United States Patent Application Publication US 2023/0026259 A1 - sequence listing, part 28

SEQ ID NO: 111049 - DNA, 2407 bp, Homo sapiens
  Payload ID: 1783
  Gene Symbol: BAG6
  Gene Name: BCL2-associated athanogene 6
  ENST ID: ENST00000436569
  CDS Start-End: 180-2407
cgcatccgtagtgcgacgcacgcaggcgtagtacggtcccccgggcgacagcggtggcggctcctcggggtgctcggctccctcccacctaggccggccccggcccgactcgccctcagaaactcactgtttggggctgcggactttctcgtcgtgccccacaaaaagacctgtcggccatggagcctaatgatagtaccagtaccgctgtggaggagcctgacagcttggaggtgttggtgaagaccttggactctcaaactcgtacctttattgtgggggcccagatgaatgtaaaagagtttaaggagcacattgctgcctctgtcagcatcccatctgaaaaacaacggctcatttaccagggacgagttctgcaagatgataagaagcttcaggaatacaatgttgggggaaaggttatccacctggtggaacgggctcctcctcagactcacctcccttctggggcatcttctgggacggggtctgcctcagccactcatggtgggggatccccccctggtactcgggggcctggggcctctgttcatgaccggaatgccaacagctatgtcatggttggaaccttcaatcttcctagtgacggctctgctgtggatgttcacatcaacatggaacaggccccgattcagagtgagccccgggtacggctggtgatggctcagcacatgatcagggatatacagaccttactatcccggatggagtgtcgaggagggccccaaccgcagcacagtcagccgcccccgcagccaccggctgtgaccccggagccagtagccttgagctctcaaacatcagaaccagttgaaagtgaagcacctccccgggagcccatggaggcagaagaagtggaggagcgtgccccagcccagaacccggagctcactcctggcccagccccagcgggcccaacacctgccccggaaacaaatgcacccaaccatccttcccctgcggagtatgtcgaggtgctccaggagctacagcggctggagagtcgcctccagcccttcttgcagcgctactacgaggttctgggtgctgctgccaccacggactacaataacaatcacgagggccgggaggaggatcagcggttgatcaacttggtaggggagagcctgcgactgctgggcaacacctttgttgcactgtctgacctgcgctgcaatctggcctgcacgcccccacgacacctgcatgtggtccggcctatgtctcactacaccacccccatggtgctccagcaggcagccattcccatacagatcaatgtgggaaccactgtgaccatgacaggaaatgggactcggccccccccaactcccaatgcagaggcacctccccctggtcctgggcaggcctcatccgtggctccgtcttctaccaatgtcgagtcctcagctgagggggctcccccgccaggtccagctcccccgccagccaccagccacccgagggtcatccggatttcccaccagagtgtggaacccgtggtcatgatgcacatgaacattcaagattctggcacacagcctggtggtgttccgagtgctcccactggccccctgggaccccctggtcatggccaaaccctgggctccaccctcatccagctgccctccctgccccctgagttcatgcacgccgtcgcccaccagatcactcatcaggccatggtggcagctgttgcctccgcggccgcaggacagcaggtgccaggcttcccaacagctccaacccgggtggtgattgcccggcccactcctccacaggctcggccttcccatcctggagggcccccagtctctgggacactgcagggcgccggtctgggtaccaatgcctcgttggcccagatggtgagcggccttgtggggcagcttcttatgcagccagtccttgtggctcaggggaccccaggtatggctccaccgccagcccctgccactgcttctgccagtgctggcaccaccaacacagctaccacagctggccccgctcctggggggcctgcccagcctccacccacccctcaaccctccatggctgatcttcagttctctcagcttctggggaacctgctagggcctgcagggccaggggctggagggtctggtgtggcttctcccaccatcactgtggcgatgcctggtgtccctgcctttctccaaggcatgactgacttcttgcaggcaacacagacagcccctccaccacccccacctcctccacccccaccacctgccccagagcagcagaccatgcccccaccaggctccccttctggtggcgcagggagtcctggaggcctgggtcttgagagcctgtcaccggagttttttacctcagtggtgcagggtgtgctcagctccctgct

SEQ ID NO: 111050 - DNA, 1056 bp, Homo sapiens; identical to SEQ ID NO: 111046
  Payload ID: 1783
  Gene Symbol: BAG6
  Gene Name: BCL2-associated athanogene 6
  ENST ID: ENST00000458287
  CDS Start-End: 282-1056

SEQ ID NO: 111051 - DNA, 3755 bp, Homo sapiens; identical to SEQ ID NO: 111033
  Payload ID: 1783
  Gene Symbol: BAG6
  Gene Name: BCL2-associated athanogene 6
  Uniprot ID: P46379
  ENST ID: ENST00000451932
  CDS Start-End: 250-3648

SEQ ID NO: 111052 - DNA, 544 bp, Homo sapiens; identical to SEQ ID NO: 111048
  Payload ID: 1783
  Gene Symbol: BAG6
  Gene Name: BCL2-associated athanogene 6
  ENST ID: ENST00000437731
  CDS Start-End: 69-544

SEQ ID NO: 111053 - DNA, 844 bp, Homo sapiens
  Payload ID: 1783
  Gene Symbol: BAG6
  Gene Name: BCL2-associated athanogene 6
  ENST ID: ENST00000421991
  CDS Start-End: 147-844
cggtcccccgggcgacagcggtggcggctcctcggggtgctcggctccctcccacctaggccggccccggcccgactcgccctcagaaactcactgtttggggctgcggactttctcgtcgtgccccacaaaaagacctgtcggccatggagcctaatgatagtaccagtaccgctgtggaggagcctgacagcttggaggtgttggtgaagaccttggactctcaaactcgtacctttattgtgggggcccagatgaatgtaaaagagtttaaggagcacattgctgcctctgtcagcatcccatctgaaaaacaacggctcatttaccagggacgagttctgcaagatgataagaagcttcaggaatacaatgttgggggaaaggttatccacctggtggaacgggctcctcctcagactcacctcccttctggggcatcttctgggacggggtctgcctcagccactcatggtgggggatccccccctggtactcgggggcctggggcctctgttcatgaccggaatgccaacagctatgtcatggttggaaccttcaatcttcctagtgacggctctgctgtggatgttcacatcaacatggaacaggccccgattcagagtgagccccgggtacggctggtgatggctcagcacatgatcagggatatacagaccttactatcccggatggagactctcccctaccttcagtgtcgaggagggccccaaccgcagcacagtcagccgcccccgcagccaccggctgtgaccccggagccagtagccttgagctctcaaacatcagaaccagttgaaagtgaagcacctccccgggagcc

SEQ ID NO: 111054 - DNA, 554 bp, Homo sapiens
  Payload ID: 1783
  Gene Symbol: BAG6
  Gene Name: BCL2-associated athanogene 6
  ENST ID: ENST00000423612
  CDS Start-End: 1-554
tctggcctgcacgcccccacgacacctgcatgtggtccggcctatgtctcactacaccacccccatggtgctccagcaggcagccattcccatacagatcaatgtgggaaccactgtgaccatgacaggaaatgggactcggccccccccaactcccaatgcagaggcacctccccctggtcctgggcaggcctcatccgtggctccgtcttctaccaatgtcgagtcctcagctgagggggctcccccgccaggtccagctcccccgccagccaccagccacccgagggtcatccggatttcccaccagagtgtggaacccgtggtcatgatgcacatgaacattcaaggacagcaggtgccaggcttcccaacagctccaacccgggtggtgattgcccggcccactcctccacaggctcggccttcccatcctggagggcccccagtctctgggacactgcagggcgccggtctgggtaccaatgcctcgttggcccagatggtgagcggccttgtggggcagcttcttatgcagccagtccttgtggctc

SEQ ID NO: 111055 - DNA, 993 bp, Homo sapiens
  Payload ID: 1783
  Gene Symbol: BAG6
  Gene Name: BCL2-associated athanogene 6
  ENST ID: ENST00000451898
  CDS Start-End: 263-993
gtacggtcccccgggcgacagcggtggcggctcctcggggtgctcggctccctcccacctaggccggccccggcccgactcgccctcagaaactcactgtttggggctgcggactttctcgtcgtgccccacaaaagtaaagcttggggacctggggggagccggaagtatcgcttcgagatccccaaatactatcggggaaacggaagtggccgtcggtggcaggtttgggggagaccggaagtgacgagacctgtcggccatggagcctaatgatagtaccagtaccgctgtggaggagcctgacagcttggaggtgttggtgaagaccttggactctcaaactcgtacctttattgtgggggcccagatgaatgtaaaagagtttaaggagcacattgctgcctctgtcagcatcccatctgaaaaacaacggctcatttaccagggacgagttctgcaagatgataagaagcttcaggaatacaatgttgggggaaaggttatccacctggtggaacgggctcctcctcagactcacctcccttctggggcatcttctgggacggggtctgcctcagccactcatggtgggggatccccccctggtactcgggggcctggggcctctgttcatgaccggaatgccaacagctatgtcatggttggaaccttcaatcttcctagtgagccccgggtacggctggtgatggctcagcacatgatcagggatatacagaccttactatcccggatggagtgtcgaggagggccccaaccgcagcacagtcagccgcccccgcagccaccggctgtgaccccggagccagtagccttgagctctcaaacatcagaaccagttgaaagtgaagcacctccccgggagcccatggaggcagaagaagtggaggagcgtgccccagcccagaacccggagctcactcctggcccagccccagcgggcccaacacctgccccggaaacaaatgcacc

SEQ ID NO: 111056 - DNA, 680 bp, Homo sapiens
  Payload ID: 1783
  Gene Symbol: BAG6
  Gene Name: BCL2-associated athanogene 6
  ENST ID: ENST00000419496
  CDS Start-End: 1-680
atagtggatttggggcccggttgctggagttgtgtaaccaaggcctgtttgaatgcctggccctaaacctgcactgcttggggggacagcagatggagcttgctgctgttatcaatggccgaattcgtcgtatgtctcgtggggtgaatccctccttggtgagctggctgaccactatgatgggactgaggcttcaggtggtactggagcacatgcctgtaggccctgatgccattctcagatacgttcgcagggttggtgatcccccccagccacttcctgaggagccaatggaagttcagggagcagaaagagcttcccctgagcctcagcgggagaatgcttccccagcccctggaacaacagcagaagaggccatgtcccgaggtccacctcctgctcctgaggggggctcccgggatgaacaggatggagcttcagctgagacagaaccttgggcagctgcagtccccccagaatgggtccctattatccagcaggacattcagagccagcggaaggtgaaaccgcagccccctctgagtgatgcctacctcagtggtatgcctgccaagagacgcaagctccggtctgatatacaaaaacgactgcaggaagaccccaactacagtccccagcgcttccccaatgcccagcgggcctttgctgatgatccttag

SEQ ID NO: 111057 - DNA, 807 bp, Homo sapiens; identical to SEQ ID NO: 111042
  Payload ID: 1783
  Gene Symbol: BAG6
  Gene Name: BCL2-associated athanogene 6
  ENST ID: ENST00000426331
  CDS Start-End: 217-807

SEQ ID NO: 111058 - DNA, 747 bp, Homo sapiens
  Payload ID: 1783
  Gene Symbol: BAG6
  Gene Name: BCL2-associated athanogene 6
  ENST ID: ENST00000424176
  CDS Start-End: 103-747
tgtttggctgtgggttagttgtgccgttctgctggaacaccgtgggaaggcagtagacgcgggcagtcagctagcaggtctgtcgccccagacctgtcggccatggagcctaatgatagtaccagtaccgctgtggaggagcctgacagcttggaggtgttggtgaagaccttggactctcaaactcgtacctttattgtgggggcccagatgaatgtaaaagagtttaaggagcacattgctgcctctgtcagcatcccatctgaaaaacaacggctcatttaccagggacgagttctgcaagatgataagaagcttcaggaatacaatgttgggggaaaggttatccacctggtggaacgggctcctcctcagactcacctcccttctggggcatcttctgggacggggtctgcctcagccactcatggtgggggatccccccctggtactcgggggcctggggcctctgttcatgaccggaatgccaacagctatgtcatggttggaaccttcaatcttcctagtgagccccgggtacggctggtgatggctcagcacatgatcagggatatacagaccttactatcccggatggagtgtcgaggagggccccaaccgcagcacagtcagccgcccccgcagccaccggctgtgaccccggagccagtagccttgagctctcaaacatcagaaccagttgaaagtgaagcacctccccgggagcccatggaggcagaagaagtg

SEQ ID NO: 111059 - DNA, 513 bp, Homo sapiens
  Payload ID: 1783
  Gene Symbol: BAG6
  Gene Name: BCL2-associated athanogene 6
  ENST ID: ENST00000434874
  CDS Start-End: 1-410
gtcgtatgtctcgtggggtgaatccctccttggtgagctggctgaccactatgatgggactgaggcttcaggtggtactggagcacatgcctgtaggccctgatgccattctcagatacgttcgcagggttggtgatcccccccagccacttcctgaggagccaatggaagttcagggagcagaaagagcttcccctgagcctcaggaatgggtccctattatccagcaggacattcagagccagcggaaggtgaaaccgcagccccctctgagtgatgcctacctcagtggtatgcctgccaagagacgcaagctccggtctgatatacaaaaacgactgcaggaagaccccaactacagtccccagcgcttccccaatgcccagcgggcctttgctgatgatccttagctctttgctctatggcccttcctcatcaggggaccgtttcccccctcttccttcacagtatttaagaaataaaagtcggatttttctggctgctttctctcta

SEQ ID NO: 111060 - DNA, 747 bp, Homo sapiens; identical to SEQ ID NO: 111058
  Payload ID: 1783
  Gene Symbol: BAG6
  Gene Name: BCL2-associated athanogene 6
  ENST ID: ENST00000436859
  CDS Start-End: 103-747

SEQ ID NO: 111061 - DNA, 844 bp, Homo sapiens; identical to SEQ ID NO: 111053
  Payload ID: 1783
  Gene Symbol: BAG6
  Gene Name: BCL2-associated athanogene 6
  ENST ID: ENST00000444557
  CDS Start-End: 147-844

SEQ ID NO: 111062 - DNA, 714 bp, Homo sapiens
  Payload ID: 1783
  Gene Symbol: BAG6
  Gene Name: BCL2-associated athanogene 6
  ENST ID: ENST00000417468
  CDS Start-End: 1-714
tcctcagctgagggggctcccccgccaggtccagctcccccgccagccaccagccacccgagggtcatccggatttcccaccagagtgtggaacccgtggtcatgatgcacatgaacattcaagggccactgtctctgtctccctgcccagattctggcacacagcctggtggtgttccgagtgctcccactggccccctgggaccccctggtcatggccaaaccctgggacagcaggtgccaggcttcccaacagctccaacccgggtggtgattgcccggcccactcctccacaggctcggccttcccatcctggagggcccccagtctctgggacactgcagggcgccggtctgggtaccaatgcctcgttggcccagatggtgagcggccttgtggggcagcttcttatgcagccagtccttgtggctcaggggaccccaggtatggctccaccgccagcccctgccactgcttctgccagtgctggcaccaccaacacagctaccacagctggccccgctcctggggggcctgcccagcctccacccacccctcaaccctccatggctgatcttcagttctctcagcttctggggaacctgctagggcctgcagggccaggggctggagggtctggtgtggcttctcccaccatcactgtggcgatgcctggtgtccctgcctttctccaaggcatgactgacttcttg

SEQ ID NO: 111063 - DNA, 410 bp, Homo sapiens
  Payload ID: 1783
  Gene Symbol: BAG6
  Gene Name: BCL2-associated athanogene 6
  ENST ID: ENST00000415721
  CDS Start-End: 1-410
gtcgtatgtctcgtggggtgaatccctccttggtgagctggctgaccactatgatgggactgaggcttcaggtggtactggagcacatgcctgtaggccctgatgccattctcagatacgttcgcagggttggtgatcccccccagccacttcctgaggagccaatggaagttcagggagcagaaagagcttcccctgagcctcaggaatgggtccctattatccagcaggacattcagagccagcggaaggtgaaaccgcagccccctctgagtgatgcctacctcagtggtatgcctgccaagagacgcaagctccggtctgatatacaaaaacgactgcaggaagaccccaactacagtccccagcgcttccccaatgcccagcgggcctttgctgatgatccttag

SEQ ID NO: 111064 - DNA, 766 bp, Homo sapiens
  Payload ID: 1783
  Gene Symbol: BAG6
  Gene Name: BCL2-associated athanogene 6
  ENST ID: ENST00000451534
  CDS Start-End: 33-766
agaagggggatggggacagagacctgtcggccatggagcctaatgatagtaccagtaccgctgtggaggagcctgacagcttggaggtgttggtgaagaccttggactctcaaactcgtacctttattgtgggggcccagatgaatgtaaaagagtttaaggagcacattgctgcctctgtcagcatcccatctgaaaaacaacggctcatttaccagggacgagttctgcaagatgataagaagcttcaggaatacaatgttgggggaaaggttatccacctggtggaacgggctcctcctcagactcacctcccttctggggcatcttctgggacggggtctgcctcagccactcatggtgggggatccccccctggtactcgggggcctggggcctctgttcatgaccggaatgccaacagctatgtcatggttggaaccttcaatcttcctagtgagccccgggtacggctggtgatggctcagcacatgatcagggatatacagaccttactatcccggatggagtgtcgaggagggccccaaccgcagcacagtcagccgcccccgcagccaccggctgtgaccccggagccagtagccttgagctctcaaacatcagaaccagttgaaagtgaagcacctccccgggagcccatggaggcagaagaagtggaggagcgtgccccagcccagaacccggagctcactcctggcccagccccagcgggcccaacacctgccccggaaacaaatgcacccaa

SEQ ID NO: 111065 - DNA, 880 bp, Homo sapiens
  Payload ID: 1783
  Gene Symbol: BAG6
  Gene Name: BCL2-associated athanogene 6
  ENST ID: ENST00000422860
  CDS Start-End: 93-880
cgcagagtgtggggcgaccaccgctttcgcgttgtcccaggattttccgacctctggggcgcttgtcctgccgtgaccgagacctgtcggccatggagcctaatgatagtaccagtaccgctgtggaggagcctgacagcttggaggtgttggtgaagaccttggactctcaaactcgtacctttattgtgggggcccagatgaatgtaaaagagtttaaggagcacattgctgcctctgtcagcatcccatctgaaaaacaacggctcatttaccagggacgagttctgcaagatgataagaagcttcaggaatacaatgttgggggaaaggttatccacctggtggaacgggctcctcctcagactcacctcccttctggggcatcttctgggacggggtctgcctcagccactcatggtgggggatccccccctggtactcgggggcctggggcctctgttcatgaccggaatgccaacagctatgtcatggttggaaccttcaatcttcctagtgacggctctgctgtggatgttcacatcaacatggaacaggccccgattcagagtgagccccgggtacggctggtgatggctcagcacatgatcagggatatacagaccttactatcccggatggagtgtcgaggagggccccaaccgcagcacagtcagccgcccccgcagccaccggctgtgaccccggagccagtagccttgagctctcaaacatcagaaccagttgaaagtgaagcacctccccgggagcccatggaggcagaagaagtggaggagcgtgccccagcccagaacccggagctcactcctggcccagccccagcgggcccaacacctgccccggaaacaaatgcacccaa

SEQ ID NO: 111066 - DNA, 902 bp, Homo sapiens; identical to SEQ ID NO: 111039
  Payload ID: 1783
  Gene Symbol: BAG6
  Gene Name: BCL2-associated athanogene 6
  ENST ID: ENST00000431345
  CDS Start-End: 124-902

SEQ ID NO: 111067 - DNA, 993 bp, Homo sapiens; identical to SEQ ID NO: 111055
  Payload ID: 1783
  Gene Symbol: BAG6
  Gene Name: BCL2-associated athanogene 6
  ENST ID: ENST00000442698
  CDS Start-End: 263-993

SEQ ID NO: 111068 - DNA, 902 bp, Homo sapiens; identical to SEQ ID NO: 111039
  Payload ID: 1783
  Gene Symbol: BAG6
  Gene Name: BCL2-associated athanogene 6
  ENST ID: ENST00000441898
  CDS Start-End: 124-902

SEQ ID NO: 111069 - DNA, 859 bp, Homo sapiens
  Payload ID: 1783
  Gene Symbol: BAG6
  Gene Name: BCL2-associated athanogene 6
  ENST ID: ENST00000453772
  CDS Start-End: 126-859
gtgtgtgtgtgtgtgtgtgtgtgtgtgtgtgtgtgtgtttggctgtgggttagttgtgccgttctgctggaacaccgtgggaaggcagtagacgcgggcagtcagctagcagagacctgtcggccatggagcctaatgatagtaccagtaccgctgtggaggagcctgacagcttggaggtgttggtgaagaccttggactctcaaactcgtacctttattgtgggggcccagatgaatgtaaaagagtttaaggagcacattgctgcctctgtcagcatcccatctgaaaaacaacggctcatttaccagggacgagttctgcaagatgataagaagcttcaggaatacaatgttgggggaaaggttatccacctggtggaacgggctcctcctcagactcacctcccttctggggcatcttctgggacggggtctgcctcagccactcatggtgggggatccccccctggtactcgggggcctggggcctctgttcatgaccggaatgccaacagctatgtcatggttggaaccttcaatcttcctagtgagccccgggtacggctggtgatggctcagcacatgatcagggatatacagaccttactatcccggatggagtgtcgaggagggccccaaccgcagcacagtcagccgcccccgcagccaccggctgtgaccccggagccagtagccttgagctctcaaacatcagaaccagttgaaagtgaagcacctccccgggagcccatggaggcagaagaagtggaggagcgtgccccagcccagaacccggagctcactcctggcccagccccagcgggcccaacacctgccccggaaacaaatgcacccaa

SEQ ID NO: 111070 - DNA, 993 bp, Homo sapiens; identical to SEQ ID NO: 111055
  Payload ID: 1783
  Gene Symbol: BAG6
  Gene Name: BCL2-associated athanogene 6
  ENST ID: ENST00000449173
  CDS Start-End: 263-993

SEQ ID NO: 111071 - DNA, 880 bp, Homo sapiens; identical to SEQ ID NO: 111065
  Payload ID: 1783
  Gene Symbol: BAG6
  Gene Name: BCL2-associated athanogene 6
  ENST ID: ENST00000420075
  CDS Start-End: 93-880

SEQ ID NO: 111072 - DNA, 766 bp, Homo sapiens; identical to SEQ ID NO: 111064
  Payload ID: 1783
  Gene Symbol: BAG6
  Gene Name: BCL2-associated athanogene 6
  ENST ID: ENST00000416852
  CDS Start-End: 33-766

SEQ ID NO: 111073 - DNA, 783 bp, Homo sapiens
  Payload ID: 1783
  Gene Symbol: BAG6
  Gene Name: BCL2-associated athanogene 6
  ENST ID: ENST00000423989
  CDS Start-End: 1-680
atagtggatttggggcccggttgctggagttgtgtaaccaaggcctgtttgaatgcctggccctaaacctgcactgcttggggggacagcagatggagcttgctgctgttatcaatggccgaattcgtcgtatgtctcgtggggtgaatccctccttggtgagctggctgaccactatgatgggactgaggcttcaggtggtactggagcacatgcctgtaggccctgatgccattctcagatacgttcgcagggttggtgatcccccccagccacttcctgaggagccaatggaagttcagggagcagaaagagcttcccctgagcctcagcgggagaatgcttccccagcccctggaacaacagcagaagaggccatgtcccgaggtccacctcctgctcctgaggggggctcccgggatgaacaggatggagcttcagctgagacagaaccttgggcagctgcagtccccccagaatgggtccctattatccagcaggacattcagagccagcggaaggtgaaaccgcagccccctctgagtgatgcctacctcagtggtatgcctgccaagagacgcaagctccggtctgatatacaaaaacgactgcaggaagaccccaactacagtccccagcgcttccccaatgcccagcgggcctttgctgatgatccttagctctttgctctatggcccttcctcatcaggggaccgtttcccccctcttccttcacagtatttaagaaataaaagtcggatttttctggctgctttctctcta

SEQ ID NO: 111074 - DNA, 3779 bp, Homo sapiens
  Payload ID: 1783
  Gene Symbol: BAG6
  Gene Name: BCL2-associated athanogene 6
  ENST ID: ENST00000434446
  CDS Start-End: 296-3676
gggggtggggcgatgcttaagtgtccacgcatccgtagtgcgacgcacgcaggcgtagtacggtcccccgggcgacagcggtggcggctcctcggggtgctcggctccctcccacctaggccggccccggcccgactcgccctcagaaactcactgtttggggctgcggactttctcgtcgtgccccacaaaagtaaagcttggggacctggggggagccggaagtatcgcttcgagatccccaaatactatcggggaaacggaagtggccgtcggtggcagagacctgtcggccatggagcctaatgatagtaccagtaccgctgtggaggagcctgacagcttggaggtgttggtgaagaccttggactctcaaactcgtacctttattgtgggggcccagatgaatgtaaaagagtttaaggagcacattgctgcctctgtcagcatcccatctgaaaaacaacggctcatttaccagggacgagttctgcaagatgataagaagcttcaggaatacaatgttgggggaaaggttatccacctggtggaacgggctcctcctcagactcacctcccttctggggcatcttctgggacggggtctgcctcagccactcatggtgggggatccccccctggtactcgggggcctggggcctctgttcatgaccggaatgccaacagctatgtcatggttggaaccttcaatcttcctagtgacggctctgctgtggatgttcacatcaacatggaacaggccccgattcagagtgagccccgggtacggctggtgatggctcagcacatgatcagggatatacagaccttactatcccggatggagtgtcgaggagggccccaaccgcagcacagtcagccgcccccgcagccaccggctgtgaccccggagccagtagccttgagctctcaaacatcagaaccagttgaaagtgaagcacctccccgggagcccatggaggcagaagaagtggaggagcgtgccccagcccagaacccggagctcactcctggcccagccccagcgggcccaacacctgccccggaaacaaatgcacccaaccatccttcccctgcggagtatgtcgaggtgctccaggagctacagcggctggagagtcgcctccagcccttcttgcagcgctactacgaggttctgggtgctgctgccaccacggactacaataacaatcacgagggccgggaggaggatcagcggttgatcaacttggtaggggagagcctgcgactgctgggcaacacctttgttgcactgtctgacctgcgctgcaatctggcctgcacgcccccacgacacctgcatgtggtccggcctatgtctcactacaccacccccatggtgctccagcaggcagccattcccatacagatcaatgtgggaaccactgtgaccatgacaggaaatgggactcggccccccccaactcccaatgcagaggcacctccccctggtcctgggcaggcctcatccgtggctccgtcttctaccaatgtcgagtcctcagctgagggggctcccccgccaggtccagctcccccgccagccaccagccacccgagggtcatccggatttcccaccagagtgtggaacccgtggtcatgatgcacatgaacattcaagattctggcacacagcctggtggtgttccgagtgctcccactggccccctgggaccccctggtcatggccaaaccctgggacagcaggtgccaggcttcccaacagctccaacccgggtggtgattgcccggcccactcctccacaggctcggccttcccatcctggagggcccccagtctctgggacactgcagggcgccggtctgggtaccaatgcctcgttggcccagatggtgagcggccttgtggggcagcttcttatgcagccagtccttgtggctcaggggaccccaggtatggctccaccgccagcccctgccactgcttctgccagtgctggcaccaccaacacagctaccacagctggccccgctcctggggggcctgcccagcctccacccacccctcaaccctccatggctgatcttcagttctctcagcttctggggaacctgctagggcctgcagggccaggggctggagggcctggtgtggcttctcccaccatcactgtggcgatgcctggtgtccctgcctttctccaaggcatgactgacttcttgcaggcaacacagacagcccctccaccacccccacctcctccacccccaccacctgccccagagcagcagaccatgcccccaccaggctccccttctggtggcgcagggagtcctggaggcctgggtcttgagagcctgtcaccggagttttttacctcagtggtgcagggtgtgctcagctccctgctgggctccctgggggctcgggctggcagcagtgaaagtattgctgccttcatacaacgcctcagtggatccagcaacatctttgagcctggagctgatggggcccttggattctttggggccttgctttctcttctgtgccagaacttctctatggtggacgtagtgatgcttctccatgggcatttccagccactacaacggctccagccccagctgcgatccttcttccaccagcactacctgggtggtcaggagcccacacccagtaacatccggatggcaacccacacattgatcacggggctagaagagtatgtgcgggagagtttttccttggtgcaggttcagccaggtgtggacatcatccggacaaacctggaatttctccaagagcagtttaatagcattgctgcgcatgtgctgcattgcacagatagtggatttggggcccggttgctggagttgtgtaaccaaggcctgtttgaatgcctggccctaaacctgcactgcttggggggacagcagatggagcttgctgctgttatcaatggccgaattcgtcgtatgtctcgtggggtgaatccctccttggtgagctggctgaccactatgatgggactgaggcttcaggtggtactggagcacatgcctgtaggccctgatgccattctcagatacgttcgcagggttggtgatcccccccagccacttcctgaggagccaatggaagttcagggagcagaaagagcttcccctgagcctcagcgggagaatgcttccccagcccctggaacaacagcagaagaggccatgtcccgaggtccacctcctgctcctgaggggggctcccgggatgaacaggatggagcttcagctgagacagaaccttgggcagctgcagtccccccagaatgggtccctattatccagcaggacattcagagccagcggaaggtgaaaccgcagccccctctgagtgatgcctacctcagtggtatgcctgccaagagacgcaagacgatgcagggtgagggcccccagctgcttctctcagaggctgtgagccgggcagctaaggcagccggagctcggcccctgacgagccccgagagcctgagccgggacctggaggcaccagaggttcaggagagctacaggcagcagctccggtctgatatacaaaaacgactgcaggaagaccccaactacagtccccagcgcttccccaatgcccagcgggcctttgctgatgatccttagctctttgctctatggcccttcctcatcaggggaccgtttcccccctcttccttcacagtatttaagaaataaaagtcggatttttctggctgctttctctcta

SEQ ID NO: 111075 - DNA, 766 bp, Homo sapiens; identical to SEQ ID NO: 111064
  Payload ID: 1783
  Gene Symbol: BAG6
  Gene Name: BCL2-associated athanogene 6
  ENST ID: ENST00000434444
  CDS Start-End: 33-766

SEQ ID NO: 111076 - DNA, 747 bp, Homo sapiens
  Payload ID: 1783
  Gene Symbol: BAG6
  Gene Name: BCL2-associated athanogene 6
  ENST ID: ENST00000434880
  CDS Start-End: 103-747
tgtttggctgtgggttagttgtgccgttctgctggaacaccgtgggaaggcagtagacgcgggcagtcagctagcaggtccgtcgccccagacctgtcggccatggagcctaatgatagtaccagtaccgctgtggaggagcctgacagcttggaggtgttggtgaagaccttggactctcaaactcgtacctttattgtgggggcccagatgaatgtaaaagagtttaaggagcacattgctgcctctgtcagcatcccatctgaaaaacaacggctcatttaccagggacgagttctgcaagatgataagaagcttcaggaatacaatgttgggggaaaggttatccacctggtggaacgggctcctcctcagactcacctcccttctggggcatcttctgggacggggtctgcctcagccactcatggtgggggatccccccctggtactcgggggcctggggcctctgttcatgaccggaatgccaacagctatgtcatggttggaaccttcaatcttcctagtgagccccgggtacggctggtgatggctcagcacatgatcagggatatacagaccttactatcccggatggagtgtcgaggagggccccaaccgcagcacagtcagccgcccccgcagccaccggctgtgaccccggagccagtagccttgagctctcaaacatcagaaccagttgaaagtgaagcacctccccgggagcccatggaggcagaagaagtg

SEQ ID NO: 111077 - DNA, 654 bp, Homo sapiens; identical to SEQ ID NO: 111047
  Payload ID: 1783
  Gene Symbol: BAG6
  Gene Name: BCL2-associated athanogene 6
  ENST ID: ENST00000416797
  CDS Start-End: 36-654

SEQ ID NO: 111078 - DNA, 714 bp, Homo sapiens; identical to SEQ ID NO: 111043
  Payload ID: 1783
  Gene Symbol: BAG6
  Gene Name: BCL2-associated athanogene 6
  ENST ID: ENST00000413373
  CDS Start-End: 1-714

SEQ ID NO: 111079 - DNA, 1710 bp, Homo sapiens
  Payload ID: 1783
  Gene Symbol: BAG6
  Gene Name: BCL2-associated athanogene 6
  ENST ID: ENST00000421354
  CDS Start-End: 166-1710
tcgggggcggagccgcggggtggtgggtgggtgtgtgtgtgtgtgtgtgtgtgtgtgtgtgtgtgtttggctgtgggttagttgtgccgttctgctggaacaccgtgggaaggcagtagacgcgggcagtcagctagcaggtccgtcgccccagacctgtcggccatggagcctaatgatagtaccagtaccgctgtggaggagcctgacagcttggaggtgttggtgaagaccttggactctcaaactcgtacctttattgtgggggcccagatgaatgtaaaagagtttaaggagcacattgctgcctctgtcagcatcccatctgaaaaacaacggctcatttaccagggacgagttctgcaagatgataagaagcttcaggaatacaatgttgggggaaaggttatccacctggtggaacgggctcctcctcagactcacctcccttctggggcatcttctgggacggggtctgcctcagccactcatggtgggggatccccccctggtactcgggggcctggggcctctgttcatgaccggaatgccaacagctatgtcatggttggaaccttcaatcttcctagtgacggctctgctgtggatgttcacatcaacatggaacaggccccgattcagagtgagccccgggtacggctggtgatggctcagcacatgatcagggatatacagaccttactatcccggatggagtgtcgaggagggccccaaccgcagcacagtcagccgcccccgcagccaccggctgtgaccccggagccagtagccttgagctctcaaacatcagaaccagttgaaagtgaagcacctccccgggagcccatggaggcagaagaagtggaggagcgtgccccagcccagaacccggagctcactcctggcccagccccagcgggcccaacacctgccccggaaacaaatgcacccaaccatccttcccctgcggagtatgtcgaggtgctccaggagctacagcggctggagagtcgcctccagcccttcttgcagcgctactacgaggttctgggtgctgctgccaccacggactacaataacaatcacgagggccgggaggaggatcagcggttgatcaacttggtaggggagagcctgcgactgctgggcaacacctttgttgcactgtctgacctgcgctgcaatctggcctgcacgcccccacgacacctgcatgtggtccggcctatgtctcactacaccacccccatggtgctccagcaggcagccattcccatacagatcaatgtgggaaccactgtgaccatgacaggaaatgggactcggccccccccaactcccaatgcagaggcacctccccctggtcctgggcaggcctcatccgtggctccgtcttctaccaatgtcgagtcctcagctgagggggctcccccgccaggtccagctcccccgccagccaccagccacccgagggtcatccggatttcccaccagagtgtggaacccgtggtcatgatgcacatgaacattcaagattctggcacacagcctggtggtgttccgagtgctcccactggccccctgggaccccctggtcatggccaaaccctgggctccaccctcatccagctgccctccctgccccctgagttcatgcacgccgtcgcccaccagatcactcatcaggccatggtggcagctgttgcctcc

SEQ ID NO: 111080 - DNA, 714 bp, Homo sapiens; identical to SEQ ID NO: 111062
  Payload ID: 1783
  Gene Symbol: BAG6
  Gene Name: BCL2-associated athanogene 6
  ENST ID: ENST00000455101
  CDS Start-End: 1-714

SEQ ID NO: 111081 - DNA, 544 bp, Homo sapiens; identical to SEQ ID NO: 111048
  Payload ID: 1783
  Gene Symbol: BAG6
  Gene Name: BCL2-associated athanogene 6
  ENST ID: ENST00000454165
  CDS Start-End: 69-544

SEQ ID NO: 111082 - DNA, 736 bp, Homo sapiens
  Payload ID: 1783
  Gene Symbol: BAG6
  Gene Name: BCL2-associated athanogene 6
  ENST ID: ENST00000435543
  CDS Start-End: 1-736
cccccacgacacctgcatgtggtccggcctatgtctcactacaccacccccatggtgctccagcaggcagccattcccatacagatcaatgtgggaaccactgtgaccatgacaggtccagctcccccgccagccaccagccacccgagggtcatccggatttcccaccagagtgtggaacccgtggtcatgatgcacatgaacattcaagattctggcacacagcctggtggtgttccgagtgctcccactggccccctgggaccccctggtcatggccaaaccctgggacagcaggtgccaggcttcccaacagctccaacccgggtggtgattgcccggcccactcctccacaggctcggccttcccatcctggagggcccccagtctctgggacactgcagggcgccggtctgggtaccaatgcctcgttggcccagatggtgagcggccttgtggggcagcttcttatgcagccagtccttgtggctcaggggaccccaggtatggctccaccgccagcccctgccactgcttctgccagtgctggcaccaccaacacagctaccacagctggccccgctcctggggggcctgcccagcctccacccacccctcaaccctccatggctgatcttcagttctctcagcttctggggaacctgctagggcctgcagggccaggggctggagggcctggtgtggcttctcccaccatcactgtggcgatgcctg

SEQ ID NO: 111083 - DNA, 736 bp, Homo sapiens
  Payload ID: 1783
  Gene Symbol: BAG6
  Gene Name: BCL2-associated athanogene 6
  ENST ID: ENST00000456828
  CDS Start-End: 1-736
cccccacgacacctgcatgtggtccggcctatgtctcactacaccacccccatggtgctccagcaggcagccattcccatacagatcaatgtgggaaccactgtgaccatgacaggtccagctcccccgccagccaccagccacccgagggtcatccggatttcccaccagagtgtggaacccgtggtcatgatgcacatgaacattcaagattctggcacacagcctggtggtgttccgagtgctcccactggccccctgggaccccctggtcatggccaaaccctgggacagcaggtgccaggcttcccaacagctccaacccgggtggtgattgcccggcccactcctccacaggctcggccttcccatcctggagggcccccagtctctgggacactgcagggcgccggtctgggtaccaatgcctcgttggcccagatggtgagcggccttgtggggcagcttcttatgcagccagtccttgtggctcaggggaccccaggtatggctccaccgccagcccctgccactgcttctgccagtgctggcaccaccaacacagctaccacagctggccccgctcctggggggcctgcccagcctccacccacccctcaaccctccatggctgatcttcagttctctcagcttctggggaacctgctagggcctgcagggccaggggctggagggtctggtgtggcttctcccaccatcactgtggcgatgcctg

SEQ ID NO: 111084 - DNA, 766 bp, Homo sapiens; identical to SEQ ID NO: 111064
  Payload ID: 1783
  Gene Symbol: BAG6
  Gene Name: BCL2-associated athanogene 6
  ENST ID: ENST00000429956
  CDS Start-End: 33-766

SEQ ID NO: 111085 - DNA, 554 bp, Homo sapiens; identical to SEQ ID NO: 111054
  Payload ID: 1783
  Gene Symbol: BAG6
  Gene Name: BCL2-associated athanogene 6
  ENST ID: ENST00000439917
  CDS Start-End: 1-554

SEQ ID NO: 111086 - DNA, 3755 bp, Homo sapiens; identical to SEQ ID NO: 111033
  Payload ID: 1783
  Gene Symbol: BAG6
  Gene Name: BCL2-associated athanogene 6
  Uniprot ID: P46379
  ENST ID: ENST00000449450
  CDS Start-End: 250-3648

SEQ ID NO: 111087 - DNA, 902 bp, Homo sapiens; identical to SEQ ID NO: 111039
  Payload ID: 1783
  Gene Symbol: BAG6
  Gene Name: BCL2-associated athanogene 6
  ENST ID: ENST00000437054
  CDS Start-End: 124-902

SEQ ID NO: 111088 - DNA, 2407 bp, Homo sapiens; identical to SEQ ID NO: 111049
  Payload ID: 1783
  Gene Symbol: BAG6
  Gene Name: BCL2-associated athanogene 6
  ENST ID: ENST00000437771
  CDS Start-End: 180-2407

SEQ ID NO: 111089 - DNA, 736 bp, Homo sapiens; identical to SEQ ID NO: 111082
  Payload ID: 1783
  Gene Symbol: BAG6
  Gene Name: BCL2-associated athanogene 6
  ENST ID: ENST00000451948
  CDS Start-End: 1-736

SEQ ID NO: 111090 - DNA, 787 bp, Homo sapiens
  Payload ID: 1783
  Gene Symbol: BAG6
  Gene Name: BCL2-associated athanogene 6
  ENST ID: ENST00000437959
  CDS Start-End: 1-680
atagtggatttggggcccggttgctggagttgtgtaaccaaggcctgtttgaatgcctggccctaaacctgcactgcttggggggacagcagatggagcttgctgctgttatcaatggccgaattcgtcgtatgtctcgtggggtgaatccctccttggtgagctggctgaccactatgatgggactgaggcttcaggtggtactggagcacatgcctgtaggccctgatgccattctcagatacgttcgcagggttggtgatcccccccagccacttcctgaggagccaatggaagttcagggagcagaaagagcttcccctgagcctcagcgggagaatgcttccccagcccctggaacaacagcagaagaggccatgtcccgaggtccacctcctgctcctgaggggggctcccgggatgaacaggatggagcttcagctgagacagaaccttgggcagctgcagtccccccagaatgggtccctattatccagcaggacattcagagccagcggaaggtgaaaccgcagccccctctgagtgatgcctacctcagtggtatgcctgccaagagacgcaagctccggtctgatatacaaaaacgactgcaggaagaccccaactacagtccccagcgcttccccaatgcccagcgggcctttgctgatgatccttagctctttctttgctctatggcccttcctcatcaggggaccgtttcccccctcttccttcacagtatttaagaaataaaagtcggatttttctggctgctttctctcta

SEQ ID NO: 111091 - DNA, 1051 bp, Homo sapiens
  Payload ID: 1783
  Gene Symbol: BAG6
  Gene Name: BCL2-associated athanogene 6
  ENST ID: ENST00000440499
  CDS Start-End: 266-1051
agtgtggggcgaccaccgctttcgcgttgtcccaggattttccgacctctggggcgcttgtcctgccgtgaccggtgatgacactagtctctggtctcgtgcttccttcctaatctgactggctccctgcttattgtgattggcgtcgtggagcccctcccacctctcgtcctccagctccctaagccgtcgatctcctgccctttgtgtttctctccctgtgccccggaatcagaagggggatggggacagagacctgtcggccatggagcctaatgatagtaccagtaccgctgtggaggagcctgacagcttggaggtgttggtgaagaccttggactctcaaactcgtacctttattgtgggggcccagatgaatgtaaaagagtttaaggagcacattgctgcctctgtcagcatcccatctgaaaaacaacggctcatttaccagggacgagttctgcaagatgataagaagcttcaggaatacaatgttgggggaaaggttatccacctggtggaacgggctcctcctcagactcacctcccttctggggcatcttctgggacggggtctgcctcagccactcatggtgggggatccccccctggtactcgggggcctggggcctctgttcatgaccggaatgccaacagctatgtcatggttggaaccttcaatcttcctagtgacggctctgctgtggatgttcacatcaacatggaacaggccccgattcagagtgagccccgggtacggctggtgatggctcagcacatgatcagggatatacagaccttactatcccggatggagtgtcgaggagggccccaaccgcagcacagtcagccgcccccgcagccaccggctgtgaccccggagccagtagccttgagctctcaaacatcagaaccagttgaaagtgaagcacctccccgggagcccatggaggcagaagaagtggaggagcgtgccccagcccagaacccggagctcactcctggcccagccccagcgggcccaacacctgccccggaaacaaatgcaccc

SEQ ID NO: 111092 - DNA, 654 bp, Homo sapiens; identical to SEQ ID NO: 111047
  Payload ID: 1783
  Gene Symbol: BAG6
  Gene Name: BCL2-associated athanogene 6
  ENST ID: ENST00000430999
  CDS Start-End: 36-654

SEQ ID NO: 111093 - DNA, 554 bp, Homo sapiens; identical to SEQ ID NO: 111054
  Payload ID: 1783
  Gene Symbol: BAG6
  Gene Name: BCL2-associated athanogene 6
  ENST ID: ENST00000455689
  CDS Start-End: 1-554

SEQ ID NO: 111094 - DNA, 1689 bp, Homo sapiens
  Payload ID: 1783
  Gene Symbol: BAG6
  Gene Name: BCL2-associated athanogene 6
  ENST ID: ENST00000432539
  CDS Start-End: 145-1689
ggtgggtgtgtgtgtgtgtgtgtgtgtgtgtgtgtgtgtgtgtgtttggctgtgggttagttgtgccgttctgctggaacaccgtgggaaggcagtagacgcgggcagtcagctagcaggtccgtcgccccagacctgtcggccatggagcctaatgatagtaccagtaccgctgtggaggagcctgacagcttggaggtgttggtgaagaccttggactctcaaactcgtacctttattgtgggggcccagatgaatgtaaaagagtttaaggagcacattgctgcctctgtcagcatcccatctgaaaaacaacggctcatttaccagggacgagttctgcaagatgataagaagcttcaggaatacaatgttgggggaaaggttatccacctggtggaacgggctcctcctcagactcacctcccttctggggcatcttctgggacggggtctgcctcagccactcatggtgggggatccccccctggtactcgggggcctggggcctctgttcatgaccggaatgccaacagctatgtcatggttggaaccttcaatcttcctagtgacggctctgctgtggatgttcacatcaacatggaacaggccccgattcagagtgagccccgggtacggctggtgatggctcagcacatgatcagggatatacagaccttactatcccggatggagtgtcgaggagggccccaaccgcagcacagtcagccgcccccgcagccaccggctgtgaccccggagccagtagccttgagctctcaaacatcagaaccagttgaaagtgaagcacctccccgggagcccatggaggcagaagaagtggaggagcgtgccccagcccagaacccggagctcactcctggcccagccccagcgggcccaacacctgccccggaaacaaatgcacccaaccatccttcccctgcggagtatgtcgaggtgctccaggagctacagcggctggagagtcgcctccagcccttcttgcagcgctactacgaggttctgggtgctgctgccaccacggactacaataacaatcacgagggccgggaggaggatcagcggttgatcaacttggtaggggagagcctgcgactgctgggcaacacctttgttgcactgtctgacctgcgctgcaatctggcctgcacgcccccacgacacctgcatgtggtccggcctatgtctcactacaccacccccatggtgctccagcaggcagccattcccatacagatcaatgtgggaaccactgtgaccatgacaggaaatgggactcggccccccccaactcccaatgcagaggcacctccccctggtcctgggcaggcctcatccgtggctccgtcttctaccaatgtcgagtcctcagctgagggggctcccccgccaggtccagctcccccgccagccaccagccacccgagggtcatccggatttcccaccagagtgtggaacccgtggtcatgatgcacatgaacattcaagattctggcacacagcctggtggtgttccgagtgctcccactggccccctgggaccccctggtcatggccaaaccctgggctccaccctcatccagctgccctccctgccccctgagttcatgcacgccgtcgcccaccagatcactcatcaggccatggtggcagctgttgcctcc

SEQ ID NO: 111095 - DNA, 2407 bp, Homo sapiens; identical to SEQ ID NO: 111049
  Payload ID: 1783
  Gene Symbol: BAG6
  Gene Name: BCL2-associated athanogene 6
  ENST ID: ENST00000425568
  CDS Start-End: 180-2407

SEQ ID NO: 111096 - DNA, 1051 bp, Homo sapiens; identical to SEQ ID NO: 111091
  Payload ID: 1783
  Gene Symbol: BAG6
  Gene Name: BCL2-associated athanogene 6
  ENST ID: ENST00000436497
  CDS Start-End: 266-1051

SEQ ID NO: 111097 - DNA, 654 bp, Homo sapiens; identical to SEQ ID NO: 111047
  Payload ID: 1783
  Gene Symbol: BAG6
  Gene Name: BCL2-associated athanogene 6
  ENST ID: ENST00000455409
  CDS Start-End: 36-654

SEQ ID NO: 111098 - DNA, 859 bp, Homo sapiens; identical to SEQ ID NO: 111069
  Payload ID: 1783
  Gene Symbol: BAG6
  Gene Name: BCL2-associated athanogene 6
  ENST ID: ENST00000427244
  CDS Start-End: 126-859

SEQ ID NO: 111099 - DNA, 544 bp, Homo sapiens; identical to SEQ ID NO: 111048
  Payload ID: 1783
  Gene Symbol: BAG6
  Gene Name: BCL2-associated athanogene 6
  ENST ID: ENST00000433146
  CDS Start-End: 69-544

SEQ ID NO: 111100 - DNA, 544 bp, Homo sapiens; identical to SEQ ID NO: 111048
  Payload ID: 1783
  Gene Symbol: BAG6
  Gene Name: BCL2-associated athanogene 6
  ENST ID: ENST00000420098
  CDS Start-End: 69-544

SEQ ID NO: 111101 - DNA, 859 bp, Homo sapiens; identical to SEQ ID NO: 111069
  Payload ID: 1783
  Gene Symbol: BAG6
  Gene Name: BCL2-associated athanogene 6
  ENST ID: ENST00000456622
  CDS Start-End: 126-859

SEQ ID NO: 111102 - DNA, 654 bp, Homo sapiens; identical to SEQ ID NO: 111047
  Payload ID: 1783
  Gene Symbol: BAG6
  Gene Name: BCL2-associated athanogene 6
  ENST ID: ENST00000454248
  CDS Start-End: 36-654

SEQ ID NO: 111103 - DNA, 1051 bp, Homo sapiens; identical to SEQ ID NO: 111091
  Payload ID: 1783
  Gene Symbol: BAG6
  Gene Name: BCL2-associated athanogene 6
  ENST ID: ENST00000456223
  CDS Start-End: 266-1051

SEQ ID NO: 111104 - DNA, 736 bp, Homo sapiens; identical to SEQ ID NO: 111083
  Payload ID: 1783
  Gene Symbol: BAG6
  Gene Name: BCL2-associated athanogene 6
  ENST ID: ENST00000411914
  CDS Start-End: 1-736

SEQ ID NO: 111105 - DNA, 2407 bp, Homo sapiens; identical to SEQ ID NO: 111044
  Payload ID: 1783
  Gene Symbol: BAG6
  Gene Name: BCL2-associated athanogene 6
  ENST ID: ENST00000451042
  CDS Start-End: 180-2407

SEQ ID NO: 111106 - DNA, 1056 bp, Homo sapiens; identical to SEQ ID NO: 111046
  Payload ID: 1783
  Gene Symbol: BAG6
  Gene Name: BCL2-associated athanogene 6
  ENST ID: ENST00000452627
  CDS Start-End: 282-1056

SEQ ID NO: 111107 - DNA, 3104 bp, Homo sapiens
  Payload ID: 1783
  Gene Symbol: BAG6
  Gene Name: BCL2-associated athanogene 6
  Uniprot ID: P46379
  ENST ID: ENST00000439687
  CDS Start-End: 291-3002
tggggcgatgcttaagtgtccacgcatccgtagtgcgacgcacgcaggcgtagtacggtcccccgggcgacagcggtggcggctcctcggggtgctcggctccctcccacctaggccggccccggcccgactcgccctcagaaactcactgtttggggctgcggactttctcgtcgtgccccacaaaagtaaagcttggggacctggggggagccggaagtatcgcttcgagatccccaaatactatcggggaaacggaagtggccgtcggtggcagagacctgtcggccatggagcctaatgatagtaccagtaccgctgtggaggagcctgacagcttggaggtgttggtgaagaccttggactctcaaactcgtacctttattgtgggggcccagatgaatgtaaaagagtttaaggagcacattgctgcctctgtcagcatcccatctgaaaaacaacggctcatttaccagggacgagttctgcaagatgataagaagcttcaggaatacaatgttgggggaaaggttatccacctggtggaacgggctcctcctcagactcacctcccttctggggcatcttctgggacggggtctgcctcagccactcatggtgggggatccccccctggtactcgggggcctggggcctctgttcatgaccggaatgccaacagctatgtcatggttggaaccttcaatcttcctagtgacggctctgctgtggatgttcacatcaacatggaacaggccccgattcagagtgagccccgggtacggctggtgatggctcagcacatgatcagggatatacagaccttactatcccggatggagtgtcgaggagggccccaaccgcagcacagtcagccgcccccgcagccaccggctgtgaccccggagccagtagccttgagctctcaaacatcagaaccagttgaaagtgaagcacctccccgggagcccatggaggcagaagaagtggaggagcgtgccccagcccagaacccggagctcactcctggcccagccccagcgggcccaacacctgccccggaaacaaatgcacccaaccatccttcccctgcggagtatgtcgaggtgctccaggagctacagcggctggagagtcgcctccagcccttcttgcagcgctactacgaggttctgggtgctgctgccaccacggactacaataacaatcacgagggccgggaggaggatcagcggttgatcaacttggtaggggagagcctgcgactgctgggcaacacctttgttgcactgtctgacctgcgctgcaatctggcctgcacgcccccacgacacctgcatgtggtccggcctatgtctcactacaccacccccatggtgctccagcaggcagccattcccatacagatcaatgtgggaaccactgtgaccatgacaggaaatgggactcggccccccccaactcccaatgcagaggcacctccccctggtcctgggcaggcctcatccgtggctccgtcttctaccaatgtcgagtcctcagctgagggggctcccccgccaggtccagctcccccgccagccaccagccacccgagggtcatccggatttcccaccagagtgtggaacccgtggtcatgatgcacatgaacattcaagattctggcacacagcctggtggtgttccgagtgctcccactggccccctgggaccccctggtcatggccaaaccctgggacagcaggtgccaggcttcccaacagctccaacccgggtggtgattgcccggcccactcctccacaggctcggccttcccatcctggagggcccccagtctctgggacactgggcgccggtctgggtaccaatgcctcgttggcccagatggtgagcggccttgtggggcagcttcttatgcagccagtccttgtggctcaggggaccccagggagtcctggaggcctgggtcttgagagcctgtcaccggagttttttacctcagtggtgcagggtgtgctcagctccctgctgggctccctgggggctcgggctggcagcagtgaaagtattgctgccttcatacaacgcctcagtggatccagcaacatctttgagcctggagctgatggggcccttggattctttggggccttgctttctcttctgtgccagaacttctctatggtggacgtagtgatgcttctccatgggcatttccagccactacaacggctccagccccagctgcgatccttcttccaccagcactacctgggtggtcaggagcccacacccagtaacatccggatggcaacccacacattgatcacggggctagaagagtatgtgcgggagagtttttccttggtgcaggttcagccaggtgtggacatcatccggacaaacctggaatttctccaagagcagtttaatagcattgctgcgcatgtgctgcattgcacagatagtggatttggggcccggttgctggagttgtgtaaccaaggcctgtttgaatgcctggccctaaacctgcactgcttggggggacagcagatggagcttgctgctgttatcaatggccgaattcgtcgtatgtctcgtggggtgaatccctccttggtgagctggctgaccactatgatgggactgaggcttcaggtggtactggagcacatgcctgtaggccctgatgccattctcagatacgttcgcagggttggtgatcccccccagccacttcctgaggagccaatggaagttcagggagcagaaagagcttcccctgagcctcaggaatgggtccctattatccagcaggacattcagagccagcggaaggtgaaaccgcagccccctctgagtgatgcctacctcagtggtatgcctgccaagagacgcaagctccggtctgatatacaaaaacgactgcaggaagaccccaactacagtccccagcgcttccccaatgcccagcgggcctttgctgatgatccttagctctttgctctatggcccttcctcatcaggggaccgtttcccccctcttccttcacagtatttaagaaataaaagtcggatttttctggctgctttctctct

SEQ ID NO: 111108 - DNA, 1689 bp, Homo sapiens
  Payload ID: 1783
  Gene Symbol: BAG6
  Gene Name: BCL2-associated athanogene 6
  ENST ID: ENST00000449874
  CDS Start-End: 145-1689
ggtgtgtgtgtgtgtgtgtgtgtgtgtgtgtgtgtgtgtgtgtgtttggctgtgggttagttgtgccgttctgctggaacaccgtgggaaggcagtagacgcgggcagtcagctagcaggtctgtcgccccagacctgtcggccatggagcctaatgatagtaccagtaccgctgtggaggagcctgacagcttggaggtgttggtgaagaccttggactctcaaactcgtacctttattgtgggggcccagatgaatgtaaaagagtttaaggagcacattgctgcctctgtcagcatcccatctgaaaaacaacggctcatttaccagggacgagttctgcaagatgataagaagcttcaggaatacaatgttgggggaaaggttatccacctggtggaacgggctcctcctcagactcacctcccttctggggcatcttctgggacggggtctgcctcagccactcatggtgggggatccccccctggtactcgggggcctggggcctctgttcatgaccggaatgccaacagctatgtcatggttggaaccttcaatcttcctagtgacggctctgctgtggatgttcacatcaacatggaacaggccccgattcagagtgagccccgggtacggctggtgatggctcagcacatgatcagggatatacagaccttactatcccggatggagtgtcgaggagggccccaaccgcagcacagtcagccgcccccgcagccaccggctgtgaccccggagccagtagccttgagctctcaaacatcagaaccagttgaaagtgaagcacctccccgggagcccatggaggcagaagaagtggaggagcgtgccccagcccagaacccggagctcactcctggcccagccccagcgggcccaacacctgccccggaaacaaatgcacccaaccatccttcccctgcggagtatgtcgaggtgctccaggagctacagcggctggagagtcgcctccagcccttcttgcagcgctactacgaggttctgggtgctgctgccaccacggactacaataacaatcacgagggccgggaggaggatcagcggttgatcaacttggtaggggagagcctgcgactgctgggcaacacctttgttgcactgtctgacctgcgctgcaatctggcctgcacgcccccacgacacctgcatgtggtccggcctatgtctcactacaccacccccatggtgctccagcaggcagccattcccatacagatcaatgtgggaaccactgtgaccatgacaggaaatgggactcggccccccccaactcccaatgcagaggcacctccccctggtcctgggcaggcctcatccgtggctccgtcttctaccaatgtcgagtcctcagctgagggggctcccccgccaggtccagctcccccgccagccaccagccacccgagggtcatccggatttcccaccagagtgtggaacccgtggtcatgatgcacatgaacattcaagattctggcacacagcctggtggtgttccgagtgctcccactggccccctgggaccccctggtcatggccaaaccctgggctccaccctcatccagctgccctccctgccccctgagttcatgcacgccgtcgcccaccagatcactcatcaggccatggtggcagctgttgcctcc

SEQ ID NO: 111109 - DNA, 859 bp, Homo sapiens; identical to SEQ ID NO: 111069
  Payload ID: 1783
  Gene Symbol: BAG6
  Gene Name: BCL2-associated athanogene 6
  ENST ID: ENST00000431049
  CDS Start-End: 126-859

SEQ ID NO: 111110 - DNA, 1688 bp, Homo sapiens
  Payload ID: 1783
  Gene Symbol: BAG6
  Gene Name: BCL2-associated athanogene 6
  ENST ID: ENST00000442870
  CDS Start-End: 144-1688
gtgtgtgtgtgtgtgtgtgtgtgtgtgtgtgtgtgtgtgtgtgtttggctgtgggttagttgtgccgttctgctggaacaccgtgggaaggcagtagacgcgggcagtcagctagcaggtctgtcgccccagacctgtcggccatggagcctaatgatagtaccagtaccgctgtggaggagcctgacagcttggaggtgttggtgaagaccttggactctcaaactcgtacctttattgtgggggcccagatgaatgtaaaagagtttaaggagcacattgctgcctctgtcagcatcccatctgaaaaacaacggctcatttaccagggacgagttctgcaagatgataagaagcttcaggaatacaatgttgggggaaaggttatccacctggtggaacgggctcctcctcagactcacctcccttctggggcatcttctgggacggggtctgcctcagccactcatggtgggggatccccccctggtactcgggggcctggggcctctgttcatgaccggaatgccaacagctatgtcatggttggaaccttcaatcttcctagtgacggctctgctgtggatgttcacatcaacatggaacaggccccgattcagagtgagccccgggtacggctggtgatggctcagcacatgatcagggatatacagaccttactatcccggatggagtgtcgaggagggccccaaccgcagcacagtcagccgcccccgcagccaccggctgtgaccccggagccagtagccttgagctctcaaacatcagaaccagttgaaagtgaagcacctccccgggagcccatggaggcagaagaagtggaggagcgtgccccagcccagaacccggagctcactcctggcccagccccagcgggcccaacacctgccccggaaacaaatgcacccaaccatccttcccctgcggagtatgtcgaggtgctccaggagctacagcggctggagagtcgcctccagcccttcttgcagcgctactacgaggttctgggtgctgctgccaccacggactacaataacaatcacgagggccgggaggaggatcagcggttgatcaacttggtaggggagagcctgcgactgctgggcaacacctttgttgcactgtctgacctgcgctgcaatctggcctgcacgcccccacgacacctgcatgtggtccggcctatgtctcactacaccacccccatggtgctccagcaggcagccattcccatacagatcaatgtgggaaccactgtgaccatgacaggaaatgggactcggccccccccaactcccaatgcagaggcacctccccctggtcctgggcaggcctcatccgtggctccgtcttctaccaatgtcgagtcctcagctgagggggctcccccgccaggtccagctcccccgccagccaccagccacccgagggtcatccggatttcccaccagagtgtggaacccgtggtcatgatgcacatgaacattcaagattctggcacacagcctggtggtgttccgagtgctcccactggccccctgggaccccctggtcatggccaaaccctgggctccaccctcatccagctgccctccctgccccctgagttcatgcacgccgtcgcccaccagatcactcatcaggccatggtggcagctgttgcctcc

SEQ ID NO: 111111 - DNA, 1056 bp, Homo sapiens; identical to SEQ ID NO: 111046
  Payload ID: 1783
  Gene Symbol: BAG6
  Gene Name: BCL2-associated athanogene 6
  ENST ID: ENST00000436807
  CDS Start-End: 282-1056

SEQ ID NO: 111112 - DNA, 1714 bp, Homo sapiens
  Payload ID: 1783
  Gene Symbol: BAG6
  Gene Name: BCL2-associated athanogene 6
  ENST ID: ENST00000428037
  CDS Start-End: 170-1714
tcgggggcggagccgcggggtggtgggtgggtgggtgtgtgtgtgtgtgtgtgtgtgtgtgtgtgtgtgtttggctgtgggttagttgtgccgttctgctggaacaccgtgggaaggcagtagacgcgggcagtcagctagcaggtccgtcgccccagacctgtcggccatggagcctaatgatagtaccagtaccgctgtggaggagcctgacagcttggaggtgttggtgaagaccttggactctcaaactcgtacctttattgtgggggcccagatgaatgtaaaagagtttaaggagcacattgctgcctctgtcagcatcccatctgaaaaacaacggctcatttaccagggacgagttctgcaagatgataagaagcttcaggaatacaatgttgggggaaaggttatccacctggtggaacgggctcctcctcagactcacctcccttctggggcatcttctgggacggggtctgcctcagccactcatggtgggggatccccccctggtactcgggggcctggggcctctgttcatgaccggaatgccaacagctatgtcatggttggaaccttcaatcttcctagtgacggctctgctgtggatgttcacatcaacatggaacaggccccgattcagagtgagccccgggtacggctggtgatggctcagcacatgatcagggatatacagaccttactatcccggatggagtgtcgaggagggccccaaccgcagcacagtcagccgcccccgcagccaccggctgtgaccccggagccagtagccttgagctctcaaacatcagaaccagttgaaagtgaagcacctccccgggagcccatggaggcagaagaagtggaggagcgtgccccagcccagaacccggagctcactcctggcccagccccagcgggcccaacacctgccccggaaacaaatgcacccaaccatccttcccctgcggagtatgtcgaggtgctccaggagctacagcggctggagagtcgcctccagcccttcttgcagcgctactacgaggttctgggtgctgctgccaccacggactacaataacaatcacgagggccgggaggaggatcagcggttgatcaacttggtaggggagagcctgcgactgctgggcaacacctttgttgcactgtctgacctgcgctgcaatctggcctgcacgcccccacgacacctgcatgtggtccggcctatgtctcactacaccacccccatggtgctccagcaggcagccattcccatacagatcaatgtgggaaccactgtgaccatgacaggaaatgggactcggccccccccaactcccaatgcagaggcacctccccctggtcctgggcaggcctcatccgtggctccgtcttctaccaatgtcgagtcctcagctgagggggctcccccgccaggtccagctcccccgccagccaccagccacccgagggtcatccggatttcccaccagagtgtggaacccgtggtcatgatgcacatgaacattcaagattctggcacacagcctggtggtgttccgagtgctcccactggccccctgggaccccctggtcatggccaaaccctgggctccaccctcatccagctgccctccctgccccctgagttcatgcacgccgtcgcccaccagatcactcatcaggccatggtggcagctgttgcctcc

SEQ ID NO: 111113 - DNA, 880 bp, Homo sapiens; identical to SEQ ID NO: 111065
  Payload ID: 1783
  Gene Symbol: BAG6
  Gene Name: BCL2-associated athanogene 6
  ENST ID: ENST00000428905
  CDS Start-End: 93-880

SEQ ID NO: 111114 - DNA, 3635 bp, Homo sapiens
  Payload ID: 1783
  Gene Symbol: BAG6
  Gene Name: BCL2-associated athanogene 6
  ENST ID: ENST00000413922
  CDS Start-End: 152-3532
ggagccgcggggtggtgggtgtgtgtgtgtgtgtgtgtgtgtgtgtgtgtgtgtgtgtgtgtgtttggctgtgggttagttgtgccgttctgctggaacaccgtgggaaggcagtagacgcgggcagtcagctagcagagacctgtcggccatggagcctaatgatagtaccagtaccgctgtggaggagcctgacagcttggaggtgttggtgaagaccttggactctcaaactcgtacctttattgtgggggcccagatgaatgtaaaagagtttaaggagcacattgctgcctctgtcagcatcccatctgaaaaacaacggctcatttaccagggacgagttctgcaagatgataagaagcttcaggaatacaatgttgggggaaaggttatccacctggtggaacgggctcctcctcagactcacctcccttctggggcatcttctgggacggggtctgcctcagccactcatggtgggggatccccccctggtactcgggggcctggggcctctgttcatgaccggaatgccaacagctatgtcatggttggaaccttcaatcttcctagtgacggctctgctgtggatgttcacatcaacatggaacaggccccgattcagagtgagccccgggtacggctggtgatggctcagcacatgatcagggatatacagaccttactatcccggatggagtgtcgaggagggccccaaccgcagcacagtcagccgcccccgcagccaccggctgtgaccccggagccagtagccttgagctctcaaacatcagaaccagttgaaagtgaagcacctccccgggagcccatggaggcagaagaagtggaggagcgtgccccagcccagaacccggagctcactcctggcccagccccagcgggcccaacacctgccccggaaacaaatgcacccaaccatccttcccctgcggagtatgtcgaggtgctccaggagctacagcggctggagagtcgcctccagcccttcttgcagcgctactacgaggttctgggtgctgctgccaccacggactacaataacaatcacgagggccgggaggaggatcagcggttgatcaacttggtaggggagagcctgcgactgctgggcaacacctttgttgcactgtctgacctgcgctgcaatctggcctgcacgcccccacgacacctgcatgtggtccggcctatgtctcactacaccacccccatggtgctccagcaggcagccattcccatacagatcaatgtgggaaccactgtgaccatgacaggaaatgggactcggccccccccaactcccaatgcagaggcacctccccctggtcctgggcaggcctcatccgtggctccgtcttctaccaatgtcgagtcctcagctgagggggctcccccgccaggtccagctcccccgccagccaccagccacccgagggtcatccggatttcccaccagagtgtggaacccgtggtcatgatgcacatgaacattcaagattctggcacacagcctggtggtgttccgagtgctcccactggccccctgggaccccctggtcatggccaaaccctgggacagcaggtgccaggcttcccaacagctccaacccgggtggtgattgcccggcccactcctccacaggctcggccttcccatcctggagggcccccagtctctgggacactgcagggcgccggtctgggtaccaatgcctcgttggcccagatggtgagcggccttgtggggcagcttcttatgcagccagtccttgtggctcaggggaccccaggtatggctccaccgccagcccctgccactgcttctgccagtgctggcaccaccaacacagctaccacagctggccccgctcctggggggcctgcccagcctccacccacccctcaaccctccatggctgatcttcagttctctcagcttctggggaacctgctagggcctgcagggccaggggctggagggcctggtgtggcttctcccaccatcactgtggcgatgcctggtgtccctgcctttctccaaggcatgactgacttcttgcaggcaacacagacagcccctccaccacccccacctcctccacccccaccacctgccccagagcagcagaccatgcccccaccaggctccccttctggtggcgcagggagtcctggaggcctgggtcttgagagcctgtcaccggagttttttacctcagtggtgcagggtgtgctcagctccctgctgggctccctgggggctcgggctggcagcagtgaaagtattgctgccttcatacaacgcctcagtggatccagcaacatctttgagcctggagctgatggggcccttggattctttggggccttgctttctcttctgtgccagaacttctctatggtggacgtagtgatgcttctccatgggcatttccagccactacaacggctccagccccagctgcgatccttcttccaccagcactacctgggtggtcaggagcccacacccagtaacatccggatggcaacccacacattgatcacggggctagaagagtatgtgcgggagagtttttccttggtgcaggttcagccaggtgtggacatcatccggacaaacctggaatttctccaagagcagtttaatagcattgctgcgcatgtgctgcattgcacagatagtggatttggggcccggttgctggagttgtgtaaccaaggcctgtttgaatgcctggccctaaacctgcactgcttggggggacagcagatggagcttgctgctgttatcaatggccgaattcgtcgtatgtctcgtggggtgaatccctccttggtgagctggctgaccactatgatgggactgaggcttcaggtggtactggagcacatgcctgtaggccctgatgccattctcagatacgttcgcagggttggtgatcccccccagccacttcctgaggagccaatggaagttcagggagcagaaagagcttcccctgagcctcagcgggagaatgcttccccagcccctggaacaacagcagaagaggccatgtcccgaggtccacctcctgctcctgaggggggctcccgggatgaacaggatggagcttcagctgagacagaaccttgggcagctgcagtccccccagaatgggtccctattatccagcaggacattcagagccagcggaaggtgaaaccgcagccccctctgagtgatgcctacctcagtggtatgcctgccaagagacgcaagacgatgcagggtgagggcccccagctgcttctctcagaggctgtgagccgggcagctaaggcagccggagctcggcccctgacgagccccgagagcctgagccgggacctggaggcaccagaggttcaggagagctacaggcagcagctccggtctgatatacaaaaacgactgcaggaagaccccaactacagtccccagcgcttccccaatgcccagcgggcctttgctgatgatccttagctctttgctctatggcccttcctcatcaggggaccgtttcccccctcttccttcacagtatttaagaaataaaagtcggatttttctggctgctttctctcta

SEQ ID NO: 111115 - DNA, 1710 bp, Homo sapiens
  Payload ID: 1783
  Gene Symbol: BAG6
  Gene Name: BCL2-associated athanogene 6
  ENST ID: ENST00000447656
  CDS Start-End: 166-1710
tcgggggcggagccgcggggtggtgggtgtgtgtgtgtgtgtgtgtgtgtgtgtgtgtgtgtgtgtttggctgtgggttagttgtgccgttctgctggaacaccgtgggaaggcagtagacgcgggcagtcagctagcaggtctgtcgccccagacctgtcggccatggagcctaatgatagtaccagtaccgctgtggaggagcctgacagcttggaggtgttggtgaagaccttggactctcaaactcgtacctttattgtgggggcccagatgaatgtaaaagagtttaaggagcacattgctgcctctgtcagcatcccatctgaaaaacaacggctcatttaccagggacgagttctgcaagatgataagaagcttcaggaatacaatgttgggggaaaggttatccacctggtggaacgggctcctcctcagactcacctcccttctggggcatcttctgggacggggtctgcctcagccactcatggtgggggatccccccctggtactcgggggcctggggcctctgttcatgaccggaatgccaacagctatgtcatggttggaaccttcaatcttcctagtgacggctctgctgtggatgttcacatcaacatggaacaggccccgattcagagtgagccccgggtacggctggtgatggctcagcacatgatcagggatatacagaccttactatcccggatggagtgtcgaggagggccccaaccgcagcacagtcagccgcccccgcagccaccggctgtgaccccggagccagtagccttgagctctcaaacatcagaaccagttgaaagtgaagcacctccccgggagcccatggaggcagaagaagtggaggagcgtgccccagcccagaacccggagctcactcctggcccagccccagcgggcccaacacctgccccggaaacaaatgcacccaaccatccttcccctgcggagtatgtcgaggtgctccaggagctacagcggctggagagtcgcctccagcccttcttgcagcgctactacgaggttctgggtgctgctgccaccacggactacaataacaatcacgagggccgggaggaggatcagcggttgatcaacttggtaggggagagcctgcgactgctgggcaacacctttgttgcactgtctgacctgcgctgcaatctggcctgcacgcccccacgacacctgcatgtggtccggcctatgtctcactacaccacccccatggtgctccagcaggcagccattcccatacagatcaatgtgggaaccactgtgaccatgacaggaaatgggactcggccccccccaactcccaatgcagaggcacctccccctggtcctgggcaggcctcatccgtggctccgtcttctaccaatgtcgagtcctcagctgagggggctcccccgccaggtccagctcccccgccagccaccagccacccgagggtcatccggatttcccaccagagtgtggaacccgtggtcatgatgcacatgaacattcaagattctggcacacagcctggtggtgttccgagtgctcccactggccccctgggaccccctggtcatggccaaaccctgggctccaccctcatccagctgccctccctgccccctgagttcatgcacgccgtcgcccaccagatcactcatcaggccatggtggcagctgttgcctcc

SEQ ID NO: 111116 - DNA, 544 bp, Homo sapiens; identical to SEQ ID NO: 111048
  Payload ID: 1783
  Gene Symbol: BAG6
  Gene Name: BCL2-associated athanogene 6
  ENST ID: ENST00000419409
  CDS Start-End: 69-544

SEQ ID NO: 111117 - DNA, 747 bp, Homo sapiens; identical to SEQ ID NO: 111058
  Payload ID: 1783
  Gene Symbol: BAG6
  Gene Name: BCL2-associated athanogene 6
  ENST ID: ENST00000432814
  CDS Start-End: 103-747

SEQ ID NO: 111118 - DNA, 880 bp, Homo sapiens; identical to SEQ ID NO: 111065
  Payload ID: 1783
  Gene Symbol: BAG6
  Gene Name: BCL2-associated athanogene 6
  ENST ID: ENST00000415034
  CDS Start-End: 93-880

SEQ ID NO: 111119 - DNA, 880 bp, Homo sapiens; identical to SEQ ID NO: 111065
  Payload ID: 1783
  Gene Symbol: BAG6
  Gene Name: BCL2-associated athanogene 6
  ENST ID: ENST00000452994
  CDS Start-End: 93-880

SEQ ID NO: 111120 - DNA, 807 bp, Homo sapiens; identical to SEQ ID NO: 111042
  Payload ID: 1783
  Gene Symbol: BAG6
  Gene Name: BCL2-associated athanogene 6
  ENST ID: ENST00000438112
  CDS Start-End: 217-807

SEQ ID NO: 111121 - DNA, 993 bp, Homo sapiens; identical to SEQ ID NO: 111055
  Payload ID: 1783
  Gene Symbol: BAG6
  Gene Name: BCL2-associated athanogene 6
  ENST ID: ENST00000450513
  CDS Start-End: 263-993

SEQ ID NO: 111122 - DNA, 554 bp, Homo sapiens; identical to SEQ ID NO: 111054
  Payload ID: 1783
  Gene Symbol: BAG6
  Gene Name: BCL2-associated athanogene 6
  ENST ID: ENST00000445519
  CDS Start-End: 1-554

SEQ ID NO: 111123 - DNA, 2407 bp, Homo sapiens; identical to SEQ ID NO: 111049
  Payload ID: 1783
  Gene Symbol: BAG6
  Gene Name: BCL2-associated athanogene 6
  ENST ID: ENST00000418840
  CDS Start-End: 180-2407

SEQ ID NO: 111124 - DNA, 902 bp, Homo sapiens
  Payload ID: 1783
  Gene Symbol: BAG6
  Gene Name: BCL2-associated athanogene 6
  ENST ID: ENST00000453928
  CDS Start-End: 124-902
tccctaagccgtcgatctcctgccctttgtgtttctctccctgtgccccggaatcagaagggggatggggacaggtgtgaatgtgtgtgtgtgcaggagatactttttagagacctgtcggccatggagcctaatgatagtaccagtaccgctgtggaggagcctgacagcttggaggtgttggtgaagaccttggactctcaaactcgtacctttattgtgggggcccagatgaatgtaaaagagtttaaggagcacattgctgcctctgtcagcatcccatctgaaaaacaacggctcatttaccagggacgagttctgcaagatgataagaagcttcaggaatacaatgttgggggaaaggttatccacctggtggaacgggctcctcctcagactcacctcccttctggggcatcttctgggacggggtctgcctcagccactcatggtgggggatccccccctggtactcgggggcctggggcctctgttcatgaccggaatgccaacagctatgtcatggttggaaccttcaatcttcctagtgacggctctgctgtggatgttcacatcaacatggaacaggccccgattcagagtgagccccgggtacggctggtgatggctcagcacatgatcagggatatacagaccttactatcccggatggagtgtcgaggagggccccaaccgcagcacagtcagccgcccccgcagccaccggctgtgaccccggagccagtagccttgagctctcaaacatcagaaccagttgaaagtgaagcacctccccgggagcccatggaggcagaagaagtggaggagcgtgccccagcccagaacccggagctcactcctggcccagccccagcgggcccaacacctgccccggaaacaaa

SEQ ID NO: 111125 - DNA, 714 bp, Homo sapiens; identical to SEQ ID NO: 111043
  Payload ID: 1783
  Gene Symbol: BAG6
  Gene Name: BCL2-associated athanogene 6
  ENST ID: ENST00000432674
  CDS Start-End: 1-714

SEQ ID NO: 111126 - DNA, 859 bp, Homo sapiens
  Payload ID: 1783
  Gene Symbol: BAG6
  Gene Name: BCL2-associated athanogene 6
  ENST ID: ENST00000417824
  CDS Start-End: 126-859
gggtgtgtgtgtgtgtgtgtgtgtgtgtgtgtgtgtgtttggctgtgggttagttgtgccgttctgctggaacaccgtgggaaggcagtagacgcgggcagtcagctagcagagacctgtcggccatggagcctaatgatagtaccagtaccgctgtggaggagcctgacagcttggaggtgttggtgaagaccttggactctcaaactcgtacctttattgtgggggcccagatgaatgtaaaagagtttaaggagcacattgctgcctctgtcagcatcccatctgaaaaacaacggctcatttaccagggacgagttctgcaagatgataagaagcttcaggaatacaatgttgggggaaaggttatccacctggtggaacgggctcctcctcagactcacctcccttctggggcatcttctgggacggggtctgcctcagccactcatggtgggggatccccccctggtactcgggggcctggggcctctgttcatgaccggaatgccaacagctatgtcatggttggaaccttcaatcttcctagtgagccccgggtacggctggtgatggctcagcacatgatcagggatatacagaccttactatcccggatggagtgtcgaggagggccccaaccgcagcacagtcagccgcccccgcagccaccggctgtgaccccggagccagtagccttgagctctcaaacatcagaaccagttgaaagtgaagcacctccccgggagcccatggaggcagaagaagtggaggagcgtgccccagcccagaacccggagctcactcctggcccagccccagcgggcccaacacctgccccggaaacaaatgcacccaa

SEQ ID NO: 111127 - DNA, 1051 bp, Homo sapiens; identical to SEQ ID NO: 111091
  Payload ID: 1783
  Gene Symbol: BAG6
  Gene Name: BCL2-associated athanogene 6
  ENST ID: ENST00000415770
  CDS Start-End: 266-1051

SEQ ID NO: 111128 - DNA, 654 bp, Homo sapiens; identical to SEQ ID NO: 111047
  Payload ID: 1783
  Gene Symbol: BAG6
  Gene Name: BCL2-associated athanogene 6
  ENST ID: ENST00000441054
  CDS Start-End: 36-654

SEQ ID NO: 111129 - DNA, 993 bp, Homo sapiens; identical to SEQ ID NO: 111055
  Payload ID: 1783
  Gene Symbol: BAG6
  Gene Name: BCL2-associated athanogene 6
  ENST ID: ENST00000417419
  CDS Start-End: 263-993

SEQ ID NO: 111130 - DNA, 554 bp, Homo sapiens; identical to SEQ ID NO: 111054
  Payload ID: 1783
  Gene Symbol: BAG6
  Gene Name: BCL2-associated athanogene 6
  ENST ID: ENST00000453833
  CDS Start-End: 1-554

SEQ ID NO: 111131 - DNA, 807 bp, Homo sapiens
  Payload ID: 1783
  Gene Symbol: BAG6
  Gene Name: BCL2-associated athanogene 6
  ENST ID: ENST00000456286
  CDS Start-End: 217-807
cagctccctaagccgtcgatctcctgccctttgtgtttctctccctgtgccccggaatcagaagggggatggggacaggtgtgaatgtgtgtgtgtgcaggagaaactttttaggtattggggcagggattaatgctagggagtctttcgggtacactctggtctgggcaacagcgggccttccttccttcgttcttctttagagacctgtcggccatggagcctaatgatagtaccagtaccgctgtggaggagcctgacagcttggaggtgttggtgaagaccttggactctcaaactcgtacctttattgtgggggcccagatgaatgtaaaagagtttaaggagcacattgctgcctctgtcagcatcccatctgaaaaacaacggctcatttaccagggacgagttctgcaagatgataagaagcttcaggaatacaatgttgggggaaaggttatccacctggtggaacgggctcctcctcagactcacctcccttctggggcatcttctgggacggggtctgcctcagccactcatggtgggggatccccccctggtactcgggggcctggggcctctgttcatgaccggaatgccaacagctatgtcatggttggaaccttcaatcttcctagtgacggctctgctgtggatgttcacatcaacatggaacaggccccgattcagagtgagccccgggtacggctggtgatggctcagcacatgatcagggatatacagaccttactatcccggatggagtgtcgaggagggccccaaccgcagcacagtcagccgccc

SEQ ID NO: 111132 - DNA, 747 bp, Homo sapiens; identical to SEQ ID NO: 111076
  Payload ID: 1783
  Gene Symbol: BAG6
  Gene Name: BCL2-associated athanogene 6
  ENST ID: ENST00000414208
  CDS Start-End: 103-747

SEQ ID NO: 111133 - DNA, 766 bp, Homo sapiens; identical to SEQ ID NO: 111064
  Payload ID: 1783
  Gene Symbol: BAG6
  Gene Name: BCL2-associated athanogene 6
  ENST ID: ENST00000442427
  CDS Start-End: 33-766

SEQ ID NO: 111134 - DNA, 1056 bp, Homo sapiens; identical to SEQ ID NO: 111046
  Payload ID: 1783
  Gene Symbol: BAG6
  Gene Name: BCL2-associated athanogene 6
  ENST ID: ENST00000420942
  CDS Start-End: 282-1056

SEQ ID NO: 111135 - DNA, 544 bp, Homo sapiens; identical to SEQ ID NO: 111048
  Payload ID: 1783
  Gene Symbol: BAG6
  Gene Name: BCL2-associated athanogene 6
  ENST ID: ENST00000447798
  CDS Start-End: 69-544

SEQ ID NO: 111136 - DNA, 844 bp, Homo sapiens; identical to SEQ ID NO: 111053
  Payload ID: 1783
  Gene Symbol: BAG6
  Gene Name: BCL2-associated athanogene 6
  ENST ID: ENST00000446133
  CDS Start-End: 147-844

SEQ ID NO: 111137 - DNA, 859 bp, Homo sapiens; identical to SEQ ID NO: 111126
  Payload ID: 1783
  Gene Symbol: BAG6
  Gene Name: BCL2-associated athanogene 6
  ENST ID: ENST00000421106
  CDS Start-End: 126-859

SEQ ID NO: 111138 - DNA, 844 bp, Homo sapiens; identical to SEQ ID NO: 111053
  Payload ID: 1783
  Gene Symbol: BAG6
  Gene Name: BCL2-associated athanogene 6
  ENST ID: ENST00000424221
  CDS Start-End: 147-844

SEQ ID NO: 111139 - DNA, 993 bp, Homo sapiens; identical to SEQ ID NO: 111055
  Payload ID: 1783
  Gene Symbol: BAG6
  Gene Name: BCL2-associated athanogene 6
  ENST ID: ENST00000428271
  CDS Start-End: 263-993

SEQ ID NO: 111140 - DNA, 807 bp, Homo sapiens; identical to SEQ ID NO: 111131
  Payload ID: 1783
  Gene Symbol: BAG6
  Gene Name: BCL2-associated athanogene 6
  ENST ID: ENST00000416755
  CDS Start-End: 217-807

SEQ ID NO: 111141 - DNA, 410 bp, Homo sapiens; identical to SEQ ID NO: 111063
  Payload ID: 1783
  Gene Symbol: BAG6
  Gene Name: BCL2-associated athanogene 6
  ENST ID: ENST00000433960
  CDS Start-End: 1-410

SEQ ID NO: 111142 - DNA, 3648 bp, Homo sapiens
  Payload ID: 1783
  Gene Symbol: BAG6
  Gene Name: BCL2-associated athanogene 6
  ENST ID: ENST00000422756
  CDS Start-End: 165-3545
ggggaagtcgggggcggagccgcggggtggtgggtgtgtgtgtgtgtgtgtgtgtgtgtgtgtgtgtgtgtgtgtgtttggctgtgggttagttgtgccgttctgctggaacaccgtgggaaggcagtagacgcgggcagtcagctagcagagacctgtcggccatggagcctaatgatagtaccagtaccgctgtggaggagcctgacagcttggaggtgttggtgaagaccttggactctcaaactcgtacctttattgtgggggcccagatgaatgtaaaagagtttaaggagcacattgctgcctctgtcagcatcccatctgaaaaacaacggctcatttaccagggacgagttctgcaagatgataagaagcttcaggaatacaatgttgggggaaaggttatccacctggtggaacgggctcctcctcagactcacctcccttctggggcatcttctgggacggggtctgcctcagccactcatggtgggggatccccccctggtactcgggggcctggggcctctgttcatgaccggaatgccaacagctatgtcatggttggaaccttcaatcttcctagtgacggctctgctgtggatgttcacatcaacatggaacaggccccgattcagagtgagccccgggtacggctggtgatggctcagcacatgatcagggatatacagaccttactatcccggatggagtgtcgaggagggccccaaccgcagcacagtcagccgcccccgcagccaccggctgtgaccccggagccagtagccttgagctctcaaacatcagaaccagttgaaagtgaagcacctccccgggagcccatggaggcagaagaagtggaggagcgtgccccagcccagaacccggagctcactcctggcccagccccagcgggcccaacacctgccccggaaacaaatgcacccaaccatccttcccctgcggagtatgtcgaggtgctccaggagctacagcggctggagagtcgcctccagcccttcttgcagcgctactacgaggttctgggtgctgctgccaccacggactacaataacaatcacgagggccgggaggaggatcagcggttgatcaacttggtaggggagagcctgcgactgctgggcaacacctttgttgcactgtctgacctgcgctgcaatctggcctgcacgcccccacgacacctgcatgtggtccggcctatgtctcactacaccacccccatggtgctccagcaggcagccattcccatacagatcaatgtgggaaccactgtgaccatgacaggaaatgggactcggccccccccaactcccaatgcagaggcacctccccctggtcctgggcaggcctcatccgtggctccgtcttctaccaatgtcgagtcctcagctgagggggctcccccgccaggtccagctcccccgccagccaccagccacccgagggtcatccggatttcccaccagagtgtggaacccgtggtcatgatgcacatgaacattcaagattctggcacacagcctggtggtgttccgagtgctcccactggccccctgggaccccctggtcatggccaaaccctgggacagcaggtgccaggcttcccaacagctccaacccgggtggtgattgcccggcccactcctccacaggctcggccttcccatcctggagggcccccagtctctgggacactgcagggcgccggtctgggtaccaatgcctcgttggcccagatggtgagcggccttgtggggcagcttcttatgcagccagtccttgtggctcaggggaccccaggtatggctccaccgccagcccctgccactgcttctgccagtgctggcaccaccaacacagctaccacagctggccccgctcctggggggcctgcccagcctccacccacccctcaaccctccatggctgatcttcagttctctcagcttctggggaacctgctagggcctgcagggccaggggctggagggcctggtgtggcttctcccaccatcactgtggcgatgcctggtgtccctgcctttctccaaggcatgactgacttcttgcaggcaacacagacagcccctccaccacccccacctcctccacccccaccacctgccccagagcagcagaccatgcccccaccaggctccccttctggtggcgcagggagtcctggaggcctgggtcttgagagcctgtcaccggagttttttacctcagtggtgcagggtgtgctcagctccctgctgggctccctgggggctcgggctggcagcagtgaaagtattgctgccttcatacaacgcctcagtggatccagcaacatctttgagcctggagctgatggggcccttggattctttggggccttgctttctcttctgtgccagaacttctctatggtggacgtagtgatgcttctccatgggcatttccagccactacaacggctccagccccagctgcgatccttcttccaccagcactacctgggtggtcaggagcccacacccagtaacatccggatggcaacccacacattgatcacggggctagaagagtatgtgcgggagagtttttccttggtgcaggttcagccaggtgtggacatcatccggacaaacctggaatttctccaagagcagtttaatagcattgctgcgcatgtgctgcattgcacagatagtggatttggggcccggttgctggagttgtgtaaccaaggcctgtttgaatgcctggccctaaacctgcactgcttggggggacagcagatggagcttgctgctgttatcaatggccgaattcgtcgtatgtctcgtggggtgaatccctccttggtgagctggctgaccactatgatgggactgaggcttcaggtggtactggagcacatgcctgtaggccctgatgccattctcagatacgttcgcagggttggtgatcccccccagccacttcctgaggagccaatggaagttcagggagcagaaagagcttcccctgagcctcagcgggagaatgcttccccagcccctggaacaacagcagaagaggccatgtcccgaggtccacctcctgctcctgaggggggctcccgggatgaacaggatggagcttcagctgagacagaaccttgggcagctgcagtccccccagaatgggtccctattatccagcaggacattcagagccagcggaaggtgaaaccgcagccccctctgagtgatgcctacctcagtggtatgcctgccaagagacgcaagacgatgcagggtgagggcccccagctgcttctctcagaggctgtgagccgggcagctaaggcagccggagctcggcccctgacgagccccgagagcctgagccgggacctggaggcaccagaggttcaggagagctacaggcagcagctccggtctgatatacaaaaacgactgcaggaagaccccaactacagtccccagcgcttccccaatgcccagcgggcctttgctgatgatccttagctctttgctctatggcccttcctcatcaggggaccgtttcccccctcttccttcacagtatttaagaaataaaagtcggatttttctggctgctttctctcta

SEQ ID NO: 111143 - DNA, 807 bp, Homo sapiens; identical to SEQ ID NO: 111131
  Payload ID: 1783
  Gene Symbol: BAG6
  Gene Name: BCL2-associated athanogene 6
  ENST ID: ENST00000427281
  CDS Start-End: 217-807

SEQ ID NO: 111144 - DNA, 747 bp, Homo sapiens; identical to SEQ ID NO: 111076
  Payload ID: 1783
  Gene Symbol: BAG6
  Gene Name: BCL2-associated athanogene 6
  ENST ID: ENST00000453763
  CDS Start-End: 103-747

SEQ ID NO: 111145 - DNA, 3779 bp, Homo sapiens; identical to SEQ ID NO: 111074
  Payload ID: 1783
  Gene Symbol: BAG6
  Gene Name: BCL2-associated athanogene 6
  ENST ID: ENST00000412012
  CDS Start-End: 296-3676

SEQ ID NO: 111146 - DNA, 844 bp, Homo sapiens; identical to SEQ ID NO: 111053
  Payload ID: 1783
  Gene Symbol: BAG6
  Gene Name: BCL2-associated athanogene 6
  ENST ID: ENST00000448278
  CDS Start-End: 147-844

SEQ ID NO: 111147 - DNA, 513 bp, Homo sapiens; identical to SEQ ID NO: 111059
  Payload ID: 1783
  Gene Symbol: BAG6
  Gene Name: BCL2-associated athanogene 6
  ENST ID: ENST00000443312
  CDS Start-End: 1-410

SEQ ID NO: 111148 - DNA, 517 bp, Homo sapiens
  Payload ID: 1783
  Gene Symbol: BAG6
  Gene Name: BCL2-associated athanogene 6
  ENST ID: ENST00000458596
  CDS Start-End: 1-410
gtcgtatgtctcgtggggtgaatccctccttggtgagctggctgaccactatgatgggactgaggcttcaggtggtactggagcacatgcctgtaggccctgatgccattctcagatacgttcgcagggttggtgatcccccccagccacttcctgaggagccaatggaagttcagggagcagaaagagcttcccctgagcctcaggaatgggtccctattatccagcaggacattcagagccagcggaaggtgaaaccgcagccccctctgagtgatgcctacctcagtggtatgcctgccaagagacgcaagctccggtctgatatacaaaaacgactgcaggaagaccccaactacagtccccagcgcttccccaatgcccagcgggcctttgctgatgatccttagctctttctttgctctatggcccttcctcatcaggggaccgtttcccccctcttccttcacagtatttaagaaataaaagtcggatttttctggctgctttctctcta

SEQ ID NO: 111149 - DNA, 2407 bp, Homo sapiens; identical to SEQ ID NO: 111044
  Payload ID: 1783
  Gene Symbol: BAG6
  Gene Name: BCL2-associated athanogene 6
  ENST ID: ENST00000438641
  CDS Start-End: 180-2407

SEQ ID NO: 111150 - DNA, 880 bp, Homo sapiens; identical to SEQ ID NO: 111065
  Payload ID: 1783
  Gene Symbol: BAG6
  Gene Name: BCL2-associated athanogene 6
  ENST ID: ENST00000453036
  CDS Start-End: 93-880

SEQ ID NO: 111151 - DNA, 783 bp, Homo sapiens; identical to SEQ ID NO: 111073
  Payload ID: 1783
  Gene Symbol: BAG6
  Gene Name: BCL2-associated athanogene 6
  ENST ID: ENST00000457868
  CDS Start-End: 1-680

SEQ ID NO: 111152 - DNA, 859 bp, Homo sapiens; identical to SEQ ID NO: 111069
  Payload ID: 1783
  Gene Symbol: BAG6
  Gene Name: BCL2-associated athanogene 6
  ENST ID: ENST00000438330
  CDS Start-End: 126-859

SEQ ID NO: 111153 - DNA, 1051 bp, Homo sapiens; identical to SEQ ID NO: 111091
  Payload ID: 1783
  Gene Symbol: BAG6
  Gene Name: BCL2-associated athanogene 6
  ENST ID: ENST00000438546
  CDS Start-End: 266-1051

SEQ ID NO: 111154 - DNA, 3652 bp, Homo sapiens
  Payload ID: 1783
  Gene Symbol: BAG6
  Gene Name: BCL2-associated athanogene 6
  Uniprot ID: P46379
  ENST ID: ENST00000443182
  CDS Start-End: 165-3545
ggggaagtcgggggcggagccgcggggtggtgggtgggtgggtgtgtgtgtgtgtgtgtgtgtgtgtgtgtgtgtgtttggctgtgggttagttgtgccgttctgctggaacaccgtgggaaggcagtagacgcgggcagtcagctagcagagacctgtcggccatggagcctaatgatagtaccagtaccgctgtggaggagcctgacagcttggaggtgttggtgaagaccttggactctcaaactcgtacctttattgtgggggcccagatgaatgtaaaagagtttaaggagcacattgctgcctctgtcagcatcccatctgaaaaacaacggctcatttaccagggacgagttctgcaagatgataagaagcttcaggaatacaatgttgggggaaaggttatccacctggtggaacgggctcctcctcagactcacctcccttctggggcatcttctgggacggggtctgcctcagccactcatggtgggggatccccccctggtactcgggggcctggggcctctgttcatgaccggaatgccaacagctatgtcatggttggaaccttcaatcttcctagtgacggctctgctgtggatgttcacatcaacatggaacaggccccgattcagagtgagccccgggtacggctggtgatggctcagcacatgatcagggatatacagaccttactatcccggatggagtgtcgaggagggccccaaccgcagcacagtcagccgcccccgcagccaccggctgtgaccccggagccagtagccttgagctctcaaacatcagaaccagttgaaagtgaagcacctccccgggagcccatggaggcagaagaagtggaggagcgtgccccagcccagaacccggagctcactcctggcccagccccagcgggcccaacacctgccccggaaacaaatgcacccaaccatccttcccctgcggagtatgtcgaggtgctccaggagctacagcggctggagagtcgcctccagcccttcttgcagcgctactacgaggttctgggtgctgctgccaccacggactacaataacaatcacgagggccgggaggaggatcagcggttgatcaacttggtaggggagagcctgcgactgctgggcaacacctttgttgcactgtctgacctgcgctgcaatctggcctgcacgcccccacgacacctgcatgtggtccggcctatgtctcactacaccacccccatggtgctccagcaggcagccattcccatacagatcaatgtgggaaccactgtgaccatgacaggaaatgggactcggccccccccaactcccaatgcagaggcacctccccctggtcctgggcaggcctcatccgtggctccgtcttctaccaatgtcgagtcctcagctgagggggctcccccgccaggtccagctcccccgccagccaccagccacccgagggtcatccggatttcccaccagagtgtggaacccgtggtcatgatgcacatgaacattcaagattctggcacacagcctggtggtgttccgagtgctcccactggccccctgggaccccctggtcatggccaaaccctgggacagcaggtgccaggcttcccaacagctccaacccgggtggtgattgcccggcccactcctccacaggctcggccttcccatcctggagggcccccagtctctgggacactgcagggcgccggtctgggtaccaatgcctcgttggcccagatggtgagcggccttgtggggcagcttcttatgcagccagtccttgtggctcaggggaccccaggtatggctccaccgccagcccctgccactgcttctgccagtgctggcaccaccaacacagctaccacagctggccccgctcctggggggcctgcccagcctccacccacccctcaaccctccatggctgatcttcagttctctcagcttctggggaacctgctagggcctgcagggccaggggctggagggtctggtgtggcttctcccaccatcactgtggcgatgcctggtgtccctgcctttctccaaggcatgactgacttcttgcaggcaacacagacagcccctccaccacccccacctcctccacccccaccacctgccccagagcagcagaccatgcccccaccaggctccccttctggtggcgcagggagtcctggaggcctgggtcttgagagcctgtcaccggagttttttacctcagtggtgcagggtgtgctcagctccctgctgggctccctgggggctcgggctggcagcagtgaaagtattgctgccttcatacaacgcctcagtggatccagcaacatctttgagcctggagctgatggggcccttggattctttggggccttgctttctcttctgtgccagaacttctctatggtggacgtagtgatgcttctccatgggcatttccagccactacaacggctccagccccagctgcgatccttcttccaccagcactacctgggtggtcaggagcccacacccagtaacatccggatggcaacccacacattgatcacggggctagaagagtatgtgcgggagagtttttccttggtgcaggttcagccaggtgtggacatcatccggacaaacctggaatttctccaagagcagtttaatagcattgctgcgcatgtgctgcattgcacagatagtggatttggggcccggttgctggagttgtgtaaccaaggcctgtttgaatgcctggccctaaacctgcactgcttggggggacagcagatggagcttgctgctgttatcaatggccgaattcgtcgtatgtctcgtggggtgaatccctccttggtgagctggctgaccactatgatgggactgaggcttcaggtggtactggagcacatgcctgtaggccctgatgccattctcagatacgttcgcagggttggtgatcccccccagccacttcctgaggagccaatggaagttcagggagcagaaagagcttcccctgagcctcagcgggagaatgcttccccagcccctggaacaacagcagaagaggccatgtcccgaggtccacctcctgctcctgaggggggctcccgggatgaacaggatggagcttcagctgagacagaaccttgggcagctgcagtccccccagaatgggtccctattatccagcaggacattcagagccagcggaaggtgaaaccgcagccccctctgagtgatgcctacctcagtggtatgcctgccaagagacgcaagacgatgcagggtgagggcccccagctgcttctctcagaggctgtgagccgggcagctaaggcagccggagctcggcccctgacgagccccgagagcctgagccgggacctggaggcaccagaggttcaggagagctacaggcagcagctccggtctgatatacaaaaacgactgcaggaagaccccaactacagtccccagcgcttccccaatgcccagcgggcctttgctgatgatccttagctctttctttgctctatggcccttcctcatcaggggaccgtttcccccctcttccttcacagtatttaagaaataaaagtcggatttttctggctgctttctctcta

SEQ ID NO: 111155 - DNA, 747 bp, Homo sapiens; identical to SEQ ID NO: 111058
  Payload ID: 1783
  Gene Symbol: BAG6
  Gene Name: BCL2-associated athanogene 6
  ENST ID: ENST00000456067
  CDS Start-End: 103-747

SEQ ID NO: 111156 - DNA, 714 bp, Homo sapiens; identical to SEQ ID NO: 111062
  Payload ID: 1783
  Gene Symbol: BAG6
  Gene Name: BCL2-associated athanogene 6
  ENST ID: ENST00000438149
  CDS Start-End: 1-714

SEQ ID NO: 111157 - DNA, 844 bp, Homo sapiens; identical to SEQ ID NO: 111053
  Payload ID: 1783
  Gene Symbol: BAG6
  Gene Name: BCL2-associated athanogene 6
  ENST ID: ENST00000433726
  CDS Start-End: 147-844

SEQ ID NO: 111158 - DNA, 766 bp, Homo sapiens; identical to SEQ ID NO: 111064
  Payload ID: 1783
  Gene Symbol: BAG6
  Gene Name: BCL2-associated athanogene 6
  ENST ID: ENST00000432174
  CDS Start-End: 33-766

SEQ ID NO: 111159 - DNA, 714 bp, Homo sapiens; identical to SEQ ID NO: 111062
  Payload ID: 1783
  Gene Symbol: BAG6
  Gene Name: BCL2-associated athanogene 6
  ENST ID: ENST00000429830
  CDS Start-End: 1-714

SEQ ID NO: 111160 - DNA, 1056 bp, Homo sapiens; identical to SEQ ID NO: 111046
  Payload ID: 1783
  Gene Symbol: BAG6
  Gene Name: BCL2-associated athanogene 6
  ENST ID: ENST00000424480
  CDS Start-End: 282-1056

SEQ ID NO: 111161 - DNA, 1710 bp, Homo sapiens; identical to SEQ ID NO: 111115
  Payload ID: 1783
  Gene Symbol: BAG6
  Gene Name: BCL2-associated athanogene 6
  ENST ID: ENST00000435080
  CDS Start-End: 166-1710

SEQ ID NO: 111162 - DNA, 807 bp, Homo sapiens
  Payload ID: 1783
  Gene Symbol: BAG6
  Gene Name: BCL2-associated athanogene 6
  ENST ID: ENST00000435066
  CDS Start-End: 217-807
cagctccctaagccgtcgatctcctgccctttgtgtttctctccctgtgccccggaatcagaagggggatggggacaggtgtgaatgtgtgtgtgtgcaggagatactttttaggtattggggcagggattaatgctagggagtctttcgggtacactctggtctgggcaacagcgggccttccttccttcgttcttctttagagacctgtcggccatggagcctaatgatagtaccagtaccgctgtggaggagcctgacagcttggaggtgttggtgaagaccttggactctcaaactcgtacctttattgtgggggcccagatgaatgtaaaagagtttaaggagcacattgctgcctctgtcagcatcccatctgaaaaacaacggctcatttaccagggacgagttctgcaagatgataagaagcttcaggaatacaatgttgggggaaaggttatccacctggtggaacgggctcctcctcagactcacctcccttctggggcatcttctgggacggggtctgcctcagccactcatggtgggggatccccccctggtactcgggggcctggggcctctgttcatgaccggaatgccaacagctatgtcatggttggaaccttcaatcttcctagtgacggctctgctgtggatgttcacatcaacatggaacaggccccgattcagagtgagccccgggtacggctggtgatggctcagcacatgatcagggatatacagaccttactatcccggatggagtgtcgaggagggccccaaccgcagcacagtcagccgccc

SEQ ID NO: 111163 - DNA, 736 bp, Homo sapiens; identical to SEQ ID NO: 111083
  Payload ID: 1783
  Gene Symbol: BAG6
  Gene Name: BCL2-associated athanogene 6
  ENST ID: ENST00000453241
  CDS Start-End: 1-736

SEQ ID NO: 111164 - DNA, 3783 bp, Homo sapiens; identical to SEQ ID NO: 111038
  Payload ID: 1783
  Gene Symbol: BAG6
  Gene Name: BCL2-associated athanogene 6
  Uniprot ID: P46379
  ENST ID: ENST00000417144
  CDS Start-End: 296-3676

SEQ ID NO: 111165 - DNA, 513 bp, Homo sapiens; identical to SEQ ID NO: 111059
  Payload ID: 1783
  Gene Symbol: BAG6
  Gene Name: BCL2-associated athanogene 6
  ENST ID: ENST00000424504
  CDS Start-End: 1-410

SEQ ID NO: 111166 - DNA, 513 bp, Homo sapiens; identical to SEQ ID NO: 111059
  Payload ID: 1783
  Gene Symbol: BAG6
  Gene Name: BCL2-associated athanogene 6
  ENST ID: ENST00000422948
  CDS Start-End: 1-410

SEQ ID NO: 111167 - DNA, 654 bp, Homo sapiens; identical to SEQ ID NO: 111047
  Payload ID: 1783
  Gene Symbol: BAG6
  Gene Name: BCL2-associated athanogene 6
  ENST ID: ENST00000437735
  CDS Start-End: 36-654

SEQ ID NO: 111168 - DNA, 3751 bp, Homo sapiens
  Payload ID: 1783
  Gene Symbol: BAG6
  Gene Name: BCL2-associated athanogene 6
  ENST ID: ENST00000444402
  CDS Start-End: 250-3648
ggcgacagcggtggcggctcctcggggtgctcggctccctcccacctaggccggccccggcccgactcgccctcagaaactcactgtttggggctgcggactttctcgtcgtgccccacaaaagtaaagcttggggacctggggggagccggaagtatcgcttcgagatccccaaatactatcggggaaacggaagtggccgtcggtggcaggtttgggggagaccggaagtgacgagacctgtcggccatggagcctaatgatagtaccagtaccgctgtggaggagcctgacagcttggaggtgttggtgaagaccttggactctcaaactcgtacctttattgtgggggcccagatgaatgtaaaagagtttaaggagcacattgctgcctctgtcagcatcccatctgaaaaacaacggctcatttaccagggacgagttctgcaagatgataagaagcttcaggaatacaatgttgggggaaaggttatccacctggtggaacgggctcctcctcagactcacctcccttctggggcatcttctgggacggggtctgcctcagccactcatggtgggggatccccccctggtactcgggggcctggggcctctgttcatgaccggaatgccaacagctatgtcatggttggaaccttcaatcttcctagtgacggctctgctgtggatgttcacatcaacatggaacaggccccgattcagagtgagccccgggtacggctggtgatggctcagcacatgatcagggatatacagaccttactatcccggatggagactctcccctaccttcagtgtcgaggagggccccaaccgcagcacagtcagccgcccccgcagccaccggctgtgaccccggagccagtagccttgagctctcaaacatcagaaccagttgaaagtgaagcacctccccgggagcccatggaggcagaagaagtggaggagcgtgccccagcccagaacccggagctcactcctggcccagccccagcgggcccaacacctgccccggaaacaaatgcacccaaccatccttcccctgcggagtatgtcgaggtgctccaggagctacagcggctggagagtcgcctccagcccttcttgcagcgctactacgaggttctgggtgctgctgccaccacggactacaataacaatcacgagggccgggaggaggatcagcggttgatcaacttggtaggggagagcctgcgactgctgggcaacacctttgttgcactgtctgacctgcgctgcaatctggcctgcacgcccccacgacacctgcatgtggtccggcctatgtctcactacaccacccccatggtgctccagcaggcagccattcccatacagatcaatgtgggaaccactgtgaccatgacaggaaatgggactcggccccccccaactcccaatgcagaggcacctccccctggtcctgggcaggcctcatccgtggctccgtcttctaccaatgtcgagtcctcagctgagggggctcccccgccaggtccagctcccccgccagccaccagccacccgagggtcatccggatttcccaccagagtgtggaacccgtggtcatgatgcacatgaacattcaagattctggcacacagcctggtggtgttccgagtgctcccactggccccctgggaccccctggtcatggccaaaccctgggacagcaggtgccaggcttcccaacagctccaacccgggtggtgattgcccggcccactcctccacaggctcggccttcccatcctggagggcccccagtctctgggacactgcagggcgccggtctgggtaccaatgcctcgttggcccagatggtgagcggccttgtggggcagcttcttatgcagccagtccttgtggctcaggggaccccaggtatggctccaccgccagcccctgccactgcttctgccagtgctggcaccaccaacacagctaccacagctggccccgctcctggggggcctgcccagcctccacccacccctcaaccctccatggctgatcttcagttctctcagcttctggggaacctgctagggcctgcagggccaggggctggagggcctggtgtggcttctcccaccatcactgtggcgatgcctggtgtccctgcctttctccaaggcatgactgacttcttgcaggcaacacagacagcccctccaccacccccacctcctccacccccaccacctgccccagagcagcagaccatgcccccaccaggctccccttctggtggcgcagggagtcctggaggcctgggtcttgagagcctgtcaccggagttttttacctcagtggtgcagggtgtgctcagctccctgctgggctccctgggggctcgggctggcagcagtgaaagtattgctgccttcatacaacgcctcagtggatccagcaacatctttgagcctggagctgatggggcccttggattctttggggccttgctttctcttctgtgccagaacttctctatggtggacgtagtgatgcttctccatgggcatttccagccactacaacggctccagccccagctgcgatccttcttccaccagcactacctgggtggtcaggagcccacacccagtaacatccggatggcaacccacacattgatcacggggctagaagagtatgtgcgggagagtttttccttggtgcaggttcagccaggtgtggacatcatccggacaaacctggaatttctccaagagcagtttaatagcattgctgcgcatgtgctgcattgcacagatagtggatttggggcccggttgctggagttgtgtaaccaaggcctgtttgaatgcctggccctaaacctgcactgcttggggggacagcagatggagcttgctgctgttatcaatggccgaattcgtcgtatgtctcgtggggtgaatccctccttggtgagctggctgaccactatgatgggactgaggcttcaggtggtactggagcacatgcctgtaggccctgatgccattctcagatacgttcgcagggttggtgatcccccccagccacttcctgaggagccaatggaagttcagggagcagaaagagcttcccctgagcctcagcgggagaatgcttccccagcccctggaacaacagcagaagaggccatgtcccgaggtccacctcctgctcctgaggggggctcccgggatgaacaggatggagcttcagctgagacagaaccttgggcagctgcagtccccccagaatgggtccctattatccagcaggacattcagagccagcggaaggtgaaaccgcagccccctctgagtgatgcctacctcagtggtatgcctgccaagagacgcaagacgatgcagggtgagggcccccagctgcttctctcagaggctgtgagccgggcagctaaggcagccggagctcggcccctgacgagccccgagagcctgagccgggacctggaggcaccagaggttcaggagagctacaggcagcagctccggtctgatatacaaaaacgactgcaggaagaccccaactacagtccccagcgcttccccaatgcccagcgggcctttgctgatgatccttagctctttgctctatggcccttcctcatcaggggaccgtttcccccctcttccttcacagtatttaagaaataaaagtcggatttttctggctgctttctctcta

SEQ ID NO: 111169 - DNA, 3751 bp, Homo sapiens; identical to SEQ ID NO: 111168
  Payload ID: 1783
  Gene Symbol: BAG6
  Gene Name: BCL2-associated athanogene 6
  ENST ID: ENST00000425649
  CDS Start-End: 250-3648

SEQ ID NO: 111170 - DNA, 554 bp, Homo sapiens; identical to SEQ ID NO: 111054
  Payload ID: 1783
  Gene Symbol: BAG6
  Gene Name: BCL2-associated athanogene 6
  ENST ID: ENST00000436814
  CDS Start-End: 1-554

SEQ ID NO: 111171 - DNA, 736 bp, Homo sapiens; identical to SEQ ID NO: 111082
  Payload ID: 1783
  Gene Symbol: BAG6
  Gene Name: BCL2-associated athanogene 6
  ENST ID: ENST00000445869
  CDS Start-End: 1-736

SEQ ID NO: 111172 - DNA, 1051 bp, Homo sapiens; identical to SEQ ID NO: 111091
  Payload ID: 1783
  Gene Symbol: BAG6
  Gene Name: BCL2-associated athanogene 6
  ENST ID: ENST00000428326
  CDS Start-End: 266-1051

SEQ ID NO: 111173 - DNA, 3648 bp, Homo sapiens
  Payload ID: 1783
  Gene Symbol: BAG6
  Gene Name: BCL2-associated athanogene 6
  Uniprot ID: P46379
  ENST ID: ENST00000442479
  CDS Start-End: 161-3541
ggggaagtcgggggcggagccgcggggtggtgggtgggtgtgtgtgtgtgtgtgtgtgtgtgtgtgtgtgtgtttggctgtgggttagttgtgccgttctgctggaacaccgtgggaaggcagtagacgcgggcagtcagctagcagagacctgtcggccatggagcctaatgatagtaccagtaccgctgtggaggagcctgacagcttggaggtgttggtgaagaccttggactctcaaactcgtacctttattgtgggggcccagatgaatgtaaaagagtttaaggagcacattgctgcctctgtcagcatcccatctgaaaaacaacggctcatttaccagggacgagttctgcaagatgataagaagcttcaggaatacaatgttgggggaaaggttatccacctggtggaacgggctcctcctcagactcacctcccttctggggcatcttctgggacggggtctgcctcagccactcatggtgggggatccccccctggtactcgggggcctggggcctctgttcatgaccggaatgccaacagctatgtcatggttggaaccttcaatcttcctagtgacggctctgctgtggatgttcacatcaacatggaacaggccccgattcagagtgagccccgggtacggctggtgatggctcagcacatgatcagggatatacagaccttactatcccggatggagtgtcgaggagggccccaaccgcagcacagtcagccgcccccgcagccaccggctgtgaccccggagccagtagccttgagctctcaaacatcagaaccagttgaaagtgaagcacctccccgggagcccatggaggcagaagaagtggaggagcgtgccccagcccagaacccggagctcactcctggcccagccccagcgggcccaacacctgccccggaaacaaatgcacccaaccatccttcccctgcggagtatgtcgaggtgctccaggagctacagcggctggagagtcgcctccagcccttcttgcagcgctactacgaggttctgggtgctgctgccaccacggactacaataacaatcacgagggccgggaggaggatcagcggttgatcaacttggtaggggagagcctgcgactgctgggcaacacctttgttgcactgtctgacctgcgctgcaatctggcctgcacgcccccacgacacctgcatgtggtccggcctatgtctcactacaccacccccatggtgctccagcaggcagccattcccatacagatcaatgtgggaaccactgtgaccatgacaggaaatgggactcggccccccccaactcccaatgcagaggcacctccccctggtcctgggcaggcctcatccgtggctccgtcttctaccaatgtcgagtcctcagctgagggggctcccccgccaggtccagctcccccgccagccaccagccacccgagggtcatccggatttcccaccagagtgtggaacccgtggtcatgatgcacatgaacattcaagattctggcacacagcctggtggtgttccgagtgctcccactggccccctgggaccccctggtcatggccaaaccctgggacagcaggtgccaggcttcccaacagctccaacccgggtggtgattgcccggcccactcctccacaggctcggccttcccatcctggagggcccccagtctctgggacactgcagggcgccggtctgggtaccaatgcctcgttggcccagatggtgagcggccttgtggggcagcttcttatgcagccagtccttgtggctcaggggaccccaggtatggctccaccgccagcccctgccactgcttctgccagtgctggcaccaccaacacagctaccacagctggccccgctcctggggggcctgcccagcctccacccacccctcaaccctccatggctgatcttcagttctctcagcttctggggaacctgctagggcctgcagggccaggggctggagggtctggtgtggcttctcccaccatcactgtggcgatgcctggtgtccctgcctttctccaaggcatgactgacttcttgcaggcaacacagacagcccctccaccacccccacctcctccacccccaccacctgccccagagcagcagaccatgcccccaccaggctccccttctggtggcgcagggagtcctggaggcctgggtcttgagagcctgtcaccggagttttttacctcagtggtgcagggtgtgctcagctccctgctgggctccctgggggctcgggctggcagcagtgaaagtattgctgccttcatacaacgcctcagtggatccagcaacatctttgagcctggagctgatggggcccttggattctttggggccttgctttctcttctgtgccagaacttctctatggtggacgtagtgatgcttctccatgggcatttccagccactacaacggctccagccccagctgcgatccttcttccaccagcactacctgggtggtcaggagcccacacccagtaacatccggatggcaacccacacattgatcacggggctagaagagtatgtgcgggagagtttttccttggtgcaggttcagccaggtgtggacatcatccggacaaacctggaatttctccaagagcagtttaatagcattgctgcgcatgtgctgcattgcacagatagtggatttggggcccggttgctggagttgtgtaaccaaggcctgtttgaatgcctggccctaaacctgcactgcttggggggacagcagatggagcttgctgctgttatcaatggccgaattcgtcgtatgtctcgtggggtgaatccctccttggtgagctggctgaccactatgatgggactgaggcttcaggtggtactggagcacatgcctgtaggccctgatgccattctcagatacgttcgcagggttggtgatcccccccagccacttcctgaggagccaatggaagttcagggagcagaaagagcttcccctgagcctcagcgggagaatgcttccccagcccctggaacaacagcagaagaggccatgtcccgaggtccacctcctgctcctgaggggggctcccgggatgaacaggatggagcttcagctgagacagaaccttgggcagctgcagtccccccagaatgggtccctattatccagcaggacattcagagccagcggaaggtgaaaccgcagccccctctgagtgatgcctacctcagtggtatgcctgccaagagacgcaagacgatgcagggtgagggcccccagctgcttctctcagaggctgtgagccgggcagctaaggcagccggagctcggcccctgacgagccccgagagcctgagccgggacctggaggcaccagaggttcaggagagctacaggcagcagctccggtctgatatacaaaaacgactgcaggaagaccccaactacagtccccagcgcttccccaatgcccagcgggcctttgctgatgatccttagctctttctttgctctatggcccttcctcatcaggggaccgtttcccccctcttccttcacagtatttaagaaataaaagtcggatttttctggctgctttctctcta

SEQ ID NO: 111174 - DNA, 783 bp, Homo sapiens; identical to SEQ ID NO: 111073
  Payload ID: 1783
  Gene Symbol: BAG6
  Gene Name: BCL2-associated athanogene 6
  ENST ID: ENST00000456804
  CDS Start-End: 1-680

SEQ ID NO: 111175 - DNA, 993 bp, Homo sapiens; identical to SEQ ID NO: 111055
  Payload ID: 1783
  Gene Symbol: BAG6
  Gene Name: BCL2-associated athanogene 6
  ENST ID: ENST00000438842
  CDS Start-End: 263-993

SEQ ID NO: 111176 - DNA, 1056 bp, Homo sapiens; identical to SEQ ID NO: 111046
  Payload ID: 1783
  Gene Symbol: BAG6
  Gene Name: BCL2-associated athanogene 6
  ENST ID: ENST00000436434
  CDS Start-End: 282-1056

SEQ ID NO: 111177 - DNA, 766 bp, Homo sapiens; identical to SEQ ID NO: 111064
  Payload ID: 1783
  Gene Symbol: BAG6
  Gene Name: BCL2-associated athanogene 6
  ENST ID: ENST00000416094
  CDS Start-End: 33-766

SEQ ID NO: 111178 - DNA, 3779 bp, Homo sapiens; identical to SEQ ID NO: 111074
  Payload ID: 1783
  Gene Symbol: BAG6
  Gene Name: BCL2-associated athanogene 6
  ENST ID: ENST00000415345
  CDS Start-End: 296-3676

SEQ ID NO: 111179 - DNA, 3751 bp, Homo sapiens; identical to SEQ ID NO: 111168
  Payload ID: 1783
  Gene Symbol: BAG6
  Gene Name: BCL2-associated athanogene 6
  ENST ID: ENST00000454478
  CDS Start-End: 250-3648

SEQ ID NO: 111180 - DNA, 880 bp, Homo sapiens; identical to SEQ ID NO: 111065
  Payload ID: 1783
  Gene Symbol: BAG6
  Gene Name: BCL2-associated athanogene 6
  ENST ID: ENST00000439612
  CDS Start-End: 93-880

SEQ ID NO: 111181 - DNA, 3644 bp, Homo sapiens
  Payload ID: 1783
  Gene Symbol: BAG6
  Gene Name: BCL2-associated athanogene 6
  ENST ID: ENST00000415373
  CDS Start-End: 161-3541
ggggaagtcgggggcggagccgcggggtggtgggtgtgtgtgtgtgtgtgtgtgtgtgtgtgtgtgtgtgtgtttggctgtgggttagttgtgccgttctgctggaacaccgtgggaaggcagtagacgcgggcagtcagctagcagagacctgtcggccatggagcctaatgatagtaccagtaccgctgtggaggagcctgacagcttggaggtgttggtgaagaccttggactctcaaactcgtacctttattgtgggggcccagatgaatgtaaaagagtttaaggagcacattgctgcctctgtcagcatcccatctgaaaaacaacggctcatttaccagggacgagttctgcaagatgataagaagcttcaggaatacaatgttgggggaaaggttatccacctggtggaacgggctcctcctcagactcacctcccttctggggcatcttctgggacggggtctgcctcagccactcatggtgggggatccccccctggtactcgggggcctggggcctctgttcatgaccggaatgccaacagctatgtcatggttggaaccttcaatcttcctagtgacggctctgctgtggatgttcacatcaacatggaacaggccccgattcagagtgagccccgggtacggctggtgatggctcagcacatgatcagggatatacagaccttactatcccggatggagtgtcgaggagggccccaaccgcagcacagtcagccgcccccgcagccaccggctgtgaccccggagccagtagccttgagctctcaaacatcagaaccagttgaaagtgaagcacctccccgggagcccatggaggcagaagaagtggaggagcgtgccccagcccagaacccggagctcactcctggcccagccccagcgggcccaacacctgccccggaaacaaatgcacccaaccatccttcccctgcggagtatgtcgaggtgctccaggagctacagcggctggagagtcgcctccagcccttcttgcagcgctactacgaggttctgggtgctgctgccaccacggactacaataacaatcacgagggccgggaggaggatcagcggttgatcaacttggtaggggagagcctgcgactgctgggcaacacctttgttgcactgtctgacctgcgctgcaatctggcctgcacgcccccacgacacctgcatgtggtccggcctatgtctcactacaccacccccatggtgctccagcaggcagccattcccatacagatcaatgtgggaaccactgtgaccatgacaggaaatgggactcggccccccccaactcccaatgcagaggcacctccccctggtcctgggcaggcctcatccgtggctccgtcttctaccaatgtcgagtcctcagctgagggggctcccccgccaggtccagctcccccgccagccaccagccacccgagggtcatccggatttcccaccagagtgtggaacccgtggtcatgatgcacatgaacattcaagattctggcacacagcctggtggtgttccgagtgctcccactggccccctgggaccccctggtcatggccaaaccctgggacagcaggtgccaggcttcccaacagctccaacccgggtggtgattgcccggcccactcctccacaggctcggccttcccatcctggagggcccccagtctctgggacactgcagggcgccggtctgggtaccaatgcctcgttggcccagatggtgagcggccttgtggggcagcttcttatgcagccagtccttgtggctcaggggaccccaggtatggctccaccgccagcccctgccactgcttctgccagtgctggcaccaccaacacagctaccacagctggccccgctcctggggggcctgcccagcctccacccacccctcaaccctccatggctgatcttcagttctctcagcttctggggaacctgctagggcctgcagggccaggggctggagggcctggtgtggcttctcccaccatcactgtggcgatgcctggtgtccctgcctttctccaaggcatgactgacttcttgcaggcaacacagacagcccctccaccacccccacctcctccacccccaccacctgccccagagcagcagaccatgcccccaccaggctccccttctggtggcgcagggagtcctggaggcctgggtcttgagagcctgtcaccggagttttttacctcagtggtgcagggtgtgctcagctccctgctgggctccctgggggctcgggctggcagcagtgaaagtattgctgccttcatacaacgcctcagtggatccagcaacatctttgagcctggagctgatggggcccttggattctttggggccttgctttctcttctgtgccagaacttctctatggtggacgtagtgatgcttctccatgggcatttccagccactacaacggctccagccccagctgcgatccttcttccaccagcactacctgggtggtcaggagcccacacccagtaacatccggatggcaacccacacattgatcacggggctagaagagtatgtgcgggagagtttttccttggtgcaggttcagccaggtgtggacatcatccggacaaacctggaatttctccaagagcagtttaatagcattgctgcgcatgtgctgcattgcacagatagtggatttggggcccggttgctggagttgtgtaaccaaggcctgtttgaatgcctggccctaaacctgcactgcttggggggacagcagatggagcttgctgctgttatcaatggccgaattcgtcgtatgtctcgtggggtgaatccctccttggtgagctggctgaccactatgatgggactgaggcttcaggtggtactggagcacatgcctgtaggccctgatgccattctcagatacgttcgcagggttggtgatcccccccagccacttcctgaggagccaatggaagttcagggagcagaaagagcttcccctgagcctcagcgggagaatgcttccccagcccctggaacaacagcagaagaggccatgtcccgaggtccacctcctgctcctgaggggggctcccgggatgaacaggatggagcttcagctgagacagaaccttgggcagctgcagtccccccagaatgggtccctattatccagcaggacattcagagccagcggaaggtgaaaccgcagccccctctgagtgatgcctacctcagtggtatgcctgccaagagacgcaagacgatgcagggtgagggcccccagctgcttctctcagaggctgtgagccgggcagctaaggcagccggagctcggcccctgacgagccccgagagcctgagccgggacctggaggcaccagaggttcaggagagctacaggcagcagctccggtctgatatacaaaaacgactgcaggaagaccccaactacagtccccagcgcttccccaatgcccagcgggcctttgctgatgatccttagctctttgctctatggcccttcctcatcaggggaccgtttcccccctcttccttcacagtatttaagaaataaaagtcggatttttctggctgctttctctcta

SEQ ID NO: 111182 - DNA, 783 bp, Homo sapiens; identical to SEQ ID NO: 111073
  Payload ID: 1783
  Gene Symbol: BAG6
  Gene Name: BCL2-associated athanogene 6
  ENST ID: ENST00000441793
  CDS Start-End: 1-680

SEQ ID NO: 111183 - DNA, 1051 bp, Homo sapiens; identical to SEQ ID NO: 111091
  Payload ID: 1783
  Gene Symbol: BAG6
  Gene Name: BCL2-associated athanogene 6
  ENST ID: ENST00000412992
  CDS Start-End: 266-1051

SEQ ID NO: 111184 - DNA, 554 bp, Homo sapiens; identical to SEQ ID NO: 111054
  Payload ID: 1783
  Gene Symbol: BAG6
  Gene Name: BCL2-associated athanogene 6
  ENST ID: ENST00000431516
  CDS Start-End: 1-554

SEQ ID NO: 111185 - DNA, 680 bp, Homo sapiens; identical to SEQ ID NO: 111056
  Payload ID: 1783
  Gene Symbol: BAG6
  Gene Name: BCL2-associated athanogene 6
  ENST ID: ENST00000457802
  CDS Start-End: 1-680

SEQ ID NO: 111186 - DNA, 3630 bp, Homo sapiens
  Payload ID: 1783
  Gene Symbol: BAG6
  Gene Name: BCL2-associated athanogene 6
  Uniprot ID: P46379
  ENST ID: ENST00000552605
  CDS Start-End: 291-3524
tggggcgatgcttaagtgtccacgcatccgtagtgcgacgcacgcaggcgtagtacggtcccccgggcgacagcggtggcggctcctcggggtgctcggctccctcccacctaggccggccccggcccgactcgccctcagaaactcactgtttggggctgcggactttctcgtcgtgccccacaaaagtaaagcttggggacctggggggagccggaagtatcgcttcgagatccccaaatactatcggggaaacggaagtggccgtcggtggcagagacctgtcggccatggagcctaatgatagtaccagtaccgctgtggaggagcctgacagcttggaggtgttggtgaagaccttggactctcaaactcgtacctttattgtgggggcccagatgaatgtaaaagagtttaaggagcacattgctgcctctgtcagcatcccatctgaaaaacaacggctcatttaccagggacgagttctgcaagatgataagaagcttcaggaatacaatgttgggggaaaggttatccacctggtggaacgggctcctcctcagactcacctcccttctggggcatcttctgggacggggtctgcctcagccactcatggtgggggatccccccctggtactcgggggcctggggcctctgttcatgaccggaatgccaacagctatgtcatggttggaaccttcaatcttcctagtgacggctctgctgtggatgttcacatcaacatggaacaggccccgattcagagtgagccccgggtacggctggtgatggctcagcacatgatcagggatatacagaccttactatcccggatggagtgtcgaggagggccccaaccgcagcacagtcagccgcccccgcagccaccggctgtgaccccggagccagtagccttgagctctcaaacatcagaaccagttgaaagtgaagcacctccccgggagcccatggaggcagaagaagtggaggagcgtgccccagcccagaacccggagctcactcctggcccagccccagcgggcccaacacctgccccggaaacaaatgcacccaaccatccttcccctgcggagtatgtcgaggtgctccaggagctacagcggctggagagtcgcctccagcccttcttgcagcgctactacgaggttctgggtgctgctgccaccacggactacaataacaatcacgagggccgggaggaggatcagcggttgatcaacttggtaggggagagcctgcgactgctgggcaacacctttgttgcactgtctgacctgcgctgcaatctggcctgcacgcccccacgacacctgcatgtggtccggcctatgtctcactacaccacccccatggtgctccagcaggcagccattcccatacagatcaatgtgggaaccactgtgaccatgacaggaaatgggactcggccccccccaactcccaatgcagaggcacctccccctggtcctgggcaggcctcatccgtggctccgtcttctaccaatgtcgagtcctcagctgagggggctcccccgccaggtccagctcccccgccagccaccagccacccgagggtcatccggatttcccaccagagtgtggaacccgtggtcatgatgcacatgaacattcaagattctggcacacagcctggtggtgttccgagtgctcccactggccccctgggaccccctggtcatggccaaaccctgggacagcaggtgccaggcttcccaacagctccaacccgggtggtgattgcccggcccactcctccacaggctcggccttcccatcctggagggcccccagtctctgggacactgcagggcgccggtctgggtaccaatgcctcgttggcccagatggtgagcggccttgtggggcagcttcttatgcagccagtccttgtggctcaggggaccccaggtatggctccaccgccagcccctgccactgcttctgccagtgctggcaccaccaacacagctaccacagctggccccgctcctggggggcctgcccagcctccacccacccctcaaccctccatggctgatcttcagttctctcagcttctggggaacctgctagggcctgcagggccaggggctggagggtctggtgtggcttctcccaccatcactgtggcgatgcctggtgtccctgcctttctccaaggcatgactgacttcttgcaggcaacacagacagcccctccaccacccccacctcctccacccccaccacctgccccagagcagcagaccatgcccccaccaggctccccttctggtggcgcagggagtcctggaggcctgggtcttgagagcctgtcaccggagttttttacctcagtggtgcagggtgtgctcagctccctgctgggctccctgggggctcgggctggcagcagtgaaagtattgctgccttcatacaacgcctcagtggatccagcaacatctttgagcctggagctgatggggcccttggattctttggggccttgctttctcttctgtgccagaacttctctatggtggacgtagtgatgcttctccatgggcatttccagccactacaacggctccagccccagctgcgatccttcttccaccagcactacctgggtggtcaggagcccacacccagtaacatccggatggcaacccacacattgatcacggggctagaagagtatgtgcgggagagtttttccttggtgcaggttcagccaggtgtggacatcatccggacaaacctggaatttctccaagagcagtttaatagcattgctgcgcatgtgctgcattgcacagatagtggatttggggcccggttgctggagttgtgtaaccaaggcctgtttgaatgcctggccctaaacctgcactgcttggggggacagcagatggagcttgctgctgttatcaatggccgaattcgtcgtatgtctcgtggggtgaatccctccttggtgagctggctgaccactatgatgggactgaggcttcaggtggtactggagcacatgcctgtaggccctgatgccattctcagatacgttcgcagggttggtgatcccccccagccacttcctgaggagccaatggaagttcagggagcagaaagagcttcccctgagcctcagcgggagaatgcttccccagcccctggaacaacagcagaagaggccatgtcccgaggtccacctcctgctcctgaggggggctcccgggatgaacaggatggagcttcagctgagacagaaccttgggcagctgcagtccccccagaatgggtccctattatccagcaggacattcagagccagcggaaggtgaaaccgcagccccctctgagtgatgcctacctcagtggtatgcctgccaagagacgcaagctccggtctgatatacaaaaacgactgcaggaagaccccaactacagtccccagcgcttccccaatgcccagcgggcctttgctgatgatccttagctctttctttgctctatggcccttcctcatcaggggaccgtttcccccctcttccttcacagtatttaagaaataaaagtcggatttttctggctgctttctctct

SEQ ID NO: 111187 - DNA, 3630 bp, Homo sapiens; identical to SEQ ID NO: 111186
  Payload ID: 1783
  Gene Symbol: BAG6
  Gene Name: BCL2-associated athanogene 6
  Uniprot ID: P46379
  ENST ID: ENST00000551350
  CDS Start-End: 291-3524

SEQ ID NO: 111188 - DNA, 3630 bp, Homo sapiens; identical to SEQ ID NO: 111186
  Payload ID: 1783
  Gene Symbol: BAG6
  Gene Name: BCL2-associated athanogene 6
  Uniprot ID: P46379
  ENST ID: ENST00000552116
  CDS Start-End: 291-3524

SEQ ID NO: 111189 - DNA, 3626 bp, Homo sapiens
  Payload ID: 1783
  Gene Symbol: BAG6
  Gene Name: BCL2-associated athanogene 6
  ENST ID: ENST00000546462
  CDS Start-End: 291-3524
tggggcgatgcttaagtgtccacgcatccgtagtgcgacgcacgcaggcgtagtacggtcccccgggcgacagcggtggcggctcctcggggtgctcggctccctcccacctaggccggccccggcccgactcgccctcagaaactcactgtttggggctgcggactttctcgtcgtgccccacaaaagtaaagcttggggacctggggggagccggaagtatcgcttcgagatccccaaatactatcggggaaacggaagtggccgtcggtggcagagacctgtcggccatggagcctaatgatagtaccagtaccgctgtggaggagcctgacagcttggaggtgttggtgaagaccttggactctcaaactcgtacctttattgtgggggcccagatgaatgtaaaagagtttaaggagcacattgctgcctctgtcagcatcccatctgaaaaacaacggctcatttaccagggacgagttctgcaagatgataagaagcttcaggaatacaatgttgggggaaaggttatccacctggtggaacgggctcctcctcagactcacctcccttctggggcatcttctgggacggggtctgcctcagccactcatggtgggggatccccccctggtactcgggggcctggggcctctgttcatgaccggaatgccaacagctatgtcatggttggaaccttcaatcttcctagtgacggctctgctgtggatgttcacatcaacatggaacaggccccgattcagagtgagccccgggtacggctggtgatggctcagcacatgatcagggatatacagaccttactatcccggatggagtgtcgaggagggccccaaccgcagcacagtcagccgcccccgcagccaccggctgtgaccccggagccagtagccttgagctctcaaacatcagaaccagttgaaagtgaagcacctccccgggagcccatggaggcagaagaagtggaggagcgtgccccagcccagaacccggagctcactcctggcccagccccagcgggcccaacacctgccccggaaacaaatgcacccaaccatccttcccctgcggagtatgtcgaggtgctccaggagctacagcggctggagagtcgcctccagcccttcttgcagcgctactacgaggttctgggtgctgctgccaccacggactacaataacaatcacgagggccgggaggaggatcagcggttgatcaacttggtaggggagagcctgcgactgctgggcaacacctttgttgcactgtctgacctgcgctgcaatctggcctgcacgcccccacgacacctgcatgtggtccggcctatgtctcactacaccacccccatggtgctccagcaggcagccattcccatacagatcaatgtgggaaccactgtgaccatgacaggaaatgggactcggccccccccaactcccaatgcagaggcacctccccctggtcctgggcaggcctcatccgtggctccgtcttctaccaatgtcgagtcctcagctgagggggctcccccgccaggtccagctcccccgccagccaccagccacccgagggtcatccggatttcccaccagagtgtggaacccgtggtcatgatgcacatgaacattcaagattctggcacacagcctggtggtgttccgagtgctcccactggccccctgggaccccctggtcatggccaaaccctgggacagcaggtgccaggcttcccaacagctccaacccgggtggtgattgcccggcccactcctccacaggctcggccttcccatcctggagggcccccagtctctgggacactgcagggcgccggtctgggtaccaatgcctcgttggcccagatggtgagcggccttgtggggcagcttcttatgcagccagtccttgtggctcaggggaccccaggtatggctccaccgccagcccctgccactgcttctgccagtgctggcaccaccaacacagctaccacagctggccccgctcctggggggcctgcccagcctccacccacccctcaaccctccatggctgatcttcagttctctcagcttctggggaacctgctagggcctgcagggccaggggctggagggcctggtgtggcttctcccaccatcactgtggcgatgcctggtgtccctgcctttctccaaggcatgactgacttcttgcaggcaacacagacagcccctccaccacccccacctcctccacccccaccacctgccccagagcagcagaccatgcccccaccaggctccccttctggtggcgcagggagtcctggaggcctgggtcttgagagcctgtcaccggagttttttacctcagtggtgcagggtgtgctcagctccctgctgggctccctgggggctcgggctggcagcagtgaaagtattgctgccttcatacaacgcctcagtggatccagcaacatctttgagcctggagctgatggggcccttggattctttggggccttgctttctcttctgtgccagaacttctctatggtggacgtagtgatgcttctccatgggcatttccagccactacaacggctccagccccagctgcgatccttcttccaccagcactacctgggtggtcaggagcccacacccagtaacatccggatggcaacccacacattgatcacggggctagaagagtatgtgcgggagagtttttccttggtgcaggttcagccaggtgtggacatcatccggacaaacctggaatttctccaagagcagtttaatagcattgctgcgcatgtgctgcattgcacagatagtggatttggggcccggttgctggagttgtgtaaccaaggcctgtttgaatgcctggccctaaacctgcactgcttggggggacagcagatggagcttgctgctgttatcaatggccgaattcgtcgtatgtctcgtggggtgaatccctccttggtgagctggctgaccactatgatgggactgaggcttcaggtggtactggagcacatgcctgtaggccctgatgccattctcagatacgttcgcagggttggtgatcccccccagccacttcctgaggagccaatggaagttcagggagcagaaagagcttcccctgagcctcagcgggagaatgcttccccagcccctggaacaacagcagaagaggccatgtcccgaggtccacctcctgctcctgaggggggctcccgggatgaacaggatggagcttcagctgagacagaaccttgggcagctgcagtccccccagaatgggtccctattatccagcaggacattcagagccagcggaaggtgaaaccgcagccccctctgagtgatgcctacctcagtggtatgcctgccaagagacgcaagctccggtctgatatacaaaaacgactgcaggaagaccccaactacagtccccagcgcttccccaatgcccagcgggcctttgctgatgatccttagctctttgctctatggcccttcctcatcaggggaccgtttcccccctcttccttcacagtatttaagaaataaaagtcggatttttctggctgctttctctct

SEQ ID NO: 111190 - DNA, 3626 bp, Homo sapiens; identical to SEQ ID NO: 111189
  Payload ID: 1783
  Gene Symbol: BAG6
  Gene Name: BCL2-associated athanogene 6
  ENST ID: ENST00000552467
  CDS Start-End: 291-3524

SEQ ID NO: 111191 - DNA, 3626 bp, Homo sapiens; identical to SEQ ID NO: 111189
  Payload ID: 1783
  Gene Symbol: BAG6
  Gene Name: BCL2-associated athanogene 6
  ENST ID: ENST00000550393
  CDS Start-End: 291-3524

SEQ ID NO: 111192 - DNA, 3104 bp, Homo sapiens; identical to SEQ ID NO: 111107
  Payload ID: 1783
  Gene Symbol: BAG6
  Gene Name: BCL2-associated athanogene 6
  Uniprot ID: P46379
  ENST ID: ENST00000621056
  CDS Start-End: 291-3002

SEQ ID NO: 111193 - DNA, 3104 bp, Homo sapiens; identical to SEQ ID NO: 111107
  Payload ID: 1783
  Gene Symbol: BAG6
  Gene Name: BCL2-associated athanogene 6
  Uniprot ID: P46379
  ENST ID: ENST00000615224
  CDS Start-End: 291-3002

SEQ ID NO: 111194 - DNA, 3104 bp, Homo sapiens; identical to SEQ ID NO: 111107
  Payload ID: 1783
  Gene Symbol: BAG6
  Gene Name: BCL2-associated athanogene 6
  Uniprot ID: P46379
  ENST ID: ENST00000613474
  CDS Start-End: 291-3002

SEQ ID NO: 111195 - DNA, 3108 bp, Homo sapiens
  Payload ID: 1783
  Gene Symbol: BAG6
  Gene Name: BCL2-associated athanogene 6
  Uniprot ID: P46379
  ENST ID: ENST00000615725
  CDS Start-End: 291-3002
tggggcgatgcttaagtgtccacgcatccgtagtgcgacgcacgcaggcgtagtacggtcccccgggcgacagcggtggcggctcctcggggtgctcggctccctcccacctaggccggccccggcccgactcgccctcagaaactcactgtttggggctgcggactttctcgtcgtgccccacaaaagtaaagcttggggacctggggggagccggaagtatcgcttcgagatccccaaatactatcggggaaacggaagtggccgtcggtggcagagacctgtcggccatggagcctaatgatagtaccagtaccgctgtggaggagcctgacagcttggaggtgttggtgaagaccttggactctcaaactcgtacctttattgtgggggcccagatgaatgtaaaagagtttaaggagcacattgctgcctctgtcagcatcccatctgaaaaacaacggctcatttaccagggacgagttctgcaagatgataagaagcttcaggaatacaatgttgggggaaaggttatccacctggtggaacgggctcctcctcagactcacctcccttctggggcatcttctgggacggggtctgcctcagccactcatggtgggggatccccccctggtactcgggggcctggggcctctgttcatgaccggaatgccaacagctatgtcatggttggaaccttcaatcttcctagtgacggctctgctgtggatgttcacatcaacatggaacaggccccgattcagagtgagccccgggtacggctggtgatggctcagcacatgatcagggatatacagaccttactatcccggatggagtgtcgaggagggccccaaccgcagcacagtcagccgcccccgcagccaccggctgtgaccccggagccagtagccttgagctctcaaacatcagaaccagttgaaagtgaagcacctccccgggagcccatggaggcagaagaagtggaggagcgtgccccagcccagaacccggagctcactcctggcccagccccagcgggcccaacacctgccccggaaacaaatgcacccaaccatccttcccctgcggagtatgtcgaggtgctccaggagctacagcggctggagagtcgcctccagcccttcttgcagcgctactacgaggttctgggtgctgctgccaccacggactacaataacaatcacgagggccgggaggaggatcagcggttgatcaacttggtaggggagagcctgcgactgctgggcaacacctttgttgcactgtctgacctgcgctgcaatctggcctgcacgcccccacgacacctgcatgtggtccggcctatgtctcactacaccacccccatggtgctccagcaggcagccattcccatacagatcaatgtgggaaccactgtgaccatgacaggaaatgggactcggccccccccaactcccaatgcagaggcacctccccctggtcctgggcaggcctcatccgtggctccgtcttctaccaatgtcgagtcctcagctgagggggctcccccgccaggtccagctcccccgccagccaccagccacccgagggtcatccggatttcccaccagagtgtggaacccgtggtcatgatgcacatgaacattcaagattctggcacacagcctggtggtgttccgagtgctcccactggccccctgggaccccctggtcatggccaaaccctgggacagcaggtgccaggcttcccaacagctccaacccgggtggtgattgcccggcccactcctccacaggctcggccttcccatcctggagggcccccagtctctgggacactgggcgccggtctgggtaccaatgcctcgttggcccagatggtgagcggccttgtggggcagcttcttatgcagccagtccttgtggctcaggggaccccagggagtcctggaggcctgggtcttgagagcctgtcaccggagttttttacctcagtggtgcagggtgtgctcagctccctgctgggctccctgggggctcgggctggcagcagtgaaagtattgctgccttcatacaacgcctcagtggatccagcaacatctttgagcctggagctgatggggcccttggattctttggggccttgctttctcttctgtgccagaacttctctatggtggacgtagtgatgcttctccatgggcatttccagccactacaacggctccagccccagctgcgatccttcttccaccagcactacctgggtggtcaggagcccacacccagtaacatccggatggcaacccacacattgatcacggggctagaagagtatgtgcgggagagtttttccttggtgcaggttcagccaggtgtggacatcatccggacaaacctggaatttctccaagagcagtttaatagcattgctgcgcatgtgctgcattgcacagatagtggatttggggcccggttgctggagttgtgtaaccaaggcctgtttgaatgcctggccctaaacctgcactgcttggggggacagcagatggagcttgctgctgttatcaatggccgaattcgtcgtatgtctcgtggggtgaatccctccttggtgagctggctgaccactatgatgggactgaggcttcaggtggtactggagcacatgcctgtaggccctgatgccattctcagatacgttcgcagggttggtgatcccccccagccacttcctgaggagccaatggaagttcagggagcagaaagagcttcccctgagcctcaggaatgggtccctattatccagcaggacattcagagccagcggaaggtgaaaccgcagccccctctgagtgatgcctacctcagtggtatgcctgccaagagacgcaagctccggtctgatatacaaaaacgactgcaggaagaccccaactacagtccccagcgcttccccaatgcccagcgggcctttgctgatgatccttagctctttctttgctctatggcccttcctcatcaggggaccgtttcccccctcttccttcacagtatttaagaaataaaagtcggatttttctggctgctttctctct

SEQ ID NO: 111196 - DNA, 3108 bp, Homo sapiens; identical to SEQ ID NO: 111195
  Payload ID: 1783
  Gene Symbol: BAG6
  Gene Name: BCL2-associated athanogene 6
  Uniprot ID: P46379
  ENST ID: ENST00000615143
  CDS Start-End: 291-3002

SEQ ID NO: 111197 - DNA, 3108 bp, Homo sapiens; identical to SEQ ID NO: 111195
  Payload ID: 1783
  Gene Symbol: BAG6
  Gene Name: BCL2-associated athanogene 6
  Uniprot ID: P46379
  ENST ID: ENST00000617635
  CDS Start-End: 291-3002

SEQ ID NO: 111198 - DNA, 7110 bp, Homo sapiens
  Payload ID: 1784
  Gene Symbol: BCLAF1
  Gene Name: BCL2-associated transcription factor 1
  Uniprot ID: Q9NYF8
  ENST ID: ENST00000353331
  CDS Start-End: 254-2863
gccccagatcggaagtgacggagacgtgctagcgcgtcgaaggtagctctatggttttcctcgcgttcttgagtcgggaaatggccgctgtgtggttgcaacggagataaattcccggaaccgcgattcggcgtgtcaggaattcgaatttagagtttaatttctcagagcattctctccaggaagaatttttacagtatctcaaagacttcacttgacttcttgatcctgcataaaaccaaggagaaaagaaatgggtcgctccaattctagatcacattcttcaaggtcaaagtctagatcacagtctagttctcgatcaagatcaagatctcattctagaaagaagcgatacaggtctcgttccagaacatattcaaggtctcgtagtagagatcgtatgtattctagagattatcgtcgcgattacagaaataatagaggaatgagacgaccttatgggtacagaggaaggggtagagggtattatcaaggaggaggaggtagatatcatcgaggtggttatagacctgtctggaatagaaggcactctaggagtcctagacgaggtcgttcacgttccaggagtccaaaaagaagatccgtttcttctcaaagatccagaagcagatctcgccggtcatatagatcttctaggtctccaagatcatcctcttctcgttcttcatccccatatagcaaatctcctgtttctaaaagacgagggtctcaggaaaaacaaaccaaaaaagctgaaggggaaccccaagaagagagtccgttgaaaagtaaatcacaggaggaaccgaaagatacatttgaacatgacccatctgagtctatcgatgaatttaataagtcatcagccacatccggtgatatttggcctggcctttcagcttatgataatagtcctagatcaccccatagtccttcacctattgctacaccacctagtcagagttcatcttgctctgatgctcccatgctcagtacagttcactctgcaaaaaatactccttctcagcattcacattccattcagcatagtcctgaaaggtctgggtctggttctgttggaaatggatctagtcgatacagtccttctcagaatagtccaattcatcacatcccttcacgaagaagtcctgcaaagacaatcgcaccacagaatgctccaagagatgagtctaggggccgttcctcgttttatcctgatggtggagatcaggaaactgcaaagactgggaagttcttaaaaaggttcacagatgaagagtctagagtattcctgcttgataggggtaataccagggataaagaggcttcaaaagagaaaggatcagagaaagggagggcagagggagaatgggaagatcaggaagctctagattacttcagtgataaagagtctggaaaacaaaagtttaatgattcagaaggggatgacacagaggagacagaggattatagacagttcaggaagtcagtcctcgcagatcagggtaaaagttttgctactgcatctcaccggaatactgaggaggaaggactcaagtacaagtccaaagtttcactgaaaggcaatagagaaagtgatggatttagagaagaaaaaaattataaacttaaagagactggatatgtagtggaaaggcctagcactacaaaagataagcacaaagaagaagacaaaaattctgaaagaataacagtaaagaaagaaactcagtcacctgagcaggtaaagtctgaaaagctcaaagacctctttgattacagtccccctctacacaagaatctggatgcacgagaaaagtctaccttcagagaggaaagcccacttaggatcaaaatgatagcgagtgattctcaccgtcctgaagtcaaactcaaaatggcacctgttcctcttgatgattctaacagacctgcttccttgactaaagacaggctgcttgctagtacacttgtccattctgtcaagaaggagcaagaattccgatccatctttgaccacattaagttgccacaggccagcaaaagcacttcagagtcatttattcaacacattgtgtccttggttcatcatgttaaagagcaatacttcaagtcagctgcaatgaccctaaacgagcggttcacttcgtatcagaaagccactgaagaacatagtactcggcaaaagagccctgaaatacacaggagaattgacatctcaccaagtaccctgaggaagcatacccgtttagcaggggaagagagagtttttaaagaagaaaatcaaaagggagataaaaaattaaggtgtgactctgctgaccttcggcatgacattgatcgccgtagaaaagaaagaagtaaagaacggggagattccaagggctccagggaatccagtggatcaagaaagcaggaaaaaactccaaaagattacaaggaatacaaatcttacaaagatgacagtaaacataaaagagagcaagatcattctcgatcttcatcctcttcagcatcaccttcttctcccagttctcgagaagaaaaggagagtaagaaggaaagagaagaagaatttaaaactcaccatgaaatgaaagaatactcaggctttgcaggagttagccgaccacgaggaacctttcatgacgacagagatgatggtgtggattattgggccaaaagaggaagaggtcgtggtacttttcaacgtggcagagggcgctttaacttcaaaaaatcaggtagcagtcctaaatggactcatgacaaataccaaggggatgggattgttgaagatgaagaagagaccatggaaaataatgaagaaaagaaggacagacgcaaggaagaaaaggaataataaatatgaagtaagattacaacagagcagaacttgcacccaccattttttttacctgatttttgttttcaaataagaatgtaagcattttacttaaattttactgtttgcaagtagtctatagaaattttgttttaagtcttcaaatatcttgagaaatagtagactgtatgttgaaaattgtactgaaataaagtagaaaattgttacgtaccatatttgtaactatcaacttttaaaacttttaacgtttttgttacatgcattgtaattctgctttgtctataagatatggtcaagtacagctctgtgaaagttctgattctcttccttccctgtttgtcaatgttttattctgaagtaaacgttagctctacatataaatcctggaacagaaattgtttatagagactacactaattattttaactgtatacatctgtttaatttgaacacactacatcgtagggtgactgatttttgaagtataccacagacaaaaagttgttactatggtaaactaagctagtttaacacttgagcaaatgcttaagaaggaattaaaaaaaaaaagctttgccaatagctaaaaagtacaagctattaaaaatcagattgaaaagttttgagaaaatgttatttttactgaaagcaagcagtggcctataaagaacattcttaggagccttttctatttgcgttcaaaactgtgtgttctctttctattcctatttgatagtttgagtcatggtcttagatattagctatttgtgagaggaaactggtttgtaacaatactgcaaatagaaaccccatttctactgaacatcctagttttaaacagaagaaaaactgtaatcctggggttggtatgtaggaggtctatcctgcagaataagttgatacattagtacctgatttcatatcttacatatttatttgagctgaacattagtttgtagtgtaactattagtaaaaatagagaaacacagcatactgttcattaatagtattttaaaaaaattgtttttcaaatgtcaccaataaaagttttggcaggaagcttgttgcggcattgatctaacctttttcccccccatttcagttgcagtttttgtagaatggctttttctttttcctcttaagagttctattcttcaggtagataatttttcaaatgtgaattatcttttgtgtctatattgatagctcttaaaggagtgaaaatctaaaatagtaaatttcaatgttaagtgtctgctttatgggcatatataaaagtagacacatttcatttgttaatttagttgtgtgtgtgtgttaaaaggagctaatgcttattctgttaatgtaaacttttgaagatcttaagtgtattgctctttcatcttaaacactttcgaggatttgcagtgcgtctagcacctagattacagccaggaacattggttaagaactgttggaaacaaaactaaaagcaaactcaacatatgtgatgtttatggccctcagatccttagtattgtgtgattttcccccgttaacatgtctttctaaaattgtctattaaagcagaggaaatacctgccaaaggaagtatgtattgcattaatcagggcataactaatattctcctgttcagaataatacttatttacgtgtgaaagcaacatggatgtgattcccaacacagaattttcatgacccttttattgtatacaaataaataccataacagttacttggttagacatcaaatctgtgtgcatgactatgtgcttatccacttaagacaataggtaaaaggggatctgagaaattatgtaatagggagtgggaataaaactacttaattcctgtgggcaggttatattttaagttcaaatgcattgctttaacctttggttacttttattctgttaaacagaattgaagaaagagtattataccagagtgtagtaggctagggtgattgtaagaactctgtaatagaatgtcattgtggatgttacctttttcagatccaagcatataaaaagcctgtatattttttaaaaacacatcttaactccacgctttacgatattataaaagttgaatggttcctcttggtaaggatatttgcttacaagtgctaggaaataactcactgatacctgcgttaacatactttgttttgcctagagaggggcaataaaaatgaaccaaaggatatttccagaaaggattaagaaagctgtttaagaaggccatgactctttaggtgtgtatgtgtacctttcagcatcctaggaatttttatactaaaagcaaaatgttttttccagttagtcttcttcaaggaattactattgttccttttgtcacaggtaaaatcagtgttgggaattataatttgagaaaaatattacccagtaacattgaatgtagatggctaaacgattcttactcagtgtgatgtataatgatgcaacagggacccttgtaaattgtcatacgccaataaaatgtcacaagtaataactgctgttgtttgtttacctgtgtctatttcacacatcttatttctgtggcctattttagaatatcagcgcatctgttaggaagattactggtgtggtaaggcttgataaatgctttataaactccctcaaacctttctttactgtttttttgttttgtcttgtttttgtttttgtttttgtttttgtttttgtttttgtttttcccttgtctcccctgggaaaatgggaaattttacagttggtaaatctaagccaaaattattttgaaataaaggaattctggatgtccagtttagtcctcgttttcttacgttaatctgggaccttatcacccataatatggtgattacttctctttctaaaaacatagtagctagtaaataagtaaaaagaattgtcttttcattcactttaagtaagatgtggtataattcttaccatgtgccatcctgtcagttttaacaaagcattttcacagaaatttgtgtactaagacaaactgacacattttgactcatacaaatggcaaattagtccttaaaaattctgtgagagaaataactctgtgtgtacatacatatgcatgtaaagtgttgtgtaagatcattggtagcttaattatactggataattgtaatgttatatacaaatttcttatataaaagtatgctgcattattaacatttgtttaacttttcttatttttctttttctgggtttcaactggaatcccattggtggggatgtaccttaagtttccttgtggaataatagactttcacatccagaaagagaagttcagaggcctttctcaatttacagagttgaagaggaaaggcaaatggaggaataaacttcattgtcattgggattaatttggctagactcaatctcttgagccttaaaatgagaaagtaatatccattacatgtttagagttctcaaatagttgatactattattaaatgtttcaaattttattggggtagatactaaaaattagtacactgtcctaatgaagtttaaatgaacaagttttacatttcttaggattcaggaatatatggaatctagttgtatttaattgacttgagagccacagagattgtgttgatttatgagctggactcctattgttttagaaacatgcagtaatgattaacttgtgtcaatgatggtaatgagaccaaacttgtacatttaattaagggtaccagttctttttatgttactagactataccttggcctttaaaaatgaatctcactgattaaagagaacaggcattattaggatagcattccaccacaactagaaacattcaaataatgtgtcttaattgtaatctgtatataggaaaatttttcctatggatatttttggtgttttaccacagtgaactgatttgtagcacttatgaagtgcagaaggtaatattcttgaaaatagaaaaaggttgggtgagcaggctttaatgcctttcccccaagaatatacatcgaatttttcttaatcttttggggttggccagcttccagatttcattaataatgagctctgcctttaataaaagtacatgatcatagctacactgtatgtttaggtggtgtgaaatgatttataatcacagcttgaactgtgtttgcttggtactgtcatagtgattacaaatttcatggaatgcgaagagcaacaataaataaaaaataccactcaccctc

SEQ ID NO: 111199 - DNA, 2610 bp, Homo sapiens
  Payload ID: 1784
  Gene Symbol: BCLAF1
  Gene Name: BCL2-associated transcription factor 1
  Uniprot ID: Q9NYF8
  ENST ID: ENST00000392348
  CDS Start-End: 1-2610
atgggtcgctccaattctagatcacattcttcaaggtcaaagtctagatcacagtctagttctcgatcaagatcaagatctcattctagaaagaagcgatacaggtctcgttccagaacatattcaaggtctcgtagtagagatcgtatgtattctagagattatcgtcgcgattacagaaataatagaggaatgagacgaccttatgggtacagaggaaggggtagagggtattatcaaggaggaggaggtagatatcatcgaggtggttatagacctgtctggaatagaaggcactctaggagtcctagacgaggtcgttcacgttccaggagtccaaaaagaagatccgtttcttctcaaagatccagaagcagatctcgccggtcatatagatcttctaggtctccaagatcatcctcttctcgttcttcatccccatatagcaaatctcctgtttctaaaagacgagggtctcaggaaaaacaaaccaaaaaagctgaaggggaaccccaagaagagagtccgttgaaaagtaaatcacaggaggaaccgaaagatacatttgaacatgacccatctgagtctatcgatgaatttaataagtcatcagccacatccggtgatatttggcctggcctttcagcttatgataatagtcctagatcaccccatagtccttcacctattgctacaccacctagtcagagttcatcttgctctgatgctcccatgctcagtacagttcactctgcaaaaaatactccttctcagcattcacattccattcagcatagtcctgaaaggtctgggtctggttctgttggaaatggatctagtcgatacagtccttctcagaatagtccaattcatcacatcccttcacgaagaagtcctgcaaagacaatcgcaccacagaatgctccaagagatgagtctaggggccgttcctcgttttatcctgatggtggagatcaggaaactgcaaagactgggaagttcttaaaaaggttcacagatgaagagtctagagtattcctgcttgataggggtaataccagggataaagaggcttcaaaagagaaaggatcagagaaagggagggcagagggagaatgggaagatcaggaagctctagattacttcagtgataaagagtctggaaaacaaaagtttaatgattcagaaggggatgacacagaggagacagaggattatagacagttcaggaagtcagtcctcgcagatcagggtaaaagttttgctactgcatctcaccggaatactgaggaggaaggactcaagtacaagtccaaagtttcactgaaaggcaatagagaaagtgatggatttagagaagaaaaaaattataaacttaaagagactggatatgtagtggaaaggcctagcactacaaaagataagcacaaagaagaagacaaaaattctgaaagaataacagtaaagaaagaaactcagtcacctgagcaggtaaagtctgaaaagctcaaagacctctttgattacagtccccctctacacaagaatctggatgcacgagaaaagtctaccttcagagaggaaagcccacttaggatcaaaatgatagcgagtgattctcaccgtcctgaagtcaaactcaaaatggcacctgttcctcttgatgattctaacagacctgcttccttgactaaagacaggctgcttgctagtacacttgtccattctgtcaagaaggagcaagaattccgatccatctttgaccacattaagttgccacaggccagcaaaagcacttcagagtcatttattcaacacattgtgtccttggttcatcatgttaaagagcaatacttcaagtcagctgcaatgaccctaaacgagcggttcacttcgtatcagaaagccactgaagaacatagtactcggcaaaagagccctgaaatacacaggagaattgacatctcaccaagtaccctgaggaagcatacccgtttagcaggggaagagagagtttttaaagaagaaaatcaaaagggagataaaaaattaaggtgtgactctgctgaccttcggcatgacattgatcgccgtagaaaagaaagaagtaaagaacggggagattccaagggctccagggaatccagtggatcaagaaagcaggaaaaaactccaaaagattacaaggaatacaaatcttacaaagatgacagtaaacataaaagagagcaagatcattctcgatcttcatcctcttcagcatcaccttcttctcccagttctcgagaagaaaaggagagtaagaaggaaagagaagaagaatttaaaactcaccatgaaatgaaagaatactcaggctttgcaggagttagccgaccacgaggaacctttcatgacgacagagatgatggtgtggattattgggccaaaagaggaagaggtcgtggtacttttcaacgtggcagagggcgctttaacttcaaaaaatcaggtagcagtcctaaatggactcatgacaaataccaaggggatgggattgttgaagatgaagaagagaccatggaaaataatgaagaaaagaaggacagacgcaaggaagaaaaggaataa

SEQ ID NO: 111200 - DNA, 2423 bp, Homo sapiens
  Payload ID: 1784
  Gene Symbol: BCLAF1
  Gene Name: BCL2-associated transcription factor 1
  ENST ID: ENST00000529826
  CDS Start-End: 247-2423
atcggaagtgacggagacgtgctagcgcgtcgaaggtagctctatggttttcctcgcgttcttgagtcgggaaatggccgctgtgtggttgcaacggagataaattcccggaaccgcgattcggcgtgtcaggaattcgaatttagagtttaatttctcagagcattctctccaggaagaatttttacagtatctcaaagacttcacttgacttcttgatcctgcataaaaccaaggagaaaagaaatgggtcgctccaattctagatcacattcttcaaggtcaaagtctagatcacagtctagttctcgatcaagatcaagatctcattctagaaagaagcgatacagttctaggtctcgttccagaacatattcaaggtctcgtagtagagatcgtatgtattctagagattatcgtcgcgattacagaaataatagaggaatgagacgaccttatgggtacagaggaaggggtagagggtattatcaaggaggaggaggtagatatcatcgaggtggttatagacctgtctggaatagaaggcactctaggagtcctagacgaggtcgttcacgttccaggagtccaaaaagaagatccgtttcttctcaaagatccagaagcagatctcgccggtcatatagatcttctaggtctccaagatcatcctcttctcgttcttcatccccatatagcaaatctcctgtttctaaaagacgagggtctcaggaaaaacaaaccaaaaaagctgaaggggaaccccaagaagagagtccgttgaaaagtaaatcacaggaggaaccgaaagatacatttgaacatgacccatctgagtctatcgatgaatttaataagtcatcagccacatccggtgatatttggcctggcctttcagcttatgataatagtcctagatcaccccatagtccttcacctattgctacaccacctagtcagagttcatcttgctctgatgctcccatgctcagtacagttcactctgcaaaaaatactccttctcagcattcacattccattcagcatagtcctgaaaggtctgggtctggttctgttggaaatggatctagtcgatacagtccttctcagaatagtccaattcatcacatcccttcacgaagaagtcctgcaaagacaatcgcaccacagaatgctccaagagatgagtctaggggccgttcctcgttttatcctgatggtggagatcaggaaactgcaaagactgggaagttcttaaaaaggttcacagatgaagagtctagagtattcctgcttgataggggtaataccagggataaagaggcttcaaaagagaaaggatcagagaaagggagggcagagggagaatgggaagatcaggaagctctagattacttcagtgataaagagtctggaaaacaaaagtttaatgattcagaaggggatgacacagaggagacagaggattatagacagttcaggaagtcagtcctcgcagatcagggtaaaagttttgctactgcatctcaccggaatactgaggaggaaggactcaagtacaagtccaaagtttcactgaaaggcaatagagaaagtgatggatttagagaagaaaaaaattataaacttaaagagactggatatgtagtggaaaggcctagcactacaaaagataagcacaaagaagaagacaaaaattctgaaagaataacagtaaagaaagaaactcagtcacctgagcaggtaaagtctgaaaagctcaaagacctctttgattacagtccccctctacacaagaatctggatgcacgagaaaagtctaccttcagagaggaaagcccacttaggatcaaaatgatagcgagtgattctcaccgtcctgaagtcaaactcaaaatggcacctgttcctcttgatgattctaacagacctgcttccttgactaaagacaggctgcttgctagtacacttgtccattctgtcaagaaggagcaagaattccgatccatctttgaccacattaagttgccacaggccagcaaaagcacttcagagtcatttattcaacacattgtgtccttggttcatcatgttaaagagcaatacttcaagtcagctgcaatgaccctaaacgagcggttcacttcgtatcagaaagccactgaagaacatagtactcggcaaaagagccctgaaatacacagaattgacatctcaccaagtaccctgaggaagcatacccgtttagcaggggaagagagagtttttaaagaagaaaatcaaaagggagataaaaaattaaggtgtgactctgctgaccttcggcatgacattgatcgccgtagaaaagaaagaagtaaagaacggggagattccaagggctccagggaatccagtggatcaagaaagcaggaaaaaactcc

SEQ ID NO: 111201 - DNA, 3237 bp, Homo sapiens
  Payload ID: 1784
  Gene Symbol: BCLAF1
  Gene Name: BCL2-associated transcription factor 1
  ENST ID: ENST00000532384
  CDS Start-End: 244-2502
ggaagtgacggagacgtgctagcgcgtcgaaggtagctctatggttttcctcgcgttcttgagtcgggaaatggccgctgtgtggttgcaacggagataaattcccggaaccgcgattcggcgtgtcaggaattcgaatttagagtttaatttctcagagcattctctccaggaagaatttttacagtatctcaaagacttcacttgacttcttgatcctgcataaaaccaaggagaaaagaaatgggtcgctccaattctagatcacattcttcaaggtcaaagtctagatcacagtctagttctcgatcaagatcaagatctcattctagaaagaagcgatacagttctaggtctcgttccagaacatattcaaggtctcgtagtagagatcgtatgtattctagagattatcgtcgcgattacagaaataatagaggaatgagacgaccttatgggtacagaggaaggggtagagggtattatcaaggaggaggaggtagatatcatcgaggtggttatagacctgtctggaatagaaggcactctaggagtcctagacgaggtcgttcacgttccaggagtccaaaaagaagatccgtttcttctcaaagatccagaagcagatctcgccggtcatatagatcttctaggtctccaagatcatcctcttctcgttcttcatccccatatagcaaatctcctgtttctaaaagacgagggtctcaggaaaaacaaaccaaaaaagctgaaggggaaccccaagaagagagtccgttgaaaagtaaatcacaggaggaaccgaaagatacatttgaacatgacccatctgagtctatcgatgaatttaataagtcatcagccacatccggtgatatttggcctggcctttcagcttatgataatagtcctagatcaccccatagtccttcacctattgctacaccacctagtcagagttcatcttgctctgatgctcccatgctcagtacagttcactctgcaaaaaatactccttctcagcattcacattccattcagcatagtcctgaaaggtctgggtctggttctgttggaaatggatctagtcgatacagtccttctcagaatagtccaattcatcacatcccttcacgaagaagtcctgcaaagacaatcgcaccacagaatgctccaagagatgagtctaggggccgttcctcgttttatcctgatggtggagatcaggaaactgcaaagactgggaagttcttaaaaaggttcacagatgaagagtctagagtattcctgcttgataggggtaataccagggataaagaggcttcaaaagagaaaggatcagagaaagggagggcagagggagaatgggaagatcaggaagctctagattacttcagtgataaagagtctggaaaacaaaagtttaatgattcagaaggggatgacacagaggagacagaggattatagacagttcaggaagtcagtcctcgcagatcagggtaaaagttttgctactgcatctcaccggaatactgaggaggaaggactcaagtacaagtccaaagtttcactgaaaggcaatagagaaagtgatggatttagagaagaaaaaaattataaacttaaagagactggatatgtagtggaaaggcctagcactacaaaagataagcacaaagaagaagacaaaaattctgaaagaataacagtaaagaaagaaactcagtcacctgagcaggtaaagtctgaaaagctcaaagacctctttgattacagtccccctctacacaagaatctggatgcacgagaaaagtctaccttcagagaggaaagcccacttaggatcaaaatgatagcgagtgattctcaccgtcctgaagtcaaactcaaaatggcacctgttcctcttgatgattctaacagacctgcttccttgactaaagacaggctgcttgctagtacacttgtccattctgtcaagaaggagcaagaattccgatccatctttgaccacattaagttgccacaggccagcaaaagcacttcagagtcatttattcaacacattgtgtccttggttcatcatgttaaagagcaatacttcaagtcagctgcaatgaccctaaacgagcggttcacttcgtatcagaaagccactgaagaacatagtactcggcaaaagagccctgaaatacacaggagaattgacatctcaccaagtaccctgaggaagcatacccgtttagcaggggaagagagagtttttaaagaagaaaatcaaaagggagataaaaaattaaggtgtgactctgctgaccttcggcatgacattgatcgccgtagaaaagaaagaagtaaagaacggggagattccaagggctccagggaatccagtggatcaagaaagcaggaaaaaactccaaaagattacaaggaatacaaatcttacaaagatgacagcaaaaatgtatttgtcttttacacggcttatggtggatgaggacaaaaactttggaatagcaagctaacactgaaaaaaaaaatgacaaattaatgtgtcctattatccaggctacatcaggaggttggacttcaatgcagtgcatttctagaaacagtttgttaaacataaaagagagcaagatcattctcgatcttcatcctcttcagcatcaccttcttctcccagttctcgagaagaaaaggagagtaagaaggaaagagaagaagaatttaaaactcaccatgaaatgaaagaatactcaggctttgcaggagttagccgaccacgaggaacctttcatgacgacagagatgatggtgtggattattgggccaaaagaggaagaggtcgtggtacttttcaacgtggcagagggcgctttaacttcaaaaaatcaggtagcagtcctaaatggactcatgacaaataccaaggggatgggattgttgaagatgaagaagagaccatggaaaataatgaagaaaagaaggacagacgcaaggaagaaaaggaataataaatatgaagtaagattacaacagagcagaacttgcacccaccattttttttacctgatttttgttttcaaataagaatgtaagcattttacttaaattttactgtttgcaagtagtctatagaaattttgttttaagtcttcaaatatcttgagaaatagtagactgtatgttgaaaattgtactgaaataaagtagaaaattgttacgtacc

SEQ ID NO: 111202 - DNA, 4239 bp, Homo sapiens
  Payload ID: 1784
  Gene Symbol: BCLAF1
  Gene Name: BCL2-associated transcription factor 1
  ENST ID: ENST00000534269
  CDS Start-End: 198-1601
ttcctcgcgttcttgagtcgggaaatggccgctgtgtggttgcaacggagataaattcccggaaccgcgattcggcgtgtcaggaattcgaatttagagtttaatttctcagagcattctctccaggaagaatttttacagtatctcaaagacttcacttgacttcttgatcctgcataaaaccaaggagaaaagaaatgggtcgctccaattctagatcacattcttcaaggtcaaagtctagatcacagtctagttctcgatcaagatcaagatctcattctagaaagaagcgatacaggtctcgttccagaacatattcaaggtctcgtagtagagatcgtatgtattctagagattatcgtcgcgattacagaaataatagaggaatgagacgaccttatgggtacagaggaaggggtagagggtattatcaaggaggaggaggtagatatcatcgaggtggttatagacctgtctggaatagaaggcactctaggagtcctagacgaggtcgttcacgttccaggagtccaaaaagaagatccgtttcttctcaaagatccagaagcagatctcgccggtcatatagatcttctaggtctccaagatcatcctcttctcgttcttcatccccatatagcaaatctcctgtttctaaaagacgagggtctcaggaaaaacaaaccaaaaaagctgaaggggaaccccaagaagagagtccgttgaaaagtaaatcacaggaggaaccgaaagatacatttgaacatgacccatctgagtctatcgatgaatttaataagtcatcagccacatccggtgatatttggcctggcctttcagcttatgataatagtcctagatcaccccatagtccttcacctattgctacaccacctagtcagagttcatcttgctctgatgctcccatgctcagtacagttcactctgcaaaaaatactccttctcagcattcacattccattcagcatagtcctgaaaggtctgggtctggttctgttggaaatggatctagtcgatacagtccttctcagaatagtccaattcatcacatcccttcacgaagaagtcctgcaaagacaatcgcaccacagaatgctccaagagatgagtctaggggccgttcctcgttttatcctgatggtggagatcaggaaactgcaaagactgggaagttcttaaaaagtccccctctacacaagaatctggatgcacgagaaaagtctaccttcagagaggaaagcccacttaggatcaaaatgatagcgagtgattctcaccgtcctgaagtcaaactcaaaatggcacctgttcctcttgatgattctaacagacctgcttccttgactaaagacaggctgcttgctagtacacttgtccattctgtcaagaaggagcaagaattccgatccatctttgaccacattaagttgccacaggccagcaaaagcacttcagagtcatttattcaacacattgtgtccttggttcatcatgttaaaggtcctggaatatgttttgaaatggcaaaatccatgtttcaaagtaaaatagctgttgaaagatacaggcaaagttgaatcttctgtcttcctggcaaaaatggcataaaaactgagttgctagctcaaattcctgggtttcatggaattatgattgaggcactacccttgtagtggccgtttcaagttttaatgattggttatgagacatgtgctggatattgggcgagcaatacttcaagtcagctgcaatgaccctaaacgagcggttcacttcgtatcagaaagccactgaagaacatagtactcggcaaaagagccctgaaatacacaggagaattgacatctcaccaagtaccctgaggaagcatacccgtttagcaggggaagagagagtttttaaagaagaaaatcaaaagggagataaaaaattaaggtgtgactctgctgaccttcggcatgacattgatcgccgtagaaaagaaagaagtaaagaacggggagattccaagggctccagggaatccagtggatcaagaaagcaggaaaaaactccaaaagattacaaggaatacaaatcttacaaagatgacagcaaaaatgtatttgtcttttacacggcttatggtggatgaggacaaaaactttggaatagcaagctaacactgaaaaaaaaaatgacaaattaatgtgtcctattatccaggctacatcaggaggttggacttcaatgcagtgcatttctagaaacagtttgttaaacataaaagagagcaagatcattctcgatcttcatcctcttcagcatcaccttcttctcccagttctcgagaagaaaaggagagtaagaaggaaagagaagaagaatttaaaactcaccatgaaatgaaagaatactcaggctttgcaggagttagccgaccacgaggaaccttttttcgaattagaggcagaggaagagccagaggagtttttgctgggacaaatactggtccaaacaactcaaatactacttttcaaaagagaccgaaggaagaggaatgggatccagaatataccccaaagagcaagaagtacttcttgcatgacgacagagatgatggtgtggattattgggccaaaagaggaagaggtcgtggtacttttcaacgtggcagagggcgctttaacttcaaaaaatcaggtagcagtcctaaatggactcatgacaaataccaaggggatgggattgttgaagatgaagaagagaccatggaaaataatgaagaaaagaaggacagacgcaaggaagaaaaggaataataaatatgaagtaagattacaacagagcagaacttgcacccaccattttttttacctgatttttgttttcaaataagaatgtaagcattttacttaaattttactgtttgcaagtagtctatagaaattttgttttaagtcttcaaatatcttgagaaatagtagactgtatgttgaaaattgtactgaaataaagtagaaaattgttacgtaccatatttgtaactatcaacttttaaaacttttaacgtttttgttacatgcattgtaattctgctttgtctataagatatggtcaagtacagctctgtgaaagttctgattctcttccttccctgtttgtcaatgttttattctgaagtaaacgttagctctacatataaatcctggaacagaaattgtttatagagactacactaattattttaactgtatacatctgtttaatttgaacacactacatcgtagggtgactgatttttgaagtataccacagacaaaaagttgttactatggtaaactaagctagtttaacacttgagcaaatgcttaagaaggaattaaaaaaaaaaagctttgccaatagctaaaaagtacaagctattaaaaatcagattgaaaagttttgagaaaatgttatttttactgaaagcaagcagtggcctataaagaacattcttaggagccttttctatttgcgttcaaaactgtgtgttctctttctattcctatttgatagtttgagtcatggtcttagatattagctatttgtgagaggaaactggtttgtaacaatactgcaaatagaaaccccatttctactgaacatcctagttttaaacagaagaaaaactgtaatcctggggttggtatgtaggaggtctatcctgcagaataagttgatacattagtacctgatttcatatcttacatatttatttgagctgaacattagtttgtagtgtaactattagtaaaaatagagaaacacagcatactgttcattaatagtattttaaaaaaattgtttttcaaatgtcaccaataaaagttttggcaggaagcttgttgcggcattgatctaacctttttcccccccatttcagttgcagtttttgtagaatggctttttctttttcctcttaagagttctattcttcaggtagataatttttcaaatgtgaattatcttttgtgtctatattgatagctcttaaaggagtgaaaatctaaaatagtaaatttcaatgttaagtgtctgctttatgggcatatataaaagtagacacatttcatttgttaatttagttgtgtgtgtgtgttaaaaggagctaatgcttattctgttaatgtaaacttttgaagatcttaagtgtattgctctttcatcttaaacactttcgaggatttgcag

SEQ ID NO: 111203 - DNA, 4373 bp, Homo sapiens
  Payload ID: 1784
  Gene Symbol: BCLAF1
  Gene Name: BCL2-associated transcription factor 1
  Uniprot ID: Q9NYF8
  ENST ID: ENST00000527759
  CDS Start-End: 198-2954
ttcctcgcgttcttgagtcgggaaatggccgctgtgtggttgcaacggagataaattcccggaaccgcgattcggcgtgtcaggaattcgaatttagagtttaatttctcagagcattctctccaggaagaatttttacagtatctcaaagacttcacttgacttcttgatcctgcataaaaccaaggagaaaagaaatgggtcgctccaattctagatcacattcttcaaggtcaaagtctagatcacagtctagttctcgatcaagatcaagatctcattctagaaagaagcgatacaggtctcgttccagaacatattcaaggtctcgtagtagagatcgtatgtattctagagattatcgtcgcgattacagaaataatagaggaatgagacgaccttatgggtacagaggaaggggtagagggtattatcaaggaggaggaggtagatatcatcgaggtggttatagacctgtctggaatagaaggcactctaggagtcctagacgaggtcgttcacgttccaggagtccaaaaagaagatccgtttcttctcaaagatccagaagcagatctcgccggtcatatagatcttctaggtctccaagatcatcctcttctcgttcttcatccccatatagcaaatctcctgtttctaaaagacgagggtctcaggaaaaacaaaccaaaaaagctgaaggggaaccccaagaagagagtccgttgaaaagtaaatcacaggaggaaccgaaagatacatttgaacatgacccatctgagtctatcgatgaatttaataagtcatcagccacatccggtgatatttggcctggcctttcagcttatgataatagtcctagatcaccccatagtccttcacctattgctacaccacctagtcagagttcatcttgctctgatgctcccatgctcagtacagttcactctgcaaaaaatactccttctcagcattcacattccattcagcatagtcctgaaaggtctgggtctggttctgttggaaatggatctagtcgatacagtccttctcagaatagtccaattcatcacatcccttcacgaagaagtcctgcaaagacaatcgcaccacagaatgctccaagagatgagtctaggggccgttcctcgttttatcctgatggtggagatcaggaaactgcaaagactgggaagttcttaaaaaggttcacagatgaagagtctagagtattcctgcttgataggggtaataccagggataaagaggcttcaaaagagaaaggatcagagaaagggagggcagagggagaatgggaagatcaggaagctctagattacttcagtgataaagagtctggaaaacaaaagtttaatgattcagaaggggatgacacagaggagacagaggattatagacagttcaggaagtcagtcctcgcagatcagggtaaaagttttgctactgcatctcaccggaatactgaggaggaaggactcaagtacaagtccaaagtttcactgaaaggcaatagagaaagtgatggatttagagaagaaaaaaattataaacttaaagagactggatatgtagtggaaaggcctagcactacaaaagataagcacaaagaagaagacaaaaattctgaaagaataacagtaaagaaagaaactcagtcacctgagcaggtaaagtctgaaaagctcaaagacctctttgattacagtccccctctacacaagaatctggatgcacgagaaaagtctaccttcagagaggaaagcccacttaggatcaaaatgatagcgagtgattctcaccgtcctgaagtcaaactcaaaatggcacctgttcctcttgatgattctaacagacctgcttccttgactaaagacaggctgcttgctagtacacttgtccattctgtcaagaaggagcaagaattccgatccatctttgaccacattaagttgccacaggccagcaaaagcacttcagagtcatttattcaacacattgtgtccttggttcatcatgttaaagagcaatacttcaagtcagctgcaatgaccctaaacgagcggttcacttcgtatcagaaagccactgaagaacatagtactcggcaaaagagccctgaaatacacaggagaattgacatctcaccaagtaccctgaggaagcatacccgtttagcaggggaagagagagtttttaaagaagaaaatcaaaagggagataaaaaattaaggtgtgactctgctgaccttcggcatgacattgatcgccgtagaaaagaaagaagtaaagaacggggagattccaagggctccagggaatccagtggatcaagaaagcaggaaaaaactccaaaagattacaaggaatacaaatcttacaaagatgacagtaaacataaaagagagcaagatcattctcgatcttcatcctcttcagcatcaccttcttctcccagttctcgagaagaaaaggagagtaagaaggaaagagaagaagaatttaaaactcaccatgaaatgaaagaatactcaggctttgcaggagttagccgaccacgaggaaccttttttcgaattagaggcagaggaagagccagaggagtttttgctgggacaaatactggtccaaacaactcaaatactacttttcaaaagagaccgaaggaagaggaatgggatccagaatataccccaaagagcaagaagtacttcttgcatgacgacagagatgatggtgtggattattgggccaaaagaggaagaggtcgtggtacttttcaacgtggcagagggcgctttaacttcaaaaaatcaggtagcagtcctaaatggactcatgacaaataccaaggggatgggattgttgaagatgaagaagagaccatggaaaataatgaagaaaagaaggacagacgcaaggaagaaaaggaataataaatatgaagtaagattacaacagagcagaacttgcacccaccattttttttacctgatttttgttttcaaataagaatgtaagcattttacttaaattttactgtttgcaagtagtctatagaaattttgttttaagtcttcaaatatcttgagaaatagtagactgtatgttgaaaattgtactgaaataaagtagaaaattgttacgtaccatatttgtaactatcaacttttaaaacttttaacgtttttgttacatgcattgtaattctgctttgtctataagatatggtcaagtacagctctgtgaaagttctgattctcttccttccctgtttgtcaatgttttattctgaagtaaacgttagctctacatataaatcctggaacagaaattgtttatagagactacactaattattttaactgtatacatctgtttaatttgaacacactacatcgtagggtgactgatttttgaagtataccacagacaaaaagttgttactatggtaaactaagctagtttaacacttgagcaaatgcttaagaaggaattaaaaaaaaaaagctttgccaatagctaaaaagtacaagctattaaaaatcagattgaaaagttttgagaaaatgttatttttactgaaagcaagcagtggcctataaagaacattcttaggagccttttctatttgcgttcaaaactgtgtgttctctttctattcctatttgatagtttgagtcatggtcttagatattagctatttgtgagaggaaactggtttgtaacaatactgcaaatagaaaccccatttctactgaacatcctagttttaaacagaagaaaaactgtaatcctggggttggtatgtaggaggtctatcctgcagaataagttgatacattagtacctgatttcatatcttacatatttatttgagctgaacattagtttgtagtgtaactattagtaaaaatagagaaacacagcatactgttcattaatagtattttaaaaaaattgtttttcaaatgtcaccaataaaagttttggcaggaagcttgttgcggcattgatctaacctttttcccccccatttcagttgcagtttttgtagaatggctttttctttttcctcttaagagttctattcttcaggtagataatttttcaaatgtgaattatcttttgtgtctatattgatagctcttaaaggagtgaaaatctaaaatagtaaatttcaatgttaagtgtctgctttatgggcatatataaaagtagacacatttcatttgttaatttagttgtgtgtgtgtgttaaaaggagctaatgcttattctgttaatgtaaacttttgaagatcttaagtgtattgctctttcatcttaaacactttcgaggatttgcagtgcgt

SEQ ID NO: 111204 - DNA, 7263 bp, Homo sapiens
  Payload ID: 1784
  Gene Symbol: BCLAF1
  Gene Name: BCL2-associated transcription factor 1
  Uniprot ID: Q9NYF8
  ENST ID: ENST00000531224
  CDS Start-End: 254-3016
gccccagatcggaagtgacggagacgtgctagcgcgtcgaaggtagctctatggttttcctcgcgttcttgagtcgggaaatggccgctgtgtggttgcaacggagataaattcccggaaccgcgattcggcgtgtcaggaattcgaatttagagtttaatttctcagagcattctctccaggaagaatttttacagtatctcaaagacttcacttgacttcttgatcctgcataaaaccaaggagaaaagaaatgggtcgctccaattctagatcacattcttcaaggtcaaagtctagatcacagtctagttctcgatcaagatcaagatctcattctagaaagaagcgatacagttctaggtctcgttccagaacatattcaaggtctcgtagtagagatcgtatgtattctagagattatcgtcgcgattacagaaataatagaggaatgagacgaccttatgggtacagaggaaggggtagagggtattatcaaggaggaggaggtagatatcatcgaggtggttatagacctgtctggaatagaaggcactctaggagtcctagacgaggtcgttcacgttccaggagtccaaaaagaagatccgtttcttctcaaagatccagaagcagatctcgccggtcatatagatcttctaggtctccaagatcatcctcttctcgttcttcatccccatatagcaaatctcctgtttctaaaagacgagggtctcaggaaaaacaaaccaaaaaagctgaaggggaaccccaagaagagagtccgttgaaaagtaaatcacaggaggaaccgaaagatacatttgaacatgacccatctgagtctatcgatgaatttaataagtcatcagccacatccggtgatatttggcctggcctttcagcttatgataatagtcctagatcaccccatagtccttcacctattgctacaccacctagtcagagttcatcttgctctgatgctcccatgctcagtacagttcactctgcaaaaaatactccttctcagcattcacattccattcagcatagtcctgaaaggtctgggtctggttctgttggaaatggatctagtcgatacagtccttctcagaatagtccaattcatcacatcccttcacgaagaagtcctgcaaagacaatcgcaccacagaatgctccaagagatgagtctaggggccgttcctcgttttatcctgatggtggagatcaggaaactgcaaagactgggaagttcttaaaaaggttcacagatgaagagtctagagtattcctgcttgataggggtaataccagggataaagaggcttcaaaagagaaaggatcagagaaagggagggcagagggagaatgggaagatcaggaagctctagattacttcagtgataaagagtctggaaaacaaaagtttaatgattcagaaggggatgacacagaggagacagaggattatagacagttcaggaagtcagtcctcgcagatcagggtaaaagttttgctactgcatctcaccggaatactgaggaggaaggactcaagtacaagtccaaagtttcactgaaaggcaatagagaaagtgatggatttagagaagaaaaaaattataaacttaaagagactggatatgtagtggaaaggcctagcactacaaaagataagcacaaagaagaagacaaaaattctgaaagaataacagtaaagaaagaaactcagtcacctgagcaggtaaagtctgaaaagctcaaagacctctttgattacagtccccctctacacaagaatctggatgcacgagaaaagtctaccttcagagaggaaagcccacttaggatcaaaatgatagcgagtgattctcaccgtcctgaagtcaaactcaaaatggcacctgttcctcttgatgattctaacagacctgcttccttgactaaagacaggctgcttgctagtacacttgtccattctgtcaagaaggagcaagaattccgatccatctttgaccacattaagttgccacaggccagcaaaagcacttcagagtcatttattcaacacattgtgtccttggttcatcatgttaaagagcaatacttcaagtcagctgcaatgaccctaaacgagcggttcacttcgtatcagaaagccactgaagaacatagtactcggcaaaagagccctgaaatacacaggagaattgacatctcaccaagtaccctgaggaagcatacccgtttagcaggggaagagagagtttttaaagaagaaaatcaaaagggagataaaaaattaaggtgtgactctgctgaccttcggcatgacattgatcgccgtagaaaagaaagaagtaaagaacggggagattccaagggctccagggaatccagtggatcaagaaagcaggaaaaaactccaaaagattacaaggaatacaaatcttacaaagatgacagtaaacataaaagagagcaagatcattctcgatcttcatcctcttcagcatcaccttcttctcccagttctcgagaagaaaaggagagtaagaaggaaagagaagaagaatttaaaactcaccatgaaatgaaagaatactcaggctttgcaggagttagccgaccacgaggaaccttttttcgaattagaggcagaggaagagccagaggagtttttgctgggacaaatactggtccaaacaactcaaatactacttttcaaaagagaccgaaggaagaggaatgggatccagaatataccccaaagagcaagaagtacttcttgcatgacgacagagatgatggtgtggattattgggccaaaagaggaagaggtcgtggtacttttcaacgtggcagagggcgctttaacttcaaaaaatcaggtagcagtcctaaatggactcatgacaaataccaaggggatgggattgttgaagatgaagaagagaccatggaaaataatgaagaaaagaaggacagacgcaaggaagaaaaggaataataaatatgaagtaagattacaacagagcagaacttgcacccaccattttttttacctgatttttgttttcaaataagaatgtaagcattttacttaaattttactgtttgcaagtagtctatagaaattttgttttaagtcttcaaatatcttgagaaatagtagactgtatgttgaaaattgtactgaaataaagtagaaaattgttacgtaccatatttgtaactatcaacttttaaaacttttaacgtttttgttacatgcattgtaattctgctttgtctataagatatggtcaagtacagctctgtgaaagttctgattctcttccttccctgtttgtcaatgttttattctgaagtaaacgttagctctacatataaatcctggaacagaaattgtttatagagactacactaattattttaactgtatacatctgtttaatttgaacacactacatcgtagggtgactgatttttgaagtataccacagacaaaaagttgttactatggtaaactaagctagtttaacacttgagcaaatgcttaagaaggaattaaaaaaaaaaagctttgccaatagctaaaaagtacaagctattaaaaatcagattgaaaagttttgagaaaatgttatttttactgaaagcaagcagtggcctataaagaacattcttaggagccttttctatttgcgttcaaaactgtgtgttctctttctattcctatttgatagtttgagtcatggtcttagatattagctatttgtgagaggaaactggtttgtaacaatactgcaaatagaaaccccatttctactgaacatcctagttttaaacagaagaaaaactgtaatcctggggttggtatgtaggaggtctatcctgcagaataagttgatacattagtacctgatttcatatcttacatatttatttgagctgaacattagtttgtagtgtaactattagtaaaaatagagaaacacagcatactgttcattaatagtattttaaaaaaattgtttttcaaatgtcaccaataaaagttttggcaggaagcttgttgcggcattgatctaacctttttcccccccatttcagttgcagtttttgtagaatggctttttctttttcctcttaagagttctattcttcaggtagataatttttcaaatgtgaattatcttttgtgtctatattgatagctcttaaaggagtgaaaatctaaaatagtaaatttcaatgttaagtgtctgctttatgggcatatataaaagtagacacatttcatttgttaatttagttgtgtgtgtgtgttaaaaggagctaatgcttattctgttaatgtaaacttttgaagatcttaagtgtattgctctttcatcttaaacactttcgaggatttgcagtgcgtctagcacctagattacagccaggaacattggttaagaactgttggaaacaaaactaaaagcaaactcaacatatgtgatgtttatggccctcagatccttagtattgtgtgattttcccccgttaacatgtctttctaaaattgtctattaaagcagaggaaatacctgccaaaggaagtatgtattgcattaatcagggcataactaatattctcctgttcagaataatacttatttacgtgtgaaagcaacatggatgtgattcccaacacagaattttcatgacccttttattgtatacaaataaataccataacagttacttggttagacatcaaatctgtgtgcatgactatgtgcttatccacttaagacaataggtaaaaggggatctgagaaattatgtaatagggagtgggaataaaactacttaattcctgtgggcaggttatattttaagttcaaatgcattgctttaacctttggttacttttattctgttaaacagaattgaagaaagagtattataccagagtgtagtaggctagggtgattgtaagaactctgtaatagaatgtcattgtggatgttacctttttcagatccaagcatataaaaagcctgtatattttttaaaaacacatcttaactccacgctttacgatattataaaagttgaatggttcctcttggtaaggatatttgcttacaagtgctaggaaataactcactgatacctgcgttaacatactttgttttgcctagagaggggcaataaaaatgaaccaaaggatatttccagaaaggattaagaaagctgtttaagaaggccatgactctttaggtgtgtatgtgtacctttcagcatcctaggaatttttatactaaaagcaaaatgttttttccagttagtcttcttcaaggaattactattgttccttttgtcacaggtaaaatcagtgttgggaattataatttgagaaaaatattacccagtaacattgaatgtagatggctaaacgattcttactcagtgtgatgtataatgatgcaacagggacccttgtaaattgtcatacgccaataaaatgtcacaagtaataactgctgttgtttgtttacctgtgtctatttcacacatcttatttctgtggcctattttagaatatcagcgcatctgttaggaagattactggtgtggtaaggcttgataaatgctttataaactccctcaaacctttctttactgtttttttgttttgtcttgtttttgtttttgtttttgtttttgtttttgtttttgtttttcccttgtctcccctgggaaaatgggaaattttacagttggtaaatctaagccaaaattattttgaaataaaggaattctggatgtccagtttagtcctcgttttcttacgttaatctgggaccttatcacccataatatggtgattacttctctttctaaaaacatagtagctagtaaataagtaaaaagaattgtcttttcattcactttaagtaagatgtggtataattcttaccatgtgccatcctgtcagttttaacaaagcattttcacagaaatttgtgtactaagacaaactgacacattttgactcatacaaatggcaaattagtccttaaaaattctgtgagagaaataactctgtgtgtacatacatatgcatgtaaagtgttgtgtaagatcattggtagcttaattatactggataattgtaatgttatatacaaatttcttatataaaagtatgctgcattattaacatttgtttaacttttcttatttttctttttctgggtttcaactggaatcccattggtggggatgtaccttaagtttccttgtggaataatagactttcacatccagaaagagaagttcagaggcctttctcaatttacagagttgaagaggaaaggcaaatggaggaataaacttcattgtcattgggattaatttggctagactcaatctcttgagccttaaaatgagaaagtaatatccattacatgtttagagttctcaaatagttgatactattattaaatgtttcaaattttattggggtagatactaaaaattagtacactgtcctaatgaagtttaaatgaacaagttttacatttcttaggattcaggaatatatggaatctagttgtatttaattgacttgagagccacagagattgtgttgatttatgagctggactcctattgttttagaaacatgcagtaatgattaacttgtgtcaatgatggtaatgagaccaaacttgtacatttaattaagggtaccagttctttttatgttactagactataccttggcctttaaaaatgaatctcactgattaaagagaacaggcattattaggatagcattccaccacaactagaaacattcaaataatgtgtcttaattgtaatctgtatataggaaaatttttcctatggatatttttggtgttttaccacagtgaactgatttgtagcacttatgaagtgcagaaggtaatattcttgaaaatagaaaaaggttgggtgagcaggctttaatgcctttcccccaagaatatacatcgaatttttcttaatcttttggggttggccagcttccagatttcattaataatgagctctgcctttaataaaagtacatgatcatagctacactgtatgtttaggtggtgtgaaatgatttataatcacagcttgaactgtgtttgcttggtactgtcatagtgattacaaatttcatggaatgcgaagagcaacaataaataaaaaataccactcaccctc

SEQ ID NO: 111205 - DNA, 5371 bp, Homo sapiens
  Payload ID: 1784
  Gene Symbol: BCLAF1
  Gene Name: BCL2-associated transcription factor 1
  ENST ID: ENST00000527536
  CDS Start-End: 232-2847
gacgtgctagcgcgtcgaaggtagctctatggttttcctcgcgttcttgagtcgggaaatggccgctgtgtggttgcaacggagataaattcccggaaccgcgattcggcgtgtcaggaattcgaatttagagtttaatttctcagagcattctctccaggaagaatttttacagtatctcaaagacttcacttgacttcttgatcctgcataaaaccaaggagaaaagaaatgggtcgctccaattctagatcacattcttcaaggtcaaagtctagatcacagtctagttctcgatcaagatcaagatctcattctagaaagaagcgatacagttctaggtctcgttccagaacatattcaaggtctcgtagtagagatcgtatgtattctagagattatcgtcgcgattacagaaataatagaggaatgagacgaccttatgggtacagaggaaggggtagagggtattatcaaggaggaggaggtagatatcatcgaggtggttatagacctgtctggaatagaaggcactctaggagtcctagacgaggtcgttcacgttccaggagtccaaaaagaagatccgtttcttctcaaagatccagaagcagatctcgccggtcatatagatcttctaggtctccaagatcatcctcttctcgttcttcatccccatatagcaaatctcctgtttctaaaagacgagggtctcaggaaaaacaaaccaaaaaagctgaaggggaaccccaagaagagagtccgttgaaaagtaaatcacaggaggaaccgaaagatacatttgaacatgacccatctgagtctatcgatgaatttaataagtcatcagccacatccggtgatatttggcctggcctttcagcttatgataatagtcctagatcaccccatagtccttcacctattgctacaccacctagtcagagttcatcttgctctgatgctcccatgctcagtacagttcactctgcaaaaaatactccttctcagcattcacattccattcagcatagtcctgaaaggtctgggtctggttctgttggaaatggatctagtcgatacagtccttctcagaatagtccaattcatcacatcccttcacgaagaagtcctgcaaagacaatcgcaccacagaatgctccaagagatgagtctaggggccgttcctcgttttatcctgatggtggagatcaggaaactgcaaagactgggaagttcttaaaaaggttcacagatgaagagtctagagtattcctgcttgataggggtaataccagggataaagaggcttcaaaagagaaaggatcagagaaagggagggcagagggagaatgggaagatcaggaagctctagattacttcagtgataaagagtctggaaaacaaaagtttaatgattcagaaggggatgacacagaggagacagaggattatagacagttcaggaagtcagtcctcgcagatcagggtaaaagttttgctactgcatctcaccggaatactgaggaggaaggactcaagtacaagtccaaagtttcactgaaaggcaatagagaaagtgatggatttagagaagaaaaaaattataaacttaaagagactggatatgtagtggaaaggcctagcactacaaaagataagcacaaagaagaagacaaaaattctgaaagaataacagtaaagaaagaaactcagtcacctgagcaggtaaagtctgaaaagctcaaagacctctttgattacagtccccctctacacaagaatctggatgcacgagaaaagtctaccttcagagaggaaagcccacttaggatcaaaatgatagcgagtgattctcaccgtcctgaagtcaaactcaaaatggcacctgttcctcttgatgattctaacagacctgcttccttgactaaagacaggctgcttgctagtacacttgtccattctgtcaagaaggagcaagaattccgatccatctttgaccacattaagttgccacaggccagcaaaagcacttcagagtcatttattcaacacattgtgtccttggttcatcatgttaaagagcaatacttcaagtcagctgcaatgaccctaaacgagcggttcacttcgtatcagaaagccactgaagaacatagtactcggcaaaagagccctgaaatacacaggagaattgacatctcaccaagtaccctgaggaagcatacccgtttagcaggggaagagagagtttttaaagaagaaaatcaaaagggagataaaaaattaaggtgtgactctgctgaccttcggcatgacattgatcgccgtagaaaagaaagaagtaaagaacggggagattccaagggctccagggaatccagtggatcaagaaagcaggaaaaaactccaaaagattacaaggaatacaaatcttacaaagatgacagtaaacataaaagagagcaagatcattctcgatcttcatcctcttcagcatcaccttcttctcccagttctcgagaagaaaaggagagtaagaaggaaagagaagaagaatttaaaactcaccatgaaatgaaagaatactcaggctttgcaggagttagccgaccacgaggaacctttcatgacgacagagatgatggtgtggattattgggccaaaagaggaagaggtcgtggtacttttcaacgtggcagagggcgctttaacttcaaaaaatcaggtagcagtcctaaatggactcatgacaaataccaaggggatgggattgttgaagatgaagaagagaccatggaaaataatgaagaaaagaaggacagacgcaaggaagaaaaggaataataaatatgaagtaagattacaacagagcagaacttgcacccaccattttttttacctgatttttgttttcaaataagaatgtaagcattttacttaaattttactgtttgcaagtagtctatagaaattttgttttaagtcttcaaatatcttgagaaatagtagactgtatgttgaaaattgtactgaaataaagtagaaaattgttacgtaccatatttgtaactatcaacttttaaaacttttaacgtttttgttacatgcattgtaattctgctttgtctataagatatggtcaagtacagctctgtgaaagttctgattctcttccttccctgtttgtcaatgttttattctgaagtaaacgttagctctacatataaatcctggaacagaaattgtttatagagactacactaattattttaactgtatacatctgtttaatttgaacacactacatcgtagggtgactgatttttgaagtataccacagacaaaaagttgttactatggtaaactaagctagtttaacacttgagcaaatgcttaagaaggaattaaaaaaaaaaagctttgccaatagctaaaaagtacaagctattaaaaatcagattgaaaagttttgagaaaatgttatttttactgaaagcaagcagtggcctataaagaacattcttaggagccttttctatttgcgttcaaaactgtgtgttctctttctattcctatttgatagtttgagtcatggtcttagatattagctatttgtgagaggaaactggtttgtaacaatactgcaaatagaaaccccatttctactgaacatcctagttttaaacagaagaaaaactgtaatcctggggttggtatgtaggaggtctatcctgcagaataagttgatacattagtacctgatttcatatcttacatatttatttgagctgaacattagtttgtagtgtaactattagtaaaaatagagaaacacagcatactgttcattaatagtattttaaaaaaattgtttttcaaatgtcaccaataaaagttttggcaggaagcttgttgcggcattgatctaacctttttcccccccatttcagttgcagtttttgtagaatggctttttctttttcctcttaagagttctattcttcaggtagataatttttcaaatgtgaattatcttttgtgtctatattgatagctcttaaaggagtgaaaatctaaaatagtaaatttcaatgttaagtgtctgctttatgggcatatataaaagtagacacatttcatttgttaatttagttgtgtgtgtgtgttaaaaggagctaatgcttattctgttaatgtaaacttttgaagatcttaagtgtattgctctttcatcttaaacactttcgaggatttgcagtgcgtctagcacctagattacagccaggaacattggttaagaactgttggaaacaaaactaaaagcaaactcaacatatgtgatgtttatggccctcagatccttagtattgtgtgattttcccccgttaacatgtctttctaaaattgtctattaaagcagaggaaatacctgccaaaggaagtatgtattgcattaatcagggcataactaatattctcctgttcagaataatacttatttacgtgtgaaagcaacatggatgtgattcccaacacagaattttcatgacccttttattgtatacaaataaataccataacagttacttggttagacatcaaatctgtgtgcatgactatgtgcttatccacttaagacaataggtaaaaggggatctgagaaattatgtaatagggagtgggaataaaactacttaattcctgtgggcaggttatattttaagttcaaatgcattgctttaacctttggttacttttattctgttaaacagaattgaagaaagagtattataccagagtgtagtaggctagggtgattgtaagaactctgtaatagaatgtcattgtggatgttacctttttcagatccaagcatataaaaagcctgtatattttttaaaaacacatcttaactccacgctttacgatattataaaagttgaatggttcctcttggtaaggatatttgcttacaagtgctaggaaataactcactgatacctgcgttaacatactttgttttgcctagagaggggcaataaaaatgaaccaaaggatatttccagaaaggattaagaaagctgtttaagaaggccatgactctttaggtgtgtatgtgtacctttcagcatcctaggaatttttatactaaaagcaaaatgttttttccagttagtcttcttcaaggaattactattgttccttttgtcacaggtaaaatcagtgttgggaattataatttgagaaaaatattacccagtaacattgaatgtagatggctaaacgattcttactcagtgtgatgtataatgatgcaacagggacccttgtaaattgtcatacgccaataaaatgtcacaagtaataa

SEQ ID NO: 111206 - DNA, 3167 bp, Homo sapiens
  Payload ID: 1784
  Gene Symbol: BCLAF1
  Gene Name: BCL2-associated transcription factor 1
  ENST ID: ENST00000530429
  CDS Start-End: 187-2439
cttgagtcgggaaatggccgctgtgtggttgcaacggagataaattcccggaaccgcgattcggcgtgtcaggaattcgaatttagagtttaatttctcagagcattctctccaggaagaatttttacagtatctcaaagacttcacttgacttcttgatcctgcataaaaccaaggagaaaagaaatgggtcgctccaattctagatcacattcttcaaggtcaaagtctagatcacagtctagttctcgatcaagatcaagatctcattctagaaagaagcgatacaggtctcgttccagaacatattcaaggtctcgtagtagagatcgtatgtattctagagattatcgtcgcgattacagaaataatagaggaatgagacgaccttatgggtacagaggaaggggtagagggtattatcaaggaggaggaggtagatatcatcgaggtggttatagacctgtctggaatagaaggcactctaggagtcctagacgaggtcgttcacgttccaggagtccaaaaagaagatccgtttcttctcaaagatccagaagcagatctcgccggtcatatagatcttctaggtctccaagatcatcctcttctcgttcttcatccccatatagcaaatctcctgtttctaaaagacgagggtctcaggaaaaacaaaccaaaaaagctgaaggggaaccccaagaagagagtccgttgaaaagtaaatcacaggaggaaccgaaagatacatttgaacatgacccatctgagtctatcgatgaatttaataagtcatcagccacatccggtgatatttggcctggcctttcagcttatgataatagtcctagatcaccccatagtccttcacctattgctacaccacctagtcagagttcatcttgctctgatgctcccatgctcagtacagttcactctgcaaaaaatactccttctcagcattcacattccattcagcatagtcctgaaaggtctgggtctggttctgttggaaatggatctagtcgatacagtccttctcagaatagtccaattcatcacatcccttcacgaagaagtcctgcaaagacaatcgcaccacagaatgctccaagagatgagtctaggggccgttcctcgttttatcctgatggtggagatcaggaaactgcaaagactgggaagttcttaaaaaggttcacagatgaagagtctagagtattcctgcttgataggggtaataccagggataaagaggcttcaaaagagaaaggatcagagaaagggagggcagagggagaatgggaagatcaggaagctctagattacttcagtgataaagagtctggaaaacaaaagtttaatgattcagaaggggatgacacagaggagacagaggattatagacagttcaggaagtcagtcctcgcagatcagggtaaaagttttgctactgcatctcaccggaatactgaggaggaaggactcaagtacaagtccaaagtttcactgaaaggcaatagagaaagtgatggatttagagaagaaaaaaattataaacttaaagagactggatatgtagtggaaaggcctagcactacaaaagataagcacaaagaagaagacaaaaattctgaaagaataacagtaaagaaagaaactcagtcacctgagcaggtaaagtctgaaaagctcaaagacctctttgattacagtccccctctacacaagaatctggatgcacgagaaaagtctaccttcagagaggaaagcccacttaggatcaaaatgatagcgagtgattctcaccgtcctgaagtcaaactcaaaatggcacctgttcctcttgatgattctaacagacctgcttccttgactaaagacaggctgcttgctagtacacttgtccattctgtcaagaaggagcaagaattccgatccatctttgaccacattaagttgccacaggccagcaaaagcacttcagagtcatttattcaacacattgtgtccttggttcatcatgttaaagagcaatacttcaagtcagctgcaatgaccctaaacgagcggttcacttcgtatcagaaagccactgaagaacatagtactcggcaaaagagccctgaaatacacaggagaattgacatctcaccaagtaccctgaggaagcatacccgtttagcaggggaagagagagtttttaaagaagaaaatcaaaagggagataaaaaattaaggtgtgactctgctgaccttcggcatgacattgatcgccgtagaaaagaaagaagtaaagaacggggagattccaagggctccagggaatccagtggatcaagaaagcaggaaaaaactccaaaagattacaaggaatacaaatcttacaaagatgacagcaaaaatgtatttgtcttttacacggcttatggtggatgaggacaaaaactttggaatagcaagctaacactgaaaaaaaaaatgacaaattaatgtgtcctattatccaggctacatcaggaggttggacttcaatgcagtgcatttctagaaacagtttgttaaacataaaagagagcaagatcattctcgatcttcatcctcttcagcatcaccttcttctcccagttctcgagaagaaaaggagagtaagaaggaaagagaagaagaatttaaaactcaccatgaaatgaaagaatactcaggctttgcaggagttagccgaccacgaggaacctttcatgacgacagagatgatggtgtggattattgggccaaaagaggaagaggtcgtggtacttttcaacgtggcagagggcgctttaacttcaaaaaatcaggtagcagtcctaaatggactcatgacaaataccaaggggatgggattgttgaagatgaagaagagaccatggaaaataatgaagaaaagaaggacagacgcaaggaagaaaaggaataataaatatgaagtaagattacaacagagcagaacttgcacccaccattttttttacctgatttttgttttcaaataagaatgtaagcattttacttaaattttactgtttgcaagtagtctatagaaattttgttttaagtcttcaaatatcttgagaaatagtagactgtatgttgaaaattgtactgaaataaagtagaaaattgtt

SEQ ID NO: 111207 - DNA, 5640 bp, Homo sapiens
  Payload ID: 1784
  Gene Symbol: BCLAF1
  Gene Name: BCL2-associated transcription factor 1
  ENST ID: ENST00000527613
  CDS Start-End: 198-2456
ttcctcgcgttcttgagtcgggaaatggccgctgtgtggttgcaacggagataaattcccggaaccgcgattcggcgtgtcaggaattcgaatttagagtttaatttctcagagcattctctccaggaagaatttttacagtatctcaaagacttcacttgacttcttgatcctgcataaaaccaaggagaaaagaaatgggtcgctccaattctagatcacattcttcaaggtcaaagtctagatcacagtctagttctcgatcaagatcaagatctcattctagaaagaagcgatacagttctaggtctcgttccagaacatattcaaggtctcgtagtagagatcgtatgtattctagagattatcgtcgcgattacagaaataatagaggaatgagacgaccttatgggtacagaggaaggggtagagggtattatcaaggaggaggaggtagatatcatcgaggtggttatagacctgtctggaatagaaggcactctaggagtcctagacgaggtcgttcacgttccaggagtccaaaaagaagatccgtttcttctcaaagatccagaagcagatctcgccggtcatatagatcttctaggtctccaagatcatcctcttctcgttcttcatccccatatagcaaatctcctgtttctaaaagacgagggtctcaggaaaaacaaaccaaaaaagctgaaggggaaccccaagaagagagtccgttgaaaagtaaatcacaggaggaaccgaaagatacatttgaacatgacccatctgagtctatcgatgaatttaataagtcatcagccacatccggtgatatttggcctggcctttcagcttatgataatagtcctagatcaccccatagtccttcacctattgctacaccacctagtcagagttcatcttgctctgatgctcccatgctcagtacagttcactctgcaaaaaatactccttctcagcattcacattccattcagcatagtcctgaaaggtctgggtctggttctgttggaaatggatctagtcgatacagtccttctcagaatagtccaattcatcacatcccttcacgaagaagtcctgcaaagacaatcgcaccacagaatgctccaagagatgagtctaggggccgttcctcgttttatcctgatggtggagatcaggaaactgcaaagactgggaagttcttaaaaaggttcacagatgaagagtctagagtattcctgcttgataggggtaataccagggataaagaggcttcaaaagagaaaggatcagagaaagggagggcagagggagaatgggaagatcaggaagctctagattacttcagtgataaagagtctggaaaacaaaagtttaatgattcagaaggggatgacacagaggagacagaggattatagacagttcaggaagtcagtcctcgcagatcagggtaaaagttttgctactgcatctcaccggaatactgaggaggaaggactcaagtacaagtccaaagtttcactgaaaggcaatagagaaagtgatggatttagagaagaaaaaaattataaacttaaagagactggatatgtagtggaaaggcctagcactacaaaagataagcacaaagaagaagacaaaaattctgaaagaataacagtaaagaaagaaactcagtcacctgagcaggtaaagtctgaaaagctcaaagacctctttgattacagtccccctctacacaagaatctggatgcacgagaaaagtctaccttcagagaggaaagcccacttaggatcaaaatgatagcgagtgattctcaccgtcctgaagtcaaactcaaaatggcacctgttcctcttgatgattctaacagacctgcttccttgactaaagacaggctgcttgctagtacacttgtccattctgtcaagaaggagcaagaattccgatccatctttgaccacattaagttgccacaggccagcaaaagcacttcagagtcatttattcaacacattgtgtccttggttcatcatgttaaagagcaatacttcaagtcagctgcaatgaccctaaacgagcggttcacttcgtatcagaaagccactgaagaacatagtactcggcaaaagagccctgaaatacacaggagaattgacatctcaccaagtaccctgaggaagcatacccgtttagcaggggaagagagagtttttaaagaagaaaatcaaaagggagataaaaaattaaggtgtgactctgctgaccttcggcatgacattgatcgccgtagaaaagaaagaagtaaagaacggggagattccaagggctccagggaatccagtggatcaagaaagcaggaaaaaactccaaaagattacaaggaatacaaatcttacaaagatgacagcaaaaatgtatttgtcttttacacggcttatggtggatgaggacaaaaactttggaatagcaagctaacactgaaaaaaaaaatgacaaattaatgtgtcctattatccaggctacatcaggaggttggacttcaatgcagtgcatttctagaaacagtttgttaaacataaaagagagcaagatcattctcgatcttcatcctcttcagcatcaccttcttctcccagttctcgagaagaaaaggagagtaagaaggaaagagaagaagaatttaaaactcaccatgaaatgaaagaatactcaggctttgcaggagttagccgaccacgaggaaccttttttcgaattagaggcagaggaagagccagaggagtttttgctgggacaaatactggtccaaacaactcaaatactacttttcaaaagagaccgaaggaagaggaatgggatccagaatataccccaaagagcaagaagtacttcttgcatgacgacagagatgatggtgtggattattgggccaaaagaggaagaggtcgtggtacttttcaacgtggcagagggcgctttaacttcaaaaaatcaggtagcagtcctaaatggactcatgacaaataccaaggggatgggattgttgaagatgaagaagagaccatggaaaataatgaagaaaagaaggacagacgcaaggaagaaaaggaataataaatatgaagtaagattacaacagagcagaacttgcacccaccattttttttacctgatttttgttttcaaataagaatgtaagcattttacttaaattttactgtttgcaagtagtctatagaaattttgttttaagtcttcaaatatcttgagaaatagtagactgtatgttgaaaattgtactgaaataaagtagaaaattgttacgtaccatatttgtaactatcaacttttaaaacttttaacgtttttgttacatgcattgtaattctgctttgtctataagatatggtcaagtacagctctgtgaaagttctgattctcttccttccctgtttgtcaatgttttattctgaagtaaacgttagctctacatataaatcctggaacagaaattgtttatagagactacactaattattttaactgtatacatctgtttaatttgaacacactacatcgtagggtgactgatttttgaagtataccacagacaaaaagttgttactatggtaaactaagctagtttaacacttgagcaaatgcttaagaaggaattaaaaaaaaaaagctttgccaatagctaaaaagtacaagctattaaaaatcagattgaaaagttttgagaaaatgttatttttactgaaagcaagcagtggcctataaagaacattcttaggagccttttctatttgcgttcaaaactgtgtgttctctttctattcctatttgatagtttgagtcatggtcttagatattagctatttgtgagaggaaactggtttgtaacaatactgcaaatagaaaccccatttctactgaacatcctagttttaaacagaagaaaaactgtaatcctggggttggtatgtaggaggtctatcctgcagaataagttgatacattagtacctgatttcatatcttacatatttatttgagctgaacattagtttgtagtgtaactattagtaaaaatagagaaacacagcatactgttcattaatagtattttaaaaaaattgtttttcaaatgtcaccaataaaagttttggcaggaagcttgttgcggcattgatctaacctttttcccccccatttcagttgcagtttttgtagaatggctttttctttttcctcttaagagttctattcttcaggtagataatttttcaaatgtgaattatcttttgtgtctatattgatagctcttaaaggagtgaaaatctaaaatagtaaatttcaatgttaagtgtctgctttatgggcatatataaaagtagacacatttcatttgttaatttagttgtgtgtgtgtgttaaaaggagctaatgcttattctgttaatgtaaacttttgaagatcttaagtgtattgctctttcatcttaaacactttcgaggatttgcagtgcgtctagcacctagattacagccaggaacattggttaagaactgttggaaacaaaactaaaagcaaactcaacatatgtgatgtttatggccctcagatccttagtattgtgtgattttcccccgttaacatgtctttctaaaattgtctattaaagcagaggaaatacctgccaaaggaagtatgtattgcattaatcagggcataactaatattctcctgttcagaataatacttatttacgtgtgaaagcaacatggatgtgattcccaacacagaattttcatgacccttttattgtatacaaataaataccataacagttacttggttagacatcaaatctgtgtgcatgactatgtgcttatccacttaagacaataggtaaaaggggatctgagaaattatgtaatagggagtgggaataaaactacttaattcctgtgggcaggttatattttaagttcaaatgcattgctttaacctttggttacttttattctgttaaacagaattgaagaaagagtattataccagagtgtagtaggctagggtgattgtaagaactctgtaatagaatgtcattgtggatgttacctttttcagatccaagcatataaaaagcctgtatattttttaaaaacacatcttaactccacgctttacgatattataaaagttgaatggttcctcttggtaaggatatttgcttacaagtgctaggaaataactcactgatacctgcgttaacatactttgttttgcctagagaggggcaataaaaatgaaccaaaggatatttccagaaaggattaagaaagctgtttaagaaggccatgactctttaggtgtgtatgtgtacctttcagcatcctaggaatttttatactaaaagcaaaatgttttttccagttagtcttcttcaaggaattactattgttccttttgtcacaggtaaaatcagtgttgggaattataatttgagaaaaatattacccagtaacattgaatgtagatggctaaacgattcttactcagtgtgatgtataatgatgcaacagggacccttgtaaattgtcatacgccaataaaatgtcacaa

SEQ ID NO: 111208 - DNA, 4186 bp, Homo sapiens
  Payload ID: 1784
  Gene Symbol: BCLAF1
  Gene Name: BCL2-associated transcription factor 1
  Uniprot ID: Q9NYF8
  ENST ID: ENST00000530767
  CDS Start-End: 184-2427
gagtcgggaaatggccgctgtgtggttgcaacggagataaattcccggaaccgcgattcggcgtgtcaggaattcgaatttagagtttaatttctcagagcattctctccaggaagaatttttacagtatctcaaagacttcacttgacttcttgatcctgcataaaaccaaggagaaaagaaatgggtcgctccaattctagatcacattcttcaaggtcaaagtctagatcacagtctagttctcgatcaagatcaagatctcattctagaaagaagcgatacagttctaggtctcgttccagaacatattcaaggtctcgtagtagagatcgtatgtattctagagattatcgtcgcgattacagaaataatagaggaatgagacgaccttatgggtacagaggaaggggtagagggtattatcaaggaggaggaggtagatatcatcgaggtggttatagacctgtctggaatagaaggcactctaggagtcctagacgaggtcgttcacgttccaggagtccaaaaagaagatccgtttcttctcaaagatccagaagcagatctcgccggtcatatagatcttctaggtctccaagatcatcctcttctcgttcttcatccccatatagcaaatctcctgtttctaaaagacgagggtctcaggaaaaacaaaccaaaaaagctgaaggggaaccccaagaagagagtccgttgaaaagtaaatcacaggaggaaccgaaagatacatttgaacatgacccatctgagtctatcgatgaatttaataagtcatcagccacatccggtgatatttggcctggcctttcagcttatgataatagtcctagatcaccccatagtccttcacctattgctacaccacctagtcagagttcatcttgctctgatgctcccatgctcagtacagttcactctgcaaaaaatactccttctcagcattcacattccattcagcatagtcctgaaaggtctgggtctggttctgttggaaatggatctagtcgatacagtccttctcagaatagtccaattcatcacatcccttcacgaagaagtcctgcaaagacaatcgcaccacagaatgctccaagagatgagtctaggggccgttcctcgttttatcctgatggtggagatcaggaaactgcaaagactgggaagttcttaaaaagtccccctctacacaagaatctggatgcacgagaaaagtctaccttcagagaggaaagcccacttaggatcaaaatgatagcgagtgattctcaccgtcctgaagtcaaactcaaaatggcacctgttcctcttgatgattctaacagacctgcttccttgactaaagacaggctgcttgctagtacacttgtccattctgtcaagaaggagcaagaattccgatccatctttgaccacattaagttgccacaggccagcaaaagcacttcagagtcatttattcaacacattgtgtccttggttcatcatgttaaagagcaatacttcaagtcagctgcaatgaccctaaacgagcggttcacttcgtatcagaaagccactgaagaacatagtactcggcaaaagagccctgaaatacacaggagaattgacatctcaccaagtaccctgaggaagcatacccgtttagcaggggaagagagagtttttaaagaagaaaatcaaaagggagataaaaaattaaggtgtgactctgctgaccttcggcatgacattgatcgccgtagaaaagaaagaagtaaagaacggggagattccaagggctccagggaatccagtggatcaagaaagcaggaaaaaactccaaaagattacaaggaatacaaatcttacaaagatgacagtaaacataaaagagagcaagatcattctcgatcttcatcctcttcagcatcaccttcttctcccagttctcgagaagaaaaggagagtaagaaggaaagagaagaagaatttaaaactcaccatgaaatgaaagaatactcaggctttgcaggagttagccgaccacgaggaaccttttttcgaattagaggcagaggaagagccagaggagtttttgctgggacaaatactggtccaaacaactcaaatactacttttcaaaagagaccgaaggaagaggaatgggatccagaatataccccaaagagcaagaagtacttcttgcatgacgacagagatgatggtgtggattattgggccaaaagaggaagaggtcgtggtacttttcaacgtggcagagggcgctttaacttcaaaaaatcaggtagcagtcctaaatggactcatgacaaataccaaggggatgggattgttgaagatgaagaagagaccatggaaaataatgaagaaaagaaggacagacgcaaggaagaaaaggaataataaatatgaagtaagattacaacagagcagaacttgcacccaccattttttttacctgatttttgttttcaaataagaatgtaagcattttacttaaattttactgtttgcaagtagtctatagaaattttgttttaagtcttcaaatatcttgagaaatagtagactgtatgttgaaaattgtactgaaataaagtagaaaattgttacgtaccatatttgtaactatcaacttttaaaacttttaacgtttttgttacatgcattgtaattctgctttgtctataagatatggtcaagtacagctctgtgaaagttctgattctcttccttccctgtttgtcaatgttttattctgaagtaaacgttagctctacatataaatcctggaacagaaattgtttatagagactacactaattattttaactgtatacatctgtttaatttgaacacactacatcgtagggtgactgatttttgaagtataccacagacaaaaagttgttactatggtaaactaagctagtttaacacttgagcaaatgcttaagaaggaattaaaaaaaaaaagctttgccaatagctaaaaagtacaagctattaaaaatcagattgaaaagttttgagaaaatgttatttttactgaaagcaagcagtggcctataaagaacattcttaggagccttttctatttgcgttcaaaactgtgtgttctctttctattcctatttgatagtttgagtcatggtcttagatattagctatttgtgagaggaaactggtttgtaacaatactgcaaatagaaaccccatttctactgaacatcctagttttaaacagaagaaaaactgtaatcctggggttggtatgtaggaggtctatcctgcagaataagttgatacattagtacctgatttcatatcttacatatttatttgagctgaacattagtttgtagtgtaactattagtaaaaatagagaaacacagcatactgttcattaatagtattttaaaaaaattgtttttcaaatgtcaccaataaaagttttggcaggaagcttgttgcggcattgatctaacctttttcccccccatttcagttgcagtttttgtagaatggctttttctttttcctcttaagagttctattcttcaggtagataatttttcaaatgtgaattatcttttgtgtctatattgatagctcttaaaggagtgaaaatctaaaatagtaaatttcaatgttaagtgtctgctttatgggcatatataaaagtagacacatttcatttgttaatttagttgtgtgtgtgtgttaaaaggagctaatgcttattctgttaatgtaaacttttgaagatcttaagtgtattgctctttcatcttaaacactttcgaggatttgcagtgcgtctagcacctagattacagccaggaacattggttaagaactgttggaaacaaaactaaaagcaaactcaacatatgtgatgtttatggccctcagatccttagtattgtgtgattttcccccgttaacatgtctttctaaaattgtctattaaagcagaggaaatacctgccaaaggaagtatgtattgcattaatcagggcataactaatattctcctgttcagaataatacttatttacgtgtgaaagcaacatggatgtgattcccaacacagaattttcatgacccttttattgtatacaaataaataccataacagttacttggttagacatcaaa

SEQ ID NO: 111209 - DNA, 574 bp, Homo sapiens
  Payload ID: 1784
  Gene Symbol: BCLAF1
  Gene Name: BCL2-associated transcription factor 1
  ENST ID: ENST00000533621
  CDS Start-End: 1-357
cagcattcacattccattcagcatagtcctgaaaggtctgggtctggttctgttggaaatggatctagtcgatacagtccttctcagaatagtccaattcatcacatcccttcacgaagaagtcctgcaaagacaatcgcaccacagaatgctccaagagatgagtctaggggccgttcctcgttttatcctgatggtggagatcaggaaactgcaaagactgggaagttcttaaaaaggttcacagatgaagagtctagagtattcctgcttgatagggtccccctctacacaagaatctggatgcacgagaaaagtctaccttcagagaggaaagcccacttaggatcaaaatgatagcgagtgattctcaccgtcctgaagtcaaactcaaaatggcacctgttcctcttgatgattctaacagacctgcttccttgactaaagacaggctgcttgctagtacacttgtccattctgtcaagaaggagcaagaattccgatccatctttgaccacattaagttgccacaggccagcaaaagcacttcagagtcatttattcaacacattgt

SEQ ID NO: 111210 - DNA, 744 bp, Homo sapiens
  Payload ID: 1784
  Gene Symbol: BCLAF1
  Gene Name: BCL2-associated transcription factor 1
  ENST ID: ENST00000534762
  CDS Start-End: 1-562
gggctccagggaatccagtggatcaagaaagcaggaaaaaactccaaaagattacaaggaatacaaatcttacaaagatgacagttctcgagaagaaaaggagagtaagaaggaaagagaagaagaatttaaaactcaccatgaaatgaaagaatactcaggctttgcaggagttagccgaccacgaggaaccttttttcgaattagaggcagaggaagagccagaggagtttttgctgggacaaatactggtccaaacaactcaaatactacttttcaaaagagaccgaaggaagaggaatgggatccagaatataccccaaagagcaagaagtacttcttgcatgacgacagagatgatggtgtggattattgggccaaaagaggaagaggtcgtggtacttttcaacgtggcagagggcgctttaacttcaaaaaatcaggtagcagtcctaaatggactcatgacaaataccaaggggatgggattgttgaagatgaagaagagaccatggaaaataatgaagaaaagaaggacagacgcaaggaagaaaaggaataataaatatgaagtaagattacaacagagcagaacttgcacccaccattttttttacctgatttttgttttcaaataagaatgtaagcattttacttaaattttactgtttgcaagtagtctatagaaattttgttttaagtcttcaaatatcttgagaaatagtagactgtatgttgaaaatt

SEQ ID NO: 111211 - DNA, 692 bp, Homo sapiens
  Payload ID: 1784
  Gene Symbol: BCLAF1
  Gene Name: BCL2-associated transcription factor 1
  ENST ID: ENST00000533422
  CDS Start-End: 1-380
aagatcattctcgatcttcatcctcttcagcatcaccttcttctcccagttctcgagaagaaaaggagagtaagaaggaaagagaagaagaatttaaaactcaccatgaaatgaaagaatactcaggctttgcaggagttagccgaccacgaggaacctttcatgacgacagagatgatggtgtggattattgggccaaaagaggaagaggtcgtggtacttttcaacgtggcagagggcgctttaacttcaaaaaatcaggtagcagtcctaaatggactcatgacaaataccaaggggatgggattgttgaagatgaagaagagaccatggaaaataatgaagaaaagaaggacagacgcaaggaagaaaaggaataataaatatgaagtaagattacaacagagcagaacttgcacccaccattttttttacctgatttttgttttcaaataagaataatatcagcgcatctgttaggaagattactggtgtggtaaggcttgataaatgctttataaactccctcaaacctttctttactgtttttttgttttgtcttgtttttgtttttgtttttgtttttgtttttgtttttgtttttcccttgtctcccctgggaaaatgggaaattttacagttggtaaatctaagccaaaattattttgaaataaaggaattctggatgtcca

SEQ ID NO: 111212 - DNA, 2512 bp, Homo sapiens
  Payload ID: 1784
  Gene Symbol: BCLAF1
  Gene Name: BCL2-associated transcription factor 1
  ENST ID: ENST00000628517
  CDS Start-End: 254-2512
gccccagatcggaagtgacggagacgtgctagcgcgtcgaaggtagctctatggttttcctcgcgttcttgagtcgggaaatggccgctgtgtggttgcaacggagataaattcccggaaccgcgattcggcgtgtcaggaattcgaatttagagtttaatttctcagagcattctctccaggaagaatttttacagtatctcaaagacttcacttgacttcttgatcctgcataaaaccaaggagaaaagaaatgggtcgctccaattctagatcacattcttcaaggtcaaagtctagatcacagtctagttctcgatcaagatcaagatctcattctagaaagaagcgatacagttctaggtctcgttccagaacatattcaaggtctcgtagtagagatcgtatgtattctagagattatcgtcgcgattacagaaataatagaggaatgagacgaccttatgggtacagaggaaggggtagagggtattatcaaggaggaggaggtagatatcatcgaggtggttatagacctgtctggaatagaaggcactctaggagtcctagacgaggtcgttcacgttccaggagtccaaaaagaagatccgtttcttctcaaagatccagaagcagatctcgccggtcatatagatcttctaggtctccaagatcatcctcttctcgttcttcatccccatatagcaaatctcctgtttctaaaagacgagggtctcaggaaaaacaaaccaaaaaagctgaaggggaaccccaagaagagagtccgttgaaaagtaaatcacaggaggaaccgaaagatacatttgaacatgacccatctgagtctatcgatgaatttaataagtcatcagccacatccggtgatatttggcctggcctttcagcttatgataatagtcctagatcaccccatagtccttcacctattgctacaccacctagtcagagttcatcttgctctgatgctcccatgctcagtacagttcactctgcaaaaaatactccttctcagcattcacattccattcagcatagtcctgaaaggtctgggtctggttctgttggaaatggatctagtcgatacagtccttctcagaatagtccaattcatcacatcccttcacgaagaagtcctgcaaagacaatcgcaccacagaatgctccaagagatgagtctaggggccgttcctcgttttatcctgatggtggagatcaggaaactgcaaagactgggaagttcttaaaaaggttcacagatgaagagtctagagtattcctgcttgataggggtaataccagggataaagaggcttcaaaagagaaaggatcagagaaagggagggcagagggagaatgggaagatcaggaagctctagattacttcagtgataaagagtctggaaaacaaaagtttaatgattcagaaggggatgacacagaggagacagaggattatagacagttcaggaagtcagtcctcgcagatcagggtaaaagttttgctactgcatctcaccggaatactgaggaggaaggactcaagtacaagtccaaagtttcactgaaaggcaatagagaaagtgatggatttagagaagaaaaaaattataaacttaaagagactggatatgtagtggaaaggcctagcactacaaaagataagcacaaagaagaagacaaaaattctgaaagaataacagtaaagaaagaaactcagtcacctgagcaggtaaagtctgaaaagctcaaagacctctttgattacagtccccctctacacaagaatctggatgcacgagaaaagtctaccttcagagaggaaagcccacttaggatcaaaatgatagcgagtgattctcaccgtcctgaagtcaaactcaaaatggcacctgttcctcttgatgattctaacagacctgcttccttgactaaagacaggctgcttgctagtacacttgtccattctgtcaagaaggagcaagaattccgatccatctttgaccacattaagttgccacaggccagcaaaagcacttcagagtcatttattcaacacattgtgtccttggttcatcatgttaaagagcaatacttcaagtcagctgcaatgaccctaaacgagcggttcacttcgtatcagaaagccactgaagaacatagtactcggcaaaagagccctgaaatacacaggagaattgacatctcaccaagtaccctgaggaagcatacccgtttagcaggggaagagagagtttttaaagaagaaaatcaaaagggagataaaaaattaaggtgtgactctgctgaccttcggcatgacattgatcgccgtagaaaagaaagaagtaaagaacggggagattccaagggctccagggaatccagtggatcaagaaagcaggaaaaaactccaaaagattacaaggaatacaaatcttacaaagatgacagcaaaaatgtatttgtcttttacacggcttatggtggatga

SEQ ID NO: 111213 - DNA, 793 bp, Homo sapiens
  Payload ID: 1785
  Gene Symbol: BAX
  Gene Name: BCL2-associated X protein
  Uniprot ID: Q07812
  ENST ID: ENST00000345358
  CDS Start-End: 53-631
gctgcggccgcccgcgcggacccggcgagaggcggcggcgggagcggcggtgatggacgggtccggggagcagcccagaggcggggggcccaccagctctgagcagatcatgaagacaggggcccttttgcttcagggtttcatccaggatcgagcagggcgaatggggggggaggcacccgagctggccctggacccggtgcctcaggatgcgtccaccaagaagctgagcgagtgtctcaagcgcatcggggacgaactggacagtaacatggagctgcagaggatgattgccgccgtggacacagactccccccgagaggtctttttccgagtggcagctgacatgttttctgacggcaacttcaactggggccgggttgtcgcccttttctactttgccagcaaactggtgctcaaggccctgtgcaccaaggtgccggaactgatcagaaccatcatgggctggacattggacttcctccgggagcggctgttgggctggatccaagaccagggtggttgggacggcctcctctcctactttgggacgcccacgtggcagaccgtgaccatctttgtggcgggagtgctcaccgcctcactcaccatctggaagaagatgggctgaggcccccagctgccttggactgtgtttttcctccataaattatggcatttttctgggaggggtggggattgggggacgtgggcatttttcttacttttgtaattattggggggtgtggggaagagtggtcttgagggggtaataaacctccttcgggacaca

SEQ ID NO: 111214 - DNA, 1358 bp, Homo sapiens
  Payload ID: 1785
  Gene Symbol: BAX
  Gene Name: BCL2-associated X protein
  Uniprot ID: Q07812
  ENST ID: ENST00000293288
  CDS Start-End: 1-657
atggacgggtccggggagcagcccagaggcggggggcccaccagctctgagcagatcatgaagacaggggcccttttgcttcagggtttcatccaggatcgagcagggcgaatggggggggaggcacccgagctggccctggacccggtgcctcaggatgcgtccaccaagaagctgagcgagtgtctcaagcgcatcggggacgaactggacagtaacatggagctgcagaggatgattgccgccgtggacacagactccccccgagaggtctttttccgagtggcagctgacatgttttctgacggcaacttcaactggggccgggttgtcgcccttttctactttgccagcaaactggtgctcaaggccctgtgcaccaaggtgccggaactgatcagaaccatcatgggctggacattggacttcctccgggagcggctgttgggctggatccaagaccagggtggttgggtgagactcctcaagcctcctcacccccaccaccgcgccctcaccaccgcccctgccccaccgtccctgccccccgccactcctctgggaccctgggccttctggagcaggtcacagtggtgccctctccccatcttcagatcatcagatgtggtctataatgcgttttccttacgtgtctgatcaatccccgattcatctaccctgctgacctcccagtgacccctgacctcactgtgaccttgacttgattagtgccttctgccctccctggagcctccactgcctctggaattgctcaagttcattgatgaccctctgaccctagctctttcctttttttttttttccccactgagaaggggtctcgctatgttgcccaggttggtctcgaactcctggcctcaagcgatcctcccgcctcagcctctcaaagtgctgggattacaggtgtgagccaccatgcctggcctgagtccagctctttaatgcccgttcatctcagtcccctgcccgcaatcctgccttctggcctcctccgtccctgatcccgcctctgcctgcccaggggctgcccctggccgagtcactgaagcgactgatgtccctgtctccaggacggcctcctctcctactttgggacgcccacgtggcagaccgtgaccatctttgtggcgggagtgctcaccgcctcactcaccatctggaagaagatgggctgaggcccccagctgccttggactgtgtttttcctccataaattatggcatttttctgggaggggtggggattgggggacgtgggcatttttcttacttttgtaattattggggggtgtggggaagagtggtcttgagggggtaataaacctccttcgggacaca

SEQ ID NO: 111215 - DNA, 433 bp, Homo sapiens
  Payload ID: 1785
  Gene Symbol: BAX
  Gene Name: BCL2-associated X protein
  Uniprot ID: Q07812
  ENST ID: ENST00000354470
  CDS Start-End: 1-432
atggacgggtccggggagcagcccagaggcggggggcccaccagctctgagcagatcatgaagacaggggcccttttgcttcaggggatgattgccgccgtggacacagactccccccgagaggtctttttccgagtggcagctgacatgttttctgacggcaacttcaactggggccgggttgtcgcccttttctactttgccagcaaactggtgctcaaggccctgtgcaccaaggtgccggaactgatcagaaccatcatgggctggacattggacttcctccgggagcggctgttgggctggatccaagaccagggtggttgggacggcctcctctcctactttgggacgcccacgtggcagaccgtgaccatctttgtggcgggagtgctcaccgcctcactcaccatctggaagaagatgggctgag

SEQ ID NO: 111216 - DNA, 677 bp, Homo sapiens
  Payload ID: 1785
  Gene Symbol: BAX
  Gene Name: BCL2-associated X protein
  Uniprot ID: Q07812
  ENST ID: ENST00000356483
  CDS Start-End: 1-495
atggacgggtccggggagcagcccagaggcggggggcccaccagctctgagcagatcatgaagacaggggcccttttgcttcagggtttcatccaggatcgagcagggcgaatggggggggaggcacccgagctggccctggacccggtgcctcaggatgcgtccaccaagaagctgagcgagtgtctcaagcgcatcggggacgaactggacagtaacatggagctgcagaggatgattgccgccgtggacacagactccccccgagaggtctttttccgagtggcagctgacatgttttctgacggcaacttcaactggggccgggttgtcgcccttttctactttgccagcaaactggtgctcaaggctggcgtgaaatggcgtgatctgggctcactgcaacctctgcctcctgggttcaagcgattcacctgcctcagcatcccaaggagctgggattacaggccctgtgcaccaaggtgccggaactgatcagaaccatcatgggctggacattggacttcctccgggagcggctgttgggctggatccaagaccagggtggttgggacggcctcctctcctactttgggacgcccacgtggcagaccgtgaccatctttgtggcgggagtgctcaccgcctcactcaccatctggaagaagatgggctga

SEQ ID NO: 111217 - DNA, 687 bp, Homo sapiens
  Payload ID: 1785
  Gene Symbol: BAX
  Gene Name: BCL2-associated X protein
  ENST ID: ENST00000391871
  CDS Start-End: 1-528
atggacgggtccggggagcagcccagaggcgggggttttcatccaggatcgagcagggcgaatgggggggaggcacccgagctggccctggacccggtgcctcaggatgcgtccaccaagaagctgagcgagtgtctcaagcgcatcggggacgaactggacagtaacatggagctgcagaggatgattgccgccgtggacacagactccccccgagaggtctttttccgagtggcagctgacatgttttctgacggcaacttcaactggggccgggttgtcgcccttttctactttgccagcaaactggtgctcaaggccctgtgcaccaaggtgccggaactgatcagaaccatcatgggctggacattggacttcctccgggagcggctgttgggctggatccaagaccagggtggttgggacggcctcctctcctactttgggacgcccacgtggcagaccgtgaccatctttgtggcgggagtgctcaccgcctcactcaccatctggaagaagatgggctgaggcccccagctgccttggactgtgtttttcctccataaattatggcatttttctgggaggggtggggattgggggacgtgggcatttttcttacttttgtaattattggggggtgtggggaagagtggtcttgagggggtaataaacctccttcgggac

SEQ ID NO: 111218 - DNA, 540 bp, Homo sapiens
  Payload ID: 1785
  Gene Symbol: BAX
  Gene Name: BCL2-associated X protein
  Uniprot ID: Q07812
  ENST ID: ENST00000415969
  CDS Start-End: 1-540
atggacgggtccggggagcagcccagaggcggggggcccaccagctctgagcagatcatgaagacaggggcccttttgcttcagggtttcatccaggatcgagcagggcgaatggggggggaggcacccgagctggccctggacccggtgcctcaggatgcgtccaccaagaagctgagcgagtgtctcaagcgcatcggggacgaactggacagtaacatggagctgcagaggatgattgccgccgtggacacagactccccccgagaggtctttttccgagtggcagctgacatgttttctgacggcaacttcaactggggccgggttgtcgcccttttctactttgccagcaaactggtgctcaaggccctgtgcaccaaggtgccggaactgatcagaaccatcatgggctggacattggacttcctccgggagcggctgttgggctggatccaagaccagggtggttggaccgtgaccatctttgtggcgggagtgctcaccgcctcactcaccatctggaagaagatgggctga

SEQ ID NO: 111219 - DNA, 383 bp, Homo sapiens
  Payload ID: 1785
  Gene Symbol: BAX
  Gene Name: BCL2-associated X protein
  ENST ID: ENST00000506183
  CDS Start-End: 1-380
atggacgggtccggggagcagcccagaggcgggggatgattgccgccgtggacacagactccccccgagaggtctttttccgagtggcagctgacatgttttctgacggcaacttcaactggggccgggttgtcgcccttttctactttgccagcaaactggtgctcaaggccctgtgcaccaaggtgccggaactgatcagaaccatcatgggctggacattggacttcctccgggagcggctgttgggctggatccaagaccagggtggttgggacggcctcctctcctactttgggacgcccacgtggcagaccgtgaccatctttgtggcgggagtgctcaccgcctcactcaccatctggaagaagatgggctgaggc

SEQ ID NO: 111220 - DNA, 300 bp, Homo sapiens
  Payload ID: 1785
  Gene Symbol: BAX
  Gene Name: BCL2-associated X protein
  Uniprot ID: Q07812
  ENST ID: ENST00000515540
  CDS Start-End: 1-126
atggacgggtccggggagcagcccagaggcggggtttcatccaggatcgagcagggcgaatggggggggaggcacccgagctggccctggacccggtgcctcaggatgcgtccaccaagaagctgagcgagtgtctcaagcgcatcggggacgaactggacagtaacatggagctgcagaggatgattgccgccgtggacacagactccccccgagaggtctttttccgagtggcagctgacatgttttctgacggcaacttcaactggggccgggttgtcgcccttttctactttgcca

SEQ ID NO: 111221 - DNA, 458 bp, Homo sapiens
  Payload ID: 1785
  Gene Symbol: BAX
  Gene Name: BCL2-associated X protein
  ENST ID: ENST00000539787
  CDS Start-End: 36-458
atggacgggtccggggagcagcccagaggcgggggatgattgccgccgtggacacagactccccccgagaggtctttttccgagtggcagctgacatgttttctgacggcaacttcaactggggccgggttgtcgcccttttctactttgccagcaaactggtgctcaaggccctgtgcaccaaggtgccggaactgatcagaaccatcatgggctggacattggacttcctccgggagcggctgttgggctggatccaagaccagggtggttgggtgagactcctcaagcctcctcacccccaccaccgcgccctcaccaccgcccctgccccaccgtccctgccccccgccactcctctgggaccctgggccttctggagcaggtcacagtggtgccctctccccatcttcagatcatcagatgtggtctataatgcgttttccttacgtgtctga

SEQ ID NO: 111222 - DNA, 953 bp, Homo sapiens
  Payload ID: 1786
  Gene Symbol: BIK
  Gene Name: BCL2-interacting killer (apoptosis-inducing)
  Uniprot ID: Q13323
  ENST ID: ENST00000216115
  CDS Start-End: 64-546
gcagacacgaagcctcccgggtggcttacagacgctgccagcatcgccgccgccagaggagaaatgtctgaagtaagacccctctccagagacatcttgatggagaccctcctgtatgagcagctcctggaacccccgaccatggaggttcttggcatgactgactctgaagaggacctggaccctatggaggacttcgattctttggaatgcatggagggcagtgacgcattggccctgcggctggcctgcatcggggacgagatggacgtgagcctcagggccccgcgcctggcccagctctccgaggtggccatgcacagcctgggtctggctttcatctacgaccagactgaggacatcagggatgttcttagaagtttcatggacggtttcaccacacttaaggagaacataatgaggttctggagatccccgaaccccgggtcctgggtgtcctgcgaacaggtgctgctggcgctgctgctgctgctggcgctgctgctgccgctgctcagcgggggcctgcacctgctgctcaagtgaggccccggcggctcagggcggggctggccccacccccatgaccactgccctggaggtggcggcctgctgctgttatctttttaactgttttctcatgatgcctttttatatttaaaccccgagatagtgctggaacactgctgaggttttatactcaggttttttgttttttttttattccagttttcgttttttctaaaagatgaattcctatggctctgcaattgtcaccggttaactgtggcctgtgcccaggaagagccattcactcctgcccctgcccacacggcaggtagcagggggagtgctggtcacacccctgtgtgatatgtgatgccctcggcaaagaatctactggaatagattccgaggagcaggagtgctcaataaaatgttggtttccagca

SEQ ID NO: 111223 - DNA, 1241 bp, Homo sapiens
  Payload ID: 1787
  Gene Symbol: BCL2L2-PABPN1
  Gene Name: BCL2L2-PABPN1 readthrough
  Uniprot ID: Q92843
  ENST ID: ENST00000553781
  CDS Start-End: 157-1158
ctccctccctcccagctcctgcaccaggaaacggcccggatcccggcagcggcctgacccggctccacgctggccaggaggatgaaaggccccagctgggggctccttgccaccagtgctgtgtcttaagagctgccatcccggctggccgcccggatggcgaccccagcctcggccccagacacacgggctctggtggcagactttgtaggttataagctgaggcagaagggttatgtctgtggagctggccccggggagggcccagcagctgacccgctgcaccaagccatgcgggcagctggagatgagttcgagacccgcttccggcgcaccttctctgatctggcggctcagctgcatgtgaccccaggctcagcccaacaacgcttcacccaggtctccgatgaactttttcaagggggccccaactggggccgccttgtagccttctttgtctttggggctgcactgtgtgctgagagtgtcaacaaggagatggaaccactggtgggacaagtgcaggagtggatggtggcctacctggagacgcagctggctgactggatccacagcagtgggggctgggagctggaagctatcaaagctcgagtcagggagatggaggaagaagctgagaagctaaaggagctacagaacgaggtagagaagcagatgaatatgagtccacctccaggcaatgctggcccggtgatcatgtccattgaggagaagatggaggctgatgcccgttccatctatgttggcaatgtggactatggtgcaacagcagaagagctggaagctcactttcatggctgtggttcagtcaaccgtgttaccatactgtgtgacaaatttagtggccatcccaaagggtttgcgtatatagagttctcagacaaagagtcagtgaggacttccttggccttagatgagtccctatttagaggaaggcaaatcaaggtgatcccaaaacgaaccaacagaccaggcatcagcacaacagaccggggttttccacgagcccgctaccgcgcccggaccaccaactacaacagctcccgctctcgattctacagtggttttaacagcaggccccggggtcgcgtctacaggggccgggctagagcgacatcatggtattccccttactaaaaaaagtgtgtattaggaggagagagaggaaaaaaagaggaaagaaggaaaaaaaaaagaattaaaaaaaaaaaaaagaaaaa

SEQ ID NO: 111224 - DNA, 1366 bp, Homo sapiens
  Payload ID: 1787
  Gene Symbol: BCL2L2-PABPN1
  Gene Name: BCL2L2-PABPN1 readthrough
  Uniprot ID: Q92843
  ENST ID: ENST00000557008
  CDS Start-End: 322-1323
tttgggctgcactagggggaaccgggaatagagatggtgtcggcaggaagcccttggccttgggtttcccgggaggacagtcattaaacatggattcggccacacagctggtagagcgttgggggcaggggcctaggcccagagctgcaaccctagcccttcccaggccagaacctgatccctggccttcccctcctggttctgatctccccctcccctttccagggctccacgctggccaggaggatgaaaggccccagctgggggctccttgccaccagtgctgtgtcttaagagctgccatcccggctggccgcccggatggcgaccccagcctcggccccagacacacgggctctggtggcagactttgtaggttataagctgaggcagaagggttatgtctgtggagctggccccggggagggcccagcagctgacccgctgcaccaagccatgcgggcagctggagatgagttcgagacccgcttccggcgcaccttctctgatctggcggctcagctgcatgtgaccccaggctcagcccaacaacgcttcacccaggtctccgatgaactttttcaagggggccccaactggggccgccttgtagccttctttgtctttggggctgcactgtgtgctgagagtgtcaacaaggagatggaaccactggtgggacaagtgcaggagtggatggtggcctacctggagacgcagctggctgactggatccacagcagtgggggctgggagctggaagctatcaaagctcgagtcagggagatggaggaagaagctgagaagctaaaggagctacagaacgaggtagagaagcagatgaatatgagtccacctccaggcaatgctggcccggtgatcatgtccattgaggagaagatggaggctgatgcccgttccatctatgttggcaatgtggactatggtgcaacagcagaagagctggaagctcactttcatggctgtggttcagtcaaccgtgttaccatactgtgtgacaaatttagtggccatcccaaagggtttgcgtatatagagttctcagacaaagagtcagtgaggacttccttggccttagatgagtccctatttagaggaaggcaaatcaaggtgatcccaaaacgaaccaacagaccaggcatcagcacaacagaccggggttttccacgagcccgctaccgcgcccggaccaccaactacaacagctcccgctctcgattctacagtggttttaacagcaggccccggggtcgcgtctacaggggccgggctagagcgacatcatggtattccccttactaaaaaaagtgtgtattaggaggagagagaggaaaaaaagaggaaa

SEQ ID NO: 111225 - DNA, 2610 bp, Homo sapiens
  Payload ID: 1788
  Gene Symbol: BCL2L1
  Gene Name: BCL2-like 1
  Uniprot ID: Q07817
  ENST ID: ENST00000307677
  CDS Start-End: 412-1113
gcaggaggccgcggctgcggagcggccgccctcgatccgggcgatggaggaggaagcaagcgagggggctggttcctgagcttcgcaattcctgtgtcgccttctgggctcccagcctgccgggtcgcatgatccctccggccggagctggtttttttgccagccaccgcgaggccggctgagttaccggcatccccgcagccacctcctctcccgacctgtgatacaaaagatcttccgggggctgcacctgcctgcctttgcctaaggcggatttgaatctctttctctcccttcagaatcttatcttggctttggatcttagaagagaatcactaaccagagacgagactcagtgagtgagcaggtgttttggacaatggactggttgagcccatccctattataaaaatgtctcagagcaaccgggagctggtggttgactttctctcctacaagctttcccagaaaggatacagctggagtcagtttagtgatgtggaagagaacaggactgaggccccagaagggactgaatcggagatggagacccccagtgccatcaatggcaacccatcctggcacctggcagacagccccgcggtgaatggagccactggccacagcagcagtttggatgcccgggaggtgatccccatggcagcagtaaagcaagcgctgagggaggcaggcgacgagtttgaactgcggtaccggcgggcattcagtgacctgacatcccagctccacatcaccccagggacagcatatcagagctttgaacaggtagtgaatgaactcttccgggatggggtaaactggggtcgcattgtggcctttttctccttcggcggggcactgtgcgtggaaagcgtagacaaggagatgcaggtattggtgagtcggatcgcagcttggatggccacttacctgaatgaccacctagagccttggatccaggagaacggcggctgggatacttttgtggaactctatgggaacaatgcagcagccgagagccgaaagggccaggaacgcttcaaccgctggttcctgacgggcatgactgtggccggcgtggttctgctgggctcactcttcagtcggaaatgaccagacactgaccatccactctaccctcccacccccttctctgctccaccacatcctccgtccagccgccattgccaccaggagaaccactacatgcagcccatgcccacctgcccatcacagggttgggcccagatctggtcccttgcagctagttttctagaatttatcacacttctgtgagacccccacacctcagttcccttggcctcagaattcacaaaatttccacaaaatctgtccaaaggaggctggcaggtatggaagggtttgtggctgggggcaggagggccctacctgattggtgcaacccttaccccttagcctccctgaaaatgtttttctgccagggagcttgaaagttttcagaacctcttccccagaaaggagactagattgcctttgttttgatgtttgtggcctcagaattgatcattttccccccactctccccacactaacctgggttccctttccttccatccctaccccctaagagccatttaggggccacttttgactagggattcaggctgcttgggataaagatgcaaggaccaggactccctcctcacctctggactggctagagtcctcactcccagtccaaatgtcctccagaagcctctggctagaggccagccccacccaggagggagggggctatagctacaggaagcaccccatgccaaagctagggtggcccttgcagttcagcaccaccctagtcccttcccctccctggctcccatgaccatactgagggaccaactgggcccaagacagatgccccagagctgtttatggcctcagctgcctcacttcctacaagagcagcctgtggcatctttgccttgggctgctcctcatggtgggttcaggggactcagccctgaggtgaaagggagctatcaggaacagctatgggagccccagggtcttccctacctcaggcaggaagggcaggaaggagagcctgctgcatggggtggggtagggctgactagaagggccagtcctgcctggccaggcagatctgtgccccatgcctgtccagcctgggcagccaggctgccaaggccagagtggcctggccaggagctcttcaggcctccctctctcttctgctccacccttggcctgtctcatccccaggggtcccagccaccccgggctctctgctgtacatatttgagactagtttttattccttgtgaagatgatatactatttttgttaagcgtgtctgtatttatgtgtgaggagctgctggcttgcagtgcgcgtgcacgtggagagctggtgcccggagattggacggcctgatgctccctcccctgccctggtccagggaagctggccgagggtcctggctcctgaggggcatctgcccctcccccaacccccaccccacacttgttccagctctttgaaatagtctgtgtgaaggtgaaagtgcagttcagtaataaactgtgtttactcagtgaacaaaga

SEQ ID NO: 111226 - DNA, 2383 bp, Homo sapiens
  Payload ID: 1788
  Gene Symbol: BCL2L1
  Gene Name: BCL2-like 1
  Uniprot ID: Q07817
  ENST ID: ENST00000376055
  CDS Start-End: 374-886
gggcgatggaggaggaagcaagcgagggggctggttcctgagcttcgcaattcctgtgtcgccttctgggctcccagcctgccgggtcgcatgatccctccggccggagctggtttttttgccagccaccgcgaggccggctgagttaccggcatccccgcagccacctcctctcccgacctgtgatacaaaagatcttccgggggctgcacctgcctgcctttgcctaaggcggatttgaatctctttctctcccttcagaatcttatcttggctttggatcttagaagagaatcactaaccagagacgagactcagtgagtgagcaggtgttttggacaatggactggttgagcccatccctattataaaaatgtctcagagcaaccgggagctggtggttgactttctctcctacaagctttcccagaaaggatacagctggagtcagtttagtgatgtggaagagaacaggactgaggccccagaagggactgaatcggagatggagacccccagtgccatcaatggcaacccatcctggcacctggcagacagccccgcggtgaatggagccactggccacagcagcagtttggatgcccgggaggtgatccccatggcagcagtaaagcaagcgctgagggaggcaggcgacgagtttgaactgcggtaccggcgggcattcagtgacctgacatcccagctccacatcaccccagggacagcatatcagagctttgaacaggatacttttgtggaactctatgggaacaatgcagcagccgagagccgaaagggccaggaacgcttcaaccgctggttcctgacgggcatgactgtggccggcgtggttctgctgggctcactcttcagtcggaaatgaccagacactgaccatccactctaccctcccacccccttctctgctccaccacatcctccgtccagccgccattgccaccaggagaaccactacatgcagcccatgcccacctgcccatcacagggttgggcccagatctggtcccttgcagctagttttctagaatttatcacacttctgtgagacccccacacctcagttcccttggcctcagaattcacaaaatttccacaaaatctgtccaaaggaggctggcaggtatggaagggtttgtggctgggggcaggagggccctacctgattggtgcaacccttaccccttagcctccctgaaaatgtttttctgccagggagcttgaaagttttcagaacctcttccccagaaaggagactagattgcctttgttttgatgtttgtggcctcagaattgatcattttccccccactctccccacactaacctgggttccctttccttccatccctaccccctaagagccatttaggggccacttttgactagggattcaggctgcttgggataaagatgcaaggaccaggactccctcctcacctctggactggctagagtcctcactcccagtccaaatgtcctccagaagcctctggctagaggccagccccacccaggagggagggggctatagctacaggaagcaccccatgccaaagctagggtggcccttgcagttcagcaccaccctagtcccttcccctccctggctcccatgaccatactgagggaccaactgggcccaagacagatgccccagagctgtttatggcctcagctgcctcacttcctacaagagcagcctgtggcatctttgccttgggctgctcctcatggtgggttcaggggactcagccctgaggtgaaagggagctatcaggaacagctatgggagccccagggtcttccctacctcaggcaggaagggcaggaaggagagcctgctgcatggggtggggtagggctgactagaagggccagtcctgcctggccaggcagatctgtgccccatgcctgtccagcctgggcagccaggctgccaaggccagagtggcctggccaggagctcttcaggcctccctctctcttctgctccacccttggcctgtctcatccccaggggtcccagccaccccgggctctctgctgtacatatttgagactagtttttattccttgtgaagatgatatactatttttgttaagcgtgtctgtatttatgtgtgaggagctgctggcttgcagtgcgcgtgcacgtggagagctggtgcccggagattggacggcctgatgctccctcccctgccctggtccagggaagctggccgagggtcctggctcctgaggggcatctgcccctcccccaacccccaccccacacttgttccagctctttgaaatagtctgtgtgaaggtgaaagtgcagttcagtaataaactgtgtttactcagtgaacaaaga

SEQ ID NO: 111227 - DNA, 2578 bp, Homo sapiens
  Payload ID: 1788
  Gene Symbol: BCL2L1
  Gene Name: BCL2-like 1
  Uniprot ID: Q07817
  ENST ID: ENST00000376062
  CDS Start-End: 380-1081
ggagtggggcgggggggactgcccagggagtgactttccgaggaaggcatttcggagaagacgggggtagaaaaggctggtgggagattcagagtccactggtgctttcgatttgacttaagtgaagtatcttggaacctagacccagaccttcgtaagacccacaaagaaaccagttctggtacctggagggggaatggaatttttagggtaaatggcatgcatattaattatttttttttcctgaagctctttctctcccttcagaatcttatcttggctttggatcttagaagagaatcactaaccagagacgagactcagtgagtgagcaggtgttttggacaatggactggttgagcccatccctattataaaaatgtctcagagcaaccgggagctggtggttgactttctctcctacaagctttcccagaaaggatacagctggagtcagtttagtgatgtggaagagaacaggactgaggccccagaagggactgaatcggagatggagacccccagtgccatcaatggcaacccatcctggcacctggcagacagccccgcggtgaatggagccactggccacagcagcagtttggatgcccgggaggtgatccccatggcagcagtaaagcaagcgctgagggaggcaggcgacgagtttgaactgcggtaccggcgggcattcagtgacctgacatcccagctccacatcaccccagggacagcatatcagagctttgaacaggtagtgaatgaactcttccgggatggggtaaactggggtcgcattgtggcctttttctccttcggcggggcactgtgcgtggaaagcgtagacaaggagatgcaggtattggtgagtcggatcgcagcttggatggccacttacctgaatgaccacctagagccttggatccaggagaacggcggctgggatacttttgtggaactctatgggaacaatgcagcagccgagagccgaaagggccaggaacgcttcaaccgctggttcctgacgggcatgactgtggccggcgtggttctgctgggctcactcttcagtcggaaatgaccagacactgaccatccactctaccctcccacccccttctctgctccaccacatcctccgtccagccgccattgccaccaggagaaccactacatgcagcccatgcccacctgcccatcacagggttgggcccagatctggtcccttgcagctagttttctagaatttatcacacttctgtgagacccccacacctcagttcccttggcctcagaattcacaaaatttccacaaaatctgtccaaaggaggctggcaggtatggaagggtttgtggctgggggcaggagggccctacctgattggtgcaacccttaccccttagcctccctgaaaatgtttttctgccagggagcttgaaagttttcagaacctcttccccagaaaggagactagattgcctttgttttgatgtttgtggcctcagaattgatcattttccccccactctccccacactaacctgggttccctttccttccatccctaccccctaagagccatttaggggccacttttgactagggattcaggctgcttgggataaagatgcaaggaccaggactccctcctcacctctggactggctagagtcctcactcccagtccaaatgtcctccagaagcctctggctagaggccagccccacccaggagggagggggctatagctacaggaagcaccccatgccaaagctagggtggcccttgcagttcagcaccaccctagtcccttcccctccctggctcccatgaccatactgagggaccaactgggcccaagacagatgccccagagctgtttatggcctcagctgcctcacttcctacaagagcagcctgtggcatctttgccttgggctgctcctcatggtgggttcaggggactcagccctgaggtgaaagggagctatcaggaacagctatgggagccccagggtcttccctacctcaggcaggaagggcaggaaggagagcctgctgcatggggtggggtagggctgactagaagggccagtcctgcctggccaggcagatctgtgccccatgcctgtccagcctgggcagccaggctgccaaggccagagtggcctggccaggagctcttcaggcctccctctctcttctgctccacccttggcctgtctcatccccaggggtcccagccaccccgggctctctgctgtacatatttgagactagtttttattccttgtgaagatgatatactatttttgttaagcgtgtctgtatttatgtgtgaggagctgctggcttgcagtgcgcgtgcacgtggagagctggtgcccggagattggacggcctgatgctccctcccctgccctggtccagggaagctggccgagggtcctggctcctgaggggcatctgcccctcccccaacccccaccccacacttgttccagctctttgaaatagtctgtgtgaaggtgaaagtgcagttcagtaataaactgtgtttactcagtgaacaaaga

SEQ ID NO: 111228 - DNA, 781 bp, Homo sapiens
  Payload ID: 1788
  Gene Symbol: BCL2L1
  Gene Name: BCL2-like 1
  ENST ID: ENST00000439267
  CDS Start-End: 239-781
ctttgcgtctcgggctcgcgcgcgttgccgcggcaccggaagtgactgagcttgcaagttcccctgtctcttcaggggaaactgaggccggcttgttcgggagagacggcgcgagcagtcagccagaatcttatcttggctttggatcttagaagagaatcactaaccagagacgagactcagtgagtgagcaggtgttttggacaatggactggttgagcccatccctattataaaaatgtctcagagcaaccgggagctggtggttgactttctctcctacaagctttcccagaaaggatacagctggagtcagtttagtgatgtggaagagaacaggactgaggccccagaagggactgaatcggagatggagacccccagtgccatcaatggcaacccatcctggcacctggcagacagccccgcggtgaatggagccactggccacagcagcagtttggatgcccgggaggtgatccccatggcagcagtaaagcaagcgctgagggaggcaggcgacgagtttgaactgcggtaccggcgggcattcagtgacctgacatcccagctccacatcaccccagggacagcatatcagagctttgaacaggtagtgaatgaactcttccgggatggggtaaactggggtcgcattgtggcctttttctccttcggcggggcactgtgcgtggaaagcgtagacaaggagatgcaggtattggtgagtcggatcgcagcttggatggccacttacctgaatgaccacctagagccttgg

SEQ ID NO: 111229 - DNA, 820 bp, Homo sapiens
  Payload ID: 1788
  Gene Symbol: BCL2L1
  Gene Name: BCL2-like 1
  ENST ID: ENST00000420488
  CDS Start-End: 257-820
ctttgcgtctcgggctcgcgcgcgttgccgcggcaccggaagtgactgagcttgcaagttcccctgtctcttcaggggaaactgaggccggcttgttcgggagagacggcgcgagcagtcagccagctctttctctcccttcagaatcttatcttggctttggatcttagaagagaatcactaaccagagacgagactcagtgagtgagcaggtgttttggacaatggactggttgagcccatccctattataaaaatgtctcagagcaaccgggagctggtggttgactttctctcctacaagctttcccagaaaggatacagctggagtcagtttagtgatgtggaagagaacaggactgaggccccagaagggactgaatcggagatggagacccccagtgccatcaatggcaacccatcctggcacctggcagacagccccgcggtgaatggagccactggccacagcagcagtttggatgcccgggaggtgatccccatggcagcagtaaagcaagcgctgagggaggcaggcgacgagtttgaactgcggtaccggcgggcattcagtgacctgacatcccagctccacatcaccccagggacagcatatcagagctttgaacaggtagtgaatgaactcttccgggatggggtaaactggggtcgcattgtggcctttttctccttcggcggggcactgtgcgtggaaagcgtagacaaggagatgcaggtattggtgagtcggatcgcagcttggatggccacttacctgaatgaccacctagagccttggatccaggagaacggcggctgg

SEQ ID NO: 111230 - DNA, 914 bp, Homo sapiens
  Payload ID: 1788
  Gene Symbol: BCL2L1
  Gene Name: BCL2-like 1
  ENST ID: ENST00000456404
  CDS Start-End: 351-914
ccggaagtgactgagcttgcaagttcccctgtctcttcaggggaaactgaggccggcttgttcgggagagacggcgcgagcagtcagccaggtaggccggcagccaggtaggccggcccgggtccgcggcgcggaactcggccgcgaagagctcttgcgtctggaagctaccgggccgatgaagggggatgtggccccccacggctcgcggggctcgcagctctttctctcccttcagaatcttatcttggctttggatcttagaagagaatcactaaccagagacgagactcagtgagtgagcaggtgttttggacaatggactggttgagcccatccctattataaaaatgtctcagagcaaccgggagctggtggttgactttctctcctacaagctttcccagaaaggatacagctggagtcagtttagtgatgtggaagagaacaggactgaggccccagaagggactgaatcggagatggagacccccagtgccatcaatggcaacccatcctggcacctggcagacagccccgcggtgaatggagccactggccacagcagcagtttggatgcccgggaggtgatccccatggcagcagtaaagcaagcgctgagggaggcaggcgacgagtttgaactgcggtaccggcgggcattcagtgacctgacatcccagctccacatcaccccagggacagcatatcagagctttgaacaggtagtgaatgaactcttccgggatggggtaaactggggtcgcattgtggcctttttctccttcggcggggcactgtgcgtggaaagcgtagacaaggagatgcaggtattggtgagtcggatcgcagcttggatggccacttacctgaatgaccacctagagccttggatccaggagaacggcggctgg

SEQ ID NO: 111231 - DNA, 381 bp, Homo sapiens
  Payload ID: 1788
  Gene Symbol: BCL2L1
  Gene Name: BCL2-like 1
  ENST ID: ENST00000434194
  CDS Start-End: 236-381
tttcggagaagacgggggtagaaaaggctggtgggagattcagagtccactggtgctttcgatttgacttaagtgaagtatcttggaacctagacccagaccttcctctttctctcccttcagaatcttatcttggctttggatcttagaagagaatcactaaccagagacgagactcagtgagtgagcaggtgttttggacaatggactggttgagcccatccctattataaaaatgtctcagagcaaccgggagctggtggttgactttctctcctacaagctttcccagaaaggatacagctggagtcagtttagtgatgtggaagagaacaggactgaggccccagaagggactgaatcggagatggagacccccag

SEQ ID NO: 111232 - DNA, 894 bp, Homo sapiens
  Payload ID: 1788
  Gene Symbol: BCL2L1
  Gene Name: BCL2-like 1
  ENST ID: ENST00000450273
  CDS Start-End: 279-894
ggcttgttcgggagagacggcgcgagcagtcagccaggtaggccggcagccaggtaggccggcccgggtccgcggcgcggaactcggccgcgaagagctcttgcgtctggaagctaccgggccgatgaagggggatgtggccccccacggctcgcggggctcgcagaatcttatcttggctttggatcttagaagagaatcactaaccagagacgagactcagtgagtgagcaggtgttttggacaatggactggttgagcccatccctattataaaaatgtctcagagcaaccgggagctggtggttgactttctctcctacaagctttcccagaaaggatacagctggagtcagtttagtgatgtggaagagaacaggactgaggccccagaagggactgaatcggagatggagacccccagtgccatcaatggcaacccatcctggcacctggcagacagccccgcggtgaatggagccactggccacagcagcagtttggatgcccgggaggtgatccccatggcagcagtaaagcaagcgctgagggaggcaggcgacgagtttgaactgcggtaccggcgggcattcagtgacctgacatcccagctccacatcaccccagggacagcatatcagagctttgaacaggtagtgaatgaactcttccgggatggggtaaactggggtcgcattgtggcctttttctccttcggcggggcactgtgcgtggaaagcgtagacaaggagatgcaggtattggtgagtcggatcgcagcttggatggccacttacctgaatgaccacctagagccttggatccaggagaacggcggctgggatacttttgtggaactctatgggaacaatgcagcagccgagagccgaaagg

SEQ ID NO: 111233 - DNA, 1157 bp, Homo sapiens
  Payload ID: 1788
  Gene Symbol: BCL2L1
  Gene Name: BCL2-like 1
  ENST ID: ENST00000422920
  CDS Start-End: 594-1157
gaaaccttgaaccccattgagaagtccctttagggtttcggacgcctccacctcaccctgggctggtgcttaaatagaaaaaagaaaaacaaaaaccaactaaatccataccagccacctccgggagagtactcctggctcccagtaggaggcggagagccaaggggcgtgcaagagagagggggctgggctcccgggtggcaggaggccgcggctgcggagcggccgccctcgatccgggcgatggaggaggaagcaagcgagggggctggttcctgagcttcgcaattcctgtgtcgccttctgggctcccagcctgccgggtcgcatgatccctccggccggagctggtttttttgccagccaccgcgaggccggctgagttaccggcatccccgcagccacctcctctcccgacctgtgatacaaaagatcttccgggggctgcacctgcctgcctttgcctaaggcggatttgaataatcttatcttggctttggatcttagaagagaatcactaaccagagacgagactcagtgagtgagcaggtgttttggacaatggactggttgagcccatccctattataaaaatgtctcagagcaaccgggagctggtggttgactttctctcctacaagctttcccagaaaggatacagctggagtcagtttagtgatgtggaagagaacaggactgaggccccagaagggactgaatcggagatggagacccccagtgccatcaatggcaacccatcctggcacctggcagacagccccgcggtgaatggagccactggccacagcagcagtttggatgcccgggaggtgatccccatggcagcagtaaagcaagcgctgagggaggcaggcgacgagtttgaactgcggtaccggcgggcattcagtgacctgacatcccagctccacatcaccccagggacagcatatcagagctttgaacaggtagtgaatgaactcttccgggatggggtaaactggggtcgcattgtggcctttttctccttcggcggggcactgtgcgtggaaagcgtagacaaggagatgcaggtattggtgagtcggatcgcagcttggatggccacttacctgaatgaccacctagagccttggatccaggagaacggcggctgg

SEQ ID NO: 111234 - DNA, 1249 bp, Homo sapiens
  Payload ID: 1789
  Gene Symbol: BCL2L10
  Gene Name: BCL2-like 10 (apoptosis facilitator)
  Uniprot ID: Q9HD36
  ENST ID: ENST00000260442
  CDS Start-End: 50-664
cgggccaagaaaaccagcgaaggcccggccccccagcagaggccggaccatggttgaccagttgcgggagcgcaccaccatggccgacccgctgcgggagcgcaccgagctgttgctggccgactacctggggtactgcgcccgggaacccggcacccccgagccggcgccatccacgcccgaggccgccgtgctgcgctccgcggccgccaggttacggcagattcaccggtcctttttctccgcctacctcggctaccccgggaaccgcttcgagctggtggcgctgatggcggattccgtgctctccgacagccccggccccacctggggcagagtggtgacgctcgtgaccttcgcagggacgctgctggagagagggccgctggtgaccgcccggtggaagaagtggggcttccagccgcggctaaaggagcaggagggcgacgtcgcccgggactgccagcgcctggtggccttgctgagctcgcggctcatggggcagcaccgcgcctggctgcaggctcagggcggctgggatggcttttgtcacttcttcaggaccccctttccactggctttttggagaaaacagctggtccaggcttttctgtcatgcttgttaacaacagccttcatttatctctggacacgattattatgagttttaaaacttttaacccgcttctacctgcccaactgtgaccaactaaatgacagatgtgtgagaacaagaactgagggaaagcaccttcccccaccccagacgtttttatctgaatgcatacaaggagtcctgaggtggtgatttggccagtgttttaacttgtgacaagtactcaggtgtgaggacaagaatgcaaatggctcttccttgagtgaaagaaatggggagtctagagcctctttatgccaaagaaccgcagaagaaactgcattccattaaatgggaaatacagtgctatttgctaaaacttggataagagtgcgaacctctcatctctccacaacttcatgtgctgctgactaattttaaacatggccacagctggggcaaaataatccccaaagtagaaaaagtcccagtttaacaaagaatgtaatgttaaaatcacttataaggaattctttgaaaccaaatcctttgaaatctaattcctgggacttctaggtttttatagttaacatactaatttcttcaataattgttaactgcaaagttttaataaatttgtacctttaaaaaaaa

SEQ ID NO: 111235 - DNA, 825 bp, Homo sapiens
  Payload ID: 1789
  Gene Symbol: BCL2L10
  Gene Name: BCL2-like 10 (apoptosis facilitator)
  ENST ID: ENST00000561198
  CDS Start-End: 43-768
agaaaaccagcgaaggcccggccccccagcagaggccggaccatggttgaccagttgcgggagcgcaccaccatggccgacccgctgcgggagcgcaccgagctgttgctggccgactacctggggtactgcgcccgggaacccggcacccccgagccggcgccatccacgcccgaggccgccgtgctgcgctccgcggccgccaggttacggcagattcaccggtcctttttctccgcctacctcggctaccccgggaaccgcttcgagctggtggcgctgatggcggattccgtgctctccgacagccccggccccacctggggcagagtggtgacgctcgtgaccttcgcagggacgctgctggagagagggccgctggtgaccgcccggtggaagaagtggggcttccagccgcggctaaaggagcaggagggcgacgtcgcccgggactgccagcgcctggtggccttgctgagctcgcggctcatggggcagcaccgcgcctggctgcaggctcagggcggctgggtgagcacgcggcggacaccgggacacggggcgggacgggcagccgggaagcgcccacgaggctggcacggatggcttttgtcacttcttcaggaccccctttccactggctttttggagaaaacagctggtccaggcttttctgtcatgcttgttaacaacagccttcatttatctctggacacgattattatgagttttaaaacttttaacccgcttctacctgcccaactgtgaccaactaaatgacagatgtgtgagaacaagaactgagggaaagcaccttcccccacc

SEQ ID NO: 111236 - DNA, 1522 bp, Homo sapiens
  Payload ID: 1790
  Gene Symbol: BCL2L11
  Gene Name: BCL2-like 11 (apoptosis facilitator)
  Uniprot ID: O43521
  ENST ID: ENST00000308659
  CDS Start-End: 289-705
acttcgctccgcgcagccgcctggtctgcagtttgttggagctctgcgtccagcgccgctgccgctgccgccgccgccgccgccgccgccgccgccgccgccgccgccactaccaccacttgattcttgcagccaccctgcgaaccctgccacactgcgatcgcatcatcgcggtattcggttcgctgcgttcccgccgccaccgcctcggcgccctttcttggcccttgttcccccaaatgtctgactctgactctcggactgagaaacgcaagaaaaaaagaccaaatggcaaagcaaccttctgatgtaagttctgagtgtgaccgagaaggtagacaattgcagcctgcggagaggcctccccagctcagacctggggcccctacctccctacagacagagccacaagacaggagcccagcacccatgagttgtgacaaatcaacacaaaccccaagtcctccttgccaggccttcaaccactatctcagtgcaatggcttccatgaggcaggctgaacctgcagatatgcgcccagagatatggatcgcccaagagttgcggcgtattggagacgagtttaacgcttactatgcaaggagggtatttttgaataattaccaagcagccgaagaccacccacgaatggttatcttacgactgttacgttacattgtccgcctggtgtggagaatgcattgacaggttctttgcggagccgagataccatgcagacattttgcttgttcaaaccaacaagacccagcaccgcggtctcctggtgccattattatgcagccagcggttctcttgtggagggggcaggtgacgtttcagaagacaccgagctggatgggactacctttctgttcatcaccacacagcagaatttctaatggaagtttgttgtgaatgtaaaggagggagcattctttgctttttaatatacaaaccatggttttttggagcaggattttgtgtaagaatggtgtttacatgcagtgtgttttccccctcaccttcaataaggtttttcaaaaaggaaatggaaactttttaaccaatttgtgaataacttttgtattaaaattttaagaacctacggcctattctcagaggattatgtaacccctgcagtggaaactgagccagctaacttaaaaagctgccttagtttatttttagagattacagaatttttaaacagggagacgtgtgatatactccctcccttccctactattgcctctctgacctttttaaattatttttaataccaaaagagttcttttgaaatggaactgattaaaagggcagagggtctgttgccagcctgcattgatataccagtcccatttgtaaatatttacgtacctttataaattcagttgcatctgtggcaaaatttcagactatttttgcgtctttcctcatcactttttgtgatgcaactccagtctggactcagatgcatagatttggtccagtgtattttcatgataaagtgaaattgagtcag

SEQ ID NO: 111237 - DNA, 720 bp, Homo sapiens
  Payload ID: 1790
  Gene Symbol: BCL2L11
  Gene Name: BCL2-like 11 (apoptosis facilitator)
  Uniprot ID: O43521
  ENST ID: ENST00000337565
  CDS Start-End: 289-627
acttcgctccgcgcagccgcctggtctgcagtttgttggagctctgcgtccagcgccgctgccgctgccgccgccgccgccgccgccgccgccgccgccgccgccgccactaccaccacttgattcttgcagccaccctgcgaaccctgccacactgcgatcgcatcatcgcggtattcggttcgctgcgttcccgccgccaccgcctcggcgccctttcttggcccttgttcccccaaatgtctgactctgactctcggactgagaaacgcaagaaaaaaagaccaaatggcaaagcaaccttctgatgtaagttctgagtgtgaccgagaaggtagacaattgcagcctgcggagaggcctccccagctcagacctggggcccctacctccctacagacagagccacaagacaggagcccagcacccatgagttgtgacaaatcaacacaaaccccaagtcctccttgccaggccttcaaccactatctcagtgcaatggtagtcatcctagaggatataggtgatctttcactgtgctttggatttatatttactggcttagatttgtatggccaccaccatagtcaagatacagaacaactcaaccacaaggatttctcatgatacctttttatagccacagccacctctctccctcttccttgagcattttgtcatatggtcattggtgattaaataaaatgtattttaatattg

SEQ ID NO: 111238 - DNA, 947 bp, Homo sapiens
  Payload ID: 1790
  Gene Symbol: BCL2L11
  Gene Name: BCL2-like 11 (apoptosis facilitator)
  ENST ID: ENST00000357757
  CDS Start-End: 289-585
acttcgctccgcgcagccgcctggtctgcagtttgttggagctctgcgtccagcgccgctgccgctgccgccgccgccgccgccgccgccgccgccgccgccgccgccactaccaccacttgattcttgcagccaccctgcgaaccctgccacactgcgatcgcatcatcgcggtattcggttcgctgcgttcccgccgccaccgcctcggcgccctttcttggcccttgttcccccaaatgtctgactctgactctcggactgagaaacgcaagaaaaaaagaccaaatggcaaagcaaccttctgatgtaagttctgagtgtgaccgagaaggtagacaattgcagcctgcggagaggcctccccagctcagacctggggcccctacctccctacagacagagccacaagacaggagcccagcacccatgagttgtgacaaatcaacacaaaccccaagtcctccttgccaggccttcaaccactatctcagtgcaatggatgactccgctggatcctccctcagaattgcccttcatagggaagttcagtggccactcaagtggttagcaaaatcaagctaactgggactagaaacagctccatcacccagtaaagagaaagaaaacatggatctgcctaggaagtcacctctgcctgagtctgctacttgcaggattggagcttttgctgcagattacagctttgaagtcactttacctcaagagcagtttatattttattgtgctttaaaaaaaaaatttagtgccaggtttatggagtgaagtgctttcataaatgctgaaactacattttctgtgggtaaaaatgcagctcatcagaatttcccctttgaagaattttttatgttcacataaaattgccaagttaaaaatttgatctccctacagagtaagagctttcatttcaaataaaaccattttat

SEQ ID NO: 111239 - DNA, 443 bp, Homo sapiens
  Payload ID: 1790
  Gene Symbol: BCL2L11
  Gene Name: BCL2-like 11 (apoptosis facilitator)
  ENST ID: ENST00000361493
  CDS Start-End: 1-228
atggcaaagcaaccttctgatgtaagttctgagtgtgaccgagaaggtagacaattgcagcctgcggagaggcctccccagctcagacctggggcccctacctccctacagacagagccacaagtctcactctgtcacccaggctggagtgcactggtgcgatcttggctcactgcaacctccaactcccaagttcaagcggttctcctgcctcagcctcccaagtagctgggattacagcttccatgaggcaggctgaacctgcagatatgcgcccagagatatggatcgcccaagagttgcggcgtattggagacgagtttaacgcttactatgcaaggagggtatttttgaataattaccaagcagccgaagaccacccacgaatggttatcttacgactgttacgttacattgtccgcctggtgtggagaatgcattga

SEQ ID NO: 111240 - DNA, 482 bp, Homo sapiens
  Payload ID: 1790
  Gene Symbol: BCL2L11
  Gene Name: BCL2-like 11 (apoptosis facilitator)
  ENST ID: ENST00000393252
  CDS Start-End: 268-482
gcggccggggcagcgcgggccagaggcgcggcgtgcggagccctcggctgcccggcggagcgcggcggcgggctggcgggaaggcgcgggctttgcgctgcgccggggactctgaacccgagtcccgggctttgtctcctgcgctgctttcgtggtgacggtcagggggcgcccggtcggcgaagggcgcgggccggacgccgcggggcttggtccctggcccggacgctgcgctctgaagggaaggcgcggacaaaaaaagaccaaatggcaaagcaaccttctgatgtaagttctgagtgtgaccgagaaggtagacaattgcagcctgcggagaggcctccccagctcagacctggggcccctacctccctacagacagagccacaaggtaatcctgaaggcaatcacggaggtgaaggggacagctgcccccacggcagccctcagggcccgctggccccacctgccagccctggccc

SEQ ID NO: 111241 - DNA, 5086 bp, Homo sapiens
  Payload ID: 1790
  Gene Symbol: BCL2L11
  Gene Name: BCL2-like 11 (apoptosis facilitator)
  Uniprot ID: O43521
  ENST ID: ENST00000393256
  CDS Start-End: 274-870
gccgcctggtctgcagtttgttggagctctgcgtccagcgccgctgccgctgccgccgccgccgccgccgccgccgccgccgccgccgccgccactaccaccacttgattcttgcagccaccctgcgaaccctgccacactgcgatcgcatcatcgcggtattcggttcgctgcgttcccgccgccaccgcctcggcgccctttcttggcccttgttcccccaaatgtctgactctgactctcggactgagaaacgcaagaaaaaaagaccaaatggcaaagcaaccttctgatgtaagttctgagtgtgaccgagaaggtagacaattgcagcctgcggagaggcctccccagctcagacctggggcccctacctccctacagacagagccacaaggtaatcctgaaggcaatcacggaggtgaaggggacagctgcccccacggcagccctcagggcccgctggccccacctgccagccctggcccttttgctaccagatccccgcttttcatctttatgagaagatcctccctgctgtctcgatcctccagtgggtatttctcttttgacacagacaggagcccagcacccatgagttgtgacaaatcaacacaaaccccaagtcctccttgccaggccttcaaccactatctcagtgcaatggcttccatgaggcaggctgaacctgcagatatgcgcccagagatatggatcgcccaagagttgcggcgtattggagacgagtttaacgcttactatgcaaggagggtatttttgaataattaccaagcagccgaagaccacccacgaatggttatcttacgactgttacgttacattgtccgcctggtgtggagaatgcattgacaggttctttgcggagccgagataccatgcagacattttgcttgttcaaaccaacaagacccagcaccgcggtctcctggtgccattattatgcagccagcggttctcttgtggagggggcaggtgacgtttcagaagacaccgagctggatgggactacctttctgttcatcaccacacagcagaatttctaatggaagtttgttgtgaatgtaaaggagggagcattctttgctttttaatatacaaaccatggttttttggagcaggattttgtgtaagaatggtgtttacatgcagtgtgttttccccctcaccttcaataaggtttttcaaaaaggaaatggaaactttttaaccaatttgtgaataacttttgtattaaaattttaagaacctacggcctattctcagaggattatgtaacccctgcagtggaaactgagccagctaacttaaaaagctgccttagtttatttttagagattacagaatttttaaacagggagacgtgtgatatactccctcccttccctactattgcctctctgacctttttaaattatttttaataccaaaagagttcttttgaaatggaactgattaaaagggcagagggtctgttgccagcctgcattgatataccagtcccatttgtaaatatttacgtacctttataaattcagttgcatctgtggcaaaatttcagactatttttgcgtctttcctcatcactttttgtgatgcaactccagtctggactcagatgcatagatttggtccagtgtattttcatgataaagtgaaattgagtcagaacaagagttaatatctgcctgtatcttgcacagttcgagcgatctgttattaactgggaagcatttggtgttggttttcattccatttcgacgagcatgttattgggaagtattctgaagaggcaatagcagtaataacaacagacttaagtgctacgcccctttgtgctgctggcttttctggttgcaggctttcccatggtcacaggatgcactgtcagcatcaggtcccagagggccaccgtgtccattacagcagagtccagctgcagcatccagctcacgccctcatgggaattggcacaggcctggggcagggcttctgatggccatttgcttggcctcctgcattttagtccaactcacagtccactagcttcactcctttaaattcactttgaaacaggcctcatcccacttccaccagcaccatagaagaataattctgggcagaagtctgttttttttcatttttccaggacagttggatattgtcaggccacttgtgaccccagccatgtagtgagggtgctctttctctgtgcctgctccttatgagtgcagtggaaggaagccacacactggtcagtcatttcagaggcagcagatgcccagggagacccaagaaagagtcaggttagggagcagtgaaagtgaggagggaagacaattctgtgaactctgtaactcttaaaatttttgaaaactccatcgttaaacaacttttaaaagaaataactaaattttcaaatgagtaagcagtgccaccaactagtgttttgcccgatagaagagccagcatgttcacgttatttaaattaggtggaaaaatctaaacatttttatcttcataatttaaaaaatatatatgtatatattgcatattcactttttcctttaggtagagatgatttcaatccaaatactcttactttaaaaaatttcctttccccaagaatctccttgggactttgacttatttttaaagctgtgttggagctcatcttgttccctgatgtgtctcgagcccattggtagggtcatacaaagcccacggttacaagcagtggtaggattgcagccgtgggcctgctggacacacacatacaccaaagatgtatttggatctgggcaccccctcccaggatccctgtactcacgtgccagtctcctgactagagcactttactctgtttcctcagccctgcagcccctgggagcacacactgggtgcagccctgggccaggcacgggaggccctgccctgtgctgcccaggggctgtgtgcaccacatgagcacatttccctctggcctggcggcctccaggctggctgtggaaacagttcctgaggaaattagagattctatgaattgtaggagtattaaagaccaggctgttggcaccagaacttaaagcgatgactggatgtctctgtactgtatgtatctggttatcaagatgcctctgtgcagaaagtatgcctcccgtgggtatacgtttttaccttttttaaaaaacatttttgtagaaaaaataattaaatcccctttttggaaacttactgcaggttttgtgccttgacaacctctccctatgtgaggtttgtaaaaagtgtcctgtgacttaacacagaaacgcaataaacacacacaaaatagtttcatgagtgattcttcagatgcccttcccaactggttagttgatcaagaattttgggggtgggggttgcggagaaatcaagtttaaaattccttctgattaaaaaaatatagtggaatacaattgtctgccgtttccccttcttaatgtatatattgtgagtatttattagattcgtaggtcatattacttatcaactgagccaaatgtctgtgtgcaattgtgtttcctttaccttgtaaaattttgtacagcataaataagtaaaaaaatcactgtttttctcaactttttcaaaatcaaggattgtaaatattgtagattctttttctgtgtgatgtgtcctactgtttcataatgctgtaacttgtagaaatattgtatatttattttctgcttatttaatgtcttaatttctgaaaagtattaacatccctgtctcccactcccctgccgtcccatgaagttaactcctgagagttgtcgggggtgactggagagctcattgcagaccacgtggtcctccagggtggctctccaccttcgggtcctggtatttccagtcaagtgggtttcaattcttgggctttgccgcccttatgatgaagtgtgtgtttgatgccagtgagaaactcagtctggcaggctacaaaattctactccaagaaatacccagcaaccttctgtttgttccaaagcaactagcttatcatgcaagcaaattttgctgactccaggctttatctttaggaaaacaaaaaaaccaaagtattatcagcaggtgggaaagatttttctattgaaaatttatccctgacaactcagcgtttagaaaagaaataaaatgtgccacttccagaggtgctgcattgcagttgttcagggctagggccaggcaggacaagtgaatgggtgggacaggtggctcctgcctaaggaccacctcaggccactaaccccttgtggacaactgtgagtagctgggttttcccccacctgctgtgcaacttcctgtgctttgaggttggactaacttgtcttcaggagctaattaactgtacagccctccccacgccccacccatacggtcactgcatttggtcagcctgcttcttcaggtcgatgccctccttctgatactccatctccttcaggggaggttggggccccactggactgggtgtcaagatgtgaaagcttatgggagctttaaggagacttcatggtggttccatgcaggtggttctgccatccctgctgatttagcctggtgcctgtgtgtgtccactcacgtacacgtggggtgggggaaacgtgtctacagatgacgctaaatcagttggggtctactctaaacagcattgtgtgtaagaagcatcctcaagctcccagttaagtaacttgactacttttatttgggaatttcagactatagaagctctcttatgttttatgtccagattctgtgaccactagttactgtatcagaactcatcaggtacccacttataaatagcactgatctggctgtatactgatccatcactaacctgttttctaggacccagcgtatgtagcatttgtattgcagtttccctggcttacttgtgttttgcactgatgaattttgacagggtaattgccactttacttgtgcaatactgctgtaaataactgcagatttttaaacaatcttttatgttaattttataaaaataaaactttcaactagtttt

SEQ ID NO: 111242 - DNA, 425 bp, Homo sapiens
  Payload ID: 1790
  Gene Symbol: BCL2L11
  Gene Name: BCL2-like 11 (apoptosis facilitator)
  Uniprot ID: O43521
  ENST ID: ENST00000405953
  CDS Start-End: 1-339
atggcaaagcaaccttctgatgtaagttctgagtgtgaccgagaaggtagacaattgcagcctgcggagaggcctccccagctcagacctggggcccctacctccctacagacagagccacaagacaggagcccagcacccatgagttgtgacaaatcaacacaaaccccaagtcctccttgccaggccttcaaccactatctcagtgcaatggtagtcatcctagaggatataggtgatctttcactgtgctttggatttatatttactggcttagatttgtatggccaccaccatagtcaagatacagaacaactcaaccacaaggatttctcatgatacctttttatagccacagccacctctctccctcttccttgagcattttgtcatatggtcattggtgattaaataaaatgtatttt

SEQ ID NO: 111243 - DNA, 656 bp, Homo sapiens
  Payload ID: 1790
  Gene Symbol: BCL2L11
  Gene Name: BCL2-like 11 (apoptosis facilitator)
  ENST ID: ENST00000438054
  CDS Start-End: 1-291
aagcaaccttctgatgtaagttctgagtgtgaccgagaaggtagacaattgcagcctgcggagaggcctccccagctcagacctggggcccctacctccctacagacagagccacaagacaggagcccagcacccatgagttgtgacaaatcaacacaaaccccaagtcctccttgccaggccttcaaccactatctcagtgcaatggatgactccgctggatcctccctcagaattgcccttcatagggaagttcagtggccactcaagtggttagcaaaatcaagctaactgggactagaaacagctccatcacccagtaaagagaaagaaaacatggatctgcctaggaagtcacctctgcctgagtctgctacttgcaggattggagcttttgctgcagattacagctttgaagtcactttacctcaagagcagtttatattttattgtgctttaaaaaaaaaatttagtgccaggtttatggagtgaagtgctttcataaatgctgaaactacattttctgtgggtaaaaatgcagctcatcagaatttcccctttgaagaattttttatgttcacataaaattgccaagttaaaaatttgatctccctacagagtaagagctttcatttcaaataaaaccattttataga

SEQ ID NO: 111244 - DNA, 459 bp, Homo sapiens
  Payload ID: 1790
  Gene Symbol: BCL2L11
  Gene Name: BCL2-like 11 (apoptosis facilitator)
  Uniprot ID: O43521
  ENST ID: ENST00000452231
  CDS Start-End: 1-249
atggcaaagcaaccttctgatgtaagttctgagtgtgaccgagaaggtagacaattgcagcctgcggagaggcctccccagctcagacctggggcccctacctccctacagacagagccacaagcttccatgaggcaggctgaacctgcagatatgcgcccagagatatggatcgcccaagagttgcggcgtattggagacgagtttaacgcttactatgcaaggaggatgcctcttccacctgattaagaaccactgtagcagacgcagacttattggacactaggcgggaggccagctctgcagacagcaggtctcaggaagacggtcaaggcatggctgctgatgatccgcttatgggtatttttgaataattaccaagcagccgaagaccacccacgaatggttatcttacgactgttacgttacattgtccgcctggtgtggagaatgcattga

SEQ ID NO: 111245 - DNA, 438 bp, Homo sapiens
  Payload ID: 1790
  Gene Symbol: BCL2L11
  Gene Name: BCL2-like 11 (apoptosis facilitator)
  Uniprot ID: O43521
  ENST ID: ENST00000415458
  CDS Start-End: 1-243
atggcaaagcaaccttctgatgtaagttctgagtgtgaccgagaaggtagacaattgcagcctgcggagaggcctccccagctcagacctggggcccctacctccctacagacagagccacaagacaggagcccagcacccatgagttgtgacaaatcaacacaaaccccaagtcctccttgccaggccttcaaccactatctcagtgcaatggttagagaaatagaggaagttgtcgtgtagttgtcatgtattcagtccacttaagggcagtggggaagcgtttgagacggagctgtggaggctgaatccttgaaggaggaggtgagagaggcacaggtatttttgaataattaccaagcagccgaagaccacccacgaatggttatcttacgactgttacgttacattgtccgcctggtgtggagaatgcattga

SEQ ID NO: 111246 - DNA, 883 bp, Homo sapiens
  Payload ID: 1790
  Gene Symbol: BCL2L11
  Gene Name: BCL2-like 11 (apoptosis facilitator)
  Uniprot ID: O43521
  ENST ID: ENST00000431217
  CDS Start-End: 1-408
atggcaaagcaaccttctgatgtaagttctgagtgtgaccgagaaggtagacaattgcagcctgcggagaggcctccccagctcagacctggggcccctacctccctacagacagagccacaaggtaatcctgaaggcaatcacggaggtgaaggggacagctgcccccacggcagccctcagggcccgctggccccacctgccagccctggcccttttgctaccagatccccgcttttcatctttatgagaagatcctccctgctgtctcgatcctccagtgggtatttctcttttgacacagacaggagcccagcacccatgagttgtgacaaatcaacacaaaccccaagtcctccttgccaggccttcaaccactatctcagtgcaatggctaactgggactagaaacagctccatcacccagcttccatgaggcaggctgaacctgcagatatgcgcccagagatatggatcgcccaagagttgcggcgtattggagacgagtttaacgcttactatgcaaggaggatgcctcttccacctgattaagaaccactgtagcagacgcagacttattggacactaggcgggaggccagctctgcagacagcaggtctcaggaagacggtcaaggcatggctgctgatgatccgcttatgggtatttttgaataattaccaagcagccgaagaccacccacgaatggttatcttacgactgttacgttacattgtccgcctggtgtggagaatgcattgacaggttctttgcggagccgagataccatgcagacattttgcttgttcaaaccaacaagacccagcaccgcggtctcctggtgccattattatgcagccagcggttctcttgtggagggggc

SEQ ID NO: 111247 - DNA, 1197 bp, Homo sapiens
  Payload ID: 1790
  Gene Symbol: BCL2L11
  Gene Name: BCL2-like 11 (apoptosis facilitator)
  Uniprot ID: O43521
  ENST ID: ENST00000433098
  CDS Start-End: 244-573
ggcgcggcgtgcggagccctcggctgcccggcggagcgcggcggcgggctggcgggaaggcgcgggctttgcgctgcgccggggactctgaacccgagtcccgggctttgtctcctgcgctgctttcgtggtgacggtcagggggcgcccggtcggcgaagggcgcgggccggacgccgcggggcttggtccctggcccggacgctgcgctctgaagggaaggcgcggacaaaaaaagaccaaatggcaaagcaaccttctgatgtaagttctgagtgtgaccgagaaggtagacaattgcagcctgcggagaggcctccccagctcagacctggggcccctacctccctacagacagagccacaagacaggagcccagcacccatgagttgtgacaaatcaacacaaaccccaagtcctccttgccaggccttcaaccactatctcagtgcaatggcttccatgaggcaggctgaacctgcagatatgcgcccagagatatggatcgcccaagagttgcggcgtattggagacgagtttaacgcttactatgcaaggaggttagagaaatagaggaagttgtcgtgtagttgtcatgtattcagtccacttaagggcagtggggaagcgtttgagacggagctgtggaggctgaatccttgaaggaggaggtgagagaggcacaggtatttttgaataattaccaagcagccgaagaccacccacgaatggttatcttacgactgttacgttacattgtccgcctggtgtggagaatgcattgacaggttctttgcggagccgagataccatgcagacattttgcttgttcaaaccaacaagacccagcaccgcggtctcctggtgccattattatgcagccagcggttctcttgtggagggggcaggtgacgtttcagaagacaccgagctggatgggactacctttctgttcatcaccacacagcagaatttctaatggaagtttgttgtgaatgtaaaggagggagcattctttgctttttaatatacaaaccatggttttttggagcaggattttgtgtaagaatggtgtttacatgcagtgtgttttccccctcaccttcaataaggtttttcaaaaaggaaatggaaactttttaaccaatttgtgaataacttttgtattaaaattttaagaacctacggcctattctc

SEQ ID NO: 111248 - DNA, 618 bp, Homo sapiens
  Payload ID: 1790
  Gene Symbol: BCL2L11
  Gene Name: BCL2-like 11 (apoptosis facilitator)
  Uniprot ID: O43521
  ENST ID: ENST00000436733
  CDS Start-End: 1-423
atggcaaagcaaccttctgatgtaagttctgagtgtgaccgagaaggtagacaattgcagcctgcggagaggcctccccagctcagacctggggcccctacctccctacagacagagccacaaggtaatcctgaaggcaatcacggaggtgaaggggacagctgcccccacggcagccctcagggcccgctggccccacctgccagccctggcccttttgctaccagatccccgcttttcatctttatgagaagatcctccctgctgtctcgatcctccagtgggtatttctcttttgacacagacaggagcccagcacccatgagttgtgacaaatcaacacaaaccccaagtcctccttgccaggccttcaaccactatctcagtgcaatggttagagaaatagaggaagttgtcgtgtagttgtcatgtattcagtccacttaagggcagtggggaagcgtttgagacggagctgtggaggctgaatccttgaaggaggaggtgagagaggcacaggtatttttgaataattaccaagcagccgaagaccacccacgaatggttatcttacgactgttacgttacattgtccgcctggtgtggagaatgcattga

SEQ ID NO: 111249 - DNA, 936 bp, Homo sapiens
  Payload ID: 1790
  Gene Symbol: BCL2L11
  Gene Name: BCL2-like 11 (apoptosis facilitator)
  Uniprot ID: O43521
  ENST ID: ENST00000439718
  CDS Start-End: 1-258
atggcaaagcaaccttctgatgtaagttctgagtgtgaccgagaaggtagacaattgcagcctgcggagaggcctccccagctcagacctggggcccctacctccctacagacagagccacaagcttccatgaggcaggctgaacctgcagatatgcgcccagagatatggatcgcccaagagttgcggcgtattggagacgagtttaacgcttactatgcaaggaggctggcaaaactcctggcatcctccacctgacataaaccagttcacagaacattccagcctagatctgaaatgttagagaaatagaggaagttgtcgtgtagttgtcatgtattcagtccacttaagggcagtggggaagcgtttgagacggagctgtggaggctgaatccttgaaggaggaggtgagagaggcacaggtatttttgaataattaccaagcagccgaagaccacccacgaatggttatcttacgactgttacgttacattgtccgcctggtgtggagaatgcattgacaggttctttgcggagccgagataccatgcagacattttgcttgttcaaaccaacaagacccagcaccgcggtctcctggtgccattattatgcagccagcggttctcttgtggagggggcaggtgacgtttcagaagacaccgagctggatgggactacctttctgttcatcaccacacagcagaatttctaatggaagtttgttgtgaatgtaaaggagggagcattctttgctttttaatatacaaaccatggttttttggagcaggattttgtgtaagaatggtgtttacatgcagtgtgttttccccctcaccttcaataaggtttttcaaaaaggaaatggaaactttttaaccaatttgtgaataacttttgtattaaaattttaagaacctacggcctattctc

SEQ ID NO: 111250 - DNA, 572 bp, Homo sapiens
  Payload ID: 1790
  Gene Symbol: BCL2L11
  Gene Name: BCL2-like 11 (apoptosis facilitator)
  ENST ID: ENST00000432179
  CDS Start-End: 206-572
gacgcgcgtcctccagcgactccgggaacccaaggcctccttcacctcgctcaaaattcacccgaaaatgcgctgagactttggcatggggctgcgctgtgtcccactgacgttacagaagcgcttatgaatttaaaaactgctccaggcggccggacggcgggacaacgcctcctcacttgctcctctacgaaaaaaagaccaaatggcaaagcaaccttctgatgtaagttctgagtgtgaccgagaaggtagacaattgcagcctgcggagaggcctccccagctcagacctggggcccctacctccctacagacagagccacaaggtaatcctgaaggcaatcacggaggtgaaggggacagctgcccccacggcagccctcagggcccgctggccccacctgccagccctggcccttttgctaccagatccccgcttttcatctttatgagaagatcctccctgctgtctcgatcctccagtgggtatttctcttttgacacagacaggagcccagcacccatgagttgtgacaaatcaacacaaaccccaagtcctccttgccagg

SEQ ID NO: 111251 - DNA, 729 bp, Homo sapiens
  Payload ID: 1790
  Gene Symbol: BCL2L11
  Gene Name: BCL2-like 11 (apoptosis facilitator)
  Uniprot ID: O43521
  ENST ID: ENST00000437029
  CDS Start-End: 1-519
atggcaaagcaaccttctgatgtaagttctgagtgtgaccgagaaggtagacaattgcagcctgcggagaggcctccccagctcagacctggggcccctacctccctacagacagagccacaaggtaatcctgaaggcaatcacggaggtgaaggggacagctgcccccacggcagccctcagggcccgctggccccacctgccagccctggcccttttgctaccagatccccgcttttcatctttatgagaagatcctccctgctgtctcgatcctccagtgggtatttctcttttgacacagacaggagcccagcacccatgagttgtgacaaatcaacacaaaccccaagtcctccttgccaggccttcaaccactatctcagtgcaatggcttccatgaggcaggctgaacctgcagatatgcgcccagagatatggatcgcccaagagttgcggcgtattggagacgagtttaacgcttactatgcaaggaggatgcctcttccacctgattaagaaccactgtagcagacgcagacttattggacactaggcgggaggccagctctgcagacagcaggtctcaggaagacggtcaaggcatggctgctgatgatccgcttatgggtatttttgaataattaccaagcagccgaagaccacccacgaatggttatcttacgactgttacgttacattgtccgcctggtgtggagaatgcattga

SEQ ID NO: 111252 - DNA, 5044 bp, Homo sapiens
  Payload ID: 1790
  Gene Symbol: BCL2L11
  Gene Name: BCL2-like 11 (apoptosis facilitator)
  Uniprot ID: O43521
  ENST ID: ENST00000620862
  CDS Start-End: 289-618
acttcgctccgcgcagccgcctggtctgcagtttgttggagctctgcgtccagcgccgctgccgctgccgccgccgccgccgccgccgccgccgccgccgccgccgccactaccaccacttgattcttgcagccaccctgcgaaccctgccacactgcgatcgcatcatcgcggtattcggttcgctgcgttcccgccgccaccgcctcggcgccctttcttggcccttgttcccccaaatgtctgactctgactctcggactgagaaacgcaagaaaaaaagaccaaatggcaaagcaaccttctgatgtaagttctgagtgtgaccgagaaggtagacaattgcagcctgcggagaggcctccccagctcagacctggggcccctacctccctacagacagagccacaagacaggagcccagcacccatgagttgtgacaaatcaacacaaaccccaagtcctccttgccaggccttcaaccactatctcagtgcaatggcttccatgaggcaggctgaacctgcagatatgcgcccagagatatggatcgcccaagagttgcggcgtattggagacgagtttaacgcttactatgcaaggaggttagagaaatagaggaagttgtcgtgtagttgtcatgtattcagtccacttaagggcagtggggaagcgtttgagacggagctgtggaggctgaatccttgaaggaggaggtgagagaggcacaggtatttttgaataattaccaagcagccgaagaccacccacgaatggttatcttacgactgttacgttacattgtccgcctggtgtggagaatgcattgacaggttctttgcggagccgagataccatgcagacattttgcttgttcaaaccaacaagacccagcaccgcggtctcctggtgccattattatgcagccagcggttctcttgtggagggggcaggtgacgtttcagaagacaccgagctggatgggactacctttctgttcatcaccacacagcagaatttctaatggaagtttgttgtgaatgtaaaggagggagcattctttgctttttaatatacaaaccatggttttttggagcaggattttgtgtaagaatggtgtttacatgcagtgtgttttccccctcaccttcaataaggtttttcaaaaaggaaatggaaactttttaaccaatttgtgaataacttttgtattaaaattttaagaacctacggcctattctcagaggattatgtaacccctgcagtggaaactgagccagctaacttaaaaagctgccttagtttatttttagagattacagaatttttaaacagggagacgtgtgatatactccctcccttccctactattgcctctctgacctttttaaattatttttaataccaaaagagttcttttgaaatggaactgattaaaagggcagagggtctgttgccagcctgcattgatataccagtcccatttgtaaatatttacgtacctttataaattcagttgcatctgtggcaaaatttcagactatttttgcgtctttcctcatcactttttgtgatgcaactccagtctggactcagatgcatagatttggtccagtgtattttcatgataaagtgaaattgagtcagaacaagagttaatatctgcctgtatcttgcacagttcgagcgatctgttattaactgggaagcatttggtgttggttttcattccatttcgacgagcatgttattgggaagtattctgaagaggcaatagcagtaataacaacagacttaagtgctacgcccctttgtgctgctggcttttctggttgcaggctttcccatggtcacaggatgcactgtcagcatcaggtcccagagggccaccgtgtccattacagcagagtccagctgcagcatccagctcacgccctcatgggaattggcacaggcctggggcagggcttctgatggccatttgcttggcctcctgcattttagtccaactcacagtccactagcttcactcctttaaattcactttgaaacaggcctcatcccacttccaccagcaccatagaagaataattctgggcagaagtctgttttttttcatttttccaggacagttggatattgtcaggccacttgtgaccccagccatgtagtgagggtgctctttctctgtgcctgctccttatgagtgcagtggaaggaagccacacactggtcagtcatttcagaggcagcagatgcccagggagacccaagaaagagtcaggttagggagcagtgaaagtgaggagggaagacaattctgtgaactctgtaactcttaaaatttttgaaaactccatcgttaaacaacttttaaaagaaataactaaattttcaaatgagtaagcagtgccaccaactagtgttttgcccgatagaagagccagcatgttcacgttatttaaattaggtggaaaaatctaaacatttttatcttcataatttaaaaaatatatatgtatatattgcatattcactttttcctttaggtagagatgatttcaatccaaatactcttactttaaaaaatttcctttccccaagaatctccttgggactttgacttatttttaaagctgtgttggagctcatcttgttccctgatgtgtctcgagcccattggtagggtcatacaaagcccacggttacaagcagtggtaggattgcagccgtgggcctgctggacacacacatacaccaaagatgtatttggatctgggcaccccctcccaggatccctgtactcacgtgccagtctcctgactagagcactttactctgtttcctcagccctgcagcccctgggagcacacactgggtgcagccctgggccaggcacgggaggccctgccctgtgctgcccaggggctgtgtgcaccacatgagcacatttccctctggcctggcggcctccaggctggctgtggaaacagttcctgaggaaattagagattctatgaattgtaggagtattaaagaccaggctgttggcaccagaacttaaagcgatgactggatgtctctgtactgtatgtatctggttatcaagatgcctctgtgcagaaagtatgcctcccgtgggtatacgtttttaccttttttaaaaaacatttttgtagaaaaaataattaaatcccctttttggaaacttactgcaggttttgtgccttgacaacctctccctatgtgaggtttgtaaaaagtgtcctgtgacttaacacagaaacgcaataaacacacacaaaatagtttcatgagtgattcttcagatgcccttcccaactggttagttgatcaagaattttgggggtgggggttgcggagaaatcaagtttaaaattccttctgattaaaaaaatatagtggaatacaattgtctgccgtttccccttcttaatgtatatattgtgagtatttattagattcgtaggtcatattacttatcaactgagccaaatgtctgtgtgcaattgtgtttcctttaccttgtaaaattttgtacagcataaataagtaaaaaaatcactgtttttctcaactttttcaaaatcaaggattgtaaatattgtagattctttttctgtgtgatgtgtcctactgtttcataatgctgtaacttgtagaaatattgtatatttattttctgcttatttaatgtcttaatttctgaaaagtattaacatccctgtctcccactcccctgccgtcccatgaagttaactcctgagagttgtcgggggtgactggagagctcattgcagaccacgtggtcctccagggtggctctccaccttcgggtcctggtatttccagtcaagtgggtttcaattcttgggctttgccgcccttatgatgaagtgtgtgtttgatgccagtgagaaactcagtctggcaggctacaaaattctactccaagaaatacccagcaaccttctgtttgttccaaagcaactagcttatcatgcaagcaaattttgctgactccaggctttatctttaggaaaacaaaaaaaccaaagtattatcagcaggtgggaaagatttttctattgaaaatttatccctgacaactcagcgtttagaaaagaaataaaatgtgccacttccagaggtgctgcattgcagttgttcagggctagggccaggcaggacaagtgaatgggtgggacaggtggctcctgcctaaggaccacctcaggccactaaccccttgtggacaactgtgagtagctgggttttcccccacctgctgtgcaacttcctgtgctttgaggttggactaacttgtcttcaggagctaattaactgtacagccctccccacgccccacccatacggtcactgcatttggtcagcctgcttcttcaggtcgatgccctccttctgatactccatctccttcaggggaggttggggccccactggactgggtgtcaagatgtgaaagcttatgggagctttaaggagacttcatggtggttccatgcaggtggttctgccatccctgctgatttagcctggtgcctgtgtgtgtccactcacgtacacgtggggtgggggaaacgtgtctacagatgacgctaaatcagttggggtctactctaaacagcattgtgtgtaagaagcatcctcaagctcccagttaagtaacttgactacttttatttgggaatttcagactatagaagctctcttatgttttatgtccagattctgtgaccactagttactgtatcagaactcatcaggtacccacttataaatagcactgatctggctgtatactgatccatcactaacctgttttctaggacccagcgtatgtagcatttgtattgcagtttccctggcttacttgtgttttgcactgatgaattttgacagggtaattgccactttacttgtgcaatactgctgtaaataactgcagatttttaaacaatcttttatgttaattttataaaaataaaactttcaactagtt

SEQ ID NO: 111253 - DNA, 5132 bp, Homo sapiens
  Payload ID: 1790
  Gene Symbol: BCL2L11
  Gene Name: BCL2-like 11 (apoptosis facilitator)
  Uniprot ID: O43521
  ENST ID: ENST00000619294
  CDS Start-End: 289-696
acttcgctccgcgcagccgcctggtctgcagtttgttggagctctgcgtccagcgccgctgccgctgccgccgccgccgccgccgccgccgccgccgccgccgccgccactaccaccacttgattcttgcagccaccctgcgaaccctgccacactgcgatcgcatcatcgcggtattcggttcgctgcgttcccgccgccaccgcctcggcgccctttcttggcccttgttcccccaaatgtctgactctgactctcggactgagaaacgcaagaaaaaaagaccaaatggcaaagcaaccttctgatgtaagttctgagtgtgaccgagaaggtagacaattgcagcctgcggagaggcctccccagctcagacctggggcccctacctccctacagacagagccacaaggtaatcctgaaggcaatcacggaggtgaaggggacagctgcccccacggcagccctcagggcccgctggccccacctgccagccctggcccttttgctaccagatccccgcttttcatctttatgagaagatcctccctgctgtctcgatcctccagtgggtatttctcttttgacacagacaggagcccagcacccatgagttgtgacaaatcaacacaaaccccaagtcctccttgccaggccttcaaccactatctcagtgcaatggctaactgggactagaaacagctccatcacccagcttccatgaggcaggctgaacctgcagatatgcgcccagagatatggatcgcccaagagttgcggcgtattggagacgagtttaacgcttactatgcaaggagggtatttttgaataattaccaagcagccgaagaccacccacgaatggttatcttacgactgttacgttacattgtccgcctggtgtggagaatgcattgacaggttctttgcggagccgagataccatgcagacattttgcttgttcaaaccaacaagacccagcaccgcggtctcctggtgccattattatgcagccagcggttctcttgtggagggggcaggtgacgtttcagaagacaccgagctggatgggactacctttctgttcatcaccacacagcagaatttctaatggaagtttgttgtgaatgtaaaggagggagcattctttgctttttaatatacaaaccatggttttttggagcaggattttgtgtaagaatggtgtttacatgcagtgtgttttccccctcaccttcaataaggtttttcaaaaaggaaatggaaactttttaaccaatttgtgaataacttttgtattaaaattttaagaacctacggcctattctcagaggattatgtaacccctgcagtggaaactgagccagctaacttaaaaagctgccttagtttatttttagagattacagaatttttaaacagggagacgtgtgatatactccctcccttccctactattgcctctctgacctttttaaattatttttaataccaaaagagttcttttgaaatggaactgattaaaagggcagagggtctgttgccagcctgcattgatataccagtcccatttgtaaatatttacgtacctttataaattcagttgcatctgtggcaaaatttcagactatttttgcgtctttcctcatcactttttgtgatgcaactccagtctggactcagatgcatagatttggtccagtgtattttcatgataaagtgaaattgagtcagaacaagagttaatatctgcctgtatcttgcacagttcgagcgatctgttattaactgggaagcatttggtgttggttttcattccatttcgacgagcatgttattgggaagtattctgaagaggcaatagcagtaataacaacagacttaagtgctacgcccctttgtgctgctggcttttctggttgcaggctttcccatggtcacaggatgcactgtcagcatcaggtcccagagggccaccgtgtccattacagcagagtccagctgcagcatccagctcacgccctcatgggaattggcacaggcctggggcagggcttctgatggccatttgcttggcctcctgcattttagtccaactcacagtccactagcttcactcctttaaattcactttgaaacaggcctcatcccacttccaccagcaccatagaagaataattctgggcagaagtctgttttttttcatttttccaggacagttggatattgtcaggccacttgtgaccccagccatgtagtgagggtgctctttctctgtgcctgctccttatgagtgcagtggaaggaagccacacactggtcagtcatttcagaggcagcagatgcccagggagacccaagaaagagtcaggttagggagcagtgaaagtgaggagggaagacaattctgtgaactctgtaactcttaaaatttttgaaaactccatcgttaaacaacttttaaaagaaataactaaattttcaaatgagtaagcagtgccaccaactagtgttttgcccgatagaagagccagcatgttcacgttatttaaattaggtggaaaaatctaaacatttttatcttcataatttaaaaaatatatatgtatatattgcatattcactttttcctttaggtagagatgatttcaatccaaatactcttactttaaaaaatttcctttccccaagaatctccttgggactttgacttatttttaaagctgtgttggagctcatcttgttccctgatgtgtctcgagcccattggtagggtcatacaaagcccacggttacaagcagtggtaggattgcagccgtgggcctgctggacacacacatacaccaaagatgtatttggatctgggcaccccctcccaggatccctgtactcacgtgccagtctcctgactagagcactttactctgtttcctcagccctgcagcccctgggagcacacactgggtgcagccctgggccaggcacgggaggccctgccctgtgctgcccaggggctgtgtgcaccacatgagcacatttccctctggcctggcggcctccaggctggctgtggaaacagttcctgaggaaattagagattctatgaattgtaggagtattaaagaccaggctgttggcaccagaacttaaagcgatgactggatgtctctgtactgtatgtatctggttatcaagatgcctctgtgcagaaagtatgcctcccgtgggtatacgtttttaccttttttaaaaaacatttttgtagaaaaaataattaaatcccctttttggaaacttactgcaggttttgtgccttgacaacctctccctatgtgaggtttgtaaaaagtgtcctgtgacttaacacagaaacgcaataaacacacacaaaatagtttcatgagtgattcttcagatgcccttcccaactggttagttgatcaagaattttgggggtgggggttgcggagaaatcaagtttaaaattccttctgattaaaaaaatatagtggaatacaattgtctgccgtttccccttcttaatgtatatattgtgagtatttattagattcgtaggtcatattacttatcaactgagccaaatgtctgtgtgcaattgtgtttcctttaccttgtaaaattttgtacagcataaataagtaaaaaaatcactgtttttctcaactttttcaaaatcaaggattgtaaatattgtagattctttttctgtgtgatgtgtcctactgtttcataatgctgtaacttgtagaaatattgtatatttattttctgcttatttaatgtcttaatttctgaaaagtattaacatccctgtctcccactcccctgccgtcccatgaagttaactcctgagagttgtcgggggtgactggagagctcattgcagaccacgtggtcctccagggtggctctccaccttcgggtcctggtatttccagtcaagtgggtttcaattcttgggctttgccgcccttatgatgaagtgtgtgtttgatgccagtgagaaactcagtctggcaggctacaaaattctactccaagaaatacccagcaaccttctgtttgttccaaagcaactagcttatcatgcaagcaaattttgctgactccaggctttatctttaggaaaacaaaaaaaccaaagtattatcagcaggtgggaaagatttttctattgaaaatttatccctgacaactcagcgtttagaaaagaaataaaatgtgccacttccagaggtgctgcattgcagttgttcagggctagggccaggcaggacaagtgaatgggtgggacaggtggctcctgcctaaggaccacctcaggccactaaccccttgtggacaactgtgagtagctgggttttcccccacctgctgtgcaacttcctgtgctttgaggttggactaacttgtcttcaggagctaattaactgtacagccctccccacgccccacccatacggtcactgcatttggtcagcctgcttcttcaggtcgatgccctccttctgatactccatctccttcaggggaggttggggccccactggactgggtgtcaagatgtgaaagcttatgggagctttaaggagacttcatggtggttccatgcaggtggttctgccatccctgctgatttagcctggtgcctgtgtgtgtccactcacgtacacgtggggtgggggaaacgtgtctacagatgacgctaaatcagttggggtctactctaaacagcattgtgtgtaagaagcatcctcaagctcccagttaagtaacttgactacttttatttgggaatttcagactatagaagctctcttatgttttatgtccagattctgtgaccactagttactgtatcagaactcatcaggtacccacttataaatagcactgatctggctgtatactgatccatcactaacctgttttctaggacccagcgtatgtagcatttgtattgcagtttccctggcttacttgtgttttgcactgatgaattttgacagggtaattgccactttacttgtgcaatactgctgtaaataactgcagatttttaaacaatcttttatgttaattttataaaaataaaactttcaactagtt

SEQ ID NO: 111254 - DNA, 5120 bp, Homo sapiens
  Payload ID: 1790
  Gene Symbol: BCL2L11
  Gene Name: BCL2-like 11 (apoptosis facilitator)
  Uniprot ID: O43521
  ENST ID: ENST00000610735
  CDS Start-End: 289-711
acttcgctccgcgcagccgcctggtctgcagtttgttggagctctgcgtccagcgccgctgccgctgccgccgccgccgccgccgccgccgccgccgccgccgccgccactaccaccacttgattcttgcagccaccctgcgaaccctgccacactgcgatcgcatcatcgcggtattcggttcgctgcgttcccgccgccaccgcctcggcgccctttcttggcccttgttcccccaaatgtctgactctgactctcggactgagaaacgcaagaaaaaaagaccaaatggcaaagcaaccttctgatgtaagttctgagtgtgaccgagaaggtagacaattgcagcctgcggagaggcctccccagctcagacctggggcccctacctccctacagacagagccacaaggtaatcctgaaggcaatcacggaggtgaaggggacagctgcccccacggcagccctcagggcccgctggccccacctgccagccctggcccttttgctaccagatccccgcttttcatctttatgagaagatcctccctgctgtctcgatcctccagtgggtatttctcttttgacacagacaggagcccagcacccatgagttgtgacaaatcaacacaaaccccaagtcctccttgccaggccttcaaccactatctcagtgcaatggttagagaaatagaggaagttgtcgtgtagttgtcatgtattcagtccacttaagggcagtggggaagcgtttgagacggagctgtggaggctgaatccttgaaggaggaggtgagagaggcacaggtatttttgaataattaccaagcagccgaagaccacccacgaatggttatcttacgactgttacgttacattgtccgcctggtgtggagaatgcattgacaggttctttgcggagccgagataccatgcagacattttgcttgttcaaaccaacaagacccagcaccgcggtctcctggtgccattattatgcagccagcggttctcttgtggagggggcaggtgacgtttcagaagacaccgagctggatgggactacctttctgttcatcaccacacagcagaatttctaatggaagtttgttgtgaatgtaaaggagggagcattctttgctttttaatatacaaaccatggttttttggagcaggattttgtgtaagaatggtgtttacatgcagtgtgttttccccctcaccttcaataaggtttttcaaaaaggaaatggaaactttttaaccaatttgtgaataacttttgtattaaaattttaagaacctacggcctattctcagaggattatgtaacccctgcagtggaaactgagccagctaacttaaaaagctgccttagtttatttttagagattacagaatttttaaacagggagacgtgtgatatactccctcccttccctactattgcctctctgacctttttaaattatttttaataccaaaagagttcttttgaaatggaactgattaaaagggcagagggtctgttgccagcctgcattgatataccagtcccatttgtaaatatttacgtacctttataaattcagttgcatctgtggcaaaatttcagactatttttgcgtctttcctcatcactttttgtgatgcaactccagtctggactcagatgcatagatttggtccagtgtattttcatgataaagtgaaattgagtcagaacaagagttaatatctgcctgtatcttgcacagttcgagcgatctgttattaactgggaagcatttggtgttggttttcattccatttcgacgagcatgttattgggaagtattctgaagaggcaatagcagtaataacaacagacttaagtgctacgcccctttgtgctgctggcttttctggttgcaggctttcccatggtcacaggatgcactgtcagcatcaggtcccagagggccaccgtgtccattacagcagagtccagctgcagcatccagctcacgccctcatgggaattggcacaggcctggggcagggcttctgatggccatttgcttggcctcctgcattttagtccaactcacagtccactagcttcactcctttaaattcactttgaaacaggcctcatcccacttccaccagcaccatagaagaataattctgggcagaagtctgttttttttcatttttccaggacagttggatattgtcaggccacttgtgaccccagccatgtagtgagggtgctctttctctgtgcctgctccttatgagtgcagtggaaggaagccacacactggtcagtcatttcagaggcagcagatgcccagggagacccaagaaagagtcaggttagggagcagtgaaagtgaggagggaagacaattctgtgaactctgtaactcttaaaatttttgaaaactccatcgttaaacaacttttaaaagaaataactaaattttcaaatgagtaagcagtgccaccaactagtgttttgcccgatagaagagccagcatgttcacgttatttaaattaggtggaaaaatctaaacatttttatcttcataatttaaaaaatatatatgtatatattgcatattcactttttcctttaggtagagatgatttcaatccaaatactcttactttaaaaaatttcctttccccaagaatctccttgggactttgacttatttttaaagctgtgttggagctcatcttgttccctgatgtgtctcgagcccattggtagggtcatacaaagcccacggttacaagcagtggtaggattgcagccgtgggcctgctggacacacacatacaccaaagatgtatttggatctgggcaccccctcccaggatccctgtactcacgtgccagtctcctgactagagcactttactctgtttcctcagccctgcagcccctgggagcacacactgggtgcagccctgggccaggcacgggaggccctgccctgtgctgcccaggggctgtgtgcaccacatgagcacatttccctctggcctggcggcctccaggctggctgtggaaacagttcctgaggaaattagagattctatgaattgtaggagtattaaagaccaggctgttggcaccagaacttaaagcgatgactggatgtctctgtactgtatgtatctggttatcaagatgcctctgtgcagaaagtatgcctcccgtgggtatacgtttttaccttttttaaaaaacatttttgtagaaaaaataattaaatcccctttttggaaacttactgcaggttttgtgccttgacaacctctccctatgtgaggtttgtaaaaagtgtcctgtgacttaacacagaaacgcaataaacacacacaaaatagtttcatgagtgattcttcagatgcccttcccaactggttagttgatcaagaattttgggggtgggggttgcggagaaatcaagtttaaaattccttctgattaaaaaaatatagtggaatacaattgtctgccgtttccccttcttaatgtatatattgtgagtatttattagattcgtaggtcatattacttatcaactgagccaaatgtctgtgtgcaattgtgtttcctttaccttgtaaaattttgtacagcataaataagtaaaaaaatcactgtttttctcaactttttcaaaatcaaggattgtaaatattgtagattctttttctgtgtgatgtgtcctactgtttcataatgctgtaacttgtagaaatattgtatatttattttctgcttatttaatgtcttaatttctgaaaagtattaacatccctgtctcccactcccctgccgtcccatgaagttaactcctgagagttgtcgggggtgactggagagctcattgcagaccacgtggtcctccagggtggctctccaccttcgggtcctggtatttccagtcaagtgggtttcaattcttgggctttgccgcccttatgatgaagtgtgtgtttgatgccagtgagaaactcagtctggcaggctacaaaattctactccaagaaatacccagcaaccttctgtttgttccaaagcaactagcttatcatgcaagcaaattttgctgactccaggctttatctttaggaaaacaaaaaaaccaaagtattatcagcaggtgggaaagatttttctattgaaaatttatccctgacaactcagcgtttagaaaagaaataaaatgtgccacttccagaggtgctgcattgcagttgttcagggctagggccaggcaggacaagtgaatgggtgggacaggtggctcctgcctaaggaccacctcaggccactaaccccttgtggacaactgtgagtagctgggttttcccccacctgctgtgcaacttcctgtgctttgaggttggactaacttgtcttcaggagctaattaactgtacagccctccccacgccccacccatacggtcactgcatttggtcagcctgcttcttcaggtcgatgccctccttctgatactccatctccttcaggggaggttggggccccactggactgggtgtcaagatgtgaaagcttatgggagctttaaggagacttcatggtggttccatgcaggtggttctgccatccctgctgatttagcctggtgcctgtgtgtgtccactcacgtacacgtggggtgggggaaacgtgtctacagatgacgctaaatcagttggggtctactctaaacagcattgtgtgtaagaagcatcctcaagctcccagttaagtaacttgactacttttatttgggaatttcagactatagaagctctcttatgttttatgtccagattctgtgaccactagttactgtatcagaactcatcaggtacccacttataaatagcactgatctggctgtatactgatccatcactaacctgttttctaggacccagcgtatgtagcatttgtattgcagtttccctggcttacttgtgttttgcactgatgaattttgacagggtaattgccactttacttgtgcaatactgctgtaaataactgcagatttttaaacaatcttttatgttaattttataaaaataaaactttcaactagtt

SEQ ID NO: 111255 - DNA, 5026 bp, Homo sapiens
  Payload ID: 1790
  Gene Symbol: BCL2L11
  Gene Name: BCL2-like 11 (apoptosis facilitator)
  Uniprot ID: O43521
  ENST ID: ENST00000615946
  CDS Start-End: 289-546
acttcgctccgcgcagccgcctggtctgcagtttgttggagctctgcgtccagcgccgctgccgctgccgccgccgccgccgccgccgccgccgccgccgccgccgccactaccaccacttgattcttgcagccaccctgcgaaccctgccacactgcgatcgcatcatcgcggtattcggttcgctgcgttcccgccgccaccgcctcggcgccctttcttggcccttgttcccccaaatgtctgactctgactctcggactgagaaacgcaagaaaaaaagaccaaatggcaaagcaaccttctgatgtaagttctgagtgtgaccgagaaggtagacaattgcagcctgcggagaggcctccccagctcagacctggggcccctacctccctacagacagagccacaagcttccatgaggcaggctgaacctgcagatatgcgcccagagatatggatcgcccaagagttgcggcgtattggagacgagtttaacgcttactatgcaaggaggctggcaaaactcctggcatcctccacctgacataaaccagttcacagaacattccagcctagatctgaaatgttagagaaatagaggaagttgtcgtgtagttgtcatgtattcagtccacttaagggcagtggggaagcgtttgagacggagctgtggaggctgaatccttgaaggaggaggtgagagaggcacaggtatttttgaataattaccaagcagccgaagaccacccacgaatggttatcttacgactgttacgttacattgtccgcctggtgtggagaatgcattgacaggttctttgcggagccgagataccatgcagacattttgcttgttcaaaccaacaagacccagcaccgcggtctcctggtgccattattatgcagccagcggttctcttgtggagggggcaggtgacgtttcagaagacaccgagctggatgggactacctttctgttcatcaccacacagcagaatttctaatggaagtttgttgtgaatgtaaaggagggagcattctttgctttttaatatacaaaccatggttttttggagcaggattttgtgtaagaatggtgtttacatgcagtgtgttttccccctcaccttcaataaggtttttcaaaaaggaaatggaaactttttaaccaatttgtgaataacttttgtattaaaattttaagaacctacggcctattctcagaggattatgtaacccctgcagtggaaactgagccagctaacttaaaaagctgccttagtttatttttagagattacagaatttttaaacagggagacgtgtgatatactccctcccttccctactattgcctctctgacctttttaaattatttttaataccaaaagagttcttttgaaatggaactgattaaaagggcagagggtctgttgccagcctgcattgatataccagtcccatttgtaaatatttacgtacctttataaattcagttgcatctgtggcaaaatttcagactatttttgcgtctttcctcatcactttttgtgatgcaactccagtctggactcagatgcatagatttggtccagtgtattttcatgataaagtgaaattgagtcagaacaagagttaatatctgcctgtatcttgcacagttcgagcgatctgttattaactgggaagcatttggtgttggttttcattccatttcgacgagcatgttattgggaagtattctgaagaggcaatagcagtaataacaacagacttaagtgctacgcccctttgtgctgctggcttttctggttgcaggctttcccatggtcacaggatgcactgtcagcatcaggtcccagagggccaccgtgtccattacagcagagtccagctgcagcatccagctcacgccctcatgggaattggcacaggcctggggcagggcttctgatggccatttgcttggcctcctgcattttagtccaactcacagtccactagcttcactcctttaaattcactttgaaacaggcctcatcccacttccaccagcaccatagaagaataattctgggcagaagtctgttttttttcatttttccaggacagttggatattgtcaggccacttgtgaccccagccatgtagtgagggtgctctttctctgtgcctgctccttatgagtgcagtggaaggaagccacacactggtcagtcatttcagaggcagcagatgcccagggagacccaagaaagagtcaggttagggagcagtgaaagtgaggagggaagacaattctgtgaactctgtaactcttaaaatttttgaaaactccatcgttaaacaacttttaaaagaaataactaaattttcaaatgagtaagcagtgccaccaactagtgttttgcccgatagaagagccagcatgttcacgttatttaaattaggtggaaaaatctaaacatttttatcttcataatttaaaaaatatatatgtatatattgcatattcactttttcctttaggtagagatgatttcaatccaaatactcttactttaaaaaatttcctttccccaagaatctccttgggactttgacttatttttaaagctgtgttggagctcatcttgttccctgatgtgtctcgagcccattggtagggtcatacaaagcccacggttacaagcagtggtaggattgcagccgtgggcctgctggacacacacatacaccaaagatgtatttggatctgggcaccccctcccaggatccctgtactcacgtgccagtctcctgactagagcactttactctgtttcctcagccctgcagcccctgggagcacacactgggtgcagccctgggccaggcacgggaggccctgccctgtgctgcccaggggctgtgtgcaccacatgagcacatttccctctggcctggcggcctccaggctggctgtggaaacagttcctgaggaaattagagattctatgaattgtaggagtattaaagaccaggctgttggcaccagaacttaaagcgatgactggatgtctctgtactgtatgtatctggttatcaagatgcctctgtgcagaaagtatgcctcccgtgggtatacgtttttaccttttttaaaaaacatttttgtagaaaaaataattaaatcccctttttggaaacttactgcaggttttgtgccttgacaacctctccctatgtgaggtttgtaaaaagtgtcctgtgacttaacacagaaacgcaataaacacacacaaaatagtttcatgagtgattcttcagatgcccttcccaactggttagttgatcaagaattttgggggtgggggttgcggagaaatcaagtttaaaattccttctgattaaaaaaatatagtggaatacaattgtctgccgtttccccttcttaatgtatatattgtgagtatttattagattcgtaggtcatattacttatcaactgagccaaatgtctgtgtgcaattgtgtttcctttaccttgtaaaattttgtacagcataaataagtaaaaaaatcactgtttttctcaactttttcaaaatcaaggattgtaaatattgtagattctttttctgtgtgatgtgtcctactgtttcataatgctgtaacttgtagaaatattgtatatttattttctgcttatttaatgtcttaatttctgaaaagtattaacatccctgtctcccactcccctgccgtcccatgaagttaactcctgagagttgtcgggggtgactggagagctcattgcagaccacgtggtcctccagggtggctctccaccttcgggtcctggtatttccagtcaagtgggtttcaattcttgggctttgccgcccttatgatgaagtgtgtgtttgatgccagtgagaaactcagtctggcaggctacaaaattctactccaagaaatacccagcaaccttctgtttgttccaaagcaactagcttatcatgcaagcaaattttgctgactccaggctttatctttaggaaaacaaaaaaaccaaagtattatcagcaggtgggaaagatttttctattgaaaatttatccctgacaactcagcgtttagaaaagaaataaaatgtgccacttccagaggtgctgcattgcagttgttcagggctagggccaggcaggacaagtgaatgggtgggacaggtggctcctgcctaaggaccacctcaggccactaaccccttgtggacaactgtgagtagctgggttttcccccacctgctgtgcaacttcctgtgctttgaggttggactaacttgtcttcaggagctaattaactgtacagccctccccacgccccacccatacggtcactgcatttggtcagcctgcttcttcaggtcgatgccctccttctgatactccatctccttcaggggaggttggggccccactggactgggtgtcaagatgtgaaagcttatgggagctttaaggagacttcatggtggttccatgcaggtggttctgccatccctgctgatttagcctggtgcctgtgtgtgtccactcacgtacacgtggggtgggggaaacgtgtctacagatgacgctaaatcagttggggtctactctaaacagcattgtgtgtaagaagcatcctcaagctcccagttaagtaacttgactacttttatttgggaatttcagactatagaagctctcttatgttttatgtccagattctgtgaccactagttactgtatcagaactcatcaggtacccacttataaatagcactgatctggctgtatactgatccatcactaacctgttttctaggacccagcgtatgtagcatttgtattgcagtttccctggcttacttgtgttttgcactgatgaattttgacagggtaattgccactttacttgtgcaatactgctgtaaataactgcagatttttaaacaatcttttatgttaattttataaaaataaaactttcaactagtt

SEQ ID NO: 111256 - DNA, 5224 bp, Homo sapiens
  Payload ID: 1790
  Gene Symbol: BCL2L11
  Gene Name: BCL2-like 11 (apoptosis facilitator)
  Uniprot ID: O43521
  ENST ID: ENST00000621302
  CDS Start-End: 289-798
acttcgctccgcgcagccgcctggtctgcagtttgttggagctctgcgtccagcgccgctgccgctgccgccgccgccgccgccgccgccgccgccgccgccgccgccactaccaccacttgattcttgcagccaccctgcgaaccctgccacactgcgatcgcatcatcgcggtattcggttcgctgcgttcccgccgccaccgcctcggcgccctttcttggcccttgttcccccaaatgtctgactctgactctcggactgagaaacgcaagaaaaaaagaccaaatggcaaagcaaccttctgatgtaagttctgagtgtgaccgagaaggtagacaattgcagcctgcggagaggcctccccagctcagacctggggcccctacctccctacagacagagccacaaggtaatcctgaaggcaatcacggaggtgaaggggacagctgcccccacggcagccctcagggcccgctggccccacctgccagccctggcccttttgctaccagatccccgcttttcatctttatgagaagatcctccctgctgtctcgatcctccagtgggtatttctcttttgacacagacaggagcccagcacccatgagttgtgacaaatcaacacaaaccccaagtcctccttgccaggccttcaaccactatctcagtgcaatggcttccatgaggcaggctgaacctgcagatatgcgcccagagatatggatcgcccaagagttgcggcgtattggagacgagtttaacgcttactatgcaaggaggttagagaaatagaggaagttgtcgtgtagttgtcatgtattcagtccacttaagggcagtggggaagcgtttgagacggagctgtggaggctgaatccttgaaggaggaggtgagagaggcacaggtatttttgaataattaccaagcagccgaagaccacccacgaatggttatcttacgactgttacgttacattgtccgcctggtgtggagaatgcattgacaggttctttgcggagccgagataccatgcagacattttgcttgttcaaaccaacaagacccagcaccgcggtctcctggtgccattattatgcagccagcggttctcttgtggagggggcaggtgacgtttcagaagacaccgagctggatgggactacctttctgttcatcaccacacagcagaatttctaatggaagtttgttgtgaatgtaaaggagggagcattctttgctttttaatatacaaaccatggttttttggagcaggattttgtgtaagaatggtgtttacatgcagtgtgttttccccctcaccttcaataaggtttttcaaaaaggaaatggaaactttttaaccaatttgtgaataacttttgtattaaaattttaagaacctacggcctattctcagaggattatgtaacccctgcagtggaaactgagccagctaacttaaaaagctgccttagtttatttttagagattacagaatttttaaacagggagacgtgtgatatactccctcccttccctactattgcctctctgacctttttaaattatttttaataccaaaagagttcttttgaaatggaactgattaaaagggcagagggtctgttgccagcctgcattgatataccagtcccatttgtaaatatttacgtacctttataaattcagttgcatctgtggcaaaatttcagactatttttgcgtctttcctcatcactttttgtgatgcaactccagtctggactcagatgcatagatttggtccagtgtattttcatgataaagtgaaattgagtcagaacaagagttaatatctgcctgtatcttgcacagttcgagcgatctgttattaactgggaagcatttggtgttggttttcattccatttcgacgagcatgttattgggaagtattctgaagaggcaatagcagtaataacaacagacttaagtgctacgcccctttgtgctgctggcttttctggttgcaggctttcccatggtcacaggatgcactgtcagcatcaggtcccagagggccaccgtgtccattacagcagagtccagctgcagcatccagctcacgccctcatgggaattggcacaggcctggggcagggcttctgatggccatttgcttggcctcctgcattttagtccaactcacagtccactagcttcactcctttaaattcactttgaaacaggcctcatcccacttccaccagcaccatagaagaataattctgggcagaagtctgttttttttcatttttccaggacagttggatattgtcaggccacttgtgaccccagccatgtagtgagggtgctctttctctgtgcctgctccttatgagtgcagtggaaggaagccacacactggtcagtcatttcagaggcagcagatgcccagggagacccaagaaagagtcaggttagggagcagtgaaagtgaggagggaagacaattctgtgaactctgtaactcttaaaatttttgaaaactccatcgttaaacaacttttaaaagaaataactaaattttcaaatgagtaagcagtgccaccaactagtgttttgcccgatagaagagccagcatgttcacgttatttaaattaggtggaaaaatctaaacatttttatcttcataatttaaaaaatatatatgtatatattgcatattcactttttcctttaggtagagatgatttcaatccaaatactcttactttaaaaaatttcctttccccaagaatctccttgggactttgacttatttttaaagctgtgttggagctcatcttgttccctgatgtgtctcgagcccattggtagggtcatacaaagcccacggttacaagcagtggtaggattgcagccgtgggcctgctggacacacacatacaccaaagatgtatttggatctgggcaccccctcccaggatccctgtactcacgtgccagtctcctgactagagcactttactctgtttcctcagccctgcagcccctgggagcacacactgggtgcagccctgggccaggcacgggaggccctgccctgtgctgcccaggggctgtgtgcaccacatgagcacatttccctctggcctggcggcctccaggctggctgtggaaacagttcctgaggaaattagagattctatgaattgtaggagtattaaagaccaggctgttggcaccagaacttaaagcgatgactggatgtctctgtactgtatgtatctggttatcaagatgcctctgtgcagaaagtatgcctcccgtgggtatacgtttttaccttttttaaaaaacatttttgtagaaaaaataattaaatcccctttttggaaacttactgcaggttttgtgccttgacaacctctccctatgtgaggtttgtaaaaagtgtcctgtgacttaacacagaaacgcaataaacacacacaaaatagtttcatgagtgattcttcagatgcccttcccaactggttagttgatcaagaattttgggggtgggggttgcggagaaatcaagtttaaaattccttctgattaaaaaaatatagtggaatacaattgtctgccgtttccccttcttaatgtatatattgtgagtatttattagattcgtaggtcatattacttatcaactgagccaaatgtctgtgtgcaattgtgtttcctttaccttgtaaaattttgtacagcataaataagtaaaaaaatcactgtttttctcaactttttcaaaatcaaggattgtaaatattgtagattctttttctgtgtgatgtgtcctactgtttcataatgctgtaacttgtagaaatattgtatatttattttctgcttatttaatgtcttaatttctgaaaagtattaacatccctgtctcccactcccctgccgtcccatgaagttaactcctgagagttgtcgggggtgactggagagctcattgcagaccacgtggtcctccagggtggctctccaccttcgggtcctggtatttccagtcaagtgggtttcaattcttgggctttgccgcccttatgatgaagtgtgtgtttgatgccagtgagaaactcagtctggcaggctacaaaattctactccaagaaatacccagcaaccttctgtttgttccaaagcaactagcttatcatgcaagcaaattttgctgactccaggctttatctttaggaaaacaaaaaaaccaaagtattatcagcaggtgggaaagatttttctattgaaaatttatccctgacaactcagcgtttagaaaagaaataaaatgtgccacttccagaggtgctgcattgcagttgttcagggctagggccaggcaggacaagtgaatgggtgggacaggtggctcctgcctaaggaccacctcaggccactaaccccttgtggacaactgtgagtagctgggttttcccccacctgctgtgcaacttcctgtgctttgaggttggactaacttgtcttcaggagctaattaactgtacagccctccccacgccccacccatacggtcactgcatttggtcagcctgcttcttcaggtcgatgccctccttctgatactccatctccttcaggggaggttggggccccactggactgggtgtcaagatgtgaaagcttatgggagctttaaggagacttcatggtggttccatgcaggtggttctgccatccctgctgatttagcctggtgcctgtgtgtgtccactcacgtacacgtggggtgggggaaacgtgtctacagatgacgctaaatcagttggggtctactctaaacagcattgtgtgtaagaagcatcctcaagctcccagttaagtaacttgactacttttatttgggaatttcagactatagaagctctcttatgttttatgtccagattctgtgaccactagttactgtatcagaactcatcaggtacccacttataaatagcactgatctggctgtatactgatccatcactaacctgttttctaggacccagcgtatgtagcatttgtattgcagtttccctggcttacttgtgttttgcactgatgaattttgacagggtaattgccactttacttgtgcaatactgctgtaaataactgcagatttttaaacaatcttttatgttaattttataaaaataaaactttcaactagtt

SEQ ID NO: 111257 - DNA, 5231 bp, Homo sapiens
  Payload ID: 1790
  Gene Symbol: BCL2L11
  Gene Name: BCL2-like 11 (apoptosis facilitator)
  Uniprot ID: O43521
  ENST ID: ENST00000622509
  CDS Start-End: 289-807
acttcgctccgcgcagccgcctggtctgcagtttgttggagctctgcgtccagcgccgctgccgctgccgccgccgccgccgccgccgccgccgccgccgccgccgccactaccaccacttgattcttgcagccaccctgcgaaccctgccacactgcgatcgcatcatcgcggtattcggttcgctgcgttcccgccgccaccgcctcggcgccctttcttggcccttgttcccccaaatgtctgactctgactctcggactgagaaacgcaagaaaaaaagaccaaatggcaaagcaaccttctgatgtaagttctgagtgtgaccgagaaggtagacaattgcagcctgcggagaggcctccccagctcagacctggggcccctacctccctacagacagagccacaaggtaatcctgaaggcaatcacggaggtgaaggggacagctgcccccacggcagccctcagggcccgctggccccacctgccagccctggcccttttgctaccagatccccgcttttcatctttatgagaagatcctccctgctgtctcgatcctccagtgggtatttctcttttgacacagacaggagcccagcacccatgagttgtgacaaatcaacacaaaccccaagtcctccttgccaggccttcaaccactatctcagtgcaatggcttccatgaggcaggctgaacctgcagatatgcgcccagagatatggatcgcccaagagttgcggcgtattggagacgagtttaacgcttactatgcaaggaggatgcctcttccacctgattaagaaccactgtagcagacgcagacttattggacactaggcgggaggccagctctgcagacagcaggtctcaggaagacggtcaaggcatggctgctgatgatccgcttatgggtatttttgaataattaccaagcagccgaagaccacccacgaatggttatcttacgactgttacgttacattgtccgcctggtgtggagaatgcattgacaggttctttgcggagccgagataccatgcagacattttgcttgttcaaaccaacaagacccagcaccgcggtctcctggtgccattattatgcagccagcggttctcttgtggagggggcaggtgacgtttcagaagacaccgagctggatgggactacctttctgttcatcaccacacagcagaatttctaatggaagtttgttgtgaatgtaaaggagggagcattctttgctttttaatatacaaaccatggttttttggagcaggattttgtgtaagaatggtgtttacatgcagtgtgttttccccctcaccttcaataaggtttttcaaaaaggaaatggaaactttttaaccaatttgtgaataacttttgtattaaaattttaagaacctacggcctattctcagaggattatgtaacccctgcagtggaaactgagccagctaacttaaaaagctgccttagtttatttttagagattacagaatttttaaacagggagacgtgtgatatactccctcccttccctactattgcctctctgacctttttaaattatttttaataccaaaagagttcttttgaaatggaactgattaaaagggcagagggtctgttgccagcctgcattgatataccagtcccatttgtaaatatttacgtacctttataaattcagttgcatctgtggcaaaatttcagactatttttgcgtctttcctcatcactttttgtgatgcaactccagtctggactcagatgcatagatttggtccagtgtattttcatgataaagtgaaattgagtcagaacaagagttaatatctgcctgtatcttgcacagttcgagcgatctgttattaactgggaagcatttggtgttggttttcattccatttcgacgagcatgttattgggaagtattctgaagaggcaatagcagtaataacaacagacttaagtgctacgcccctttgtgctgctggcttttctggttgcaggctttcccatggtcacaggatgcactgtcagcatcaggtcccagagggccaccgtgtccattacagcagagtccagctgcagcatccagctcacgccctcatgggaattggcacaggcctggggcagggcttctgatggccatttgcttggcctcctgcattttagtccaactcacagtccactagcttcactcctttaaattcactttgaaacaggcctcatcccacttccaccagcaccatagaagaataattctgggcagaagtctgttttttttcatttttccaggacagttggatattgtcaggccacttgtgaccccagccatgtagtgagggtgctctttctctgtgcctgctccttatgagtgcagtggaaggaagccacacactggtcagtcatttcagaggcagcagatgcccagggagacccaagaaagagtcaggttagggagcagtgaaagtgaggagggaagacaattctgtgaactctgtaactcttaaaatttttgaaaactccatcgttaaacaacttttaaaagaaataactaaattttcaaatgagtaagcagtgccaccaactagtgttttgcccgatagaagagccagcatgttcacgttatttaaattaggtggaaaaatctaaacatttttatcttcataatttaaaaaatatatatgtatatattgcatattcactttttcctttaggtagagatgatttcaatccaaatactcttactttaaaaaatttcctttccccaagaatctccttgggactttgacttatttttaaagctgtgttggagctcatcttgttccctgatgtgtctcgagcccattggtagggtcatacaaagcccacggttacaagcagtggtaggattgcagccgtgggcctgctggacacacacatacaccaaagatgtatttggatctgggcaccccctcccaggatccctgtactcacgtgccagtctcctgactagagcactttactctgtttcctcagccctgcagcccctgggagcacacactgggtgcagccctgggccaggcacgggaggccctgccctgtgctgcccaggggctgtgtgcaccacatgagcacatttccctctggcctggcggcctccaggctggctgtggaaacagttcctgaggaaattagagattctatgaattgtaggagtattaaagaccaggctgttggcaccagaacttaaagcgatgactggatgtctctgtactgtatgtatctggttatcaagatgcctctgtgcagaaagtatgcctcccgtgggtatacgtttttaccttttttaaaaaacatttttgtagaaaaaataattaaatcccctttttggaaacttactgcaggttttgtgccttgacaacctctccctatgtgaggtttgtaaaaagtgtcctgtgacttaacacagaaacgcaataaacacacacaaaatagtttcatgagtgattcttcagatgcccttcccaactggttagttgatcaagaattttgggggtgggggttgcggagaaatcaagtttaaaattccttctgattaaaaaaatatagtggaatacaattgtctgccgtttccccttcttaatgtatatattgtgagtatttattagattcgtaggtcatattacttatcaactgagccaaatgtctgtgtgcaattgtgtttcctttaccttgtaaaattttgtacagcataaataagtaaaaaaatcactgtttttctcaactttttcaaaatcaaggattgtaaatattgtagattctttttctgtgtgatgtgtcctactgtttcataatgctgtaacttgtagaaatattgtatatttattttctgcttatttaatgtcttaatttctgaaaagtattaacatccctgtctcccactcccctgccgtcccatgaagttaactcctgagagttgtcgggggtgactggagagctcattgcagaccacgtggtcctccagggtggctctccaccttcgggtcctggtatttccagtcaagtgggtttcaattcttgggctttgccgcccttatgatgaagtgtgtgtttgatgccagtgagaaactcagtctggcaggctacaaaattctactccaagaaatacccagcaaccttctgtttgttccaaagcaactagcttatcatgcaagcaaattttgctgactccaggctttatctttaggaaaacaaaaaaaccaaagtattatcagcaggtgggaaagatttttctattgaaaatttatccctgacaactcagcgtttagaaaagaaataaaatgtgccacttccagaggtgctgcattgcagttgttcagggctagggccaggcaggacaagtgaatgggtgggacaggtggctcctgcctaaggaccacctcaggccactaaccccttgtggacaactgtgagtagctgggttttcccccacctgctgtgcaacttcctgtgctttgaggttggactaacttgtcttcaggagctaattaactgtacagccctccccacgccccacccatacggtcactgcatttggtcagcctgcttcttcaggtcgatgccctccttctgatactccatctccttcaggggaggttggggccccactggactgggtgtcaagatgtgaaagcttatgggagctttaaggagacttcatggtggttccatgcaggtggttctgccatccctgctgatttagcctggtgcctgtgtgtgtccactcacgtacacgtggggtgggggaaacgtgtctacagatgacgctaaatcagttggggtctactctaaacagcattgtgtgtaagaagcatcctcaagctcccagttaagtaacttgactacttttatttgggaatttcagactatagaagctctcttatgttttatgtccagattctgtgaccactagttactgtatcagaactcatcaggtacccacttataaatagcactgatctggctgtatactgatccatcactaacctgttttctaggacccagcgtatgtagcatttgtattgcagtttccctggcttacttgtgttttgcactgatgaattttgacagggtaattgccactttacttgtgcaatactgctgtaaataactgcagatttttaaacaatcttttatgttaattttataaaaataaaactttcaactagtt

SEQ ID NO: 111258 - DNA, 4995 bp, Homo sapiens
  Payload ID: 1790
  Gene Symbol: BCL2L11
  Gene Name: BCL2-like 11 (apoptosis facilitator)
  Uniprot ID: O43521
  ENST ID: ENST00000622612
  CDS Start-End: 289-696
acttcgctccgcgcagccgcctggtctgcagtttgttggagctctgcgtccagcgccgctgccgctgccgccgccgccgccgccgccgccgccgccgccgccgccgccactaccaccacttgattcttgcagccaccctgcgaaccctgccacactgcgatcgcatcatcgcggtattcggttcgctgcgttcccgccgccaccgcctcggcgccctttcttggcccttgttcccccaaatgtctgactctgactctcggactgagaaacgcaagaaaaaaagaccaaatggcaaagcaaccttctgatgtaagttctgagtgtgaccgagaaggtagacaattgcagcctgcggagaggcctccccagctcagacctggggcccctacctccctacagacagagccacaaggtaatcctgaaggcaatcacggaggtgaaggggacagctgcccccacggcagccctcagggcccgctggccccacctgccagccctggcccttttgctaccagatccccgcttttcatctttatgagaagatcctccctgctgtctcgatcctccagtgggtatttctcttttgacacagacaggagcccagcacccatgagttgtgacaaatcaacacaaaccccaagtcctccttgccaggccttcaaccactatctcagtgcaatgggtatttttgaataattaccaagcagccgaagaccacccacgaatggttatcttacgactgttacgttacattgtccgcctggtgtggagaatgcattgacaggttctttgcggagccgagataccatgcagacattttgcttgttcaaaccaacaagacccagcaccgcggtctcctggtgccattattatgcagccagcggttctcttgtggagggggcaggtgacgtttcagaagacaccgagctggatgggactacctttctgttcatcaccacacagcagaatttctaatggaagtttgttgtgaatgtaaaggagggagcattctttgctttttaatatacaaaccatggttttttggagcaggattttgtgtaagaatggtgtttacatgcagtgtgttttccccctcaccttcaataaggtttttcaaaaaggaaatggaaactttttaaccaatttgtgaataacttttgtattaaaattttaagaacctacggcctattctcagaggattatgtaacccctgcagtggaaactgagccagctaacttaaaaagctgccttagtttatttttagagattacagaatttttaaacagggagacgtgtgatatactccctcccttccctactattgcctctctgacctttttaaattatttttaataccaaaagagttcttttgaaatggaactgattaaaagggcagagggtctgttgccagcctgcattgatataccagtcccatttgtaaatatttacgtacctttataaattcagttgcatctgtggcaaaatttcagactatttttgcgtctttcctcatcactttttgtgatgcaactccagtctggactcagatgcatagatttggtccagtgtattttcatgataaagtgaaattgagtcagaacaagagttaatatctgcctgtatcttgcacagttcgagcgatctgttattaactgggaagcatttggtgttggttttcattccatttcgacgagcatgttattgggaagtattctgaagaggcaatagcagtaataacaacagacttaagtgctacgcccctttgtgctgctggcttttctggttgcaggctttcccatggtcacaggatgcactgtcagcatcaggtcccagagggccaccgtgtccattacagcagagtccagctgcagcatccagctcacgccctcatgggaattggcacaggcctggggcagggcttctgatggccatttgcttggcctcctgcattttagtccaactcacagtccactagcttcactcctttaaattcactttgaaacaggcctcatcccacttccaccagcaccatagaagaataattctgggcagaagtctgttttttttcatttttccaggacagttggatattgtcaggccacttgtgaccccagccatgtagtgagggtgctctttctctgtgcctgctccttatgagtgcagtggaaggaagccacacactggtcagtcatttcagaggcagcagatgcccagggagacccaagaaagagtcaggttagggagcagtgaaagtgaggagggaagacaattctgtgaactctgtaactcttaaaatttttgaaaactccatcgttaaacaacttttaaaagaaataactaaattttcaaatgagtaagcagtgccaccaactagtgttttgcccgatagaagagccagcatgttcacgttatttaaattaggtggaaaaatctaaacatttttatcttcataatttaaaaaatatatatgtatatattgcatattcactttttcctttaggtagagatgatttcaatccaaatactcttactttaaaaaatttcctttccccaagaatctccttgggactttgacttatttttaaagctgtgttggagctcatcttgttccctgatgtgtctcgagcccattggtagggtcatacaaagcccacggttacaagcagtggtaggattgcagccgtgggcctgctggacacacacatacaccaaagatgtatttggatctgggcaccccctcccaggatccctgtactcacgtgccagtctcctgactagagcactttactctgtttcctcagccctgcagcccctgggagcacacactgggtgcagccctgggccaggcacgggaggccctgccctgtgctgcccaggggctgtgtgcaccacatgagcacatttccctctggcctggcggcctccaggctggctgtggaaacagttcctgaggaaattagagattctatgaattgtaggagtattaaagaccaggctgttggcaccagaacttaaagcgatgactggatgtctctgtactgtatgtatctggttatcaagatgcctctgtgcagaaagtatgcctcccgtgggtatacgtttttaccttttttaaaaaacatttttgtagaaaaaataattaaatcccctttttggaaacttactgcaggttttgtgccttgacaacctctccctatgtgaggtttgtaaaaagtgtcctgtgacttaacacagaaacgcaataaacacacacaaaatagtttcatgagtgattcttcagatgcccttcccaactggttagttgatcaagaattttgggggtgggggttgcggagaaatcaagtttaaaattccttctgattaaaaaaatatagtggaatacaattgtctgccgtttccccttcttaatgtatatattgtgagtatttattagattcgtaggtcatattacttatcaactgagccaaatgtctgtgtgcaattgtgtttcctttaccttgtaaaattttgtacagcataaataagtaaaaaaatcactgtttttctcaactttttcaaaatcaaggattgtaaatattgtagattctttttctgtgtgatgtgtcctactgtttcataatgctgtaacttgtagaaatattgtatatttattttctgcttatttaatgtcttaatttctgaaaagtattaacatccctgtctcccactcccctgccgtcccatgaagttaactcctgagagttgtcgggggtgactggagagctcattgcagaccacgtggtcctccagggtggctctccaccttcgggtcctggtatttccagtcaagtgggtttcaattcttgggctttgccgcccttatgatgaagtgtgtgtttgatgccagtgagaaactcagtctggcaggctacaaaattctactccaagaaatacccagcaaccttctgtttgttccaaagcaactagcttatcatgcaagcaaattttgctgactccaggctttatctttaggaaaacaaaaaaaccaaagtattatcagcaggtgggaaagatttttctattgaaaatttatccctgacaactcagcgtttagaaaagaaataaaatgtgccacttccagaggtgctgcattgcagttgttcagggctagggccaggcaggacaagtgaatgggtgggacaggtggctcctgcctaaggaccacctcaggccactaaccccttgtggacaactgtgagtagctgggttttcccccacctgctgtgcaacttcctgtgctttgaggttggactaacttgtcttcaggagctaattaactgtacagccctccccacgccccacccatacggtcactgcatttggtcagcctgcttcttcaggtcgatgccctccttctgatactccatctccttcaggggaggttggggccccactggactgggtgtcaagatgtgaaagcttatgggagctttaaggagacttcatggtggttccatgcaggtggttctgccatccctgctgatttagcctggtgcctgtgtgtgtccactcacgtacacgtggggtgggggaaacgtgtctacagatgacgctaaatcagttggggtctactctaaacagcattgtgtgtaagaagcatcctcaagctcccagttaagtaacttgactacttttatttgggaatttcagactatagaagctctcttatgttttatgtccagattctgtgaccactagttactgtatcagaactcatcaggtacccacttataaatagcactgatctggctgtatactgatccatcactaacctgttttctaggacccagcgtatgtagcatttgtattgcagtttccctggcttacttgtgttttgcactgatgaattttgacagggtaattgccactttacttgtgcaatactgctgtaaataactgcagatttttaaacaatcttttatgttaattttataaaaataaaactttcaactagtt

SEQ ID NO: 111259 - DNA, 990 bp, Homo sapiens
  Payload ID: 1791
  Gene Symbol: BCL2L12
  Gene Name: BCL2-like 12 (proline rich)
  ENST ID: ENST00000246784
  CDS Start-End: 70-822
cgagttcagtggaggagaccgcaagttgagtggaggaggcggcggtggggccccggaccaggtgcctccatggcaggctctgaagagctggggctccgggaagacacgctgagggtcctagctgccttccttaggcgtggtgaggctgccgggtctcctgttccaactccacctagaagccctgcccaagaagagccaacagacttcctgagccgccttcgaagatgtcttccctgctccctggggcgaggagcagccccctctgagtcccctcggccttgctctctgcccatccgcccctgctatggtttagagcctggcccagctactccagacttctatgctttggtggcccagcggctggaacagctggtccaagagcagctgaaatctccgcccagcccagaattacagggtcccccatcgacagagaaggaagccatactgcggaggctggtggccctgctggaggaggaggcagaagtcattaaccagaagctggcctcggaccccgccctgcgcagcaagctggtccgcctgtcctccgactctttcgcccgcctggtggagctgttctgtagccgggatgacagctctcgcccaagccgagcatgccccgggcccccgcctccttccccggagcccctggcccgcctggccctagccatggagctgagccggcgcgtggccgggctggggggcaccctggccggactcagcgtggagcacgtgcacagcttcacgccctggatccaggcccacgggggctgggagggcatcctggctgtttcacccgtggacttgaacttgccattggactgagctctttctcagaagctgctacaagatgacacctcatgtccctgccctcttcgtgtgcttttccaagtcttcctattccactcagggctgtggggtggtggttgccctacctgtttttgccaaaaataaattgtttaaaacttttcttattaaaaacgttacaaagta

SEQ ID NO: 111260 - DNA, 1431 bp, Homo sapiens
  Payload ID: 1791
  Gene Symbol: BCL2L12
  Gene Name: BCL2-like 12 (proline rich)
  Uniprot ID: Q9HB09
  ENST ID: ENST00000246785
  CDS Start-End: 259-1263
ccatcctctttcccgctcctcgctctcggacgccaccaacgctctcccgggctcttccgcgttacctacgatggaaggtcggggcgtgcgggcagctggaacccacccctgtcttggagctccgggtagctctcaaactcgaggctgcgcaccccctttcccgtcagctgagctctagagcgctggggctttctttttgatcgacttcttgaaataaaaccaactttatcattctttgggtaacagacccaaaagccgatgggacggcccgctgggctgttcccgcccctatgcccttttttgggtttccggccagaggcatgctgggagcgtcacatgcaaattgagcgtgcacccagcgttccgccctttctacgctgggccggttatcgacccggcccagtgcgcaggcgcgggaaagttgaactaataaagtttgtacgagttcagtggaggagaccgcaagttgagtggaggaggcggcggtggggccccggaccaggtgcctccatggcaggctctgaagagctggggctccgggaagacacgctgagggtcctagctgccttccttaggcgtggtgaggctgccgggtctcctgttccaactccacctagaagccctgcccaagaagagccaacagacttcctgagccgccttcgaagatgtcttccctgctccctggggcgaggagcagccccctctgagtcccctcggccttgctctctgcccatccgcccctgctatggtttagagcctggcccagctactccagacttctatgctttggtggcccagcggctggaacagctggtccaagagcagctgaaatctccgcccagcccagaattacagggtcccccatcgacagagaaggaagccatactgcggaggctggtggccctgctggaggaggaggcagaagtcattaaccagaagctggcctcggaccccgccctgcgcagcaagctggtccgcctgtcctccgactctttcgcccgcctggtggagctgttctgtagccgggatgacagctctcgcccaagccgagcatgccccgggcccccgcctccttccccggagcccctggcccgcctggccctagccatggagctgagccggcgcgtggccgggctggggggcaccctggccggactcagcgtggagcacgtgcacagcttcacgccctggatccaggcccacgggggctgggagggcatcctggctgtttcacccgtggacttgaacttgccattggactgagctctttctcagaagctgctacaagatgacacctcatgtccctgccctcttcgtgtgcttttccaagtcttcctattccactcagggctgtggggtggtggttgccctacctgtttttgccaaaaataaattgtttaaaacttttcttattaaaaacgttacaaagta

SEQ ID NO: 111261 - DNA, 1371 bp, Homo sapiens
  Payload ID: 1791
  Gene Symbol: BCL2L12
  Gene Name: BCL2-like 12 (proline rich)
  Uniprot ID: Q9HB09
  ENST ID: ENST00000441864
  CDS Start-End: 259-1260
ccatcctctttcccgctcctcgctctcggacgccaccaacgctctcccgggctcttccgcgttacctacgatggaaggtcggggcgtgcgggcagctggaacccacccctgtcttggagctccgggtagctctcaaactcgaggctgcgcaccccctttcccgtcagctgagctctagagcgctggggctttctttttgatcgacttcttgaaataaaaccaactttatcattctttgggtaacagacccaaaagccgatgggacggcccgctgggctgttcccgcccctatgcccttttttgggtttccggccagaggcatgctgggagcgtcacatgcaaattgagcgtgcacccagcgttccgccctttctacgctgggccggttatcgacccggcccagtgcgcaggcgcgggaaagttgaactaataaagtttgtacgagttcagtggaggagaccgcaagttgagtggaggaggcggcggtggggccccggaccaggtgcctccatggcaggctctgaagagctggggctccgggaagacacgctgagggtcctagctgccttccttaggcgtggtgaggctgccgggtctcctgttccaactccacctagccctgcccaagaagagccaacagacttcctgagccgccttcgaagatgtcttccctgctccctggggcgaggagcagccccctctgagtcccctcggccttgctctctgcccatccgcccctgctatggtttagagcctggcccagctactccagacttctatgctttggtggcccagcggctggaacagctggtccaagagcagctgaaatctccgcccagcccagaattacagggtcccccatcgacagagaaggaagccatactgcggaggctggtggccctgctggaggaggaggcagaagtcattaaccagaagctggcctcggaccccgccctgcgcagcaagctggtccgcctgtcctccgactctttcgcccgcctggtggagctgttctgtagccgggatgacagctctcgcccaagccgagcatgccccgggcccccgcctccttccccggagcccctggcccgcctggccctagccatggagctgagccggcgcgtggccgggctggggggcaccctggccggactcagcgtggagcacgtgcacagcttcacgccctggatccaggcccacgggggctgggagggcatcctggctgtttcacccgtggacttgaacttgccattggactgagctctttctcagaagctgctacaagatgacacctcatgtccctgccctcttcgtgtgcttttccaagtcttcctattccactcagggctgtggggtggtggttgccctacc

SEQ ID NO: 111262 - DNA, 620 bp, Homo sapiens
  Payload ID: 1791
  Gene Symbol: BCL2L12
  Gene Name: BCL2-like 12 (proline rich)
  ENST ID: ENST00000594157
  CDS Start-End: 116-394
cggcccagtgcgcaggcgcgggaaagttgaactaataaagtttgtacgagttcagtggaggagaccgcaagttgagtggaggaggcggcggtggggccccggaccaggtgcctccatggcaggctctgaagagctggggctccgggaagacacgctgagggtcctagctgccttccttaggcgtggtgaggctgccgggtctcctgttccaactccacctaggcccagctactccagacttctatgctttggtggcccagcggctggaacagctggtccaagagcagctgaaatctccgcccagcccagaattacagggtcccccatcgacagagaaggaagccatactgcggaggctggtggccctgctggaggaggaggcagaagtcattaaccagaaggagggcatcctggctgtttcacccgtggacttgaacttgccattggactgagctctttctcagaagctgctacaagatgacacctcatgtccctgccctcttcgtgtgcttttccaagtcttcctattccactcagggctgtggggtggtggttgccctacctgtttttgccaaaaataaattgtttaaaacttttcttattaaaaacgttacaaagta

SEQ ID NO: 111263 - DNA, 633 bp, Homo sapiens
  Payload ID: 1791
  Gene Symbol: BCL2L12
  Gene Name: BCL2-like 12 (proline rich)
  ENST ID: ENST00000600947
  CDS Start-End: 78-494
agtttgtacgagttcagtggaggagaccgcaagttgagtggaggaggcggcggtggggccccggaccaggtgcctccatggcaggctctgaagagctggggctccgggaagacacgctgagggtcctagctgccttccttaggcgtggtgaggctgccgggtctcctgttccaactccacctagaagccctgcccaagaagagccaacagacttcctgagccgccttcgaagatgtcttccctgctccctggggcgaggagcagccccctctgagtcccctcggccttgctctctgcccatccgcccctgctatggtttagagcctggcccagctactccagacttctatgctttggtggcccagcggctggaacagctggtccaagagcagctgaaatctccgcccagcccaggagggcatcctggctgtttcacccgtggacttgaacttgccattggactgagctctttctcagaagctgctacaagatgacacctcatgtccctgccctcttcgtgtgcttttccaagtcttcctattccactcagggctgtggggtggtggttgccctacctgtttttgccaaaaataaattgtttaaaacttttcttattaaaaacgttacaaagta

SEQ ID NO: 111264 - DNA, 893 bp, Homo sapiens
  Payload ID: 1791
  Gene Symbol: BCL2L12
  Gene Name: BCL2-like 12 (proline rich)
  ENST ID: ENST00000598979
  CDS Start-End: 116-394
cggcccagtgcgcaggcgcgggaaagttgaactaataaagtttgtacgagttcagtggaggagaccgcaagttgagtggaggaggcggcggtggggccccggaccaggtgcctccatggcaggctctgaagagctggggctccgggaagacacgctgagggtcctagctgccttccttaggcgtggtgaggctgccgggtctcctgttccaactccacctaggcccagctactccagacttctatgctttggtggcccagcggctggaacagctggtccaagagcagctgaaatctccgcccagcccagaattacagggtcccccatcgacagagaaggaagccatactgcggaggctggtggccctgctggaggaggaggcagaagtcattaaccagaagctggcctcggaccccgccctgcgcagcaagctggtccgcctgtcctccgactctttcgcccgcctggtggagctgttctgtagccgggatgacagctctcgcccaagccgagcatgccccgggcccccgcctccttccccggagcccctggcccgcctggccctagccatggagctgagccggcgcgtggccgggctggggggcaccctggccggactcagcgtggagcacgtgcacagcttcacgccctggatccaggcccacgggggctgggagggcatcctggctgtttcacccgtggacttgaacttgccattggactgagctctttctcagaagctgctacaagatgacacctcatgtccctgccctcttcgtgtgcttttccaagtcttcctattccactcagggctgtggggtggtggttgccctacctgtttttgccaaaaataaattgtttaaaacttttcttattaaaaacgttacaaagta

SEQ ID NO: 111265 - DNA, 510 bp, Homo sapiens
  Payload ID: 1791
  Gene Symbol: BCL2L12
  Gene Name: BCL2-like 12 (proline rich)
  ENST ID: ENST00000598306
  CDS Start-End: 64-342
cagtggaggagaccgcaagttgagtggaggaggcggcggtggggccccggaccaggtgcctccatggcaggctctgaagagctggggctccgggaagacacgctgagggtcctagctgccttccttaggcgtggtgaggctgccgggtctcctgttccaactccacctagaagccctgcccaagaagagccaacagacttcctgagccgccttcgaagatgtcttccctgctccctgggcgtggagcacgtgcacagcttcacgccctggatccaggcccacgggggctgggagggcatcctggctgtttcacccgtggacttgaacttgccattggactgagctctttctcagaagctgctacaagatgacacctcatgtccctgccctcttcgtgtgcttttccaagtcttcctattccactcagggctgtggggtggtggttgccctacctgtttttgccaaaaataaattgtttaaaacttttcttattaaaaacgttacaaagta

SEQ ID NO: 111266 - DNA, 1259 bp, Homo sapiens
  Payload ID: 1791
  Gene Symbol: BCL2L12
  Gene Name: BCL2-like 12 (proline rich)
  ENST ID: ENST00000611631
  CDS Start-End: 683-1075
aagtaagtatccccactttcagggtagcatcctctttccctagttatttcagtgcagaatcgattcacgtgtaagcctctacctcctgcacttaccccaatgtagacccccttccacagtccccctacagaagatctcccaaaacatttccaacacagaacttccattcaattcccctccgactgcccgcctccctcctccaggacagagcacgccccaggtttcgagactgaactacccccatctacggagtccacccctccctctctagaaccccctcagtgtagacgcctcctcttttcctctttcctccctactttttctagtttttctgcagccgacctccagcgtcggccactgtagctccttccttgctccactttccccagagtacacagcctgcctttccactctccgtgcagacccatcctctttcccgctcctcgctctcggacgccaccaacgctctcccgggctcttccgcgttacctacgatggaaggtcggggcgtgcgggcagctggaacccacccctgtcttggagctccgggtagctctcaaactcgaggctgcgcaccccctttcccgtcagctgagctctagagcgctggggctttctttttgatcgacttcttgaaataaaaccaactttatcattctttgggtaacagacccaaaagccgatgggacggcccgctgggctgttcccgcccctatgcccttttttgggtttccggccagaggcatgctgggagcgtcacatgcaaattgagcgtgcacccagcgttccgccctttctacgctgggccggttatcgacccggcccagtgcgcaggcgcgggaaagttgaactaataaagtttgtacgagttcagtggaggagaccgcaagttgagtggaggaggcggcggtggggccccggaccaggtgcctccatggcaggctctgaagagctggggctccgggaagacacgctgagggtcctagctgccttccttaggcgtggtgaggctgccgggtctcctgttccaactccacctaggagggcatcctggctgtttcacccgtggacttgaacttgccattggactgagctctttctcagaagctgctacaagatgacacctcatgtccctgccctcttcgtgtgcttttccaagtcttcctattccactcagggctgtggggtggtggttgccctacctgtttttgccaaaaataaattgtttaaaacttttcttattaaaaacgttacaaagt

SEQ ID NO: 111267 - DNA, 1402 bp, Homo sapiens
  Payload ID: 1791
  Gene Symbol: BCL2L12
  Gene Name: BCL2-like 12 (proline rich)
  ENST ID: ENST00000614495
  CDS Start-End: 683-1264
aagtaagtatccccactttcagggtagcatcctctttccctagttatttcagtgcagaatcgattcacgtgtaagcctctacctcctgcacttaccccaatgtagacccccttccacagtccccctacagaagatctcccaaaacatttccaacacagaacttccattcaattcccctccgactgcccgcctccctcctccaggacagagcacgccccaggtttcgagactgaactacccccatctacggagtccacccctccctctctagaaccccctcagtgtagacgcctcctcttttcctctttcctccctactttttctagtttttctgcagccgacctccagcgtcggccactgtagctccttccttgctccactttccccagagtacacagcctgcctttccactctccgtgcagacccatcctctttcccgctcctcgctctcggacgccaccaacgctctcccgggctcttccgcgttacctacgatggaaggtcggggcgtgcgggcagctggaacccacccctgtcttggagctccgggtagctctcaaactcgaggctgcgcaccccctttcccgtcagctgagctctagagcgctggggctttctttttgatcgacttcttgaaataaaaccaactttatcattctttgggtaacagacccaaaagccgatgggacggcccgctgggctgttcccgcccctatgcccttttttgggtttccggccagaggcatgctgggagcgtcacatgcaaattgagcgtgcacccagcgttccgccctttctacgctgggccggttatcgacccggcccagtgcgcaggcgcgggaaagttgaactaataaagtttgtacgagttcagtggaggagaccgcaagttgagtggaggaggcggcggtggggccccggaccaggtgcctccatggcaggctctgaagagctggggctccgggaagacacgctgagggtcctagctgccttccttaggcgtggtgaggctgccgggtctcctgttccaactccacctagaagccctgcccaagaagagccaacagacttcctgagccgccttcgaagatgtcttccctgctccctggggcgaggagcagccccctctgagtcccctcggccttgctctctgcccatccgcccctgctatggtttagagcctggagggcatcctggctgtttcacccgtggacttgaacttgccattggactgagctctttctcagaagctgctacaagatgacacctcatgtccctgccctcttcgtgtgcttttccaagtcttcctattccactcagggctgtggggtggtggttgccctacctgtttttgccaaaaataaattgtttaaaacttttcttattaaaaacgttacaaagt

SEQ ID NO: 111268 - DNA, 1854 bp, Homo sapiens
  Payload ID: 1791
  Gene Symbol: BCL2L12
  Gene Name: BCL2-like 12 (proline rich)
  Uniprot ID: Q9HB09
  ENST ID: ENST00000616144
  CDS Start-End: 683-1687
aagtaagtatccccactttcagggtagcatcctctttccctagttatttcagtgcagaatcgattcacgtgtaagcctctacctcctgcacttaccccaatgtagacccccttccacagtccccctacagaagatctcccaaaacatttccaacacagaacttccattcaattcccctccgactgcccgcctccctcctccaggacagagcacgccccaggtttcgagactgaactacccccatctacggagtccacccctccctctctagaaccccctcagtgtagacgcctcctcttttcctctttcctccctactttttctagtttttctgcagccgacctccagcgtcggccactgtagctccttccttgctccactttccccagagtacacagcctgcctttccactctccgtgcagacccatcctctttcccgctcctcgctctcggacgccaccaacgctctcccgggctcttccgcgttacctacgatggaaggtcggggcgtgcgggcagctggaacccacccctgtcttggagctccgggtagctctcaaactcgaggctgcgcaccccctttcccgtcagctgagctctagagcgctggggctttctttttgatcgacttcttgaaataaaaccaactttatcattctttgggtaacagacccaaaagccgatgggacggcccgctgggctgttcccgcccctatgcccttttttgggtttccggccagaggcatgctgggagcgtcacatgcaaattgagcgtgcacccagcgttccgccctttctacgctgggccggttatcgacccggcccagtgcgcaggcgcgggaaagttgaactaataaagtttgtacgagttcagtggaggagaccgcaagttgagtggaggaggcggcggtggggccccggaccaggtgcctccatggcaggctctgaagagctggggctccgggaagacacgctgagggtcctagctgccttccttaggcgtggtgaggctgccgggtctcctgttccaactccacctagaagccctgcccaagaagagccaacagacttcctgagccgccttcgaagatgtcttccctgctccctggggcgaggagcagccccctctgagtcccctcggccttgctctctgcccatccgcccctgctatggtttagagcctggcccagctactccagacttctatgctttggtggcccagcggctggaacagctggtccaagagcagctgaaatctccgcccagcccagaattacagggtcccccatcgacagagaaggaagccatactgcggaggctggtggccctgctggaggaggaggcagaagtcattaaccagaagctggcctcggaccccgccctgcgcagcaagctggtccgcctgtcctccgactctttcgcccgcctggtggagctgttctgtagccgggatgacagctctcgcccaagccgagcatgccccgggcccccgcctccttccccggagcccctggcccgcctggccctagccatggagctgagccggcgcgtggccgggctggggggcaccctggccggactcagcgtggagcacgtgcacagcttcacgccctggatccaggcccacgggggctgggagggcatcctggctgtttcacccgtggacttgaacttgccattggactgagctctttctcagaagctgctacaagatgacacctcatgtccctgccctcttcgtgtgcttttccaagtcttcctattccactcagggctgtggggtggtggttgccctacctgtttttgccaaaaataaattgtttaaaacttttcttattaaaaacgttacaaagt

SEQ ID NO: 111269 - DNA, 1630 bp, Homo sapiens
  Payload ID: 1791
  Gene Symbol: BCL2L12
  Gene Name: BCL2-like 12 (proline rich)
  ENST ID: ENST00000619007
  CDS Start-End: 683-1492
aagtaagtatccccactttcagggtagcatcctctttccctagttatttcagtgcagaatcgattcacgtgtaagcctctacctcctgcacttaccccaatgtagacccccttccacagtccccctacagaagatctcccaaaacatttccaacacagaacttccattcaattcccctccgactgcccgcctccctcctccaggacagagcacgccccaggtttcgagactgaactacccccatctacggagtccacccctccctctctagaaccccctcagtgtagacgcctcctcttttcctctttcctccctactttttctagtttttctgcagccgacctccagcgtcggccactgtagctccttccttgctccactttccccagagtacacagcctgcctttccactctccgtgcagacccatcctctttcccgctcctcgctctcggacgccaccaacgctctcccgggctcttccgcgttacctacgatggaaggtcggggcgtgcgggcagctggaacccacccctgtcttggagctccgggtagctctcaaactcgaggctgcgcaccccctttcccgtcagctgagctctagagcgctggggctttctttttgatcgacttcttgaaataaaaccaactttatcattctttgggtaacagacccaaaagccgatgggacggcccgctgggctgttcccgcccctatgcccttttttgggtttccggccagaggcatgctgggagcgtcacatgcaaattgagcgtgcacccagcgttccgccctttctacgctgggccggttatcgacccggcccagtgcgcaggcgcgggaaagttgaactaataaagtttgtacgagttcagtggaggagaccgcaagttgagtggaggaggcggcggtggggccccggaccaggtgcctccatggcaggctctgaagagctggggctccgggaagacacgctgagggtcctagctgccttccttaggcgtggtgaggctgccgggtctcctgttccaactccacctagaagccctgcccaagaagagccaacagacttcctgagccgccttcgaagatgtcttccctgctccctggggcgaggagcagccccctctgagtcccctcggccttgctctctgcccatccgcccctgctatggtttagagcctggcccagctactccagacttctatgctttggtggcccagcggctggaacagctggtccaagagcagctgaaatctccgcccagcccagaattacagggtcccccatcgacagagaaggaagccatactgcggaggctggtggccctgctggaggaggaggcagaagtcattaaccagaaggtgatgggcatctgtcccactccttggcaaggacaggagttgcggaatggagggcatcctggctgtttcacccgtggacttgaacttgccattggactgagctctttctcagaagctgctacaagatgacacctcatgtccctgccctcttcgtgtgcttttccaagtcttcctattccactcagggctgtggggtggtggttgccctacctgtttttgccaaaaataaattgtttaaaacttttcttattaaaaacgttacaaagt

SEQ ID NO: 111270 - DNA, 2992 bp, Homo sapiens
  Payload ID: 1792
  Gene Symbol: BCL2L13
  Gene Name: BCL2-like 13 (apoptosis facilitator)
  Uniprot ID: Q9BXK5
  ENST ID: ENST00000317582
  CDS Start-End: 348-1805
agatttgggcgggctaggagggtttgggtcttcaggtcacatctggacggagagacctccggggcctccgttggtcggtccttccgctccggataccgttccggatgtcaggtagttcaggtcccgccccgacgccggccgtgacgaaggcacgccggggtgacctcaccctccaacatggcggcggcggtagattagggccgcgggtcggagcactcaccgccgctgggggaccctgtcggaagcaactgccgccgccgcctctttcatctcttctggggcaggggccagggccaggttttacacatccataagtagacctttttggagcctcaccagccaattcaatggcgtcctcttctactgtgcctctgggatttcactatgaaacaaagtatgttgttctcagctacttgggactcctctctcaagagaagctgcaagagcaacatctttcctcaccccaaggggttcaactagatatagcttcacaatctctggatcaagaaattttattaaaagttaaaactgaaattgaagaagagctaaaatctctggacaaagaaatttctgaagccttcaccagcacaggctttgaccgtcacacttctccagtgttcagccctgccaatccagaaagctcaatggaagactgcttggcccatcttggagaaaaagtgtcccaggaactgaaagagcctctccataaagcattgcaaatgctcctgagccagccagtgacatatcaggcatttcgggaatgtacactggagaccacagttcatgccagcggctggaataagattttggtgcctctggttttgctacgacaaatgcttttggaattgacaagacgtggtcaagaacctttgagcgcactgctgcagtttggcgtgacatacctggaggactattcggcagagtacatcattcagcaaggtggctggggcactgtgtttagtcttgagtcagaggaggaggaataccctggaatcactgcagaagatagcaatgacatttacatcctgcccagcgacaactctggacaagtcagtcccccagagtctccaactgtgaccacttcctggcagtctgagagcttacctgtgtcactgtcagctagccagagttggcacacagaaagcctgccagtgtcactaggccctgagtcctggcagcagattgcaatggatcctgaagaagtgaaaagcttagacagcaacggagctggagagaagagtgagaacaactcctctaattctgacattgtgcacgtggagaaagaagaggtgcccgagggcatggaagaggctgctgtggcttctgtggtcttgccagcgcgggagctgcaagaggcacttcctgaagccccagctcccttgcttccacatatcactgccacctccctgctggggacaagggaacctgacacagaagtgatcacagttgagaaatccagccctgctacatctctgtttgtagaacttgatgaagaagaggtgaaagcagcaacaactgaacctactgaagtggaggaggtggtccccgcactggaacccacagaaacgctgctgagtgagaaggagataaacgcaagggaagagagccttgtggaagagctgtcccctgccagcgagaagaagcccgtgccgccgtctgagggcaagtctagactgtcccccgccggtgagatgaagcccatgccgctgtctgagggcaagtctatactgctgtttggaggggctgctgctgttgccatcctggcagtggccatcggggtagccctggctctgagaaagaaataggaggcttttcagaagagaaagacagaaggatgtaaggttggagttgtattggctggaatttgaacctccagcagctgtctggacatttgtggaacactctgggataattggggacttctgctcaacatggcagtggcatgttaggcatgttagggcttgaggtggggcattcacattcatctgactgtaaatcccaagggcctccgctcatgctaaattgagaatcttaggggtaaagcaccccctccaggaccgggtttctcagccttggcactagtgctgttctgaccattctctgtgttggggctgtcctgtgtgtggtgggctccacccactagatgccagtggcaccccctcccagagatgacaaacgaaaatgtctctagacattgccaaatgtcccgtgtgaacatcccctattgagacccactgctttagcgagagagggtttacttaggaagaattgggatagaaattcccagctgagagaacttagctgtgggctcctcagctactgacttcttagctcttaatccccttagaatttcatctttctcgatgagcaggctctgcacccactctttttttgccccccgccctcatcctggagtgtgagggtgctcgcccgtactctcagctgcctctcagggactgcactgttcctcttcacccccaggttcctgctaagatcccacgggcgagggcttgctctggactcagtctgtcaagtccccgaagcttcctgcagctccaccttgtaaaaatgctgcctttgggaatcttcgaaatatgtacacagagaaaatcacatgaaggagacctggggtccccacttgtgagtgcaactgcaagtaactctggctagagagacacatgtgtcttgtgtcaaggcaggaggataacctggatgaccttctgaggtctcttcagcccttttcgctagtggtcacccaccaccatggttacttgccagcaacatctctattgctggatggtccctgtctataaccttgggctagtatattttttccaatatgggaccttagtcttactactgatgagttctatgggtctcttgctagggggtaaggatttttattcttgggcttatagagccagttagatcataattcttatgaaatagagagtgtcctaaatatcactgaaataaaaagtaggaaaaagaa

SEQ ID NO: 111271 - DNA, 4905 bp, Homo sapiens
  Payload ID: 1792
  Gene Symbol: BCL2L13
  Gene Name: BCL2-like 13 (apoptosis facilitator)
  ENST ID: ENST00000337612
  CDS Start-End: 354-740
gcaatcagatttgggcgggctaggagggtttgggtcttcaggtcacatctggacggagagacctccggggcctccgttggtcggtccttccgctccggataccgttccggatgtcaggtagttcaggtcccgccccgacgccggccgtgacgaaggcacgccggggtgacctcaccctccaacatggcggcggcggtagattagggccgcgggtcggagcactcaccgccgctgggggaccctgtcggaagcaactgccgccgccgcctctttcatctcttctggggcaggggccagggccaggttttacacatccataagtagacctttttggagcctcaccagccaattcaatggcgtcctcttctactgtgcctctgggatttcactatgaaacaaagtatgttgttctcagctacttgggactcctctctcaagagaagctgcaagagcaacatctttcctcaccccaaggggttcaactagatatagcttcacaatctctggatcaagaaattttattaaaagttaaaactgaaattgaagaagagctaaaatctctggacaaagaaatttctgaagattttggtgcctctggttttgctacgacaaatgcttttggaattgacaagacgtggtcaagaacctttgagcgcactgctgcagtttggcgtgacatacctggaggactattcggcagagtacatcattcagcaaggtggctggggcactgtgtttagtcttgagtcagaggaggaggaataccctggaatcactgcagaagatagcaatgacatttacatcctgcccagcgacaactctggacaagtcagtcccccagagtctccaactgtgaccacttcctggcagtctgagagcttacctgtgtcactgtcagctagccagagttggcacacagaaagcctgccagtgtcactaggccctgagtcctggcagcagattgcaatggatcctgaagaagtgaaaagcttagacagcaacggagctggagagaagagtgagaacaactcctctaattctgacattgtgcacgtggagaaagaagaggtgcccgagggcatggaagaggctgctgtggcttctgtggtcttgccagcgcgggagctgcaagaggcacttcctgaagccccagctcccttgcttccacatatcactgccacctccctgctggggacaagggaacctgacacagaagtgatcacagttgagaaatccagccctgctacatctctgtttgtagaacttgatgaagaagaggtgaaagcagcaacaactgaacctactgaagtggaggaggtggtccccgcactggaacccacagaaacgctgctgagtgagaaggagataaacgcaagggaagagagccttgtggaagagctgtcccctgccagcgagaagaagcccgtgccgccgtctgagggcaagtctagactgtcccccgccggtgagatgaagcccatgccgctgtctgagggcaagtctatactgctgtttggaggggctgctgctgttgccatcctggcagtggccatcggggtagccctggctctgagaaagaaataggaggcttttcagaagagaaagacagaaggatgtaaggttggagttgtattggctggaatttgaacctccagcagctgtctggacatttgtggaacactctgggataattggggacttctgctcaacatggcagtggcatgttaggcatgttagggcttgaggtggggcattcacattcatctgactgtaaatcccaagggcctccgctcatgctaaattgagaatcttaggggtaaagcaccccctccaggaccgggtttctcagccttggcactagtgctgttctgaccattctctgtgttggggctgtcctgtgtgtggtgggctccacccactagatgccagtggcaccccctcccagagatgacaaacgaaaatgtctctagacattgccaaatgtcccgtgtgaacatcccctattgagacccactgctttagcgagagagggtttacttaggaagaattgggatagaaattcccagctgagagaacttagctgtgggctcctcagctactgacttcttagctcttaatccccttagaatttcatctttctcgatgagcaggctctgcacccactctttttttgccccccgccctcatcctggagtgtgagggtgctcgcccgtactctcagctgcctctcagggactgcactgttcctcttcacccccaggttcctgctaagatcccacgggcgagggcttgctctggactcagtctgtcaagtccccgaagcttcctgcagctccaccttgtaaaaatgctgcctttgggaatcttcgaaatatgtacacagagaaaatcacatgaaggagacctggggtccccacttgtgagtgcaactgcaagtaactctggctagagagacacatgtgtcttgtgtcaaggcaggaggataacctggatgaccttctgaggtctcttcagcccttttcgctagtggtcacccaccaccatggttacttgccagcaacatctctattgctggatggtccctgtctataaccttgggctagtatattttttccaatatgggaccttagtcttactactgatgagttctatgggtctcttgctagggggtaaggatttttattcttgggcttatagagccagttagatcataattcttatgaaatagagagtgtcctaaatatcactgaaataaaaagtaggaaaaagaagcttgaattttaagactgaggctgctctgcagattctagtttggctttcagagttcaagagtggtggcatcttcacctgaattcttcaatgccagggtaataaaccaaaatagtcctaatcagtatatgctagttgagcatcggcataattttctttcctctggctgatcccagccctaaaggaagggtagacccgtgtctttccagccctaaaggaagggtagacccgtgtctttccagccctaaaggaagggcagacccgtgtctttccatgcccgagggccacgacgtcactatgcagggcacacgtggcttggtttaaaaaggtcatcttagatttatcttagtaaatgtaataaattattttttagatcttgaaatttataataaaaatactttacctaccctgatcaccaaaacctgatgttttaaatgtgctttctttttgaaatttatgttttcaaataaaatctccctaaagcaatatttaaaaattggtcaaaacaaggtctgggagtatgtttgtgtgtctttccagctttatcctgtagcgtgtctttgttctgtgttttagtgtcccatttagggagtgatgttttaagggtttttgtgtacttggattaagtaattagaggtgagtggggggaatgggattattgaggcaatgatttttttcttcatgggctctgatagttgcattgattgttctgtattctaattgctatatttgtgtttgcataggtgaagagcaaactggtgcgttatcttgatttttaaaaagtaataaatcctatgagttccagtattaacacttgccagttctggatcctcacacccattggctgagcgcattcaagcaccaatcgaagccaggttcatctctgagctgctgaaaggaggtgtgaggcttaggaaattggagcctgtgttgcccacgaaaggaaagaataaggaagaaatgtggtatggaagcggctacttgctgctttattttcccacctgttagacattcctccacagtgatttggccagttgtatttcacggtaatggaactagatagtgttttccattggctttctctggtagctcttggtcagctcctgagttaacaggatgtggcagcatccctgttcttccttcacgtcctcaccctctgcctccagcagtggaagggaacagccctcatgaggactgcttcctactgcagctcctgctttttgctcatacatttaaaaaactatttctcaagcttcccctccttttggggggaggagctgatagtaggaggccattccttccacctccaacttataccctctaagtctaaggtgaaggaaagattcagaataaatccaacttgtttatagaaaagttcttgttagtccttagacctcatctcaactgctctgttgaaggtaatgatttattggggggaaaaaacaacgccaatttatcctctctgtattaaagtgataattctgggcccacagaaatcagtcagtacctgcggtgtgccttaaggggactctcatgatcatcattcccttctagagaacattctagatgaagaaatgcaactgttgaccttctggttcacccatctccccctcgaggcattcttgataccccttctcacctgcatttctgtcccagggataccagatgcagccactacctaactaggcttgtcctgggggagtgagccgtgaacctggagacatggctttgacccacagctactgttcatttcctcaggctttgcgctgattccctcaataatatgacagtaaggcaagtagtctccttgcctttctcctgaaaggtatgagatgtggacatttcagtgtttgaattattttaagagatgttttatagaaataaaacgttttgtagctaagaattttccctttctcttaatttcttacatctttccacacaaacttatctttccaagaatttgaggtggtgatcatacccatcaagacggccttgtaggctatctgattgctaacagacacgacctagagcttctgcccaaattcccacacaagcattatctcgtttaacatctcagcgacatactggataccagaataatgtttcctcttctctggtgcaccaaaacctgccctt

SEQ ID NO: 111272 - DNA, 4458 bp, Homo sapiens
  Payload ID: 1792
  Gene Symbol: BCL2L13
  Gene Name: BCL2-like 13 (apoptosis facilitator)
  ENST ID: ENST00000355028
  CDS Start-End: 127-642
gccgctgggggaccctgtcggaagcaactgccgccgccgcctctttcatctcttctggggcaggggccagggccaggttttacacatccataagtagacctttttggagcctcaccagccaattcaatggcgtcctcttctactgtgcctctgggatttcactatgaaacaaagtatgttgttctcagctacttgggactcctctctcaagagaagctgcaagagcaacatctttcctcaccccaaggggttcaactagatatagcttcacaatctctggatcaagaaattttattaaaagttaaaactgaaattgaagaagagctaaaatctctggacaaagaaatttctgaagccttcaccagcacaggctttgaccgtcacacttctccagtgttcagccctgccaatccagaaagctcaatggaagactgcttggcccatcttggagaaaaagtgtcccaggaactgaaagagcctctccataaagcattgcaaatgctcctgagccaggcactgtgtttagtcttgagtcagaggaggaggaataccctggaatcactgcagaagatagcaatgacatttacatcctgcccagcgacaactctggacaagtcagtcccccagagtctccaactgtgaccacttcctggcagtctgagagcttacctgtgtcactgtcagctagccagagttggcacacagaaagcctgccagtgtcactaggccctgagtcctggcagcagattgcaatggatcctgaagaagtgaaaagcttagacagcaacggagctggagagaagagtgagaacaactcctctaattctgacattgtgcacgtggagaaagaagaggtgcccgagggcatggaagaggctgctgtggcttctgtggtcttgccagcgcgggagctgcaagaggcacttcctgaagccccagctcccttgcttccacatatcactgccacctccctgctggggacaagggaacctgacacagaagtgatcacagttgagaaatccagccctgctacatctctgtttgtagaacttgatgaagaagaggtgaaagcagcaacaactgaacctactgaagtggaggaggtggtccccgcactggaacccacagaaacgctgctgagtgagaaggagataaacgcaagggaagagagccttgtggaagagctgtcccctgccagcgagaagaagcccgtgccgccgtctgagggcaagtctagactgtcccccgccggtgagatgaagcccatgccgctgtctgagggcaagtctatactgctgtttggaggggctgctgctgttgccatcctggcagtggccatcggggtagccctggctctgagaaagaaataggaggcttttcagaagagaaagacagaaggatgtaaggttggagttgtattggctggaatttgaacctccagcagctgtctggacatttgtggaacactctgggataattggggacttctgctcaacatggcagtggcatgttaggcatgttagggcttgaggtggggcattcacattcatctgactgtaaatcccaagggcctccgctcatgctaaattgagaatcttaggggtaaagcaccccctccaggaccgggtttctcagccttggcactagtgctgttctgaccattctctgtgttggggctgtcctgtgtgtggtgggctccacccactagatgccagtggcaccccctcccagagatgacaaacgaaaatgtctctagacattgccaaatgtcccgtgtgaacatcccctattgagacccactgctttagcgagagagggtttacttaggaagaattgggatagaaattcccagctgagagaacttagctgtgggctcctcagctactgacttcttagctcttaatccccttagaatttcatctttctcgatgagcaggctctgcacccactctttttttgccccccgccctcatcctggagtgtgagggtgctcgcccgtactctcagctgcctctcagggactgcactgttcctcttcacccccaggttcctgctaagatcccacgggcgagggcttgctctggactcagtctgtcaagtccccgaagcttcctgcagctccaccttgtaaaaatgctgcctttgggaatcttcgaaatatgtacacagagaaaatcacatgaaggagacctggggtccccacttgtgagtgcaactgcaagtaactctggctagagagacacatgtgtcttgtgtcaaggcaggaggataacctggatgaccttctgaggtctcttcagcccttttcgctagtggtcacccaccaccatggttacttgccagcaacatctctattgctggatggtccctgtctataaccttgggctagtatattttttccaatatgggaccttagtcttactactgatgagttctatgggtctcttgctagggggtaaggatttttattcttgggcttatagagccagttagatcataattcttatgaaatagagagtgtcctaaatatcactgaaataaaaagtaggaaaaagaagcttgaattttaagactgaggctgctctgcagattctagtttggctttcagagttcaagagtggtggcatcttcacctgaattcttcaatgccagggtaataaaccaaaatagtcctaatcagtatatgctagttgagcatcggcataattttctttcctctggctgatcccagccctaaaggaagggtagacccgtgtctttccagccctaaaggaagggtagacccgtgtctttccagccctaaaggaagggcagacccgtgtctttccatgcccgagggccacgacgtcactatgcagggcacacgtggcttggtttaaaaaggtcatcttagatttatcttagtaaatgtaataaattattttttagatcttgaaatttataataaaaatactttacctaccctgatcaccaaaacctgatgttttaaatgtgctttctttttgaaatttatgttttcaaataaaatctccctaaagcaatatttaaaaattggtcaaaacaaggtctgggagtatgtttgtgtgtctttccagctttatcctgtagcgtgtctttgttctgtgttttagtgtcccatttagggagtgatgttttaagggtttttgtgtacttggattaagtaattagaggtgagtggggggaatgggattattgaggcaatgatttttttcttcatgggctctgatagttgcattgattgttctgtattctaattgctatatttgtgtttgcataggtgaagagcaaactggtgcgttatcttgatttttaaaaagtaataaatcctatgagttccagtattaacacttgccagttctggatcctcacacccattggctgagcgcattcaagcaccaatcgaagccaggttcatctctgagctgctgaaaggaggtgtgaggcttaggaaattggagcctgtgttgcccacgaaaggaaagaataaggaagaaatgtggtatggaagcggctacttgctgctttattttcccacctgttagacattcctccacagtgatttggccagttgtatttcacggtaatggaactagatagtgttttccattggctttctctggtagctcttggtcagctcctgagttaacaggatgtggcagcatccctgttcttccttcacgtcctcaccctctgcctccagcagtggaagggaacagccctcatgaggactgcttcctactgcagctcctgctttttgctcatacatttaaaaaactatttctcaagcttcccctccttttggggggaggagctgatagtaggaggccattccttccacctccaacttataccctctaagtctaaggtgaaggaaagattcagaataaatccaacttgtttatagaaaagttcttgttagtccttagacctcatctcaactgctctgttgaaggtaatgatttattggggggaaaaaacaacgccaatttatcctctctgtattaaagtgataattctgggcccacagaaatcagtcagtacctgcggtgtgccttaaggggactctcatgatcatcattcccttctagagaacattctagatgaagaaatgcaactgttgaccttctggttcacccatctccccctcgaggcattcttgataccccttctcacctgcatttctgtcccagggataccagatgcagccactacctaactaggcttgtcctgggggagtgagccgtgaacctggagacatggctttgacccacagctactgttcatttcctcaggctttgcgctgattccctcaataatatgacagtaaggcaagtagtctccttgcctttctcctgaaaggtatgagatgtggacatttcagtgtttgaattattttaagagatgttttatagaaataaaacgttttgtagctaagaa

SEQ ID NO: 111273 - DNA, 2677 bp, Homo sapiens
  Payload ID: 1792
  Gene Symbol: BCL2L13
  Gene Name: BCL2-like 13 (apoptosis facilitator)
  ENST ID: ENST00000399777
  CDS Start-End: 1-115
tcttggagaaaaagtgtcccaggaactgaaagagcctctccataaagcattgcaaatgctcctgagccaattttggtgcctctggttttgctacgacaaatgcttttggaattgacaagacgtggtcaagaacctttgagcgcactgctgcagtttggcgtgacatacctggaggactattcggcagagtacatcattcagcaaggtggctggggcactgtgtttagtcttgagtcagaggaggaggaataccctggaatcactgcagaagatagcaatgacatttacatcctgcccagcgacaactctggacaagtcagtcccccagagtctccaactgtgaccacttcctggcagtctgagagcttacctgtgtcactgtcagctagccagagttggcacacagaaagcctgccagtgtcactaggccctgagtcctggcagcagattgcaatggatcctgaagaagtgaaaagcttagacagcaacggagctggagagaagagtgagaacaactcctctaattctgacattgtgcacgtggagaaagaagaggtgcccgagggcatggaagaggctgctgtggcttctgtggtcttgccagcgcgggagctgcaagaggcacttcctgaagccccagctcccttgcttccacatatcactgccacctccctgctggggacaagggaacctgacacagaagtgatcacagttgagaaatccagccctgctacatctctgtttgtagaacttgatgaagaagaggtgaaagcagcaacaactgaacctactgaagtggaggaggtggtccccgcactggaacccacagaaacgctgctgagtgagaaggagataaacgcaagggaagagagccttgtggaagagctgtcccctgccagcgagaagaagcccgtgccgccgtctgagggcaagtctagactgtcccccgccggtgagatgaagcccatgccgctgtctgagggcaagtctatactgctgtttggaggggctgctgctgttgccatcctggcagtggccatcggggtagccctggctctgagaaagaaataggaggcttttcagaagagaaagacagaaggatgtaaggttggagttgtattggctggaatttgaacctccagcagctgtctggacatttgtggaacactctgggataattggggacttctgctcaacatggcagtggcatgttaggcatgttagggcttgaggtggggcattcacattcatctgactgtaaatcccaagggcctccgctcatgctaaattgagaatcttaggggtaaagcaccccctccaggaccgggtttctcagccttggcactagtgctgttctgaccattctctgtgttggggctgtcctgtgtgtggtgggctccacccactagatgccagtggcaccccctcccagagatgacaaacgaaaatgtctctagacattgccaaatgtcccgtgtgaacatcccctattgagacccactgctttagcgagagagggtttacttaggaagaattgggatagaaattcccagctgagagaacttagctgtgggctcctcagctactgacttcttagctcttaatccccttagaatttcatctttctcgatgagcaggctctgcacccactctttttttgccccccgccctcatcctggagtgtgagggtgctcgcccgtactctcagctgcctctcagggactgcactgttcctcttcacccccaggttcctgctaagatcccacgggcgagggcttgctctggactcagtctgtcaagtccccgaagcttcctgcagctccaccttgtaaaaatgctgcctttgggaatcttcgaaatatgtacacagagaaaatcacatgaaggagacctggggtccccacttgtgagtgcaactgcaagtaactctggctagagagacacatgtgtcttgtgtcaaggcaggaggataacctggatgaccttctgaggtctcttcagcccttttcgctagtggtcacccaccaccatggttacttgccagcaacatctctattgctggatggtccctgtctataaccttgggctagtatattttttccaatatgggaccttagtcttactactgatgagttctatgggtctcttgctagggggtaaggatttttattcttgggcttatagagccagttagatcataattcttatgaaatagagagtgtcctaaatatcactgaaataaaaagtaggaaaaagaagcttgaattttaagactgaggctgctctgcagattctagtttggctttcagagttcaagagtggtggcatcttcacctgaattcttcaatgccagggtaataaaccaaaatagtcctaatcagtatatgctagttgagcatcggcataattttctttcctctggctgatcccagccctaaaggaagggtagacccgtgtctttccagccctaaaggaagggtagacccgtgtctttccagccctaaaggaagggcagacccgtgtctttccatgcccgagggccacgacgtcactatgcagggcacacgtggcttggtttaaaaaggtcatcttagatttatcttagtaaatgtaataaattattttttagatcttgaaatttataataaaaatactttacctaccctgatcaccaaaa

SEQ ID NO: 111274 - DNA, 1381 bp, Homo sapiens
  Payload ID: 1792
  Gene Symbol: BCL2L13
  Gene Name: BCL2-like 13 (apoptosis facilitator)
  Uniprot ID: Q9BXK5
  ENST ID: ENST00000399782
  CDS Start-End: 740-1345
tcctaaactgggatcttgggtaggaggaagaaaagataaggagttcctctatctgaaattagtcgggctgttttgaggagtactggttagataccttccgatactcctccaaagaactctcggattcaagtaaacaaacatccattaatacaagttaagtatgttccaggcgctgtgtgttccaggtactgttaacaaaagcgggttactagttaagacttccttcatgccctggcgcctctgctcagccagttcccttcgcctaggaggacctctctacaccaccccgctatattccctccccggaattccttcccaaccttcaaggaccatctgccccaactagtggcgaacatcgaggctgtcgtgactgtgtagatacttatttgacctgctcccttggcaaacacttgaaacgcaatacatgtttgtggaactgaacatagcctgtgcatgcagcaaggcttctttccctggaatcgcctgcccttcctccaacacagcgaccagccggtcagaatcccaacccctcgactccggaaatgatctgagagacggaacttccgaacgtcgcaatcagatttgggcgggctaggagggtttgggtcttcaggtcacatctggacggagagacctccggggcctccgttggtcggtccttccgctccggataccgttccggatgtcaggttttacacatccataagtagacctttttggagcctcaccagccaattcaatggcgtcctcttctactgtgcctctgggatttcactatgaaacaaagtatgttgttctcagctacttgggactcctctctcaagagaagctgcaagagcaacatctttcctcaccccaaggggttcaactagatatagcttcacaatctctggatcaagaaattttattaaaagttaaaactgaaattgaagaagagctaaaatctctggacaaagaaatttctgaagccttcaccagcacaggctttgaccgtcacacttctccagtgttcagccctgccaatccagaaagctcaatggaagactgcttggcccatcttggagaaaaagtgtcccaggaactgaaagagcctctccataaagcattgcaaatgctcctgagccagccagtgacatatcaggcatttcgggaatgtacactggagaccacagttcatgccagcggctggaataagattttggtgcctctggttttgctacgacaaatgcttttggaattgacaagacgtggtcaagaacctttgagcgcactgctgcagtttggcgtgacatacctggaggactattcggcagagtacatcattcagcaaggtggctgggtatgagctgttatatattaaaaatattttcttgaaaaaaaa

SEQ ID NO: 111275 - DNA, 5062 bp, Homo sapiens
  Payload ID: 1792
  Gene Symbol: BCL2L13
  Gene Name: BCL2-like 13 (apoptosis facilitator)
  Uniprot ID: Q9BXK5
  ENST ID: ENST00000418951
  CDS Start-End: 770-1741
gcaatcagatttgggcgggctaggagggtttgggtcttcaggtcacatctggacggagagacctccggggcctccgttggtcggtccttccgctccggataccgttccggatgtcaggtagttcaggtcccgccccgacgccggccgtgacgaaggcacgccggggtgacctcaccctccaacatggcggcggcggtagattagggccgcgggtcggagcactcaccgccgctgggggaccctgtcggaagcaactgccgccgccgcctctttcatctcttctggggcaggggccagggccaggttttacacatccataagtagacctttttggagcctcaccagccaattcaatggcgtcctcttctactgtgcctctgggatttcactatgaaacaaagtatgttgttctcagctacttgggactcctctctcaagagaagctgcaagagcaacatctttcctcaccccaaggggttcaactagatatagcttcacaatctctggatcaagaaattttattaaaagttaaaactgaaattgaagaagagctaaaatctctggacaaagaaatttctgaagccttcaccagcacaggctttgaccgtcacacttctccagtgttcagccctgccaatccagaaagctcaatggaagactgcttggcccatcttggagaaaaagtgtcccaggaactgaaagagcctctccataaagcattgcaaatgctcctgagccaattttggtgcctctggttttgctacgacaaatgcttttggaattgacaagacgtggtcaagaacctttgagcgcactgctgcagtttggcgtgacatacctggaggactattcggcagagtacatcattcagcaaggtggctggggcactgtgtttagtcttgagtcagaggaggaggaataccctggaatcactgcagaagatagcaatgacatttacatcctgcccagcgacaactctggacaagtcagtcccccagagtctccaactgtgaccacttcctggcagtctgagagcttacctgtgtcactgtcagctagccagagttggcacacagaaagcctgccagtgtcactaggccctgagtcctggcagcagattgcaatggatcctgaagaagtgaaaagcttagacagcaacggagctggagagaagagtgagaacaactcctctaattctgacattgtgcacgtggagaaagaagaggtgcccgagggcatggaagaggctgctgtggcttctgtggtcttgccagcgcgggagctgcaagaggcacttcctgaagccccagctcccttgcttccacatatcactgccacctccctgctggggacaagggaacctgacacagaagtgatcacagttgagaaatccagccctgctacatctctgtttgtagaacttgatgaagaagaggtgaaagcagcaacaactgaacctactgaagtggaggaggtggtccccgcactggaacccacagaaacgctgctgagtgagaaggagataaacgcaagggaagagagccttgtggaagagctgtcccctgccagcgagaagaagcccgtgccgccgtctgagggcaagtctagactgtcccccgccggtgagatgaagcccatgccgctgtctgagggcaagtctatactgctgtttggaggggctgctgctgttgccatcctggcagtggccatcggggtagccctggctctgagaaagaaataggaggcttttcagaagagaaagacagaaggatgtaaggttggagttgtattggctggaatttgaacctccagcagctgtctggacatttgtggaacactctgggataattggggacttctgctcaacatggcagtggcatgttaggcatgttagggcttgaggtggggcattcacattcatctgactgtaaatcccaagggcctccgctcatgctaaattgagaatcttaggggtaaagcaccccctccaggaccgggtttctcagccttggcactagtgctgttctgaccattctctgtgttggggctgtcctgtgtgtggtgggctccacccactagatgccagtggcaccccctcccagagatgacaaacgaaaatgtctctagacattgccaaatgtcccgtgtgaacatcccctattgagacccactgctttagcgagagagggtttacttaggaagaattgggatagaaattcccagctgagagaacttagctgtgggctcctcagctactgacttcttagctcttaatccccttagaatttcatctttctcgatgagcaggctctgcacccactctttttttgccccccgccctcatcctggagtgtgagggtgctcgcccgtactctcagctgcctctcagggactgcactgttcctcttcacccccaggttcctgctaagatcccacgggcgagggcttgctctggactcagtctgtcaagtccccgaagcttcctgcagctccaccttgtaaaaatgctgcctttgggaatcttcgaaatatgtacacagagaaaatcacatgaaggagacctggggtccccacttgtgagtgcaactgcaagtaactctggctagagagacacatgtgtcttgtgtcaaggcaggaggataacctggatgaccttctgaggtctcttcagcccttttcgctagtggtcacccaccaccatggttacttgccagcaacatctctattgctggatggtccctgtctataaccttgggctagtatattttttccaatatgggaccttagtcttactactgatgagttctatgggtctcttgctagggggtaaggatttttattcttgggcttatagagccagttagatcataattcttatgaaatagagagtgtcctaaatatcactgaaataaaaagtaggaaaaagaagcttgaattttaagactgaggctgctctgcagattctagtttggctttcagagttcaagagtggtggcatcttcacctgaattcttcaatgccagggtaataaaccaaaatagtcctaatcagtatatgctagttgagcatcggcataattttctttcctctggctgatcccagccctaaaggaagggtagacccgtgtctttccagccctaaaggaagggtagacccgtgtctttccagccctaaaggaagggcagacccgtgtctttccatgcccgagggccacgacgtcactatgcagggcacacgtggcttggtttaaaaaggtcatcttagatttatcttagtaaatgtaataaattattttttagatcttgaaatttataataaaaatactttacctaccctgatcaccaaaacctgatgttttaaatgtgctttctttttgaaatttatgttttcaaataaaatctccctaaagcaatatttaaaaattggtcaaaacaaggtctgggagtatgtttgtgtgtctttccagctttatcctgtagcgtgtctttgttctgtgttttagtgtcccatttagggagtgatgttttaagggtttttgtgtacttggattaagtaattagaggtgagtggggggaatgggattattgaggcaatgatttttttcttcatgggctctgatagttgcattgattgttctgtattctaattgctatatttgtgtttgcataggtgaagagcaaactggtgcgttatcttgatttttaaaaagtaataaatcctatgagttccagtattaacacttgccagttctggatcctcacacccattggctgagcgcattcaagcaccaatcgaagccaggttcatctctgagctgctgaaaggaggtgtgaggcttaggaaattggagcctgtgttgcccacgaaaggaaagaataaggaagaaatgtggtatggaagcggctacttgctgctttattttcccacctgttagacattcctccacagtgatttggccagttgtatttcacggtaatggaactagatagtgttttccattggctttctctggtagctcttggtcagctcctgagttaacaggatgtggcagcatccctgttcttccttcacgtcctcaccctctgcctccagcagtggaagggaacagccctcatgaggactgcttcctactgcagctcctgctttttgctcatacatttaaaaaactatttctcaagcttcccctccttttggggggaggagctgatagtaggaggccattccttccacctccaacttataccctctaagtctaaggtgaaggaaagattcagaataaatccaacttgtttatagaaaagttcttgttagtccttagacctcatctcaactgctctgttgaaggtaatgatttattggggggaaaaaacaacgccaatttatcctctctgtattaaagtgataattctgggcccacagaaatcagtcagtacctgcggtgtgccttaaggggactctcatgatcatcattcccttctagagaacattctagatgaagaaatgcaactgttgaccttctggttcacccatctccccctcgaggcattcttgataccccttctcacctgcatttctgtcccagggataccagatgcagccactacctaactaggcttgtcctgggggagtgagccgtgaacctggagacatggctttgacccacagctactgttcatttcctcaggctttgcgctgattccctcaataatatgacagtaaggcaagtagtctccttgcctttctcctgaaaggtatgagatgtggacatttcagtgtttgaattattttaagagatgttttatagaaataaaacgttttgtagctaagaattttccctttctcttaatttcttacatctttccacacaaacttatctttccaagaatttgaggtggtgatcatacccatcaagacggccttgtaggctatctgattgctaacagacacgacctagagcttctgcccaaattcccacacaagcattatctcgtttaacatctcagcgacatactggataccagaataatgtttcctcttctctggtgcaccaaaacctgccctt

SEQ ID NO: 111276 - DNA, 2112 bp, Homo sapiens
  Payload ID: 1792
  Gene Symbol: BCL2L13
  Gene Name: BCL2-like 13 (apoptosis facilitator)
  Uniprot ID: Q9BXK5
  ENST ID: ENST00000493680
  CDS Start-End: 166-771
ggcggcggtagattagggccgcgggtcggagcactcaccgccgctgggggaccctgtcggaagcaactgccgccgccgcctctttcatctcttctggggcaggggccagggccaggttttacacatccataagtagacctttttggagcctcaccagccaattcaatggcgtcctcttctactgtgcctctgggatttcactatgaaacaaagtatgttgttctcagctacttgggactcctctctcaagagaagctgcaagagcaacatctttcctcaccccaaggggttcaactagatatagcttcacaatctctggatcaagaaattttattaaaagttaaaactgaaattgaagaagagctaaaatctctggacaaagaaatttctgaagccttcaccagcacaggctttgaccgtcacacttctccagtgttcagccctgccaatccagaaagctcaatggaagactgcttggcccatcttggagaaaaagtgtcccaggaactgaaagagcctctccataaagcattgcaaatgctcctgagccagccagtgacatatcaggcatttcgggaatgtacactggagaccacagttcatgccagcggctggaataagattttggtgcctctggttttgctacgacaaatgcttttggaattgacaagacgtggtcaagaacctttgagcgcactgctgcagtttggcgtgacatacctggaggactattcggcagagtacatcattcagcaaggtggctgggtatgagctgttatatattaaaaatattttcttgaaaaaaaattaggtttgttgtttttcttaagagatgggttcttgctgtgttacccgggctggagtgcagtgtctaattgctggcactatcatggcaggcttcggtctcaaactcctgggctcaagtgatcctgcctcaggtcctgaatagccaagagcacaggctgggactataggtgcccaccactgtgccgtgctctatcccgtactttttgatatgtaattattattattattcagttggttcagttgtttataaattttccttatatgttctttgacccttgaattacttagaaatgtattttttaatttctaaatacttacaggtttaaaaattttgttttcaattactaatttaattctgtttcatcagaaagcacgaccatcgtggcattgaaacttgagttatagcctactatcatgatcaatttaaaaaatatatatatagggctgggtgcagtggtgcacatctgtaatcccagtgctttgggaggctgaggtgggtgaatcacctgaggtcaggagttcaagaccagcctggtcaacatgacaaaaccccatctgtacaaaaaaatacaaaaaattaactgggcttggtggcatgtgcctgtaatcccagctactcaggaggccaaggcaggagaatcacttgaacccgggaggcagaggttgcagtgagccaagatggcaccactgcattccagcctgggcaacagagcaacaacaacaacaacaacaaaatatatatatacacacacacacacacatatgtatatgtatatacacacatgtatatttttatgtatgtttcagaacatgtattctctaatggttggtgcagaagtctgtacgtgtccatttacatttaatcagtcttaataatacgtattttaaatctttcagtcatttccaattattttgtctaattatttactaagagagacatgttctatttgctactatggtggtagattttccattttccctttagttctgtcaattgtaggtgactaaaagttgtaattattgacccctggacatttatgcggactctctttctttctttgggcctagaaatggtttttaagtttatttgttgtaatttgcccaacagtcagtgattctgtagagagagtacttttcataaagtatactactcattattgttttttagccactatgcatctgagggtttgagttaatttttaaaatatgtaaatttaattactatggatactaatatcgaacatcctaggtttacgtgcttggtaaatgcttactgaataaaatcctgaacatttgtcttaggaa

SEQ ID NO: 111277 - DNA, 2662 bp, Homo sapiens
  Payload ID: 1792
  Gene Symbol: BCL2L13
  Gene Name: BCL2-like 13 (apoptosis facilitator)
  ENST ID: ENST00000498133
  CDS Start-End: 197-433
acgccggggtgacctcaccctccaacatggcggcggcggtagattagggccgcgggtcggagcactcaccgccgctgggggaccctgtcggaagcaactgccgccgccgcctctttcatctcttctggggcaggggccagggccaggttttacacatccataagtagacctttttggagcctcaccagccaattcaatggcgtcctcttctactgtgcctctgggatttcactatgaaacaaagtatgttgttctcagctacttgggactcctctctcaagagaagctgcaagagcaacatctttcctcaccccaaggggttcaactagatatagcttcacaatctctggatcaagaaattttattaaaagttaaaactgaaattgaagaagagctaaaatctctggacaaagaaatttctgaaggccagtgacatatcaggcatttcgggaatgtacactggagaccacagttcatgccagcggctggaataagattttggtgcctctggttttgctacgacaaatgcttttggaattgacaagacgtggtcaagaacctttgagcgcactgctgcagtttggcgtgacatacctggaggactattcggcagagtacatcattcagcaaggtggctggggcactgtgtttagtcttgagtcagaggaggaggaataccctggaatcactgcagaagatagcaatgacatttacatcctgcccagcgacaactctggacaagtcagtcccccagagtctccaactgtgaccacttcctggcagtctgagagcttacctgtgtcactgtcagctagccagagttggcacacagaaagcctgccagtgtcactaggccctgagtcctggcagcagattgcaatggatcctgaagaagtgaaaagcttagacagcaacggagctggagagaagagtgagaacaactcctctaattctgacattgtgcacgtggagaaagaagaggtgcccgagggcatggaagaggctgctgtggcttctgtggtcttgccagcgcgggagctgcaagaggcacttcctgaagccccagctcccttgcttccacatatcactgccacctccctgctggggacaagggaacctgacacagaagtgatcacagttgagaaatccagccctgctacatctctgtttgtagaacttgatgaagaagaggtgaaagcagcaacaactgaacctactgaagtggaggaggtggtccccgcactggaacccacagaaacgctgctgagtgagaaggagataaacgcaagggaagagagccttgtggaagagctgtcccctgccagcgagaagaagcccgtgccgccgtctgagggcaagtctagactgtcccccgccggtgagatgaagcccatgccgctgtctgagggcaagtctatactgctgtttggaggggctgctgctgttgccatcctggcagtggccatcggggtagccctggctctgagaaagaaataggaggcttttcagaagagaaagacagaaggatgtaaggttggagttgtattggctggaatttgaacctccagcagctgtctggacatttgtggaacactctgggataattggggacttctgctcaacatggcagtggcatgttaggcatgttagggcttgaggtggggcattcacattcatctgactgtaaatcccaagggcctccgctcatgctaaattgagaatcttaggggtaaagcaccccctccaggaccgggtttctcagccttggcactagtgctgttctgaccattctctgtgttggggctgtcctgtgtgtggtgggctccacccactagatgccagtggcaccccctcccagagatgacaaacgaaaatgtctctagacattgccaaatgtcccgtgtgaacatcccctattgagacccactgctttagcgagagagggtttacttaggaagaattgggatagaaattcccagctgagagaacttagctgtgggctcctcagctactgacttcttagctcttaatccccttagaatttcatctttctcgatgagcaggctctgcacccactctttttttgccccccgccctcatcctggagtgtgagggtgctcgcccgtactctcagctgcctctcagggactgcactgttcctcttcacccccaggttcctgctaagatcccacgggcgagggcttgctctggactcagtctgtcaagtccccgaagcttcctgcagctccaccttgtaaaaatgctgcctttgggaatcttcgaaatatgtacacagagaaaatcacatgaaggagacctggggtccccacttgtgagtgcaactgcaagtaactctggctagagagacacatgtgtcttgtgtcaaggcaggaggataacctggatgaccttctgaggtctcttcagcccttttcgctagtggtcacccaccaccatggttacttgccagcaacatctctattgctggatggtccctgtctataaccttgggctagtatattttttccaatatgggaccttagtcttactactgatgagttctatgggtctcttgctagggggtaaggatttttattcttgggcttatagagccagttagatcataattcttatgaaatagagagtgtcctaaatatcactg

SEQ ID NO: 111278 - DNA, 4975 bp, Homo sapiens
  Payload ID: 1792
  Gene Symbol: BCL2L13
  Gene Name: BCL2-like 13 (apoptosis facilitator)
  Uniprot ID: Q9BXK5
  ENST ID: ENST00000543133
  CDS Start-End: 683-1654
gcaatcagatttgggcgggctaggagggtttgggtcttcaggtcacatctggacggagagacctccggggcctccgttggtcggtccttccgctccggataccgttccggatgtcaggtagttcaggtcccgccccgacgccggccgtgacgaaggcacgccggggtgacctcaccctccaacatggcggcggcggtagattagggccgcgggtcggagcactcaccgccgctgggggaccctgtcggaagcaactgccgccgccgcctctttcatctcttctggggcaggggccagggccaggttttacacatccataagtagacctttttggagcctcaccagccaattcaatggcgtcctcttctactgtgcctctgggatttcactatgaaacaaagtatgttgttctcagctacttgggactcctctctcaagagaagctgcaagagcaacatctttcctcaccccaaggggttcaactagatatagcttcacaatctctggatcaagaaattttattaaaagttaaaactgaaattgaagaagagctaaaatctctggacaaagaaatttctgaaggccagtgacatatcaggcatttcgggaatgtacactggagaccacagttcatgccagcggctggaataagattttggtgcctctggttttgctacgacaaatgcttttggaattgacaagacgtggtcaagaacctttgagcgcactgctgcagtttggcgtgacatacctggaggactattcggcagagtacatcattcagcaaggtggctggggcactgtgtttagtcttgagtcagaggaggaggaataccctggaatcactgcagaagatagcaatgacatttacatcctgcccagcgacaactctggacaagtcagtcccccagagtctccaactgtgaccacttcctggcagtctgagagcttacctgtgtcactgtcagctagccagagttggcacacagaaagcctgccagtgtcactaggccctgagtcctggcagcagattgcaatggatcctgaagaagtgaaaagcttagacagcaacggagctggagagaagagtgagaacaactcctctaattctgacattgtgcacgtggagaaagaagaggtgcccgagggcatggaagaggctgctgtggcttctgtggtcttgccagcgcgggagctgcaagaggcacttcctgaagccccagctcccttgcttccacatatcactgccacctccctgctggggacaagggaacctgacacagaagtgatcacagttgagaaatccagccctgctacatctctgtttgtagaacttgatgaagaagaggtgaaagcagcaacaactgaacctactgaagtggaggaggtggtccccgcactggaacccacagaaacgctgctgagtgagaaggagataaacgcaagggaagagagccttgtggaagagctgtcccctgccagcgagaagaagcccgtgccgccgtctgagggcaagtctagactgtcccccgccggtgagatgaagcccatgccgctgtctgagggcaagtctatactgctgtttggaggggctgctgctgttgccatcctggcagtggccatcggggtagccctggctctgagaaagaaataggaggcttttcagaagagaaagacagaaggatgtaaggttggagttgtattggctggaatttgaacctccagcagctgtctggacatttgtggaacactctgggataattggggacttctgctcaacatggcagtggcatgttaggcatgttagggcttgaggtggggcattcacattcatctgactgtaaatcccaagggcctccgctcatgctaaattgagaatcttaggggtaaagcaccccctccaggaccgggtttctcagccttggcactagtgctgttctgaccattctctgtgttggggctgtcctgtgtgtggtgggctccacccactagatgccagtggcaccccctcccagagatgacaaacgaaaatgtctctagacattgccaaatgtcccgtgtgaacatcccctattgagacccactgctttagcgagagagggtttacttaggaagaattgggatagaaattcccagctgagagaacttagctgtgggctcctcagctactgacttcttagctcttaatccccttagaatttcatctttctcgatgagcaggctctgcacccactctttttttgccccccgccctcatcctggagtgtgagggtgctcgcccgtactctcagctgcctctcagggactgcactgttcctcttcacccccaggttcctgctaagatcccacgggcgagggcttgctctggactcagtctgtcaagtccccgaagcttcctgcagctccaccttgtaaaaatgctgcctttgggaatcttcgaaatatgtacacagagaaaatcacatgaaggagacctggggtccccacttgtgagtgcaactgcaagtaactctggctagagagacacatgtgtcttgtgtcaaggcaggaggataacctggatgaccttctgaggtctcttcagcccttttcgctagtggtcacccaccaccatggttacttgccagcaacatctctattgctggatggtccctgtctataaccttgggctagtatattttttccaatatgggaccttagtcttactactgatgagttctatgggtctcttgctagggggtaaggatttttattcttgggcttatagagccagttagatcataattcttatgaaatagagagtgtcctaaatatcactgaaataaaaagtaggaaaaagaagcttgaattttaagactgaggctgctctgcagattctagtttggctttcagagttcaagagtggtggcatcttcacctgaattcttcaatgccagggtaataaaccaaaatagtcctaatcagtatatgctagttgagcatcggcataattttctttcctctggctgatcccagccctaaaggaagggtagacccgtgtctttccagccctaaaggaagggtagacccgtgtctttccagccctaaaggaagggcagacccgtgtctttccatgcccgagggccacgacgtcactatgcagggcacacgtggcttggtttaaaaaggtcatcttagatttatcttagtaaatgtaataaattattttttagatcttgaaatttataataaaaatactttacctaccctgatcaccaaaacctgatgttttaaatgtgctttctttttgaaatttatgttttcaaataaaatctccctaaagcaatatttaaaaattggtcaaaacaaggtctgggagtatgtttgtgtgtctttccagctttatcctgtagcgtgtctttgttctgtgttttagtgtcccatttagggagtgatgttttaagggtttttgtgtacttggattaagtaattagaggtgagtggggggaatgggattattgaggcaatgatttttttcttcatgggctctgatagttgcattgattgttctgtattctaattgctatatttgtgtttgcataggtgaagagcaaactggtgcgttatcttgatttttaaaaagtaataaatcctatgagttccagtattaacacttgccagttctggatcctcacacccattggctgagcgcattcaagcaccaatcgaagccaggttcatctctgagctgctgaaaggaggtgtgaggcttaggaaattggagcctgtgttgcccacgaaaggaaagaataaggaagaaatgtggtatggaagcggctacttgctgctttattttcccacctgttagacattcctccacagtgatttggccagttgtatttcacggtaatggaactagatagtgttttccattggctttctctggtagctcttggtcagctcctgagttaacaggatgtggcagcatccctgttcttccttcacgtcctcaccctctgcctccagcagtggaagggaacagccctcatgaggactgcttcctactgcagctcctgctttttgctcatacatttaaaaaactatttctcaagcttcccctccttttggggggaggagctgatagtaggaggccattccttccacctccaacttataccctctaagtctaaggtgaaggaaagattcagaataaatccaacttgtttatagaaaagttcttgttagtccttagacctcatctcaactgctctgttgaaggtaatgatttattggggggaaaaaacaacgccaatttatcctctctgtattaaagtgataattctgggcccacagaaatcagtcagtacctgcggtgtgccttaaggggactctcatgatcatcattcccttctagagaacattctagatgaagaaatgcaactgttgaccttctggttcacccatctccccctcgaggcattcttgataccccttctcacctgcatttctgtcccagggataccagatgcagccactacctaactaggcttgtcctgggggagtgagccgtgaacctggagacatggctttgacccacagctactgttcatttcctcaggctttgcgctgattccctcaataatatgacagtaaggcaagtagtctccttgcctttctcctgaaaggtatgagatgtggacatttcagtgtttgaattattttaagagatgttttatagaaataaaacgttttgtagctaagaattttccctttctcttaatttcttacatctttccacacaaacttatctttccaagaatttgaggtggtgatcatacccatcaagacggccttgtaggctatctgattgctaacagacacgacctagagcttctgcccaaattcccacacaagcattatctcgtttaacatctcagcgacatactggataccagaataatgtttcctcttctctggtgcaccaaaacctgccctt

SEQ ID NO: 111279 - DNA, 4797 bp, Homo sapiens
  Payload ID: 1792
  Gene Symbol: BCL2L13
  Gene Name: BCL2-like 13 (apoptosis facilitator)
  ENST ID: ENST00000538149
  CDS Start-End: 354-632
gcaatcagatttgggcgggctaggagggtttgggtcttcaggtcacatctggacggagagacctccggggcctccgttggtcggtccttccgctccggataccgttccggatgtcaggtagttcaggtcccgccccgacgccggccgtgacgaaggcacgccggggtgacctcaccctccaacatggcggcggcggtagattagggccgcgggtcggagcactcaccgccgctgggggaccctgtcggaagcaactgccgccgccgcctctttcatctcttctggggcaggggccagggccaggttttacacatccataagtagacctttttggagcctcaccagccaattcaatggcgtcctcttctactgtgcctctgggatttcactatgaaacaaagtatgttgttctcagctacttgggactcctctctcaagagaagctgcaagagcaacatctttcctcaccccaagattttggtgcctctggttttgctacgacaaatgcttttggaattgacaagacgtggtcaagaacctttgagcgcactgctgcagtttggcgtgacatacctggaggactattcggcagagtacatcattcagcaaggtggctggggcactgtgtttagtcttgagtcagaggaggaggaataccctggaatcactgcagaagatagcaatgacatttacatcctgcccagcgacaactctggacaagtcagtcccccagagtctccaactgtgaccacttcctggcagtctgagagcttacctgtgtcactgtcagctagccagagttggcacacagaaagcctgccagtgtcactaggccctgagtcctggcagcagattgcaatggatcctgaagaagtgaaaagcttagacagcaacggagctggagagaagagtgagaacaactcctctaattctgacattgtgcacgtggagaaagaagaggtgcccgagggcatggaagaggctgctgtggcttctgtggtcttgccagcgcgggagctgcaagaggcacttcctgaagccccagctcccttgcttccacatatcactgccacctccctgctggggacaagggaacctgacacagaagtgatcacagttgagaaatccagccctgctacatctctgtttgtagaacttgatgaagaagaggtgaaagcagcaacaactgaacctactgaagtggaggaggtggtccccgcactggaacccacagaaacgctgctgagtgagaaggagataaacgcaagggaagagagccttgtggaagagctgtcccctgccagcgagaagaagcccgtgccgccgtctgagggcaagtctagactgtcccccgccggtgagatgaagcccatgccgctgtctgagggcaagtctatactgctgtttggaggggctgctgctgttgccatcctggcagtggccatcggggtagccctggctctgagaaagaaataggaggcttttcagaagagaaagacagaaggatgtaaggttggagttgtattggctggaatttgaacctccagcagctgtctggacatttgtggaacactctgggataattggggacttctgctcaacatggcagtggcatgttaggcatgttagggcttgaggtggggcattcacattcatctgactgtaaatcccaagggcctccgctcatgctaaattgagaatcttaggggtaaagcaccccctccaggaccgggtttctcagccttggcactagtgctgttctgaccattctctgtgttggggctgtcctgtgtgtggtgggctccacccactagatgccagtggcaccccctcccagagatgacaaacgaaaatgtctctagacattgccaaatgtcccgtgtgaacatcccctattgagacccactgctttagcgagagagggtttacttaggaagaattgggatagaaattcccagctgagagaacttagctgtgggctcctcagctactgacttcttagctcttaatccccttagaatttcatctttctcgatgagcaggctctgcacccactctttttttgccccccgccctcatcctggagtgtgagggtgctcgcccgtactctcagctgcctctcagggactgcactgttcctcttcacccccaggttcctgctaagatcccacgggcgagggcttgctctggactcagtctgtcaagtccccgaagcttcctgcagctccaccttgtaaaaatgctgcctttgggaatcttcgaaatatgtacacagagaaaatcacatgaaggagacctggggtccccacttgtgagtgcaactgcaagtaactctggctagagagacacatgtgtcttgtgtcaaggcaggaggataacctggatgaccttctgaggtctcttcagcccttttcgctagtggtcacccaccaccatggttacttgccagcaacatctctattgctggatggtccctgtctataaccttgggctagtatattttttccaatatgggaccttagtcttactactgatgagttctatgggtctcttgctagggggtaaggatttttattcttgggcttatagagccagttagatcataattcttatgaaatagagagtgtcctaaatatcactgaaataaaaagtaggaaaaagaagcttgaattttaagactgaggctgctctgcagattctagtttggctttcagagttcaagagtggtggcatcttcacctgaattcttcaatgccagggtaataaaccaaaatagtcctaatcagtatatgctagttgagcatcggcataattttctttcctctggctgatcccagccctaaaggaagggtagacccgtgtctttccagccctaaaggaagggtagacccgtgtctttccagccctaaaggaagggcagacccgtgtctttccatgcccgagggccacgacgtcactatgcagggcacacgtggcttggtttaaaaaggtcatcttagatttatcttagtaaatgtaataaattattttttagatcttgaaatttataataaaaatactttacctaccctgatcaccaaaacctgatgttttaaatgtgctttctttttgaaatttatgttttcaaataaaatctccctaaagcaatatttaaaaattggtcaaaacaaggtctgggagtatgtttgtgtgtctttccagctttatcctgtagcgtgtctttgttctgtgttttagtgtcccatttagggagtgatgttttaagggtttttgtgtacttggattaagtaattagaggtgagtggggggaatgggattattgaggcaatgatttttttcttcatgggctctgatagttgcattgattgttctgtattctaattgctatatttgtgtttgcataggtgaagagcaaactggtgcgttatcttgatttttaaaaagtaataaatcctatgagttccagtattaacacttgccagttctggatcctcacacccattggctgagcgcattcaagcaccaatcgaagccaggttcatctctgagctgctgaaaggaggtgtgaggcttaggaaattggagcctgtgttgcccacgaaaggaaagaataaggaagaaatgtggtatggaagcggctacttgctgctttattttcccacctgttagacattcctccacagtgatttggccagttgtatttcacggtaatggaactagatagtgttttccattggctttctctggtagctcttggtcagctcctgagttaacaggatgtggcagcatccctgttcttccttcacgtcctcaccctctgcctccagcagtggaagggaacagccctcatgaggactgcttcctactgcagctcctgctttttgctcatacatttaaaaaactatttctcaagcttcccctccttttggggggaggagctgatagtaggaggccattccttccacctccaacttataccctctaagtctaaggtgaaggaaagattcagaataaatccaacttgtttatagaaaagttcttgttagtccttagacctcatctcaactgctctgttgaaggtaatgatttattggggggaaaaaacaacgccaatttatcctctctgtattaaagtgataattctgggcccacagaaatcagtcagtacctgcggtgtgccttaaggggactctcatgatcatcattcccttctagagaacattctagatgaagaaatgcaactgttgaccttctggttcacccatctccccctcgaggcattcttgataccccttctcacctgcatttctgtcccagggataccagatgcagccactacctaactaggcttgtcctgggggagtgagccgtgaacctggagacatggctttgacccacagctactgttcatttcctcaggctttgcgctgattccctcaataatatgacagtaaggcaagtagtctccttgcctttctcctgaaaggtatgagatgtggacatttcagtgtttgaattattttaagagatgttttatagaaataaaacgttttgtagctaagaattttccctttctcttaatttcttacatctttccacacaaacttatctttccaagaatttgaggtggtgatcatacccatcaagacggccttgtaggctatctgattgctaacagacacgacctagagcttctgcccaaattcccacacaagcattatctcgtttaacatctcagcgacatactggataccagaataatgtttcctcttctctggtgcaccaaaacctgccctt

SEQ ID NO: 111280 - DNA, 4817 bp, Homo sapiens
  Payload ID: 1792
  Gene Symbol: BCL2L13
  Gene Name: BCL2-like 13 (apoptosis facilitator)
  ENST ID: ENST00000611738
  CDS Start-End: 111-1496
gcaatcagatttgggcgggctaggagggtttgggtcttcaggtcacatctggacggagagacctccggggcctccgttggtcggtccttccgctccggataccgttccggatgtcaggtagttcaggtcccgccccgacgccggccgtgacgaaggcacgccggggtgacctcaccctccaacatggcggcggcggtagattagggccgcgggtcggagcactcaccgccgctgggggaccctgtcggaagcaactgccgccgccgcctctttcatctcttctggggcaggggccagggccaggggttcaactagatatagcttcacaatctctggatcaagaaattttattaaaagttaaaactgaaattgaagaagagctaaaatctctggacaaagaaatttctgaagccttcaccagcacaggctttgaccgtcacacttctccagtgttcagccctgccaatccagaaagctcaatggaagactgcttggcccatcttggagaaaaagtgtcccaggaactgaaagagcctctccataaagcattgcaaatgctcctgagccagccagtgacatatcaggcatttcgggaatgtacactggagaccacagttcatgccagcggctggaataagggcactgtgtttagtcttgagtcagaggaggaggaataccctggaatcactgcagaagatagcaatgacatttacatcctgcccagcgacaactctggacaagtcagtcccccagagtctccaactgtgaccacttcctggcagtctgagagcttacctgtgtcactgtcagctagccagagttggcacacagaaagcctgccagtgtcactaggccctgagtcctggcagcagattgcaatggatcctgaagaagtgaaaagcttagacagcaacggagctggagagaagagtgagaacaactcctctaattctgacattgtgcacgtggagaaagaagaggtgcccgagggcatggaagaggctgctgtggcttctgtggtcttgccagcgcgggagctgcaagaggcacttcctgaagccccagctcccttgcttccacatatcactgccacctccctgctggggacaagggaacctgacacagaagtgatcacagttgagaaatccagccctgctacatctctgtttgtagaacttgatgaagaagaggtgaaagcagcaacaactgaacctactgaagtggaggaggtggtccccgcactggaacccacagaaacgctgctgagtgagaaggagataaacgcaagggaagagagccttgtggaagagctgtcccctgccagcgagaagaagcccgtgccgccgtctgagggcaagtctagactgtcccccgccggtgagatgaagcccatgccgctgtctgagggcaagtctatactgctgtttggaggggctgctgctgttgccatcctggcagtggccatcggggtagccctggctctgagaaagaaataggaggcttttcagaagagaaagacagaaggatgtaaggttggagttgtattggctggaatttgaacctccagcagctgtctggacatttgtggaacactctgggataattggggacttctgctcaacatggcagtggcatgttaggcatgttagggcttgaggtggggcattcacattcatctgactgtaaatcccaagggcctccgctcatgctaaattgagaatcttaggggtaaagcaccccctccaggaccgggtttctcagccttggcactagtgctgttctgaccattctctgtgttggggctgtcctgtgtgtggtgggctccacccactagatgccagtggcaccccctcccagagatgacaaacgaaaatgtctctagacattgccaaatgtcccgtgtgaacatcccctattgagacccactgctttagcgagagagggtttacttaggaagaattgggatagaaattcccagctgagagaacttagctgtgggctcctcagctactgacttcttagctcttaatccccttagaatttcatctttctcgatgagcaggctctgcacccactctttttttgccccccgccctcatcctggagtgtgagggtgctcgcccgtactctcagctgcctctcagggactgcactgttcctcttcacccccaggttcctgctaagatcccacgggcgagggcttgctctggactcagtctgtcaagtccccgaagcttcctgcagctccaccttgtaaaaatgctgcctttgggaatcttcgaaatatgtacacagagaaaatcacatgaaggagacctggggtccccacttgtgagtgcaactgcaagtaactctggctagagagacacatgtgtcttgtgtcaaggcaggaggataacctggatgaccttctgaggtctcttcagcccttttcgctagtggtcacccaccaccatggttacttgccagcaacatctctattgctggatggtccctgtctataaccttgggctagtatattttttccaatatgggaccttagtcttactactgatgagttctatgggtctcttgctagggggtaaggatttttattcttgggcttatagagccagttagatcataattcttatgaaatagagagtgtcctaaatatcactgaaataaaaagtaggaaaaagaagcttgaattttaagactgaggctgctctgcagattctagtttggctttcagagttcaagagtggtggcatcttcacctgaattcttcaatgccagggtaataaaccaaaatagtcctaatcagtatatgctagttgagcatcggcataattttctttcctctggctgatcccagccctaaaggaagggtagacccgtgtctttccagccctaaaggaagggtagacccgtgtctttccagccctaaaggaagggcagacccgtgtctttccatgcccgagggccacgacgtcactatgcagggcacacgtggcttggtttaaaaaggtcatcttagatttatcttagtaaatgtaataaattattttttagatcttgaaatttataataaaaatactttacctaccctgatcaccaaaacctgatgttttaaatgtgctttctttttgaaatttatgttttcaaataaaatctccctaaagcaatatttaaaaattggtcaaaacaaggtctgggagtatgtttgtgtgtctttccagctttatcctgtagcgtgtctttgttctgtgttttagtgtcccatttagggagtgatgttttaagggtttttgtgtacttggattaagtaattagaggtgagtggggggaatgggattattgaggcaatgatttttttcttcatgggctctgatagttgcattgattgttctgtattctaattgctatatttgtgtttgcataggtgaagagcaaactggtgcgttatcttgatttttaaaaagtaataaatcctatgagttccagtattaacacttgccagttctggatcctcacacccattggctgagcgcattcaagcaccaatcgaagccaggttcatctctgagctgctgaaaggaggtgtgaggcttaggaaattggagcctgtgttgcccacgaaaggaaagaataaggaagaaatgtggtatggaagcggctacttgctgctttattttcccacctgttagacattcctccacagtgatttggccagttgtatttcacggtaatggaactagatagtgttttccattggctttctctggtagctcttggtcagctcctgagttaacaggatgtggcagcatccctgttcttccttcacgtcctcaccctctgcctccagcagtggaagggaacagccctcatgaggactgcttcctactgcagctcctgctttttgctcatacatttaaaaaactatttctcaagcttcccctccttttggggggaggagctgatagtaggaggccattccttccacctccaacttataccctctaagtctaaggtgaaggaaagattcagaataaatccaacttgtttatagaaaagttcttgttagtccttagacctcatctcaactgctctgttgaaggtaatgatttattggggggaaaaaacaacgccaatttatcctctctgtattaaagtgataattctgggcccacagaaatcagtcagtacctgcggtgtgccttaaggggactctcatgatcatcattcccttctagagaacattctagatgaagaaatgcaactgttgaccttctggttcacccatctccccctcgaggcattcttgataccccttctcacctgcatttctgtcccagggataccagatgcagccactacctaactaggcttgtcctgggggagtgagccgtgaacctggagacatggctttgacccacagctactgttcatttcctcaggctttgcgctgattccctcaataatatgacagtaaggcaagtagtctccttgcctttctcctgaaaggtatgagatgtggacatttcagtgtttgaattattttaagagatgttttatagaaataaaacgttttgtagctaagaattttccctttctcttaatttcttacatctttccacacaaacttatctttccaagaatttgaggtggtgatcatacccatcaagacggccttgtaggctatctgattgctaacagacacgacctagagcttctgcccaaattcccacacaagcattatctcgtttaacatctcagcgacatactggataccagaataatgtttcctcttctctggtgcaccaaaacctgccctt

SEQ ID NO: 111281 - DNA, 4761 bp, Homo sapiens
  Payload ID: 1792
  Gene Symbol: BCL2L13
  Gene Name: BCL2-like 13 (apoptosis facilitator)
  ENST ID: ENST00000616863
  CDS Start-End: 354-596
gcaatcagatttgggcgggctaggagggtttgggtcttcaggtcacatctggacggagagacctccggggcctccgttggtcggtccttccgctccggataccgttccggatgtcaggtagttcaggtcccgccccgacgccggccgtgacgaaggcacgccggggtgacctcaccctccaacatggcggcggcggtagattagggccgcgggtcggagcactcaccgccgctgggggaccctgtcggaagcaactgccgccgccgcctctttcatctcttctggggcaggggccagggccaggttttacacatccataagtagacctttttggagcctcaccagccaattcaatggcgtcctcttctactgtgcctctgggatttcactatgaaacaaagtatgttgttctcagctacttgggactcctctctcaagagaagctgcaagagcaacatctttcctcaccccaaggggttcaactagatatagcttcacaatctctggatcaagaaattttattaaaagttaaaactgaaattgaagaagagctaaaatctctggacaaagaaatttctgaagggcactgtgtttagtcttgagtcagaggaggaggaataccctggaatcactgcagaagatagcaatgacatttacatcctgcccagcgacaactctggacaagtcagtcccccagagtctccaactgtgaccacttcctggcagtctgagagcttacctgtgtcactgtcagctagccagagttggcacacagaaagcctgccagtgtcactaggccctgagtcctggcagcagattgcaatggatcctgaagaagtgaaaagcttagacagcaacggagctggagagaagagtgagaacaactcctctaattctgacattgtgcacgtggagaaagaagaggtgcccgagggcatggaagaggctgctgtggcttctgtggtcttgccagcgcgggagctgcaagaggcacttcctgaagccccagctcccttgcttccacatatcactgccacctccctgctggggacaagggaacctgacacagaagtgatcacagttgagaaatccagccctgctacatctctgtttgtagaacttgatgaagaagaggtgaaagcagcaacaactgaacctactgaagtggaggaggtggtccccgcactggaacccacagaaacgctgctgagtgagaaggagataaacgcaagggaagagagccttgtggaagagctgtcccctgccagcgagaagaagcccgtgccgccgtctgagggcaagtctagactgtcccccgccggtgagatgaagcccatgccgctgtctgagggcaagtctatactgctgtttggaggggctgctgctgttgccatcctggcagtggccatcggggtagccctggctctgagaaagaaataggaggcttttcagaagagaaagacagaaggatgtaaggttggagttgtattggctggaatttgaacctccagcagctgtctggacatttgtggaacactctgggataattggggacttctgctcaacatggcagtggcatgttaggcatgttagggcttgaggtggggcattcacattcatctgactgtaaatcccaagggcctccgctcatgctaaattgagaatcttaggggtaaagcaccccctccaggaccgggtttctcagccttggcactagtgctgttctgaccattctctgtgttggggctgtcctgtgtgtggtgggctccacccactagatgccagtggcaccccctcccagagatgacaaacgaaaatgtctctagacattgccaaatgtcccgtgtgaacatcccctattgagacccactgctttagcgagagagggtttacttaggaagaattgggatagaaattcccagctgagagaacttagctgtgggctcctcagctactgacttcttagctcttaatccccttagaatttcatctttctcgatgagcaggctctgcacccactctttttttgccccccgccctcatcctggagtgtgagggtgctcgcccgtactctcagctgcctctcagggactgcactgttcctcttcacccccaggttcctgctaagatcccacgggcgagggcttgctctggactcagtctgtcaagtccccgaagcttcctgcagctccaccttgtaaaaatgctgcctttgggaatcttcgaaatatgtacacagagaaaatcacatgaaggagacctggggtccccacttgtgagtgcaactgcaagtaactctggctagagagacacatgtgtcttgtgtcaaggcaggaggataacctggatgaccttctgaggtctcttcagcccttttcgctagtggtcacccaccaccatggttacttgccagcaacatctctattgctggatggtccctgtctataaccttgggctagtatattttttccaatatgggaccttagtcttactactgatgagttctatgggtctcttgctagggggtaaggatttttattcttgggcttatagagccagttagatcataattcttatgaaatagagagtgtcctaaatatcactgaaataaaaagtaggaaaaagaagcttgaattttaagactgaggctgctctgcagattctagtttggctttcagagttcaagagtggtggcatcttcacctgaattcttcaatgccagggtaataaaccaaaatagtcctaatcagtatatgctagttgagcatcggcataattttctttcctctggctgatcccagccctaaaggaagggtagacccgtgtctttccagccctaaaggaagggtagacccgtgtctttccagccctaaaggaagggcagacccgtgtctttccatgcccgagggccacgacgtcactatgcagggcacacgtggcttggtttaaaaaggtcatcttagatttatcttagtaaatgtaataaattattttttagatcttgaaatttataataaaaatactttacctaccctgatcaccaaaacctgatgttttaaatgtgctttctttttgaaatttatgttttcaaataaaatctccctaaagcaatatttaaaaattggtcaaaacaaggtctgggagtatgtttgtgtgtctttccagctttatcctgtagcgtgtctttgttctgtgttttagtgtcccatttagggagtgatgttttaagggtttttgtgtacttggattaagtaattagaggtgagtggggggaatgggattattgaggcaatgatttttttcttcatgggctctgatagttgcattgattgttctgtattctaattgctatatttgtgtttgcataggtgaagagcaaactggtgcgttatcttgatttttaaaaagtaataaatcctatgagttccagtattaacacttgccagttctggatcctcacacccattggctgagcgcattcaagcaccaatcgaagccaggttcatctctgagctgctgaaaggaggtgtgaggcttaggaaattggagcctgtgttgcccacgaaaggaaagaataaggaagaaatgtggtatggaagcggctacttgctgctttattttcccacctgttagacattcctccacagtgatttggccagttgtatttcacggtaatggaactagatagtgttttccattggctttctctggtagctcttggtcagctcctgagttaacaggatgtggcagcatccctgttcttccttcacgtcctcaccctctgcctccagcagtggaagggaacagccctcatgaggactgcttcctactgcagctcctgctttttgctcatacatttaaaaaactatttctcaagcttcccctccttttggggggaggagctgatagtaggaggccattccttccacctccaacttataccctctaagtctaaggtgaaggaaagattcagaataaatccaacttgtttatagaaaagttcttgttagtccttagacctcatctcaactgctctgttgaaggtaatgatttattggggggaaaaaacaacgccaatttatcctctctgtattaaagtgataattctgggcccacagaaatcagtcagtacctgcggtgtgccttaaggggactctcatgatcatcattcccttctagagaacattctagatgaagaaatgcaactgttgaccttctggttcacccatctccccctcgaggcattcttgataccccttctcacctgcatttctgtcccagggataccagatgcagccactacctaactaggcttgtcctgggggagtgagccgtgaacctggagacatggctttgacccacagctactgttcatttcctcaggctttgcgctgattccctcaataatatgacagtaaggcaagtagtctccttgcctttctcctgaaaggtatgagatgtggacatttcagtgtttgaattattttaagagatgttttatagaaataaaacgttttgtagctaagaattttccctttctcttaatttcttacatctttccacacaaacttatctttccaagaatttgaggtggtgatcatacccatcaagacggccttgtaggctatctgattgctaacagacacgacctagagcttctgcccaaattcccacacaagcattatctcgtttaacatctcagcgacatactggataccagaataatgtttcctcttctctggtgcaccaaaacctgccctt

SEQ ID NO: 111282 - DNA, 4961 bp, Homo sapiens
  Payload ID: 1792
  Gene Symbol: BCL2L13
  Gene Name: BCL2-like 13 (apoptosis facilitator)
  ENST ID: ENST00000618481
  CDS Start-End: 111-1640
gcaatcagatttgggcgggctaggagggtttgggtcttcaggtcacatctggacggagagacctccggggcctccgttggtcggtccttccgctccggataccgttccggatgtcaggtagttcaggtcccgccccgacgccggccgtgacgaaggcacgccggggtgacctcaccctccaacatggcggcggcggtagattagggccgcgggtcggagcactcaccgccgctgggggaccctgtcggaagcaactgccgccgccgcctctttcatctcttctggggcaggggccagggccaggggttcaactagatatagcttcacaatctctggatcaagaaattttattaaaagttaaaactgaaattgaagaagagctaaaatctctggacaaagaaatttctgaagccttcaccagcacaggctttgaccgtcacacttctccagtgttcagccctgccaatccagaaagctcaatggaagactgcttggcccatcttggagaaaaagtgtcccaggaactgaaagagcctctccataaagcattgcaaatgctcctgagccagccagtgacatatcaggcatttcgggaatgtacactggagaccacagttcatgccagcggctggaataagattttggtgcctctggttttgctacgacaaatgcttttggaattgacaagacgtggtcaagaacctttgagcgcactgctgcagtttggcgtgacatacctggaggactattcggcagagtacatcattcagcaaggtggctggggcactgtgtttagtcttgagtcagaggaggaggaataccctggaatcactgcagaagatagcaatgacatttacatcctgcccagcgacaactctggacaagtcagtcccccagagtctccaactgtgaccacttcctggcagtctgagagcttacctgtgtcactgtcagctagccagagttggcacacagaaagcctgccagtgtcactaggccctgagtcctggcagcagattgcaatggatcctgaagaagtgaaaagcttagacagcaacggagctggagagaagagtgagaacaactcctctaattctgacattgtgcacgtggagaaagaagaggtgcccgagggcatggaagaggctgctgtggcttctgtggtcttgccagcgcgggagctgcaagaggcacttcctgaagccccagctcccttgcttccacatatcactgccacctccctgctggggacaagggaacctgacacagaagtgatcacagttgagaaatccagccctgctacatctctgtttgtagaacttgatgaagaagaggtgaaagcagcaacaactgaacctactgaagtggaggaggtggtccccgcactggaacccacagaaacgctgctgagtgagaaggagataaacgcaagggaagagagccttgtggaagagctgtcccctgccagcgagaagaagcccgtgccgccgtctgagggcaagtctagactgtcccccgccggtgagatgaagcccatgccgctgtctgagggcaagtctatactgctgtttggaggggctgctgctgttgccatcctggcagtggccatcggggtagccctggctctgagaaagaaataggaggcttttcagaagagaaagacagaaggatgtaaggttggagttgtattggctggaatttgaacctccagcagctgtctggacatttgtggaacactctgggataattggggacttctgctcaacatggcagtggcatgttaggcatgttagggcttgaggtggggcattcacattcatctgactgtaaatcccaagggcctccgctcatgctaaattgagaatcttaggggtaaagcaccccctccaggaccgggtttctcagccttggcactagtgctgttctgaccattctctgtgttggggctgtcctgtgtgtggtgggctccacccactagatgccagtggcaccccctcccagagatgacaaacgaaaatgtctctagacattgccaaatgtcccgtgtgaacatcccctattgagacccactgctttagcgagagagggtttacttaggaagaattgggatagaaattcccagctgagagaacttagctgtgggctcctcagctactgacttcttagctcttaatccccttagaatttcatctttctcgatgagcaggctctgcacccactctttttttgccccccgccctcatcctggagtgtgagggtgctcgcccgtactctcagctgcctctcagggactgcactgttcctcttcacccccaggttcctgctaagatcccacgggcgagggcttgctctggactcagtctgtcaagtccccgaagcttcctgcagctccaccttgtaaaaatgctgcctttgggaatcttcgaaatatgtacacagagaaaatcacatgaaggagacctggggtccccacttgtgagtgcaactgcaagtaactctggctagagagacacatgtgtcttgtgtcaaggcaggaggataacctggatgaccttctgaggtctcttcagcccttttcgctagtggtcacccaccaccatggttacttgccagcaacatctctattgctggatggtccctgtctataaccttgggctagtatattttttccaatatgggaccttagtcttactactgatgagttctatgggtctcttgctagggggtaaggatttttattcttgggcttatagagccagttagatcataattcttatgaaatagagagtgtcctaaatatcactgaaataaaaagtaggaaaaagaagcttgaattttaagactgaggctgctctgcagattctagtttggctttcagagttcaagagtggtggcatcttcacctgaattcttcaatgccagggtaataaaccaaaatagtcctaatcagtatatgctagttgagcatcggcataattttctttcctctggctgatcccagccctaaaggaagggtagacccgtgtctttccagccctaaaggaagggtagacccgtgtctttccagccctaaaggaagggcagacccgtgtctttccatgcccgagggccacgacgtcactatgcagggcacacgtggcttggtttaaaaaggtcatcttagatttatcttagtaaatgtaataaattattttttagatcttgaaatttataataaaaatactttacctaccctgatcaccaaaacctgatgttttaaatgtgctttctttttgaaatttatgttttcaaataaaatctccctaaagcaatatttaaaaattggtcaaaacaaggtctgggagtatgtttgtgtgtctttccagctttatcctgtagcgtgtctttgttctgtgttttagtgtcccatttagggagtgatgttttaagggtttttgtgtacttggattaagtaattagaggtgagtggggggaatgggattattgaggcaatgatttttttcttcatgggctctgatagttgcattgattgttctgtattctaattgctatatttgtgtttgcataggtgaagagcaaactggtgcgttatcttgatttttaaaaagtaataaatcctatgagttccagtattaacacttgccagttctggatcctcacacccattggctgagcgcattcaagcaccaatcgaagccaggttcatctctgagctgctgaaaggaggtgtgaggcttaggaaattggagcctgtgttgcccacgaaaggaaagaataaggaagaaatgtggtatggaagcggctacttgctgctttattttcccacctgttagacattcctccacagtgatttggccagttgtatttcacggtaatggaactagatagtgttttccattggctttctctggtagctcttggtcagctcctgagttaacaggatgtggcagcatccctgttcttccttcacgtcctcaccctctgcctccagcagtggaagggaacagccctcatgaggactgcttcctactgcagctcctgctttttgctcatacatttaaaaaactatttctcaagcttcccctccttttggggggaggagctgatagtaggaggccattccttccacctccaacttataccctctaagtctaaggtgaaggaaagattcagaataaatccaacttgtttatagaaaagttcttgttagtccttagacctcatctcaactgctctgttgaaggtaatgatttattggggggaaaaaacaacgccaatttatcctctctgtattaaagtgataattctgggcccacagaaatcagtcagtacctgcggtgtgccttaaggggactctcatgatcatcattcccttctagagaacattctagatgaagaaatgcaactgttgaccttctggttcacccatctccccctcgaggcattcttgataccccttctcacctgcatttctgtcccagggataccagatgcagccactacctaactaggcttgtcctgggggagtgagccgtgaacctggagacatggctttgacccacagctactgttcatttcctcaggctttgcgctgattccctcaataatatgacagtaaggcaagtagtctccttgcctttctcctgaaaggtatgagatgtggacatttcagtgtttgaattattttaagagatgttttatagaaataaaacgttttgtagctaagaattttccctttctcttaatttcttacatctttccacacaaacttatctttccaagaatttgaggtggtgatcatacccatcaagacggccttgtaggctatctgattgctaacagacacgacctagagcttctgcccaaattcccacacaagcattatctcgtttaacatctcagcgacatactggataccagaataatgtttcctcttctctggtgcaccaaaacctgccctt

SEQ ID NO: 111283 - DNA, 2039 bp, Homo sapiens
  Payload ID: 1793
  Gene Symbol: BCL2L14
  Gene Name: BCL2-like 14 (apoptosis facilitator)
  Uniprot ID: Q9BZR8
  ENST ID: ENST00000266434
  CDS Start-End: 196-954
aatgacatgacagccattccgtggccagggacaccactgcccaagctggagaccacgaggattcagggactgaagccagcatgggaattcctggtttgagatcagagtcctgagtacctcgtgggaacttgggcactcatccgcaggaggtctagacccccagagaattccttgagtctaaggcacaggcccaacatgtgtagcaccagtgggtgtgacctggaagaaatccccctagatgatgatgacctaaacaccatagaattcaaaatcctcgcctactacaccagacatcatgtcttcaagagcacccctgctctcttctcaccaaagctgctgagaacaagaagtttgtcccagaggggcctggggaattgttcagcaaatgagtcatggacagaggtgtcatggccttgcagaaattcccaatccagtgagaaggccataaaccttggcaagaaaaagtcttcttggaaagcattctttggagtagtggagaaggaagattcgcagagcacgcctgccaaggtctctgctcagggtcaaaggacgttggaataccaagattcgcacagccagcagtggtccaggtgtctttctaacgtggagcagtgcttggagcatgaagctgtggaccccaaagtcatttccattgccaaccgagtagctgaaattgtttactcctggccaccaccacaagcgacccaggcaggaggcttcaagtccaaagagatttttgtaactgagggtctctccttccagctccaaggccacgtgcctgtagcttcaagttctaagaaagatgaagaagaacaaatactagccaaaattgttgagctgctgaaatattcaggagatcagttggaaagaaaggacactgccttcatccccattcccttggttgacaccagcatccagggttttccacaggatggtttgatggcctgcatttgagctaaagaatgaacttctgtctgcctcgtggagccaagctactgtactgagtgcttattcttttgtacacagctgaagaaagataaggctttgatgggccacttccaggatgggctgtcctactctgttttcaagaccatcacagaccaggtcctaatgggtgtggaccccaggggagaatcagaggtcaaagctcagggctttaaggctgcccttgtaatagacgtcacggccaagctcacagctattgacaaccacccgatgaacagggtcctgggctttggcaccaagtacctgaaagagaacttctcgccatggatccagcagcacggtggatgggaaaaaatacttgggatatcacatgaagaagtagactgaaatatcagatttgtcatcaggaatactctttgtctactgtggtcctgtgcacgttggcctcagatggactacaggagattacaacgtacaaggcagatggagcattgacgttttcaaaaccattattcctgtgactggagaggcatcaggagaggtctcgttcgtctccagctcataaaatgtagcagcatcatccttgacagtgatgtttttcaggccctccattgagaacctgaggaaatctgtaaagataagtggtgatgttgtttcaaacgttcagaacagataccatcatcctgcctttgttagctgctgtagggaaagtgcgttacagatgtctgctgacctcacaagagtgaaaagataaactgtgcatgtgtttccacttccgtttctagtactatttatttttaaactacacttggggtggcctaatacctaggaagatgttgctattcacgttagtaaacagcctaaagaaactcttaggtttactgctacatccatttgtttggagaggtaactgttgtctgtgcctttttgaaaaacttccatttggtacaaaatttttactccaacaccccctcaacccttttctcagggaccacacctcttcttcccaaggtccctgggacttcctcattctttgtggtagtacaatgattggtagcaggtaaaataaatacatagaaagactactgtcaaaa

SEQ ID NO: 111284 - DNA, 1247 bp, Homo sapiens
  Payload ID: 1793
  Gene Symbol: BCL2L14
  Gene Name: BCL2-like 14 (apoptosis facilitator)
  Uniprot ID: Q9BZR8
  ENST ID: ENST00000298566
  CDS Start-End: 8-838
gcccaacatgtgtagcaccagtgggtgtgacctggaagaaatccccctagatgatgatgacctaaacaccatagaattcaaaatcctcgcctactacaccagacatcatgtcttcaagagcacccctgctctcttctcaccaaagctgctgagaacaagaagtttgtcccagaggggcctggggaattgttcagcaaatgagtcatggacagaggtgtcatggccttgcagaaattcccaatccagtgagaaggccataaaccttggcaagaaaaagtcttcttggaaagcattctttggagtagtggagaaggaagattcgcagagcacgcctgccaaggtctctgctcagggtcaaaggacgttggaataccaagattcgcacagccagcagtggtccaggtgtctttctaacgtggagcagtgcttggagcatgaagctgtggaccccaaagtcatttccattgccaaccgagtagctgaaattgtttactcctggccaccaccacaagcgacccaggcaggaggcttcaagtccaaagagatttttgtaactgagggtctctccttccagctccaaggccacgtgcctgtagcttcaagttctaagaaagatgaagaagaacaaatactagccaaaattgttgagctgctgaaatattcaggagatcagttggaaagaaaggaaaaagaatgggaggagtcagcaaagaccaagataaaaatggcacttctctggaggagcagtggtggtggacccagagttctgagtatacctgaggcatttatgaagaacagcttcactctcaccccacctggcttctcagaacacaattagaaaaaatgactgactcaccccaaggtgtccaaaagccccaaacaagcatttgggaatagtccctaacttggcagcagcctcaagttcagtacaagatacccggcagagagagagcactgctttttcattgtttgcactgctgtcaaatcctactcttcaactaccatctctggactcacagcttccaccctttcacacaattcatgtcatcagacagagaaagtagattaggctttaagtgaagaggagtttgaagaatttacggatttctgcttcctaatagaagtgaaaagaaaaaaagaattgtgaagaaatcggacctacttctgcacttcccctctacttgatcatgtgttggtatcatattttaaaaacaagtagaaattaataaaagaggatagtgaaagca

SEQ ID NO: 111285 - DNA, 1897 bp, Homo sapiens
  Payload ID: 1793
  Gene Symbol: BCL2L14
  Gene Name: BCL2-like 14 (apoptosis facilitator)
  Uniprot ID: Q9BZR8
  ENST ID: ENST00000308721
  CDS Start-End: 207-1190
ctcttttcaggctgagtcctaaacctgaagaaagtttagagcctggggctctaaactacctgagtctttccaaacgacaagccaagaagacctgttgaaagtttcctcttaagtttcgtggagagagactcaggtatagaaatatccttactgccacctgacctgaagcagaagaaatcacagacagcttccagaccaggcccaacatgtgtagcaccagtgggtgtgacctggaagaaatccccctagatgatgatgacctaaacaccatagaattcaaaatcctcgcctactacaccagacatcatgtcttcaagagcacccctgctctcttctcaccaaagctgctgagaacaagaagtttgtcccagaggggcctggggaattgttcagcaaatgagtcatggacagaggtgtcatggccttgcagaaattcccaatccagtgagaaggccataaaccttggcaagaaaaagtcttcttggaaagcattctttggagtagtggagaaggaagattcgcagagcacgcctgccaaggtctctgctcagggtcaaaggacgttggaataccaagattcgcacagccagcagtggtccaggtgtctttctaacgtggagcagtgcttggagcatgaagctgtggaccccaaagtcatttccattgccaaccgagtagctgaaattgtttactcctggccaccaccacaagcgacccaggcaggaggcttcaagtccaaagagatttttgtaactgagggtctctccttccagctccaaggccacgtgcctgtagcttcaagttctaagaaagatgaagaagaacaaatactagccaaaattgttgagctgctgaaatattcaggagatcagttggaaagaaagctgaagaaagataaggctttgatgggccacttccaggatgggctgtcctactctgttttcaagaccatcacagaccaggtcctaatgggtgtggaccccaggggagaatcagaggtcaaagctcagggctttaaggctgcccttgtaatagacgtcacggccaagctcacagctattgacaaccacccgatgaacagggtcctgggctttggcaccaagtacctgaaagagaacttctcgccatggatccagcagcacggtggatgggaaaaaatacttgggatatcacatgaagaagtagactgaaatatcagatttgtcatcaggaatactctttgtctactgtggtcctgtgcacgttggcctcagatggactacaggagattacaacgtacaaggcagatggagcattgacgttttcaaaaccattattcctgtgactggagaggcatcaggagaggtctcgttcgtctccagctcataaaatgtagcagcatcatccttgacagtgatgtttttcaggccctccattgagaacctgaggaaatctgtaaagataagtggtgatgttgtttcaaacgttcagaacagataccatcatcctgcctttgttagctgctgtagggaaagtgcgttacagatgtctgctgacctcacaagagtgaaaagataaactgtgcatgtgtttccacttccgtttctagtactatttatttttaaactacacttggggtggcctaatacctaggaagatgttgctattcacgttagtaaacagcctaaagaaactcttaggtttactgctacatccatttgtttggagaggtaactgttgtctgtgcctttttgaaaaacttccatttggtacaaaatttttactccaacaccccctcaacccttttctcagggaccacacctcttcttcccaaggtccctgggacttcctcattctttgtggtagtacaatgattggtagcaggtaaaataaatacatagaaagactactgtcaaaa

SEQ ID NO: 111286 - DNA, 1886 bp, Homo sapiens
  Payload ID: 1793
  Gene Symbol: BCL2L14
  Gene Name: BCL2-like 14 (apoptosis facilitator)
  Uniprot ID: Q9BZR8
  ENST ID: ENST00000396367
  CDS Start-End: 196-1179
aatgacatgacagccattccgtggccagggacaccactgcccaagctggagaccacgaggattcagggactgaagccagcatgggaattcctggtttgagatcagagtcctgagtacctcgtgggaacttgggcactcatccgcaggaggtctagacccccagagaattccttgagtctaaggcacaggcccaacatgtgtagcaccagtgggtgtgacctggaagaaatccccctagatgatgatgacctaaacaccatagaattcaaaatcctcgcctactacaccagacatcatgtcttcaagagcacccctgctctcttctcaccaaagctgctgagaacaagaagtttgtcccagaggggcctggggaattgttcagcaaatgagtcatggacagaggtgtcatggccttgcagaaattcccaatccagtgagaaggccataaaccttggcaagaaaaagtcttcttggaaagcattctttggagtagtggagaaggaagattcgcagagcacgcctgccaaggtctctgctcagggtcaaaggacgttggaataccaagattcgcacagccagcagtggtccaggtgtctttctaacgtggagcagtgcttggagcatgaagctgtggaccccaaagtcatttccattgccaaccgagtagctgaaattgtttactcctggccaccaccacaagcgacccaggcaggaggcttcaagtccaaagagatttttgtaactgagggtctctccttccagctccaaggccacgtgcctgtagcttcaagttctaagaaagatgaagaagaacaaatactagccaaaattgttgagctgctgaaatattcaggagatcagttggaaagaaagctgaagaaagataaggctttgatgggccacttccaggatgggctgtcctactctgttttcaagaccatcacagaccaggtcctaatgggtgtggaccccaggggagaatcagaggtcaaagctcagggctttaaggctgcccttgtaatagacgtcacggccaagctcacagctattgacaaccacccgatgaacagggtcctgggctttggcaccaagtacctgaaagagaacttctcgccatggatccagcagcacggtggatgggaaaaaatacttgggatatcacatgaagaagtagactgaaatatcagatttgtcatcaggaatactctttgtctactgtggtcctgtgcacgttggcctcagatggactacaggagattacaacgtacaaggcagatggagcattgacgttttcaaaaccattattcctgtgactggagaggcatcaggagaggtctcgttcgtctccagctcataaaatgtagcagcatcatccttgacagtgatgtttttcaggccctccattgagaacctgaggaaatctgtaaagataagtggtgatgttgtttcaaacgttcagaacagataccatcatcctgcctttgttagctgctgtagggaaagtgcgttacagatgtctgctgacctcacaagagtgaaaagataaactgtgcatgtgtttccacttccgtttctagtactatttatttttaaactacacttggggtggcctaatacctaggaagatgttgctattcacgttagtaaacagcctaaagaaactcttaggtttactgctacatccatttgtttggagaggtaactgttgtctgtgcctttttgaaaaacttccatttggtacaaaatttttactccaacaccccctcaacccttttctcagggaccacacctcttcttcccaaggtccctgggacttcctcattctttgtggtagtacaatgattggtagcaggtaaaataaatacatagaaagactactgtcaaaa

SEQ ID NO: 111287 - DNA, 598 bp, Homo sapiens
  Payload ID: 1793
  Gene Symbol: BCL2L14
  Gene Name: BCL2-like 14 (apoptosis facilitator)
  ENST ID: ENST00000464885
  CDS Start-End: 426-598
gctttcgcttcatcctagaggctaaatgggctcccctggactcgcctggcagaactaaccacctagaagaacgttattgtaagggggaaatgcaaacagggtgaagacaagaggcataggtgatggacactaaaacaaagaccctgccacccaccgggagggaagtgaaatctcacctcaacaagtgagtccgcagagcgagaaccgtgcgacagtgcgtctgccaatacctggaatgtaggtgttcgttgcagtgtggccttcccagccggcctctcagcacacccggccaggcagccagtgttcccagaggacacgctggggccagacgtggaggaccccggccacctcggggagggaaagagaccaagaaaagaacctctgtagccttgcttctgagagtgcaggtttgttacaggcccaacatgtgtagcaccagtgggtgtgacctggaagaaatccccctagatgatgatgacctaaacaccatagaattcaaaatcctcgcctactacaccagacatcatgtcttcaagagcacccctgctctcttctcaccaaagctgctgagaacaagaagtttgtcccagaggggcct

SEQ ID NO: 111288 - DNA, 762 bp, Homo sapiens
  Payload ID: 1793
  Gene Symbol: BCL2L14
  Gene Name: BCL2-like 14 (apoptosis facilitator)
  ENST ID: ENST00000461264
  CDS Start-End: 388-762
gggctcccctggactcgcctggcagaactaaccacctagaagaacgttattgtaagggggaaatgcaaacagggtgaagacaagaggcataggtgatggacactaaaacaaagaccgaagttcatgtttggagagatggagtaacctgccacaggtcacaaaactagtcactggcatggccacaatctgaatttgggactgttagactgagaagcccaagctaattcttgatacgctcactgcctgggacatttcacacggtagatctgagctttctcgcatctgagactaaaaggaaaatgtagtccttaacagacagcagaaggaaacagattattagcaaaaagaactgctttcctagcaggaaaccagagaaggagttatttcatgcccaacatgtgtagcaccagtgggtgtgacctggaagaaatccccctagatgatgatgacctaaacaccatagaattcaaaatcctcgcctactacaccagacatcatgtcttcaagagcacccctgctctcttctcaccaaagctgctgagaacaagaagtttgtcccagaggggcctggggaattgttcagcaaatgagtcatggacagaggtgtcatggccttgcagaaattcccaatccagtgagaaggccataaaccttggcaagaaaaagtcttcttggaaagcattctttggagtagtggagaaggaagattcgcagagcacgcctgccaaggtctctgctcagggtcaaaggacgttggaatac

SEQ ID NO: 111289 - DNA, 583 bp, Homo sapiens
  Payload ID: 1793
  Gene Symbol: BCL2L14
  Gene Name: BCL2-like 14 (apoptosis facilitator)
  ENST ID: ENST00000588270
  CDS Start-End: 54-583
aagtggccctgcatagaagggcacagtgtggactttgttgttacaggcccaacatgtgtagcaccagtgggtgtgacctggaagaaatccccctagatgatgatgacctaaacaccatagaattcaaaatcctcgcctactacaccagacatcatgtcttcaagagcacccctgctctcttctcaccaaagctgctgagaacaagaagtttgtcccagaggggcctggggaattgttcagcaaatgagtcatggacagaggtgtcatggccttgcagaaattcccaatccagtgagaaggccataaaccttggcaagaaaaagtcttcttggaaagcattctttggagtagtggagaaggaagattcgcagagcacgcctgccaaggtctctgctcagggtcaaaggacgttggaataccaagattcgcacagccagcagtggtccaggtgtctttctaacgtggagcagtgcttggagcatgaagctgtggaccccaaagtcatttccattgccaaccgagtagctgaaattgtttactcctggccaccaccacaagcgacccaggcaggaggcttcaagtc

SEQ ID NO: 111290 - DNA, 1927 bp, Homo sapiens
  Payload ID: 1793
  Gene Symbol: BCL2L14
  Gene Name: BCL2-like 14 (apoptosis facilitator)
  ENST ID: ENST00000586576
  CDS Start-End: 149-1231
agtgctttcgcttcatcctagaggctaaatgggctcccctggactcgcctggcagaactaaccacctagaagaacgttattgtaagggggaaatgcaaacagggtgaagacaagaggcataggtgatggacactaaaacaaagacctgatggggttatcaccatgttgcccaggctggtttcaaactccaggacacagtctgtcctcctgcctcagcctcccaaagcgctgggattgcaggcccaacatgtgtagcaccagtgggtgtgacctggaagaaatccccctagatgatgatgacctaaacaccatagaattcaaaatcctcgcctactacaccagacatcatgtcttcaagagcacccctgctctcttctcaccaaagctgctgagaacaagaagtttgtcccagaggggcctggggaattgttcagcaaatgagtcatggacagaggtgtcatggccttgcagaaattcccaatccagtgagaaggccataaaccttggcaagaaaaagtcttcttggaaagcattctttggagtagtggagaaggaagattcgcagagcacgcctgccaaggtctctgctcagggtcaaaggacgttggaataccaagattcgcacagccagcagtggtccaggtgtctttctaacgtggagcagtgcttggagcatgaagctgtggaccccaaagtcatttccattgccaaccgagtagctgaaattgtttactcctggccaccaccacaagcgacccaggcaggaggcttcaagtccaaagagatttttgtaactgagggtctctccttccagctccaaggccacgtgcctgtagcttcaagttctaagaaagatgaagaagaacaaatactagccaaaattgttgagctgctgaaatattcaggagatcagttggaaagaaagctgaagaaagataaggctttgatgggccacttccaggatgggctgtcctactctgttttcaagaccatcacagaccaggtcctaatgggtgtggaccccaggggagaatcagaggtcaaagctcagggctttaaggctgcccttgtaatagacgtcacggccaagctcacagctattgacaaccacccgatgaacagggtcctgggctttggcaccaagtacctgaaagagaacttctcgccatggatccagcagcacggtggatgggaaaaaatacttgggatatcacatgaagaagtagactgaaatatcagatttgtcatcaggaatactctttgtctactgtggtcctgtgcacgttggcctcagatggactacaggagattacaacgtacaaggcagatggagcattgacgttttcaaaaccattattcctgtgactggagaggcatcaggagaggtctcgttcgtctccagctcataaaatgtagcagcatcatccttgacagtgatgtttttcaggccctccattgagaacctgaggaaatctgtaaagataagtggtgatgttgtttcaaacgttcagaacagataccatcatcctgcctttgttagctgctgtagggaaagtgcgttacagatgtctgctgacctcacaagagtgaaaagataaactgtgcatgtgtttccacttccgtttctagtactatttatttttaaactacacttggggtggcctaatacctaggaagatgttgctattcacgttagtaaacagcctaaagaaactcttaggtttactgctacatccatttgtttggagaggtaactgttgtctgtgcctttttgaaaaacttccatttggtacaaaatttttactccaacaccccctcaacccttttctcagggaccacacctcttcttcccaaggtccctgggacttcctcattctttgtggtagtacaatgattggtagcaggtaaaataaatacatagaaagac

SEQ ID NO: 111291 - DNA, 1850 bp, Homo sapiens
  Payload ID: 1793
  Gene Symbol: BCL2L14
  Gene Name: BCL2-like 14 (apoptosis facilitator)
  Uniprot ID: Q9BZR8
  ENST ID: ENST00000589718
  CDS Start-End: 171-1154
aaagattctaaggtcccagtgctttcgcttcatcctagaggctaaatgggctcccctggactcgcctggcagaactaaccacctagaagaacgttattgtaagggggaaatgcaaacagggtgaagacaagaggcataggtgatggacactaaaacaaagaccgcccaacatgtgtagcaccagtgggtgtgacctggaagaaatccccctagatgatgatgacctaaacaccatagaattcaaaatcctcgcctactacaccagacatcatgtcttcaagagcacccctgctctcttctcaccaaagctgctgagaacaagaagtttgtcccagaggggcctggggaattgttcagcaaatgagtcatggacagaggtgtcatggccttgcagaaattcccaatccagtgagaaggccataaaccttggcaagaaaaagtcttcttggaaagcattctttggagtagtggagaaggaagattcgcagagcacgcctgccaaggtctctgctcagggtcaaaggacgttggaataccaagattcgcacagccagcagtggtccaggtgtctttctaacgtggagcagtgcttggagcatgaagctgtggaccccaaagtcatttccattgccaaccgagtagctgaaattgtttactcctggccaccaccacaagcgacccaggcaggaggcttcaagtccaaagagatttttgtaactgagggtctctccttccagctccaaggccacgtgcctgtagcttcaagttctaagaaagatgaagaagaacaaatactagccaaaattgttgagctgctgaaatattcaggagatcagttggaaagaaagctgaagaaagataaggctttgatgggccacttccaggatgggctgtcctactctgttttcaagaccatcacagaccaggtcctaatgggtgtggaccccaggggagaatcagaggtcaaagctcagggctttaaggctgcccttgtaatagacgtcacggccaagctcacagctattgacaaccacccgatgaacagggtcctgggctttggcaccaagtacctgaaagagaacttctcgccatggatccagcagcacggtggatgggaaaaaatacttgggatatcacatgaagaagtagactgaaatatcagatttgtcatcaggaatactctttgtctactgtggtcctgtgcacgttggcctcagatggactacaggagattacaacgtacaaggcagatggagcattgacgttttcaaaaccattattcctgtgactggagaggcatcaggagaggtctcgttcgtctccagctcataaaatgtagcagcatcatccttgacagtgatgtttttcaggccctccattgagaacctgaggaaatctgtaaagataagtggtgatgttgtttcaaacgttcagaacagataccatcatcctgcctttgttagctgctgtagggaaagtgcgttacagatgtctgctgacctcacaagagtgaaaagataaactgtgcatgtgtttccacttccgtttctagtactatttatttttaaactacacttggggtggcctaatacctaggaagatgttgctattcacgttagtaaacagcctaaagaaactcttaggtttactgctacatccatttgtttggagaggtaactgttgtctgtgcctttttgaaaaacttccatttggtacaaaatttttactccaacaccccctcaacccttttctcagggaccacacctcttcttcccaaggtccctgggacttcctcattctttgtggtagtacaatgattggtagcaggtaaaataaatacatagaaagac

SEQ ID NO: 111292 - DNA, 1247 bp, Homo sapiens; identical to SEQ ID NO: 111284
  Payload ID: 1793
  Gene Symbol: BCL2L14
  Gene Name: BCL2-like 14 (apoptosis facilitator)
  Uniprot ID: Q9BZR8
  ENST ID: ENST00000628315
  CDS Start-End: 8-838

SEQ ID NO: 111293 - DNA, 1850 bp, Homo sapiens; identical to SEQ ID NO: 111291
  Payload ID: 1793
  Gene Symbol: BCL2L14
  Gene Name: BCL2-like 14 (apoptosis facilitator)
  Uniprot ID: Q9BZR8
  ENST ID: ENST00000627413
  CDS Start-End: 171-1154

SEQ ID NO: 111294 - DNA, 583 bp, Homo sapiens; identical to SEQ ID NO: 111289
  Payload ID: 1793
  Gene Symbol: BCL2L14
  Gene Name: BCL2-like 14 (apoptosis facilitator)
  ENST ID: ENST00000627464
  CDS Start-End: 54-583

SEQ ID NO: 111295 - DNA, 2039 bp, Homo sapiens; identical to SEQ ID NO: 111283
  Payload ID: 1793
  Gene Symbol: BCL2L14
  Gene Name: BCL2-like 14 (apoptosis facilitator)
  Uniprot ID: Q9BZR8
  ENST ID: ENST00000631251
  CDS Start-End: 196-954

SEQ ID NO: 111296 - DNA, 1927 bp, Homo sapiens; identical to SEQ ID NO: 111290
  Payload ID: 1793
  Gene Symbol: BCL2L14
  Gene Name: BCL2-like 14 (apoptosis facilitator)
  ENST ID: ENST00000628217
  CDS Start-End: 149-1231

SEQ ID NO: 111297 - DNA, 1897 bp, Homo sapiens; identical to SEQ ID NO: 111285
  Payload ID: 1793
  Gene Symbol: BCL2L14
  Gene Name: BCL2-like 14 (apoptosis facilitator)
  Uniprot ID: Q9BZR8
  ENST ID: ENST00000631317
  CDS Start-End: 207-1190

SEQ ID NO: 111298 - DNA, 762 bp, Homo sapiens; identical to SEQ ID NO: 111288
  Payload ID: 1793
  Gene Symbol: BCL2L14
  Gene Name: BCL2-like 14 (apoptosis facilitator)
  ENST ID: ENST00000625808
  CDS Start-End: 388-762

SEQ ID NO: 111299 - DNA, 1886 bp, Homo sapiens; identical to SEQ ID NO: 111286
  Payload ID: 1793
  Gene Symbol: BCL2L14
  Gene Name: BCL2-like 14 (apoptosis facilitator)
  Uniprot ID: Q9BZR8
  ENST ID: ENST00000628783
  CDS Start-End: 196-1179

SEQ ID NO: 111300 - DNA, 598 bp, Homo sapiens; identical to SEQ ID NO: 111287
  Payload ID: 1793
  Gene Symbol: BCL2L14
  Gene Name: BCL2-like 14 (apoptosis facilitator)
  ENST ID: ENST00000629515
  CDS Start-End: 426-598

SEQ ID NO: 111301 - DNA, 1084 bp, Homo sapiens
  Payload ID: 1794
  Gene Symbol: BCL2L15
  Gene Name: BCL2-like 15
  Uniprot ID: Q5TBC7
  ENST ID: ENST00000393316
  CDS Start-End: 173-664
cctttctgagcagctgtgtttgaagaaagctagtgggaaaagttccaggattacatgtcaggaaactacaagaggtagaaacatttgttgatttaccagtgtttttaacttcctgctgggctgaaaactgcttgtttcgtggaaaagcaaaacttgacagcaaacatctaaaatgaagagctcccaaacttttgaggaacaaacggaatgcattgtgaacactctactcatggacttcttgagcccaacattgcaggttgccagccggaacctatgctgtgtagatgaagtagattcaggagagccttgttcttttgatgtggctatcattgctggtcgccttcggatgttgggtgaccagttcaacggagaattggaagcttctgccaaaaacgtcattgcagaaaccattaagggacagacaggagctatactccaggacactgtggaatctctcagcaagacctggtgtgctcaggattccagcttagcttatgagagagcttttctggcagtgtcagtgaaacttcttgagtacatggctcacattgctcctgaagtagtgggacaggtggctatccccatgacgggtatgatcaatgggaaccaagccatccgggagttcatccagggccagggaggttgggaaaatctggagagctgaagagttggagctattcacgagactgaacatcacttccttgttgactgattgggtgattgattcctgggaattcaaacaaacaaataaaaaagcacttttttcattttatcagaactgaacttagctgaataagttattttttactgattgttaaagttgggagcagctgccagaggcctgcagagttggtttttgttttgttttgttttgtcaacttaatgcaaaccacagagattttctactttctgttttcacatgagttttaatgaggttctgttgaagcaaagacccctagacacaaagtaatgacttgttagtagtggaattataagcaacagggcaggcctttgctggaggtattttgagagaaagggagaacaatggaaactatttcttcagatgtagccctgtcttttggta

SEQ ID NO: 111302 - DNA, 276 bp, Homo sapiens
  Payload ID: 1794
  Gene Symbol: BCL2L15
  Gene Name: BCL2-like 15
  Uniprot ID: Q5TBC7
  ENST ID: ENST00000393320
  CDS Start-End: 63-233
tcctgctgggctgaaaactgcttgtttcgtggaaaagcaaaacttgacagcaaacatctaaaatgaagagctcccaaacttttgaggaacaaacggaatgcattgtgaacactctactcatggacttcttgagcccaacattgcaggttgccagccggaacctatgctgtgtagatgaagtagattcaggaaaatctggagagctgaagagttggagctattcacgagactgaacatcacttccttgttgactgattgggtgattgattcctggga

SEQ ID NO: 111303 - DNA, 267 bp, Homo sapiens
  Payload ID: 1794
  Gene Symbol: BCL2L15
  Gene Name: BCL2-like 15
  ENST ID: ENST00000471267
  CDS Start-End: 1-267
atgaagagctcccaaacttttgaggaacaaacggaatgcattgtgaacactctactcatggacttcttgagcccaacattgcaggttgccagccggaacctatgctgtgtagatgaagtagattcaggagagccttgttcttttgatgtggctatcattgctggtcgccttcggatgttgggtgaccagttcaacggagaattggaagcttctgccaaaaacgtcattgcagaaaccattaagggacaggaaaatctggagagctga

SEQ ID NO: 111304 - DNA, 3605 bp, Homo sapiens
  Payload ID: 1795
  Gene Symbol: BCL2L2
  Gene Name: BCL2-like 2
  Uniprot ID: Q92843
  ENST ID: ENST00000250405
  CDS Start-End: 230-811
atcacccggcgccgggccctccctctgcccccccctttctcctccctccttccttccctcccttcctccctctctccctccctcccagctcctgcaccaggaaacggcccggatcccggcagcggcctgacccggctccacgctggccaggaggatgaaaggccccagctgggggctccttgccaccagtgctgtgtcttaagagctgccatcccggctggccgcccggatggcgaccccagcctcggccccagacacacgggctctggtggcagactttgtaggttataagctgaggcagaagggttatgtctgtggagctggccccggggagggcccagcagctgacccgctgcaccaagccatgcgggcagctggagatgagttcgagacccgcttccggcgcaccttctctgatctggcggctcagctgcatgtgaccccaggctcagcccaacaacgcttcacccaggtctccgatgaactttttcaagggggccccaactggggccgccttgtagccttctttgtctttggggctgcactgtgtgctgagagtgtcaacaaggagatggaaccactggtgggacaagtgcaggagtggatggtggcctacctggagacgcagctggctgactggatccacagcagtgggggctgggcggagttcacagctctatacggggacggggccctggaggaggcgcggcgtctgcgggaggggaactgggcatcagtgaggacagtgctgacgggggccgtggcactgggggccctggtaactgtaggggccttttttgctagcaagtgaaagtccagggccaggtggggctaggtgtggctgggggccaggagagcaggaacagaacagagaaatgcccttggaagaagtggagttggtggatgggtgggcatggaacaggatgggcagagaaagggtagtgtgtgagggagctgagtaggccaggtaggcgattggaagagtgagcaggacacagaggggaggggaatgttttggcaagtttaggggcacaggagatgtagtcgttccagggctgggggaggtgggagggatcacgcctataggtgtgggcacatgaaacgacctggaacttgcttcacagccctgaggaaggtggacttacataagcagctgtattccattagatgagtgggatttagggaacgcagaaggcacatccctttggaatggaagcttaggggttctcaggtgatagggagaggtggctgttaacagtgggctgcttggacacgcgtgtgcatgtgcacgcatgctggtgtgcatgctgggctgcctggcaaatctggtggtgatgggattcctcaaggagaaaacattccctcttgcaatggcaagaactaggggcagttctctgtccctcctcccaacccctcctttcccctgcccttgtcctgatgcctcaaggcttagagagaaacattgtatccagaccgagggctctgctgcttctttccagaaagtgattggcaaggctttggagagaagagcagttctgcagctggccttgttccttcatcatcccccttccttgtgcattatgcacttgctgctgcctcctgggctctgatagaagggcagggctgttgagcctggatgggtggaggcttaggtagccggacctgcctgccaccctcctctcccactcaggcacaatggtgcctaaagtgtttccaatctctgggacctctgtacccaaactgaaactctaaattggggccctaactaattttccttttgaggttgtgggcataagtgctgatctagaatacagtctgggtcccacactgtgtctcagtgagactgttgatgccttgagatgaccatttcagatctgaatcccatgggtgtgagggtgatgggtactccaggactggcctatgctgtgttgtgggctttggttcggctttatcaggggccaggcatatgggttctagagtacctaccatgacctagaagcatttatgatttatttgaagccacactgtttgcatgggtgttacttgtctgtacctcagagtctgaggatgttaactttggaactcgcagtcctctagaacagcttcagattatggctttttcttttgaggaagaaattattcactccagatgcatgccctgagccagacctcactgctgcactttccaaggtgctaagattgctgctctccaatgctaactttctgacacagtgctctagaaccctgcctgtggtcctgagcactgatcaccttagctagaccatggttgactcttcttggagattttcacttggtcctagaatgtggcaacgtagttgtgctcgccagaacgtgggaccaaattggcctcaggtgttgagtccagacttctgcttttgagagagggctgcactttttcatggtatttctaggggaggtggtaggctgcatgtgccacttggtcttgttgtgagtatgctgacaccagaaactcagagccagcttgtggcaagcagttggggtggggggtctctgacttgctcaggacaaactaggccagtggttttcaaactgcttggcagagccctgaagtttcctaggggttgcctcaggagtccttggggagatgaagggggtggggagctgagcaggctgggcaatttgccctcaaacagaacagctccccttgtagctgtcttacatattggggttcagggtaagattttatttgcattaaggggtttgctgctgaaaaaaagttggaaaaccactgactagaccatcggctccaaattggagtctgtgcttccttccccaggtatggagcacactcttcaccctaccctctaccacaggacacatatccctgttagcattccccgggacctttagccaagaggagctgcagggaccatggccaggttaccaaaatgccctgctctgaagccttgacacctgggtggaaagagaggctgttttctgaaagggtaaagggcttggtctggattcccagaagcatagcttagatgggaccacagtgggcaattttgacctgtcctgcccttcttagcttgaagggaaaccccagagactcttctgtcagggaaaactagggactctcttctagagccatatagttccttgggattagctcttggccaagaaggctgagtatggttcccaatttttaaatccatttcattttttaaaaaataagggaaataaatgtaattgccatttttcaaagattaagtaggaggagaggggtttcttgctctccagagcccaaagggacaaatagggactttgtttaggccaaggaaggagcggaagtagggcaactcggtcctgcgattattaatcccactccccacttattctagggcacacaaacactattttacttttttaaaatcataaaacggcagaacagatttggttagtttagaagaaaagaaagctctataaatataaatctatattcctgtatttttatttaataatttataaataccaagttcatttgacttttatttttgtgtaatatgtaatgatcgtattaaaaacaataaataaagcccagaagtttaatgagaaggactgaa

SEQ ID NO: 111305 - DNA, 548 bp, Homo sapiens
  Payload ID: 1795
  Gene Symbol: BCL2L2
  Gene Name: BCL2-like 2
  ENST ID: ENST00000553824
  CDS Start-End: 394-548
gatccacatggtacatgacattcttcctgttttcttcacaagacaaggatgatgtttaaatgggcatttgtttgcggaatgacttggagagttcctctctttcagccatcttttctcaaagactaaggctgtggacaggatgggcatgaagactgtcaaggagcccgagtgagggaagcagaccaaccatggtcttggagaaaagaaaatagggtttccatcccttctggagggagaaggaatagcagagatgaacatgaatgaagaaggaaacaaatggaaataaacaaaatgaagggctccacgctggccaggaggatgaaaggccccagctgggggctccttgccaccagtgctgtgtcttaagagctgccatcccggctggccgcccggatggcgaccccagcctcggccccagacacacgggctctggtggcagactttgtaggttataagctgaggcagaagggttatgtctgtggagctggccccggggagggcccagcagctgacccgctgcaccaagccatgcgggcagctggagatga

SEQ ID NO: 111306 - DNA, 548 bp, Homo sapiens
  Payload ID: 1795
  Gene Symbol: BCL2L2
  Gene Name: BCL2-like 2
  ENST ID: ENST00000556599
  CDS Start-End: 1-502
gcgcaccttctctgatctggcggctcagctgcatgtgaccccaggctcagcccaacaacgcttcacccaggtctccgatgaactttttcaagggggccccaactggggccgccttgtagccttctttgtctttggggctgcactgtgtgctgagagtgtcaacaaggagatggaaccactggtgggacaagtgcaggagtggatggtggcctacctggagacgcagctggctgactggatccacagcagtgggggctgggcggagttcacagctctatacggggacggggccctggaggaggcgcggcgtctgcgggaggggaactgggcatcagtgaggacagtgctgacgggggccgtggcactgggggccctggtatggagcacactcttcaccctaccctctaccacaggacacatatccctgttagcattccccgggacctttagccaagaggagctgcagggaccatggccaggttaccaaaatgccctgctctgaagccttgacacctgggtggaaagagaggctgttttctgaaagggta

SEQ ID NO: 111307 - DNA, 545 bp, Homo sapiens
  Payload ID: 1795
  Gene Symbol: BCL2L2
  Gene Name: BCL2-like 2
  ENST ID: ENST00000554635
  CDS Start-End: 331-545
agctgggcctttgggctgcactagggggaaccgggaatagagatggtgtcggcaggaagcccttggccttgggtttcccgggaggacagtcattaaacatggattcggccacacagctggtagagcgttgggggcaggggcctaggcccagagctgcaaccctagcccttcccaggccagaacctgatccctggccttcccctcctggttctgatctccccctcccctttccagggctccacgctggccaggaggatgaaaggccccagctgggggctccttgccaccagtgctgtgtcttaagagctgccatcccggctggccgcccggatggcgaccccagcctcggccccagacacacgggctctggtggcagactttgtaggttataagctgaggcagaagggttatgtctgtggagctggccccggggagggcccagcagctgacccgctgcaccaagccatgcgggcagctggagatgagttcgagacccgcttccggcgcaccttctctgatctggcggctcagctgcatgtgacccc

SEQ ID NO: 111308 - DNA, 631 bp, Homo sapiens
  Payload ID: 1795
  Gene Symbol: BCL2L2
  Gene Name: BCL2-like 2
  ENST ID: ENST00000557236
  CDS Start-End: 185-631
aggaaacggcccggatcccggcagcggcctgacccgtgagatccctaacctggcaggcgggcggggttggagactggctgaggtggggggctccacgctggccaggaggatgaaaggccccagctgggggctccttgccaccagtgctgtgtcttaagagctgccatcccggctggccgcccggatggcgaccccagcctcggccccagacacacgggctctggtggcagactttgtaggttataagctgaggcagaagggttatgtctgtggagctggccccggggagggcccagcagctgacccgctgcaccaagccatgcgggcagctggagatgagttcgagacccgcttccggcgcaccttctctgatctggcggctcagctgcatgtgaccccaggctcagcccaacaacgcttcacccaggtctccgatgaactttttcaagggggccccaactggggccgccttgtagccttctttgtctttggggctgcactgtgtgctgagagtgtcaacaaggagatggaaccactggtgggacaagtgcaggagtggatggtggcctacctggagacgcagctggctgactggatccacagcagtgggggctgggcggagttcacagct

SEQ ID NO: 111309 - DNA, 596 bp, Homo sapiens
  Payload ID: 1795
  Gene Symbol: BCL2L2
  Gene Name: BCL2-like 2
  ENST ID: ENST00000557579
  CDS Start-End: 165-596
atcccggcagcggcctgacccgtgagatccctaacctggcaggcgggcggggttggagactggctgagggctccacgctggccaggaggatgaaaggccccagctgggggctccttgccaccagtgctgtgtcttaagagctgccatcccggctggccgcccggatggcgaccccagcctcggccccagacacacgggctctggtggcagactttgtaggttataagctgaggcagaagggttatgtctgtggagctggccccggggagggcccagcagctgacccgctgcaccaagccatgcgggcagctggagatgagttcgagacccgcttccggcgcaccttctctgatctggcggctcagctgcatgtgaccccaggctcagcccaacaacgcttcacccaggtctccgatgaactttttcaagggggccccaactggggccgccttgtagccttctttgtctttggggctgcactgtgtgctgagagtgtcaacaaggagatggaaccactggtgggacaagtgcaggagtggatggtggcctacctggagacgcagctggctgactggatccacagcagtgggggctgg

SEQ ID NO: 111310 - DNA, 2657 bp, Homo sapiens
  Payload ID: 1796
  Gene Symbol: BOK
  Gene Name: BCL2-related ovarian killer
  Uniprot ID: Q9UMX3
  ENST ID: ENST00000318407
  CDS Start-End: 303-941
agaaggccaagccccaagcccagcctctcgccagctgggagtcgcgcgctgcccacctcgctgcccaggcccccgacgccgcggcaggagccccccaagagcgcgggaagccccgtggacctggcgctcccggctcgggcgtggacggggcgggcgccggggcggggcgcgcgtcctcgcgggtctgaatggaagggtcgaggtcgtcgtcggcggcgagcagatcctgaagccagaactccaccccggcgcccgcgccatgcggcgggagaggtgcggcgccccccacccgcgtcgccgccatggaggtgctgcggcgctcctcggtcttcgccgccgagatcatggacgcctttgaccgctcgcccacagacaaggagctggtggcccaggccaaggcgctgggccgggagtacgtgcacgcgcggctgctgcgcgccggcctctcctggagcgcgcccgagcgtgccgcgccggtcccgggacgcctggctgaggtgtgcgcggtgctgctgcgcctgggcgatgagctggagatgatccggcccagcgtctaccgcaacgtggcgcgtcagctgcacatctccctgcagtctgagcctgtggtgaccgatgcgttcctggccgtggctggccacatcttctctgcaggcatcacgtggggcaaggtggtgtccctgtatgcggtggccgcggggctggccgtggactgtgtgaggcaggcccagcctgccatggtccacgccctcgtggactgcctgggggagttcgtgcgcaagaccctggcaacctggctgcggagacgcggcggatggactgatgtcctcaagtgtgtggtcagcacagaccctggcctccgctcccactggctggtggctgcactctgcagcttcggccgcttcctgaaggctgccttcttcgtgctgctgccagagagatgagctgcccacctggcagtggccgcagcctggccctctgggcccaacgcaggaggccctcagcacccgaacacatcttcctcctccccacccgagcctggagcactctaaccctcggagaccccctaagccccgttcctccgcagacccaggccctccggaaggggtgagtggggaggggctttcctgagcctggagctgggctttggggcagcctgcgaccctccccgcttgtgtcccttctcctgtgatctctgtgttttcccttttctttctggggccaggaagtcagggtcaactcccaggcctcagatgcaggggcccagaacacctgctctcacctgagccccaggtgaaggggcccgggaacacctgctctcacctgagccccaggtgaaggggcccgggaacacctgctctcacctgaaccccaggtgaaggggcccggaacacctgctctcacctgagccccaggtgaaggggcccggaacacctgctctcacctgagccccaggtgaaggggcccgggaacacctgctctcacctgagccccaggtgaaggggcccgggaacacctgctctcacctgaaccccaggtgaaggggcccagaacacctgctctcacctgagccccaggtgaaggggcccggaacacctgctctcacctgagccccaggtgaaggggcccgggaacacctgctctcacctgagcccctggtgaaggggcccggaacacttgctctcacctgagccccaggtgaaggggcccggaacacctgctctcacctgagcccccggtgaaggggcccggaacacttgctctcacctgagccccaggtgaaggggcccggaacacctcctctcacctgagccccaggtgaaggggcccggaacacctcctgtcacctgagccccaggtgaaggggcccgggaacacctctcacctgaacccgggggtcccatcccaggaagaagggccatctcaggacatgagtcctcaggggccctgcacattcaatctgaaggtgaccctggcctggctgaagctggaagagctgtggggactcagcctgtaaacagagcgtaaggttcacatgctggttgcttaatccgtttctggaggaagagtatgacacccacttgtgatggggtccttgtgcggtggggaccggggccggcgggctccaggccagcacacctaacccatggatgtggaacctacggccgagaaggaatgttgcatgagtcggatcccagtccattgtcagtggagggtgagggtgaccccatctgctatttttgtgctcatcctcatacaaccatttggggatgtgcctattagggctccgtaagaactcagatgcctgggaagcccagcccctcaggtgcccccacacacagccttcccttgacgcctacatttctaggcacatgtgaggcatctttcctggagccccgagccagccctgtccctccccagtgcagcatggcactcaggagatacaggctggacatggggcagtcgttctggggaggcctggcctagcagccacccacctgagccctcccggccaggcttcgtgctggggtgggccatgtgccaggacaggagggtcccggcggaaagccagccccggactcatcgtgacattgagatcccactggagggtaggggtggtaataaacttctccaaacgatcgttgtcattttagacagaa

SEQ ID NO: 111311 - DNA, 1033 bp, Homo sapiens
  Payload ID: 1797
  Gene Symbol: BCL2A1
  Gene Name: BCL2-related protein A1
  Uniprot ID: Q16548
  ENST ID: ENST00000267953
  CDS Start-End: 328-855
gcaatctacaaggattctaatttctccacatcctgcatttaagacttgcaaagctgaattaatcacaggatgaggaagtggcttctctgaaacattttcctctttcacattttaaactttctctttcatacatgacatgaaacacagcctacgcacgaaagtgactaggaggaaggatattataaagtgatgcaaacagaaattccaccagcctccatgtatcatcatgtgtcataactcagtcaagctcagtgagcattctcagcacattgcctcaacagcttcaaggtgagccagctcaagactttgctctccaccaggcagaagatgacagactgtgaatttggatatatttacaggctggctcaggactatctgcagtgcgtcctacagataccacaacctggatcaggtccaagcaaaacgtccagagtgctacaaaatgttgcgttctcagtccaaaaagaagtggaaaagaatctgaagtcatgcttggacaatgttaatgttgtgtccgtagacactgccagaacactattcaaccaagtgatggaaaaggagtttgaagacggcatcattaactggggaagaattgtaaccatatttgcatttgaaggtattctcatcaagaaacttctacgacagcaaattgccccggatgtggatacctataaggagatttcatattttgttgcggagttcataatgaataacacaggagaatggataaggcaaaacggaggctgggaaaatggctttgtaaagaagtttgaacctaaatctggctggatgacttttctagaagttacaggaaagatctgtgaaatgctatctctcctgaagcaatactgttgaccagaaaggacactccatattgtgaaaccggcctaatttttctgactgatatggaaacgattgccaacacatacttctacttttaaataaacaactttgatgatgtaacttgaccttccagagttatggaaattttgtccccatgtaatgaataaattgtatgtatttttctctatat

SEQ ID NO: 111312 - DNA, 809 bp, Homo sapiens
  Payload ID: 1797
  Gene Symbol: BCL2A1
  Gene Name: BCL2-related protein A1
  Uniprot ID: Q16548
  ENST ID: ENST00000335661
  CDS Start-End: 51-542
acagcttcaaggtgagccagctcaagactttgctctccaccaggcagaagatgacagactgtgaatttggatatatttacaggctggctcaggactatctgcagtgcgtcctacagataccacaacctggatcaggtccaagcaaaacgtccagagtgctacaaaatgttgcgttctcagtccaaaaagaagtggaaaagaatctgaagtcatgcttggacaatgttaatgttgtgtccgtagacactgccagaacactattcaaccaagtgatggaaaaggagtttgaagacggcatcattaactggggaagaattgtaaccatatttgcatttgaaggtattctcatcaagaaacttctacgacagcaaattgccccggatgtggatacctataaggagatttcatattttgttgcggagttcataatgaataacacaggagaatggataaggcaaaacggaggctgggggaaatggcacaatcacacacctatgctggtagagtcagtggcccacaagaagaggaaaatggctttgtaaagaagtttgaacctaaatctggctggatgacttttctagaagttacaggaaagatctgtgaaatgctatctctcctgaagcaatactgttgaccagaaaggacactccatattgtgaaaccggcctaatttttctgactgatatggaaacgattgccaacacatacttctacttttaaataaacaactttgatgatgtaacttgaccttccagagttatggaaattttgtccccatgtaatgaataaattgtatgtatttttctcta

SEQ ID NO: 111313 - DNA, 6390 bp, Homo sapiens
  Payload ID: 1798
  Gene Symbol: BCOR
  Gene Name: BCL6 corepressor
  Uniprot ID: Q6W2J9
  ENST ID: ENST00000342274
  CDS Start-End: 364-5529
ggtatttccgaagctggccaggccctctgctgctgaccctggaaatcgggtcacactagacaaggctgcatgtgcggggagaaggcgggggggctcctttgcacgcggctgctcgcgtttccccaaggcctccaaatagtctaaaaactcacctcggaggaggagaaagagcgtgaagtggctctttcgatctgagacaccccctcccggagaactcgccccctcccccccagcccagagcggagtgaaatcttagaagccgtggctgctgggtttgaacggaatgctggagtcagtggaagacggagctggtcggcccgaagactagacgcttgaagcaaagctgccatcccagaagacgacatgctctcagcaacccccctgtatgggaacgttcacagctggatgaacagcgagagggtccgcatgtgtggggcgagcgaagacaggaaaatccttgtaaatgatggtgacgcttcaaaagccagactggaactgagggaagagaatcccttgaaccacaacgtggtggatgcgagcacggcccataggatcgatggcctggcagcactgagcatggaccgcactggcctgatccgggaagggctgcgggtcccgggaaacatcgtctattctagcttgtgtggactgggctcagagaaaggtcgggaggctgccacaagcactctaggtggccttgggttttcttcggaaagaaatccagagatgcagttcaaaccgaatacacccgagacagtggaggcttctgccgtctctggaaaacccccaaatggcttcagtgctatatacaaaacaccgcctggaatacaaaaaagtgctgtagccacagcagaagcgctgggcttggacaggcctgccagcgacaaacagagccctctcaacatcaatggtgctagttatctgcggctgccctgggtcaatccttacatggagggtgccacgccagccatctaccctttcctcgactcgccaaataagtattcactgaacatgtacaaggccttgctacctcagcagtcctacagcttggcccagccgctgtattctccagtctgcaccaatggggagcgctttctctacctgccgccacctcactacgtcggtccccacatcccatcgtccttggcatcacccatgaggctctcgacaccttcggcctccccagccatcccgcctctcgtccattgcgcagacaaaagcctcccgtggaagatgggcgtcagccctgggaatcctgttgattcccacgcctatcctcacatccagaacagtaagcagcccagggttccctctgccaaggcggtcaccagtggcctgccgggggacacagctctcctgttgcccccctcgcctcggccgtcaccccgagtccaccttcccacccagcctgctgcagacacctactcggagttccacaagcactatgccaggatctccacctctccttcagttgccctgtcaaagccatacatgacagttagcagcgagttccccgcggccaggctctccaatggcaagtatcccaaggctccggaagggggcgaaggtgcccagccagtgcccgggcatgcccggaagacagcggttcaagacagaaaagatggcagctcacctcctctgttggagaagcagaccgttaccaaagacgtcacagataagccactagacttgtcttctaaagtggtggatgtagatgcttccaaagctgaccacatgaaaaagatggctcccacggtcctggttcacagcagggctggaagtggcttagtgctctccggaagtgagattccgaaagaaacactatctcctccaggaaatggttgtgctatctatagatctgaaatcatcagcactgctccctcatcctgggtggtgcccgggccaagtcctaacgaagagaacaatggcaaaagcatgtcgctgaaaaacaaggcattggactgggcgataccacagcagcggagttcatcatgcccgcgcatgggcggcaccgatgctgtcatcactaacgtttcagggtcagtgtcgagtgcaggccgcccagcctccgcatcacccgcccccaatgccaatgcagatggcaccaaaaccagcaggagctctgtagaaaccacaccatccgttattcagcacgtgggccagcccccggccactcctgccaagcacagtagcagcaccagcagcaagggcgccaaagccagcaacccagaaccgagtttcaaagcaaacgagaacggccttccaccaagctctatatttctgtctccaaatgaggcattcaggtccccaccaattccctaccccaggagttacctcccttacccagcccctgagggcattgctgtaagtcccctctccttacatggcaaaggacctgtctaccctcacccagttttgttacccaatggcagtctgtttcctgggcaccttgccccaaagcctgggctgccctatgggcttcccaccggccgtccagagtttgtgacctaccaagatgccctggggttgggcatggtgcatcccatgttgataccacacacgcccatagagattactaaagaggagaaaccagagaggagatcccggtcccatgagagagcccgttacgaggacccaaccctccggaatcggttttccgagattttggaaactagcagcaccaagttacatccagatgtccccaccgacaagaacctaaagccgaaccccaactggaatcaagggaagactgttgtcaaaagcgacaagcttgtctacgtagaccttctccgagaagaaccagatgctaaaactgacacaaacgtgtccaaacccagctttgcagcagagagtgttggccagagcgctgagccccccaagccctcagttgagccggccctgcagcagcaccgtgatttcatcgccctgagagaggagttggggcgcatcagtgacttccacgaaacttatactttcaaacagccagtcttcaccgtaagcaaggacagtgttctggcaggtaccaacaaagagaacctagggttgccagtctcgactccattcctggagccacctctggggagcgatggccctgctgtaacttttggtaaaacccaagaggatcccaaaccattttgtgtgggcagtgccccaccaagtgtggatgtgacccccacctataccaaagatggagctgatgaggctgaatcaaatgatggcaaagttctgaaaccgaagccatctaagctggcaaagagaatcgccaactcagcgggttacgtgggtgaccgattcaaatgtgtcactaccgaactgtatgcagattccagtcagctcagccgggagcaacgggcattgcagatggaaggattacaagaggacagtattttatgtctacccgctgcttactgtgagcgtgcaatgatgcgcttctcagagttggagatgaaagaaagagaaggtggccacccagcaaccaaagactccgagatgtgcaaattcagcccagccgactgggaaaggttgaaaggaaatcaggacaaaaagccaaagtcggtcaccctggaggaggccattgcagaacagaacgaaagtgagagatgcgagtatagtgttggaaacaagcaccgtgatccctttgaagccccagaggacaaagatcttcctgtggagaagtactttgtggagaggcagcctgtgagcgagcctcccgcagaccaggtggcctcggacatgcctcacagccccaccctccgggtggacaggaaacgcaaagtctcaggtgacagcagccacactgagaccactgcggaggaggtgccagaggaccctctgctgaaagccaaacgccgacgagtctctaaagggctccatcctaaaaaacaacgccacttgctgcaccttagagaacgatgggagcagcaggtgtcggcagcagatggcaaacctggccggcaaagcaggaaggaagtgacccaggccactcagcctgaggccattcctcaggggactaacatcactgaagagaaacctggcaggaaaagggcagaggccaaaggcaacagaagctggtcggaagagtctcttaaacccagtgacaatgaacaaggcttgcctgtgttctccggctctccgcccatgaagagtctttcatccaccagtgcaggcggcaaaaagcaggctcagccaagctgcgcaccagcctccaggccgcctgccaaacagcagaaaattaaagaaaaccagaagacagatgtgctgtgtgcagacgaagaagaggattgccaggctgcctccctgctgcagaaatacaccgacaacagcgagaagccatccgggaagagactgtgcaaaaccaaacacttgatccctcaggagtccaggcggggattgccactgacaggggaatactacgtggagaatgccgatggcaaggtgactgtccggagattcagaaagcggccggagcccagttcggactatgatctgtcaccagccaagcaggagccaaagcccttcgaccgcttgcagcaactgctaccagcctcccagtccacacagctgccatgctcaagttcccctcaggagaccacccagtctcgccctatgccgccggaagcacggagacttattgtcaataagaacgctggcgagacccttctgcagcgggcagccaggcttggctatgaggaagtggtcctgtactgcttagagaacaagatttgtgatgtaaatcatcgggacaacgcaggttactgcgccctgcatgaagcttgtgctaggggctggctcaacattgtgcgacacctccttgaatatggcgctgatgtcaactgtagtgcccaggatggaaccaggcctctgcacgatgctgttgagaacgatcacttggaaattgtccgactacttctctcttatggtgctgaccccaccttggctacgtactcaggtagaaccatcatgaaaatgacccacagtgaacttatggaaaagttcttaacagattatttaaatgacctccagggtcgcaatgatgatgacgccagtggcacttgggacttctatggcagctctgtttgtgaaccagatgatgaaagtggctatgatgttttagccaaccccccaggaccagaagaccaggatgatgatgacgatgcctatagcgatgtgtttgaatttgaattttcagagacccccctcttaccgtgttataacatccaagtatctgtggctcaggggccacgaaactggctactgctttcggatgtccttaagaaattgaaaatgtcctcccgcatatttcgctgcaattttccaaacgtggaaattgtcaccattgcagaggcagaattttatcggcaggtttctgcaagtctcttgttctcttgctccaaagacctggaagccttcaaccctgaaagtaaggagctgttagatctggtggaattcacgaacgaaattcagactctgctgggctcctctgtagagtggctccaccccagtgatctggcctcagacaactactggtgagcaagctggacccaccatgtacagtgtgttatagtgttaatccttgtgcatatgtgtcataatacaactatttctgtaaagaaaggacactattacatatgaaaatatctcttctttatataagagaaattactccagtcagaaggacttagaaacatgtttttttccttttaaacttttaagtcagtttttatgaagttgttataatgtttctttacttttcaatgcacacatgctttgggatacgtttgtttttacttggaacatttgtttcttttcttttttaaggagaaaaaaaaatgagtaaaaggagctccacactttgacttaatttcatacaaagctctgatgacaggccatgactgtagagtggtcagaactgtgtggttggtttgagggagcgaattcggggaaggcacttggtgatataactttgttttgtttacagagtacctgctcgggccaggtaaatgctattggatgtaatccagtagtgtgtaatataaattcaaaccatatccacacacaacaactaattgtatgaaacttttatatcctaatttaaaagctgtgaaattagttttcacgcatcaaaccggattgtttatatgtttaaacattttatgctcttatttaaagaagactttgagctatttttttctgtaccctgtaaaatattgaaaactaacataatatgttgaggttgcttggaaatgtacataaaactaaaattttctgaatcgtgtgtttatgtttgaaatctgtgttttaactttgtaagtaaattctctgcctttgtatttatattttacaaaaattttcttaaaaggcaataaaactgttgaggaaaggagaaaattg

SEQ ID NO: 111314 - DNA, 6358 bp, Homo sapiens
  Payload ID: 1798
  Gene Symbol: BCOR
  Gene Name: BCL6 corepressor
  Uniprot ID: Q6W2J9
  ENST ID: ENST00000378444
  CDS Start-End: 230-5497
gctcgccgcgcttctccggcccggctccttctccgctcgttaacgtcgccaaccccccccacccctcatatctctctccacccacccaaccgccccccgctccttctcgccgcctcgagtccgcttgggggaaaacttcaaagagccggatcgcaggctccctgcctactcccccaccggggatttcagactagacgcttgaagcaaagctgccatcccagaagacgacatgctctcagcaacccccctgtatgggaacgttcacagctggatgaacagcgagagggtccgcatgtgtggggcgagcgaagacaggaaaatccttgtaaatgatggtgacgcttcaaaagccagactggaactgagggaagagaatcccttgaaccacaacgtggtggatgcgagcacggcccataggatcgatggcctggcagcactgagcatggaccgcactggcctgatccgggaagggctgcgggtcccgggaaacatcgtctattctagcttgtgtggactgggctcagagaaaggtcgggaggctgccacaagcactctaggtggccttgggttttcttcggaaagaaatccagagatgcagttcaaaccgaatacacccgagacagtggaggcttctgccgtctctggaaaacccccaaatggcttcagtgctatatacaaaacaccgcctggaatacaaaaaagtgctgtagccacagcagaagcgctgggcttggacaggcctgccagcgacaaacagagccctctcaacatcaatggtgctagttatctgcggctgccctgggtcaatccttacatggagggtgccacgccagccatctaccctttcctcgactcgccaaataagtattcactgaacatgtacaaggccttgctacctcagcagtcctacagcttggcccagccgctgtattctccagtctgcaccaatggggagcgctttctctacctgccgccacctcactacgtcggtccccacatcccatcgtccttggcatcacccatgaggctctcgacaccttcggcctccccagccatcccgcctctcgtccattgcgcagacaaaagcctcccgtggaagatgggcgtcagccctgggaatcctgttgattcccacgcctatcctcacatccagaacagtaagcagcccagggttccctctgccaaggcggtcaccagtggcctgccgggggacacagctctcctgttgcccccctcgcctcggccgtcaccccgagtccaccttcccacccagcctgctgcagacacctactcggagttccacaagcactatgccaggatctccacctctccttcagttgccctgtcaaagccatacatgacagttagcagcgagttccccgcggccaggctctccaatggcaagtatcccaaggctccggaagggggcgaaggtgcccagccagtgcccgggcatgcccggaagacagcggttcaagacagaaaagatggcagctcacctcctctgttggagaagcagaccgttaccaaagacgtcacagataagccactagacttgtcttctaaagtggtggatgtagatgcttccaaagctgaccacatgaaaaagatggctcccacggtcctggttcacagcagggctggaagtggcttagtgctctccggaagtgagattccgaaagaaacactatctcctccaggaaatggttgtgctatctatagatctgaaatcatcagcactgctccctcatcctgggtggtgcccgggccaagtcctaacgaagagaacaatggcaaaagcatgtcgctgaaaaacaaggcattggactgggcgataccacagcagcggagttcatcatgcccgcgcatgggcggcaccgatgctgtcatcactaacgtttcagggtcagtgtcgagtgcaggccgcccagcctccgcatcacccgcccccaatgccaatgcagatggcaccaaaaccagcaggagctctgtagaaaccacaccatccgttattcagcacgtgggccagcccccggccactcctgccaagcacagtagcagcaccagcagcaagggcgccaaagccagcaacccagaaccgagtttcaaagcaaacgagaacggccttccaccaagctctatatttctgtctccaaatgaggcattcaggtccccaccaattccctaccccaggagttacctcccttacccagcccctgagggcattgctgtaagtcccctctccttacatggcaaaggacctgtctaccctcacccagttttgttacccaatggcagtctgtttcctgggcaccttgccccaaagcctgggctgccctatgggcttcccaccggccgtccagagtttgtgacctaccaagatgccctggggttgggcatggtgcatcccatgttgataccacacacgcccatagagattactaaagaggagaaaccagagaggagatcccggtcccatgagagagcccgttacgaggacccaaccctccggaatcggttttccgagattttggaaactagcagcaccaagttacatccagatgtccccaccgacaagaacctaaagccgaaccccaactggaatcaagggaagactgttgtcaaaagcgacaagcttgtctacgtagaccttctccgagaagaaccagatgctaaaactgacacaaacgtgtccaaacccagctttgcagcagagagtgttggccagagcgctgagccccccaagccctcagttgagccggccctgcagcagcaccgtgatttcatcgccctgagagaggagttggggcgcatcagtgacttccacgaaacttatactttcaaacagccagtcttcaccgtaagcaaggacagtgttctggcaggtaccaacaaagagaacctagggttgccagtctcgactccattcctggagccacctctggggagcgatggccctgctgtaacttttggtaaaacccaagaggatcccaaaccattttgtgtgggcagtgccccaccaagtgtggatgtgacccccacctataccaaagatggagctgatgaggctgaatcaaatgatggcaaagttctgaaaccgaagccatctaagctggcaaagagaatcgccaactcagcgggttacgtgggtgaccgattcaaatgtgtcactaccgaactgtatgcagattccagtcagctcagccgggagcaacgggcattgcagatggaaggattacaagaggacagtattttatgtctacccgctgcttactgtgagcgtgcaatgatgcgcttctcagagttggagatgaaagaaagagaaggtggccacccagcaaccaaagactccgagatgtgcaaattcagcccagccgactgggaaaggttgaaaggaaatcaggacaaaaagccaaagtcggtcaccctggaggaggccattgcagaacagaacgaaagtgagagatgcgagtatagtgttggaaacaagcaccgtgatccctttgaagccccagaggacaaagatcttcctgtggagaagtactttgtggagaggcagcctgtgagcgagcctcccgcagaccaggtggcctcggacatgcctcacagccccaccctccgggtggacaggaaacgcaaagtctcaggtgacagcagccacactgagaccactgcggaggaggtgccagaggaccctctgctgaaagccaaacgccgacgagtctctaaagatgactggcctgagagggaaatgacaaacagttcctctaaccacttagaagacccacattatagtgagctgaccaacctgaaggtgtgcattgaattaacagggctccatcctaaaaaacaacgccacttgctgcaccttagagaacgatgggagcagcaggtgtcggcagcagatggcaaacctggccggcaaagcaggaaggaagtgacccaggccactcagcctgaggccattcctcaggggactaacatcactgaagagaaacctggcaggaaaagggcagaggccaaaggcaacagaagctggtcggaagagtctcttaaacccagtgacaatgaacaaggcttgcctgtgttctccggctctccgcccatgaagagtctttcatccaccagtgcaggcggcaaaaagcaggctcagccaagctgcgcaccagcctccaggccgcctgccaaacagcagaaaattaaagaaaaccagaagacagatgtgctgtgtgcagacgaagaagaggattgccaggctgcctccctgctgcagaaatacaccgacaacagcgagaagccatccgggaagagactgtgcaaaaccaaacacttgatccctcaggagtccaggcggggattgccactgacaggggaatactacgtggagaatgccgatggcaaggtgactgtccggagattcagaaagcggccggagcccagttcggactatgatctgtcaccagccaagcaggagccaaagcccttcgaccgcttgcagcaactgctaccagcctcccagtccacacagctgccatgctcaagttcccctcaggagaccacccagtctcgccctatgccgccggaagcacggagacttattgtcaataagaacgctggcgagacccttctgcagcgggcagccaggcttggctatgaggaagtggtcctgtactgcttagagaacaagatttgtgatgtaaatcatcgggacaacgcaggttactgcgccctgcatgaagcttgtgctaggggctggctcaacattgtgcgacacctccttgaatatggcgctgatgtcaactgtagtgcccaggatggaaccaggcctctgcacgatgctgttgagaacgatcacttggaaattgtccgactacttctctcttatggtgctgaccccaccttggctacgtactcaggtagaaccatcatgaaaatgacccacagtgaacttatggaaaagttcttaacagattatttaaatgacctccagggtcgcaatgatgatgacgccagtggcacttgggacttctatggcagctctgtttgtgaaccagatgatgaaagtggctatgatgttttagccaaccccccaggaccagaagaccaggatgatgatgacgatgcctatagcgatgtgtttgaatttgaattttcagagacccccctcttaccgtgttataacatccaagtatctgtggctcaggggccacgaaactggctactgctttcggatgtccttaagaaattgaaaatgtcctcccgcatatttcgctgcaattttccaaacgtggaaattgtcaccattgcagaggcagaattttatcggcaggtttctgcaagtctcttgttctcttgctccaaagacctggaagccttcaaccctgaaagtaaggagctgttagatctggtggaattcacgaacgaaattcagactctgctgggctcctctgtagagtggctccaccccagtgatctggcctcagacaactactggtgagcaagctggacccaccatgtacagtgtgttatagtgttaatccttgtgcatatgtgtcataatacaactatttctgtaaagaaaggacactattacatatgaaaatatctcttctttatataagagaaattactccagtcagaaggacttagaaacatgtttttttccttttaaacttttaagtcagtttttatgaagttgttataatgtttctttacttttcaatgcacacatgctttgggatacgtttgtttttacttggaacatttgtttcttttcttttttaaggagaaaaaaaaatgagtaaaaggagctccacactttgacttaatttcatacaaagctctgatgacaggccatgactgtagagtggtcagaactgtgtggttggtttgagggagcgaattcggggaaggcacttggtgatataactttgttttgtttacagagtacctgctcgggccaggtaaatgctattggatgtaatccagtagtgtgtaatataaattcaaaccatatccacacacaacaactaattgtatgaaacttttatatcctaatttaaaagctgtgaaattagttttcacgcatcaaaccggattgtttatatgtttaaacattttatgctcttatttaaagaagactttgagctatttttttctgtaccctgtaaaatattgaaaactaacataatatgttgaggttgcttggaaatgtacataaaactaaaattttctgaatcgtgtgtttatgtttgaaatctgtgttttaactttgtaagtaaattctctgcctttgtatttatattttacaaaaattttcttaaaaggcaataaaactgttgaggaaaggagaaaattg

SEQ ID NO: 111315 - DNA, 6338 bp, Homo sapiens
  Payload ID: 1798
  Gene Symbol: BCOR
  Gene Name: BCL6 corepressor
  Uniprot ID: Q6W2J9
  ENST ID: ENST00000378455
  CDS Start-End: 364-5475
ggtatttccgaagctggccaggccctctgctgctgaccctggaaatcgggtcacactagacaaggctgcatgtgcggggagaaggcgggggggctcctttgcacgcggctgctcgcgtttccccaaggcctccaaatagtctaaaaactcacctcggaggaggagaaagagcgtgaagtggctctttcgatctgagacaccccctcccggagaactcgccccctcccccccagcccagagcggagtgaaatcttagaagccgtggctgctgggtttgaacggaatgctggagtcagtggaagacggagctggtcggcccgaagactagacgcttgaagcaaagctgccatcccagaagacgacatgctctcagcaacccccctgtatgggaacgttcacagctggatgaacagcgagagggtccgcatgtgtggggcgagcgaagacaggaaaatccttgtaaatgatggtgacgcttcaaaagccagactggaactgagggaagagaatcccttgaaccacaacgtggtggatgcgagcacggcccataggatcgatggcctggcagcactgagcatggaccgcactggcctgatccgggaagggctgcgggtcccgggaaacatcgtctattctagcttgtgtggactgggctcagagaaaggtcgggaggctgccacaagcactctaggtggccttgggttttcttcggaaagaaatccagagatgcagttcaaaccgaatacacccgagacagtggaggcttctgccgtctctggaaaacccccaaatggcttcagtgctatatacaaaacaccgcctggaatacaaaaaagtgctgtagccacagcagaagcgctgggcttggacaggcctgccagcgacaaacagagccctctcaacatcaatggtgctagttatctgcggctgccctgggtcaatccttacatggagggtgccacgccagccatctaccctttcctcgactcgccaaataagtattcactgaacatgtacaaggccttgctacctcagcagtcctacagcttggcccagccgctgtattctccagtctgcaccaatggggagcgctttctctacctgccgccacctcactacgtcggtccccacatcccatcgtccttggcatcacccatgaggctctcgacaccttcggcctccccagccatcccgcctctcgtccattgcgcagacaaaagcctcccgtggaagatgggcgtcagccctgggaatcctgttgattcccacgcctatcctcacatccagaacagtaagcagcccagggttccctctgccaaggcggtcaccagtggcctgccgggggacacagctctcctgttgcccccctcgcctcggccgtcaccccgagtccaccttcccacccagcctgctgcagacacctactcggagttccacaagcactatgccaggatctccacctctccttcagttgccctgtcaaagccatacatgacagttagcagcgagttccccgcggccaggctctccaatggcaagtatcccaaggctccggaagggggcgaaggtgcccagccagtgcccgggcatgcccggaagacagcggttcaagacagaaaagatggcagctcacctcctctgttggagaagcagaccgttaccaaagacgtcacagataagccactagacttgtcttctaaagtggtggatgtagatgcttccaaagctgaccacatgaaaaagatggctcccacggtcctggttcacagcagggctggaagtggcttagtgctctccggaagtgagattccgaaagaaacactatctcctccaggaaatggttgtgctatctatagatctgaaatcatcagcactgctccctcatcctgggtggtgcccgggccaagtcctaacgaagagaacaatggcaaaagcatgtcgctgaaaaacaaggcattggactgggcgataccacagcagcggagttcatcatgcccgcgcatgggcggcaccgatgctgtcatcactaacgtttcagggtcagtgtcgagtgcaggccgcccagcctccgcatcacccgcccccaatgccaatgcagatggcaccaaaaccagcaggagctctgtagaaaccacaccatccgttattcagcacgtgggccagcccccggccactcctgccaagcacagtagcagcaccagcagcaagggcgccaaagccagcaacccagaaccgagtttcaaagcaaacgagaacggccttccaccaagctctatatttctgtctccaaatgaggcattcaggtccccaccaattccctaccccaggagttacctcccttacccagcccctgagggcattgctgtaagtcccctctccttacatggcaaaggacctgtctaccctcacccagttttgttacccaatggcagtctgtttcctgggcaccttgccccaaagcctgggctgccctatgggcttcccaccggccgtccagagtttgtgacctaccaagatgccctggggttgggcatggtgcatcccatgttgataccacacacgcccatagagattactaaagaggagaaaccagagaggagatcccggtcccatgagagagcccgttacgaggacccaaccctccggaatcggttttccgagattttggaaactagcagcaccaagttacatccagatgtccccaccgacaagaacctaaagccgaaccccaactggaatcaagggaagactgttgtcaaaagcgacaagcttgtctacgtagaccttctccgagaagaaccagatgctaaaactgacacaaacgtgtccaaacccagctttgcagcagagagtgttggccagagcgctgagccccccaagccctcagttgagccggccctgcagcagcaccgtgatttcatcgccctgagagaggagttggggcgcatcagtgacttccacgaaacttatactttcaaacagccagtcttcaccgtaagcaaggacagtgttctggcaggtaccaacaaagagaacctagggttgccagtctcgactccattcctggagccacctctggggagcgatggccctgctgtaacttttggtaaaacccaagaggatcccaaaccattttgtgtgggcagtgccccaccaagtgtggatgtgacccccacctataccaaagatggagctgatgaggctgaatcaaatgatggcaaagttctgaaaccgaagccatctaagctggcaaagagaatcgccaactcagcgggttacgtgggtgaccgattcaaatgtgtcactaccgaactgtatgcagattccagtcagctcagccgggagcaacgggcattgcagcgtgcaatgatgcgcttctcagagttggagatgaaagaaagagaaggtggccacccagcaaccaaagactccgagatgtgcaaattcagcccagccgactgggaaaggttgaaaggaaatcaggacaaaaagccaaagtcggtcaccctggaggaggccattgcagaacagaacgaaagtgagagatgcgagtatagtgttggaaacaagcaccgtgatccctttgaagccccagaggacaaagatcttcctgtggagaagtactttgtggagaggcagcctgtgagcgagcctcccgcagaccaggtggcctcggacatgcctcacagccccaccctccgggtggacaggaaacgcaaagtctcaggtgacagcagccacactgagaccactgcggaggaggtgccagaggaccctctgctgaaagccaaacgccgacgagtctctaaagggctccatcctaaaaaacaacgccacttgctgcaccttagagaacgatgggagcagcaggtgtcggcagcagatggcaaacctggccggcaaagcaggaaggaagtgacccaggccactcagcctgaggccattcctcaggggactaacatcactgaagagaaacctggcaggaaaagggcagaggccaaaggcaacagaagctggtcggaagagtctcttaaacccagtgacaatgaacaaggcttgcctgtgttctccggctctccgcccatgaagagtctttcatccaccagtgcaggcggcaaaaagcaggctcagccaagctgcgcaccagcctccaggccgcctgccaaacagcagaaaattaaagaaaaccagaagacagatgtgctgtgtgcagacgaagaagaggattgccaggctgcctccctgctgcagaaatacaccgacaacagcgagaagccatccgggaagagactgtgcaaaaccaaacacttgatccctcaggagtccaggcggggattgccactgacaggggaatactacgtggagaatgccgatggcaaggtgactgtccggagattcagaaagcggccggagcccagttcggactatgatctgtcaccagccaagcaggagccaaagcccttcgaccgcttgcagcaactgctaccagcctcccagtccacacagctgccatgctcaagttcccctcaggagaccacccagtctcgccctatgccgccggaagcacggagacttattgtcaataagaacgctggcgagacccttctgcagcgggcagccaggcttggctatgaggaagtggtcctgtactgcttagagaacaagatttgtgatgtaaatcatcgggacaacgcaggttactgcgccctgcatgaagcttgtgctaggggctggctcaacattgtgcgacacctccttgaatatggcgctgatgtcaactgtagtgcccaggatggaaccaggcctctgcacgatgctgttgagaacgatcacttggaaattgtccgactacttctctcttatggtgctgaccccaccttggctacgtactcaggtagaaccatcatgaaaatgacccacagtgaacttatggaaaagttcttaacagattatttaaatgacctccagggtcgcaatgatgatgacgccagtggcacttgggacttctatggcagctctgtttgtgaaccagatgatgaaagtggctatgatgttttagccaaccccccaggaccagaagaccaggatgatgatgacgatgcctatagcgatgtgtttgaatttgaattttcagagacccccctcttaccgtgttataacatccaagtatctgtggctcaggggccacgaaactggctactgctttcggatgtccttaagaaattgaaaatgtcctcccgcatatttcgctgcaattttccaaacgtggaaattgtcaccattgcagaggcagaattttatcggcaggtttctgcaagtctcttgttctcttgctccaaagacctggaagccttcaaccctgaaagtaaggagctgttagatctggtggaattcacgaacgaaattcagactctgctgggctcctctgtagagtggctccaccccagtgatctggcctcagacaactactggtgagcaagctggacccaccatgtacagtgtgttatagtgttaatccttgtgcatatgtgtcataatacaactatttctgtaaagaaaggacactattacatatgaaaatatctcttctttatataagagaaattactccagtcagaaggacttagaaacatgtttttttccttttaaacttttaagtcagtttttatgaagttgttataatgtttctttacttttcaatgcacacatgctttgggatacgtttgtttttacttggaacatttgtttcttttcttttttaaggagaaaaaaaaatgagtaaaaggagctccacactttgacttaatttcatacaaagctctgatgacaggccatgactgtagagtggtcagaactgtgtggttggtttgagggagcgaattcggggaaggcacttggtgatataactttgttttgtttacagagtacctgctcgggccaggtaaatgctattggatgtaatccagtagtgtgtaatataaattcaaaccatatccacacacaacaactaattgtatgaaacttttatatcctaatttaaaagctgtgaaattagttttcacgcatcaaaccggattgtttatatgtttaaacattttatgctcttatttaaagaagactttgagctatttttttctgtaccctgtaaaatattgaaaactaacataatatgttgaggttgcttggaaatgtacataaaactaaaattttctgaatcgtgtgtttatgtttgaaatctgtgttttaactttgtaagtaaattctctgcctttgtatttatattttacaaaaattttcttaaaaggcaataaaactgttgaggaaaggagaaaattgaa

SEQ ID NO: 111316 - DNA, 2230 bp, Homo sapiens
  Payload ID: 1798
  Gene Symbol: BCOR
  Gene Name: BCL6 corepressor
  ENST ID: ENST00000378463
  CDS Start-End: 261-2129
atgtatgtgctgtgccttataggaccatgatgcaaggagaaagtggtagacggtgtaggactcagccatgttcacatctgcctagatctcatgaccaaaggcacatggcattccactcacagaagggctgcgagtatagtgttggaaacaagcaccgtgatccctttgaagccccagaggacaaagatcttcctgtggagaagtactttgtggagaggcagcctgtgagcgagcctcccgcagaccaggtggcctcggacatgcctcacagccccaccctccgggtggacaggaaacgcaaagtctcaggtgacagcagccacactgagaccactgcggaggaggtgccagaggaccctctgctgaaagccaaacgccgacgagtctctaaagggctccatcctaaaaaacaacgccacttgctgcaccttagagaacgatgggagcagcaggtgtcggcagcagatggcaaacctggccggcaaagcaggaaggaagtgacccaggccactcagcctgaggccattcctcaggggactaacatcactgaagagaaacctggcaggaaaagggcagaggccaaaggcaacagaagctggtcggaagagtctcttaaacccagtgacaatgaacaaggcttgcctgtgttctccggctctccgcccatgaagagtctttcatccaccagtgcaggcggcaaaaagcaggctcagccaagctgcgcaccagcctccaggccgcctgccaaacagcagaaaattaaagaaaaccagaagacagatgtgctgtgtgcagacgaagaagaggattgccaggctgcctccctgctgcagaaatacaccgacaacagcgagaagccatccgggaagagactgtgcaaaaccaaacacttgatccctcaggagtccaggcggggattgccactgacaggggaatactacgtggagaatgccgatggcaaggtgactgtccggagattcagaaagcggccggagcccagttcggactatgatctgtcaccagccaagcaggagccaaagcccttcgaccgcttgcagcaactgctaccagcctcccagtccacacagctgccatgctcaagttcccctcaggagaccacccagtctcgccctatgccgccggaagcacggagacttattgtcaataagaacgctggcgagacccttctgcagcgggcagccaggcttggctatgaggaagtggtcctgtactgcttagagaacaagatttgtgatgtaaatcatcgggacaacgcaggttactgcgccctgcatgaagcttgtgctaggggctggctcaacattgtgcgacacctccttgaatatggcgctgatgtcaactgtagtgcccaggatggaaccaggcctctgcacgatgctgttgagaacgatcacttggaaattgtccgactacttctctcttatggtgctgaccccaccttggctacgtactcaggtagaaccatcatgaaaatgacccacagtgaacttatggaaaagttcttaacagattatttaaatgacctccagggtcgcaatgatgatgacgccagtggcacttgggacttctatggcagctctgtttgtgaaccagatgatgaaagtggctatgatgttttagccaaccccccaggaccagaagaccaggatgatgatgacgatgcctatagcgatgtgtttgaatttgaattttcagagacccccctcttaccgtgttataacatccaagtatctgtggctcaggggccacgaaactggctactgctttcggatgtccttaagaaattgaaaatgtcctcccgcatatttcgctgcaattttccaaacgtggaaattgtcaccattgcagaggcagaattttatcggcaggtttctgcaagtctcttgttctcttgctccaaagacctggaagccttcaaccctgaaagtaaggagctgttagatctggtggaattcacgaacgaaattcagactctgctgggctcctctgtagagtggctccaccccagtgatctggcctcagacaactactggaagtcccctcaaatagctagggggagtgttgaagggaaaaaaacagacgacaagaccagtaaaacagacctgtagaaatgatttaagcagaagaggactggtgaagctgaactaccatcaaagctacgagagatcctacacacccagatttaaaaaataataaaaacttaagggca

SEQ ID NO: 111317 - DNA, 6258 bp, Homo sapiens
  Payload ID: 1798
  Gene Symbol: BCOR
  Gene Name: BCL6 corepressor
  Uniprot ID: Q6W2J9
  ENST ID: ENST00000397354
  CDS Start-End: 230-5395
gctcgccgcgcttctccggcccggctccttctccgctcgttaacgtcgccaaccccccccacccctcatatctctctccacccacccaaccgccccccgctccttctcgccgcctcgagtccgcttgggggaaaacttcaaagagccggatcgcaggctccctgcctactcccccaccggggatttcagactagacgcttgaagcaaagctgccatcccagaagacgacatgctctcagcaacccccctgtatgggaacgttcacagctggatgaacagcgagagggtccgcatgtgtggggcgagcgaagacaggaaaatccttgtaaatgatggtgacgcttcaaaagccagactggaactgagggaagagaatcccttgaaccacaacgtggtggatgcgagcacggcccataggatcgatggcctggcagcactgagcatggaccgcactggcctgatccgggaagggctgcgggtcccgggaaacatcgtctattctagcttgtgtggactgggctcagagaaaggtcgggaggctgccacaagcactctaggtggccttgggttttcttcggaaagaaatccagagatgcagttcaaaccgaatacacccgagacagtggaggcttctgccgtctctggaaaacccccaaatggcttcagtgctatatacaaaacaccgcctggaatacaaaaaagtgctgtagccacagcagaagcgctgggcttggacaggcctgccagcgacaaacagagccctctcaacatcaatggtgctagttatctgcggctgccctgggtcaatccttacatggagggtgccacgccagccatctaccctttcctcgactcgccaaataagtattcactgaacatgtacaaggccttgctacctcagcagtcctacagcttggcccagccgctgtattctccagtctgcaccaatggggagcgctttctctacctgccgccacctcactacgtcggtccccacatcccatcgtccttggcatcacccatgaggctctcgacaccttcggcctccccagccatcccgcctctcgtccattgcgcagacaaaagcctcccgtggaagatgggcgtcagccctgggaatcctgttgattcccacgcctatcctcacatccagaacagtaagcagcccagggttccctctgccaaggcggtcaccagtggcctgccgggggacacagctctcctgttgcccccctcgcctcggccgtcaccccgagtccaccttcccacccagcctgctgcagacacctactcggagttccacaagcactatgccaggatctccacctctccttcagttgccctgtcaaagccatacatgacagttagcagcgagttccccgcggccaggctctccaatggcaagtatcccaaggctccggaagggggcgaaggtgcccagccagtgcccgggcatgcccggaagacagcggttcaagacagaaaagatggcagctcacctcctctgttggagaagcagaccgttaccaaagacgtcacagataagccactagacttgtcttctaaagtggtggatgtagatgcttccaaagctgaccacatgaaaaagatggctcccacggtcctggttcacagcagggctggaagtggcttagtgctctccggaagtgagattccgaaagaaacactatctcctccaggaaatggttgtgctatctatagatctgaaatcatcagcactgctccctcatcctgggtggtgcccgggccaagtcctaacgaagagaacaatggcaaaagcatgtcgctgaaaaacaaggcattggactgggcgataccacagcagcggagttcatcatgcccgcgcatgggcggcaccgatgctgtcatcactaacgtttcagggtcagtgtcgagtgcaggccgcccagcctccgcatcacccgcccccaatgccaatgcagatggcaccaaaaccagcaggagctctgtagaaaccacaccatccgttattcagcacgtgggccagcccccggccactcctgccaagcacagtagcagcaccagcagcaagggcgccaaagccagcaacccagaaccgagtttcaaagcaaacgagaacggccttccaccaagctctatatttctgtctccaaatgaggcattcaggtccccaccaattccctaccccaggagttacctcccttacccagcccctgagggcattgctgtaagtcccctctccttacatggcaaaggacctgtctaccctcacccagttttgttacccaatggcagtctgtttcctgggcaccttgccccaaagcctgggctgccctatgggcttcccaccggccgtccagagtttgtgacctaccaagatgccctggggttgggcatggtgcatcccatgttgataccacacacgcccatagagattactaaagaggagaaaccagagaggagatcccggtcccatgagagagcccgttacgaggacccaaccctccggaatcggttttccgagattttggaaactagcagcaccaagttacatccagatgtccccaccgacaagaacctaaagccgaaccccaactggaatcaagggaagactgttgtcaaaagcgacaagcttgtctacgtagaccttctccgagaagaaccagatgctaaaactgacacaaacgtgtccaaacccagctttgcagcagagagtgttggccagagcgctgagccccccaagccctcagttgagccggccctgcagcagcaccgtgatttcatcgccctgagagaggagttggggcgcatcagtgacttccacgaaacttatactttcaaacagccagtcttcaccgtaagcaaggacagtgttctggcaggtaccaacaaagagaacctagggttgccagtctcgactccattcctggagccacctctggggagcgatggccctgctgtaacttttggtaaaacccaagaggatcccaaaccattttgtgtgggcagtgccccaccaagtgtggatgtgacccccacctataccaaagatggagctgatgaggctgaatcaaatgatggcaaagttctgaaaccgaagccatctaagctggcaaagagaatcgccaactcagcgggttacgtgggtgaccgattcaaatgtgtcactaccgaactgtatgcagattccagtcagctcagccgggagcaacgggcattgcagatggaaggattacaagaggacagtattttatgtctacccgctgcttactgtgagcgtgcaatgatgcgcttctcagagttggagatgaaagaaagagaaggtggccacccagcaaccaaagactccgagatgtgcaaattcagcccagccgactgggaaaggttgaaaggaaatcaggacaaaaagccaaagtcggtcaccctggaggaggccattgcagaacagaacgaaagtgagagatgcgagtatagtgttggaaacaagcaccgtgatccctttgaagccccagaggacaaagatcttcctgtggagaagtactttgtggagaggcagcctgtgagcgagcctcccgcagaccaggtggcctcggacatgcctcacagccccaccctccgggtggacaggaaacgcaaagtctcaggtgacagcagccacactgagaccactgcggaggaggtgccagaggaccctctgctgaaagccaaacgccgacgagtctctaaagggctccatcctaaaaaacaacgccacttgctgcaccttagagaacgatgggagcagcaggtgtcggcagcagatggcaaacctggccggcaaagcaggaaggaagtgacccaggccactcagcctgaggccattcctcaggggactaacatcactgaagagaaacctggcaggaaaagggcagaggccaaaggcaacagaagctggtcggaagagtctcttaaacccagtgacaatgaacaaggcttgcctgtgttctccggctctccgcccatgaagagtctttcatccaccagtgcaggcggcaaaaagcaggctcagccaagctgcgcaccagcctccaggccgcctgccaaacagcagaaaattaaagaaaaccagaagacagatgtgctgtgtgcagacgaagaagaggattgccaggctgcctccctgctgcagaaatacaccgacaacagcgagaagccatccgggaagagactgtgcaaaaccaaacacttgatccctcaggagtccaggcggggattgccactgacaggggaatactacgtggagaatgccgatggcaaggtgactgtccggagattcagaaagcggccggagcccagttcggactatgatctgtcaccagccaagcaggagccaaagcccttcgaccgcttgcagcaactgctaccagcctcccagtccacacagctgccatgctcaagttcccctcaggagaccacccagtctcgccctatgccgccggaagcacggagacttattgtcaataagaacgctggcgagacccttctgcagcgggcagccaggcttggctatgaggaagtggtcctgtactgcttagagaacaagatttgtgatgtaaatcatcgggacaacgcaggttactgcgccctgcatgaagcttgtgctaggggctggctcaacattgtgcgacacctccttgaatatggcgctgatgtcaactgtagtgcccaggatggaaccaggcctctgcacgatgctgttgagaacgatcacttggaaattgtccgactacttctctcttatggtgctgaccccaccttggctacgtactcaggtagaaccatcatgaaaatgacccacagtgaacttatggaaaagttcttaacagattatttaaatgacctccagggtcgcaatgatgatgacgccagtggcacttgggacttctatggcagctctgtttgtgaaccagatgatgaaagtggctatgatgttttagccaaccccccaggaccagaagaccaggatgatgatgacgatgcctatagcgatgtgtttgaatttgaattttcagagacccccctcttaccgtgttataacatccaagtatctgtggctcaggggccacgaaactggctactgctttcggatgtccttaagaaattgaaaatgtcctcccgcatatttcgctgcaattttccaaacgtggaaattgtcaccattgcagaggcagaattttatcggcaggtttctgcaagtctcttgttctcttgctccaaagacctggaagccttcaaccctgaaagtaaggagctgttagatctggtggaattcacgaacgaaattcagactctgctgggctcctctgtagagtggctccaccccagtgatctggcctcagacaactactggtgagcaagctggacccaccatgtacagtgtgttatagtgttaatccttgtgcatatgtgtcataatacaactatttctgtaaagaaaggacactattacatatgaaaatatctcttctttatataagagaaattactccagtcagaaggacttagaaacatgtttttttccttttaaacttttaagtcagtttttatgaagttgttataatgtttctttacttttcaatgcacacatgctttgggatacgtttgtttttacttggaacatttgtttcttttcttttttaaggagaaaaaaaaatgagtaaaaggagctccacactttgacttaatttcatacaaagctctgatgacaggccatgactgtagagtggtcagaactgtgtggttggtttgagggagcgaattcggggaaggcacttggtgatataactttgttttgtttacagagtacctgctcgggccaggtaaatgctattggatgtaatccagtagtgtgtaatataaattcaaaccatatccacacacaacaactaattgtatgaaacttttatatcctaatttaaaagctgtgaaattagttttcacgcatcaaaccggattgtttatatgtttaaacattttatgctcttatttaaagaagactttgagctatttttttctgtaccctgtaaaatattgaaaactaacataatatgttgaggttgcttggaaatgtacataaaactaaaattttctgaatcgtgtgtttatgtttgaaatctgtgttttaactttgtaagtaaattctctgcctttgtatttatattttacaaaaattttcttaaaaggcaataaaactgttgaggaaaggagaaaattgaa

SEQ ID NO: 111318 - DNA, 4216 bp, Homo sapiens
  Payload ID: 1798
  Gene Symbol: BCOR
  Gene Name: BCL6 corepressor
  ENST ID: ENST00000406200
  CDS Start-End: 355-4216
gaagctggccaggccctctgctgctgaccctggaaatcgggtcacactagacaaggctgcatgtgcggggagaaggcgggggggctcctttgcacgcggctgctcgcgtttccccaaggcctccaaatagtctaaaaactcacctcggaggaggagaaagagcgtgaagtggctctttcgatctgagacaccccctcccggagaactcgccccctcccccccagcccagagcggagtgaaatcttagaagccgtggctgctgggtttgaacggaatgctggagtcagtggaagacggagctggtcggcccgaagactagacgcttgaagcaaagctgccatcccagaagacgacatgctctcagcaacccccctgtatgggaacgttcacagctggatgaacagcgagagggtccgcatgtgtggggcgagcgaagacaggaaaatccttgtaaatgatggtgacgcttcaaaagccagactggaactgagggaagagaatcccttgaaccacaacgtggtggatgcgagcacggcccataggatcgatggcctggcagcactgagcatggaccgcactggcctgatccgggaagggctgcgggtcccgggaaacatcgtctattctagcttgtgtggactgggctcagagaaaggtcgggaggctgccacaagcactctaggtggccttgggttttcttcggaaagaaatccagagatgcagttcaaaccgaatacacccgagacagtggaggcttctgccgtctctggaaaacccccaaatggcttcagtgctatatacaaaacaccgcctggaatacaaaaaagtgctgtagccacagcagaagcgctgggcttggacaggcctgccagcgacaaacagagccctctcaacatcaatggtgctagttatctgcggctgccctgggtcaatccttacatggagggtgccacgccagccatctaccctttcctcgactcgccaaataagtattcactgaacatgtacaaggccttgctacctcagcagtcctacagcttggcccagccgctgtattctccagtctgcaccaatggggagcgctttctctacctgccgccacctcactacgtcggtccccacatcccatcgtccttggcatcacccatgaggctctcgacaccttcggcctccccagccatcccgcctctcgtccattgcgcagacaaaagcctcccgtggaagatgggcgtcagccctgggaatcctgttgattcccacgcctatcctcacatccagaacagtaagcagcccagggttccctctgccaaggcggtcaccagtggcctgccgggggacacagctctcctgttgcccccctcgcctcggccgtcaccccgagtccaccttcccacccagcctgctgcagacacctactcggagttccacaagcactatgccaggatctccacctctccttcagttgccctgtcaaagccatacatgacagttagcagcgagttccccgcggccaggctctccaatggcaagtatcccaaggctccggaagggggcgaaggtgcccagccagtgcccgggcatgcccggaagacagcggttcaagacagaaaagatggcagctcacctcctctgttggagaagcagaccgttaccaaagacgtcacagataagccactagacttgtcttctaaagtggtggatgtagatgcttccaaagctgaccacatgaaaaagatggctcccacggtcctggttcacagcagggctggaagtggcttagtgctctccggaagtgagattccgaaagaaacactatctcctccaggaaatggttgtgctatctatagatctgaaatcatcagcactgctccctcatcctgggtggtgcccgggccaagtcctaacgaagagaacaatggcaaaagcatgtcgctgaaaaacaaggcattggactgggcgataccacagcagcggagttcatcatgcccgcgcatgggcggcaccgatgctgtcatcactaacgtttcagggtcagtgtcgagtgcaggccgcccagcctccgcatcacccgcccccaatgccaatgcagatggcaccaaaaccagcaggagctctgtagaaaccacaccatccgttattcagcacgtgggccagcccccggccactcctgccaagcacagtagcagcaccagcagcaagggcgccaaagccagcaacccagaaccgagtttcaaagcaaacgagaacggccttccaccaagctctatatttctgtctccaaatgaggcattcaggtccccaccaattccctaccccaggagttacctcccttacccagcccctgagggcattgctgtaagtcccctctccttacatggcaaaggacctgtctaccctcacccagttttgttacccaatggcagtctgtttcctgggcaccttgccccaaagcctgggctgccctatgggcttcccaccggccgtccagagtttgtgacctaccaagatgccctggggttgggcatggtgcatcccatgttgataccacacacgcccatagagattactaaagaggagaaaccagagaggagatcccggtcccatgagagagcccgttacgaggacccaaccctccggaatcggttttccgagattttggaaactagcagcaccaagttacatccagatgtccccaccgacaagaacctaaagccgaaccccaactggaatcaagggaagactgttgtcaaaagcgacaagcttgtctacgtagaccttctccgagaagaaccagatgctaaaactgacacaaacgtgtccaaacccagctttgcagcagagagtgttggccagagcgctgagccccccaagccctcagttgagccggccctgcagcagcaccgtgatttcatcgccctgagagaggagttggggcgcatcagtgacttccacgaaacttatactttcaaacagccagtcttcaccgtaagcaaggacagtgttctggcaggtaccaacaaagagaacctagggttgccagtctcgactccattcctggagccacctctggggagcgatggccctgctgtaacttttggtaaaacccaagaggatcccaaaccattttgtgtgggcagtgccccaccaagtgtggatgtgacccccacctataccaaagatggagctgatgaggctgaatcaaatgatggcaaagttctgaaaccgaagccatctaagctggcaaagagaatcgccaactcagcgggttacgtgggtgaccgattcaaatgtgtcactaccgaactgtatgcagattccagtcagctcagccgggagcaacgggcattgcagatggaaggattacaagaggacagtattttatgtctacccgctgcttactgtgagcgtgcaatgatgcgcttctcagagttggagatgaaagaaagagaaggtggccacccagcaaccaaagactccgagatgtgcaaattcagcccagccgactgggaaaggttgaaaggaaatcaggacaaaaagccaaagtcggtcaccctggaggaggccattgcagaacagaacgaaagtgagagatgcgagtatagtgttggaaacaagcaccgtgatccctttgaagccccagaggacaaagatcttcctgtggagaagtactttgtggagaggcagcctgtgagcgagcctcccgcagaccaggtggcctcggacatgcctcacagccccaccctccgggtggacaggaaacgcaaagtctcaggtgacagcagccacactgagaccactgcggaggaggtgccagaggaccctctgctgaaagccaaacgccgacgagtctctaaagggctccatcctaaaaaacaacgccacttgctgcaccttagagaacgatgggagcagcaggtgtcggcagcagatggcaaacctggccggcaaagcaggaaggaagtgacccaggccactcagcctgaggccattcctcaggggactaacatcactgaagagaaacctggcaggaaaagggcagaggccaaaggcaacagaagctggtcggaagagtctcttaaacccagtgacaatgaacaaggcttgcctgtgttctccggctctccgcccatgaagagtctttcatccaccagtgcaggcggcaaaaagcaggctcagccaagctgcgcaccagcctccaggccgcctgccaaacagc

SEQ ID NO: 111319 - DNA, 2189 bp, Homo sapiens
  Payload ID: 1798
  Gene Symbol: BCOR
  Gene Name: BCL6 corepressor
  ENST ID: ENST00000442018
  CDS Start-End: 1-999
cagaagacagatgtgctgtgtgcagacgaagaagaggattgccaggctgcctccctgctgcagaaatacaccgacaacagcgagaagccatccgggaagagactgtgcaaaaccaaacacttgatccctcaggagtccaggcggggattgccactgacaggggaatactacgtggagaatgccgatggcaaggtgactgtccggagattcagaaagcggccggagcccagttcggactatgatctgtcaccagccaagcaggagccaaagcccttcgaccgcttgcagcaactgctaccagcctcccagtccacacagctgccatgctcaagttcccctcaggagaccacccagtctcgccctatgccgccggaagcacggagacttattgtcaataagaacgctggcgagacccttctgcagcgggcagccaggcttggctatgaggaagtggtcctgtactgcttagagaacaagatttgtgatgtaaatcatcgggacaacgcaggttactgcgccctgcatgaagcttgtgctaggggctggctcaacattgtgcgacacctccttgaatatggcgctgatgtcaactgtagtgcccaggatggaaccaggcctctgcacgatgctgttgagaacgatcacttggaaattgtccgactacttctctcttatggtgctgaccccaccttggctacgtactcaggtagaaccatcatgaaaatgacccacagtgaacttatggaaaagttcttaacagattatttaaatgacctccagggtcgcaatgatgatgacgccagtggcacttgggacttctatggcagctctgtttgtgaaccagatgatgaaagtggctatgatgttttagccaaccccccaggaccagaagaccaggatgatgatgacgatgcctatagcgatgtgtttgaatttgaattttcagagacccccctcttaccgtgttataacatccaagtatctgtggctcaggggtgagcatggctgtcatgtgattgaaaactagctgagctgctcttgaggccacgaaactggctactgctttcggatgtccttaagaaattgaaaatgtcctcccgcatatttcgctgcaattttccaaacgtggaaattgtcaccattgcagaggcagaattttatcggcaggtttctgcaagtctcttgttctcttgctccaaagacctggaagccttcaaccctgaaagtaaggagctgttagatctggtggaattcacgaacgaaattcagactctgctgggctcctctgtagagtggctccaccccagtgatctggcctcagacaactactggtgagcaagctggacccaccatgtacagtgtgttatagtgttaatccttgtgcatatgtgtcataatacaactatttctgtaaagaaaggacactattacatatgaaaatatctcttctttatataagagaaattactccagtcagaaggacttagaaacatgtttttttccttttaaacttttaagtcagtttttatgaagttgttataatgtttctttacttttcaatgcacacatgctttgggatacgtttgtttttacttggaacatttgtttcttttcttttttaaggagaaaaaaaaatgagtaaaaggagctccacactttgacttaatttcatacaaagctctgatgacaggccatgactgtagagtggtcagaactgtgtggttggtttgagggagcgaattcggggaaggcacttggtgatataactttgttttgtttacagagtacctgctcgggccaggtaaatgctattggatgtaatccagtagtgtgtaatataaattcaaaccatatccacacacaacaactaattgtatgaaacttttatatcctaatttaaaagctgtgaaattagttttcacgcatcaaaccggattgtttatatgtttaaacattttatgctcttatttaaagaagactttgagctatttttttctgtaccctgtaaaatattgaaaactaacataatatgttgaggttgcttggaaatgtacataaaactaaaattttctgaatcgtgtgtttatgtttgaaatctgtgttttaactttgtaagtaaattctctgcctttgtatttatattttacaaaaattttcttaaaaggcaataaaactgttgaggaaaggag

SEQ ID NO: 111320 - DNA, 288 bp, Homo sapiens
  Payload ID: 1798
  Gene Symbol: BCOR
  Gene Name: BCL6 corepressor
  ENST ID: ENST00000412952
  CDS Start-End: 203-288
tccattcatgcactgaagcgcgtgcagagctgctgatcgctgccattgttactcgcgggcggtgtgggagctgagcctccactctggcgagagataaatggcctctgacagcccctcctcgccaagagagctcctcggatttcaccgcgcggcggctctcagactagacgcttgaagcaaagctgccatcccagaagacgacatgctctcagcaacccccctgtatgggaacgttcacagctggatgaacagcgagagggtccgcatgtgtggggcgagcgaagacag

SEQ ID NO: 111321 - DNA, 1969 bp, Homo sapiens
  Payload ID: 1798
  Gene Symbol: BCOR
  Gene Name: BCL6 corepressor
  ENST ID: ENST00000427012
  CDS Start-End: 1-869
aggctcagccaagctgcgcaccagcctccaggccgcctgccaaacagcagaaaattaaagaaaaccagaagacagatgtgctgtgtgcagacgaagaagaggattgccaggctgcctccctgctgcagaaatacaccgacaacagcgagaagccatccgggaagagactgtgcaaaaccaaacacttgatccctcaggagtccaggcggggattgccactgacaggggaatactacgtggagaatgccgatggcaaggtgactgtccggagattcagaaagcggccggagcccagttcggactatgatctgtcaccagccaagcaggagccaaagcccttcgaccgcttgcagcaactgctaccagcctcccagtccacacagctgccatgctcaagttcccctcaggagaccacccagtctcgccctatgccgccggaagcacggagacttattgtcaataagaacgctggcgagacccttctgcagcgggcagccaggcttggctatgaggaagtggtcctgtactgcttagagaacaagatttgtgatgtaaatcatcgggacaacgcaggttactgcgccctgcatgaagcttgtgctaggggctggctcaacattgtgcgacacctccttgaatatggcgctgatgtcaactgtagtgcccaggatggaaccaggcctctgcacgatgctgttgagaacgatcacttggaaattgtccgactacttctctcttatggtgctgaccccaccttggctacgtactcaggtagaaccatcatgaaaatgacccacagtgaacttatggaaaagttcttaacaggccacgaaactggctactgctttcggatgtccttaagaaattgaaaatgtcctcccgcatatttcgctgcaattttccaaacgtggaaattgtcaccattgcagaggcagaattttatcggcaggtttctgcaagtctcttgttctcttgctccaaagacctggaagccttcaaccctgaaagtaaggagctgttagatctggtggaattcacgaacgaaattcagactctgctgggctcctctgtagagtggctccaccccagtgatctggcctcagacaactactggtgagcaagctggacccaccatgtacagtgtgttatagtgttaatccttgtgcatatgtgtcataatacaactatttctgtaaagaaaggacactattacatatgaaaatatctcttctttatataagagaaattactccagtcagaaggacttagaaacatgtttttttccttttaaacttttaagtcagtttttatgaagttgttataatgtttctttacttttcaatgcacacatgctttgggatacgtttgtttttacttggaacatttgtttcttttcttttttaaggagaaaaaaaaatgagtaaaaggagctccacactttgacttaatttcatacaaagctctgatgacaggccatgactgtagagtggtcagaactgtgtggttggtttgagggagcgaattcggggaaggcacttggtgatataactttgttttgtttacagagtacctgctcgggccaggtaaatgctattggatgtaatccagtagtgtgtaatataaattcaaaccatatccacacacaacaactaattgtatgaaacttttatatcctaatttaaaagctgtgaaattagttttcacgcatcaaaccggattgtttatatgtttaaacattttatgctcttatttaaagaagactttgagctatttttttctgtaccctgtaaaatattgaaaactaacataatatgttgaggttgcttggaaatgtacataaaactaaaattttctgaatcgtgtgtttatgtttgaaatctgtgttttaactttgtaagtaaattctctgcctttgtatttatattttacaaaaattttcttaaaaggcaataaaactgttgaggaaagg

SEQ ID NO: 111322 - DNA, 1945 bp, Homo sapiens
  Payload ID: 1798
  Gene Symbol: BCOR
  Gene Name: BCL6 corepressor
  ENST ID: ENST00000413905
  CDS Start-End: 1-1785
gacaaagatcttcctgtggagaagtactttgtggagaggcagcctgtgagcgagcctcccgcagaccaggtggcctcggacatgcctcacagccccaccctccgggtggacaggaaacgcaaagtctcaggtgacagcagccacactgagaccactgcggaggaggtgccagaggaccctctgctgaaagccaaacgccgacgagtctctaaagggctccatcctaaaaaacaacgccacttgctgcaccttagagaacgatgggagcagcaggtgtcggcagcagatggcaaacctggccggcaaagcaggaaggaagtgacccaggccactcagcctgaggccattcctcaggggactaacatcactgaagagaaacctggcaggaaaagggcagaggccaaaggcaacagaagctggtcggaagagtctcttaaacccagtgacaatgaacaaggcttgcctgtgttctccggctctccgcccatgaagagtctttcatccaccagtgcaggcggcaaaaagcaggctcagccaagctgcgcaccagcctccaggccgcctgccaaacagcagaaaattaaagaaaaccagaagacagatgtgctgtgtgcagacgaagaagaggattgccaggctgcctccctgctgcagaaatacaccgacaacagcgagaagccatccgggaagagactgtgcaaaaccaaacacttgatccctcaggagtccaggcggggattgccactgacaggggaatactacgtggagaatgccgatggcaaggtgactgtccggagattcagaaagcggccggagcccagttcggactatgatctgtcaccagccaagcaggagccaaagcccttcgaccgcttgcagcaactgctaccagcctcccagtccacacagctgccatgctcaagttcccctcaggagaccacccagtctcgccctatgccgccggaagcacggagacttattgtcaataagaacgctggcgagacccttctgcagcgggcagccaggcttggctatgaggaagtggtcctgtactgcttagagaacaagatttgtgatgtaaatcatcgggacaacgcaggttactgcgccctgcatgaagcttgtgctaggggctggctcaacattgtgcgacacctccttgaatatggcgctgatgtcaactgtagtgcccaggatggaaccaggcctctgcacgatgctgttgagaacgatcacttggaaattgtccgactacttctctcttatggtgctgaccccaccttggctacgtactcaggtagaaccatcatgaaaatgacccacagtgaacttatggaaaagttcttaacagattatttaaatgacctccagggtcgcaatgatgatgacgccagtggcacttgggacttctatggcagctctgtttgtgaaccagatgatgaaagtggctatgatgttttagccaaccccccaggaccagaagaccaggatgatgatgacgatgcctatagcgatgtgtttgaatttgaattttcagagacccccctcttaccgtgttataacatccaagtatctgtggctcaggggccacgaaactggctactgctttcggatgtccttaagaaattgaaaatgtcctcccgcatatttcgctgcaattttccaaacgtggaaattgtcaccattgcagaggcagaattttatcggcaggtttctgcaagtctcttgttctcttgctccaaagacctggaagccttcaaccctgaaagaagtcccctcaaatagctagggggagtgttgaagggaaaaaaacagacgacaagaccagtaaaacagacctgtagaaatgatttaagcagaagaggactggtgaagctgaactaccatcaaagctacgagagatcctacacacccagatttaaaaaataataaaaacttaagggca

SEQ ID NO: 111323 - DNA, 2618 bp, Homo sapiens
  Payload ID: 1798
  Gene Symbol: BCOR
  Gene Name: BCL6 corepressor
  ENST ID: ENST00000615339
  CDS Start-End: 996-2231
aagcaaagctgccatcccagaagacgacatgctctcagcaacccccctgtatgggaacgttcacagctggatgaacagcgagagggtccgcatgtgtggggcgagcgaagacaggtgaatgcgcccatctgggccgggcctgagtggagcccacgcccatgctgaagcccccctcaacttctcacagccaccgtgggcccaaaaggggtgggagagaaagagcttcccgcctagtaggccgctcttgatttacagttttaacaggcaacctggctcagtgaagcattgccgccctttaaaagattagcccctaaagcggcctttcagtgcactttcgtccttaatttattatttcatatttatgaaggagaattaatcccagtctatatactgctttaactctaaatgtcaggagtgtgggcccaggtggagcagcattctatgtgcttttaaaacaaatagtttgctcagtaataaatggggagagagccaccgttttccttcattgaagcccaggatctctcattgtcctctgctgcctgttcccagaggccactggcgcctgcttttggtcgtcagacagctctgttatgcttcctaatcagtaattttggagttgtggggtggaggcagctaagcagtagatgattgaagctgctcttcggggtaatgaggaaacttttcctctgccgcttgtcagcgatttttatcctggggatttggaagttggcaccaagcactttctttatcgatgctctctgataacaagtcccagggcagccgcagcagcctggcacagatgtgcagcttccttttcagcctggaacagctgacatttgtatgatactagtgtgtatccccctgtcattttgacaaaggcagtcaaatatggcttttttatcaccatggaaaccagtttcgtaggacatggtccctaactttgttttggaaaaagttttgaaagcctaccctcctgggtaacacggaagtggttgatgacacgaccagccttccagcccccggccactcctgccaagcacagtagcagcaccagcagcaagggcgccaaagccagcaacccagaaccgagtttcaaagcaaacgagaacggccttccaccaagctctatatttctgtctccaaatgaggcattcaggtccccaccaattccctaccccaggagttacctcccttacccagcccctgagggcattgctgtaagtcccctctccttacatggcaaaggacctgtctaccctcacccagttttgttacccaatggcagtctgtttcctgggcaccttgccccaaagcctgggctgccctatgggcttcccaccggccgtccagagtttgtgacctaccaagatgccctggggttgggcatggtgcatcccatgttgataccacacacgcccatagagattactaaagaggagaaaccagagaggagatcccggtcccatgagagagcccgttacgaggacccaaccctccggaatcggttttccgagattttggaaactagcagcaccaagttacatccagatgtccccaccgacaagaacctaaagccgaaccccaactggaatcaagggaagactgttgtcaaaagcgacaagcttgtctacgtagaccttctccgagaagaaccagatgctaaaactgacacaaacgtgtccaaacccagctttgcagcagagagtgttggccagagcgctgagccccccaagccctcagttgagccggccctgcagcagcaccgtgatttcatcgccctgagagaggagttggggcgcatcagtgacttccacgaaacttatactttcaaacagccagtcttcaccgtaagcaaggacagtgttctggcaggtaccaacaaagagaacctagggttgccagtctcgactccattcctggagccacctctggggagcgatggccctgctgtaacttttggtaaaacccaagaggatcccaaaccattttgtgtgggcagtgccccaccaagtgtggatgtgacccccacctataccaaagatggagctgatgaggctgaatcaaatgatggcaaagttctgaaaccgaagccatctaagctggcaaagagaatcgccaactcagcgggttacgtgggtgaccgattcaaatgtgtcactaccgaactgtatgcagattccagtcagctcagccgggagcaacgggcattgcaggtgagcccccccacctgaatttcagttactttaccagttgtcagttttttaatgtgtaaacaggattgggggagtatggtagggcagggcaccaggcagatttggtgaatgaagcttgtggtaatttgaatatatgcaatgtggccagtaagagaacgtgagtggtagcactgaggcgtgtctggatgctttaagttattctgtagattataagggaactccactcaattgctgataaccgatgttttaattattgtgaagggtatctaaagactgcatgacgtttacctatcaattgctttgatttctctgcctgtaagatagcaaatatacctagaagtgctgcttagaatgccttacttgatacctggtagagatgtgtagcagccgcatgtctgtgggatt

SEQ ID NO: 111324 - DNA, 6860 bp, Homo sapiens
  Payload ID: 1799
  Gene Symbol: BCORL1
  Gene Name: BCL6 corepressor-like 1
  Uniprot ID: Q5H9F3
  ENST ID: ENST00000218147
  CDS Start-End: 198-5333
acacacacacaccgctctccccctcactctttcgctcgccgcggctgctgccagtgtgtggctctgtctctcctccgctttgctgagccctcccttcttcctctcagttcctagagtccgaccgccgccgccgccgagagagaggagaaggagggggagtggccacagcaggtcctatctggtggtgagtggctgtcatgatctctacagcaccgctctacagcggcgtgcacaactggaccagttctgaccggattcgcatgtgtggcatcaacgaggagagaagagcacctctttctgatgaggagtcaacgacaggcgactgccagcactttggatctcaggagttttgtgtcagcagcagtttttccaaggtggagctcacggcagttggaagtggcagcaatgcccggggggcagacccagatggcagtgctacagaaaaacttgggcacaagtcagaagacaagcctgacgatccccagccaaaaatggactacgctgggaacgtggcagaggctgagggcctcttggtgcccctgagcagcccaggagacgggctcaagcttcccgcatctgacagcgccgaggccagcaacagcagggccgactgctcctggactccactcaacacccaaatgagcaaacaggttgactgctcacccgccggagtaaaggctttggactctcggcaaggtgttggagagaagaatactttcattttggcaactctgggaactggagtccctgtggaggggaccctgcccctggttaccactaacttcagtcctctgccagcccctatctgtccccctgctcccggttcggcctctgtgccccactctgttccagatgcattccaggttcccctctccgtccctgccccagtcccccattcagggcttgttccagtccaagttgccacttcggttccagctccttcccctcccttagcacctgtcccggctctggctccagcgccaccgtcagtgcccacgctcatctctgactcgaaccccctttctgtttcggcctcagtcttggtgcctgtgccagcttctgctcccccttcaggcccggttcccttgtcggctccagctcctgccccgctttcagtcccagtttcagctcctcccttggctctcatccaggctcctgtgcccccttcagctccgaccttggttctcgctcccgtccccactccggttctggctcccatgccagcatccacgcctccagcggcccctgcccctccgtctgtgcccatgcccactccaaccccatcttccggcccaccttctacccccaccctcatccccgcctttgctcctacaccggtgcctgcacccaccccagcccccatctttactccagcccctacacccatgcctgctgccacgccagctgccattcccacctctgcacccatcccggcctccttcagtttgagtagagtgtgctttcctgcagctcaggcaccagctatgcaaaaagtccccctgtcctttcagccagggacagtgctgaccccgagccagccgctggtatatatcccgcctccaagctgtgggcagccactcagtgtggccacactgccaaccactctaggggtttcctccactcttacgctccctgtcctgccgtcctacctgcaggacaggtgtctcccaggcgtgctagcctcccccgagctccgttcttacccgtatgcattttctgtggcccggcctctgacttcggattccaagctggtatctctggaggtgaacaggctcccctgcacttccccatccggtagcaccaccacccagcctgcacccgatggggtccctgggcctttggcagatacctcccttgttactgcttctgccaaggtgcttccaactccacagcctctgctgccagcccccagtgggagctcagccccaccgcaccccgccaagatgcccagtggcaccgagcagcaaacagaagggacttccgttaccttctctcctcttaagtcaccgccacagctggaacgagagatggcctctccacctgagtgcagcgagatgccccttgatctgtcctccaagtccaaccgccagaagcttccattgccgaaccagcgcaagacaccccccatgcctgtgttgacccccgtgcacaccagcagcaaggccctcctctccacagtcctgtctaggtctcagcgcacaacccaggctgccggtggcaatgtcacctcctgcctgggctccacttcctcgccctttgtcatctttcccgagatcgtgaggaatggggacccgagcacctgggtgaagaactcaactgcactgatcagcaccattcctggcacctacgtgggagtggccaacccagtgcctgcatccctgctgctgaacaaagaccccaacctgggcctcaaccgtgacccccgccatctccccaagcaggagcccatctccatcattgatcaaggagagcctaagggcactggtgccacgtgtggcaaaaagggcagccaggctggtgctgagggacagccaagcacagtgaaacgatatactccagcccgcattgcccctgggctgccagggtgccaaaccaaggaactctctttgtggaaacccacggggccggcaaatatttatccccggtgttcagtcaatgggaaacctaccagcacccaggtcctgcctgttggctggtccccgtaccaccaggcgtctctgctttccattggcatttccagtgccgggcagctgacccccagtcagggggcgcccatcaggcccaccagcgttgtttcggagttttctggtgtgccatctctcagctccagcgaagccgtgcacggacttcctgaggggcaaccacggcctgggggctccttcgttccagagcaggaccctgttacaaagaacaaaacttgccggattgctgccaagccttatgaagaacaagtcaatcctgtcctcttgaccctcagccctcagactgggaccctggcactgtctgttcagcctagcggtggggacattcgaatgaatcaggggcctgaggaatcagagagccacctctgctctgacagcactcctaagatggaaggcccccagggggcttgtggcctgaagctggcaggagacacgaagcctaagaaccaagtgctggccacctacatgtcccatgagctggtcctggccaccccccagaacctgcctaagatgcctgagctgcctttgctacctcacgacagccaccccaaggaacttatattggacgtggttccgagcagcaggaggggctccagcacagagcgcccacagcttggaagccaggtggatctggggcgagtgaaaatggagaaggtggatggtgatgtggtcttcaatttagccacctgcttccgggctgatggcctcccagtggctccccagaggggccaagctgaagttcgggctaaggccgggcaggctcgagtgaaacaggaaagcgtaggggtctttgcttgcaagaacaagtggcagccagatgatgtgacggaatctctgccgcccaagaagatgaagtgcggcaaagagaaggacagtgaagagcagcagctccagccacaagccaaggccgtggtccggagttcccacagacccaagtgccggaagctgcccagtgacccccaggaatccaccaagaaaagccccaggggggcttcagattcaggaaaagagcacaatggagtcaggggaaagcacaagcaccggaagccgacaaagccggagtcccagtctccaggaaaacgagccgacagccacgaggaaggttccttggaaaagaaagcaaagagcagtttccgtgactttattcctgtggttctgagcacccgcacgcgcagtcagtctggaagcatctgtagctcctttgctggcatggcagacagtgacatgggaagccaggaagtcttccccacagaagaagaagaggaggtaacccccaccccagctaagcgtcgaaaggtgagaaagacccaacgggacacccagtatcgcagccaccatgcccaggacaagtctctgctgagccagggccgaaggcacctgtggcgagcccgagaaatgccctggaggacagaggctgcccggcaaatgtgggacaccaatgaggaggaggaggaagaagaggaggagggcctgctgaagaggaagaaacgaagacggcagaagagccgaaaatatcagactggggagtacctgacagagcaagaagacgagcagcggcggaaagggagagcagatttaaaggcccgtaagcagaagacttcctcctcccaaagtttggagcaccgcctcaggaacaggaaccttctcttgcccaacaaagtccaggggatctcggattcaccaaacggtttcctcccaaataacctggaagagccagcctgccttgaaaattcagaaaagccatcaggaaaacgaaagtgcaagaccaagcacatggcaaccgtctcagaagaggcaaaggatgttgttctctactgcctccagaaagacagtgaagatgtgaatcaccgtgacaatgctggctacacagccctgcatgaggcttgttcccggggctggaccgacatcctgaacatcctgctggagcacggggccaacgtgaactgcagtgcgcaggacggcacgaggccagttcatgatgcggtggtcaatgacaacctggagaccatctggctcctgctgtcctatggggccgatcccacactggctacctactcgggtcagacagccatgaagctggccagcagcgacaccatgaagcgctttctcagtgatcacctctcggatcttcagggccgggcagagggtgatcccggtgtatcctgggatttttacagcagttctgtgttggaggaaaaagacgggtttgcctgtgacctcctacataatcctcctgggagctcagatcaagaaggagacgatccgatggaggaggatgatttcatgtttgaactctcagacaagcctcttctcccttgctacaacctccaagtgtcagtgtcccgcgggccctgcaactggttcctcttttccgatgtcttgaagaggctgaagctttcctcgaggatctttcaggcccggttcccgcactttgaaatcaccaccatgcccaaggccgagttctacaggcaggtggcctccagtcagctgctgacccctgccgagaggcctggaggcttggacgacagatcccccccaggctcctctgagactgtggagctggtgcggtacgagccagacctacttcggctcctagggtccgaggtggaattccagtcttgcaacagttgaccgggaaaacagcccctcctcttctttctccttccgagttcgcccttcccccacctccttgtctttccccgaccgagcaccagactgcagaatgaggcaataatacggaccaacaagaagccgccttatcaatgccagcattagcgactggactgtttttgtttttttggttacaattagttctcatctccctgtcgtcgtcattgttatcgtggttgctgatgggggtggaaagttgaactccatgtctgaggacaagaggtcccgggggtggtgggaggtggcgccggggtcccttggactggcctccttgttcatgaccaagaccaaacctgggccctggatggccttggcctgtcccgaggagaaatgagaaaatcccagatctctgagcgccccccaactccattcccctgtgttcttctgtcttctgtagtatttattttattagtatttaatttgtattgtttcattggtttctgataagtctgtatcactgtgacgatttgagacaacttgttgtattgagggactttctgtacctccttttctttttctttgttgatgagctctgacaaagctattccctggtgtttttttcccccactggggagggggtgaggtggaatggggtgggggaacatggacttgtgactaacgaagctggttgctgctggcccagggctgggggcttgggggtaaatcctgaggctttggtgctcccccacccacccattcccgccctttgcagcagccccgctatcttgagattagtgttgacagggaggggaggattgtgaggtgaggggttaataagttactctaataaaggagcgtggagaagggatctgaggggtgagggtggcccccctcctcacgccttcttcactgcccccctcagagtgcacaatacgagtttgttcctgcctccactctcccaccccgttctggcctccctgtctcaagatactgagcctctcacctcccagccctcagccacccccatccctgccccttctgagactcacagcacccctttccttcctctcctcccacctcctccctcagcccctcattctccttgggaatctgcagagggctctgggactcactgccggatgtgaaatccaggcgtcagctgtttcctaggcaagggcaggaaagtggtctccagcccttgctccactcatgcctgggggcctggggctgagtggtatccctacctggcctccccctggcctctgggcctccagcgctgggtttgtcgagtgagagagagagaggagcttgggttgcttccctgtccccgccccctctgtggcattgtccctcccactcttatttttctaccaattgctatttttccgaacaatccttgtagagtatgtaccatccaaaggcaggagggcctcgccgtggccggctctggttggagatggtacagttttattgtacaggtgctaaaacaacaacaacaaaaaagaaaatggaaaaaaaaaagattaaaaaaaaaaggaaaaaaaaaaa

SEQ ID NO: 111325 - DNA, 5648 bp, Homo sapiens
  Payload ID: 1799
  Gene Symbol: BCORL1
  Gene Name: BCL6 corepressor-like 1
  ENST ID: ENST00000456822
  CDS Start-End: 1-4158
acgccagctgccattcccacctctgcacccatcccggcctccttcagtttgagtagagtgtgctttcctgcagctcaggcaccagctatgcaaaaagtccccctgtcctttcagccagggacagtgctgaccccgagccagccgctggtatatatcccgcctccaagctgtgggcagccactcagtgtggccacactgccaaccactctaggggtttcctccactcttacgctccctgtcctgccgtcctacctgcaggacaggtgtctcccaggcgtgctagcctcccccgagctccgttcttacccgtatgcattttctgtggcccggcctctgacttcggattccaagctggtatctctggaggtgaacaggctcccctgcacttccccatccggtagcaccaccacccagcctgcacccgatggggtccctgggcctttggcagatacctcccttgttactgcttctgccaaggtgcttccaactccacagcctctgctgccagcccccagtgggagctcagccccaccgcaccccgccaagatgcccagtggcaccgagcagcaaacagaagggacttccgttaccttctctcctcttaagtcaccgccacagctggaacgagagatggcctctccacctgagtgcagcgagatgccccttgatctgtcctccaagtccaaccgccagaagcttccattgccgaaccagcgcaagacaccccccatgcctgtgttgacccccgtgcacaccagcagcaaggccctcctctccacagtcctgtctaggtctcagcgcacaacccaggctgccggtggcaatgtcacctcctgcctgggctccacttcctcgccctttgtcatctttcccgagatcgtgaggaatggggacccgagcacctgggtgaagaactcaactgcactgatcagcaccattcctggcacctacgtgggagtggccaacccagtgcctgcatccctgctgctgaacaaagaccccaacctgggcctcaaccgtgacccccgccatctccccaagcaggagcccatctccatcattgatcaaggagagcctaagggcactggtgccacgtgtggcaaaaagggcagccaggctggtgctgagggacagccaagcacagtgaaacgatatactccagcccgcattgcccctgggctgccagggtgccaaaccaaggaactctctttgtggaaacccacggggccggcaaatatttatccccggtgttcagtcaatgggaaacctaccagcacccaggtcctgcctgttggctggtccccgtaccaccaggcgtctctgctttccattggcatttccagtgccgggcagctgacccccagtcagggggcgcccatcaggcccaccagcgttgtttcggagttttctggtgtgccatctctcagctccagcgaagccgtgcacggacttcctgaggggcaaccacggcctgggggctccttcgttccagagcaggaccctgttacaaagaacaaaacttgccggattgctgccaagccttatgaagaacaagtcaatcctgtcctcttgaccctcagccctcagactgggaccctggcactgtctgttcagcctagcggtggggacattcgaatgaatcaggggcctgaggaatcagagagccacctctgctctgacagcactcctaagatggaaggcccccagggggcttgtggcctgaagctggcaggagacacgaagcctaagaaccaagtgctggccacctacatgtcccatgagctggtcctggccaccccccagaacctgcctaagatgcctgagctgcctttgctacctcacgacagccaccccaaggaacttatattggacgtggttccgagcagcaggaggggctccagcacagagcgcccacagcttggaagccaggtggatctggggcgagtgaaaatggagaaggtggatggtgatgtggtcttcaatttagccacctgcttccgggctgatggcctcccagtggctccccagaggggccaagctgaagttcgggctaaggccgggcaggctcgagtgaaacaggaaagcgtaggggtctttgcttgcaagaacaagtggcagccagatgatgtgacggaatctctgccgcccaagaagatgaagtgcggcaaagagaaggacagtgaagagcagcagctccagccacaagccaaggccgtggtccggagttcccacagacccaagtgccggaagctgcccagtgacccccaggaatccaccaagaaaagccccaggggggcttcagattcaggaaaagagcacaatggagtcaggggaaagcacaagcaccggaagccgacaaagccggagtcccagtctccaggaaaacgagccgacagccacgaggaaggttccttggaaaagaaagcaaagagcagtttccgtgactttattcctgtggttctgagcacccgcacgcgcagtcagtctggaagcatctgtagctcctttgctggcatggcagacagtgacatgggaagccaggaagtcttccccacagaagaagaagaggaggtaacccccaccccagctaagcgtcgaaaggtgagaaagacccaacgggacacccagtatcgcagccaccatgcccaggacaagtctctgctgagccagggccgaaggcacctgtggcgagcccgagaaatgccctggaggacagaggctgcccggcaaatgtgggacaccaatgaggaggaggaggaagaagaggaggagggcctgctgaagaggaagaaacgaagacggcagaagagccgaaaatatcagactggggagtacctgacagagcaagaagacgagcagcggcggaaagggagagcagatttaaaggcccgtaagcagaagacttcctcctcccaaagtttggagcaccgcctcaggaacaggaaccttctcttgcccaacaaagtccaggggatctcggattcaccaaacggtttcctcccaaataacctggaagagccagcctgccttgaaaattcagaaaagccatcaggaaaacgaaagtgcaagaccaagcacatggcaaccgtctcagaagaggcaaagggcaaaggtcgttggagccagcagaagacacgatctcccaaatctcccaccccagtgaaacccacagaaccatgtacaccctctaagtcccgaagtgccagctcagaggaggcctcagagtcacctacagcccggcagatccccccagaggcacgtcggctcatagtgaacaaaaatgctggtgagaccctcctgcagagggcggcgcgtcttggctataaggatgttgttctctactgcctccagaaagacagtgaagatgtgaatcaccgtgacaatgctggctacacagccctgcatgaggcttgttcccggggctggaccgacatcctgaacatcctgctggagcacggggccaacgtgaactgcagtgcgcaggacggcacgaggccagttcatgatgcggtggtcaatgacaacctggagaccatctggctcctgctgtcctatggggccgatcccacactggctacctactcgggtcagacagccatgaagctggccagcagcgacaccatgaagcgctttctcagtgatcacctctcggatcttcagggccgggcagagggtgatcccggtgtatcctgggatttttacagcagttctgtgttggaggaaaaagacgggtttgcctgtgacctcctacataatcctcctgggagctcagatcaagaaggagacgatccgatggaggaggatgatttcatgtttgaactctcagacaagcctcttctcccttgctacaacctccaagtgtcagtgtcccgcgggccctgcaactggttcctcttttccgatgtcttgaagaggctgaagctttcctcgaggatctttcaggcccggttcccgcactttgaaatcaccaccatgcccaaggccgagttctacaggcaggtggcctccagtcagctgctgacccctgccgagaggcctggaggcttggacgacagatcccccccaggctcctctgagactgtggagctggtgcggtacgagccagacctacttcggctcctagggtccgaggtggaattccagtcttgcaacagttgaccgggaaaacagcccctcctcttctttctccttccgagttcgcccttcccccacctccttgtctttccccgaccgagcaccagactgcagaatgaggcaataatacggaccaacaagaagccgccttatcaatgccagcattagcgactggactgtttttgtttttttggttacaattagttctcatctccctgtcgtcgtcattgttatcgtggttgctgatgggggtggaaagttgaactccatgtctgaggacaagaggtcccgggggtggtgggaggtggcgccggggtcccttggactggcctccttgttcatgaccaagaccaaacctgggccctggatggccttggcctgtcccgaggagaaatgagaaaatcccagatctctgagcgccccccaactccattcccctgtgttcttctgtcttctgtagtatttattttattagtatttaatttgtattgtttcattggtttctgataagtctgtatcactgtgacgatttgagacaacttgttgtattgagggactttctgtacctccttttctttttctttgttgatgagctctgacaaagctattccctggtgtttttttcccccactggggagggggtgaggtggaatggggtgggggaacatggacttgtgactaacgaagctggttgctgctggcccagggctgggggcttgggggtaaatcctgaggctttggtgctcccccacccacccattcccgccctttgcagcagccccgctatcttgagattagtgttgacagggaggggaggattgtgaggtgaggggttaataagttactctaataaaggagcgtggagaagggatctgaggggtgagggtggcccccctcctcacgccttcttcactgcccccctcagagtgcacaatacgagtttgttcctgcctccactctcccaccccgttctggcctccctgtctcaagatactgagcctctcacctcccagccctcagccacccccatccctgccccttctgagactcacagcacccctttccttcctctcctcccacctcctccctcagcccctcattctccttgggaatctgcagagggctctgggactcactgccggatgtgaaatccaggcgtcagctgtttcctaggcaagggcaggaaagtggtctccagcccttgctccactcatgcctgggggcctggggctgagtggtatccctacctggcctccccctggcctctgggcctccagcgctgggtttgtcgagtgagagagagagaggagcttgggttgcttccctgtccccgccccctctgtggcattgtccctcccactcttatttttctaccaattgctatttttccgaacaatccttgtagagtatgtaccatccaaaggcaggagggcctcgccgtggccggctctggttggagatggtacagttttattgtacaggtgctaaaacaacaacaacaaaaaagaaaatgg

SEQ ID NO: 111326 - DNA, 2221 bp, Homo sapiens
  Payload ID: 1799
  Gene Symbol: BCORL1
  Gene Name: BCL6 corepressor-like 1
  ENST ID: ENST00000441294
  CDS Start-End: 1-2221
gcctctgctgccagcccccagtgggagctcagccccaccgcaccccgccaagatgcccagtggcaccgagcagcaaacagaagggacttccgttaccttctctcctcttaagtcaccgccacagctggaacgagagatggcctctccacctgagtgcagcgagatgccccttgatctgtcctccaagtccaaccgccagaagcttccattgccgaaccagcgcaagacaccccccatgcctgtgttgacccccgtgcacaccagcagcaaggccctcctctccacagtcctgtctaggtctcagcgcacaacccaggctgccggtggcaatgtcacctcctgcctgggctccacttcctcgccctttgtcatctttcccgagatcgtgaggaatggggacccgagcacctgggtgaagaactcaactgcactgatcagcaccattcctggcacctacgtgggagtggccaacccagtgcctgcatccctgctgctgaacaaagaccccaacctgggcctcaaccgtgacccccgccatctccccaagcaggagcccatctccatcattgatcaaggagagcctaagggcactggtgccacgtgtggcaaaaagggcagccaggctggtgctgagggacagccaagcacagtgaaacgatatactccagcccgcattgcccctgggctgccagggtgccaaaccaaggaactctctttgtggaaacccacggggccggcaaatatttatccccggtgttcagtcaatgggaaacctaccagcacccaggtcctgcctgttggctggtccccgtaccaccaggcgtctctgctttccattggcatttccagtgccgggcagctgacccccagtcagggggcgcccatcaggcccaccagcgttgtttcggagttttctggtgtgccatctctcagctccagcgaagccgtgcacggacttcctgaggggcaaccacggcctgggggctccttcgttccagagcaggaccctgttacaaagaacaaaacttgccggattgctgccaagccttatgaagaacaagtcaatcctgtcctcttgaccctcagccctcagactgggaccctggcactgtctgttcagcctagcggtggggacattcgaatgaatcaggggcctgaggaatcagagagccacctctgctctgacagcactcctaagatggaaggcccccagggggcttgtggcctgaagctggcaggagacacgaagcctaagaaccaagtgctggccacctacatgtcccatgagctggtcctggccaccccccagaacctgcctaagatgcctgagctgcctttgctacctcacgacagccaccccaaggaacttatattggacgtggttccgagcagcaggaggggctccagcacagagcgcccacagcttggaagccaggtggatctggggcgagtgaaaatggagaaggtggatggtgatgtggtcttcaatttagccacctgcttccgggctgatggcctcccagtggctccccagaggggccaagctgaagttcgggctaaggccgggcaggctcgagtgaaacaggaaagcgtaggggtctttgcttgcaagaacaagtggcagccagatgatgtgacggaatctctgccgcccaagaagatgaagtgcggcaaagagaaggacagtgaagagcagcagctccagccacaagccaaggccgtggtccggagttcccacagacccaagtgccggaagctgcccagtgacccccaggaatccaccaagaaaagccccaggggggcttcagattcaggaaaagagcacaatggagtcaggggaaagcacaagcaccggaagccgacaaagccggagtcccagtctccaggaaaacgagccgacagccacgaggaaggttccttggaaaagaaagcaaagagcagtttccgtgactttattcctgtggttctgagcacccgcacgcgcagtcagtctgatttaaaggcccgtaagcagaagacttcctcctcccaaagtttggagcaccgcctcaggaacaggaaccttctcttgcccaacaaagtccaggggatctcggattcaccaaacggtttcctcccaaataacctggaagagccagcctgccttgaaaattcagaaaagccatcaggaaaacgaaagtgcaagaccaagcacatggcaaccgtctcagaagaggcaaag

SEQ ID NO: 111327 - DNA, 7127 bp, Homo sapiens
  Payload ID: 1799
  Gene Symbol: BCORL1
  Gene Name: BCL6 corepressor-like 1
  Uniprot ID: Q5H9F3
  ENST ID: ENST00000540052
  CDS Start-End: 45-5180
ggggagtggccacagcaggtcctatctggtggtgagtggctgtcatgatctctacagcaccgctctacagcggcgtgcacaactggaccagttctgaccggattcgcatgtgtggcatcaacgaggagagaagagcacctctttctgatgaggagtcaacgacaggcgactgccagcactttggatctcaggagttttgtgtcagcagcagtttttccaaggtggagctcacggcagttggaagtggcagcaatgcccggggggcagacccagatggcagtgctacagaaaaacttgggcacaagtcagaagacaagcctgacgatccccagccaaaaatggactacgctgggaacgtggcagaggctgagggcctcttggtgcccctgagcagcccaggagacgggctcaagcttcccgcatctgacagcgccgaggccagcaacagcagggccgactgctcctggactccactcaacacccaaatgagcaaacaggttgactgctcacccgccggagtaaaggctttggactctcggcaaggtgttggagagaagaatactttcattttggcaactctgggaactggagtccctgtggaggggaccctgcccctggttaccactaacttcagtcctctgccagcccctatctgtccccctgctcccggttcggcctctgtgccccactctgttccagatgcattccaggttcccctctccgtccctgccccagtcccccattcagggcttgttccagtccaagttgccacttcggttccagctccttcccctcccttagcacctgtcccggctctggctccagcgccaccgtcagtgcccacgctcatctctgactcgaaccccctttctgtttcggcctcagtcttggtgcctgtgccagcttctgctcccccttcaggcccggttcccttgtcggctccagctcctgccccgctttcagtcccagtttcagctcctcccttggctctcatccaggctcctgtgcccccttcagctccgaccttggttctcgctcccgtccccactccggttctggctcccatgccagcatccacgcctccagcggcccctgcccctccgtctgtgcccatgcccactccaaccccatcttccggcccaccttctacccccaccctcatccccgcctttgctcctacaccggtgcctgcacccaccccagcccccatctttactccagcccctacacccatgcctgctgccacgccagctgccattcccacctctgcacccatcccggcctccttcagtttgagtagagtgtgctttcctgcagctcaggcaccagctatgcaaaaagtccccctgtcctttcagccagggacagtgctgaccccgagccagccgctggtatatatcccgcctccaagctgtgggcagccactcagtgtggccacactgccaaccactctaggggtttcctccactcttacgctccctgtcctgccgtcctacctgcaggacaggtgtctcccaggcgtgctagcctcccccgagctccgttcttacccgtatgcattttctgtggcccggcctctgacttcggattccaagctggtatctctggaggtgaacaggctcccctgcacttccccatccggtagcaccaccacccagcctgcacccgatggggtccctgggcctttggcagatacctcccttgttactgcttctgccaaggtgcttccaactccacagcctctgctgccagcccccagtgggagctcagccccaccgcaccccgccaagatgcccagtggcaccgagcagcaaacagaagggacttccgttaccttctctcctcttaagtcaccgccacagctggaacgagagatggcctctccacctgagtgcagcgagatgccccttgatctgtcctccaagtccaaccgccagaagcttccattgccgaaccagcgcaagacaccccccatgcctgtgttgacccccgtgcacaccagcagcaaggccctcctctccacagtcctgtctaggtctcagcgcacaacccaggctgccggtggcaatgtcacctcctgcctgggctccacttcctcgccctttgtcatctttcccgagatcgtgaggaatggggacccgagcacctgggtgaagaactcaactgcactgatcagcaccattcctggcacctacgtgggagtggccaacccagtgcctgcatccctgctgctgaacaaagaccccaacctgggcctcaaccgtgacccccgccatctccccaagcaggagcccatctccatcattgatcaaggagagcctaagggcactggtgccacgtgtggcaaaaagggcagccaggctggtgctgagggacagccaagcacagtgaaacgatatactccagcccgcattgcccctgggctgccagggtgccaaaccaaggaactctctttgtggaaacccacggggccggcaaatatttatccccggtgttcagtcaatgggaaacctaccagcacccaggtcctgcctgttggctggtccccgtaccaccaggcgtctctgctttccattggcatttccagtgccgggcagctgacccccagtcagggggcgcccatcaggcccaccagcgttgtttcggagttttctggtgtgccatctctcagctccagcgaagccgtgcacggacttcctgaggggcaaccacggcctgggggctccttcgttccagagcaggaccctgttacaaagaacaaaacttgccggattgctgccaagccttatgaagaacaagtcaatcctgtcctcttgaccctcagccctcagactgggaccctggcactgtctgttcagcctagcggtggggacattcgaatgaatcaggggcctgaggaatcagagagccacctctgctctgacagcactcctaagatggaaggcccccagggggcttgtggcctgaagctggcaggagacacgaagcctaagaaccaagtgctggccacctacatgtcccatgagctggtcctggccaccccccagaacctgcctaagatgcctgagctgcctttgctacctcacgacagccaccccaaggaacttatattggacgtggttccgagcagcaggaggggctccagcacagagcgcccacagcttggaagccaggtggatctggggcgagtgaaaatggagaaggtggatggtgatgtggtcttcaatttagccacctgcttccgggctgatggcctcccagtggctccccagaggggccaagctgaagttcgggctaaggccgggcaggctcgagtgaaacaggaaagcgtaggggtctttgcttgcaagaacaagtggcagccagatgatgtgacggaatctctgccgcccaagaagatgaagtgcggcaaagagaaggacagtgaagagcagcagctccagccacaagccaaggccgtggtccggagttcccacagacccaagtgccggaagctgcccagtgacccccaggaatccaccaagaaaagccccaggggggcttcagattcaggaaaagagcacaatggagtcaggggaaagcacaagcaccggaagccgacaaagccggagtcccagtctccaggaaaacgagccgacagccacgaggaaggttccttggaaaagaaagcaaagagcagtttccgtgactttattcctgtggttctgagcacccgcacgcgcagtcagtctggaagcatctgtagctcctttgctggcatggcagacagtgacatgggaagccaggaagtcttccccacagaagaagaagaggaggtaacccccaccccagctaagcgtcgaaaggtgagaaagacccaacgggacacccagtatcgcagccaccatgcccaggacaagtctctgctgagccagggccgaaggcacctgtggcgagcccgagaaatgccctggaggacagaggctgcccggcaaatgtgggacaccaatgaggaggaggaggaagaagaggaggagggcctgctgaagaggaagaaacgaagacggcagaagagccgaaaatatcagactggggagtacctgacagagcaagaagacgagcagcggcggaaagggagagcagatttaaaggcccgtaagcagaagacttcctcctcccaaagtttggagcaccgcctcaggaacaggaaccttctcttgcccaacaaagtccaggggatctcggattcaccaaacggtttcctcccaaataacctggaagagccagcctgccttgaaaattcagaaaagccatcaggaaaacgaaagtgcaagaccaagcacatggcaaccgtctcagaagaggcaaaggatgttgttctctactgcctccagaaagacagtgaagatgtgaatcaccgtgacaatgctggctacacagccctgcatgaggcttgttcccggggctggaccgacatcctgaacatcctgctggagcacggggccaacgtgaactgcagtgcgcaggacggcacgaggccagttcatgatgcggtggtcaatgacaacctggagaccatctggctcctgctgtcctatggggccgatcccacactggctacctactcgggtcagacagccatgaagctggccagcagcgacaccatgaagcgctttctcagtgatcacctctcggatcttcagggccgggcagagggtgatcccggtgtatcctgggatttttacagcagttctgtgttggaggaaaaagacgggtttgcctgtgacctcctacataatcctcctgggagctcagatcaagaaggagacgatccgatggaggaggatgatttcatgtttgaactctcagacaagcctcttctcccttgctacaacctccaagtgtcagtgtcccgcgggccctgcaactggttcctcttttccgatgtcttgaagaggctgaagctttcctcgaggatctttcaggcccggttcccgcactttgaaatcaccaccatgcccaaggccgagttctacaggcaggtggcctccagtcagctgctgacccctgccgagaggcctggaggcttggacgacagatcccccccaggctcctctgagactgtggagctggtgcggtacgagccagacctacttcggctcctagggtccgaggtggaattccagtcttgcaacagttgaccgggaaaacagcccctcctcttctttctccttccgagttcgcccttcccccacctccttgtctttccccgaccgagcaccagactgcagaatgaggcaataatacggaccaacaagaagccgccttatcaatgccagcattagcgactggactgtttttgtttttttggttacaattagttctcatctccctgtcgtcgtcattgttatcgtggttgctgatgggggtggaaagttgaactccatgtctgaggacaagaggtcccgggggtggtgggaggtggcgccggggtcccttggactggcctccttgttcatgaccaagaccaaacctgggccctggatggccttggcctgtcccgaggagaaatgagaaaatcccagatctctgagcgccccccaactccattcccctgtgttcttctgtcttctgtagtatttattttattagtatttaatttgtattgtttcattggtttctgataagtctgtatcactgtgacgatttgagacaacttgttgtattgagggactttctgtacctccttttctttttctttgttgatgagctctgacaaagctattccctggtgtttttttcccccactggggagggggtgaggtggaatggggtgggggaacatggacttgtgactaacgaagctggttgctgctggcccagggctgggggcttgggggtaaatcctgaggctttggtgctcccccacccacccattcccgccctttgcagcagccccgctatcttgagattagtgttgacagggaggggaggattgtgaggtgaggggttaataagttactctaataaaggagcgtggagaagggatctgaggggtgagggtggcccccctcctcacgccttcttcactgcccccctcagagtgcacaatacgagtttgttcctgcctccactctcccaccccgttctggcctccctgtctcaagatactgagcctctcacctcccagccctcagccacccccatccctgccccttctgagactcacagcacccctttccttcctctcctcccacctcctccctcagcccctcattctccttgggaatctgcagagggctctgggactcactgccggatgtgaaatccaggcgtcagctgtttcctaggcaagggcaggaaagtggtctccagcccttgctccactcatgcctgggggcctggggctgagtggtatccctacctggcctccccctggcctctgggcctccagcgctgggtttgtcgagtgagagagagagaggagcttgggttgcttccctgtccccgccccctctgtggcattgtccctcccactcttatttttctaccaattgctatttttccgaacaatccttgtagagtatgtaccatccaaaggcaggagggcctcgccgtggccggctctggttggagatggtacagttttattgtacaggtgctaaaacaacaacaacaaaaaagaaaatggaaaaaaaaaagattaaaaaaaaaaggaaaaaaaaaaagccagtttgaggatgggacaatctgttctctagaggctcctgagccatgcgggagcattggtggttattttctttgtattgtgtttgttctttgttcctgggggggaagttctcggcccccttctgtaggactgctccccacccccaccatactgcccagttggttttgaacagttgttttccctttttaagaaaaaaaaatacatatatatatacatatatatatataaagttgaggggttttggactttaatttgttggttttgttggggttcctggtattgtgtagtttatttcatgttctgtttgcctttccttttttcgcatttgggtgtatattctggctgccctttatgtttcattttaagcaactggctgtggagtcaaaaacacttgcatactgaaaaacctgtgtcaggg

SEQ ID NO: 111328 - DNA, 857 bp, Homo sapiens
  Payload ID: 1799
  Gene Symbol: BCORL1
  Gene Name: BCL6 corepressor-like 1
  ENST ID: ENST00000488135
  CDS Start-End: 296-433
ggaaaagcgaggaaagacacagtctgcgattgtgccgcaccccccacccacctcttagcatctggattctgctctcgtagtgggggccgcggaccctccccgccacagtccttttactctccagcactcccaccgccttcccccttcttcagccatctgactctcctagggggtcggcgtggcgaaggacggctagccttggagggaaagtagccaccagtccaactcgggtcgcccccaccattatttcgggggagtggccacagcaggtcctatctggtggtgagtggctgtcatgatctctacagcaccgctctacagcggcgtgcacaactggaccagttctgaccggattcgcatgtgtggcatcaacgaggagagtcacttccagcagtggagccctcccacttctgccagtccaactgccttttaaagggaacaagcctttccccctcggttagccccttctggatccctgaaaagatggggagaggcccgtggtgatcccccttgccttttttgcttctcttgccccagaagagcacctctttctgatgaggagtcaacgacaggcgactgccagcactttggatctcaggagttttgtgtcagcagcagtttttccaaggtggagctcacggcagttggaagtggcagcaatgcccggggggcagacccagatggcagtgctacagaaaaacttgggcacaagtcagaagacaagcctgacgatccccagccaaaaatggactacgctgggaacgtggcagaggctgagggcctcttggtgcccctgagcagcccaggagacgggctcaagcttcccgcatctgacagcgccgaggccagcaacagca

SEQ ID NO: 111329 - DNA, 468 bp, Homo sapiens
  Payload ID: 1799
  Gene Symbol: BCORL1
  Gene Name: BCL6 corepressor-like 1
  ENST ID: ENST00000607874
  CDS Start-End: 383-468
ggggactgagtggtaagcaactccgagtgttagacggtgatcgggcggcgattccgggaaaagcgaggaaagacacagtctgcgattgtgccgcaccccccacccacctcttagcatctggattctgctctcgtagtgggggccgcggaccctccccgccacagtccttttactctccagcactcccaccgccttcccccttcttcagccatctgactctcctagggggtcggcgtggcgaaggacggctagccttggagggaaagtagccaccagtccaactcgggtcgcccccaccattatttcggtgagggggcaacgctaagaaggggatactgggggagtggccacagcaggtcctatctggtggtgagtggctgtcatgatctctacagcaccgctctacagcggcgtgcacaactggaccagttctgaccggattcgcatgtgtggcatcaacgaggagag

SEQ ID NO: 111330 - DNA, 2063 bp, Homo sapiens
  Payload ID: 1800
  Gene Symbol: BFSP1
  Gene Name: beaded filament structural protein 1, filensin
  Uniprot ID: Q12934
  ENST ID: ENST00000377868
  CDS Start-End: 272-1894
aattttccatgctggaagtggaaggaattgcttgctcatttatattctctatcctgtggaaagccttccctcccaccccttgagccagtgagtcacttcctctctgcaaacctctaaagcctcctttctttctcagcccagacctggccctctggagagggttttggagtcctgggtaggcagggtacctcaggcagcaggcagcacaccttggatgtgagctgaatggattttcaaatttcacagaaggagcctccatgctggagaaagtatgtatgaaaatgagtgcgaatgtcaactcctgctaaaagaaatgcttgaacggcttaacaaggaagctgatgaagccttgctgcataacctacgccttcagctggaagcccaatttctgcaagatgatatcagtgcggcaaaggacaggcacaagaagaatcttctggaagttcagacctatatcagcatcctgcagcagatcatccacaccactcctccagcatccattgtgacgagtgggatgagggaggagaagctcctgacggagcgggaggtggccgccctgcggagtcagctggaggagggccgggaggtgctctcccacctgcaggcgcagagagtggagctgcaggcacagacaacaactctggaacaagctattaaaagtgcccatgagtgttatgacgatgagattcagctttataacgagcagattgagacactgcgcaaggagattgaggagacagagcgggtcctggagaagtcttcttacgactgccggcagctggcggtcgcccagcaaaccctgaagaatgagctggaccggtatcatcgtatcatcgagattgaaggcaacaggctgacctctgccttcattgaaactcccattcccctgttcacccagagccatggagtctctctcagcactggatccggtgggaaagatcttaccagagctctgcaggatataacagcagcaaaaccaagacaaaaagccctccccaagaatgttccaaggagaaaagagattataacaaaagacaaaaccaacggagctctggaagatgcaccattaaaaggtttggaagacacaaagctggtacaggtggtacttaaagaggaaagtgaatctaagtttgaatcagaaagtaaagaagtaagtcccctgacacaagaaggggctccagaggatgtgccagatggagggcagataagcaaaggctttgggaaactatacaggaaggtcaaggagaaagtgagaagccccaaagagcctgagacccccactgagctctacaccaaagagcggcacgtgctggtcacaggggatgccaattacgtggaccctagattctatgtctcctccatcacagctaaaggtggggtggctgtttctgttgcggaagactctgtgctttatgacggccaggtggagccctctcctgagtcacccaagccccctttagagaatgggcaggtgggtctgcaggagaaagaagatggacaaccaattgaccagcagcctatagacaaggagattgagccagatggtgcagagctggaaggccctgaagagaaacgtgagggtgaggagcgggacgaagagtccaggagaccctgtgccatggtcacacccggtgcagaggaaccatctatacctgagcctccaaagcctgcggctgatcaggatggagctgaggtgcttgggactaggagcagaagcctgccagaaaaaggccctcccaaggctttggcctataagacagtggaagtggtggaatctatcgagaagatttccacggagagcattcagacatatgaagaaaccgctgtgatcgtggagaccatgattggaaagacaaagtcagacaagaagaaatcaggagagaagagctcttaaaatgcccaggcttgatgggataaaatgtatttggggccactgtaggggtaatgctttgatattttagagcaaatgataaaagggtgagggttcctgtttggattagaccatagttgacccatctggcattgccaacgaagccttcattaaaatgttttctttgcttgca

SEQ ID NO: 111331 - DNA, 2207 bp, Homo sapiens
  Payload ID: 1800
  Gene Symbol: BFSP1
  Gene Name: beaded filament structural protein 1, filensin
  Uniprot ID: Q12934
  ENST ID: ENST00000377873
  CDS Start-End: 41-2038
gccggctcggcgccgcccgcgcgcccgcgccagagcagccatgtaccggcgcagctacgtcttccagacccgcaaggagcagtacgagcacgccgacgaggcttcgcgcgccgccgagcccgagcgcccggccgacgagggctgggctggggcaacgagcctggcggcgctgcaggggctcggcgagcgcgtggccgcccacgtccagcgggcccgcgccctcgagcagcgccatgccgggctccggaggcagctggatgccttccagcgcctgggcgagctggccgggcccgaggacgccctcgcccgccaagtcgagagcaaccgccagcgcgtccgggacctggaggccgagcgcgcccggctggagcgccagggcaccgaggcgcagcgcgcgctcgacgagttccgaagcaagtatgaaaatgagtgcgaatgtcaactcctgctaaaagaaatgcttgaacggcttaacaaggaagctgatgaagccttgctgcataacctacgccttcagctggaagcccaatttctgcaagatgatatcagtgcggcaaaggacaggcacaagaagaatcttctggaagttcagacctatatcagcatcctgcagcagatcatccacaccactcctccagcatccattgtgacgagtgggatgagggaggagaagctcctgacggagcgggaggtggccgccctgcggagtcagctggaggagggccgggaggtgctctcccacctgcaggcgcagagagtggagctgcaggcacagacaacaactctggaacaagctattaaaagtgcccatgagtgttatgacgatgagattcagctttataacgagcagattgagacactgcgcaaggagattgaggagacagagcgggtcctggagaagtcttcttacgactgccggcagctggcggtcgcccagcaaaccctgaagaatgagctggaccggtatcatcgtatcatcgagattgaaggcaacaggctgacctctgccttcattgaaactcccattcccctgttcacccagagccatggagtctctctcagcactggatccggtgggaaagatcttaccagagctctgcaggatataacagcagcaaaaccaagacaaaaagccctccccaagaatgttccaaggagaaaagagattataacaaaagacaaaaccaacggagctctggaagatgcaccattaaaaggtttggaagacacaaagctggtacaggtggtacttaaagaggaaagtgaatctaagtttgaatcagaaagtaaagaagtaagtcccctgacacaagaaggggctccagaggatgtgccagatggagggcagataagcaaaggctttgggaaactatacaggaaggtcaaggagaaagtgagaagccccaaagagcctgagacccccactgagctctacaccaaagagcggcacgtgctggtcacaggggatgccaattacgtggaccctagattctatgtctcctccatcacagctaaaggtggggtggctgtttctgttgcggaagactctgtgctttatgacggccaggtggagccctctcctgagtcacccaagccccctttagagaatgggcaggtgggtctgcaggagaaagaagatggacaaccaattgaccagcagcctatagacaaggagattgagccagatggtgcagagctggaaggccctgaagagaaacgtgagggtgaggagcgggacgaagagtccaggagaccctgtgccatggtcacacccggtgcagaggaaccatctatacctgagcctccaaagcctgcggctgatcaggatggagctgaggtgcttgggactaggagcagaagcctgccagaaaaaggccctcccaaggctttggcctataagacagtggaagtggtggaatctatcgagaagatttccacggagagcattcagacatatgaagaaaccgctgtgatcgtggagaccatgattggaaagacaaagtcagacaagaagaaatcaggagagaagagctcttaaaatgcccaggcttgatgggataaaatgtatttggggccactgtaggggtaatgctttgatattttagagcaaatgataaaagggtgagggttcctgtttggattagaccatagttgacccatctggcattgccaacgaagccttcattaaaatgttttctttgcttgca

SEQ ID NO: 111332 - DNA, 2183 bp, Homo sapiens
  Payload ID: 1800
  Gene Symbol: BFSP1
  Gene Name: beaded filament structural protein 1, filensin
  Uniprot ID: Q12934
  ENST ID: ENST00000536626
  CDS Start-End: 435-2015
gaggcgaccgtggccatgcagagtgctctgtgagtcaccgttaatttcagatggggtaaggtgaagagacgttccttgggagcccagaggagtacaggatctgatcccaagccctttaccaacaggccgcatgacacagcacttgtgagtgaggctgaacaagagaaatgagatttgaggatgtttcctgaggtcctactgtgtgccagctgcggccatgttagctaccaggaatatgaagatgaataaggagatcacaagtgaaaacagaaatgccaagataaacttggcccaagttcccttgggaattctcaggatcctacctggtgcagcagatcacaccagggagatgttactggatctttgatgagtggagcatccacagaggaaggaagtatgaaaatgagtgcgaatgtcaactcctgctaaaagaaatgcttgaacggcttaacaaggaagctgatgaagccttgctgcataacctacgccttcagctggaagcccaatttctgcaagatgatatcagtgcggcaaaggacaggcacaagaagaatcttctggaagttcagacctatatcagcatcctgcagcagatcatccacaccactcctccagcatccattgtgacgagtgggatgagggaggagaagctcctgacggagcgggaggtggccgccctgcggagtcagctggaggagggccgggaggtgctctcccacctgcaggcgcagagagtggagctgcaggcacagacaacaactctggaacaagctattaaaagtgcccatgagtgttatgacgatgagattcagctttataacgagcagattgagacactgcgcaaggagattgaggagacagagcgggtcctggagaagtcttcttacgactgccggcagctggcggtcgcccagcaaaccctgaagaatgagctggaccggtatcatcgtatcatcgagattgaaggcaacaggctgacctctgccttcattgaaactcccattcccctgttcacccagagccatggagtctctctcagcactggatccggtgggaaagatcttaccagagctctgcaggatataacagcagcaaaaccaagacaaaaagccctccccaagaatgttccaaggagaaaagagattataacaaaagacaaaaccaacggagctctggaagatgcaccattaaaaggtttggaagacacaaagctggtacaggtggtacttaaagaggaaagtgaatctaagtttgaatcagaaagtaaagaagtaagtcccctgacacaagaaggggctccagaggatgtgccagatggagggcagataagcaaaggctttgggaaactatacaggaaggtcaaggagaaagtgagaagccccaaagagcctgagacccccactgagctctacaccaaagagcggcacgtgctggtcacaggggatgccaattacgtggaccctagattctatgtctcctccatcacagctaaaggtggggtggctgtttctgttgcggaagactctgtgctttatgacggccaggtggagccctctcctgagtcacccaagccccctttagagaatgggcaggtgggtctgcaggagaaagaagatggacaaccaattgaccagcagcctatagacaaggagattgagccagatggtgcagagctggaaggccctgaagagaaacgtgagggtgaggagcgggacgaagagtccaggagaccctgtgccatggtcacacccggtgcagaggaaccatctatacctgagcctccaaagcctgcggctgatcaggatggagctgaggtgcttgggactaggagcagaagcctgccagaaaaaggccctcccaaggctttggcctataagacagtggaagtggtggaatctatcgagaagatttccacggagagcattcagacatatgaagaaaccgctgtgatcgtggagaccatgattggaaagacaaagtcagacaagaagaaatcaggagagaagagctcttaaaatgcccaggcttgatgggataaaatgtatttggggccactgtaggggtaatgctttgatattttagagcaaatgataaaagggtgagggttcctgtttggattagaccatagttgacccatctggcattgccaacgaagccttcattaaaatgttttctttgcttgc

SEQ ID NO: 111333 - DNA, 1558 bp, Homo sapiens
  Payload ID: 1801
  Gene Symbol: BFSP2
  Gene Name: beaded filament structural protein 2, phakinin
  Uniprot ID: Q13515
  ENST ID: ENST00000302334
  CDS Start-End: 90-1337
cgtgaccaggccacagggatgctggggctgtaaaccaaaagccactggactctgtaaacccactgggcaccacagaggcagaaggggtgatgagtgagaggcgagtggtagtggacttgcccaccagtgccagctccagcatgcccctccagaggcgcagggcgtccttcagggggccacggtcatcatcctccctggagagccccccagcctccaggaccaatgccatgagtggccttgtccgagcacccggggtctatgtaggaacagcacccagtgggtgcataggtggcttgggtgcccgtgtgacccgccgggccctcggcatcagcagtgtcttccttcagggcctgcggagctcaggcctggccaccgtgccggctccaggtttggagagggaccatggtgctgttgaggacctagggggctgcctggtggaatatatggccaaagtgcacgcccttgagcaagtcagtcaggagctggaaacacaactgcggatgcacctggagagcaaagccacacgctcgggaaactggggtgccctacgggcttcctgggccagcagctgccagcaggtgggtgaggcagtcttggaaaatgcccggctcatgctgcagacagaaactatccaggccggagcagatgactttaaagagagatatgaaaatgagcagccatttcgaaaggcggcagaagaggaaattaactctctgtataaagtcattgatgaggctaatttgactaaaatggacctggagagtcaaatagaaagtctgaaagaagaacttggctctctatcaagaaactatgaagaggatgtgaagctgctgcacaaacagttggcagggtgtgagctggaacaaatggatgctcccattggcactggtctggacgacatccttgagacgatcagaattcagtgggagagagatgttgaaaagaaccgggtggaggcaggagccctgctccaagctaagcaacaggcggaggtggcccacatgtcccagacccaggaggagaagctggcagctgccctcagggtggagttacacaacacttcgtgccaagtccagagcctccaggctgagacagaatccttacgtgccctgaaacgaggcctggagaacaccttgcacgatgccaagcactggcatgacatggagctccagaacctgggcgctgtggtcggccggctggaggcggagctcagggaaatccgagcggaggcggagcagcagcaacaggagcgcgcgcatctgctggcccgcaagtgccagctgcagaaggacgtggcgtcctaccacgccctgctggacagggaggagagcggctgatggagaaacttcctctttttcatgaagaaaacacccttcctcaacagctgacccaagaagttgcttgaggagctttctcctgagctccagtccctgctggattccctggttaattcagcttgagctgaaaagcttcctggaagtggagaggatccttctgctttaatctgagtagtctgtagcttgagcaatctcccttgtcctccttcaaataaatgctt

SEQ ID NO: 111334 - DNA, 2112 bp, Homo sapiens
  Payload ID: 1802
  Gene Symbol: BECN1
  Gene Name: beclin 1, autophagy related
  Uniprot ID: Q14457
  ENST ID: ENST00000361523
  CDS Start-End: 134-1486
gctgaagacagagcgatggtagttctggaggcctcgctccggggccgacccgaggccacagtgcctccgcggtagaccggacttgggtgacgggctccgggctcccgaggtgaagagcatcgggggctgagggatggaagggtctaagacgtccaacaacagcaccatgcaggtgagcttcgtgtgccagcgctgcagccagcccctgaaactggacacgagtttcaagatcctggaccgtgtcaccatccaggaactcacagctccattacttaccacagcccaggcgaaaccaggagagacccaggaggaagagactaactcaggagaggagccatttattgaaactcctcgccaggatggtgtctctcgcagattcatccccccagccaggatgatgtccacagaaagtgccaacagcttcactctgattggggaggcatctgatggcggcaccatggagaacctcagccgaagactgaaggtcactggggacctttttgacatcatgtcgggccagacagatgtggatcacccactctgtgaggaatgcacagatactcttttagaccagctggacactcagctcaacgtcactgaaaatgagtgtcagaactacaaacgctgtttggagatcttagagcaaatgaatgaggatgacagtgaacagttacagatggagctaaaggagctggcactagaggaggagaggctgatccaggagctggaagacgtggaaaagaaccgcaagatagtggcagaaaatctcgagaaggtccaggctgaggctgagagactggatcaggaggaagctcagtatcagagagaatacagtgaatttaaacgacagcagctggagctggatgatgagctgaagagtgttgaaaaccagatgcgttatgcccagacgcagctggataagctgaagaaaaccaacgtctttaatgcaaccttccacatctggcacagtggacagtttggcacaatcaataacttcaggctgggtcgcctgcccagtgttcccgtggaatggaatgagattaatgctgcttggggccagactgtgttgctgctccatgctctggccaataagatgggtctgaaatttcagagataccgacttgttccttacggaaaccattcatatctggagtctctgacagacaaatctaaggagctgccgttatactgttctggggggttgcggtttttctgggacaacaagtttgaccatgcaatggtggctttcctggactgtgtgcagcagttcaaagaagaggttgagaaaggcgagacacgtttttgtcttccctacaggatggatgtggagaaaggcaagattgaagacacaggaggcagtggcggctcctattccatcaaaacccagtttaactctgaggagcagtggacaaaagctctcaagttcatgctgacgaatcttaagtggggtcttgcttgggtgtcctcacaattttataacaaatgacttttttccttagggggaggtttgccttaaaggcttttaattttgttttgtttgcaaacatgttttaaattaaattcgggtaatattaaacagtacatgtttacaataccaaaaaagaaaaaatccacaaaagccactttattttaaaatatcatgtgacagatactttccagagctacaacatgccatctatagttgccagccctggtcagttttgattcttaaccccatggactcctttccctttcttctctgaaaaaaactaatttaaatttgcttttcttttttttaactgagttgaattgagattgatgtgttttcactggatttttatctctctcaacttcctgcacttaacaatatgaaatagaaacttttgtctttactgagatgaggatatgtttgagatgcacagttggataatgtgggaaaatgacatctaagctttacctggtcaccatgtgatgtgatcagatgcttgaaatttaacacttttcacttggttcttatactgaatgccgactctgctctgtgttagagatatgaaatggtgtttgatactgtttgagacattatggagagatttaattatttgtaataaaagatttgctgcagtctgaaaactg

SEQ ID NO: 111335 - DNA, 1569 bp, Homo sapiens
  Payload ID: 1802
  Gene Symbol: BECN1
  Gene Name: beclin 1, autophagy related
  ENST ID: ENST00000438274
  CDS Start-End: 136-975
ttttccggcggctaccgggaagtcgctgaagacagagcgatggtagttctggaggcctcgctccggggccgacccgaggccacagtgcctccgcggtagaccggacttgggtgacgggctccgggctcccgagggatggaagggtctaagacgtccaacaacagcaccatgcaggtgagcttcgtgtgccagcgctgcagccagcccctgaaactggacacgagtttcaagatcctggaccgtgtcaccatccaggaactcacagctccattacttaccacagcccaggcgaaaccaggagagacccaggaggaagagactaactcaggagaggagccatttattgaaactcctcgccaggatggtgtctctcgcagattcatccccccagccagacgctgtttggagatcttagagcaaatgaatgaggatgacagtgaacagttacagatggagctaaaggagctggcactagaggaggagaggctgatccaggagctggaagacgtggaaaagaaccgcaagatagtggcagaaaatctcgagaaggtccaggctgaggctgagagactggatcaggaggaagctcagtatcagagagaatacagtgaatttaaacgacagcagctggagctggatgatgagctgaagagtgttgaaaaccagatgcgttatgcccagacgcagctggataagctgaagaaaaccaacgtctttaatgcaaccttccacatctggcacagtggacagtttggcacaatcaataacttcaggctgggtcgcctgcccagtgttcccgtggaatggaatgagattaatgctgcttggggccagactgtgttgctgctccatgctctggccaataagatgggtctgaaatttcagagataccgacttgttccttacggaaaccattcatatctggagtctctgacagacaaatctaaggatggatgtggagaaaggcaagattgaagacacaggaggcagtggcggctcctattccatcaaaacccagtttaactctgaggagcagtggacaaaagctctcaagttcatgctgacgaatcttaagtggggtcttgcttgggtgtcctcacaattttataacaaatgacttttttccttagggggaggtttgccttaaaggcttttaattttgttttgtttgcaaacatgttttaaattaaattcgggtaatattaaacagtacatgtttacaataccaaaaaagaaaaaatccacaaaagccactttattttaaaatatcatgtgacagatactttccagagctacaacatgccatctatagttgccagccctggtcagttttgattcttaaccccatggactcctttccctttcttctctgaaaaaaactaatttaaatttgcttttcttttttttaactgagttgaattgagattgatgtgttttcactggatttttatctctctcaacttcctgcacttaacaatatgaaatagaaacttttgtctttactgagatgaggatatgtttgagatgcacagttggataatgtgggaaaatgacatctaagctttacct

SEQ ID NO: 111336 - DNA, 2087 bp, Homo sapiens
  Payload ID: 1802
  Gene Symbol: BECN1
  Gene Name: beclin 1, autophagy related
  Uniprot ID: Q14457
  ENST ID: ENST00000590099
  CDS Start-End: 112-1464
gctgaagacagagcgatggtagttctggaggcctcgctccggggccgacccgaggccacagtgcctccgcggtagaccggacttgggtgacgggctccgggctcccgagggatggaagggtctaagacgtccaacaacagcaccatgcaggtgagcttcgtgtgccagcgctgcagccagcccctgaaactggacacgagtttcaagatcctggaccgtgtcaccatccaggaactcacagctccattacttaccacagcccaggcgaaaccaggagagacccaggaggaagagactaactcaggagaggagccatttattgaaactcctcgccaggatggtgtctctcgcagattcatccccccagccaggatgatgtccacagaaagtgccaacagcttcactctgattggggaggcatctgatggcggcaccatggagaacctcagccgaagactgaaggtcactggggacctttttgacatcatgtcgggccagacagatgtggatcacccactctgtgaggaatgcacagatactcttttagaccagctggacactcagctcaacgtcactgaaaatgagtgtcagaactacaaacgctgtttggagatcttagagcaaatgaatgaggatgacagtgaacagttacagatggagctaaaggagctggcactagaggaggagaggctgatccaggagctggaagacgtggaaaagaaccgcaagatagtggcagaaaatctcgagaaggtccaggctgaggctgagagactggatcaggaggaagctcagtatcagagagaatacagtgaatttaaacgacagcagctggagctggatgatgagctgaagagtgttgaaaaccagatgcgttatgcccagacgcagctggataagctgaagaaaaccaacgtctttaatgcaaccttccacatctggcacagtggacagtttggcacaatcaataacttcaggctgggtcgcctgcccagtgttcccgtggaatggaatgagattaatgctgcttggggccagactgtgttgctgctccatgctctggccaataagatgggtctgaaatttcagagataccgacttgttccttacggaaaccattcatatctggagtctctgacagacaaatctaaggagctgccgttatactgttctggggggttgcggtttttctgggacaacaagtttgaccatgcaatggtggctttcctggactgtgtgcagcagttcaaagaagaggttgagaaaggcgagacacgtttttgtcttccctacaggatggatgtggagaaaggcaagattgaagacacaggaggcagtggcggctcctattccatcaaaacccagtttaactctgaggagcagtggacaaaagctctcaagttcatgctgacgaatcttaagtggggtcttgcttgggtgtcctcacaattttataacaaatgacttttttccttagggggaggtttgccttaaaggcttttaattttgttttgtttgcaaacatgttttaaattaaattcgggtaatattaaacagtacatgtttacaataccaaaaaagaaaaaatccacaaaagccactttattttaaaatatcatgtgacagatactttccagagctacaacatgccatctatagttgccagccctggtcagttttgattcttaaccccatggactcctttccctttcttctctgaaaaaaactaatttaaatttgcttttcttttttttaactgagttgaattgagattgatgtgttttcactggatttttatctctctcaacttcctgcacttaacaatatgaaatagaaacttttgtctttactgagatgaggatatgtttgagatgcacagttggataatgtgggaaaatgacatctaagctttacctggtcaccatgtgatgtgatcagatgcttgaaatttaacacttttcacttggttcttatactgaatgccgactctgctctgtgttagagatatgaaatggtgtttgatactgtttgagacattatggagagatttaattatttgtaataaaagatttgctgcagtctgaaaa

SEQ ID NO: 111337 - DNA, 559 bp, Homo sapiens
  Payload ID: 1802
  Gene Symbol: BECN1
  Gene Name: beclin 1, autophagy related
  ENST ID: ENST00000591085
  CDS Start-End: 136-366
ttttccggcggctaccgggaagtcgctgaagacagagcgatggtagttctggaggcctcgctccggggccgacccgaggccacagtgcctccgcggtagaccggacttgggtgacgggctccgggctcccgagggatggaagggtctaagacgtccaacaacagcaccatgcaggtgagcttcgtgtgccagcgctgcagccagcccctgaaactggacacgagtttcaagatcctggaccgtgtcaccatccaggaactcacaggtcagcgagacccttggaaagagggtggtcaagaatgtggaagctccattacttaccacagcccaggcgaaaccaggagagacccaggaggaagagactaactcaggagaggagccatttattgaaactcctcgccaggatggtgtctctcgcagattcatccccccagccaggatgatgtccacagaaagtgccaacagcttcactctgattggggaggcatctgatggcggcaccatggagaacctcagccgaagactgaaggtcactggggacctttttgacatcatgtcg

SEQ ID NO: 111338 - DNA, 524 bp, Homo sapiens
  Payload ID: 1802
  Gene Symbol: BECN1
  Gene Name: beclin 1, autophagy related
  ENST ID: ENST00000587880
  CDS Start-End: 1-168
ggaaaccattcatatctggagtctctgacagacaaatctaaggctgaagtgcaatggcatgatctcggcttactgcaacctccgcctcccgggttcaagcaattcccctgcctcagcctcctgagtatctgggattacaggcatgcaccaccacgcccggctaattaggagctgccgttatactgttctggggggttgcggtttttctgggacaacaagtttgaccatgcaatggtggctttcctggactgtgtgcagcagttcaaagaagaggttgagaaaggcgagacacgtttttgtcttccctacaggatggatgtggagaaaggcaagattgaagacacaggaggcagtggcggctcctattccatcaaaacccagtttaactctgaggagcagtggacaaaagctctcaagttcatgctgacgaatcttaagtggggtcttgcttgggtgtcctcacaattttataacaaatgacttttttccttagggggaggtttgccttaaaggcttttaatttt

SEQ ID NO: 111339 - DNA, 731 bp, Homo sapiens
  Payload ID: 1802
  Gene Symbol: BECN1
  Gene Name: beclin 1, autophagy related
  ENST ID: ENST00000586589
  CDS Start-End: 1-689
cgggccagacagatgtggatcacccactctgtgaggaatgcacagatactcttttagaccagctggacactcagctcaacgtcactgaaaatgagtgtcagaactacaaacgctgtttggagatcttagagcaaatgaatgaggatgacagtgaacagttacagatggagctaaaggagctggcactagaggaggagaggctgatccaggagctggaagacgtggaaaagaaccgcaagatagtggcagaaaatctcgagaaggtccaggctgaggctgagagactggatcaggaggaagctcagtatcagagagaatacagtgaatttaaacgacagcagctggagctggatgatgagctgaagagtgttgaaaaccagatgcgttatgcccagacgcagctggataagctgaagaaaaccaacgtctttaatgcaaccttccacatctggcacagtggacagtttggcacaatcaataacttcaggctgggtcgcctgcccagtgttcccgtggaatggaatgagattaatgctgcttggggccagactgtgttgctgctccatgctctggccaataagatgggtctgaaatttcagagataccgacttgttccttacggaaaccattcatatctggagtctctgacagacaaatctaaggatggatgtggagaaaggcaagattgaagacacaggaggcagtggcggctcctattccatcaaaaccca

SEQ ID NO: 111340 - DNA, 769 bp, Homo sapiens
  Payload ID: 1802
  Gene Symbol: BECN1
  Gene Name: beclin 1, autophagy related
  ENST ID: ENST00000588276
  CDS Start-End: 1-319
gcacagtggacagtttggcacaatcaataacttcaggctgggtcgcctgcccagtgttcccgtggaatggaatgagattaatgctgcttggggccagactgtgttgctgctccatgctctggccaataagatgggtctgaaatttcagaggatggatgtggagaaaggcaagattgaagacacaggaggcagtggcggctcctattccatcaaaacccagtttaactctgaggagcagtggacaaaagctctcaagttcatgctgacgaatcttaagtggggtcttgcttgggtgtcctcacaattttataacaaatgacttttttccttagggggaggtttgccttaaaggcttttaattttgttttgtttgcaaacatgttttaaattaaattcgggtaatattaaacagtacatgtttacaataccaaaaaagaaaaaatccacaaaagccactttattttaaaatatcatgtgacagatactttccagagctacaacatgccatctatagttgccagccctggtcagttttgattcttaaccccatggactcctttccctttcttctctgaaaaaaactaatttaaatttgcttttcttttttttaactgagttgaattgagattgatgtgttttcactggatttttatctctctcaacttcctgcacttaacaatatgaaatagaaacttttgtctttactgagatgaggatatgtttgagatgcacagttggataatgtgggaaaatgacatctaagctttac

SEQ ID NO: 111341 - DNA, 629 bp, Homo sapiens
  Payload ID: 1802
  Gene Symbol: BECN1
  Gene Name: beclin 1, autophagy related
  ENST ID: ENST00000593205
  CDS Start-End: 100-629
gcgatggtagttctggaggcctcgctccggggccgacccgaggccacagtgcctccgcggtagaccggacttgggtgacgggctccgggctcccgagggatggaagggtctaagacgtccaacaacagcaccatgcaggtgagcttcgtgtgccagcgctgcagccagcccctgaaactggacacgagtttcaagatcctggaccgtgtcaccatccaggaactcacagctccattacttaccacagcccaggcgaaaccaggagagacccaggaggaagagactaactcaggagaggagccatttattgaaactcctcgccaggatggtgtctctcgcagattcatccccccagccagacgctgtttggagatcttagagcaaatgaatgaggatgacagtgaacagttacagatggagctaaaggagctggcactagaggaggagaggctgatccaggagctggaagacgtggaaaagaaccgcaagatagtggcagaaaatctcgagaaggtccaggctgaggctgagagactggatcaggaggaagctcagcacagtggacagtttggcacaatcaataacttcaggctgggtcgcctgcccagtgttcccgtggaatggaatga

SEQ ID NO: 111342 - DNA, 561 bp, Homo sapiens
  Payload ID: 1802
  Gene Symbol: BECN1
  Gene Name: beclin 1, autophagy related
  ENST ID: ENST00000589636
  CDS Start-End: 384-561
gcgcagccgcgatgaggcatggctttggacgctcccagcggggttcacactgccggggtcaagtgtcgggtaggggtaaagtaaaaaggagagctgtggggaatggtgcgctgagaactgagcctccgagagactcggaaacggtgcggccctctctgttgtcccggaactcgccttcaccgaagggaccttctcagccgctgcactcccggggacaacgccgtcgcgccccaaagcccgttacttctctatgcgtttctgagatgttagggacagccaagcaggaagaaacgcaggactatgaagcagccacaccaggactaggtaccctctgtgctcttgctgttcccttggcctagaatgctcttccttaagatgcagggatggaagggtctaagacgtccaacaacagcaccatgcaggtgagcttcgtgtgccagcgctgcagccagcccctgaaactggacacgagtttcaagatcctggaccgtgtcaccatccaggaactcacagctccattacttaccacagcccaggcgaaaccaggagagacccaggagg

SEQ ID NO: 111343 - DNA, 489 bp, Homo sapiens
  Payload ID: 1802
  Gene Symbol: BECN1
  Gene Name: beclin 1, autophagy related
  ENST ID: ENST00000589663
  CDS Start-End: 1-399
ctcaacgtcactgaaaatgagtgtcagaactacaaacgctgtttggagatcttagagcaaatgaatgaggatgacagtgaacagttacagatggagctaaaggagctggcactagaggaggagaggctgatccaggagctggaagacgtggaaaagaaccgcaagatagtggcagaaaatctcgagaaggtccaggctgaggctgagagactggatcaggaggaagctcagatggatgtggagaaaggcaagattgaagacacaggaggcagtggcggctcctattccatcaaaacccagtttaactctgaggagcagtggacaaaagctctcaagttcatgctgacgaatcttaagtggggtcttgcttgggtgtcctcacaattttataacaaatgacttttttccttagggggaggtttgccttaaaggcttttaattttgttttgtttgcaaacatgttttaaattaaattcgggtaatattaaa

SEQ ID NO: 111344 - DNA, 570 bp, Homo sapiens
  Payload ID: 1802
  Gene Symbol: BECN1
  Gene Name: beclin 1, autophagy related
  ENST ID: ENST00000590852
  CDS Start-End: 1-218
atgcccagacgcagctggataagctgaagaaaaccaacgtctttaatgcaaccttccacatctggcacagtggacagtttggcacaatcaataacttcaggctgggtcgcctgcccagtgttcccgtggaatggaatgagattaatgctgcttggggccagactgtgttgctgctccatgctctggccaataagatgggtctgaaatttcagaggtaggaagtgtagccctttcttggggagtgatgtgcattgatataatttgtatctccaacctggtactgctgtccaccatgtcaggagcccttgctgcccacagactgggagttttctgtggctgaagagctgtcagcatctgattttcccctcatcacagggctctctccactgatcacacagtcactgagttgcgtgactatagcatagttcccagcctacagtccccagagccttagtgttcctcaggatattttcagtttttgtttcttaaatttaaaccaaaacataacatttgttcatggaaggcccccaggcaattatataataaatgtagtttgttcattaaacaaaa

SEQ ID NO: 111345 - DNA, 854 bp, Homo sapiens
  Payload ID: 1802
  Gene Symbol: BECN1
  Gene Name: beclin 1, autophagy related
  ENST ID: ENST00000590764
  CDS Start-End: 1-329
atgctgcttggggccagactgtgttgctgctccatgctctggccaataagatgggtctgaaatttcagaggagctgccgttatactgttctggggggttgcggtttttctgggacaacaagtttgaccatgcaatggtggctttcctggactgtgtgcagcagttcaaagaagaggttgagaaaggcgagacacgtttttgtcttccctacaggatggatgtggagaaaggcaagattgaagacacaggaggcagtggcggctcctattccatcaaaacccagtttaactctgaggagcagtggacaaaagctctcaagttcatgctgacgaatcttaagtggggtcttgcttgggtgtcctcacaattttataacaaatgacttttttccttagggggaggtttgccttaaaggcttttaattttgttttgtttgcaaacatgttttaaattaaattcgggtaatattaaacagtacatgtttacaataccaaaaaagaaaaaatccacaaaagccactttattttaaaatatcatgtgacagatactttccagagctacaacatgccatctatagttgccagccctggtcagttttgattcttaaccccatggactcctttccctttcttctctgaaaaaaactaatttaaatttgcttttcttttttttaactgagttgaattgagattgatgtgttttcactggatttttatctctctcaacttcctgcacttaacaatatgaaatagaaacttttgtctttactgagatgaggatatgtttgagatgcacagttggataatgtgggaaaatgacatctaagctttacctggtcaccatgtgatgtgatc

SEQ ID NO: 111346 - DNA, 559 bp, Homo sapiens
  Payload ID: 1802
  Gene Symbol: BECN1
  Gene Name: beclin 1, autophagy related
  ENST ID: ENST00000612631
  CDS Start-End: 500-559
atggctttggacgctcccagcggggttcacactgccggggtcaagtgtcgggtaggggtaaagtaaaaaggagagctgtggggaatggtgcgctgagaactgagcctccgagagactcggaaacggtgcggccctctctgttgtcccggaactcgccttcaccgaagggaccttctcagccgctgcactcccggggacaacgccgtcgcgccccagtaccctctgtgctcttgctgttcccttggcctagaatgctcttccttaagatgcagcccggcctctgggggccgctgccgggcctgtgagcctgtggaccaggagctcctgctgccgtcgtagcgtcacgtccggtctcgggcggaagttttccggcggctaccgggaagtcgctgaagacagagcgatggtagttctggaggcctcgctccggggccgacccgaggccacagtgcctccgcggtagaccggacttgggtgacgggctccgggctcccgagggatggaagggtctaagacgtccaacaacagcaccatgcaggtgagcttcgtgtgccagcgc

SEQ ID NO: 111347 - DNA, 1296 bp, Homo sapiens
  Payload ID: 1803
  Gene Symbol: BECN2
  Gene Name: beclin 2
  Uniprot ID: A8MW95
  ENST ID: ENST00000419583
  CDS Start-End: 1-1296
atgtcttccatccgcttcctgtgccagcgctgccaccaggccctgaagctgagcggctcctcggagtctaggagcctccctgcagccccggcgcccacctctgggcaggctgagcccggagacacccgggagcccggcgtcaccaccagggaggtgacagacgctgaggagcaacaggacggtgcctctagcagatcccctccaggcgatggcagtgtgtccaagggccatgccaacatcttcaccctgctgggggagcttggcgccatgcacatgctcagtagcatccagaaggcagctggtgacatttttgacatagtctctggccaagcagttgtggaccatcccctgtgtgaagaatgcaccgacagtcttttagagcagctggacatccagctcgctctcacagaagctgacagtcagaactaccaacgctgcctggagaccggggagctggcgaccagcgaggacgaggcggcggcgctgcgggcggagctgcgggacctggagctggaggaggccaggctggtgcaggagctggaggatgtggacaggaacaatgcaagagcagcggcggatctccaggcagcccaggcagaggctgcggagctggaccagcaggagaggcagcactacagggactacagtgccttgaagcggcagcagctggaactgcttgatcagctggggaacgtggagaaccagctgcagtatgccagggtccagagggaccggctgaaggaaatcaactgtttcaccgccacgtttgagatctgggtggagggccccttgggcgtcatcaataacttcaggttgggccgcctccccactgtccgtgtgggctggaatgagattaacactgcctggggacaggcggccttgctgctccttaccctggccaatacaattggactgcagtttcagaggtatcgactcatcccctgcggaaaccattcgtatctgaagtctttaacagatgaccgcactgagctgccgttgttctgttatggggggcaggatgttttcctcaataacaagtatgaccgcgcgatggtggccttcctggactgcatgcagcagttcaaggaagaggctgagaagggtgagctgggcctctctctgccctacgggatccaggtggagacaggcctgatggaggacgttggcggccgaggggaatgctattccatcagaacccatctgaacacgcaggagctgtggacaaaggcactcaagttcatgcttataaatttcaagtggagtctcatctgggttgcctcaaggtatcaaaagtag

SEQ ID NO: 111348 - DNA, 1938 bp, Homo sapiens
  Payload ID: 1804
  Gene Symbol: BEND2
  Gene Name: BEN domain containing 2
  Uniprot ID: Q8NDZ0
  ENST ID: ENST00000380030
  CDS Start-End: 1-1938
atgtcagagaggacccaggaacaggattttgttattataactgtcgacgacagtgatgataacaatgattgcagtattgagatggtggaagtttctgaaacagcagataattccactaatgacatagcagatgattccacttatgtcacagcagataatcccactgatgacacagccacacaaccaaattttccaggcggcaatgatggccatcaccgtccactccaaatgtcatatgggtctggctctgtcacccaggctggagtgcagtggcatgatcacagctcactgcagcctcaacctcttggactcaagcaattcttccacctcagccttcccagtagctgggatgacaggcgcacgccaccatgcccagtagcccatggtgaccaaatagtttcacagataaaccacccagtacatttaagaagatacagttacaactcagaggaagtggattttccaaaaagaggaagattctatactccagaggtacagtctagcatatcaccaccagcggaaaggcaggaaacccatgcctgggccagccctgctgtaacatctcttgagtcagcagcatgtcatgaactgcaggaagcagacctcagtgagagtttatcatatcccagaattgtctcctcaagttcattacagcagtatgtcgcacaaggtggctcatttccttgtttcggtatgccatggaactttatcagtggaggtgctgaaagtaccaatgctgtcatctcatttgccaatgctactacagcagtacctatggcagttctgtcacgaagagaatccagtctggcaaataaccctggtgtggtgaattactctgctctaccagaaaatgaaaatgtgggcccaggtagagccttgtcatctttctgcttccatcccaatttggaatctggcccacaaatgagttatgggacaatgagttactcaactgaaatgaaaaataactgtgaccaagatgatgcttcagcatctgcctgcctcactcccgattttgcactgttacctctgaatattttggtaaaagtagacaccaacacggaaaacagcgtcaacacaatgaatcgctcaactttattggacagtgacagtggccaggattcttcctcatcatctgtctgtatccctcccaagtatggctatcttggtgatccaaaaagaaatgtcagagtacttaaaatccatttgctggccgtacaaaatatggccaaacctaagcaagcagcctgctacttggttcgtattttgttctccaaggaaatcctgattagcagctcagtggatatccatttgaaagacagccaatccctcgacccgaacaaaatggctgcattgagagaatatctggcaacaacttttcccacctgtgatttgcatgaacatggaaaagactggcaggactgtatttctggtatcaattctatgatctactgtttatgttctgaaggcaagagtactccaaaaactgttcgcaaaaataaaaaacgtaccaaccgtgttgcatcggcatctgcagatagaaatgaccaaaggggcagagatggtggtgaaggctgttcttggatgtttcagccaatgaataactccaaaatgagagaaaagaggaacttgcagccaaacagtaatgctatccctgaaggaatgcgagaaccttccactgataatccagaggaacctggtgaagcatggagctattttggaagaccatggagaaatatacggatgccatgttcagtactgactttggcaaaaactaagtcttgcgcaagcctgtcggctagataccttattcagaaactcttcacaaaagatgtcctggtccaaagtaacgtctatggcaatctgaagcatggcctgtgtgcccttgaccccaataagattagtgctctccgaggtttgttacacatagagtatgtctga

SEQ ID NO: 111349 - DNA, 4611 bp, Homo sapiens
  Payload ID: 1804
  Gene Symbol: BEND2
  Gene Name: BEN domain containing 2
  Uniprot ID: Q8NDZ0
  ENST ID: ENST00000380033
  CDS Start-End: 134-2533
gtgcctcggacaacgagtgtacgcagttaccacacagttaccaagcagttacctcagagccgcggcgcagacgtaggcctcaggtctcgggcctcaggtctcgggcctcagagccagaccccgccatctcacgatgtcagagaggacccaggaacaggattttgttattataactgtcgacgacagtgatgataacaatgattgcagtattgagatggtggaagtttctgaaacagcagataattccactaatgacatagcagatgattccacttatgtcacagcagataatcccactgatgacacagccacacaaccaaattttccaggcggcaatgatggccatcaccgtccactccaaatgtcatatgggtctggctctgtcacccaggctggagtgcagtggcatgatcacagctcactgcagcctcaacctcttggactcaagcaattcttccacctcagccttcccagtagctgggatgacaggcgcacgccaccatgcccagtagcccatggtgaccaaatagtttcacagataaaccacccagtacatttaagaagatacagttacaactcagaggaagtggattttccaaaaagaggaagattctatactccagaggtacagtctagcatatcaccaccagcggaaaggcaggaaacccatgcctgggccagccctgctgtaacatctcttgagtcagcagcatgtcatgaactgcaggaagcagacctcagtgagagtttatcatatcccagaattgtctcctcaagttcattacagcagtatgtcgcacaaggtggctcatttccttgtttcggtatgccatggaactttatcagtggaggtgctgaaagtaccaatgctgtcatctcatttgccaatgctactacagcagtacctatggcagttctgtcacgaagagaatccagtctggcaaataaccctggtgtggtgaattactctgctctaccagaaaatgaaaatgtgggcccaggtagagccttgtcatctttctgcttccatcccaatttggaaatgccagaaagaccagcaaacagcagtaaaaacagcactgagacagcgaattatccaactttaatgggaaattacaatggccaaaatactgcctctttatctgtcttcatccctccctattttgctgagaaaattatacttactgaaatgccaggaacaacagaaaccaacgtggaaaataactctcagacagtgtattacccagctttatcgggaaatacgagtgccccatatccagcctcttcatatcttcccatcacttctaattttgaatctggcccacaaatgagttatgggacaatgagttactcaactgaaatgaaaaataactgtgaccaagatgatgcttcagcatctgcctgcctcactcccgattttgcactgttacctctgaatattttggtaaaagtagacaccaacacggaaaacagcgtcaacacaatgaatcgctcaactttattggacagtgacagtggccaggattcttcctcatcatctgtctgtatccctcccaagtatggctatcttggtgatccaaaaagaaatgtcagagtacttaaaatccatttgctggccgtacaaaatatggccaaacctaagcaagcagcctgctacttggttcgtattttgttctccaaggaaatcctgattagcagctcagtggatatccatttgaaagacagccaatccctcgacccgaacaaaatggctgcattgagagaatatctggcaacaacttttcccacctgtgatttgcatgaacatggaaaagactggcaggactgtatttctggtatcaattctatgatctactgtttatgttctgaaggcaagagtactccaaaaactgttcgcaaaaataaaaaacgtaccaaccgtgttgcatcggcatctgcagatagaaatgaccaaaggggcagagatggtggtgaaggctgttcttggatgtttcagccaatgaataactccaaaatgagagaaaagaggaacttgcagccaaacagtaatgctatccctgaaggaatgcgagaaccttccactgataatccagaggaacctggtgaagcatggagctattttggaagaccatggagaaatatacggatgccatgttcagtactgactttggcaaaaactaagtcttgcgcaagcctgtcggctagataccttattcagaaactcttcacaaaagatgtcctggtccaaagtaacgtctatggcaatctgaagcatggcctgtgtgcccttgaccccaataagattagtgctctccgagagttcctccaagaaaactacccaatttgtgatctctcggaaaatggaagagactggaagtcgtgtgtgacctccatcaacagcggtatccgtagccttagacatgacgtcagaagggctgaagccaggtctcagtcgcttccagcagtgacccctccagagctggagcaggagtcaaagccaggagatcccgacgccactgacccaagcacctgaacggcagctgccaaactttttttttttttttaactgttaagactattttgtaagtttctcaagttctaattccaaaatcagcctgctgtactggcagagtagtttgcattgacacctgtagtaatcgccaaacctctttttctgctcataaaggaggtagaatcacattaggaagatacgtaatgtttcatctgtggatttgatgacaacctctgattgagggaatggtagtaaactcctcatgggcttgtgacccatggctttgacttagataattgacattaatatactttgtttttttgataaggtagagaaagaaattcaatagaaagtaaggagccactcagtcaaataatataattcgtataaaacttgacaagtctttttatttttgtgacttgtgagatagtttaagatatttttatgtgaccaatttgtagaatgaatacatattttcaaagttatcttttcaaaattcaacttttagagtattttagcaaaatatatgtatagtttataatatagaagtatagctttataaagatattaaggatttattttttaaaataattctctgaatagtttgctgtagtagttgccttcagcttaataaaaccatagtacttctacatacatctttataagttaggctatgcctacaaaggtcttaaaaagtagataatttaccgggtgtagtggctcacacctgtaatcccagcactttgggaggccgagacgggtggatcacctgaggtcaggggttcgagaccagcctggccaacatgacgaaaccccatctctactaaaaatacaaaaaaagtagccaggcatggtggcaagcacctgtagtcccagttactcgggtggctgaggcaggagaatcacttgaacctgggaggtggagactgcagtgagccgagattgtgccactgcactcgagcctgggtgacagagtgagactccgtctcgggaaaagaaaaaaaagaagtagataattaaaaaaatcttgcataaaaaaaaatcttccataaagggcaaaaaggctttaacttccattattcagatttaatccaactaagatagtctttggcttcattcactgttcagtttcacaagttttttacaactactagtaacagagctaatacagaatagtaatccacattataaacatagatcaaaataccacatcataccccataaatacatgcagttattatttgtcaattaaaaataaaatttttttaaaagaaaagtacagttcgaccctaggcaagaagaaatttcaaattgtatatgcatattttgaatttggtttatattttgtggtatctgaaatattccctggactagaagcaaaaccacagaaacaaaactttacatttagaaaaaaatttcaagacttctattgctaactttattacattagtggtttttagaagttatttagagcagtcttgtctgatagaactttccaccatgatggaaatgtaaataaatataccacattaaaaatataaatttgcaatgtccaataggctcgtatggctattgagcatttaagatgtaattaattagacagaggaagtaaatttaacattttctctcattttagctaattagaatttaaagtgaaatagccacaagtggatagtggctactgtgttggatggcacagttcaaaatgcctcttatttataaaaaaaagtgtttaaaagtggttcccatggcttgaagaggaataatatacacataacttctttaaaatcacattttgtttgagatggagatcttgctatattgcccaggcttatctggaactcctgggctcaagagggaggatcacatttgactggacaaaatacattttataaaggtgttttgtattttatgttaaagtggaattgtgtcttcaaaattgtgtcttcaaaatttcacaagttaatactattactgtattagtccaatgttaaacattttaaatgcctgctcataagactcatttttgataaataaatgtatctttaatgttttgtttcccaaatagatacaataaataaacatttaaaatgccttaa

SEQ ID NO: 111350 - DNA, 6200 bp, Homo sapiens
  Payload ID: 1805
  Gene Symbol: BEND3
  Gene Name: BEN domain containing 3
  Uniprot ID: Q5T5X7
  ENST ID: ENST00000369042
  CDS Start-End: 192-2678
acacaaagagaggggaaaatacacggcgctcgcccgcccgccgcccccagcgcctccccgggccgccctggccaggccctccgcgcgcggcccccactccccggccccgcgccctcccccccacgtggcgcccaaactcggcgcgggcccgcccggcaaagtacagaactcgcgtcccagcggaatagaagatgaactcaactgaattcaccgaagatgtagaagaagttctaaaaagtatcactgtgaaagtggagacagaggctgaagatgctgctctggactgctccgtgaattccaggacttctgagaagcactctgtggacagcgtcctcactgccctgcaggactccagcaaacgaaagcagctggtcagcgatggcctgctagactctgtccccggcgtgaagaggaggcggctgatccccgaggctctcctagcaggcatgcggaaccgtgagaacagctcgccctgccaaggcaatggtgagcaggccggcaggggcaggagcctgggcaatgtgtggcctggagaggaggagccctgcaacgatgccaccaccccttcctacaagaagcctctgtatggcatctcgcacaagatcatggagaagaagaatcctccctcgggggacctgctaaacgtgtacgagctctttgagaaggcaaacgccagcaacagcccctcgtcactgcggctcctgaatgagccacagaagcgggactgtggcagcaccggggcaggcactgacaacgaccccaacatctacttcctgatccagaagatgttctacatgctgaacaccctcacgtccaacatgtcccagctgcacagcaaggtggacctgctctcccttgaggtgagccgcatcaagaagcaggtgagccccactgagatggtggccaaattccagccgccccctgagtaccagctcacagccgcagagctcaagcagatcgtggaccagagcctgtcagggggggacctggcctgccgcttgctggtgcagctcttccccgagctcttcagcgacgtggacttctcccggggctgcagtgcctgtggctttgcggccaagcgcaagctggagtcgctgcacctgcagctcatccgcaactatgtggaggtctactacccctcggtgaaggacacggctgtgtggcaggccgagtgcctgccccagctgaacgacttcttcagccgcttctgggcccagcgggaaatggaggacagccagcccagcggccaggtcgccagcttctttgaggcagagcaggtggaccccggccacttcctggacaacaaagaccaggaggaggccctgtctcttgaccggagcagcaccatcgcctcagaccacgtggtggacacgcaggacctcactgagttcctggacgaagcctcctcaccaggcgagtttgccgtcttcctcctccaccggctcttccccgagctcttcgaccaccgcaagctgggtgaacagtacagctgctacggggacggtggaaagcaggagctggacccgcagcggctgcagatcatccgcaactacacggagatctacttccctgacatgcaggaggaggaggcctggctgcagcagtgtgcccagcgcatcaacgacgagctcgagggcctggggctggacgcgggcagtgaaggcgaccccccgcgtgatgactgctacgactcctccagtctgcccgacgacatctcagtggtcaaggtggaggacagcttcgagggcgagcggccgggtcgccgctccaagaagatctggctggtgcccatcgacttcgacaagttagagatcccccagcctgacttcgaggtgcccggtgccgactgcctgctcagcaaggagcagctacgcagcatctacgagagcagcctgtccatcggcaacttcgcctcgcgcctgctggtgcacctgttccccgagctcttcacgcacgagaacctgcgcaagcagtacaactgcagcggctccctgggcaagaagcagctggacccctcccgcatcaagctcatccgccactacgtgcagctgctctacccacgcgccaaaaacgaccgcgtctggaccctggagttcgtgggcaaactggatgagcgctgccggcgccgggacacggagcaaaggcgctcctaccagcagcagcgcaaggtccacgtgccgggccctgagtgcagagacttgaccagctatgcaatcaaccccgagaggttccgggaggagtttgaggggcccccactgccccccgagaggagcagcaaggacttttgcaagatccccttggacgagctggtggtcccctcgcctgacttcccggtgccttctccctacctgctgtctgacaaggaggtgcgtgagatcgtgcagcagagcctctccgtgggcaactttgccgcccggctcctcgtccgcctgtttcccgaactcttcaccgccgagaacctccggctgcagtacaaccattccggggcttgcaacaagaagcaactggaccccacgcggctgcggctcatccgccactacgtggaagccgtctacccggtggagaagatggaggaggtgtggcactacgaatgtatccccagcatcgatgagaggtgccgccgccccaacaggaaaaaatgcgacatcctcaagaaagcaaagaaagtggagaagtgaaggcccgtgacctgcccagagattcggggtcaccagaggctgagcgatgggcacccttgggactgagcaatacttgggagcacgcctatggcatccacagacaggcaccttatgtccgtggggagtggcttactacatttgcacacgtaaacacccacccaaccgcaagaaagaagccttgagtttggtctcttgtacttacaacttctgtcctatgtgccccggcggggcagcctgagtgtggggagagcaagctgtgagggcagggaccagaggttaggggtcctctctccctggttgtgccctccccagcccctcacagcttataatgcaaacccagcaactctcttgcccctcttcccatattttacatcttccattttgacccatttttttttaattaaaaagaaacccttaaaaaaaatcattgggctctttgggggccattttacttagaaaaaaatctctttaaaagtgccatgttcgtgcacagtggctaatcatagcttcaggtggcatggatactgattttactgaccttgttttttacatctgattttggaagagtcaagatgccccttggatggcagtagaggggatggaatagtgcgaagtcctttacgaccacatgcaagttttcccttctgctctggtgccagggaaggcttccgttcagcttggcctgtccttcaggcgcgttggtagaatgttgtgtcactctttaggcgagaacactggatgatgatgatatgaatgtagacagccgtggaaacacgttcgcagtgtctccatctgagccgtgtccttccgctgcccccattccttctccatacatggttgctggttggagggagtggacatgtttccttggaaaacagtgcaggggcttttggcttcttgttagatttaagggtgggcctctttgagctcaccatgaactgtttacttttccgtgtgtgtatttgtacaaaatccaggttccgggagctttgtggtgacttccccagacctcagtgttagctactccaggcagtactacatcctcattcctcagggcgggcccaggtctgggcccctcttggggataccatgcattggaaggacacaggccattttagatggggtacacatgtcccttcccagggtccactcagaactttcctcttggactctctagaaggtcctgctgtcctatacctggccaccccctgccttggggggcacatgtcttcgttccctcccgactgggaatgtcaggctcctgcaggccagctgcatgctctccaggagcaccaactgggaaatcccctgacaggtaaagtcctttaaaatgatacttttacctacctaactctgggggccaaatgcttaagagggaaaggaaacagtcgaatgcaaacagtgtgtcataccagagtcctggaaaatttattgaatcacacagggtagtcatagaacccctgtgggatggcttaatattttgctactttaaaatgcagagataacagaaacaatctggattttcttcattcagctgataagaacttcagttccagtggctgtatgacataattttgcctgtacccaggagcattttttaaaatacaggattttaaaagcaatgttaagttgctgatctaactagtaaatttgctcctaagtgtcatttacagattatttctgttgaaactgcaaacagatttagaaaggcacagggactgaatgactctctgtcttacacagctactcatgcacacacgcactgcttactaaaagctgaagtgagatgaagggggcctacacgaataacaagttcaacttctttgtgcctggaaaggagggactggagcagccaggagactcactttcccccctcgcttgggcccttctctatgccttagtctctccagcacatgcacacagcatgcacacacacgcaccctacccaaagacagctgtggccctctcccaccacctcccccttcccaccgctggttgttgggggctggaggcgggaggtcccatggaatttgttctggtttctaggatgtaaacgaggactccaagccatgaattgccctgctttctagagggtggaatgttgaccctgcaactttagaagcacaatcatttattaataatttttttgaaactcccatctacccctgttagagaaatcaacaggttctaggaattaaatatgtctctttgtaacccagagcatgttcaatttttggaaaccgtatttcagtgattttcttaataccttacatgtgtagggcatcttcccccagaatcttacagtccctttctgtgaagagaagtggacacacgtgggaactctcaccatctctggactgtcgtcaggaaacgcctgcaggtccttgccctgtctgtatggtgtcctcacttctccatccatacaggtggctccagtgggcatttttttattttaaattttttacatgaagcaatagaagtacaaaatacttattttttcaaaatttaatgtgttccatgaaacctgttggcagtcgctttccttcccccacatctaaattctttggtttttagttgtttgttttttggatttttttttttttttttttggccttgtatcccaaggactaaaagattagcacagacacgttttgatgttgaatgaactagtaagtcacagtaggtggtagtcttcattgatttctctgtaagtttttaaagaatgtatgaagatagtcacgaatgtactgagtgttcgcatcccccttcagttcaccttggctgtgtctacaggacaacaaatgtttgacagggaataaagtcgtgtctggtgtcatttgcgctagcgtgcccctcccctttcggtgttggctccaaaccttcctttccttttatgtttgtggggagtggggaaccacatcagcagcaatcatcaaccaaccaaccaatgggatctacttagtggtgaatagattggctatttaattggtaaaagttgctggtctgaccacaccacagcatgaccactgggttcatttagagatggcctccgtttccaacgttccccacaaatgtttgcttctttcccagtcaagaggggatctcgagactcccgagtggaggtcgtgagcttgcaccccgcctggctgtgtagatcgactgtatagatacatgaagtgggggtgagggccaaggggctattactgctgttgggaaatacttgcctctcgtagatccagccttaatgtttttctgacatcctagtaatagcagaccctgcacaaagtggatatcagacttaatactgtgaggagacaaaataatgagaatagttttaccaaagataatgaaatctcgcatcatgtctgcattttaccatagattggagtgcatccttaggaaactgaatgtaacaaaaacccaggacatttttggaaattgtatgctctctagcaactttgtgtgaatttttatacaaacactgttttatgagttatataaaatgttataaaaatagaaaaa

SEQ ID NO: 111351 - DNA, 6654 bp, Homo sapiens
  Payload ID: 1805
  Gene Symbol: BEND3
  Gene Name: BEN domain containing 3
  Uniprot ID: Q5T5X7
  ENST ID: ENST00000429433
  CDS Start-End: 651-3137
atgggccccgccgccagggggcgcagcgctcccttcccggccgttccacggcggttcgcggttcccgctgcccaggagctggaggcgggcccggcgccttgggtgtgcacccgggctggcgcgaggcctggccggccggccgcaaagctgaagcctggggcgctcgccgctcctcgtgagcgctcctttccttctctatgataaacgtgatttcccacgcatgctttgcccttgcctcatccgtgagctgtgcaccaccgatttggaggcccttgtgtgcttgtttacctacgtctccctatgtagctattttaaacaaggtgtttttacagagataaaagttttattgattgctcaggtggtctttctggaagaattctgcacgtaaacgctaactcgacaagagtgccgggaggaacaaggttactcactagagttggaaatgtgcagttcatctccttaaagtaacttttgaatggttgaatacaaatagtaaacatgccacagggcagcgtggcatagtgccagaaagctacggttgcaggaaactgaggtttaatttttagaagtcaatgtcacctgtagcagagaagttccttgaaatcaaatcagacatatggcaattgtgaaaagattgaacggaatagaagatgaactcaactgaattcaccgaagatgtagaagaagttctaaaaagtatcactgtgaaagtggagacagaggctgaagatgctgctctggactgctccgtgaattccaggacttctgagaagcactctgtggacagcgtcctcactgccctgcaggactccagcaaacgaaagcagctggtcagcgatggcctgctagactctgtccccggcgtgaagaggaggcggctgatccccgaggctctcctagcaggcatgcggaaccgtgagaacagctcgccctgccaaggcaatggtgagcaggccggcaggggcaggagcctgggcaatgtgtggcctggagaggaggagccctgcaacgatgccaccaccccttcctacaagaagcctctgtatggcatctcgcacaagatcatggagaagaagaatcctccctcgggggacctgctaaacgtgtacgagctctttgagaaggcaaacgccagcaacagcccctcgtcactgcggctcctgaatgagccacagaagcgggactgtggcagcaccggggcaggcactgacaacgaccccaacatctacttcctgatccagaagatgttctacatgctgaacaccctcacgtccaacatgtcccagctgcacagcaaggtggacctgctctcccttgaggtgagccgcatcaagaagcaggtgagccccactgagatggtggccaaattccagccgccccctgagtaccagctcacagccgcagagctcaagcagatcgtggaccagagcctgtcagggggggacctggcctgccgcttgctggtgcagctcttccccgagctcttcagcgacgtggacttctcccggggctgcagtgcctgtggctttgcggccaagcgcaagctggagtcgctgcacctgcagctcatccgcaactatgtggaggtctactacccctcggtgaaggacacggctgtgtggcaggccgagtgcctgccccagctgaacgacttcttcagccgcttctgggcccagcgggaaatggaggacagccagcccagcggccaggtcgccagcttctttgaggcagagcaggtggaccccggccacttcctggacaacaaagaccaggaggaggccctgtctcttgaccggagcagcaccatcgcctcagaccacgtggtggacacgcaggacctcactgagttcctggacgaagcctcctcaccaggcgagtttgccgtcttcctcctccaccggctcttccccgagctcttcgaccaccgcaagctgggtgaacagtacagctgctacggggacggtggaaagcaggagctggacccgcagcggctgcagatcatccgcaactacacggagatctacttccctgacatgcaggaggaggaggcctggctgcagcagtgtgcccagcgcatcaacgacgagctcgagggcctggggctggacgcgggcagtgaaggcgaccccccgcgtgatgactgctacgactcctccagtctgcccgacgacatctcagtggtcaaggtggaggacagcttcgagggcgagcggccgggtcgccgctccaagaagatctggctggtgcccatcgacttcgacaagttagagatcccccagcctgacttcgaggtgcccggtgccgactgcctgctcagcaaggagcagctacgcagcatctacgagagcagcctgtccatcggcaacttcgcctcgcgcctgctggtgcacctgttccccgagctcttcacgcacgagaacctgcgcaagcagtacaactgcagcggctccctgggcaagaagcagctggacccctcccgcatcaagctcatccgccactacgtgcagctgctctacccacgcgccaaaaacgaccgcgtctggaccctggagttcgtgggcaaactggatgagcgctgccggcgccgggacacggagcaaaggcgctcctaccagcagcagcgcaaggtccacgtgccgggccctgagtgcagagacttgaccagctatgcaatcaaccccgagaggttccgggaggagtttgaggggcccccactgccccccgagaggagcagcaaggacttttgcaagatccccttggacgagctggtggtcccctcgcctgacttcccggtgccttctccctacctgctgtctgacaaggaggtgcgtgagatcgtgcagcagagcctctccgtgggcaactttgccgcccggctcctcgtccgcctgtttcccgaactcttcaccgccgagaacctccggctgcagtacaaccattccggggcttgcaacaagaagcaactggaccccacgcggctgcggctcatccgccactacgtggaagccgtctacccggtggagaagatggaggaggtgtggcactacgaatgtatccccagcatcgatgagaggtgccgccgccccaacaggaaaaaatgcgacatcctcaagaaagcaaagaaagtggagaagtgaaggcccgtgacctgcccagagattcggggtcaccagaggctgagcgatgggcacccttgggactgagcaatacttgggagcacgcctatggcatccacagacaggcaccttatgtccgtggggagtggcttactacatttgcacacgtaaacacccacccaaccgcaagaaagaagccttgagtttggtctcttgtacttacaacttctgtcctatgtgccccggcggggcagcctgagtgtggggagagcaagctgtgagggcagggaccagaggttaggggtcctctctccctggttgtgccctccccagcccctcacagcttataatgcaaacccagcaactctcttgcccctcttcccatattttacatcttccattttgacccatttttttttaattaaaaagaaacccttaaaaaaaatcattgggctctttgggggccattttacttagaaaaaaatctctttaaaagtgccatgttcgtgcacagtggctaatcatagcttcaggtggcatggatactgattttactgaccttgttttttacatctgattttggaagagtcaagatgccccttggatggcagtagaggggatggaatagtgcgaagtcctttacgaccacatgcaagttttcccttctgctctggtgccagggaaggcttccgttcagcttggcctgtccttcaggcgcgttggtagaatgttgtgtcactctttaggcgagaacactggatgatgatgatatgaatgtagacagccgtggaaacacgttcgcagtgtctccatctgagccgtgtccttccgctgcccccattccttctccatacatggttgctggttggagggagtggacatgtttccttggaaaacagtgcaggggcttttggcttcttgttagatttaagggtgggcctctttgagctcaccatgaactgtttacttttccgtgtgtgtatttgtacaaaatccaggttccgggagctttgtggtgacttccccagacctcagtgttagctactccaggcagtactacatcctcattcctcagggcgggcccaggtctgggcccctcttggggataccatgcattggaaggacacaggccattttagatggggtacacatgtcccttcccagggtccactcagaactttcctcttggactctctagaaggtcctgctgtcctatacctggccaccccctgccttggggggcacatgtcttcgttccctcccgactgggaatgtcaggctcctgcaggccagctgcatgctctccaggagcaccaactgggaaatcccctgacaggtaaagtcctttaaaatgatacttttacctacctaactctgggggccaaatgcttaagagggaaaggaaacagtcgaatgcaaacagtgtgtcataccagagtcctggaaaatttattgaatcacacagggtagtcatagaacccctgtgggatggcttaatattttgctactttaaaatgcagagataacagaaacaatctggattttcttcattcagctgataagaacttcagttccagtggctgtatgacataattttgcctgtacccaggagcattttttaaaatacaggattttaaaagcaatgttaagttgctgatctaactagtaaatttgctcctaagtgtcatttacagattatttctgttgaaactgcaaacagatttagaaaggcacagggactgaatgactctctgtcttacacagctactcatgcacacacgcactgcttactaaaagctgaagtgagatgaagggggcctacacgaataacaagttcaacttctttgtgcctggaaaggagggactggagcagccaggagactcactttcccccctcgcttgggcccttctctatgccttagtctctccagcacatgcacacagcatgcacacacacgcaccctacccaaagacagctgtggccctctcccaccacctcccccttcccaccgctggttgttgggggctggaggcgggaggtcccatggaatttgttctggtttctaggatgtaaacgaggactccaagccatgaattgccctgctttctagagggtggaatgttgaccctgcaactttagaagcacaatcatttattaataatttttttgaaactcccatctacccctgttagagaaatcaacaggttctaggaattaaatatgtctctttgtaacccagagcatgttcaatttttggaaaccgtatttcagtgattttcttaataccttacatgtgtagggcatcttcccccagaatcttacagtccctttctgtgaagagaagtggacacacgtgggaactctcaccatctctggactgtcgtcaggaaacgcctgcaggtccttgccctgtctgtatggtgtcctcacttctccatccatacaggtggctccagtgggcatttttttattttaaattttttacatgaagcaatagaagtacaaaatacttattttttcaaaatttaatgtgttccatgaaacctgttggcagtcgctttccttcccccacatctaaattctttggtttttagttgtttgttttttggatttttttttttttttttttggccttgtatcccaaggactaaaagattagcacagacacgttttgatgttgaatgaactagtaagtcacagtaggtggtagtcttcattgatttctctgtaagtttttaaagaatgtatgaagatagtcacgaatgtactgagtgttcgcatcccccttcagttcaccttggctgtgtctacaggacaacaaatgtttgacagggaataaagtcgtgtctggtgtcatttgcgctagcgtgcccctcccctttcggtgttggctccaaaccttcctttccttttatgtttgtggggagtggggaaccacatcagcagcaatcatcaaccaaccaaccaatgggatctacttagtggtgaatagattggctatttaattggtaaaagttgctggtctgaccacaccacagcatgaccactgggttcatttagagatggcctccgtttccaacgttccccacaaatgtttgcttctttcccagtcaagaggggatctcgagactcccgagtggaggtcgtgagcttgcaccccgcctggctgtgtagatcgactgtatagatacatgaagtgggggtgagggccaaggggctattactgctgttgggaaatacttgcctctcgtagatccagccttaatgtttttctgacatcctagtaatagcagaccctgcacaaagtggatatcagacttaatactgtgaggagacaaaataatgagaatagttttaccaaagataatgaaatctcgcatcatgtctgcattttaccatagattggagtgcatccttaggaaactgaatgtaacaaaaacccaggacatttttggaaattgtatgctctctagcaactttgtgtgaatttttatacaaacactgttttatgagttatataaaatgttataaaaatag

SEQ ID NO: 111352 - DNA, 8692 bp, Homo sapiens
  Payload ID: 1806
  Gene Symbol: BEND4
  Gene Name: BEN domain containing 4
  ENST ID: ENST00000504360
  CDS Start-End: 593-1906
gcgatgctcggggaaagcaggaccccaaagccccgtaaacaccgcgcgaccacccgggccaagatcttcaagaggttcttttcagaaggatcggagagcaattcccgattggtagaagaacttgctgtaatacacacgtactctgacgaccccgccccaacgactagcccctcctctgtgcaaccccgagagtttggggtcatgcagggggcgccacgagctcgtttcggaagccggaccccgcccgcagccgcagaagcctcgagtccacatctgggtctctaaagtctcgccgtagccagatcccggatccccaccttcttcaccagttcccgggcgtcctccaggcattggcgaggcagcctgtcaatcaggagctcgggcggcagccccccgcgcgggggctcggcgatgccagcctcagcgacaggcggcggcggcggcggccacggcacagacacacaccctcccacacgcgcgcaccagggcagacccggcgggcaggcggcggaggcaccctcggagcccggcgcccggcggggaggggacgtgctccgagggaccggccccgaggcgccggatggaggaagagatgcagccggcagaggaggggcccagcgtccccaaaatctacaagcagcgcagcccctacagcgtcctcaagacgttccccagcaagagaccggcgctggccaagcgctacgagcgacccaccctggtggagctgccgcacgtgcgggcgcccccgccgcccccgccgcccttcgcgccgcacgccgccgtctccatcagcagcagcgagccgccgccgcagcagttccaggcgcagagctcctacccccccgggcccggccgggccgccgccgccgcttcgtcgtcgtcgccgtcctgcacgcccgccacatcccagggccacttgaggactccggcgcagccgccgcccgcgtcccccgccgcctcctcgtcgtcttcgttcgccgctgtcgtcaggtatggcccaggcgcggcggcggccgccggcaccggcggcacgggtagcgacagcgccagcctggagctcagcgcagagagtcgaatgatcttggatgcctttgcccagcagtgcagtcgagttcttagcctcttaaattgtggaggaaaactcctggactccaaccattctcagtccatgatttcttgcgtaaagcaggaaggctcaagttacaacgaaagacaggagcactgtcacattgggaaaggggtccacagtcagacctcagacaatgtagacatagagatgcagtatatgcaaaggaaacaacaaacttctgcctttttgagggttttcactgactctctacaaaattacctgctctcgggaagctttccaactccaaacccctcgtcagccagtgaatatggccatctggccgacgtggatcctctgtcaacctctcctgtgcatacattaggtggctggacttccccagcaacgtccgaatcccatggccacccatcttcatctacactgccagaagaggaggaggaggaggacgaggaaggctattgtcctcgatgccaagagctggagcaggaggttatttcactgcaacaagaaaatgaagagctcagaaggaaattagagagcatcccagtgccctgccagaccgttttagattacttgaagatggttctgcagcaccacaaccaactcctgataccacagccagctgaccagccgacagagggaagcaagcagctgttgaacaactatcctgtctacataacgagcaaacagtgggatgaggctgtaaattcttcaaagaaagatgggagacggctccttcgatacctcatcagatttgttttcacaaccgatgagcttaagtactcatgcggccttgggaaaaggaaaagaattcattaggatgcattgtacctccaaccccgattggtggatgccctcggaagagcagataaacaaagtgttcagcgacgctgtcggtcacgcccgacaggggcgggcggtggggactttcctgcacaacggtggctcattttatgaagggatcgatcaccaggcttctcaggatgaagtcttcaataaaagttcccaggatggatctggggattagtggacagaatcttcctgttgtagcagctggtcctctcaagagttccaattgtgaatgtcctgttcctgtcacctgagagtccaaagcctgtcattctgccatagtctacacattctcagctgccacagtacccaaatagaaatccattttagggttgtttgggaagtctgtggcacctacaacagacttttggaatattatattataaaaagaaaaaactacatctgatttttaaatgattactagctagatcatgagggtgaaaaaataggtgagctcctagttacctttctgaaatcttcaaactctgctacctgggcagagatagtccccaaggtaggctggggtagtgtttctgcccatgggagaaggtggagacatggagttgtgttaagggacaagaagcaaacattctcttaattcaaataagttgtctttatgttttccaaagacttgacttcatatttctcggcaaagacataggatagatgacatcatataccattttgacattaataatgtctattactaaaaggaaaccagagaacagaggcaacatctgcagacagtgattaattacaggtcaactgtttttctgttgtttaaaaaccactgtgttgatcaagaaggcactatttgatctctggagtttacaaacagtagtcatttttcattgttagtcaagaaacatccaaagatccaaaaccattttcaaatgctcagttttgtaggttaataaatccgcagtttccatagccttaaatcaggctttgttgacacaatgccaaagtgatgggtagaacaatgaaaatttaaagcaattagttgtttggtgcactgaagaccaaacaagtggtgtgactgatggtattcgctgaattgactagatgttctggcattgtatacacacagcttcaaggcgattctgacaactatgcaatgggcttgtcagtaattgctctgaaatttgagggtctttctctgctgagctgatctttagaatttgtatgaaacttgtttcccattgtccttgatgaaaacatttcatcccctccgtgcctcctttaccccaatgtaccccttagctatggctaagtcagcactgtgccgctatcccctggttaatttgttgagttccatatgtgaaattagtggtatctttggaaactttccatattggcaaatgctatagaggtgctagagtcatcatttctgagggcttcctgtttggactcaggagaggctttctttaccaaactagtccagattactacattctttgtagagcaaagggctaaatggacagcgtttattgaaggctactaatgtcatctacagacatgaccaagggtttttgaaaattggttggagattcaggttaatgagcatccattgataaagggtttttgggctatttttgtcaacataaactcataaattgtcctttagatttaatatttagtttgtattcactatatacaaagtcctagaaacaggtctttctgtagcttttgtttattagcttttttgtattactagaattcatccattgaaaagtttaatgtttatggaggtggtcatctgtcagatctgctcaatgatgtagtgggcactaatatttcaatcctgttttgagaaaattaactaaaatttgtcatatcattcaatggaatagggagaaccaatattcaattctatttggggcaaattagctaaaatttggaagtaaaagaaatgatatgggcaaatgccatgttcttacggcagccatgagaccagtctctttggctctccaaggaagaaagatacctcttaaagcattttttagaggtccgagaagtcagtgtctgtcttataagattctttgacaacatgacatcttcgctagaagaaaaacaccaccatagcctcatctgtttttccatcttaccttaatttttcattggccttaagttgtccttactgctgaatacatcgttctgtttttctaaagcaacaatatttgatcactgcttttaagaaaaacagactagcccttcttgtttttctggaagtttgagagtcctgaatatttcttcatatccaaatatcatcttggagccctatcgtgctggtcttcgctgaggctgatgagagcactttctgcacccctgctccatggccgtacatgacaacgcacctgcaccactgctgcaagggcggggggcagcagcctgtgttttggctgtcactgttacctcctgagaaggctgctgtcccaggtttgcacaccacttttgttccaaagttacacatggtctcttcctccctcgcacccattccaggttaatcatttctctatcagctgtttctccatccacagattctgaatgttgagactaattgttgggcatctcttttgcacaaggctgacagactccatactcagcatcgcacagccagttctaactcctctgctgggtctcggacctacagcttttgcctgagtgaaatgttcctacgacttttgctcctgagtgagatattccattgtacttctactgtttgtgtatctgctgggttcctttagccaagcctagcgtctgacgcaggcactagccgccactgaggccgtgatacagcatcactgtggacactgctggctcctctccttgggacatatccacactgccccttgagcttcacctttaaggctggtatgtacgtaagttcacggtggtcgtctgcatggtctcctcttgtttaaatcaggaccaacaaaggatgttcatttgtattttggcaaggcccattgggcctctgtgtagccaggttaaaagctcactcactaggatcggatgctgtcattgctctgtgagcctttcagttgaaatccttggagacttgaaggtgttgcttattattttgatttgattttctgcatctttatctggcaaatggacagattgctctcacaagaaacttagtcatgtcagcttttagagtccttcttgagtcatgttagcattggtagtgtaaaatagattgagttaaaacagctcaggatgcagctgtgcccccacttaattggtgagaggaggaggtcacggggctggcttgacaacaaagactaaatgtggcttttttgtcggtgactaggtgtggtccataagcagaagagccatacctacaaaaagtgacaactgtcctgtgttttccaaattaaaatcttgttacaaagatcatgccggcttttcgcagtgagttgaagccccaagctcagttccagccaggctcaggatgaccctcaaatgatatgtattggatagtgtaggtcaggagcctgtggaggggaccagtattttgcaagcagttactaaagtcacatttctcactgactcttgacggtgcattgttcaaaatctcatggcttaaccttagtgttaaatgctttcaagaaaaactgtaaccatttcaattttacaagtactttctcattttacttgaacattttacaagtactttctgtatttacttgtaaatatttcctctagcccttgaacccgcgcatcacttttttggttttcctcattccaccacagcatttaggtgaccgttaccatttatgtttcattaagcttcactaggaatgtaaggataatattagagcatttgcagaaaattgttatctccttttgtaggggattcgagacatatttgtagctacttcacggctgtagagttagtgggtgatcgggtattctgcattgttccttatccctttgtcagtgacagacacattgacataagagattcctacaggattataaggagagataaattattaaccatttttttacttgatccaactactccatgtcccatcaactagtggtaactgatgttgataggattttttttaagtccagtaactattcttgcagtatcagatgtttaccccaaattaggcaataacccagacttcgaatctgtaggtttatgattcctacattcccctgccgctctcaatggcttgttgcctcccttctgttgctctcagaaaacagatggagatcaggtaaagatgaaacgtgcactatatgttcagaaaagcaaacatccattgtcctcatttagattccatccttcaatttatgctctagaacctaaacctaatacccattgactacctcctgagtttcttaggtttcaattatttttttgaaatgtcatccatggataatagcttcaattttaggaaagatttaaatgtataactttcctcattcagtgctgtgtcatttcacagtacagatctgcgttaatttttgacagctcatatatacagatttttagaaatgtaatagaaaatgattttgcacatatggtgcaagtcttgctggtgtatgtttaatgtggcaacacgtgccagaactgtttggcaaaacatgtcaaatggagtgcttgagtcagaactctaatgtaaatgtgtctaaacagcagtatgtatcattatgatgtatttttgtaaacatagtgatggctgctttcagtcatgtaagtgctggataaaaataaccacttcagttggagtaatgtaggaaaacgtcacccagcagatgggtagtcctctgcaaagttacactgtcagccagtggcactggttcttttatttatgttgggtttttgttttttttttagaggagagtgaagaattgacatcagacaacatggagtgcaaaaataataacccatcaatatttgccttctaaatgtaaaatgtaaaagtttaactgatctgtgtacacattagagaccactttcacacgccacaatatgttcagttgcaggttaacactgagaggttgagacttccctcatctgatgaccagcttggttaatttgacttctgaaggcactaaattaccaagtatttgcagtaatggggaccggattaattttcctcacaattctctatagctgtctgatataagggctgtgtttttattgaatcacagatcctcaaattacagtgaaagcatgtcttgctagtaagactcatttgaaaacctctttattcttggaataattgggccagtacaagtggccagatgtatcctggccacattggaaaactatttgggcccgttcagaaccacttaactgcaacaacagtagtaactatagttaatatctatctattgagttattgtgtgacagttacttggataagtactttaatgcattctcattttaatcctcacagctaccctatgaggctgttactgttcttatccccattgtattgataaggaaactgcccagggtactcagctaagaagaggattgctttgggcataggaagcagaatgacgagttcagtcttcctcagtagttggagcacagttctcaaagcccatcaacactttggaatggatttgttgttttatttatgccatcaagggagagttgatatttgtgtattgctaaaaactactaaagtatgtcgatgcttaggtaggaacatacaaaccatatatcctctgggatctgcccaggtttctgtataaggcttgacctacgtaagatcctatgatgaagaccagaaaactttttttaaaagtaggtaaattaaaattaaaatcacgagtttgttcacatttgtcccataggttcctagtgcaaaaatgcagggagataaaagcaaacatttgaactcagtgaagtgagagtctttgggaactcctagatgttagaaatagcaccggggcatcaggtagccaacgttcaattcacttttcacgtttgtgtctttgtagctttagagctgatgagtctgattggtttggaagagagagttttaatttatgatgtcactgtgagaactgttgtgaaaattttgtaagaaaatacagtaatctgttgattttttcctgtagttttggctttcacatccctttggctgtgtttaagttcaagagcatgccaaggccatgagggtcctggcttgcacttcttgggaacagggcatgctagaggtgggtcatgaagctttcaaggtcactgttccagcccgaccctgcgcaatttaggcattgcctttatgtctctcctctctggaacttcatgtagcagcctaacaccggggccgagttgcctttactctattttctatgatgaatacttgtggagaaactgtgacaaatccattgatcctgatatttttattgttggagtcttgttgattctctatgaataatttctatttgattgtactgtgtagagttaatacccactagggatatgttaataaagctacaaatgcatagtgtaatatagaatagcaagatttttttgtgaacaatttatatagaagagtaagttgttttttaagtgttaggctcatttcttttagaaacttaaaatgttataaaagttttttaaacattcaatatttttaattataagagacatttgttactagagccaattatttcaggtgttctaattggagtgttgattttattacctcatatacctctagaatgccacgtgttctgttggggataaaattgcacaataaatgtcaagtctctgtt

SEQ ID NO: 111353 - DNA, 8765 bp, Homo sapiens
  Payload ID: 1806
  Gene Symbol: BEND4
  Gene Name: BEN domain containing 4
  Uniprot ID: Q6ZU67
  ENST ID: ENST00000502486
  CDS Start-End: 581-2185
gcgatgctcggggaaagcaggaccccaaagccccgtaaacaccgcgcgaccacccgggccaagatcttcaagaggttcttttcagaaggatcggagagcaattcccgattggtagaagaacttgctgtaatacacacgtactctgacgaccccgccccaacgactagcccctcctctgtgcaaccccgagagtttggggtcatgcagggggcgccacgagctcgtttcggaagccggaccccgcccgcagccgcagaagcctcgagtccacatctgggtctctaaagtctcgccgtagccagatcccggatccccaccttcttcaccagttcccgggcgtcctccaggcattggcgaggcagcctgtcaatcaggagctcgggcggcagccccccgcgcgggggctcggcgatgccagcctcagcgacaggcggcggcggcggcggccacggcacagacacacaccctcccacacgcgcgcaccagggcagacccggcgggcaggcggcggaggcaccctcggagcccggcgcccggcggggaggggacgtgctccgagggaccggccccgaggcgccggatggaggaagagatgcagccggcagaggaggggcccagcgtccccaaaatctacaagcagcgcagcccctacagcgtcctcaagacgttccccagcaagagaccggcgctggccaagcgctacgagcgacccaccctggtggagctgccgcacgtgcgggcgcccccgccgcccccgccgcccttcgcgccgcacgccgccgtctccatcagcagcagcgagccgccgccgcagcagttccaggcgcagagctcctacccccccgggcccggccgggccgccgccgccgcttcgtcgtcgtcgccgtcctgcacgcccgccacatcccagggccacttgaggactccggcgcagccgccgcccgcgtcccccgccgcctcctcgtcgtcttcgttcgccgctgtcgtcaggtatggcccaggcgcggcggcggccgccggcaccggcggcacgggtagcgacagcgccagcctggagctcagcgcagagagtcgaatgatcttggatgcctttgcccagcagtgcagtcgagttcttagcctcttaaattgtggaggaaaactcctggactccaaccattctcagtccatgatttcttgcgtaaagcaggaaggctcaagttacaacgaaagacaggagcactgtcacattgggaaaggggtccacagtcagacctcagacaatgtagacatagagatgcagtatatgcaaaggaaacaacaaacttctgcctttttgagggttttcactgactctctacaaaattacctgctctcgggaagctttccaactccaaacccctcgtcagccagtgaatatggccatctggccgacgtggatcctctgtcaacctctcctgtgcatacattaggtggctggacttccccagcaacgtccgaatcccatggccacccatcttcatctacactgccagaagaggaggaggaggaggacgaggaaggctattgtcctcgatgccaagagctggagcaggaggttatttcactgcaacaagaaaatgaagagctcagaaggaaattagagagcatcccagtgccctgccagaccgttttagattacttgaagatggttctgcagcaccacaaccaactcctgataccacagccagctgaccagccgacagagggaagcaagcagctgttgaacaactatcctgtctacataacgagcaaacagtgggatgaggctgtaaattcttcaaagaaagatgggagacggctccttcgatacctcatcagatttgttttcacaaccgatgagcttaagtactcatgcggccttgggaaaaggaaaaggtcagtgcagtcaggagagacaggtcccgaaagacgccctctggatccagttaaagtaacatgcctccgagaattcattaggatgcattgtacctccaaccccgattggtggatgccctcggaagagcagataaacaaagtgttcagcgacgctgtcggtcacgcccgacaggggcgggcggtggggactttcctgcacaacggtggctcattttatgaagggatcgatcaccaggcttctcaggatgaagtcttcaataaaagttcccaggatggatctggggattagtggacagaatcttcctgttgtagcagctggtcctctcaagagttccaattgtgaatgtcctgttcctgtcacctgagagtccaaagcctgtcattctgccatagtctacacattctcagctgccacagtacccaaatagaaatccattttagggttgtttgggaagtctgtggcacctacaacagacttttggaatattatattataaaaagaaaaaactacatctgatttttaaatgattactagctagatcatgagggtgaaaaaataggtgagctcctagttacctttctgaaatcttcaaactctgctacctgggcagagatagtccccaaggtaggctggggtagtgtttctgcccatgggagaaggtggagacatggagttgtgttaagggacaagaagcaaacattctcttaattcaaataagttgtctttatgttttccaaagacttgacttcatatttctcggcaaagacataggatagatgacatcatataccattttgacattaataatgtctattactaaaaggaaaccagagaacagaggcaacatctgcagacagtgattaattacaggtcaactgtttttctgttgtttaaaaaccactgtgttgatcaagaaggcactatttgatctctggagtttacaaacagtagtcatttttcattgttagtcaagaaacatccaaagatccaaaaccattttcaaatgctcagttttgtaggttaataaatccgcagtttccatagccttaaatcaggctttgttgacacaatgccaaagtgatgggtagaacaatgaaaatttaaagcaattagttgtttggtgcactgaagaccaaacaagtggtgtgactgatggtattcgctgaattgactagatgttctggcattgtatacacacagcttcaaggcgattctgacaactatgcaatgggcttgtcagtaattgctctgaaatttgagggtctttctctgctgagctgatctttagaatttgtatgaaacttgtttcccattgtccttgatgaaaacatttcatcccctccgtgcctcctttaccccaatgtaccccttagctatggctaagtcagcactgtgccgctatcccctggttaatttgttgagttccatatgtgaaattagtggtatctttggaaactttccatattggcaaatgctatagaggtgctagagtcatcatttctgagggcttcctgtttggactcaggagaggctttctttaccaaactagtccagattactacattctttgtagagcaaagggctaaatggacagcgtttattgaaggctactaatgtcatctacagacatgaccaagggtttttgaaaattggttggagattcaggttaatgagcatccattgataaagggtttttgggctatttttgtcaacataaactcataaattgtcctttagatttaatatttagtttgtattcactatatacaaagtcctagaaacaggtctttctgtagcttttgtttattagcttttttgtattactagaattcatccattgaaaagtttaatgtttatggaggtggtcatctgtcagatctgctcaatgatgtagtgggcactaatatttcaatcctgttttgagaaaattaactaaaatttgtcatatcattcaatggaatagggagaaccaatattcaattctatttggggcaaattagctaaaatttggaagtaaaagaaatgatatgggcaaatgccatgttcttacggcagccatgagaccagtctctttggctctccaaggaagaaagatacctcttaaagcattttttagaggtccgagaagtcagtgtctgtcttataagattctttgacaacatgacatcttcgctagaagaaaaacaccaccatagcctcatctgtttttccatcttaccttaatttttcattggccttaagttgtccttactgctgaatacatcgttctgtttttctaaagcaacaatatttgatcactgcttttaagaaaaacagactagcccttcttgtttttctggaagtttgagagtcctgaatatttcttcatatccaaatatcatcttggagccctatcgtgctggtcttcgctgaggctgatgagagcactttctgcacccctgctccatggccgtacatgacaacgcacctgcaccactgctgcaagggcggggggcagcagcctgtgttttggctgtcactgttacctcctgagaaggctgctgtcccaggtttgcacaccacttttgttccaaagttacacatggtctcttcctccctcgcacccattccaggttaatcatttctctatcagctgtttctccatccacagattctgaatgttgagactaattgttgggcatctcttttgcacaaggctgacagactccatactcagcatcgcacagccagttctaactcctctgctgggtctcggacctacagcttttgcctgagtgaaatgttcctacgacttttgctcctgagtgagatattccattgtacttctactgtttgtgtatctgctgggttcctttagccaagcctagcgtctgacgcaggcactagccgccactgaggccgtgatacagcatcactgtggacactgctggctcctctccttgggacatatccacactgccccttgagcttcacctttaaggctggtatgtacgtaagttcacggtggtcgtctgcatggtctcctcttgtttaaatcaggaccaacaaaggatgttcatttgtattttggcaaggcccattgggcctctgtgtagccaggttaaaagctcactcactaggatcggatgctgtcattgctctgtgagcctttcagttgaaatccttggagacttgaaggtgttgcttattattttgatttgattttctgcatctttatctggcaaatggacagattgctctcacaagaaacttagtcatgtcagcttttagagtccttcttgagtcatgttagcattggtagtgtaaaatagattgagttaaaacagctcaggatgcagctgtgcccccacttaattggtgagaggaggaggtcacggggctggcttgacaacaaagactaaatgtggcttttttgtcggtgactaggtgtggtccataagcagaagagccatacctacaaaaagtgacaactgtcctgtgttttccaaattaaaatcttgttacaaagatcatgccggcttttcgcagtgagttgaagccccaagctcagttccagccaggctcaggatgaccctcaaatgatatgtattggatagtgtaggtcaggagcctgtggaggggaccagtattttgcaagcagttactaaagtcacatttctcactgactcttgacggtgcattgttcaaaatctcatggcttaaccttagtgttaaatgctttcaagaaaaactgtaaccatttcaattttacaagtactttctcattttacttgaacattttacaagtactttctgtatttacttgtaaatatttcctctagcccttgaacccgcgcatcacttttttggttttcctcattccaccacagcatttaggtgaccgttaccatttatgtttcattaagcttcactaggaatgtaaggataatattagagcatttgcagaaaattgttatctccttttgtaggggattcgagacatatttgtagctacttcacggctgtagagttagtgggtgatcgggtattctgcattgttccttatccctttgtcagtgacagacacattgacataagagattcctacaggattataaggagagataaattattaaccatttttttacttgatccaactactccatgtcccatcaactagtggtaactgatgttgataggattttttttaagtccagtaactattcttgcagtatcagatgtttaccccaaattaggcaataacccagacttcgaatctgtaggtttatgattcctacattcccctgccgctctcaatggcttgttgcctcccttctgttgctctcagaaaacagatggagatcaggtaaagatgaaacgtgcactatatgttcagaaaagcaaacatccattgtcctcatttagattccatccttcaatttatgctctagaacctaaacctaatacccattgactacctcctgagtttcttaggtttcaattatttttttgaaatgtcatccatggataatagcttcaattttaggaaagatttaaatgtataactttcctcattcagtgctgtgtcatttcacagtacagatctgcgttaatttttgacagctcatatatacagatttttagaaatgtaatagaaaatgattttgcacatatggtgcaagtcttgctggtgtatgtttaatgtggcaacacgtgccagaactgtttggcaaaacatgtcaaatggagtgcttgagtcagaactctaatgtaaatgtgtctaaacagcagtatgtatcattatgatgtatttttgtaaacatagtgatggctgctttcagtcatgtaagtgctggataaaaataaccacttcagttggagtaatgtaggaaaacgtcacccagcagatgggtagtcctctgcaaagttacactgtcagccagtggcactggttcttttatttatgttgggtttttgttttttttttagaggagagtgaagaattgacatcagacaacatggagtgcaaaaataataacccatcaatatttgccttctaaatgtaaaatgtaaaagtttaactgatctgtgtacacattagagaccactttcacacgccacaatatgttcagttgcaggttaacactgagaggttgagacttccctcatctgatgaccagcttggttaatttgacttctgaaggcactaaattaccaagtatttgcagtaatggggaccggattaattttcctcacaattctctatagctgtctgatataagggctgtgtttttattgaatcacagatcctcaaattacagtgaaagcatgtcttgctagtaagactcatttgaaaacctctttattcttggaataattgggccagtacaagtggccagatgtatcctggccacattggaaaactatttgggcccgttcagaaccacttaactgcaacaacagtagtaactatagttaatatctatctattgagttattgtgtgacagttacttggataagtactttaatgcattctcattttaatcctcacagctaccctatgaggctgttactgttcttatccccattgtattgataaggaaactgcccagggtactcagctaagaagaggattgctttgggcataggaagcagaatgacgagttcagtcttcctcagtagttggagcacagttctcaaagcccatcaacactttggaatggatttgttgttttatttatgccatcaagggagagttgatatttgtgtattgctaaaaactactaaagtatgtcgatgcttaggtaggaacatacaaaccatatatcctctgggatctgcccaggtttctgtataaggcttgacctacgtaagatcctatgatgaagaccagaaaactttttttaaaagtaggtaaattaaaattaaaatcacgagtttgttcacatttgtcccataggttcctagtgcaaaaatgcagggagataaaagcaaacatttgaactcagtgaagtgagagtctttgggaactcctagatgttagaaatagcaccggggcatcaggtagccaacgttcaattcacttttcacgtttgtgtctttgtagctttagagctgatgagtctgattggtttggaagagagagttttaatttatgatgtcactgtgagaactgttgtgaaaattttgtaagaaaatacagtaatctgttgattttttcctgtagttttggctttcacatccctttggctgtgtttaagttcaagagcatgccaaggccatgagggtcctggcttgcacttcttgggaacagggcatgctagaggtgggtcatgaagctttcaaggtcactgttccagcccgaccctgcgcaatttaggcattgcctttatgtctctcctctctggaacttcatgtagcagcctaacaccggggccgagttgcctttactctattttctatgatgaatacttgtggagaaactgtgacaaatccattgatcctgatatttttattgttggagtcttgttgattctctatgaataatttctatttgattgtactgtgtagagttaatacccactagggatatgttaataaagctacaaatgcatagtgtaatatagaatagcaagatttttttgtgaacaatttatatagaagagtaagttgttttttaagtgttaggctcatttcttttagaaacttaaaatgttataaaagttttttaaacattcaatatttttaattataagagacatttgttactagagccaattatttcaggtgttctaattggagtgttgattttattacctcatatacctctagaatgccacgtgttctgttggggataaaattgcacaataaatgtcaagtctctgttaa

SEQ ID NO: 111354 - DNA, 1348 bp, Homo sapiens
  Payload ID: 1806
  Gene Symbol: BEND4
  Gene Name: BEN domain containing 4
  ENST ID: ENST00000611697
  CDS Start-End: 53-1270
ggaggggacgtgctccgagggaccggccccgaggcgccggatggaggaagagatgcagccggcagaggaggggcccagcgtccccaaaatctacaagcagcgcagcccctacagcgtcctcaagacgttccccagcctggagctcagcgcagagagtcgaatgatcttggatgcctttgcccagcagtgcagtcgagttcttagcctcttaaattgtggaggaaaactcctggactccaaccattctcagtccatgatttcttgcgtaaagcaggaaggctcaagttacaacgaaagacaggagcactgtcacattgggaaaggggtccacagtcagacctcagacaatgtagacatagagatgcagtatatgcaaaggaaacaacaaacttctgcctttttgagggttttcactgactctctacaaaattacctgctctcgggaagctttccaactccaaacccctcgtcagccagtgaatatggccatctggccgacgtggatcctctgtcaacctctcctgtgcatacattaggtggctggacttccccagcaacgtccgaatcccatggccacccatcttcatctacactgccagaagaggaggaggaggaggacgaggaaggctattgtcctcgatgccaagagctggagcaggaggttatttcactgcaacaagaaaatgaagagctcagaaggaaattagagagcatcccagtgccctgccagaccgttttagattacttgaagatggttctgcagcaccacaaccaactcctgataccacagccagctgaccagccgacagagggaagcaagcagctgttgaacaactatcctgtctacataacgagcaaacagtgggatgaggctgtaaattcttcaaagaaagatgggagacggctccttcgatacctcatcagatttgttttcacaaccgatgagcttaagtactcatgcggccttgggaaaaggaaaaggtcagtgcagtcaggagagacaggtcccgaaagacgccctctggatccagttaaagtaacatgcctccgagaattcattaggatgcattgtacctccaaccccgattggtggatgccctcggaagagcagataaacaaagtgttcagcgacgctgtcggtcacgcccgacaggggcgggcggtggggactttcctgcacaacggtggctcattttatgaagggatcgatcaccaggcttctcaggatgaagtcttcaataaaagttcccaggatggatctggggattagtggacagaatcttcctgttgtagcagctggtcctctcaagagttccaattgtgaatgtcctgttcctgtcacctgaga

SEQ ID NO: 111355 - DNA, 1716 bp, Homo sapiens
  Payload ID: 1807
  Gene Symbol: BEND5
  Gene Name: BEN domain containing 5
  Uniprot ID: Q7L4P6
  ENST ID: ENST00000371833
  CDS Start-End: 88-1353
gagactcgcgccccccgccggatccccacctccgcgcccgccccgcgggctgagctgcccgaccggggcccgcccccggcgcccaccatgtacgcctttgtgcggttcctggaggacaacgtctgctacgcgctgcccgtgtcgtgcgtgcgcgacttcagcccccgctcgcggctggattttgacaaccagaaggtgtacgccgtgtaccggggcccggaggaattgggcgccgggcccgagagccccccgcgcgccccccgcgactggggcgcgctgttgctccacaaggcccagatcctggcgctggcagaagacaaatctgaccttgaaaacagtgtgatgcagaagaaaataaaaatccccaagctttctcttaatcatgtagaagaagatggagaggttaaagattatggggaagaagatttacagcttagacacatcaagagacctgaggggcggaagccgagcgaagtggcgcacaagagcatcgaggcagtggtggctcggctagagaagcagaacggcctgagcctgggccatagcacgtgtccggaagaggtcttcgtggaggcctcgccaggcacagaggacatggacagtctagaagatgctgtggtgccccgggctctgtatgaggagctgctgcgcaactaccagcagcaacaggaagagatgcgccacctccagcaggagctggagcggactcggaggcagctggtacaacaggccaagaagctcaaggagtacggggcacttgtgtctgaaatgaaggagctccgtgaccttaaccggaggctccaggacgtgctgctcctgcggcttggcagcggtcccgccattgatctggaaaaagtaaagtcagaatgtctcgagcccgagccggagttacggagcactttcagtgaggaagcaaatacgtcgtcctattaccccgctcctgcgcctgtcatggacaagtatatcctagacaatggcaaggtccatctgggaagcgggatttgggttgatgaggagaaatggcaccagctacaagtaacccaaggagattccaagtacacgaagaacttggcagttatgatttggggaacagatgttctgaaaaacagaagcgtcacaggcgtcgccacaaaaaaaaagaaagatgcagtccctaaaccacccctctcgcctcacaaactaagcatcgtcagagagtgtttgtatgacagaatagcacaagaaactgtggatgaaactgaaattgcacagagactctccaaagtcaacaagtacatctgtgaaaaaatcatggatatcaataaatcctgtaaaaatgaagaacgaagggaagcaaaatacaatttgcaataaactttggatttttcataaagctttcgtgttttccttgtgtggcatgtgatttgcgagcgatggtgccgtccaaatcagaccccaccgtgcatggtggtgtgtgtgcagggatccatcgggttctggggtcagcggcttgttctgaatgtggacactccaaagacgacagatggctttgctgagactcaggagcagcctggcactggtgtccttctgggaatggggaaaacactcttcttggagggggataaggttgcctgagttgcctgtcacttgactggggtttgaatggatatttttactatccaaggacttctttgttgctctattttgttctataataaattttcattaattctttga

SEQ ID NO: 111356 - DNA, 579 bp, Homo sapiens
  Payload ID: 1808
  Gene Symbol: BEND6
  Gene Name: BEN domain containing 6
  ENST ID: ENST00000370745
  CDS Start-End: 190-579
gctgacaggagcctcccggcggtgctaccctccacctcccacctccctgcgccccgccccgaggttggggctttgaagaatgcagccggggaaagcattaacttttgagctacgtccagaatagcatcatcttcatgggtattccctactcctaggatttcagaaaacctttgataactaattgagaaaatgcagaagatcgtgcagacagatgaaattaccaatacacaagcttttagaaaaggaaagaggaaaagaacagagacaatggactcagaaaatgcaaatagtgacatggataaaggacagagagacccatattcgggaaatgcctttctgcctggtgaaagctccagtgaggatgaagagcctttagcagaattgtcaaaggaagaattgtgcgccaaaataaaaagcctgaaagaaaaactaacaaacacccggaaagaaaacagccgacttcgacagtctttggtcatgcttcaaggaaacaaactagatataacaacagagaagaccattttacatggaggcatgaaaactttgaatgttgttaccacaagcagtcacccagtttga

SEQ ID NO: 111357 - DNA, 2379 bp, Homo sapiens
  Payload ID: 1808
  Gene Symbol: BEND6
  Gene Name: BEN domain containing 6
  Uniprot ID: Q5SZJ8
  ENST ID: ENST00000370746
  CDS Start-End: 270-1109
ctatccagcctccctcggccaaattgctgcggagcccgtcgtcagggggcgccaaggagccagggggaaaaccgagaggcgctgacaggagcctcccggcggtgctaccctccacctcccacctccctgcgccccgccccgaggttggggctttgaagaatgcagccggggaaagcattaacttttgagctacgtccagaatagcatcatcttcatgggtattccctactcctaggatttcagaaaacctttgataactaattgagaaaatgcagaagatcgtgcagacagatgaaattaccaatacacaagcttttagaaaaggaaagaggaaaagaacagagacaatggactcagaaaatgcaaatagtgacatggataaaggacagagagacccatattcgggaaatgcctttctgcctggtgaaagctccagtgaggatgaagagcctttagcagaattgtcaaaggaagaattgtgcgccaaaataaaaagcctgaaagaaaaactaacaaacacccggaaagaaaacagccgacttcgacagtctttggtcatgcttcaagtgttaccacaagcagtcacccagtttgaagaattggttggtatggccgaggctctgcttaagggtgggggaaccatgtctacatctgcatccaccctctggagagcaacaaacaactcctcgccagattcatttgcctcaacatgcagtaattctaattctaactccagttcaccagtttccttaaagcctgaggaagagcatcagactgatgagaaacagttccagattgaaaaatggcagattgcccgttgtaacaagagcaagcctcagaagtttattaatgatttaatgcaagtactttacacaaatgaatacatggccactcacagcctgacaggggcaaaatcctctacttcaagggacaaagctgtaaaaccagctatgaatcagaatgaagtccaagaaatcataggagtaacaaaacaattatttcccaatacggatgatgtttcaattaggagaatgatagggcaaaagctaaacaactgtaccaagaagccaaatttaagcaaaaatcttaactctcaggatattaaatagatccttttggtattacaggtatctgaaacaaagcaccttcaattctaaatctagcactggattttgttggagaatctgcagccttcctggcagtgagaaagacagacatgtgcagtgacaggctgtaagacatatgtaacattgctgagctctcctaagggaccaacaagcttgctgaagaagctgcatgtagattccaccctcagtactagtgatgcatcaaaccagagaatttctgccagtcaaataagcatgcaatatggtttctttggaaataagcatttcccaatccccaaatacccctctgtacagttaatctaacaggatagtcagagctcttatcatagcagccaaaacttcagcccataggttagtcattgtcctaaccaatcattgtacattgattattaccagtgacttcccattatagtttttggatctttagcataagcacatgcttgcaaaagtaaacagtgaaataattaatgttggcaaatatgagaacaacaaagtcagcccaaaatctgataatcatgtctaaccaagtaataatgttttagcaataaaattacaggattattctgttatctaaaaatgtataaaatgggaatatgaaaaaaatgacaacagcaagatgttttattttaatgttaagcaattccaccacacttctgaagaataaacctaagtttttgtgattgttaaaacaatgcatcaattttcagggaaatctttttgtttgtttatttaccagacatgttctaactttgtattgcccaaagtatattaaatacagatgtgtaatataaagcatcaatatcacctaacacatcgtatataagatataacatgatagatagttggtcgattacattgctatactgcttagttttaactggtttatttttattgtagcagaaatgaactgaaaaaaaatatgggtttgataatcacacacatgaaagtaccattttgtaactcaacaaaagataaaacattcttcatcaaaaggcttctcgcttggtgtcaggttgtcacatgtgaccactgtgcaatgcgaagccatacttcttcagtgcacaaagtcatgtttaaacttggaaaagaggatgctacagtagtttcaaagttcagtgttgtggacccaggaaattttccataagtcttgcttgataacaatgtgattgtacaaaataaatgttcttaaggaaacaacttatgtaacatttgctacctttatgtaaacataaataaatcccatttaaaagat

SEQ ID NO: 111358 - DNA, 3497 bp, Homo sapiens
  Payload ID: 1808
  Gene Symbol: BEND6
  Gene Name: BEN domain containing 6
  Uniprot ID: Q5SZJ8
  ENST ID: ENST00000370748
  CDS Start-End: 436-756
ggcagcgcgggcgcgcggacatggctgcggcggtttcggcggcgtccgcgggctgcacccgggcctgagagcccagcgccctcccgcggggccgcccgccagtccgcgccgtccgcgggtgcattggccgggtgcctctagcttcccggacacccggagcttccgcctatccagcctccctcggccaaattgctgcggagcccgtcgtcagggggcgccaaggagccagggggaaaaccgagaggcgctgacaggagcctcccggcggtgctaccctccacctcccacctccctgcgccccgccccgaggttggggctttgaagaatgcagccggggaaagcattaacttttgagctacgtccagaatagcatcatcttcatgggtattccctactcctaggatttcagaaaacctttgataactaattgagaaaatgcagaagatcgtgcagacagatgaaattaccaatacacaagcttttagaaaaggaaagaggaaaagaacagagacaatggactcagaaaatgcaaatagtgacatggataaaggacagagagacccatattcgggaaatgcctttctgcctggtgaaagctccagtgaggatgaagagcctttagcagaattgtcaaaggaagaattgtgcgccaaaataaaaagcctgaaagaaaaactaacaaacacccggaaagaaaacagccgacttcgacagtctttggtcatgcttcaagcttggtccagagagctgccttagactctccaatgaatgtgttcaaacagctgcctctgttaccttgactcatctcagatacgggtcctggtgctaggaatcaaagactgtctctattattttggcttgctccaggttgggcagaagcccatgcaaggctactactgatcatgtttcatttctagctttgatgtctgggcactgatttccctaggtttaactatttgctcaatgtcaaggcagtgctgtggaaatctgtctgtgtaactggagtgctatgcagacctgtctgtgtgactgtcatgcaggcctgtctgtgtgattgtcagggagaattggcctgccacaacttcactgcagcctgggtgacagacacagacaccatctcttaaaaaaagaaaaaagaaaaaaaaataggcaaatgatctgaacagatatttctcagtaagacatacaaatggccaacaggtatatgaaaaaaatgctcaacatcactgatcaccagggaaatgcgtatcaaaaccacagtgaggtaacatctcaccccaggaagtatggctattatcaaaaagacaaaaacaaaacaaattctagtgaagatgtggagaaaagcgaactctaatacactgtgggtatgaatgtaaaccagtgcagccactatggagacagcatcgttcacaatagataacatagggaatcaacttaagtgtccaacaacagatgaatagataaagaaaatgtggcatatatacacaatggaatattattcatccataaaacagaatgaaatcctgtcatttttggcaacagggatgatcattatgttaagtgaaataagcgaggaatagaaagttaaacactgcatgttctcatttgtatacggaagctaaaaagaaaaaggttaatctcatagaagtaaaaagtagaacagaggatacaagaggctggaaagggcagggggaagggaaaggtagggagagatttattaaaggatacaaaattacagctagatgggaagaataagttctaatgttcaatacccctgtgggattactatagttaacaatagtatatattttcaagtagctagaaggaggattttgaatgttcccaacataaaaaaatgataaatgtttgcagtaatagatatgctaattaccctgatctgacctttatacattatatgtatcaaaacatcattatttgccctatgaaaatgtataattaaaatattaaataaaatcaaattttaaaaaaggattttctaatatggttccctgagtagtcctagaaacaggaactcaatagccaagagcactcctagcaattagatgtgcccttgtaatatcattaaccattaaagggaacgatgactccttggataaatggctgattccatgtcttgcatacaaaatatacaaaatgagacttgtgaagaagcttgagcaggaaatatacaggaacatcttgtcatatcagaaagcaaggaagttagaccatgcagatgtgtcaactagaagagcttcccacaagccaaagatgggacagtttgagcatgaataagaatgacaaccacaatagatagacacatattgtattgatatatgtttaatgcatgagttcacagtggtattcaaaaaagaagaaaacgttatggtcatctgaaaacaaccaactcataattttgaaaattggcagatacaaaccaaaatcaagcgtgtatcctgccattactatatgaaatgaacttctgggtaaccaaacagttgataagaggaactttccctttgtagaactccagctaataaatgaagaaaataattagaatatcactattttgcaagccattgtgacataatgaatctatgcagtgaccatctgtagctggtaagatcacaaaaaagctaaccaggcattaaataccacctgatggaagttaaaacagtacctgaatccgatcaacccttcagatctaactaccaatctacatcaaatacagggaacaggagaatatgtcaaataccacctaaaggtgcaatcacagcaaaatccgactgtaggaaattctccaggacaaatgacccagtttctacaattaataaattgcaagggaaaaaactaggaagggagaggaaacctatagtttatatggaagagacagcaaccagttgtaatgtatagtccttactggatcttgattcgaacaaacttaaaaaataagaccatcagagaaatttgaacattgactaaggtttttttaaacgatattaaaaaactattgttaactatttctggctgcagtagtggtgttaacagttataattttaaatacaccttttagagatgcctacagaaatatttacagataaaaatgagatgatgcctgtgctttgcatcaaataatttgggggataaaggggatcagggtataagtggattgagacttgccatgaattgaaatgggagaatttgctatttttgtttctgtttaaaattttccattaaaagtttaaaaaatatatccaggaaaacagcctacttatgaaaagatatttaaattctacaaaattgttggtgaatatttaactgatctgagtgatgaatgagtaagtataaaataaatggataatatactaagaaaagactgctactttcaactaaaatgaaaatttaaattatgtgtgtttaaaatgttataaaattaaaagataaacactttgagaaaaatatttgcaactcaagaaaaataaaagattaaaatgctt

SEQ ID NO: 111359 - DNA, 2239 bp, Homo sapiens
  Payload ID: 1809
  Gene Symbol: BEND7
  Gene Name: BEN domain containing 7
  Uniprot ID: Q8N7W2
  ENST ID: ENST00000341083
  CDS Start-End: 298-1704
atcctagcattatatctacagagcagaggcaggacctttggcaggagacacatcccttctcctgtgatgtgtcagttagtgtagagaagcaagctggcatggacttgagagccggggtgatgtctccagcggcagcgtgtcatcctggaggacattgtgtcagcagtgaagccctgcatccctgccagtcatcctgaaggacattgtgtcagtagtgaagccctgcgtccctgccagtccaggctttcttccttgtccttgccccgcctggtgaagctgacagacagagatgaaagcatggaaataaaaaagcaaattacagggatgagaagattgctgaacgacagcactgggcggatctatcagcgagttggcaaagaaggagagaaactaaaagaagagccccaggacctggatttagtctggcctccacgtttgaactcctctgctgaggccccgcaaagcctccacccgtcttcacgtggtgtgtggaatgagctaccgccccagagtggacagttctcagggcagtatggcacccgttctagaaccttccaaagccagccccaccctaccacgagctccaatggagaacttccagtggtgaattcatcagctggatcaaactgctgtacttgtaactgccagtcaacgttgcaggccattctacaagaactcaagaccatgaggaaattaatgcaaattcaagcagttggaactcaaaacagacaacaacctccaatttcccttatatgctcccagcgaactgctgtctcacgaaagagaaataaaaagaaaaaagtgcccccaaagactgtggaacctcttactgtgaaacagaagcccagtgggtcagagatggagaaaaagtcggtggtggcctctgagctatctgctctccaggcagccgagcacacctccccggaggagagccgcgttctaggattcggcattgttctggaatcaccttcctcagatccagaagtacaacttgctgaaggctttgacgtgtttatgcctaaatctcagctggactctatattgtcaaactacactcgctcaggaagccttctgtttagaaaactggtgtgtgcgttttttgatgacaagactttggctaactccttacccaatgggaagaggaaaagaggactcaatgacaaccggaaaggactagaccaaaatattgtgggtgcaataaaagtcttcacagaaaagtactgtacagctaaccatgtggataagcttcctggcccaagagattgggtacagattctacaggatcaaattaaactggccagaagaaggttaaaaagaggctcagcagagatcgcggacagtgatgaaagactggacggcattgctctaccaccaacaggtgcttgtggtgggccctgcactgttctgccgggtgggagtgcagcggtgaccctagtcttgcagagctcacctcagacaatgtcacaagaaaagggacagatggcagaaccctgggaggagcagcatctcgtgctcctgaacaaccttaccagagacagagctgaaacaggagctttgtcccaaaccagccaagacttcaagcaccattcattcctcataactcaggtctcagctacacttcatcatcagagagggattcgcaactttcccacgccaggctcagccaagtctcttacccttcacatctcttgcctctctctctgaaattatcttgcttatttatgtgtgtgtgtatcacccatctttccactggaatctgagccttgtgatgtcaggctgttaagatttcaggccctggtgaaaacatgttcaggatgccctctctcccctttgcccagcaagagtggactgattaaagttggacctgaggtttccatgaatatgcaaccgagtcattctgacgacagtgagtcctggcctcccagtgctgccagttaccagaagtgactccccttctcccatcagcccaaacccagagcctttatcacagaacccaagattgagaggagggtcaggctggttggacagtggccttatcatgggatggatggatcaggagccttttacagcgctctcctttccgctgtatcccattgtcttagatcacgtggacttgccttttcccctaataccgccccctcagtgctcttctataattggagaaattgtgtcaatagatcgaccaaagagatgcaggttgtactccatgagaatttaataaacgctagcgattcaaagc

SEQ ID NO: 111360 - DNA, 1609 bp, Homo sapiens
  Payload ID: 1809
  Gene Symbol: BEND7
  Gene Name: BEN domain containing 7
  Uniprot ID: Q8N7W2
  ENST ID: ENST00000378605
  CDS Start-End: 97-1221
ggacctttggcaggagacacatcccttctcctgtgatgtgtcagttagtgtagagaagcaagctggcatggacttgagagccggggagatgaaagcatggaaataaaaaagcaaattacagggatgagaagattgctgaacgacagcactgggcggatctatcagcgagttggcaaagaaggagagaaactaaaagaagagccccaggacctggatttagtctggcctccacgtttgaactcctctgctgaggccccgcaaagcctccacccgtcttcacgtggtgtgtggaatgagctaccgccccagagtggacagttctcagggcagtatggcacccgttctagaaccttccaaagccagccccaccctaccacgagctccaatggtatggttgtcaacaaacattcagaaggctctcatgggggagaacttccagtggtgaattcatcagctggatcaaactgctgtacttgtaactgccagtcaacgttgcaggccattctacaagaactcaagaccatgaggaaattaatgcaaattcaagcagttggaactcaaaacagacaacaacctccaatttcccttatatgctcccagcgaactgctgtctcacgaaagagaaataaaaagaaaaaagtgcccccaaagactgtggaacctcttactgtgaaacagaagcccagtgggtcagagatggagaaaaagtcggtggtggcctctgagctatctgctctccaggcagccgagcacacctccccggaggagagccgcgttctaggattcggcattgttctggaatcaccttcctcagatccagaagtacaacttgctgaaggctttgacgtgtttatgcctaaatctcagctggactctatattgtcaaactacactcgctcaggaagccttctgtttagaaaactggtgtgtgcgttttttgatgacaagactttggctaactccttacccaatgggaagaggaaaagaggactcaatgacaaccggaaaggactagaccaaaatattgtgggtgcaataaaagtcttcacagaaaagtactgtacagctaaccatgtggataagcttcctggcccaagagattgggtacagattctacaggatcaaattaaactggccagaagaaggttaaaaagaggctcagagatcgcggacagtgatgaaagactggacggcattgctctaccaccaacagtggtctgatgaaggactgcaaaccacagctcttgtgttttttgcaccatgggttttaaaatccgtcctctgcctcccacaaggagctactacccaagggaagggagaagattaattggtgacctttcgccgtgttaaaataggatgagtatgttgctggtcaaggcagaaacgctaacttccaactgtggtctgttaagagatctgctgggaaccttcagaagcactgccttccaaggcggggccacagcttggggtgttcagcacttgaggacgggtggagcttgttcaacccaaagatgtgtgcgatgaacggatctacacactggaaatacgtatcaaaactgcaacagcaaaatcatattttgtaaattaaaattgtgtttacttactgtga

SEQ ID NO: 111361 - DNA, 6524 bp, Homo sapiens
  Payload ID: 1809
  Gene Symbol: BEND7
  Gene Name: BEN domain containing 7
  ENST ID: ENST00000440282
  CDS Start-End: 1-354
ctggactctatattgtcaaactacactcgctcaggaagccttctgtttagaaaactggtgtgtgcgttttttgatgacaagactttggctaactccttacccaatgggaagaggaaaagaggactcaatgacaaccggaaaggactagaccaaaatattgtgggtgcaataaaagtcttcacagaaaagtactgtacagctaaccatgtggataagcttcctggcccaagagattgggtacagattctacaggatcaaattaaactggccagaagaaggttaaaaagaggctcagagatcgcggacagtgatgaaagactggacggcattgctctaccaccaacaggtaaataaaacgcatttacattttcatcacctcctggaaaatacagcccacaaaactatttgcattgaaaacgattttaacattagacatgcagacacttgagcaaactgcttctgcagtggaccaggccccgtcattggagcttctcaaggccccgtactcagagatgtttttcatactgaatagaaaaacgtttttctcacactcttattttcataaaaatctcagaagagcaaatcctaagaactaagtatcataacattttgcctccccaaacctttggacattacaaaatatttttaacgtgaaatgagatttcaccttaaaacggggaccactaattttgtgtgatcaaattcatggctaggctgtcctctcccacctcctccaaacggccttggagccttgagcagtcaatcagtggacacccagtgaatactatgttttaactgagcgatttgaacaaggccagccatccggcgtgagtggcacattcctaataccaggaccagatcagctgaagatacccttccatggaagcatttgctgcacgctgttgtgttaagccatagacataattccaacttcatgttatttgactctcaagtaatgcttctgaccctggcttcctacctgtgtatgggttcatatctgagagccagaggggcaggtgtctgatcaatgagccttgtggaaaacaatgtatcccctccattggtcacaggactctactgacttccctccaaaggatatctgaagattctctgcccacaaaacccaggtacccccaaaaaccctcttactgaaaaggttcaaccgaatgttttttcctctagttttggggtggtctgtgttgattaaattcagcaaatattagtggagtctctaggttgtgtaggaacttgactaggccatgtattcattgacagcacatatcccaaaatggcaaggaaagccacattcgcaggcataggatgggcctgtgctagtgaacttcagagcttcagagcaacaggaaaattcagccgtgtaagagacacattgctttctctgccactgagtagctaagcaacagatcaatggacagataaatcaaatgagctacatagtgcaaaaagacctgcctacatcaagttcttcccatacagagtcattatataaaagagatttctgttcttctttggctgtgttttcacatttgtgaattaagagaattgaaatacgtgatctctgttgttccttcccaatttgtcattctctgaatatcagggcacgcatatcagcctcattcttatcacctgggcccaatcccagccgatccatgaaatcctaatcgtaatagacctagccttcagaaggcccttcaggggagcaccatgcctttctagctgtgcttcccaagtgccctcccaccctggccatctgcactgcctgtcctcctgtgtcatgtgacacagtgagcttttattatttgaaagccactccccttgaagtttatattcacccccaagtggtgagtacggaatgcctttgtattttcctatctgaagttggagatacgtttccagtgagaaaactgaggtcagagggtgctagaagagcctcatggaactgaaaaaaatgtcaaggaatctgagaatgagaaggaacttgagagatcctctagtccaatcccttctttttatccagtccttttattttacaggaaaaaaagcctgaggcccagaaacattaagtggctttcccacggcctcacagctggttgacggcctggccggaacccaggtccctcgactcccagccatgataccatatagctttctcatacctaagccaaagccagcttttctctgcatgtttcttaaagatcctaagagatgatggatgtgctaatccctttaggagtcctcttcactgtctcagtcttcacaattaaaatgttcgtcgtcagtcggcccggttcactgcagctgaaactcgtttcttccagtcttttctcaaactttacccaaggctgtgaggtcataatgaagaaaatagtataacacacttgcagatcttttcattaaactattgatagatatttgatacaaatcactaagcagcatgataaataaaaacgtttatcatttagaaaagaggaaaagaggccgggcgcggtggctcacacctgtaatcccagcactttgggaggccgaggcgggcggatcacaaggtcaggagatcgagaccatcctggctaacacggtgaaacccccgtctctactaaaaaatatataaaaaattagccaggcatggtggcgggcgcctgtagtcccagctactcaggaggctgaggcaggagaatggcgtgaacctgggaggcggagcttgcagtgagccgagatcgcgccactacactccagcttgggtgacagagcgagactccgtctcaaaaaaaagaaggaaaagaagtctcagattgatgctcaaattttgcagtaataatattaagtaatcttgatattcacctggatagcatgtctcttgattgcctccaaagtaaaatccccattctggttggcttctttgaatgcagtgctgctcctaacacccctcctcacatgtgccctttaaggactccacctttctcgcacatgtggtttcatccttgagcttgagcctcactggtcagaaccacaggatcgaccaagggctctgatacagactctcattatcccatttatctgagctagcaacagttagttctttttaaagattcaacaatgcttttattacttttttaaggtcttttttcctccttccaaagttgtgtatttgggggaagggcagggaaagggatgtaaatgcttaagtgtttctatgaaccagaagtgactagggtagggttacaggcaggtcaaatgacatttgtttggatgcattacatttaagcaaccttctgttcatcaggctttagcagaaatggattcaccttctgtagtgcatctattttagtttcccttaaccctattcactaagcctttttgagcaactaccaagaatcagccccgtgttgggtgctggtgtacaaatgccctcagactagtgtgagaggcagaaggaattacataaatgctatagcacagatgtgtggagagggtctggggctcaagaaaagccacccaggagctggggacaatttgcattaaaaaaaaaagtatagagaaagtgaaatcaaaacagtgctttctaaaatttaaaatggggcttccaaatttgaaatggggatgttcatctagacttagcaattgtcataaattggcattttacatacttttaaaaaattaataaaagtgtaaggaagaacatttcaattgcttttaccacccacagacaaccattattggatgatttttctcaaatgtttctccattttatttatttatacagtggagatcaaatatgtaaaattttgtttcctacatgtttttttgatttttacctaacaagcatttttccactctatggcaaatcttcatatgcattattttaatagctgcataatattctgttttgcaggtaaattatcttttaggccattttccatgactggacaatatgtggatatactctaatagtaacacacattcgtggcctttctcataaaaaatcattacaaatttccaatttctacaattgctcatggaggacaactaaagccttggctaaaaacttagcgacttaagtgtgaaacacagacacctccccagtaaattgtttacttgtccagaacgcccacctccagccatgtcacagaaccatgtacaactcttccttagagaagcggctctccgccttcattttcttgtctctgttgtaggtaatatatttgacaccaggagagaaaacacggaggacacagaaccaggtttcattgcctagactttgattttagtgacattgttgagtggcatatgtaacttccgtttgaatttccacaaagatccacgtagcatttcaggttcctgcaaagtgtgggtgttctgtcaagcttacctgtcatgtttgaatagtttcatatactttctttgtaatgtgtgataaccaagcctccaatctggtataagattttttaaatcatttttagggttgatttgttaccctttaaaagtccagcatatgattcagtgagttcattgtccattataaagaagtggttctctcttccctgttttcattcaaaacctcagtatgaatatagagctttgaaacgtatttattttaatgtaaattgcttagatgcagtataaaggagaatggctctttccagtgctgagagagcagttgtgaaggccaagattaattagaccttcatcatcttagaagatgaaaaagttgttttgggagataggatagctctgacctgtaagatgaaatcattcatgacgtcagtgccccccaaatagccatttgtaactgagtaagtgcaaatgacctatgagttcttaggaaagaaaaacctttcacctaagttgcgtcaacacaatgacaaaataactaattaaaaggtgagaaaaccagtaaattatctacatgatacctgacagccattttaacagatggtcttaacggagtgctacagggttttggcaccatgtggtaactagctaaaaatgtacttaatattatgtcatttatttggttcctagtatacttgccctccactttatataaaactaatttatgaaaatctggatttattttaaaaagatatcttgccatgaaggtatttgttttatagaaatatttacctccagatttctttctctaataagatggtgaatttaaaacactgtgttatttagaaacactgcatttacacttcatttattgtataaagcaaattgcattgaatcttcgccacttgacccaaaggccaaaaattggcatgagaacaatttggactacacatcaccaaacccggggttcacacctgtccactagcagttccagtgccttcccctagccctggatttggcaaagcacagaatgttaagagctaaaagttattgtagaggctactcagtcccacccgggaaactgaggatgaatgagggtaagcggttgcccagagcccgttaacccctccgtggctggggccctgcctagaacccgaatttcctgactaccctgtccaaggtattcatgtcacatcacactgaaacgctaaacctagagataggagaggccctctgggataaatccctgttccaccaaagaccagccagtcatcaaagatgagagaaggcatccctgtactgtaacaaaaagctggctttaggcgtggcttgtagaatcaatctaactactagacaagttacatctcatatatgtgtggcttctttttcttcttttggggggctacaaggaaggtttggagaaattatttccatcatacctttttgttagcctttttccatttctggccagtaagtaatcccgttcctgacaacagtccctttgttttctcaagtggtctgatgaaggactgcaaaccacagctcttgtgttttttgcaccatgggttttaaaatccgtcctctgcctcccacaaggagctactacccaagggaagggagaagattaattggtgacctttcgccgtgttaaaataggatgagtatgttgctggtcaaggcagaaacgctaacttccaactgtggtctgttaagagatctgctgggaaccttcagaagcactgccttccaaggcggggccacagcttggggtgttcagcacttgaggacgggtggagcttgttcaacccaaagatgtgtgcgatgaacggatctacacactggaaatacgtatcaaaactgcaacagcaaaatcatattttgtaaattaaaattgtgtttacttactgtgactactgttcagtctttattcagaaacctttttataggctttcttagcaaaaaaaaaatccatatctatggataatgtctcaatcttctgtatatatgttttattaatatgtaaatatttagattttttaaaattactatgttctttaaaaaagaattcaatgcaagcctggttgtgaaaatggtgtataacattgtgttgtggtatcaattcccaagatgctctttatgtctgatctggaagaatacaataaattactttaattgaa

SEQ ID NO: 111362 - DNA, 7483 bp, Homo sapiens
  Payload ID: 1810
  Gene Symbol: BZRAP1
  Gene Name: benzodiazepine receptor (peripheral) associated protein 1
  Uniprot ID: O95153
  ENST ID: ENST00000268893
  CDS Start-End: 841-6234
ctcgaggctcctggactgtaagggacccctgcagtccccagagcagaggccagcaggggctgagactatgaggcaagcagcccatcgacccaggcctccttaggaccagcccagccacccagcaagcgaaagagcagcagcagagagcagagccggagataaaggaccacagcggaccactggggatcacccccagcagctcctgaagcctctggccgggctgaggggttgcgacagacggccagacccacagacactgacagacacacaacgacaccgatgcacacagctgcacgacactgacacactcagatacaaccagggacagcatcacatactgccacagccctgcaatacagacacccacacacacacacacaaacaactggcaactctgaaatgggcagacagtgacacacagcaccacccccctcaacacacagaagtgggggcacccatcttcccaacacatgagacagcattgacctgcacggacagacctggagacacacacacgcaccctcacccaggcgcagctgtcggtggcctctgcacatcctccctacccccacagggacaccctcgctcctccacatactcgcgcacacacacagctaccagcaaacatagctcacatacccctggctccagctccagcagccctggcgccttctgcagcctcctttgtgggtggggaagagctcagccaaccttggatggagcgtcggtgaagcaagagctcagaggggagaggggctggcctggcatgaccctcgccagtccccccacctggctgggtgatgtcccccggcccgggttctggggccccttggcagtaccatggagcaactgacaaccctcccacggcctggggaccctggagccatggagccatgggcactgcccacctggcatagctggactccaggtcgagggggtgaacctagcagtgcagccccaagcatcgctgatactcctccggcagctctgcagcttcaagaactgaggtctgaggagagttccaagcccaaaggagacgggagctccaggcccgtggggggaactgaccctgaaggagcagaggcttgtctgcccagcctgggccagcaagcatccagctctggacccgcctgccagaggccagaggatgaggaagtggaggctttcctgaaggccaagctgaatatgagctttggggacaggcccaatctggagctgctgagggccctgggggagctgcggcagcgctgtgccatccttaaggaggaaaaccagatgctgaggaagagcagcttccctgagacagaagagaaggtgcggaggctgaagaggaagaacgccgagctggcggtcattgccaagcgcctggaggagagggcccgaaagctgcaggaaacgaacctgagggtggagggtccccagtggctccacgtgcgggacttcgatcggctgctgcgcgagtcccagcgggaggtgctgcggctgcagaggcagatcgcgctgcgcaaccagcgggagacgctcccgctcccgccgtcctggcccccgggccctgctctccaggccagagcaggggcgcctgctcccggggccccgggagaggccacgccccaggaggatgcggacaacctacccgtgattctaggggagccagagaaagagcagagggtgcagcagctggaatcggagctcagcaagaagcggaagaaatgcgagagcctggagcaggaagcccggaaaaagcagaggcgatgtgaggagctggaactgcagctgagacaagcgcagaatgagaatgcccgcctggtggaggagaactcccggctcagtgggagagccacagagaaggagcaggtggagtgggagaatgcggagctgaggggccagctcctgggggtgacacaggagagggactcagcccttcgcaagagccagggcctgcagagcaagctggagagcctggagcaagtgctgaagcacatgcgggaggtggcccagcggcggcagcagctggaggtggagcatgaacaggctcggctcagcctacgggagaagcaggaggaggtccggagactgcagcaggcccaggctgaagcccagagggaacatgaaggagccgtgcagctgctggagtctaccttggattccatgcaggcccgggttcgagagctcgaagaacagtgccgcagccaaaccgagcagttcagcctcctggcacaggaactccaggctttccgcctgcacccgggccccttggatctgctcacatctgccctggactgtgggagccttggagactgcccaccacccccctgctgctgctccattccccagccttgccgggggtctggccccaaagaccttgacctcccgccgggctcccctgggcgctgcaccccaaagtcttccgagcctgcccctgccactctcactggggtccctcgaaggacagccaagaaggcagagtctctctccaactcctcccactccgagtccatccacaacagccccaagtcatgccctacacctgaggtggacacagccagtgaggtagaggagctggaggcagacagtgtctccctgctcccagctgcgccagagggcagccggggaggagccaggatccaggtcttcctagcacgttatagctacaacccctttgagggtcccaatgagaatccagaagcagagcttccgctgacagctggcgagtacatctacatctatggcaacatggatgaggatggcttttttgaaggagagctcatggatggccgaaggggcctggtcccttccaattttgtagagcgtgtgtcggatgatgacctcctgacctccctccctccagagctggccgatttgtcccacagctcaggccctgaactcagtttcctgagtgtaggtgggggtggcagcagtagcgggggccaaagcagtgtgggaaggagccagcccagacctgaggaggaggatgcaggggacgagctcagtctgagcccatcaccggagggcctgggcgagcctcctgccgtgccttacccccgccgtctggtggtcctcaagcagctggcccacagcgtggtgctggcctgggagccgcctcctgagcaagtggagctacacggcttccatatctgtgtgaatggggagctgcgacaggccctggggcctggggcgccacccaaggccgtgctggagaacctggacctgtgggccgggccccttcacatttctgtccaggccctgactagccggggcagctctgacccactgcgctgttgcttggcggtgggtgcccgggccggagtggtgcccagccagctgcgggtccatcggttgacagccacatctgctgagatcacctgggtgcccggcaatagcaacttggcccatgccatctacctcaatggggaagagtgcccacctgccagccccagtacctactgggccaccttctgccacttacggcctggcacaccctatcaggcccaagtggaggctcagctcccaccccaagggccctgggaaccaggctgggagaggctggagcagcgggctgccaccctgcagttcaccacactcccagcaggcccacctgatgcccctctggatgtgcagatcgagcctgggccctcccctgggatcttgatcatcagttggctcccagtcaccatcgatgctgctggcacatccaacggtgtccgggtcacaggctatgccatctacgctgatgggcagaagatcatggaggtggcctcacccacggcaggcagtgtactggtggagttgtcccagctgcagctgctgcaggtgtgtcgtgaggtggtcgtgcgcaccatgtcgccccacggggagtcggcggactccatcccggctcctatcactcccgccctggctccggccagcctgccagcccgagtctcctgcccctcaccgcacccaagcccagaggccagagcgccccttgcttcagcctccccagggcctggagaccccagctctcctctccagcaccctgctccccttggaactcaagagcctccaggagcaccccctgcaagcccttccagagagatggcaaaagggtcccacgaggaccctccagcaccttgctcccaggaggaggctggggcagcagtgctgggcacctcagaggagaggacagccagcacatctaccctgggtgagaaggaccctggccccgcagctccctcactggccaagcaggaggccgagtggactgcaggagaggcctgtccggcctccagctccacccagggagcacgggcccagcaggcgccaaataccgagatgtgccaaggaggagacccagggtctgggctgaggcccagggctgagaaggaggacacagcagagcttggggttcatctggtgaactccctcgtggaccacggccgcaactcagacctgtcagacatccaggaggaagaggaagaggaggaggaggaggaggaagaggagctgggttccaggacttgctccttccagaagcaggttgctggcaacagcatcagggagaatggggccaagtcccagcccgaccccttttgtgagactgacagcgatgaggagatcttggagcagatcctggagctgcccctccagcagttctgtagcaagaagctctttagcatcccggaggaggaggaagaggaagaggaggacgaggaggaggagaagtcaggggcaggctgttcttcccgagaccctggcccgcctgaacctgcattgctggggctgggctgtgacagtggtcagccccgaagacctggccagtgtcccttgtctcctgagtcctccagggctggagactgcctggaagacatgcctggattagttggtggaagcagccggaggagaggagggggctcccctgagaagcccccaagccgcaggcggcctccagatccccgagaacactgcagccgacttctcagcaacaatgggccccaggcctctggacgactgggccccacacgggagaggggtggcctccccgtaattgagggccccaggactggactagaggctagcgggagaggccggctgggcccttcccggaggtgctcccgtggccgggcgctggagcctggcctggccagctgcctttcccccaagtgcttggaaatcagcattgaatatgattcggaggatgagcaggaggcgggcagcgggggcatcagcatcaccagctcctgctaccctggagatggggaggcctggggcacagcaactgtaggaaggcccagggggcctccgaaggccaattcaggccccaagccctacccacgcctcccagcctgggagaaaggggaaccagagcggagaggccgcagtgcgacgggcagagccaaggagccactctcccgggcaacagagaccggagaggccagagggcaggacggctctgggcggaggggcccccagaagagaggtgtccgagtcctcaggccaagcactgcagagctagtccctgcgaggagcccctcagaaacactggcttaccagcacctacccgtcaggatctttgtggctctgtttgactatgaccccgtgtcaatgtcgcccaatcctgatgctggagaagaagagcttcccttccgagagggtcagatcctgaaggtgtttggggacaaggatgccgatggcttctaccagggcgaaggtgggggccggacaggctacattccctgcaacatggtggctgaggtggctgtggacagccctgctgggagacagcaactgctccagcggggttatttgtccccagatattctccttgagggctcagggaatggtccgtttgtgtactccacagcccacacaactgggcctcctcccaagccccgccgctccaagaaagctgagtcggaaggccctgcccagccctgtccaggcccccctaagctggtcccctctgctgacctgaaagctccccactccatggtggctgcatttgactacaacccccaggagagttcccccaatatggacgtggaggcagagctgcccttccgggcaggggatgtcattactgtgtttgggggcatggacgatgacggtttctactatggggaattaaatggacaaaggggcctggttccatccaacttcctggagggccctgggcctgaggcaggcggcctggacagggaacccaggacaccccaggctgagagtcagagaacgaggaggagaagagtccagtgctagatggagatagatatatgtagagagagcaacatgactggggctgcaccacacaagggtccccagggcccccaggtgggccttgtacccccagctctggcagcgcccccaggattgaacgtggggagccccagggcagaagcgagaaggtgtggggtttcttctccaaggggaagcagctcctcaggaggctgggctctgggaagaaggagtgaagctgtggcccatcctgcaggcagaagaggccctgagaggcccccagatcactgtctctgctgagcagggaaggctcagactgggcccagagcccccgttcttctgcgttaacactgtggcattcagagggaatcaaagagccttggtgaaggtcagagctaaatggctccttaaggatgaactctctagagaagcaccttcctcctacaggaggggaaactgagcccacagtgagtatgtaacttgaccaaggtcactgagccaggactggacccaggaccctcgcgtcctggtccacccacctcgtctactagtgtcccacagtgctgcgctagtcccttctgccacccttcccagtcccaggacgggccctggagggagaaaggagcctgtgccccctgatggctctggctgtcctgatcctgtcttccctcccctgaaggaaagtttgcactggattttattggagccccatctccccagcgggcaggcgggcggagcctgtatatatgtatatactcagtgcctcagttcagcttcctccacctcgcttccactgcacaggcccaggaaggagaaaggccaagccaaagtgggccccaccctgcccccgtcgtgctccatccttccctgccggggcctgctggcccctgtaaggtcccgcccccaaagaccctggggccagcggggccgaaagcggagttgggtttgccttattttgctcattggattcaagttcttttgcatagttttcttctaacccctgttggagtccaggggctggagaaaaggacagatttatgcagctattttcatacattccctgttcagagtggggtaggggttctccgccgttacccgatccactccatcccccaccctctgaggggtgagtgtgtctttgcatgtttcctttgctgtggtgggagatagtttgactgaacccccaccttgaccttggtctccaggggtgtggaatggtgggggaatttgtttaaaaagacattttattataataaagtctattttcacaaaa

SEQ ID NO: 111363 - DNA, 5947 bp, Homo sapiens
  Payload ID: 1810
  Gene Symbol: BZRAP1
  Gene Name: benzodiazepine receptor (peripheral) associated protein 1
  Uniprot ID: O95153
  ENST ID: ENST00000343736
  CDS Start-End: 165-5738
agcctcctttgtgggtggggaagagctcagccaaccttggatggagcgtcggtgaagcaagagctcagaggggagaggggctggcctggcatgaccctcgccagtccccccacctggctgggtgatgtcccccggcccgggttctggggccccttggcagtaccatggagcaactgacaaccctcccacggcctggggaccctggagccatggagccatgggcactgcccacctggcatagctggactccaggtcgagggggtgaacctagcagtgcagccccaagcatcgctgatactcctccggcagctctgcagcttcaagaactgaggtctgaggagagttccaagcccaaaggagacgggagctccaggcccgtggggggaactgaccctgaaggagcagaggcttgtctgcccagcctgggccagcaagcatccagctctggacccgcctgccagaggccagaggatgaggaagtggaggctttcctgaaggccaagctgaatatgagctttggggacaggcccaatctggagctgctgagggccctgggggagctgcggcagcgctgtgccatccttaaggaggaaaaccagatgctgaggaagagcagcttccctgagacagaagagaaggtgcggaggctgaagaggaagaacgccgagctggcggtcattgccaagcgcctggaggagagggcccgaaagctgcaggaaacgaacctgagggtggtgagtgcccccttgccccggccggggaccagcttggagttgtgtcggaaggccctagcccgccagcgagcccgggacctcagtgagacagccagtgcactgctggccaaggacaagcagattgctgccttgcagcgggagtgcagggagctgcaggccaggctcactctggtgggcaaggagggtccccagtggctccacgtgcgggacttcgatcggctgctgcgcgagtcccagcgggaggtgctgcggctgcagaggcagatcgcgctgcgcaaccagcgggagacgctcccgctcccgccgtcctggcccccgggccctgctctccaggccagagcaggggcgcctgctcccggggccccgggagaggccacgccccaggaggatgcggacaacctacccgtgattctaggggagccagagaaagagcagagggtgcagcagctggaatcggagctcagcaagaagcggaagaaatgcgagagcctggagcaggaagcccggaaaaagcagaggcgatgtgaggagctggaactgcagctgagacaagcgcagaatgagaatgcccgcctggtggaggagaactcccggctcagtgggagagccacagagaaggagcaggtggagtgggagaatgcggagctgaggggccagctcctgggggtgacacaggagagggactcagcccttcgcaagagccagggcctgcagagcaagctggagagcctggagcaagtgctgaagcacatgcgggaggtggcccagcggcggcagcagctggaggtggagcatgaacaggctcggctcagcctacgggagaagcaggaggaggtccggagactgcagcaggcccaggctgaagcccagagggaacatgaaggagccgtgcagctgctggagtctaccttggattccatgcaggcccgggttcgagagctcgaagaacagtgccgcagccaaaccgagcagttcagcctcctggcacaggaactccaggctttccgcctgcacccgggccccttggatctgctcacatctgccctggactgtgggagccttggagactgcccaccacccccctgctgctgctccattccccagccttgccgggggtctggccccaaagaccttgacctcccgccgggctcccctgggcgctgcaccccaaagtcttccgagcctgcccctgccactctcactggggtccctcgaaggacagccaagaaggcagagtctctctccaactcctcccactccgagtccatccacaacagccccaagtcatgccctacacctgaggtggacacagccagtgaggtagaggagctggaggcagacagtgtctccctgctcccagctgcgccagagggcagccggggaggagccaggatccaggtcttcctagcacgttatagctacaacccctttgagggtcccaatgagaatccagaagcagagcttccgctgacagctggcgagtacatctacatctatggcaacatggatgaggatggcttttttgaaggagagctcatggatggccgaaggggcctggtcccttccaattttgtagagcgtgtgtcggatgatgacctcctgacctccctccctccagagctggccgatttgtcccacagctcaggccctgaactcagtttcctgagtgtaggtgggggtggcagcagtagcgggggccaaagcagtgtgggaaggagccagcccagacctgaggaggaggatgcaggggacgagctcagtctgagcccatcaccggagggcctgggcgagcctcctgccgtgccttacccccgccgtctggtggtcctcaagcagctggcccacagcgtggtgctggcctgggagccgcctcctgagcaagtggagctacacggcttccatatctgtgtgaatggggagctgcgacaggccctggggcctggggcgccacccaaggccgtgctggagaacctggacctgtgggccgggccccttcacatttctgtccaggccctgactagccggggcagctctgacccactgcgctgttgcttggcggtgggtgcccgggccggagtggtgcccagccagctgcgggtccatcggttgacagccacatctgctgagatcacctgggtgcccggcaatagcaacttggcccatgccatctacctcaatggggaagagtgcccacctgccagccccagtacctactgggccaccttctgccacttacggcctggcacaccctatcaggcccaagtggaggctcagctcccaccccaagggccctgggaaccaggctgggagaggctggagcagcgggctgccaccctgcagttcaccacactcccagcaggcccacctgatgcccctctggatgtgcagatcgagcctgggccctcccctgggatcttgatcatcagttggctcccagtcaccatcgatgctgctggcacatccaacggtgtccgggtcacaggctatgccatctacgctgatgggcagaagatcatggaggtggcctcacccacggcaggcagtgtactggtggagttgtcccagctgcagctgctgcaggtgtgtcgtgaggtggtcgtgcgcaccatgtcgccccacggggagtcggcggactccatcccggctcctatcactcccgccctggctccggccagcctgccagcccgagtctcctgcccctcaccgcacccaagcccagaggccagagcgccccttgcttcagcctccccagggcctggagaccccagctctcctctccagcaccctgctccccttggaactcaagagcctccaggagcaccccctgcaagcccttccagagagatggcaaaagggtcccacgaggaccctccagcaccttgctcccaggaggaggctggggcagcagtgctgggcacctcagaggagaggacagccagcacatctaccctgggtgagaaggaccctggccccgcagctccctcactggccaagcaggaggccgagtggactgcaggagaggcctgtccggcctccagctccacccagggagcacgggcccagcaggcgccaaataccgagatgtgccaaggaggagacccagggtctgggctgaggcccagggctgagaaggaggacacagcagagcttggggttcatctggtgaactccctcgtggaccacggccgcaactcagacctgtcagacatccaggaggaagaggaagaggaggaggaggaggaggaagaggagctgggttccaggacttgctccttccagaagcaggttgctggcaacagcatcagggagaatggggccaagtcccagcccgaccccttttgtgagactgacagcgatgaggagatcttggagcagatcctggagctgcccctccagcagttctgtagcaagaagctctttagcatcccggaggaggaggaagaggaagaggaggacgaggaggaggagaagtcaggggcaggctgttcttcccgagaccctggcccgcctgaacctgcattgctggggctgggctgtgacagtggtcagccccgaagacctggccagtgtcccttgtctcctgagtcctccagggctggagactgcctggaagacatgcctggattagttggtggaagcagccggaggagaggagggggctcccctgagaagcccccaagccgcaggcggcctccagatccccgagaacactgcagccgacttctcagcaacaatgggccccaggcctctggacgactgggccccacacgggagaggggtggcctccccgtaattgagggccccaggactggactagaggctagcgggagaggccggctgggcccttcccggaggtgctcccgtggccgggcgctggagcctggcctggccagctgcctttcccccaagtgcttggaaatcagcattgaatatgattcggaggatgagcaggaggcgggcagcgggggcatcagcatcaccagctcctgctaccctggagatggggaggcctggggcacagcaactgtaggaaggcccagggggcctccgaaggccaattcaggccccaagccctacccacgcctcccagcctgggagaaaggggaaccagagcggagaggccgcagtgcgacgggcagagccaaggagccactctcccgggcaacagagaccggagaggccagagggcaggacggctctgggcggaggggcccccagaagagaggtgtccgagtcctcaggccaagcactgcagagctagtccctgcgaggagcccctcagaaacactggcttaccagcacctacccgtcaggatctttgtggctctgtttgactatgaccccgtgtcaatgtcgcccaatcctgatgctggagaagaagagcttcccttccgagagggtcagatcctgaaggtgtttggggacaaggatgccgatggcttctaccagggcgaaggtgggggccggacaggctacattccctgcaacatggtggctgaggtggctgtggacagccctgctgggagacagcaactgctccagcggggttatttgtccccagatattctccttgagggctcagggaatggtccgtttgtgtactccacagcccacacaactgggcctcctcccaagccccgccgctccaagaaagctgagtcggaaggccctgcccagccctgtccaggcccccctaagctggtcccctctgctgacctgaaagctccccactccatggtggctgcatttgactacaacccccaggagagttcccccaatatggacgtggaggcagagctgcccttccgggcaggggatgtcattactgtgtttgggggcatggacgatgacggtttctactatggggaattaaatggacaaaggggcctggttccatccaacttcctggagggccctgggcctgaggcaggcggcctggacagggaacccaggacaccccaggctgagagtcagagaacgaggaggagaagagtccagtgctagatggagatagatatatgtagagagagcaacatgactggggctgcaccacacaagggtccccagggcccccaggtgggccttgtacccccagctctggcagcgcccccaggattgaacgtggggagccccagggcagaagcgagaaggtgtggggtttcttctccaaggggaagcagctcctcaggaggctgggctctgggaagaaggag

SEQ ID NO: 111364 - DNA, 1553 bp, Homo sapiens
  Payload ID: 1810
  Gene Symbol: BZRAP1
  Gene Name: benzodiazepine receptor (peripheral) associated protein 1
  ENST ID: ENST00000581675
  CDS Start-End: 1-516
cgccgctccaagaaagctgagtcggaaggccctgcccagccctgtccaggcccccctaagctggtcccctctgctgacctgaaagctccccactccatggtggctgcatttgactacaacccccaggagagttcccccaatatggacgtggaggcagagctgcccttccgggcaggggatgtcattactgtgtttgggggcatggacgatgacggtttctactatggggaattaaatggacaaaggggcctggttccatccaacttcctggagggccctgggcctgaggcaggcggcctggacagggaacccaggacaccccaggctgagagtcaggactggggctgcaccacacaagggtccccagggcccccaggtgggccttgtacccccagctctggcagcgcccccaggattgaacgtggggagccccagggcagaagcgagaaggtgtggggtttcttctccaaggggaagcagctcctcaggaggctgggctctgggaagaaggagtgaagctgtggcccatcctgcaggcagaagaggccctgagaggcccccagatcactgtctctgctgagcagggaaggctcagactgggcccagagcccccgttcttctgcgttaacactgtggcattcagagggaatcaaagagccttggtgaaggtcagagctaaatggctccttaaggatgaactctctagagaagcaccttcctcctacaggaggggaaactgagcccacagtgagtatgtaacttgaccaaggtcactgagccaggactggacccaggaccctcgcgtcctggtccacccacctcgtctactagtgtcccacagtgctgcgctagtcccttctgccacccttcccagtcccaggacgggccctggagggagaaaggagcctgtgccccctgatggctctggctgtcctgatcctgtcttccctcccctgaaggaaagtttgcactggattttattggagccccatctccccagcgggcaggcgggcggagcctgtatatatgtatatactcagtgcctcagttcagcttcctccacctcgcttccactgcacaggcccaggaaggagaaaggccaagccaaagtgggccccaccctgcccccgtcgtgctccatccttccctgccggggcctgctggcccctgtaaggtcccgcccccaaagaccctggggccagcggggccgaaagcggagttgggtttgccttattttgctcattggattcaagttcttttgcatagttttcttctaacccctgttggagtccaggggctggagaaaaggacagatttatgcagctattttcatacattccctgttcagagtggggtaggggttctccgccgttacccgatccactccatcccccaccctctgaggggtgagtgtgtctttgcatgtttcctttgctgtggtgggagatagtttgactgaacccccaccttgaccttggtctccaggggtgtggaatggtgggggaatttgtttaaaaagacattttattataataaagtctattttcacaaaa

SEQ ID NO: 111365 - DNA, 887 bp, Homo sapiens
  Payload ID: 1810
  Gene Symbol: BZRAP1
  Gene Name: benzodiazepine receptor (peripheral) associated protein 1
  ENST ID: ENST00000582679
  CDS Start-End: 1-887
ggcagcagtgctgggcacctcagaggagaggacagccagcacatctaccctgggtgagaaggaccctggccccgcagctccctcactggccaagcaggaggccgagtggactgcaggagaggcctgtccggcctccagctccacccagggagcacgggcccagcaggcgccaaataccgagatgtgccaaggaggagacccagggtctgggctgaggcccagggctgagaaggaggacacagcagagcttggggttcatctggtgaactccctcgtggaccacggccgcaactcagacctgtcagacatccaggaggaagaggaagaggaggaggaggaggaggaagaggagctgggttccaggacttgctccttccagaagcaggttgctggcaacagcatcagggagaatggggccaaggcaacagagaccggagaggccagagggcaggacggctctgggcggaggggcccccagaagagaggtgtccgagtcctcaggccaagcactgcagagctagtccctgcgaggagcccctcagaaacactggcttaccagcacctacccgtcaggatctttgtggctctgtttgactatgaccccgtgtcaatgtcgcccaatcctgatgctggagaagaagagcttcccttccgagagggtcagatcctgaaggtgtttggggacaaggatgccgatggcttctaccagggcgaaggtgggggccggacaggctacattccctgcaacatggtggctgaggtggctgtggacagccctgctgggagacagcaactgctccagcggggttatttgtccccagatattctccttgagggctcagcccacacaactgggcctcctcccaagccccgccgctccaagaaag

SEQ ID NO: 111366 - DNA, 809 bp, Homo sapiens
  Payload ID: 1810
  Gene Symbol: BZRAP1
  Gene Name: benzodiazepine receptor (peripheral) associated protein 1
  ENST ID: ENST00000580669
  CDS Start-End: 1-809
gagccaaggagccactctcccgggcaacagagaccggagaggccagagggcaggacggctctgggcggaggggcccccagaagagaggtgtccgagtcctcaggccaagcactgcagagctagtccctgcgaggagcccctcagaaacactggcttaccagcacctacccgtcaggatctttgtggctctgtttgactatgaccccgtgtcaatgtcgcccaatcctgatgctggagaagaagagcttcccttccgagagggtcagatcctgaaggtgtttggggacaaggatgccgatggcttctaccagggcgaaggtgggggccggacaggctacattccctgcaacatggtggctgaggtggctgtggacagccctgctgggagacagcaactgctccagcggggttatttgtccccagatattctccttgagggctcagcccacacaactgggcctcctcccaagccccgccgctccaagaaagctgagtcggaaggccctgcccagccctgtccaggcccccctaagctggtcccctctgctgacctgaaagctccccactccatggtggctgcatttgactacaacccccaggagagttcccccaatatggacgtggaggcagagctgcccttccgggcaggggatgtcattactgtgtttgggggcatggacgatgacggtttctactatggggaattaaatggacaaaggggcctggttccatccaacttcctggagggccctgggcctgaggcaggcggcctggacagggaacccaggacaccccaggctgagagtcag

SEQ ID NO: 111367 - DNA, 1364 bp, Homo sapiens
  Payload ID: 1811
  Gene Symbol: BSCL2
  Gene Name: Berardinelli-Seip congenital lipodystrophy 2 (seipin)
  Uniprot ID: Q96G97
  ENST ID: ENST00000278893
  CDS Start-End: 219-1082
acttccccgggagccggaagtcccgtctcacggttgccctggcagcgcgcgaggctggtgagtcggcagccctgtggcagccggcgggctggtttccatggttgcacgattaggaaccaccagctgctgcatcccatggccaggggtggcgtccaggtggcagagcagctaggaacgcaaggcctgaacctggggccagacaccctgctctcccggccatggtcaacgaccctccagtacctgccttactgtgggcccaggaggtgggccaagtcttggcaggccgtgcccgcaggctgctgctgcagtttggggtgctcttctgcaccatcctccttttgctctgggtgtctgtcttcctctatggctccttctactattcctatatgccgacagtcagccacctcagccctgtgcatttctactacaggaccgactgtgattcctccaccacctcactctgctccttccctgttgccaatgtctcgctgactaagggtggacgtgatcgggtgctgatgtatggacagccgtatcgtgttaccttagagcttgagctgccagagtcccctgtgaatcaagatttgggcatgttcttggtcaccatttcctgctacaccagaggtggccgaatcatctccacttcttcgcgttcggtgatgctgcattaccgctcagacctgctccagatgctggacacactggtcttctctagcctcctgctatttggctttgcagagcagaagcagctgctggaggtggaactctacgcagactatagagagaactcgtacgtgccgaccactggagcgatcattgagatccacagcaagcgcatccagctgtatggagcctacctccgcatccacgcgcacttcactgggctcaggttaacatccgaaaaagagacaattcccggaaggaagtccaacgaaggatctctgctcatcagccagggcctgaaggccaggaggagtcaactccgcaatcagatgttacagaggatggtgagagccctgaagatccctcagggacagagggtcagctgtccgaggaggagaaaccagatcagcagcccctgagcggagaagaggagctagagcctgaggccagtgatggttcaggctcctgggaagatgcagctttgctgacggaggccaacctgcctgctcctgctcctgcttctgcttctgcccctgtcctagagactctgggcagctctgaacctgctgggggtgctctccgacagcgccccacctgctctagttcctgaagaaaaggggcagactcctcacattccagcactttcccacctgactcctctcccctcgtttttccttcaataaactattttgtgtcagctt

SEQ ID NO: 111368 - DNA, 1712 bp, Homo sapiens
  Payload ID: 1811
  Gene Symbol: BSCL2
  Gene Name: Berardinelli-Seip congenital lipodystrophy 2 (seipin)
  ENST ID: ENST00000301781
  CDS Start-End: 324-1157
gaggccaaggccgactccccctctcaaatggcgtggtctgggcctatgacggcccctgcagtggagtctgtactggctgcgggggaccctgctcatttgaaaatctgacatcagctgggcagtcgcccccctcctcctttcctccctctactctgacacagcacttagcacctgaatcttcgtttctctcccagggaccctccattttccatatccaggaaaatgtgatgcgccacaggtatcagcgtctggatcgccacttcacgttttagccacaagtgactcagtggaagatccagagtcaacagaggctcgtcaggaagatgtctacagaaaaggtagaccaaaaggaggaagctggggaaaaagaggtgtgcggagaccagatcaaaggaccggacaaagaggaggaaccaccagctgctgcatcccatggccaggggtggcgtccaggtggcagagcagctaggaacgcaaggcctgaacctggggccagacaccctgctctcccggccatggtcaacgaccctccagtacctgccttactgtgggcccaggaggtgggccaagtcttggcaggccgtgcccgcaggctgctgctgcagtttggggtgctcttctgcaccatcctccttttgctctgggtgtctgtcttcctctatggctccttctactattcctatatgccgacagtcagccacctcagccctgtgcatttctactacaggaccgactgtgattcctccaccacctcactctgctccttccctgttgccaatgtctcgctgactaagggtggacgtgatcgggtgctgatgtatggacagccgtatcgtgttaccttagagcttgagctgccagagtcccctgtgaatcaagatttgggcatgttcttggtcaccatttcctgctacaccagaggtggccgaatcatctccacttcttcgcgttcggtaacctcctgctatttggctttgcagagcagaagcagctgctggaggtggaactctacgcagactatagagagaactcgtacgtgccgaccactggagcgatcattgagatccacagcaagcgcatccagctgtatggagcctacctccgcatccacgcgcacttcactgggctcagatacctgctatacaacttcccgatgacctgcgccttcataggtgttgccagcaacttcaccttcctcagcgtcatcgtgctcttcagctacatgcagtgggtgtgggggggcatctggccccgacaccgcttctctttgcaggttaacatccgaaaaagagacaattcccggaaggaagtccaacgaaggatctctgctcatcagccagggcctgaaggccaggaggagtcaactccgcaatcagatgttacagaggatggtgagagccctgaagatccctcagggacagagggtcagctgtccgaggaggagaaaccagatcagcagcccctgagcggagaagaggagctagagcctgaggccagtgatggttcaggctcctgggaagatgcagctttgctgacggaggccaacctgcctgctcctgctcctgcttctgcttctgcccctgtcctagagactctgggcagctctgaacctgctgggggtgctctccgacagcgccccacctgctctagttcctgaagaaaaggggcagactcctcacattccagcactttcccacctgactcctctcccc

SEQ ID NO: 111369 - DNA, 1683 bp, Homo sapiens
  Payload ID: 1811
  Gene Symbol: BSCL2
  Gene Name: Berardinelli-Seip congenital lipodystrophy 2 (seipin)
  Uniprot ID: Q96G97
  ENST ID: ENST00000360796
  CDS Start-End: 204-1592
agtcgcccccctcctcctttcctccctctactctgacacagcacttagcacctgaatcttcgtttctctcccagggaccctccattttccatatccaggaaaatgtgatgcgccacaggtatcagcgtctggatcgccacttcacgttttagccacaagtgactcagtggaagatccagagtcaacagaggctcgtcaggaagatgtctacagaaaaggtagaccaaaaggaggaagctggggaaaaagaggtgtgcggagaccagatcaaaggaccggacaaagaggaggaaccaccagctgctgcatcccatggccaggggtggcgtccaggtggcagagcagctaggaacgcaaggcctgaacctggggccagacaccctgctctcccggccatggtcaacgaccctccagtacctgccttactgtgggcccaggaggtgggccaagtcttggcaggccgtgcccgcaggctgctgctgcagtttggggtgctcttctgcaccatcctccttttgctctgggtgtctgtcttcctctatggctccttctactattcctatatgccgacagtcagccacctcagccctgtgcatttctactacaggaccgactgtgattcctccaccacctcactctgctccttccctgttgccaatgtctcgctgactaagggtggacgtgatcgggtgctgatgtatggacagccgtatcgtgttaccttagagcttgagctgccagagtcccctgtgaatcaagatttgggcatgttcttggtcaccatttcctgctacaccagaggtggccgaatcatctccacttcttcgcgttcggtgatgctgcattaccgctcagacctgctccagatgctggacacactggtcttctctagcctcctgctatttggctttgcagagcagaagcagctgctggaggtggaactctacgcagactatagagagaactcgtacgtgccgaccactggagcgatcattgagatccacagcaagcgcatccagctgtatggagcctacctccgcatccacgcgcacttcactgggctcagatacctgctatacaacttcccgatgacctgcgccttcataggtgttgccagcaacttcaccttcctcagcgtcatcgtgctcttcagctacatgcagtgggtgtgggggggcatctggccccgacaccgcttctctttgcaggttaacatccgaaaaagagacaattcccggaaggaagtccaacgaaggatctctgctcatcagccagggcctgaaggccaggaggagtcaactccgcaatcagatgttacagaggatggtgagagccctgaagatccctcagggacagagggtcagctgtccgaggaggagaaaccagatcagcagcccctgagcggagaagaggagctagagcctgaggccagtgatggttcaggctcctgggaagatgcagctttgctgacggaggccaacctgcctgctcctgctcctgcttctgcttctgcccctgtcctagagactctgggcagctctgaacctgctgggggtgctctccgacagcgccccacctgctctagttcctgaagaaaaggggcagactcctcacattccagcactttcccacctgactcctctcccctcgtttttccttcaataaactattttgtgtcagctt

SEQ ID NO: 111370 - DNA, 1516 bp, Homo sapiens
  Payload ID: 1811
  Gene Symbol: BSCL2
  Gene Name: Berardinelli-Seip congenital lipodystrophy 2 (seipin)
  Uniprot ID: Q96G97
  ENST ID: ENST00000407022
  CDS Start-End: 248-1444
tacaaaagcggccggcggagaggggcgggacttccccgggagccggaagtcccgtctcacggttgccctggcagcgcgcgaggctggtgagtcggcagccctgtggcagccggcgggctggtttccatggttgcacgattaggaaccaccagctgctgcatcccatggccaggggtggcgtccaggtggcagagcagctaggaacgcaaggcctgaacctggggccagacaccctgctctcccggccatggtcaacgaccctccagtacctgccttactgtgggcccaggaggtgggccaagtcttggcaggccgtgcccgcaggctgctgctgcagtttggggtgctcttctgcaccatcctccttttgctctgggtgtctgtcttcctctatggctccttctactattcctatatgccgacagtcagccacctcagccctgtgcatttctactacaggaccgactgtgattcctccaccacctcactctgctccttccctgttgccaatgtctcgctgactaagggtggacgtgatcgggtgctgatgtatggacagccgtatcgtgttaccttagagcttgagctgccagagtcccctgtgaatcaagatttgggcatgttcttggtcaccatttcctgctacaccagaggtggccgaatcatctccacttcttcgcgttcggtgatgctgcattaccgctcagacctgctccagatgctggacacactggtcttctctagcctcctgctatttggctttgcagagcagaagcagctgctggaggtggaactctacgcagactatagagagaactcgtacgtgccgaccactggagcgatcattgagatccacagcaagcgcatccagctgtatggagcctacctccgcatccacgcgcacttcactgggctcagatacctgctatacaacttcccgatgacctgcgccttcataggtgttgccagcaacttcaccttcctcagcgtcatcgtgctcttcagctacatgcagtgggtgtgggggggcatctggccccgacaccgcttctctttgcaggttaacatccgaaaaagagacaattcccggaaggaagtccaacgaaggatctctgctcatcagccagggcctgaaggccaggaggagtcaactccgcaatcagatgttacagaggatggtgagagccctgaagatccctcagggacagagggtcagctgtccgaggaggagaaaccagatcagcagcccctgagcggagaagaggagctagagcctgaggccagtgatggttcaggctcctgggaagatgcagctttgctgacggaggccaacctgcctgctcctgctcctgcttctgcttctgcccctgtcctagagactctgggcagctctgaacctgctgggggtgctctccgacagcgccccacctgctctagttcctgaagaaaaggggcagactcctcacattccagcactttcccacctgactcctctcccctcgtttttccttcaata

SEQ ID NO: 111371 - DNA, 326 bp, Homo sapiens
  Payload ID: 1811
  Gene Symbol: BSCL2
  Gene Name: Berardinelli-Seip congenital lipodystrophy 2 (seipin)
  ENST ID: ENST00000403098
  CDS Start-End: 1-240
gtcttctctagcctcctgctatttggctttgcagagcagaagcagctgctggaggtggaactctacgcagactatagagagaactcgtacgtgccgaccactggagcgatcattgagatccacagcaagcgcatccagctgtatggagcctacctccgcatccacgcgcacttcactgggctcagctctgaacctgctgggggtgctctccgacagcgccccacctgctctagttcctgaagaaaaggggcagactcctcacattccagcactttcccacctgactcctctcccctcgtttttccttcaataaactattttgtgtc

SEQ ID NO: 111372 - DNA, 1984 bp, Homo sapiens
  Payload ID: 1811
  Gene Symbol: BSCL2
  Gene Name: Berardinelli-Seip congenital lipodystrophy 2 (seipin)
  ENST ID: ENST00000405837
  CDS Start-End: 498-1892
cctaagagttcctctgctgtacgactgcactcccgcaccctcccctaaatcccccctcttcggcctgtttaccttttaacttggcttcgttgcacgtttgtgtgtgtgtgtttgctcttcgcagcctcttgagcgtcttttgtacttaattcttacactgtggacgctctctcgcgcccgccatcccccgacccctctgatctccgatccttgacgatgtctagcctgcattgattggcccttttccctgggtatggcagatctattgcttgatgatcctctccccccaagaattctaacacaggagctgtcctgaggctctggatgactttattcttcaaatggctttaccctcccagtagctccagggaccctccattttccatatccaggaaaatgtgatgcgccacaggtatcagcgtctggatcgccacttcacgttttagccacaagtgactcagtggaagatccagagtcaacagaggctcgtcaggaagatgtctacagaaaaggtagaccaaaaggaggaagctggggaaaaagaggtgtgcggagaccagatcaaaggaccggacaaagaggaggaaccaccagctgctgcatcccatggccaggggtggcgtccaggtggcagagcagctaggaacgcaaggcctgaacctggggccagacaccctgctctcccggccatggtcaacgaccctccagtacctgccttactgtgggcccaggaggtgggccaagtcttggcaggccgtgcccgcaggctgctgctgcagtttggggtgctcttctgcaccatcctccttttgctctgggtgtctgtcttcctctatggctccttctactattcctatatgccgacagtcagccacctcagccctgtgcatttctactacaggaccgactgtgattcctccaccacctcactctgctccttccctgttgccaatgtctcgctgactaagggtggacgtgatcgggtgctgatgtatggacagccgtatcgtgttaccttagagcttgagctgccagagtcccctgtgaatcaagatttgggcatgttcttggtcaccatttcctgctacaccagaggtggccgaatcatctccacttcttcgcgttcggtgatgctgcattaccgctcagacctgctccagatgctggacacactggtcttctctagcctcctgctatttggctttgcagagcagaagcagctgctggaggtggaactctacgcagactatagagagaactcgtacgtgccgaccactggagcgatcattgagatccacagcaagcgcatccagctgtatggagcctacctccgcatccacgcgcacttcactgggctcagatacctgctatacaacttcccgatgacctgcgccttcataggtgttgccagcaacttcaccttcctcagcgtcatcgtgctcttcagctacatgcagtgggtgtgggggggcatctggccccgacaccgcttctctttgcaggttaacatccgaaaaagagacaattcccggaaggaagtccaacgaaggatctctgctcatcagccaggtgcagggcctgaaggccaggaggagtcaactccgcaatcagatgttacagaggatggtgagagccctgaagatccctcagggacagagggtcagctgtccgaggaggagaaaccagatcagcagcccctgagcggagaagaggagctagagcctgaggccagtgatggttcaggctcctgggaagatgcagctttgctgacggaggccaacctgcctgctcctgctcctgcttctgcttctgcccctgtcctagagactctgggcagctctgaacctgctgggggtgctctccgacagcgccccacctgctctagttcctgaagaaaaggggcagactcctcacattccagcactttcccacctgactcctctcccctcgtttttccttcaataaactattttgtgtcagcttc

SEQ ID NO: 111373 - DNA, 1693 bp, Homo sapiens
  Payload ID: 1811
  Gene Symbol: BSCL2
  Gene Name: Berardinelli-Seip congenital lipodystrophy 2 (seipin)
  Uniprot ID: Q96G97
  ENST ID: ENST00000403550
  CDS Start-End: 425-1621
cggcgggctggtttccatggttgcacgattaggtaggggctccgggcgctttgcccacccccgagctggaggggactggcgggaagcggcggttggctgcagggcgctccgccgggcgtggggtgtagccgtgtcggtgagcgagctctgctcgaggcggagaggagaaactcgggaagcaattgtggctactctaaggctactggtttcgagtcaggccgtgcgaccttaggcaagtcgcacattctctccgtgcagctgcctagcagtgtggattcagtatcaccgtgtgtgtaaagctctttctaagaatcgtaaggaaccaccagctgctgcatcccatggccaggggtggcgtccaggtggcagagcagctaggaacgcaaggcctgaacctggggccagacaccctgctctcccggccatggtcaacgaccctccagtacctgccttactgtgggcccaggaggtgggccaagtcttggcaggccgtgcccgcaggctgctgctgcagtttggggtgctcttctgcaccatcctccttttgctctgggtgtctgtcttcctctatggctccttctactattcctatatgccgacagtcagccacctcagccctgtgcatttctactacaggaccgactgtgattcctccaccacctcactctgctccttccctgttgccaatgtctcgctgactaagggtggacgtgatcgggtgctgatgtatggacagccgtatcgtgttaccttagagcttgagctgccagagtcccctgtgaatcaagatttgggcatgttcttggtcaccatttcctgctacaccagaggtggccgaatcatctccacttcttcgcgttcggtgatgctgcattaccgctcagacctgctccagatgctggacacactggtcttctctagcctcctgctatttggctttgcagagcagaagcagctgctggaggtggaactctacgcagactatagagagaactcgtacgtgccgaccactggagcgatcattgagatccacagcaagcgcatccagctgtatggagcctacctccgcatccacgcgcacttcactgggctcagatacctgctatacaacttcccgatgacctgcgccttcataggtgttgccagcaacttcaccttcctcagcgtcatcgtgctcttcagctacatgcagtgggtgtgggggggcatctggccccgacaccgcttctctttgcaggttaacatccgaaaaagagacaattcccggaaggaagtccaacgaaggatctctgctcatcagccagggcctgaaggccaggaggagtcaactccgcaatcagatgttacagaggatggtgagagccctgaagatccctcagggacagagggtcagctgtccgaggaggagaaaccagatcagcagcccctgagcggagaagaggagctagagcctgaggccagtgatggttcaggctcctgggaagatgcagctttgctgacggaggccaacctgcctgctcctgctcctgcttctgcttctgcccctgtcctagagactctgggcagctctgaacctgctgggggtgctctccgacagcgccccacctgctctagttcctgaagaaaaggggcagactcctcacattccagcactttcccacctgactcctctcccctcgtttttccttcaata

SEQ ID NO: 111374 - DNA, 578 bp, Homo sapiens
  Payload ID: 1811
  Gene Symbol: BSCL2
  Gene Name: Berardinelli-Seip congenital lipodystrophy 2 (seipin)
  ENST ID: ENST00000413908
  CDS Start-End: 269-388
ctgcagtggagtctgtactggctgcgggggaccctgctcatttgaaaatctgacatcagctgggcagtcgcccccctcctcctttcctccctctactctgacacagcacttagcacctgaatcttcgtttctctcccagggaccctccattttccatatccaggaaaatgtgatgcgccacaggtatcagcgtctggatcgccacttcacgttttagccacaagtgactcagtggaagatccagagtcaacagaggctcgtcaggaagatgtctacagaaaaggtagaccaaaaggaggaagctggggaaaaagaggtgtgcggagaccagatcaaaggaccggacaaagaggagatgcctacaggtcctaggagctgtgggcgataaaaatcagcgccagctggatgaccgcctcactcggccgcttcgcgggtgaaatggcctgtggtgaaggaaccaccagctgctgcatcccatggccaggggtggcgtccaggtggcagagcagctaggaacgcaaggcctgaacctggggccagacaccctgctctcccggccatggtcaacgaccctccag

SEQ ID NO: 111375 - DNA, 545 bp, Homo sapiens
  Payload ID: 1811
  Gene Symbol: BSCL2
  Gene Name: Berardinelli-Seip congenital lipodystrophy 2 (seipin)
  ENST ID: ENST00000449636
  CDS Start-End: 1-453
ttcagctacatgcagtgggtgtgggggggcatctggccccgacaccgcttctctttgcaggttaacatccgaaaaagagacaattcccggaaggaagtccaacgaaggatctctgctcatcagccagggcctgaaggccaggaggagtcaactccgcaatcagatgttacagaggatgtgtctgggtctgacccctgcattccccttttggctgcagagggtcagctgtccgaggaggagaaaccagatcagcagcccctgagcggagaagaggagctagagcctgaggccagtgatggttcaggctcctgggaagatgcagctttgctgacggaggccaacctgcctgctcctgctcctgcttctgcttctgcccctgtcctagagactctgggcagctctgaacctgctgggggtgctctccgacagcgccccacctgctctagttcctgaagaaaaggggcagactcctcacattccagcactttcccacctgactcctctcccctcgtttttccttcaataaactattttgtgtcagcttc

SEQ ID NO: 111376 - DNA, 1440 bp, Homo sapiens
  Payload ID: 1811
  Gene Symbol: BSCL2
  Gene Name: Berardinelli-Seip congenital lipodystrophy 2 (seipin)
  Uniprot ID: Q96G97
  ENST ID: ENST00000421906
  CDS Start-End: 192-1388
tacaaaagcggccggcggagaggggcgggacttccccgggagccggaagtcccgtctcacggttgccctggcagcgcgcgaggctggaaccaccagctgctgcatcccatggccaggggtggcgtccaggtggcagagcagctaggaacgcaaggcctgaacctggggccagacaccctgctctcccggccatggtcaacgaccctccagtacctgccttactgtgggcccaggaggtgggccaagtcttggcaggccgtgcccgcaggctgctgctgcagtttggggtgctcttctgcaccatcctccttttgctctgggtgtctgtcttcctctatggctccttctactattcctatatgccgacagtcagccacctcagccctgtgcatttctactacaggaccgactgtgattcctccaccacctcactctgctccttccctgttgccaatgtctcgctgactaagggtggacgtgatcgggtgctgatgtatggacagccgtatcgtgttaccttagagcttgagctgccagagtcccctgtgaatcaagatttgggcatgttcttggtcaccatttcctgctacaccagaggtggccgaatcatctccacttcttcgcgttcggtgatgctgcattaccgctcagacctgctccagatgctggacacactggtcttctctagcctcctgctatttggctttgcagagcagaagcagctgctggaggtggaactctacgcagactatagagagaactcgtacgtgccgaccactggagcgatcattgagatccacagcaagcgcatccagctgtatggagcctacctccgcatccacgcgcacttcactgggctcagatacctgctatacaacttcccgatgacctgcgccttcataggtgttgccagcaacttcaccttcctcagcgtcatcgtgctcttcagctacatgcagtgggtgtgggggggcatctggccccgacaccgcttctctttgcaggttaacatccgaaaaagagacaattcccggaaggaagtccaacgaaggatctctgctcatcagccagggcctgaaggccaggaggagtcaactccgcaatcagatgttacagaggatggtgagagccctgaagatccctcagggacagagggtcagctgtccgaggaggagaaaccagatcagcagcccctgagcggagaagaggagctagagcctgaggccagtgatggttcaggctcctgggaagatgcagctttgctgacggaggccaacctgcctgctcctgctcctgcttctgcttctgcccctgtcctagagactctgggcagctctgaacctgctgggggtgctctccgacagcgccccacctgctctagttcctgaagaaaaggggcagactcctcacattccagcactttcccacctgactcctctc

SEQ ID NO: 111377 - DNA, 992 bp, Homo sapiens
  Payload ID: 1811
  Gene Symbol: BSCL2
  Gene Name: Berardinelli-Seip congenital lipodystrophy 2 (seipin)
  ENST ID: ENST00000448568
  CDS Start-End: 322-992
atggttgcacgattaggtaggggctccgggcgctttgcccacccccgagctggaggggactggcgggaagcggcggttggctgcagggcgctccgccgggcgtggggtgtagccgtgtcggtgagcgagctctgctcgaggcggagaggagaaactcgggaagcaattgtggctactctaaggctactggtttcgagtcaggccgtgcgaccttaggaaccaccagctgctgcatcccatggccaggggtggcgtccaggtggcagagcagctaggaacgcaaggcctgaacctggggccagacaccctgctctcccggccatggtcaacgaccctccagtacctgccttactgtgggcccaggaggtgggccaagtcttggcaggccgtgcccgcaggctgctgctgcagtttggggtgctcttctgcaccatcctccttttgctctgggtgtctgtcttcctctatggctccttctactattcctatatgccgacagtcagccacctcagccctgtgcatttctactacaggaccgactgtgattcctccaccacctcactctgctccttccctgttgccaatgtctcgctgactaagggtggacgtgatcgggtgctgatgtatggacagccgtatcgtgttaccttagagcttgagctgccagagtcccctgtgaatcaagatttgggcatgttcttggtcaccatttcctgctacaccagaggtggccgaatcatctccacttcttcgcgttcggtgatgctgcattaccgctcagacctgctccagatgctggacacactggtcttctctagcctcctgctatttggctttgcagagcagaagcagctgctggaggtggaactctacgcagactatagagagaactcgtacgtgccgaccactggagcgatcattgagatccacagcaagcgcatccagctgtatggagcctacctccgcatccacgcgcacttcactgggctcag

SEQ ID NO: 111378 - DNA, 794 bp, Homo sapiens
  Payload ID: 1811
  Gene Symbol: BSCL2
  Gene Name: Berardinelli-Seip congenital lipodystrophy 2 (seipin)
  ENST ID: ENST00000464544
  CDS Start-End: 516-794
agtgattcttcgttatggccgcccgtgtgccttcgactcaatcgggaggacaccgaaatccagatttcggggttgcagggcgcgggccccggcttggttagggcaggggcagccattttgagaccagaagagggcggaagggaccatattgagaacgccggttgcctgggggccgccattttaagagaagccctgtacggtaaactccgtgacgtgggggctgccatgttggtacggccatcttggaatgggagtggctgtgggcgcagccatcttagatctattgcttgatgatcctctccccccaagaattctaacacaggagctgtcctgaggctctggatgactttattcttcaaatggctttaccctcccagtagctccagggaccctccattttccatatccaggaaaatgtgatgcgccacaggtatcagcgtctggatcgccacttcacgttttagccacaagtgactcagtggaagatccagagtcaacagaggctcgtcaggaagatgtctacagaaaaggtagaccaaaaggaggaagctggggaaaaagaggtgtgcggagaccagatcaaaggaccggacaaagaggaggaaccaccagctgctgcatcccatggccaggggtggcgtccaggtggcagagcagctaggaacgcaaggcctgaacctggggccagacaccctgctctcccggccatggtcaacgaccctccagtacctgccttactgtgggcccaggaggtgggccaagtcttggcaggccgtgcccgcaggctgctgctg

SEQ ID NO: 111379 - DNA, 865 bp, Homo sapiens
  Payload ID: 1811
  Gene Symbol: BSCL2
  Gene Name: Berardinelli-Seip congenital lipodystrophy 2 (seipin)
  ENST ID: ENST00000524862
  CDS Start-End: 187-865
ctctgatctccgatccttgacgatgtctagcctgcattgattggcccttttccctggggaccctccattttccatatccaggaaaatgtgatgcgccacaggtatcagcgtctggatcgccacttcacgttttagccacaagtgactcagtggaagatccagagtcaacagaggctcgtcaggaagatgtctacagaaaaggtagaccaaaaggaggaagctggggaaaaagaggtgtgcggagaccagatcaaaggaccggacaaagaggaggaaccaccagctgctgcatcccatggccaggggtggcgtccaggtggcagagcagctaggaacgcaaggcctgaacctggggccagacaccctgctctcccggccatggtcaacgaccctccagtacctgccttactgtgggcccaggaggtgggccaagtcttggcaggccgtgcccgcaggctgctgctgcagtttggggtgctcttctgcaccatcctccttttgctctgggtgtctgtcttcctctatggctccttctactattcctatatgccgacagtcagccacctcagccctgtgcatttctactacaggaccgactgtgattcctccaccacctcactctgctccttccctgttgccaatgtctcgctgactaagggtggacgtgatcgggtgctgatgtatggacagccgtatcgtgttaccttagagcttgagctgccagagtcccctgtgaatcaagatttgggcatgttcttggtcaccatttcctgctacaccagaggtggccgaatcatctccacttcttcgcgttcggtgatgctgcattaccgctcagacctgctccagatgctggacacactgg

SEQ ID NO: 111380 - DNA, 585 bp, Homo sapiens
  Payload ID: 1811
  Gene Symbol: BSCL2
  Gene Name: Berardinelli-Seip congenital lipodystrophy 2 (seipin)
  ENST ID: ENST00000533982
  CDS Start-End: 288-585
acctgaatcttcgtttctctcccagggaccctccattttccatatccaggaaaatgtgatgcgccacaggtatcagcgtctggatcgccacttcacgttttagccacaagtgactcagtggaagatccagagtcaacagaggctcgtcaggaagatgtctacagaaaaggtagaccaaaaggaggaagctggggaaaaagaggtgtgcggagaccagatcaaaggaccggacaaagaggaggaacgcaaggcctgaacctggggccagacaccctgctctcccggccatggtcaacgaccctccagtacctgccttactgtgggcccaggaggtgggccaagtcttggcaggccgtgcccgcaggctgctgctgcagtttggggtgctcttctgcaccatcctccttttgctctgggtgtctgtcttcctctatggctccttctactattcctatatgccgacagtcagccacctcagccctgtgcatttctactacaggaccgactgtgattcctccaccacctcactctgctccttccctgttgccaatgtctcgctgactaagggtggacgtgatcgggtgc

SEQ ID NO: 111381 - DNA, 539 bp, Homo sapiens
  Payload ID: 1811
  Gene Symbol: BSCL2
  Gene Name: Berardinelli-Seip congenital lipodystrophy 2 (seipin)
  ENST ID: ENST00000530009
  CDS Start-End: 455-539
agtgattcttcgttatggccgcccgtgtgccttcgactcaatcgggaggacaccgaaatccagatttcggggttgcagggcgcgggccccggcttggttagggcaggggcagccattttgagaccagaagagggcggaagggaccatattgagaacgccggttgcctgggggccgccattttaagagaagccctctctgaagacctcaaccaaccctgatgaggagggcacatcacccctgtctgctccagtgagccccaacaggagaaaaacaggccattacttacctgaagccacaagcggcagtagcagccctgggtgtaggggaccctccattttccatatccaggaaaatgtgatgcgccacaggtatcagcgtctggatcgccacttcacgttttagccacaagtgactcagtggaagatccagagtcaacagaggctcgtcaggaagatgtctacagaaaaggtagaccaaaaggaggaagctggggaaaaagaggtgtgcggagaccagatcaaaggaccggacaaagagg

SEQ ID NO: 111382 - DNA, 662 bp, Homo sapiens
  Payload ID: 1811
  Gene Symbol: BSCL2
  Gene Name: Berardinelli-Seip congenital lipodystrophy 2 (seipin)
  ENST ID: ENST00000532818
  CDS Start-End: 294-662
attttgagaccagaagagggcggaagggaccatattgagaacgccggttgcctgggggccgccattttaagagaagccctgtacggtaaactccgtgacgtgggggctgccatgttggtacggccatcttggaatgggagtggctgtgggcgcagccatcttagggaccctccattttccatatccaggaaaatgtgatgcgccacaggtatcagcgtctggatcgccacttcacgttttagccacaagtgactcagtggaagatccagagtcaacagaggctcgtcaggaagatgtctacagaaaaggtagaccaaaaggaggaagctggggaaaaagaggtgtgcggagaccagatcaaaggaccggacaaagaggaggaaccaccagctgctgcatcccatggccaggggtggcgtccaggtggcagagcagctaggaacgcaaggcctgaacctggggccagacaccctgctctcccggccatggtcaacgaccctccagtacctgccttactgtgggcccaggaggtgggccaagtcttggcaggccgtgcccgcaggctgctgctgcagtttggggtgctcttctgcaccatcctccttttgctctgggtgtctgtcttcctctatggctccttctactattcctatatgccgaca

SEQ ID NO: 111383 - DNA, 844 bp, Homo sapiens
  Payload ID: 1811
  Gene Symbol: BSCL2
  Gene Name: Berardinelli-Seip congenital lipodystrophy 2 (seipin)
  ENST ID: ENST00000531524
  CDS Start-End: 512-844
tccgcccctaccctcctaagagttcctctgctgtacgactgcactcccgcaccctcccctaaatcccccctcttcggcctgtttaccttttaacttggcttcgttgcacgtttgtgtgtgtgtgtttgctcttcgcagcctcttgagcgtcttttgtacttaattcttacactgtggacgctctctcgcgcccgccatcccccgacccctctgatctccgatccttgacgatgtctagcctgcattgattggcccttttccctgggtatggcagatctattgcttgatgatcctctccccccaagaattctaacacaggagctgtcctgaggctctggatgactttattcttcaaatggctttaccctcccagtagctccagggaccctccattttccatatccaggaaaatgtgatgcgccacaggtatcagcgtctggatcgccacttcacgttttagccacaagtgactcagtggaagatccagagtcaacagaggctcgtcaggaagatgtctacagaaaaggtagaccaaaaggaggaagctggggaaaaagaggtgtgcggagaccagatcaaaggaccggacaaagaggaggtgctgatgtatggacagccgtatcgtgttaccttagagcttgagctgccagagtcccctgtgaatcaagatttgggcatgttcttggtcaccatttcctgctacaccagaggtggccgaatcatctccacttcttcgcgttcggtgatgctgcattaccgctcagacctgctccagatgctggacacactggtcttctctagcctcctgctatttggctttgcagagcagaagcagctgctggag

SEQ ID NO: 111384 - DNA, 553 bp, Homo sapiens
  Payload ID: 1811
  Gene Symbol: BSCL2
  Gene Name: Berardinelli-Seip congenital lipodystrophy 2 (seipin)
  ENST ID: ENST00000528874
  CDS Start-End: 484-553
agagtctgacggggccctgctgtgggtggagcaaagggtgcctcatatctctggggtgcttggggtcggccacaaaggtggtaggaaatggggtcgacagataggtgagggtgggccttgtgcttcagataacctcacatggtcaggcaagggttagggatgggatgcaaggagcctaaggggctcacaacaattactgacctaaggaagggcccaggagagggaaaagggaggagttgtgagaagggacaggggagctcagaggagagcacagaagaacttcttctcccggaaggggttctccgaagtgggcacaggggtgatgaggggatcctcacaggcgtgggcatcacaggaccctccattttccatatccaggaaaatgtgatgcgccacaggtatcagcgtctggatcgccacttcacgttttagccacaagtgactcagtggaagatccagagtcaacagaggctcgtcaggaagatgtctacagaaaaggtagaccaaaaggaggaagctggggaaaaagaggtgtgcggagaccagatcaaag

SEQ ID NO: 111385 - DNA, 154 bp, Homo sapiens
  Payload ID: 1811
  Gene Symbol: BSCL2
  Gene Name: Berardinelli-Seip congenital lipodystrophy 2 (seipin)
  ENST ID: ENST00000525000
  CDS Start-End: 1-154
tgcggagaccagatcaaaggaccggacaaagaggaggaccgactgtgattcctccaccacctcactctgctccttccctgttgccaatgtctcgctgactaagggtggacgtgatcgggtgctgatgtatggacagccgtatcgtgttacctta

SEQ ID NO: 111386 - DNA, 2740 bp, Homo sapiens
  Payload ID: 1812
  Gene Symbol: BEST1
  Gene Name: bestrophin 1
  Uniprot ID: O76090
  ENST ID: ENST00000378043
  CDS Start-End: 644-2401
agataagggcactgaggctgagagaggagctgaaacctacccggggtcaccacacacaggtggcaaggctgggaccagaaaccaggactgttgactgcagcccggtattcattctttccatagcccacagggctgtcaaagaccccagggcctagtcagaggctcctccttcctggagagttcctggcacagaagttgaagctcagcacagccccctaacccccaactctctctgcaaggcctcaggggtcagaacactggtggagcagatcctttagcctctggattttagggccatggtagagggggtgttgccctaaattccagccctggtctcagcccaacaccctccaagaagaaattagaggggccatggccaggctgtgctagccgttgcttctgagcagattacaagaagggactaagacaaggactcctttgtggaggtcctggcttagggagtcaagtgacggcggctcagcactcacgtgggcagtgccagcctctaagagtgggcaggggcactggccacagagtcccagggagtcccaccagcctagtcgccagaccttctgtgggatcatcggacccacctggaaccccacctgacccaagcccacctgctgcagcccactgcctggccatgaccatcacttacacaagccaagtggctaatgcccgcttaggctccttctcccgcctgctgctgtgctggcggggcagcatctacaagctgctatatggcgagttcttaatcttcctgctctgctactacatcatccgctttatttataggctggccctcacggaagaacaacagctgatgtttgagaaactgactctgtattgcgacagctacatccagctcatccccatttccttcgtgctgggcttctacgtgacgctggtcgtgacccgctggtggaaccagtacgagaacctgccgtggcccgaccgcctcatgagcctggtgtcgggcttcgtcgaaggcaaggacgagcaaggccggctgctgcggcgcacgctcatccgctacgccaacctgggcaacgtgctcatcctgcgcagcgtcagcaccgcagtctacaagcgcttccccagcgcccagcacctggtgcaagcaggctttatgactccggcagaacacaagcagttggagaaactgagcctaccacacaacatgttctgggtgccctgggtgtggtttgccaacctgtcaatgaaggcgtggcttggaggtcgaatccgggaccctatcctgctccagagcctgctgaacgagatgaacaccttgcgtactcagtgtggacacctgtatgcctacgactggattagtatcccactggtgtatacacaggtggtgactgtggcggtgtacagcttcttcctgacttgtctagttgggcggcagtttctgaacccagccaaggcctaccctggccatgagctggacctcgttgtgcccgtcttcacgttcctgcagttcttcttctatgttggctggctgaaggtggcagagcagctcatcaacccctttggagaggatgatgatgattttgagaccaactggattgtcgacaggaatttgcaggtgtccctgttggctgtggatgagatgcaccaggacctgcctcggatggagccggacatgtactggaataagcccgagccacagcccccctacacagctgcttccgcccagttccgtcgagcctcctttatgggctccaccttcaacatcagcctgaacaaagaggagatggagttccagcccaatcaggaggacgaggaggatgctcacgctggcatcattggccgcttcctaggcctgcagtcccatgatcaccatcctcccagggcaaactcaaggaccaaactactgtggcccaagagggaatcccttctccacgagggcctgcccaaaaaccacaaggcagccaaacagaacgttaggggccaggaagacaacaaggcctggaagcttaaggctgtggacgccttcaagtctgccccactgtatcagaggccaggctactacagtgccccacagacgcccctcagccccactcccatgttcttccccctagaaccatcagcgccgtcaaagcttcacagtgtcacaggcatagacaccaaagacaaaagcttaaagactgtgagttctggggccaagaaaagttttgaattgctctcagagagcgatggggccttgatggagcacccagaagtatctcaagtgaggaggaaaactgtggagtttaacctgacggatatgccagagatccccgaaaatcacctcaaagaacctttggaacaatcaccaaccaacatacacactacactcaaagatcacatggatccttattgggccttggaaaacagggatgaagcacattcctaacctgcttcctaatggggatgcttcgccagccaggtcctcacctgtgtgtacaccagcaggacactgatccagtcacagccatacagctgtccacactgaagaacatgtcctacaacagcctgaatcaaatggttagcttaatagataaaaatcccagactacttcagcctttaatgccttttattcataaaaactgtgaaagctagactgaaccattggaaacatttaactcagactctggattcagagtcgggaacccttagttctatctgaatccaagacagccacaccttagtatactgcccaaactaatgagtttaataaatacaaatactcgtt

SEQ ID NO: 111387 - DNA, 4267 bp, Homo sapiens
  Payload ID: 1812
  Gene Symbol: BEST1
  Gene Name: bestrophin 1
  Uniprot ID: O76090
  ENST ID: ENST00000449131
  CDS Start-End: 87-1901
caccagcctagtcgccagaccttctgtgggatcatcggacccacctggaaccccacctgctggccctcacggaagaacaacagctgatgtttgagaaactgactctgtattgcgacagctacatccagctcatccccatttccttcgtgctgggcttctacgtgacgctggtcgtgacccgctggtggaaccagtacgagaacctgccgtggcccgaccgcctcatgagcctggtgtcgggcttcgtcgaaggcaaggacgagcaaggccggctgctgcggcgcacgctcatccgctacgccaacctgggcaacgtgctcatcctgcgcagcgtcagcaccgcagtctacaagcgcttccccagcgcccagcacctggtgcaagcaggctttatgactccggcagaacacaagcagttggagaaactgagcctaccacacaacatgttctgggtgccctgggtgtggtttgccaacctgtcaatgaaggcgtggcttggaggtcgaatccgggaccctatcctgctccagagcctgctgaacgagatgaacaccttgcgtactcagtgtggacacctgtatgcctacgactggattagtatcccactggtgtatacacaggtggtgactgtggcggtgtacagcttcttcctgacttgtctagttgggcggcagtttctgaacccagccaaggcctaccctggccatgagctggacctcgttgtgcccgtcttcacgttcctgcagttcttcttctatgttggctggctgaaggtggcagagcagctcatcaacccctttggagaggatgatgatgattttgagaccaactggattgtcgacaggaatttgcaggtgtccctgttggctgtggatgagatgcaccaggacctgcctcggatggagccggacatgtactggaataagcccgagccacagcccccctacacagctgcttccgcccagttccgtcgagcctcctttatgggctccaccttcaacatcagcctgaacaaagaggagatggagttccagcccaatcaggaggacgaggaggatgctcacgctggcatcattggccgcttcctaggcctgcagtcccatgatcaccatcctcccagggcaaactcaaggaccaaactactgtggcccaagagggaatcccttctccacgagggcctgcccaaaaaccacaaggcagccaaacagaacgttaggggccaggaagacaacaaggcctggaagcttaaggctgtggacgccttcaagtctgccccactgtatcagaggccaggctactacagtgccccacagacgcccctcagccccactcccatgttcttccccctagaaccatcagcgccgtcaaagcttcacagtgtcacaggcatagacaccaaagacaaaagcttaaagactgtgagttctggggccaagaaaagttttgaattgctctcagagagcgatggggccttgatggagcacccagaagtatctcaagtgaggaggaaaactgtggagtttaacctgacggatatgccagagatccccgaaaatcacctcaaagaacctttggaacaatcaccaaccaacatacacactacactcaaagatcacatggatccttattgggccttggaaaacaggtctgtcctccacctgaaccaggggcactgcattgccctgtgccccaccccagcttcccttgctctgagcctacccttcctccacaatttcctagggttccatcactgccagagcacactggacctacgcccagcactggcttggggtatatacttggccaccttcacagggatcctagggaagtgttcgggaccttttctcacttcaccctggtatcacccggaagacttcttgggaccaggtgaaggaagatgaggttgtgctgaccagaatgctgctggagaactgccccagggctgacaggccaggcttagctgagcagatgttatcactggccccaacttactttgagcaagggtggctgacccaaaaccatgaggtggcagtcagctggatgacagatgaacacttcccccataactatttagggtagtacccaagcactacaggaaagggtggcaggaactgcctcactcctaggaactggtagatggtgaggttgagggtgtccagcgcccttaggtcattttctcactgcctgggaacctcaccaaaatacttcttgcttccttggggtcagcccaaagctgtcacaaaatcagatatttccctttattccagatttcctggacactttcacccaattataaacaccccacttcagccccaatcacgtgggaggaagtgtaacttcccttttctggattctcaagcagttactttcacggtcagaacacgcagctattatgattgaaaacttaaaagggcaacaatttcagtcttgcttctagggctagacaggaacttggcaaacatctgtggcctgttcagcaaaggatgttaatatttaagaatcttgtcttgggctgggtgtggaggcaagtggatcacaggaggtcaggagtttgagaccaacctggccaacatgatgaaaccccatctctaccaaaaaaaatacaaatcagctgggcgtcgtggtgtgcctgtagtcccaacgcaggaggttgaggggagaattgcttgaacccaggaggtggtggttgcagtgagattgagcaactgcaatccagcctgggcgacggagtgagactgtctcaaaaaaaaaaaaaaaaggatcgtctcaacctttgccctcctactgcaacattttggtatttgaaatgaagggaccttccatacttatgctgttaatactttcattctcactagggatgaagcacattcctaacctgcttcctaatggggatgcttcgccagccaggtcctcacctgtgtgtacaccagcaggacactgatccagtcacagccatacagctgtccacactgaagaacatgtcctacaacagcctgaatcaaatggttagcttaatagataaaaatcccagactacttcagcctttaatgccttttattcataaaaactgtgaaagctagactgaaccattggaaacatttaactcagactctggattcagagtcgggaacccttagttctatctgaatccaagacagccacaccttagtatactgcccaaactaatgagtttaataaatacaaatactcgtttctttttgattagtgtgattagaactgaacaacggcacttaaggaatctggaagatagcctggatagatttctgattcatcccaagacctcaaagacaacacctgggtaccaaatttctttatttgaaggaatggtacaaatcaaagaacttaagtggatgttttggtacaacttatagaaaaggtaaaggaaaccccaacatgcatgcactgccttggtgaccagggaagtcaccccacggctatggggaaattagcccgaggcttagctttcattatcactgtctcccagggtgtgcttgtcaaagagatattccgccaagccagattcgggcgctcccatcttgcgcaagttggtcacgtggtcacccaattctttgatggctttcacctgctcattcaggtaatgtgtctcaatgaagtcacacaactgcaaaacaatggggaagacagttagtgggcagctttcccaatccctaaggcaaatgatttcctccatttatttcctggggttccaatactcacatgggggtcatttttgtcagtggccagtttgtgcagttccagtagtgactgattcacatttttttccaaatgtaatgcacactccattgcattcagcccgctctcccagtcatcacagtctggtttctgaatgagaataggttaatgcatctctaccaactaacctagaagtcagcaagcccatcatctctaaccaccacgttttggcaaaagggacattactatttgcctaatttagtttagatggtaagcctaaaaaagcacaaaaggcaaaagcccagtgtatcatcactttataagggcaattgctagtttaagtgatttctgatacccgaacactgccagatgatgaagtatgacacccctaggatcttttgttcaccttgatatcctgaaggaagattcggccacctcgttggttctgcagcttcatcagtttctcagcatgttccctctcctcatgagattggtgaagaaagtatttggcaaagttcttcaaagccacatcatcgcggtcaaagtagtaaga

SEQ ID NO: 111388 - DNA, 1829 bp, Homo sapiens
  Payload ID: 1812
  Gene Symbol: BEST1
  Gene Name: bestrophin 1
  ENST ID: ENST00000534553
  CDS Start-End: 577-744
tcaggggtcagaacactggtggagcagatcctttagcctctggattttagggccatggtagagggggtgttgccctaaattccagccctggtctcagcccaacaccctccaagaagaaattagaggggccatggccaggctgtgctagccgttgcttctgagcagattacaagaagggactaagacaaggactcctttgtggaggtcctggcttagggagtcaagtgacggcggctcagcactcacgtgggcagtgccagcctctaagagtgggcaggggcactggccacagagtcccagggagtcccaccagcctagtcgccagaccttctgtgggatcatcggacccacctggaaccccacctgctggccctcacggaagaacaacagctgatgtttgagaaactgactctgtattgcgacagctacatccagctcatccccatttccttcgtgctggggaaaggtgcggactgcagccagtgaaactgaagttagacgttaggcttctacgtgacgctggtcgtgacccgctggtggaaccagtacgagaacctgccgtggcccgaccgcctcatgagcctggtgtcgggcttcgtcgaaggcaaggacgagcaaggccggctgctgcggcgcacgctcatccgctacgccaacctgggcaacgtgctcatcctgcgcagcgtcagcaccgcagtctacaagcgcttccccagcgcccagcacctggtgcaagcagcctgaacaaagaggagatggagttccagcccaatcaggaggacgaggaggatgctcacgctggcatcattggccgcttcctaggcctgcagtcccatgatcaccatcctcccagggcaaactcaaggaccaaactactgtggcccaagagggaatcccttctccacgagggcctgcccaaaaaccacaaggcagccaaacagaacgttaggggccaggaagacaacaaggcctggaagcttaaggctgtggacgccttcaagtctgccccactgtatcagaggccaggctactacagtgccccacagacgcccctcagccccactcccatgttcttccccctagaaccatcagcgccgtcaaagcttcacagtgtcacaggcatagacaccaaagacaaaagcttaaagactgtgagttctggggccaagaaaagttttgaattgctctcagagagcgatggggccttgatggagcacccagaagtatctcaagtgaggaggaaaactgtggagtttaacctgacggatatgccagagatccccgaaaatcacctcaaagaacctttggaacaatcaccaaccaacatacacactacactcaaagatcacatggatccttattgggccttggaaaacaggtctgtcctccacctgaaccaggggcactgcattgccctgtgccccaccccagcttcccttgctctgagcctacccttcctccacaatttcctagggttccatcactgccagagcacactggacctacgcccagcactggcttggggtatatacttggccaccttcacagggatcctagggaagtgttcgggaccttttctcacttcaccctggtatcacccggaagacttcttgggaccaggtgaaggaagatgaggttgtgctgaccagaatgctgctggagaactgccccagggctgacaggccaggcttagctgagcagatgttatcactggccccaacttactttgagcaagggtggctgacccaaaaccatgaggtggcagtcagctggatgacagatgaacacttcccccataactatttagggtagtacccaagcactacagg

SEQ ID NO: 111389 - DNA, 2404 bp, Homo sapiens
  Payload ID: 1812
  Gene Symbol: BEST1
  Gene Name: bestrophin 1
  ENST ID: ENST00000524926
  CDS Start-End: 105-1412
cagggagtcccaccagcctagtcgccagaccttctgtgggatcatcggacccacctggaaccccacctgacccaagcccacctgctgcagcccactgcctggccatgaccatcacttacacaagccaagtggctaatgcccgcttaggctccttctcccgcctgctgctgtgctggcggggcagcatctacaagctgctatatggcgagttcttaatcttcctgctctgctactacatcatccgctttatttataggctggccctcacggaagaacaacagctgatgtttgagaaactgactctgtattgcgacagctacatccagctcatccccatttccttcgtgctgggcttctacgtgacgctggtcgtgacccgctggtggaaccagtacgagaacctgccgtggcccgaccgcctcatgagcctggtgtcgggcttcgtcgaaggcaaggacgagcaaggccggctgctgcggcgcacgctcatccgctacgccaacctgggcaacgtgctcatcctgcgcagcgtcagcaccgcagtctacaagcgcttccccagcgcccagcacctggtgcaagcaggctttatgactccggcagaacacaagcagttggagaaactgagcctaccacacaacatgttctgggtgccctgggtgtggtttgccaacctgtcaatgaaggcgtggcttggaggtcgaatccgggaccctatcctgctccagagcctgctgaacgagatgaacaccttgcgtactcagtgtggacacctgtatgcctacgactggattagtatcccactggtgtatacacaggtggtgactgtggcggtgtacagcttcttcctgacttgtctagttgggcggcagtttctgaacccagccaaggcctaccctggccatgagctggacctcgttgtgcccgtcttcacgttcctgcagttcttcttctatgttggctggctgaaggtgggcctctccagggccctgctgggctggaggcatggccagaggggtcatggccagcagctgcctgagacgaggatgcagtgtcaggaaaggaaggtctcacgggtagaaagcagccaggcgtggtggcgcacacctgtaatcccagctactcgggaggctgaggcaggagaatcgcttgaacccgggaggcggaggttgtggtggcagagcagctcatcaacccctttggagaggatgatgatgattttgagaccaactggattgtcgacaggaatttgcaggtgtccctgttggctgtggatgagatgcaccaggacctgcctcggatggagccggacatgtactggaataagcccgagccacagcccccctacacagctgcttccgcccagttccgtcgagcctcctttatgggctccaccttcaacatcagcctgaacaaagaggagatggagttccagcccaatcaggaggacgaggaggatgctcacgctggcatcattggccgcttcctaggcctgcagtcccatgatcaccatcctcccagggcaaactcaaggaccaaactactgtggcccaagagggaatcccttctccacgagggcctgcccaaaaaccacaaggcagccaaacagaacgttaggggccaggaagacaacaaggcctggaagcttaaggctgtggacgccttcaagtctgccccactgtatcagaggccaggctactacagtgccccacagacgcccctcagccccactcccatgttcttccccctagaaccatcagcgccgtcaaagcttcacagtgtcacaggcatagacaccaaagacaaaagcttaaagactgtgagttctggggccaagaaaagttttgaattgctctcagagagcgatggggccttgatggagcacccagaagtatctcaagtgaggaggaaaactgtggagtttaacctgacggatatgccagagatccccgaaaatcacctcaaagaacctttggaacaatcaccaaccaacatacacactacactcaaagatcacatggatccttattgggccttggaaaacagggatgaagcacattcctaacctgcttcctaatggggatgcttcgccagccaggtcctcacctgtgtgtacaccagcaggacactgatccagtcacagccatacagctgtccacactgaagaacatgtcctacaacagcctgaatcaaatggttagcttaatagataaaaatcccagactacttcagcctttaatgccttttattcataaaaactgtgaaagctagactgaaccattggaaacatttaactcagactctggattcagagtcgggaacccttagttctatctgaatccaagacagccacaccttagtatactgcccaaactaatgagtttaataaatacaaatactcgtt

SEQ ID NO: 111390 - DNA, 1263 bp, Homo sapiens
  Payload ID: 1812
  Gene Symbol: BEST1
  Gene Name: bestrophin 1
  ENST ID: ENST00000526988
  CDS Start-End: 162-1151
attgcgacagctacatccagctcatccccatttccttcgtgctggggaaaggtgcggactgcagccagtgaaactgaagttagacgttaggcttctacgtgacgctggtcgtgacccgctggtggaaccagtacgagaacctgccgtggcccgaccgcctcatgagcctggtgtcgggcttcgtcgaaggcaaggacgagcaaggccggctgctgcggcgcacgctcatccgctacgccaacctgggcaacgtgctcatcctgcgcagcgtcagcaccgcagtctacaagcgcttccccagcgcccagcacctggtgcaagcaggctttatgactccggcagaacacaagcagttggagaaactgagcctaccacacaacatgttctgggtgccctgggtgtggtttgccaacctgtcaatgaaggcgtggcttggaggtcgaatccgggaccctatcctgctccagagcctgctgaacgagatgaacaccttgcgtactcagtgtggacacctgtatgcctacgactggattagtatcccactggtgtatacacaggtggtgactgtggcggtgtacagcttcttcctgacttgtctagttgggcggcagtttctgaacccagccaaggcctaccctggccatgagctggacctcgttgtgcccgtcttcacgttcctgcagttcttcttctatgttggctggctgaaggtgggcctctccagggccctgctgggctggaggcatggccagaggggtcatggccagcagctgcctgagacgaggatgcagtgtcaggaaaggaaggtctcacgggtagaaagcagccaggcgtggtggcgcacacctgtaatcccagctactcgggaggctgaggcaggagaatcgcttgaacccgggaggcggaggttgtggtggcagagcagctcatcaacccctttggagaggatgatgatgattttgagaccaactggattgtcgacaggaatttgcaggtgtccctgttggctgtggatgagatgcaccaggacctgcctcggatggagccggacatgtactggaataagcccgagccacagcccccctacacagctgcttccgcccagttccgtcgagcctcctttatgggctccaccttcaacatcagcctgaacaaagaggagatggagttccagcccaatcaggaggacgaggaggatgctcacgctggcatcattggccgcttcctaggcctgcagtcccatgatcaccatcctcccagggc

SEQ ID NO: 111391 - DNA, 1908 bp, Homo sapiens
  Payload ID: 1813
  Gene Symbol: BEST2
  Gene Name: bestrophin 2
  Uniprot ID: Q8NFU1
  ENST ID: ENST00000042931
  CDS Start-End: 1-1530
atgaccgtcacctacacagcccgagtggcgaacgcccgcttcggtggcttctcccagctgctgctactgtggcgtgggagcatctacaaactcctgtggcgagagctgctctgcttccttgggttctacatggcgctgagtgctgcctaccgctttgtgctgaccgaagggcagaagcgctacttcgagaagcttgtgatttattgtgaccagtatgccagcctcatccctgtctccttcgtgcttggcttttatgtgacgctggtggtgaaccgctggtggagccagtacctatgcatgccgctgcccgacgcgctcatgtgcgtggtggcgggcaccgtgcacggacgcgacgaccgcggccgcctctaccggcgcacactcatgcgctacgcagggctctcggccgtgctcatcctgcgctccgtcagcaccgcggtgttcaagcgcttccccaccatagaccacgtggtggaggctgggtttatgacccgcgaggagcgcaagaagtttgaaaacctgaactcatcctacaacaagtactgggtgccctgcgtctggttctccaacctggcggcacaggcccgacgcgagggccgcatccgcgacaacagcgcccttaagctgctgctcgaggagctgaatgtttttcggggcaaatgtggaatgctctttcactatgactggattagcgtacccctcgtgtacacgcaggtggtgaccatcgcactgtacagctacttcctggcttgcctcattggtcgccagttcctggacccggctcagggttacaaagaccacgacctagacctgtgtgtgcccatcttcaccctcttgcagttcttcttctacgccggctggctcaaggtagctgagcagctcatcaaccccttcggagaggacgatgatgactttgagaccaactttctgatcgatagaaacttccaggtgtccatgctggcagtggacgagatgtatgatgacctggctgtgctggagaaggacttgtactgggatgcagccgaggctcgcgccccatacacagcggctactgtcttccagctgcggcagccttccttccagggctccacctttgacatcacgctggccaaagaagacatgcagttccagcggctggacggcttggatggaccgatgggagaggcgcccggcgacttcctgcagcgcctcctgccggcgggcgcgggcatggtcgcgggaggcccgctgggccggcgcctgtcctttctactccgcaagaacagctgcgtgtcggaggcgtctactggggccagctgctcatgcgcggttgtccccgaaggcgcggccccggagtgcagctgcggggacccgctgctcgaccccggcctgccggagcccgaggccccgccccctgcgggtcccgaaccgcttaccctcatccctgggcctgtcgagcccttcagcatcgtgaccatgcccgggccccggggtccggcgccaccctggctgcccagccctattggcgaggaggaggagaatctggcctgagatcttagagcccagccccctaaggacagggaaccaggtccctgcacggcacccacgcaggtgtcccggtctgcataagcctcgtgtgcctttgtaaagtccacctacacttttgaccagctctcgctgcccgcatgtgtttggcgctgtgctaggggcgggagttcttccagactcttggaccagcccgccctgaccaccagctctacttcccaacccccactgcctgagaggtctctatcagtgtcctgcctgaattctttccttcaagtgaagatgtgactgactacctcctcgagttgtcatgaggatgaaagaatggcattaaagcatttggtatacagtaggtgctcaataaattgctagtgatttttactc

SEQ ID NO: 111392 - DNA, 2000 bp, Homo sapiens
  Payload ID: 1813
  Gene Symbol: BEST2
  Gene Name: bestrophin 2
  Uniprot ID: Q8NFU1
  ENST ID: ENST00000553030
  CDS Start-End: 90-1619
gtccctgtgggtccttgcaccggccaccttcaacacagcccccacccgggccacccactctcccttggccacacctgccgggtgccacgatgaccgtcacctacacagcccgagtggcgaacgcccgcttcggtggcttctcccagctgctgctactgtggcgtgggagcatctacaaactcctgtggcgagagctgctctgcttccttgggttctacatggcgctgagtgctgcctaccgctttgtgctgaccgaagggcagaagcgctacttcgagaagcttgtgatttattgtgaccagtatgccagcctcatccctgtctccttcgtgcttggcttttatgtgacgctggtggtgaaccgctggtggagccagtacctatgcatgccgctgcccgacgcgctcatgtgcgtggtggcgggcaccgtgcacggacgcgacgaccgcggccgcctctaccggcgcacactcatgcgctacgcagggctctcggccgtgctcatcctgcgctccgtcagcaccgcggtgttcaagcgcttccccaccatagaccacgtggtggaggctgggtttatgacccgcgaggagcgcaagaagtttgaaaacctgaactcatcctacaacaagtactgggtgccctgcgtctggttctccaacctggcggcacaggcccgacgcgagggccgcatccgcgacaacagcgcccttaagctgctgctcgaggagctgaatgtttttcggggcaaatgtggaatgctctttcactatgactggattagcgtacccctcgtgtacacgcaggtggtgaccatcgcactgtacagctacttcctggcttgcctcattggtcgccagttcctggacccggctcagggttacaaagaccacgacctagacctgtgtgtgcccatcttcaccctcttgcagttcttcttctacgccggctggctcaaggtagctgagcagctcatcaaccccttcggagaggacgatgatgactttgagaccaactttctgatcgatagaaacttccaggtgtccatgctggcagtggacgagatgtatgatgacctggctgtgctggagaaggacttgtactgggatgcagccgaggctcgcgccccatacacagcggctactgtcttccagctgcggcagccttccttccagggctccacctttgacatcacgctggccaaagaagacatgcagttccagcggctggacggcttggatggaccgatgggagaggcgcccggcgacttcctgcagcgcctcctgccggcgggcgcgggcatggtcgcgggaggcccgctgggccggcgcctgtcctttctactccgcaagaacagctgcgtgtcggaggcgtctactggggccagctgctcatgcgcggttgtccccgaaggcgcggccccggagtgcagctgcggggacccgctgctcgaccccggcctgccggagcccgaggccccgccccctgcgggtcccgaaccgcttaccctcatccctgggcctgtcgagcccttcagcatcgtgaccatgcccgggccccggggtccggcgccaccctggctgcccagccctattggcgaggaggaggagaatctggcctgagatcttagagcccagccccctaaggacagggaaccaggtccctgcacggcacccacgcaggtgtcccggtctgcataagcctcgtgtgcctttgtaaagtccacctacacttttgaccagctctcgctgcccgcatgtgtttggcgctgtgctaggggcgggagttcttccagactcttggaccagcccgccctgaccaccagctctacttcccaacccccactgcctgagaggtctctatcagtgtcctgcctgaattctttccttcaagtgaagatgtgactgactacctcctcgagttgtcatgaggatgaaagaatggcattaaagcatttggtatacagtaggtgctcaataaattgctagtgatttttactcaaa

SEQ ID NO: 111393 - DNA, 2183 bp, Homo sapiens
  Payload ID: 1813
  Gene Symbol: BEST2
  Gene Name: bestrophin 2
  Uniprot ID: Q8NFU1
  ENST ID: ENST00000549706
  CDS Start-End: 325-1854
ctgaagctacagcctagccgagggaggaggaccaggaaagggaggcacgcccactccccagccccacccaacgccaaagccacccgcccattccatccctgtccctgtgggtccttgcaccggccaccttcaacacaggtgagatgagcccaggcttggggaaatagggggccctgagggaagagggaacctgcgggcaggaatgcatccggagtcctcccggggcggggagtggagggcttggaaggctggaggggaacggagagaggaaagcccccacccgggccacccactctcccttggccacacctgccgggtgccacgatgaccgtcacctacacagcccgagtggcgaacgcccgcttcggtggcttctcccagctgctgctactgtggcgtgggagcatctacaaactcctgtggcgagagctgctctgcttccttgggttctacatggcgctgagtgctgcctaccgctttgtgctgaccgaagggcagaagcgctacttcgagaagcttgtgatttattgtgaccagtatgccagcctcatccctgtctccttcgtgcttggcttttatgtgacgctggtggtgaaccgctggtggagccagtacctatgcatgccgctgcccgacgcgctcatgtgcgtggtggcgggcaccgtgcacggacgcgacgaccgcggccgcctctaccggcgcacactcatgcgctacgcagggctctcggccgtgctcatcctgcgctccgtcagcaccgcggtgttcaagcgcttccccaccatagaccacgtggtggaggctgggtttatgacccgcgaggagcgcaagaagtttgaaaacctgaactcatcctacaacaagtactgggtgccctgcgtctggttctccaacctggcggcacaggcccgacgcgagggccgcatccgcgacaacagcgcccttaagctgctgctcgaggagctgaatgtttttcggggcaaatgtggaatgctctttcactatgactggattagcgtacccctcgtgtacacgcaggtggtgaccatcgcactgtacagctacttcctggcttgcctcattggtcgccagttcctggacccggctcagggttacaaagaccacgacctagacctgtgtgtgcccatcttcaccctcttgcagttcttcttctacgccggctggctcaaggtagctgagcagctcatcaaccccttcggagaggacgatgatgactttgagaccaactttctgatcgatagaaacttccaggtgtccatgctggcagtggacgagatgtatgatgacctggctgtgctggagaaggacttgtactgggatgcagccgaggctcgcgccccatacacagcggctactgtcttccagctgcggcagccttccttccagggctccacctttgacatcacgctggccaaagaagacatgcagttccagcggctggacggcttggatggaccgatgggagaggcgcccggcgacttcctgcagcgcctcctgccggcgggcgcgggcatggtcgcgggaggcccgctgggccggcgcctgtcctttctactccgcaagaacagctgcgtgtcggaggcgtctactggggccagctgctcatgcgcggttgtccccgaaggcgcggccccggagtgcagctgcggggacccgctgctcgaccccggcctgccggagcccgaggccccgccccctgcgggtcccgaaccgcttaccctcatccctgggcctgtcgagcccttcagcatcgtgaccatgcccgggccccggggtccggcgccaccctggctgcccagccctattggcgaggaggaggagaatctggcctgagatcttagagcccagccccctaaggacagggaaccaggtccctgcacggcacccacgcaggtgtcccggtctgcataagcctcgtgtgcctttgtaaagtccacctacacttttgaccagctctcgctgcccgcatgtgtttggcgctgtgctaggggcgggagttcttccagactcttggaccagcccgccctgaccaccagctctacttcccaacccccactgcctgagaggtctctatcagtgtcctgcctgaattctttccttcaagtgaagatgtgactgactacctcctcgagttgtcatgaggatgaaagaatggcattaaa

SEQ ID NO: 111394 - DNA, 643 bp, Homo sapiens
  Payload ID: 1813
  Gene Symbol: BEST2
  Gene Name: bestrophin 2
  ENST ID: ENST00000552539
  CDS Start-End: 1-236
ctgagcagctcatcaaccccttcggagaggacgatgatgactttgagaccaactttctgatcgatagaaacttccaggtgtccatgctggcagtggacgagatgtatgatgacctggctgtgctggagaaggacttgtactgggatgcagccgaggctcgcgccccatacacagcggctactgtcttccagctgcggcagccttccttccagggctccacctttgacatcacgtgagccagttgggtgggcagggccgcctggggcagggcttatggctctgcggggcacatctgattgaaaaggttaagtggaatcaattctggagatggggataagagctaaagtctcaggactgtgataacgccagaagctaagataggagtcaggggacaaggtcaaggtctgagactgggccactgactggggacagagctaagggctgaggtcagcgaggatcagaccggtcagtggtgattccaaaggagatgagggctgaggccaggagcactggctcacgcctgtaatcccagtactttgggaggctgaggcaggaggatcctttgagcaagcccaggagttcagaccagcctgggcaacatagtgagacccccgtctctactaaaaataaaaaattagccaag

SEQ ID NO: 111395 - DNA, 1876 bp, Homo sapiens
  Payload ID: 1814
  Gene Symbol: BEST3
  Gene Name: bestrophin 3
  Uniprot ID: Q8N1M1
  ENST ID: ENST00000266661
  CDS Start-End: 344-562
atcagcagctgttgcttctgtttgttcccagctataactgtcatcagtggctaaactggcataaacaggcctctacaagtggaaaaacatttaacccctgttcttgtcacactctgggtcctctcagtggccagagaacagaaagaaaatctgactgtgcacgagcgaagggtgacaccgggcgtgcagcaccgacctgaaggcacctcttcgggggagcccgaaatttgaagattctctttcctgtcggagactacaaaccaaataaatagggttttatgttactctggtagtgaaccgatggtggaaccagtttgtgaatttgccctggccagacaggctaatgttcctcatctctagcagtgttcacggaagcgacgagcacgggcgcctgcttagaaggacgctgatgcgctacgtcaatctcacctccctgctcatctttcgctcggtgagcactgctgtgtacaaaagatttcccacaatggaccacgtggttgaagcagaaagaactggcatgaaacccattctgccttcaagttttgagatgcagagcttttagttcctctgctaatagagcctcgtttgaatactctgcttgaaaggcaaaagacatctgcctcaacttcaatcaaggaaaaatagagcaactgtacagcaggcagaatctctatgatgactggaattttgtctatcaatggatgtaattaatcctttggctcgagggcaataaaattttgtcttaaagtagcagatcctgctccatcaaaccacaactcaattgggagtaaatgcaaacatgtatctatattgagagatagattttactctgattagaaagatgaaggagggatttggggataaacaatatgaaaattgctgagcagagctgagccagccagaagaaaaagcgatagcaagagaaactgtaggcagatgcaacggcaggataaaatagctatgccaggggtgtgatggggcctgaggagagcatggcatggagacagacacgtgcagggaaccaagtggtgggaggacaagcccactcagagtgttgccgaactgtagcaaatcagtaactataattagcacagcctcagcaatgacaataatgatcatattctgaaaaaaatattggtctctgcttaaaatggcttgaagtcctgatgagggtgacattccatttcataacaaatacttttggaatggacttgaccaacaacctagagattttctttcagttgaccgactttgatttccaaaggtggagttacttttgtgaacccccaaaatctgagacaggtctcagttaatttagaaagtttattttgccaaggttgaggatgtgcacccgtgacacagcctcaggtggtcctgatgacgtgtgcccaaagcggtcagaacagtttggttttatgcattgtaggaagacatgagacatcgatcaacatatgtaagataaacattggttcagtctggaaaagccagagatgactcaaagtggggagggggcttccgggtcataggtaggtaagagacaaatggttgcattcttctgggtttctgattagtctctccaaaggaggcaatcagatatgcatttatctcagtgaatggagcaatgactttaatagaatgggaggcatgtatgccgtaagcagttcccaacttgacttttccctttagcttagtgattttggggacccaagatattttcctttcacactttggataagtaagatgtgtgaccctgcaaggaataacaaaaattattctgcttatatattcttagaggatacattaatgtctcagtgattgtcattcatctttcacagcacccagcaaaatactcaataaatttgtgctaaaaacaaaa

SEQ ID NO: 111396 - DNA, 1506 bp, Homo sapiens
  Payload ID: 1814
  Gene Symbol: BEST3
  Gene Name: bestrophin 3
  Uniprot ID: Q8N1M1
  ENST ID: ENST00000331471
  CDS Start-End: 173-1369
gggtcctctcagtggccagagaacagaaagaaaatctgactgtgcacgagcgaagggtgacaccgggcgtgcagcaccgacctgaaggcacctcttcgggggagcccgaaatttgaagattctctttcctgtcggagactacaaaccaaataaatagaaaaaactatccaagatgactgtcacttactccagtaaagtagcaaatgcaactttttttggatttcataggttactcctcaagtggagaggcagcatctacaaactactgtacagggaatttattgtttttgctgttctttatacagcaataagtttggtatacagattgttacttacaggagtccaaaaacgttactttgaaaaattatcaatttactgtgacagatatgctgaacaaattccagtaacctttgtgcttgggttttatgttactctggtagtgaaccgatggtggaaccagtttgtgaatttgccctggccagacaggctaatgttcctcatctctagcagtgttcacggaagcgacgagcacgggcgcctgcttagaaggacgctgatgcgctacgtcaatctcacctccctgctcatctttcgctcggtgagcactgctgtgtacaaaagatttcccacaatggaccacgtggttgaagcaggttttatgacaacagatgaaaggaaattattcaaccacctcaagtctcctcatctgaaatattgggttccattcatctggtttggaaatcttgcaactaaagcccggaatgaaggtagaatcagagacagtgttgatctgcaatcattgatgactgaaatgaatcgataccgctcttggtgcagcctcttattcggttatgactgggttgggattccgctggtttacacccaggttgtcactcttgctgtctataccttcttctttgcgtgcctgattggacgccagtttttggatcccaccaaaggctacgcagggcatgacttggatctttacattcccatcttcaccctcctacaattcttcttctatgcaggatggcttaaggtagcagagcagcttatcaacccttttggagaagatgatgatgattttgaaactaactggtgcattgacagaaatttgcaggtctctcttttagctgtggacgaaatgcacatgagcttacccaagatgaagaaggacatttactgggacgattctgctgctcgcccaccatacacattggcagctgctgactactgcataccctcatttctggggtcaacagtccagatggggaaacagatgcctaagaatgagtggaagatggaagatataaaaatcccactccctcagcctcaattccagtgtgctaagagtgatcctggtggttaaaggtacaacactcgaatctttcaaaacaacttggctcctaaacacaagccaacaatctcatctgctgctcaactgaaaaacattctccactttttagcatccaggcatgtggagttcctaagaaatgcactttatta

SEQ ID NO: 111397 - DNA, 3532 bp, Homo sapiens
  Payload ID: 1814
  Gene Symbol: BEST3
  Gene Name: bestrophin 3
  Uniprot ID: Q8N1M1
  ENST ID: ENST00000330891
  CDS Start-End: 228-2234
ataaacaggcctctacaagtggaaaaacatttaacccctgttcttgtcacactctgggtcctctcagtggccagagaacagaaagaaaatctgactgtgcacgagcgaagggtgacaccgggcgtgcagcaccgacctgaaggcacctcttcgggggagcccgaaatttgaagattctctttcctgtcggagactacaaaccaaataaatagaaaaaactatccaagatgactgtcacttactccagtaaagtagcaaatgcaactttttttggatttcataggttactcctcaagtggagaggcagcatctacaaactactgtacagggaatttattgtttttgctgttctttatacagcaataagtttggtatacagattgttacttacaggagtccaaaaacgttactttgaaaaattatcaatttactgtgacagatatgctgaacaaattccagtaacctttgtgcttgggttttatgttactctggtagtgaaccgatggtggaaccagtttgtgaatttgccctggccagacaggctaatgttcctcatctctagcagtgttcacggaagcgacgagcacgggcgcctgcttagaaggacgctgatgcgctacgtcaatctcacctccctgctcatctttcgctcggtgagcactgctgtgtacaaaagatttcccacaatggaccacgtggttgaagcaggttttatgacaacagatgaaaggaaattattcaaccacctcaagtctcctcatctgaaatattgggttccattcatctggtttggaaatcttgcaactaaagcccggaatgaaggtagaatcagagacagtgttgatctgcaatcattgatgactgaaatgaatcgataccgctcttggtgcagcctcttattcggttatgactgggttgggattccgctggtttacacccaggttgtcactcttgctgtctataccttcttctttgcgtgcctgattggacgccagtttttggatcccaccaaaggctacgcagggcatgacttggatctttacattcccatcttcaccctcctacaattcttcttctatgcaggatggcttaaggtagcagagcagcttatcaacccttttggagaagatgatgatgattttgaaactaactggtgcattgacagaaatttgcaggtctctcttttagctgtggacgaaatgcacatgagcttacccaagatgaagaaggacatttactgggacgattctgctgctcgcccaccatacacattggcagctgctgactactgcataccctcatttctggggtcaacagtccagatggggctgtctgggtccgactttcctgacgaggagtggctgtgggattatgagaagcatggccatcggcattccatgataagaagagtcaagcggttcctgagtgcccacgaacacccctccagccccagaagaagaagctacaggaggcagacaagtgacagctccatgttcttaccccgagatgacctcagcccagccagggacctactggatgtgccctcaagaaacccccccagggcctcacccacctggaagaaatcctgcttcccagaaggaagccccacgctgcacttcagcatgggagagctgtccaccatcagggagaccagccagacaagcactttacagagcctgaccccacagtccagtgtgagaacttcccccatcaaaatgccactggtacctgaggtattgatcacagcagccgaagcaccagtgcccacatcagggggctaccaccatgattccgctacctccatcttgagctctgagtttacaggggttcagccaagcaagactgagcagcagcagggccccatgggatccatcctgtctccctcagagaaggagacacctcctggaggccccagtccccagacagtttcagccagcgctgaggaaaatatattcaactgtgaagaagaccctggtgatacctttctaaaaaggtggagtcttccgggattcctggggtccagccacacttccctgggaaacctaagtccagaccccatgagctctcagccagctcttttaattgacacagaaacatcctcagagatcagtgggatcaacattgtggctggctctcgagtctcttctgatatgctgtatttaatggaaaacctggacaccaaggaaacagatatcatagagctgaacaaggaaactgaggaatcacccaaatgagtgccaccaagttctaggacctggttctagcctagattcttacctccccaaaagcagcatattaggcccaggacatacctgaaggctggtcgactttttaaaaaacatgatcacactgtataagctacttagaactttgaagggcattatgatcctgactttttgagagctgcgaaaaatcaaacgcattcacgtcatccaacacaacatggctttcatcagaagttacacagaccacagtgatttagccaaataagtcttaaccaaaaaaaggaatctgaaaaacatacatgacttataaattcatagattattagttgtggaaagagtctcatagatcatagtccaatcccctagacccaaaggcccagacacgcagggttctctatttctcttcttttttctctttctttttttctttagccataaagaaaggagatggatcacctaatgcctgaaagatcccctccttcctaacgtttttgtttgaggctttctaaccatctcattcctacttttataactattattgttattatcacttcctgattcttaagcttcatcagcaccagaacacttaattctcttcaatttccttttttacttttctctcttttccttttattctgtcatcctttttttcccttcccttctccctggttgtgctgcttttctagtaatctgtcccatttttcaggttataatatttcctcttgccaaatctgttgcttatgtcttgccatgaatttcaaaatataagacattggcaaagcctcctacagaatcatcaaaggtgtcaacaaatccagcctgatacccttccagtctcacttccagtggaaggcatataggagtgatggttccccccgtgcccttgcagccattgacatttctttctgcttccactatttggtgttgggcactggagaaaaacgaagccaagagaatatgaaatttgcatagccaaatgctatggaaccaaagaataagatgactcacatctgtttaacttgaactcttatgcaaaaatcctaatcgtgtcgcaacacgggaccagttactgtgtctatcgggtcatttgggaatgggcaggatactggagctgggaggctaatggggtccagagctgcataatggggatcggatgttggtactcctcccagggagctctcaggacagctgtttgtcgtgggctcccaagtgcctaggccatgccttacgactgctgcacttaccatttgtcatatgatggcacttgactacatatggctttagaaataaaataaccctcaaaacta

SEQ ID NO: 111398 - DNA, 2878 bp, Homo sapiens
  Payload ID: 1814
  Gene Symbol: BEST3
  Gene Name: bestrophin 3
  Uniprot ID: Q8N1M1
  ENST ID: ENST00000488961
  CDS Start-End: 213-1580
cagagagggctgactcagagtctgcacatggggtctgcttccaagttcttccaactgggcatatgcctccgccactctctgactgtcctttgcctgtgccaaggtttctgggaagaacaggaagttcagggatggcggaaaatgtttggcagattccctgagtccaaagccggagcacctgctcctgcctgagggcagagaggactggttttatgacaacagatgaaaggaaattattcaaccacctcaagtctcctcatctgaaatattgggttccattcatctggtttggaaatcttgcaactaaagcccggaatgaaggtagaatcagagacagtgttgatctgcaatcattgatgactgaaatgaatcgataccgctcttggtgcagcctcttattcggttatgactgggttgggattccgctggtttacacccaggtagcagagcagcttatcaacccttttggagaagatgatgatgattttgaaactaactggtgcattgacagaaatttgcaggtctctcttttagctgtggacgaaatgcacatgagcttacccaagatgaagaaggacatttactgggacgattctgctgctcgcccaccatacacattggcagctgctgactactgcataccctcatttctggggtcaacagtccagatggggctgtctgggtccgactttcctgacgaggagtggctgtgggattatgagaagcatggccatcggcattccatgataagaagagtcaagcggttcctgagtgcccacgaacacccctccagccccagaagaagaagctacaggaggcagacaagtgacagctccatgttcttaccccgagatgacctcagcccagccagggacctactggatgtgccctcaagaaacccccccagggcctcacccacctggaagaaatcctgcttcccagaaggaagccccacgctgcacttcagcatgggagagctgtccaccatcagggagaccagccagacaagcactttacagagcctgaccccacagtccagtgtgagaacttcccccatcaaaatgccactggtacctgaggtattgatcacagcagccgaagcaccagtgcccacatcagggggctaccaccatgattccgctacctccatcttgagctctgagtttacaggggttcagccaagcaagactgagcagcagcagggccccatgggatccatcctgtctccctcagagaaggagacacctcctggaggccccagtccccagacagtttcagccagcgctgaggaaaatatattcaactgtgaagaagaccctggtgatacctttctaaaaaggtggagtcttccgggattcctggggtccagccacacttccctgggaaacctaagtccagaccccatgagctctcagccagctcttttaattgacacagaaacatcctcagagatcagtgggatcaacattgtggctggctctcgagtctcttctgatatgctgtatttaatggaaaacctggacaccaaggaaacagatatcatagagctgaacaaggaaactgaggaatcacccaaatgagtgccaccaagttctaggacctggttctagcctagattcttacctccccaaaagcagcatattaggcccaggacatacctgaaggctggtcgactttttaaaaaacatgatcacactgtataagctacttagaactttgaagggcattatgatcctgactttttgagagctgcgaaaaatcaaacgcattcacgtcatccaacacaacatggctttcatcagaagttacacagaccacagtgatttagccaaataagtcttaaccaaaaaaaggaatctgaaaaacatacatgacttataaattcatagattattagttgtggaaagagtctcatagatcatagtccaatcccctagacccaaaggcccagacacgcagggttctctatttctcttcttttttctctttctttttttctttagccataaagaaaggagatggatcacctaatgcctgaaagatcccctccttcctaacgtttttgtttgaggctttctaaccatctcattcctacttttataactattattgttattatcacttcctgattcttaagcttcatcagcaccagaacacttaattctcttcaatttccttttttacttttctctcttttccttttattctgtcatcctttttttcccttcccttctccctggttgtgctgcttttctagtaatctgtcccatttttcaggttataatatttcctcttgccaaatctgttgcttatgtcttgccatgaatttcaaaatataagacattggcaaagcctcctacagaatcatcaaaggtgtcaacaaatccagcctgatacccttccagtctcacttccagtggaaggcatataggagtgatggttccccccgtgcccttgcagccattgacatttctttctgcttccactatttggtgttgggcactggagaaaaacgaagccaagagaatatgaaatttgcatagccaaatgctatggaaccaaagaataagatgactcacatctgtttaacttgaactcttatgcaaaaatcctaatcgtgtcgcaacacgggaccagttactgtgtctatcgggtcatttgggaatgggcaggatactggagctgggaggctaatggggtccagagctgcataatggggatcggatgttggtactcctcccagggagctctcaggacagctgtttgtcgtgggctcccaagtgcctaggccatgccttacgactgctgcacttaccatttgtcatatgatggcacttgactacatatggctttagaaataaaataaccctcaaaacta

SEQ ID NO: 111399 - DNA, 1692 bp, Homo sapiens
  Payload ID: 1814
  Gene Symbol: BEST3
  Gene Name: bestrophin 3
  ENST ID: ENST00000476098
  CDS Start-End: 332-925
agtggccagagaacagaaagaaaatctgactgtgcacgagcgaagggtgacaccgggcgtgcagcaccgacctgaaggcacctcttcgggggagcccgaaatttgaagattctctttcctgtcggagactacaaaccaaataaatagggttttatgttactctggtagtgaaccgatggtggaaccagtttgtgaatttgccctggccagacaggctaatgttcctcatctctagcagtgttcacggaagcgacgagcacgggcgcctgcttagaaggacgctgatgcgctacgtcaatctcacctccctgctcatctttcgctcggttttatgacaacagatgaaaggaaattattcaaccacctcaagtctcctcatctgaaatattgggttccattcatctggtttggaaatcttgcaactaaagcccggaatgaaggtagaatcagagacagtgttgatctgcaatcattgatgactgaaatgaatcgataccgctcttggtgcagcctcttattcggttatgactgggttgggattccgctggtttacacccaggtagcagagcagcttatcaacccttttggagaagatgatgatgattttgaaactaactggtgcattgacagaaatttgcaggtctctcttttagctgtggacgaaatgcacatgagcttacccaagatgaagaaggacatttactgggacgattctgctgctcgcccaccatacacattggcagctgctgactactgcataccctcatttctggggtcaacagtccagatggggagatctcgcttcaaccctgttccctttgccgaatgtctcctaatccccatcagtgatggtttgtggcacttctcttccaaaggggcctctgaggctgaaaacctttccagacccaaagaaaaggaagactgaaagtggaatttcagtagttccagcaaataatgagaacgatttaggagccaggagatttgccttgttgcccgcaaagcacatcttagagaaggttgcctactccaggctagatttgcttctgcttctagctagccttctaagaccagacccacccacccagggctccttccaggccagagagctcatccctgccctcagtgtattctcagtttccatggataggaatctcttgttgtatgcatgtctcagccttcatgataccttctgcaggggcagagcttcatggacatccagcaatcatctcaattttcagaattaataagagctgttcttctgtgagtttgattttagataattaaatatgctttatccttttcctcactctcaccattgattaatgcaaagtacttgacgatttaacttgaaaagaaaagagaccagcaatactgatagaatcagagcatcattgtgataactctatttagactgcaaatgctccaaacactctatttcttatgtccattgagttgttgttaccccatggttaagataattttttgaaggtctcaaaatttttatcctgacctacttatttatcctaatcatcataattctgcagattactacataaatgttcatgttctttagcaaatattaaaacacatttctcttgtttctaaatacagaaacagaaatagggattgacaagatctcagagaaaattccttccccaaaagatcattgggaagattagatgagattgtaaa

SEQ ID NO: 111400 - DNA, 572 bp, Homo sapiens
  Payload ID: 1814
  Gene Symbol: BEST3
  Gene Name: bestrophin 3
  ENST ID: ENST00000548658
  CDS Start-End: 147-572
aaagaaaatctgactgtgcacgagcgaagggtgacaccgggcgtgcagcaccgacctgaaggcacctcttcgggggagcccgaaatttgaagattctctttcctgtcggagactacaaaccaaataaatagaaaaaactatccaagatgactgtcacttactccagtaaagtagcaaatgcaactttttttggatttcataggttactcctcaagtggagaggcagcatctacaaactactgtacagggaatttattgtttttgctgttctttatacagcaataagtttggtatacagattgttacttacaggagtccaaaaacgttactttgaaaaattatcaatttactgtgacagatatgctgaacaaattccagtaacctttgtgcttggttttatgacaacagatgaaaggaaattattcaaccacctcaagtctcctcatctgaaatattgggttccattcatctggtttggaaatcttgcaactaaagcccggaatgaaggtagaatcagagacagtgttgatctgcaatcattgatgactgaaatgaatcgataccgctcttgg

SEQ ID NO: 111401 - DNA, 720 bp, Homo sapiens
  Payload ID: 1814
  Gene Symbol: BEST3
  Gene Name: bestrophin 3
  ENST ID: ENST00000552295
  CDS Start-End: 237-720
aggcacaaatgacattttttttctggaaggcaaaatcagaagatatggataataatatatttttgtcctccaacctctaaaaaggctaaaattcagctaaaagcatcagtgtcaccaacgtgtctgctgtaagaaactgctttataatttcctgttattctacagggttttatgttactctggtagtgaaccgatggtggaaccagtttgtgaatttgccctggccagacaggctaatgttcctcatctctagcagtgttcacggaagcgacgagcacgggcgcctgcttagaaggacgctgatgcgctacgtcaatctcacctccctgctcatctttcgctcggtgagcactgctgtgtacaaaagatttcccacaatggaccacgtggttgaagcaggttttatgacaacagatgaaaggaaattattcaaccacctcaagtctcctcatctgaaatattgggttccattcatctggtttggaaatcttgcaactaaagcccggaatgaaggtagaatcagagacagtgttgatctgcaatcattgatgactgaaatgaatcgataccgctcttggtgcagcctcttattcggttatgactgggttgggattccgctggtttacacccaggtagcagagcagcttatcaacccttttggagaagatgatgatgattttgaaactaactggtgcattgacagaaatttgcaggtctctc

SEQ ID NO: 111402 - DNA, 721 bp, Homo sapiens
  Payload ID: 1814
  Gene Symbol: BEST3
  Gene Name: bestrophin 3
  Uniprot ID: Q8N1M1
  ENST ID: ENST00000551160
  CDS Start-End: 358-576
gaaaaacatttaacccctgttcttgtcacactctgggtcctctcagtggccagagaacagaaagaaaatctgactgtgcacgagcgaagggtgacaccgggcgtgcagcaccgacctgaaggcacctcttcgggggagcccgaaatttgaagattctctttcctgtcggagactacaaaccaaataaatagattgttacttacaggagtccaaaaacgttactttgaaaaattatcaatttactgtgacagatatgctgaacaaattccagtaacctttgtgcttgggttttatgttactctggtagtgaaccgatggtggaaccagtttgtgaatttgccctggccagacaggctaatgttcctcatctctagcagtgttcacggaagcgacgagcacgggcgcctgcttagaaggacgctgatgcgctacgtcaatctcacctccctgctcatctttcgctcggtgagcactgctgtgtacaaaagatttcccacaatggaccacgtggttgaagcagaaagaactggcatgaaacccattctgccttcaagttttgagatgcagagcttttagttcctctgctaatagagcctcgtttgaatactctgcttgaaaggcaaaagacatctgcctcaacttcaatcaaggaaaaatagagcaactgtacagcaggcagaatctctatgatgactggaattttgtctatcaatggatgtaa

SEQ ID NO: 111403 - DNA, 2929 bp, Homo sapiens
  Payload ID: 1814
  Gene Symbol: BEST3
  Gene Name: bestrophin 3
  Uniprot ID: Q8N1M1
  ENST ID: ENST00000553096
  CDS Start-End: 153-1841
ccgacctgaaggcacctcttcgggggagcccgaaatttgaagattctctttcctgtcggagactacaaaccaaataaatagggttttatgttactctggtagtgaaccgatggtggaaccagtttgtgaatttgccctggccagacaggctaatgttcctcatctctagcagtgttcacggaagcgacgagcacgggcgcctgcttagaaggacgctgatgcgctacgtcaatctcacctccctgctcatctttcgctcggtgagcactgctgtgtacaaaagatttcccacaatggaccacgtggttgaagcaggttttatgacaacagatgaaaggaaattattcaaccacctcaagtctcctcatctgaaatattgggttccattcatctggtttggaaatcttgcaactaaagcccggaatgaaggtagaatcagagacagtgttgatctgcaatcattgatgactgaaatgaatcgataccgctcttggtgcagcctcttattcggttatgactgggttgggattccgctggtttacacccaggttgtcactcttgctgtctataccttcttctttgcgtgcctgattggacgccagtttttggatcccaccaaaggctacgcagggcatgacttggatctttacattcccatcttcaccctcctacaattcttcttctatgcaggatggcttaaggtagcagagcagcttatcaacccttttggagaagatgatgatgattttgaaactaactggtgcattgacagaaatttgcaggtctctcttttagctgtggacgaaatgcacatgagcttacccaagatgaagaaggacatttactgggacgattctgctgctcgcccaccatacacattggcagctgctgactactgcataccctcatttctggggtcaacagtccagatggggctgtctgggtccgactttcctgacgaggagtggctgtgggattatgagaagcatggccatcggcattccatgataagaagagtcaagcggttcctgagtgcccacgaacacccctccagccccagaagaagaagctacaggaggcagacaagtgacagctccatgttcttaccccgagatgacctcagcccagccagggacctactggatgtgccctcaagaaacccccccagggcctcacccacctggaagaaatcctgcttcccagaaggaagccccacgctgcacttcagcatgggagagctgtccaccatcagggagaccagccagacaagcactttacagagcctgaccccacagtccagtgtgagaacttcccccatcaaaatgccactggtacctgaggtattgatcacagcagccgaagcaccagtgcccacatcagggggctaccaccatgattccgctacctccatcttgagctctgagtttacaggggttcagccaagcaagactgagcagcagcagggccccatgggatccatcctgtctccctcagagaaggagacacctcctggaggccccagtccccagacagtttcagccagcgctgaggaaaatatattcaactgtgaagaagaccctggtgatacctttctaaaaaggtggagtcttccgggattcctggggtccagccacacttccctgggaaacctaagtccagaccccatgagctctcagccagctcttttaattgacacagaaacatcctcagagatcagtgggatcaacattgtggctggctctcgagtctcttctgatatgctgtatttaatggaaaacctggacaccaaggaaacagatatcatagagctgaacaaggaaactgaggaatcacccaaatgagtgccaccaagttctaggacctggttctagcctagattcttacctccccaaaagcagcatattaggcccaggacatacctgaaggctggtcgactttttaaaaaacatgatcacactgtataagctacttagaactttgaagggcattatgatcctgactttttgagagctgcgaaaaatcaaacgcattcacgtcatccaacacaacatggctttcatcagaagttacacagaccacagtgatttagccaaataagtcttaaccaaaaaaaggaatctgaaaaacatacatgacttataaattcatagattattagttgtggaaagagtctcatagatcatagtccaatcccctagacccaaaggcccagacacgcagggttctctatttctcttcttttttctctttctttttttctttagccataaagaaaggagatggatcacctaatgcctgaaagatcccctccttcctaacgtttttgtttgaggctttctaaccatctcattcctacttttataactattattgttattatcacttcctgattcttaagcttcatcagcaccagaacacttaattctcttcaatttccttttttacttttctctcttttccttttattctgtcatcctttttttcccttcccttctccctggttgtgctgcttttctagtaatctgtcccatttttcaggttataatatttcctcttgccaaatctgttgcttatgtcttgccatgaatttcaaaatataagacattggcaaagcctcctacagaatcatcaaaggtgtcaacaaatccagcctgatacccttccagtctcacttccagtggaaggcatataggagtgatggttccccccgtgcccttgcagccattgacatttctttctgcttccactatttggtgttgggcactggagaaaaacgaagccaagagaatatgaaatttgcatagccaaatgctatggaaccaaagaataagatgactcacatctgtttaacttgaactcttatgcaaaaatcctaatcgtgtcgcaacacgggaccagttactgtgtctatcgggtcatttgggaatgg

SEQ ID NO: 111404 - DNA, 1187 bp, Homo sapiens
  Payload ID: 1814
  Gene Symbol: BEST3
  Gene Name: bestrophin 3
  ENST ID: ENST00000547208
  CDS Start-End: 210-641
tctgggtcctctcagtggccagagaacagaaagaaaatctgactgtgcacgagcgaagggtgacaccgggcgtgcagcaccgacctgaaggcacctcttcgggggagcccgaaatttgaagattctctttcctgtcggagactacaaaccaaataaatagcagtgttcacggaagcgacgagcacgggcgcctgcttagaaggacgctgatgcgctacgtcaatctcacctccctgctcatctttcgctcggtgagcactgctgtgtacaaaagatttcccacaatggaccacgtggttgaagcaggttttatgacaacagatgaaaggaaattattcaaccacctcaagtctcctcatctgaaatattgggttccattcatctggtttggaaatcttgcaactaaagcccggaatgaaggtagaatcagagacagtgttgatctgcaatcattgatgactgaaatgaatcgataccgctcttggtgcagcctcttattcggttatgactgggttgggattccgctggtttacacccaggtagcagagcagcttatcaacccttttggagaagatgatgatgattttgaaactaactggtgcattgacagaaatttgcagctgtggacgaaatgcacatgagcttacccaagatgaagaaggacatttactgggacgattctgctgctcgcccaccatacacattggcagctgctgactactgcataccctcatttctggggtcaacagtccagatggggaaacagatgcctaagaatgagtggaagatggaagatataaaaatcccactccctcagcctcaattccagtgtgctaagagtgatcctggtggttaaaggtacaacactcgaatctttcaaaacaacttggctcctaaacacaagccaacaatctcatctgctgctcaactgaaaaacattctccactttttagcatccaggcatgtggagttcctaagaaatgcactttattaatgcccaacatggtaccttcccaggagattttaatggtaattttcactctaccagtgttatgtgtgctgactttagggcccacccttcacatatggtattactcactcaagggtttaaactggggcattccagaagtaccagtttccatgatgaaaagtggaacagcagaagcgcttaaagcaattttactgaa

SEQ ID NO: 111405 - DNA, 2047 bp, Homo sapiens
  Payload ID: 1815
  Gene Symbol: BEST4
  Gene Name: bestrophin 4
  Uniprot ID: Q8NFU0
  ENST ID: ENST00000372207
  CDS Start-End: 1-1422
atgacggtttcatacactctcaaagtggcggaggcccgcttcggaggtttctctggcctgcttctccgctggaggggaagcatctacaagctcctctacaaggaattcctcctctttggggccttgtacgctgtgcttagcatcacctaccggctgctgctgacccaggagcagaggtacgtgtatgctcaggtggcccggtactgcaaccgctcagcagacctcattcccttgtcctttgtattgggtttctatgtgactctcgtggtgaaccgctggtggtcccagtacacaagcatcccgctgccagaccagctgatgtgcgtcatctcggctagcgtgcacggcgtggaccagcggggccgcctgctgcgccgcaccctcatccgctacgcgaacctggcgtccgtgctggtgctgcgctcggtcagcacccgcgtgcttaagcgcttccccaccatggagcacgtggtggacgcaggtttcatgtcccaggaagagaggaaaaagtttgagagcctgaaatccgacttcaacaagtactgggtcccctgcgtctggttcaccaacctggcggcccaggcccggagggacgggcgaatacgtgacgatatcgctctctgtctacttttggaagagctgaacaagtaccgagccaagtgcagcatgctattccactatgactggatcagcatccccctcgtctacacccaagtggtgaccatagccgtctactctttctttgccctctccctggttggccgccagtttgtggagccagaggcaggggctgccaaacctcagaagcttctgaagccaggccaggagccagccccagccctgggagacccggacatgtacgtgcctctcaccactctgctgcagttcttcttctatgctggctggctcaaggtggctgaacagatcatcaacccatttggtgaggatgatgacgactttgagacaaatcagctcatagaccgcaacttgcaggtgtccctgctatccgtggacgaaatgtaccagaaccttccccccgctgagaaggaccagtactgggatgaggaccagccgcagccaccctacactgtggccacggcggccgagtctctgcggccctcattcctgggctccaccttcaacctgcgcatgagcgacgaccctgagcagagcctgcaggtggaggcgtcccccggatctggtcggcccgcgcccgccgcgcagaccccgttgctcggccgcttcctgggcgtaggggcgccctccccggccatcagcctccggaacttcggccgcgtgcgaggcaccccccgccccccgcatctgctgcgcttccgggcggaggagggcggcgaccccgaggccgcagcccgcatcgaggaggaatcggcggagtccggggacgaggccctggagccctgaggtctcgcctgcccccgcccggtttcccccacccactgccctccttccctcccgtgcccggtcctgccagccagctctattagagcagcttttcctgtgtgccttgaaggccagagcatttagggacagaacttgaaagagaagatggcgaaaagggcctgagccagggctgggaatgtgtccactttggtgggagagaaggtcggttgcttgggggacgtgaagctagaaaaataaatgagcccaggcatagaggactagagcccaggtgcacggttagcttcacagcaacagggagctaggccattggttctcaaacttaaggaaggatcagcatcacggaaggtcttgtcaaaagagtgctgggcaccactcccagcatttctggcacgttagatttgggatggcgcccaataacttgcatttctaacaagttcccaggtgatgctgtgctgcttgtccaggaaacacaatttgagagtcatgtgaaacgtgcttgaaggggtataccttaccctggtaaccttactcaaaagaagggtcagtgtgtgctgggggacttttgccttgtttgtaatgttaaagtttttgtttacattgagaatatattcaagtttttgtttaa

SEQ ID NO: 111406 - DNA, 1504 bp, Homo sapiens
  Payload ID: 1816
  Gene Symbol: BET1
  Gene Name: Bet1 golgi vesicular membrane trafficking protein
  Uniprot ID: O15155
  ENST ID: ENST00000222547
  CDS Start-End: 160-516
cggcgcggtgtttagactccactgatgtcgtggcgctttaggggaagaagttggtgtttcgctgggccctggtactgaagacgcggtccgggtcgcccctagctgtttcctactcacccaaagccccgcacccgccttttctctctctcctctggcaggatgaggcgtgcaggcctgggtgaaggagtacctcctggcaactatgggaactatggctatgctaatagtgggtatagtgcctgtgaagaagaaaatgagaggctcactgaaagtctgagaagcaaagtaactgctataaaatctctttccattgaaataggccatgaagttaaaacccagaataaattattagctgaaatggattcacaatttgattccacaactggatttctaggtaaaactatgggcaaactgaagattttatccagagggagccaaacaaagctgctgtgctatatgatgctgttttctttatttgtcttttttatcatttattggattattaaactgaggtgatgcatgtaattgtgaatttggaatttgttccaacttaatggcttgcagtaccactttgataaaaatcagcatcaaaacattcctagtgttcaaatactgtggcattttccattgaaaattgctgaattttgcttattttataaatcacattagttaatacagtggtctttgaatactgtttcttaatgactcattttagcccctattttcaggggtagtgagagggtgtggctccactaatttccagtttgtttttctattgtttgccaactgtcagattaaatagcattataatattttgttgtaatcataaatgcaggtttatgtcccatgtaaggaaacttagtgggagagtaacagaatgcctggagagcctgactctgagctcttgaagtagtcagccagtttgtggtaaaatggtaattgaattttcctaactgcatcaactgtaatgatatactcccttctcctcctttatttagttaaaattgtaggctgatttctttttacctacaatcttcctaataatttttgatgataatgacccctcatttctttctgcccaaagacctcattctttaaataaaacttgttattttggcatatttctggtagggcccattgcacatgtgtatcagtatagttattatttcatattaactttatgaattctcttgacttggcttataatagttttatgatttttactacataggtagcacatttatcatttgtgacagaataatgtgaagttaagtaattactgaactttaaatggaaatagtatgcaagaaactcaggcattgaacttgaagataagagtattattgctttaatccagtgtatttgtttatggaaagaaaaacacaaaggcagactgttgagtaaaaaatattaaatattgttaaatattctgtattttggaatttatccatttataggcttcaaaagtaaatttttaaataaaatatattagtcgactgtgtta

SEQ ID NO: 111407 - DNA, 3586 bp, Homo sapiens
  Payload ID: 1816
  Gene Symbol: BET1
  Gene Name: Bet1 golgi vesicular membrane trafficking protein
  ENST ID: ENST00000357520
  CDS Start-End: 140-523
actgatgtcgtggcgctttaggggaagaagttggtgtttcgctgggccctggtactgaagacgcggtccgggtcgcccctagctgtttcctactcacccaaagccccgcacccgccttttctctctctcctctggcaggatgaggcgtgcaggcctgggtgaaggagtacctcctggcaactatgggaactatggctatgctaatagtgggtatagtgcctgtgaagaagaaaatgagaggctcactgaaagtctgagaagcaaagtaactgctataaaatctctttccattgaaataggccatgaagttaaaacccagaataaattattagctgaaatggattcacaatttgattccacaactggatttctagtggatccttcaggttccagggatttcaccagtagcagtgaaagcctacttctgctaattttgactgttcctcagcatttgtccagaagcttaaaaagaaggaggcttactttcagtgccatctatcacagctgcagaattatatcatgacatgtcaaaataatgactctgaagccttccaaatcttccaagaaagaagaatccttattttagattagtaggaaatggctttctaccactctgaaaagtctcttcttggccaaacatcaaagtctggagccagagataaattaatgcagagaactcctagttgggcaatcagttccagactccacagaccccaggacacaaactctattcaagaatctgtttgtgatggttcagaagttttcaagcttgctttgggtacaaactgtatttccaacacttctagccctatatatacctgtcaatgatattatacttataaatacaaaagtccttattatggatgaagaaatagattaattaaaattgtatagattatatattagcatatgatattatacatcattataaaaacgaagaaataggacttgagctttttttcaattttgccactgttaaaatcacttgaatctttacctttgggaactagcattcacaaaatggtgaatactaactcttatcctgatttgctacaagaaactagtctagaatgagcagtgtaattattagcactacactctttctatgcttcacacactacagaatcttcatcttcaagtctgtaattcctcaaagtacatggatcaacatttaggcttctggaggccagcagtgaacgaggcagtgcaaaaatgaccataattcacagtcaaccagccaacatgtgtagctccgggcacatgttattatattcactggatgttaacaggatttctagttagattgagagatgagaaactctttaaaaagctcattctctttggtagaatgatttattttcctttggatagatactcagtaatgggattgctgggctaagtggtagttctgttttaaattagttgagaaatctccaagctgatttccacagtggcagaactaatttacattcctaccaactatgtataagtgttctcttttctctgcagccccgccagcatctgttattttttgactttttaataatagccattttgactgatgtgcaatctcgtggtatctcattgtggttttgctttgcatttgtctagtaattactgattatgagcattttttaaatatgtttcttggccgcttgaatggcttctttggagaagtgtctgttcacatcctttacccaccttttaatggggttgtttttttgcgtatcgatttaagttccttaaagattctggaagttacatgcactcatatgttcatcgcagtgctattcacaataacaaggacatggaatcaactggggtgcccttcaacagtggactggataaagaaaatgtggtacatatatgccatggaatatcacatagccataaaaaagaatgaaatcatatcctttgcagcaacatgcatgcagctggaggtcataatcctaatcgaattaatgcaggaacagaaaaccaaatactgtatgttcttacttataagtgggagctaaacattgagtgcacgtagatataaaaattggaacaacaggcactgtagaagggggaagggaggaaggaaggtatgggttgaaaaactagctattgggtactatgctcactacttgggtgagaaattcatatctcaaacctcagcatcatgcaatataaccatgtaaaaaatctgcacatgtaacccctgaatctaaaataaaagtggaaatcgtttttatttttgtattatttatttatttatttttatttttatttacttattttttgagatagagtctcgccctgccactgaggctggagtgcagtggcgcaatcttggctcactgcaacctctacctcctgagtttaagcgattctcctggctcagcctcctgagtagctgggactacaggcacacagcatcatgcctagctaatttttgtatttttagtagagacggggtttcactatgttggttgaaggctgaggctgacggatcacctgaggtcaggagtctgaaattgtttttaaaaagtatgttttgatataaagccttttttcaattttttttaaagtctaattcttgacagagcaacagaaacaaataaagtagaagcccaaaaggaaatttgtcattactaaaaccaaccaggctcaggtgacttttcttctccattcagacgggaacttaaatgaacaaaaatatctttaacaaattgaagacaacttaaagatcagtttatttattcattcaacaaatatttattaactggctgccacatatccatcattgttctaaattctgcagatatagtagtcaattaagatccttccctcagtgaagacttaactttgagtggagagaacaaaaaatggacaaataaaatatatagtatgtcaaatgataagtgctatgaaaaaaaatgactactagattcagcatgcatgtatactgacttgctctttaaattttaagagttttaggaaatgtctacagtattagttttcttctcatactgctataaagacatacctgagactgggtaatttataaagaaaagaggtttaaccagctcatggttcttggggctatgcagttttctgcttctacagaggcctcaggaaacttacaaccatggtggaatgcgaaatggaagtagacaggagagagtttcagttttagtcttaaaagaaaaaaaaatacatctctaactaaccccagtccttgtgttagcaacaactactccttttgactggttagggaatgagcatctgtgacatgggcttgatgaagtcatggccaatgttaactttaaataagtttgaaactattgttgatacaaaacaaataaattgcagaggattttttccaaacatcccataaatgcatagaattgaaagcaagtttcatttccaatagttaaagagtctaatgtatccacttttaattatagccaagatgtttaccatcttatttgatgttctgtgctgtgaactgttgggaatctattagctcagtattttgaatttcagataatgtatcctgtgttttttttttaataaaggtttatctgaccattaaattacaaaa

SEQ ID NO: 111408 - DNA, 1031 bp, Homo sapiens
  Payload ID: 1816
  Gene Symbol: BET1
  Gene Name: Bet1 golgi vesicular membrane trafficking protein
  Uniprot ID: O15155
  ENST ID: ENST00000433727
  CDS Start-End: 146-397
gactccactgatgtcgtggcgctttaggggaagaagttggtgtttcgctgggccctggtactgaagacgcggtccgggtcgcccctagctgtttcctactcacccaaagccccgcacccgccttttctctctctcctctggcaggatgaggcgtgcaggcctgggtgaaggagtacctcctggcaactatgggaactatggctatgctaatagtgggtatagtgcctgtgaagaagaaaatgagaggctcactgaaagtctgagaagcaaagtaactgctataaaatctctttccattgaaataggccatgaagttaaaacccagaataaattattagctgaaatggattcacaatttgattccacaactggatttctaggtttatgtcccatgtaaggaaacttagtgggagagtaacagaatgcctggagagcctgactctgagctcttgaagtagtcagccagtttgtggtaaaatggtaattgaattttcctaactgcatcaactgtaatgatatactcccttctcctcctttatttagttaaaattgtaggctgatttctttttacctacaatcttcctaataatttttgatgataatgacccctcatttctttctgcccaaagacctcattctttaaataaaacttgttattttggcatatttctggtagggcccattgcacatgtgtatcagtatagttattatttcatattaactttatgaattctcttgacttggcttataatagttttatgatttttactacataggtagcacatttatcatttgtgacagaataatgtgaagttaagtaattactgaactttaaatggaaatagtatgcaagaaactcaggcattgaacttgaagataagagtattattgctttaatccagtgtatttgtttatggaaagaaaaacacaaaggcagactgttgagtaaaaaatattaaatattgttaaatattctgtattttggaatttatccatttataggcttcaaaagtaaatttttaaataaaata

SEQ ID NO: 111409 - DNA, 1357 bp, Homo sapiens
  Payload ID: 1816
  Gene Symbol: BET1
  Gene Name: Bet1 golgi vesicular membrane trafficking protein
  ENST ID: ENST00000457139
  CDS Start-End: 1-400
gctcccgtccttctgtattaaccacttttcccttcctcttcacagccacgctttttcaatgggtgaaggagtacctcctggcaactatgggaactatggctatgctaatagtgggtatagtgcctgtgaagaagaaaatgagaggctcactgaaagtctgagaagcaaagtaactgctataaaatctctttccattgaaataggccatgaagttaaaacccagaataaattattagctgaaatggattcacaatttgattccacaactggatttctaggtaaaactatgggcaaactgaagattttatccagagggagccaaacaaagctgctgtgctatatgatgctgttttctttatttgtcttttttatcatttattggattattaaactgaggtgatgcatgtaattgtgaatttggaatttgttccaacttaatggcttgcagtaccactttgataaaaatcagcatcaaaacattcctagtgttcaaatactgtggcattttccattgaaaattgctgaattttgcttattttataaatcacattagttaatacagtggtctttgaatactgtttcttaatgactcattttagcccctattttcaggggtagtgagagggtgtggctccactaatttccagtttgtttttctattgtttgccaactgtcagattaaatagcattataatattttgttgtaatcataaatgcaggtttatgtcccatgtaaggaaacttagtgggagagtaacagaatgcctggagagcctgactctgagctcttgaagtagtcagccagtttgtggtaaaatggtaattgaattttcctaactgcatcaactgtaatgatatactcccttctcctcctttatttagttaaaattgtaggctgatttctttttacctacaatcttcctaataatttttgatgataatgacccctcatttctttctgcccaaagacctcattctttaaataaaacttgttattttggcatatttctggtagggcccattgcacatgtgtatcagtatagttattatttcatattaactttatgaattctcttgacttggcttataatagttttatgatttttactacataggtagcacatttatcatttgtgacagaataatgtgaagttaagtaattactgaactttaaatggaaatagtatgcaagaaactcaggcattgaacttgaagataagagtattattgctttaatccagtgtatttgtttatggaaagaaaaacacaaaggcagactgttgagtaaaaaatattaaatattgttaaatattctgtattttggaatttatccatttataggcttcaaaagtaaatt

SEQ ID NO: 111410 - DNA, 601 bp, Homo sapiens
  Payload ID: 1816
  Gene Symbol: BET1
  Gene Name: Bet1 golgi vesicular membrane trafficking protein
  ENST ID: ENST00000425626
  CDS Start-End: 167-463
catcatccggcgcggtgtttagactccactgatgtcgtggcgctttaggggaagaagttggtgtttcgctgggccctggtactgaagacgcggtccgggtcgcccctagctgtttcctactcacccaaagccccgcacccgccttttctctctctcctctggcaggatgaggcgtgcaggcctgggtgaaggagtacctcctggcaactatgggaactatggctatgctaatagtgggtatagtgcctgtgaagaagaaaatgagaggctcactgaaagtctgagaagcaaagtaactgctataaaatctctttccattgaaataggccatgaagttaaaacccagaataaattattagctgaaatggtaagtggttatgattttaactttaagaaatttgatctaatattcgcaaataatagaatttcaacttttattcattttgaaatacagagatcgtaagtccttgattcccgtccatttgtatctaatgtgtttggaataactataaggtttattttgccatgcttttgcatttttcatctcgtcttacgcatgtaagtgggaggaacaagtggaagccaatatatctttaatcct

SEQ ID NO: 111411 - DNA, 533 bp, Homo sapiens
  Payload ID: 1817
  Gene Symbol: BET1L
  Gene Name: Bet1 golgi vesicular membrane trafficking protein-like
  ENST ID: ENST00000332865
  CDS Start-End: 36-212
tcggtgtccgcgtcgaggagccggggcagggcacgatggcggactgggctcgggctcagagcccgggcgctgtggaagagattctagaccgggagaacaagcgaatggctgacagcctggcctccaaagtcaccaggctcaaatcgctcgccctggacatcgatagggatgcagaggatcagaaccggtacctggatggcatgggagcgtgaagcgcttttccacaatggcaaggtccggacaagacaaccggaagcttctatgtggcatggccgtgggtctaattgtggccttcttcatcctctcctacttcttgtccagggcaaggacgtgagccagtgggagctggtgtctgtgggtgccaagggcagccagggtcttccctgcctggtgttttgggctccagaggacttacctacaaaatactcctttgcaatgataattgtgggtcaggaatcttcttcctgtgtggcaggaggctgcggctgcctgtgacctgatgagctcatgttggctggtcccatgtgtgaaag

SEQ ID NO: 111412 - DNA, 2916 bp, Homo sapiens
  Payload ID: 1817
  Gene Symbol: BET1L
  Gene Name: Bet1 golgi vesicular membrane trafficking protein-like
  ENST ID: ENST00000325147
  CDS Start-End: 62-370
ccacgtctgaggcggctgtggccgcgtcggtgtccgcgtcgaggagccggggcagggcacgatggcggactgggctcgggctcagagcccgggcgctgtggaagagattctagaccgggagaacaagcgaatggctgacagcctggcctccaaagtcaccaggctcaaatcgctcgccctggacatcgatagggatgcagaggatcagaaccggtacctggatggcatggtaagggcccacggtgtgcgtgtatcagtgccctgccctagcactacctgctgcagagcctgcagtgtctccttcagcactggtgcgggtgggtggtcaaatcaccacttctgtgtgatcttgctgggattcctcccttaggactcggatttcacaagcatgaccagcctgcttacagggagcgtgaagcgcttttccacaatggcaaggtccggacaagacaaccggaagcttctatgtggcatggccgtgggtctaattgtggccttcttcatcctctcctacttcttgtccagggcaaggacgtgagccagtgggagctggtgtctgtgggtgccaagggcagccagggtcttccctgcctggtgttttgggctccagaggacttacctacaaaatactcctttgcaatgataattgtgggtcaggaatcttcttcctgtgtggcaggaggctgcggctgcctgtgacctgatgagctcatgttggctggtcccatgtgtgaaagggactctctcggggaaaccaaggcccagcccctcccccctcccccaggtgctagagagccaggcagagctggggccacagcgtgtctggagaagccaggtctgagcagagcagctggtgaatcccagacgtggccacctgtggcttgcagcccttctccccgcgcttgggactctgacatcttaaggctgcacggtcgtgtccttgtctgggtgaggccatgtctgtgatccaaggttcctggaactgacacaggaaggggctgtgaaccctaagtgggtgtcatctcctccgaccgaggcttctcaccctggagatggcagttactcctggccatggttgctgagcatgggcagaccagtggaggccaccctactgtgttatctgcgccttcgatgaagtgagacccttggggagaacgggctgtggatgaaggagtggactgcagccttggcctagccactgggctgggatcttctgggtcatgtgactgtgtatccaggagcagaaacttgtattctcaggattcaggatctacccagcaccaaagatgtattttcaggagaacagacctagaaatgggcctgtctggcatttcagagtcaggcaaagcaggcagggccagggagcttctgtgggtctacacaagaaggttcctgtgagggctatcagttgttgccttctagcttgctggtaactttggcgcctccgccaagccctgccagactcccctggctgtgatggcattctgtgccatcctccttgtccccagcctctgcaggatgccctccctacccacctctccctgggccttccctgtccactgggctggattcatgttcaaaccactggactggcagggcaacgacttcttcccacctcaagatgaggtcctcgcccccttgtcttggcataaaaacacctttaaagcatgagccatgtgcttctttgcccttctctgtcctgttccaatcttctgcctcccagtcactccctggggactatgggatcactgtccccccacctgtgtggccacaccatatgtcctgtcaatccagaactgcctctgagctccaggctgaccacagatcagccacagcctgatgcctgcagccccactttgctcacccttcccctcccctcctccttccttccacacagcaagcctacctttctccatccatgctcaccatagcccccttccttgtgacctggaccctccattgtacctggctgagactgtcagcctcctggaggagtggggtccaccttcttcttgccctatgcagtgcaagctcacttctcacccagcaaggttgactcatctgcctccatgtctctggggctttgctgttgccctgaaacctagctgggctggtcttgctcccagcttgcttccccctcctcggatgtccctttgcaggcccctgtcgttcctccggcaccagtgtccttggctgccatggcaagctcatcaggggcttgtaccctggtcaccaagcatggtagcagctgcctgcattgtatctccatctggtcactgcaggtgccaacccttcatcccccatgttttcctgggccatggagggctgacctccgtttctggggaatgtggctgagctgtggtaaccagctacaccccaggtgctctttccatggtggtgcctgctcatcttgctgatgcaaactaggaagttaggctgcatctcggagtggctttcgctggagaggtgctttgctgtctctcagactcagtcactgtgttccctccccgcctctcttatctccatggctgtttgcagctctcccaggtactttggggtctgagctggaattcctttgtggtttgctcttctgcttctcactcttgtattaagaaggattccacaaagggagagtggcatccctgctgctgctgtgccagaccagagtttcctgaggggccctgaccctaaccctccagctcagccctgtacacctgaccctgtaaatgagtggggtttgctgactgtaatccctgacaccagtaaaaccaaaaggactcttgggggctcagtgtgagagccagggttacctactctgccaagtgaggacaaactgctaggctgtatcccataatttcaggatgagaaacattaacaataaaaatttgtagtaaacataacctcatgaagaactaa

SEQ ID NO: 111413 - DNA, 2819 bp, Homo sapiens
  Payload ID: 1817
  Gene Symbol: BET1L
  Gene Name: Bet1 golgi vesicular membrane trafficking protein-like
  Uniprot ID: Q9NYM9
  ENST ID: ENST00000382762
  CDS Start-End: 108-443
atcgctagctgggggcggggccggaagctctttccccgcgactgcgccacgtctgaggcggctgtggccgcgtcggtgtccgcgtcgaggagccggggcagggcacgatggcggactgggctcgggctcagagcccgggcgctgtggaagagattctagaccgggagaacaagcgaatggctgacagcctggcctccaaagtcaccaggctcaaatcgctcgccctggacatcgatagggatgcagaggatcagaaccggtacctggatggcatggactcggatttcacaagcatgaccagcctgcttacagggagcgtgaagcgcttttccacaatggcaaggtccggacaagacaaccggaagcttctatgtggcatggccgtgggtctaattgtggccttcttcatcctctcctacttcttgtccagggcaaggacgtgagccagtgggagctggtgtctgtgggtgccaagggcagccagggtcttccctgcctggtgttttgggctccagaggacttacctacaaaatactcctttgcaatgataattgtgggtcaggaatcttcttcctgtgtggcaggaggctgcggctgcctgtgacctgatgagctcatgttggctggtcccatgtgtgaaagggactctctcggggaaaccaaggcccagcccctcccccctcccccaggtgctagagagccaggcagagctggggccacagcgtgtctggagaagccaggtctgagcagagcagctggtgaatcccagacgtggccacctgtggcttgcagcccttctccccgcgcttgggactctgacatcttaaggctgcacggtcgtgtccttgtctgggtgaggccatgtctgtgatccaaggttcctggaactgacacaggaaggggctgtgaaccctaagtgggtgtcatctcctccgaccgaggcttctcaccctggagatggcagttactcctggccatggttgctgagcatgggcagaccagtggaggccaccctactgtgttatctgcgccttcgatgaagtgagacccttggggagaacgggctgtggatgaaggagtggactgcagccttggcctagccactgggctgggatcttctgggtcatgtgactgtgtatccaggagcagaaacttgtattctcaggattcaggatctacccagcaccaaagatgtattttcaggagaacagacctagaaatgggcctgtctggcatttcagagtcaggcaaagcaggcagggccagggagcttctgtgggtctacacaagaaggttcctgtgagggctatcagttgttgccttctagcttgctggtaactttggcgcctccgccaagccctgccagactcccctggctgtgatggcattctgtgccatcctccttgtccccagcctctgcaggatgccctccctacccacctctccctgggccttccctgtccactgggctggattcatgttcaaaccactggactggcagggcaacgacttcttcccacctcaagatgaggtcctcgcccccttgtcttggcataaaaacacctttaaagcatgagccatgtgcttctttgcccttctctgtcctgttccaatcttctgcctcccagtcactccctggggactatgggatcactgtccccccacctgtgtggccacaccatatgtcctgtcaatccagaactgcctctgagctccaggctgaccacagatcagccacagcctgatgcctgcagccccactttgctcacccttcccctcccctcctccttccttccacacagcaagcctacctttctccatccatgctcaccatagcccccttccttgtgacctggaccctccattgtacctggctgagactgtcagcctcctggaggagtggggtccaccttcttcttgccctatgcagtgcaagctcacttctcacccagcaaggttgactcatctgcctccatgtctctggggctttgctgttgccctgaaacctagctgggctggtcttgctcccagcttgcttccccctcctcggatgtccctttgcaggcccctgtcgttcctccggcaccagtgtccttggctgccatggcaagctcatcaggggcttgtaccctggtcaccaagcatggtagcagctgcctgcattgtatctccatctggtcactgcaggtgccaacccttcatcccccatgttttcctgggccatggagggctgacctccgtttctggggaatgtggctgagctgtggtaaccagctacaccccaggtgctctttccatggtggtgcctgctcatcttgctgatgcaaactaggaagttaggctgcatctcggagtggctttcgctggagaggtgctttgctgtctctcagactcagtcactgtgttccctccccgcctctcttatctccatggctgtttgcagctctcccaggtactttggggtctgagctggaattcctttgtggtttgctcttctgcttctcactcttgtattaagaaggattccacaaagggagagtggcatccctgctgctgctgtgccagaccagagtttcctgaggggccctgaccctaaccctccagctcagccctgtacacctgaccctgtaaatgagtggggtttgctgactgtaatccctgacaccagtaaaaccaaaaggactcttgggggctcagtgtgagagccagggttacctactctgccaagtgaggacaaactgctaggctgtatcccataatttcaggatgagaaacattaacaataaaaatttgtagtaaacataacctcatgaagaact

SEQ ID NO: 111414 - DNA, 637 bp, Homo sapiens
  Payload ID: 1817
  Gene Symbol: BET1L
  Gene Name: Bet1 golgi vesicular membrane trafficking protein-like
  ENST ID: ENST00000410108
  CDS Start-End: 63-521
gccacgtctgaggcggctgtggccgcgtcggtgtccgcgtcgaggagccggggcagggcacgatggcggactgggctcgggctcagagcccgggcgctgtggaagagattctagaccgggagaacaagcgaatggctgacagcctggcctccaaagtcaccaggctcaaatcgctcgccctggacatcgatagggatgcagaggatcagaaccggtacctggatggcatggtatttcaggacagccaggagggggcgcacatccgccgagaaactgtgagcaagagcgtctgtgctgaaccatggcgccaccagagggcgcgcgatcccgccccaaccaacttcccgctgaagtgccagaagcagcgaggagcttcaacttcctcagggcagcacgggggtcgtgttaatttggtgttcttcattgatgatgattattccccaccttctaagagacaaagaccaacgagccaccacagccaccagtcccagaacccgccaatgctggggaacggaaaatgagggagttcaactctggccctcacaatccagtggaggagacgaaactcatctgcctctgtccctctgggcacgcctcgtgccaggtgcatctgtggacaggggccatgctcctgggc

SEQ ID NO: 111415 - DNA, 665 bp, Homo sapiens
  Payload ID: 1817
  Gene Symbol: BET1L
  Gene Name: Bet1 golgi vesicular membrane trafficking protein-like
  ENST ID: ENST00000486280
  CDS Start-End: 266-532
ctctggcccagctggggtgacctcggccgagaggaccctgtcaggggggcggattcggatccttccgggtccgagcagggccgggtttcggccggcactgccgttaggaccgaaggcgcgcgtggcggcccagcagctccagcgaggggtcgcgcagcagcggggtctccccactccccgccgccccctgtgagatcgttctgcatgggttcgggctcagagcccgggcgctgtggaagagattctagaccgggagaacaagcgaatggctgacagcctggcctccaaagtcaccaggctcaaatcgctcgccctggacatcgatagggatgcagaggatcagaaccggtacctggatggcatggactcggatttcacaagcatgaccagcctgcttacagggagcgtgaagcgcttttccacaatggcaaggtccggacaagacaaccggaagcttctatgtggcatggccgtgggtctaattgtggccttcttcatcctctcctacttcttgtccagggcaaggacgtgagccagtgggagctggtgtctgtgggtgccaagggcagccagggtcttccctgcctggtgttttgggctccagaggacttacctacaaaatactcctttgcaatgataattgtgggtcaggaatcttcttcctg

SEQ ID NO: 111416 - DNA, 560 bp, Homo sapiens
  Payload ID: 1817
  Gene Symbol: BET1L
  Gene Name: Bet1 golgi vesicular membrane trafficking protein-like
  ENST ID: ENST00000529614
  CDS Start-End: 54-332
gaggcggctgtggccgcgtcggtgtccgcgtcgaggagccggggcagggcacgatggcggactgggctcgggctcagagcccgggcgctgtggaagagattctagaccgggagaacaagcgaatggctgacagcctggcctccaaagtcaccaggctcaaatcggactcggatttcacaagcatgaccagcctgcttacagggagcgtgaagcgcttttccacaatggcaaggtccggacaagacaaccggaagcttctatgtggcatggccgtgggtctaattgtggccttcttcatcctctcctacttcttgtccagggcaaggacgtgagccagtgggagctggtgtctgtgggtgccaagggcagccagggtcttccctgcctggtgttttgggctccagaggacttacctacaaaatactcctttgcaatgataattgtgggtcaggaatcttcttcctgtgtggcaggaggctgcggctgcctgtgacctgatgagctcatgttggctggtcccatgtgtgaaagggactctctcggggaaaccaaggcccagc

SEQ ID NO: 111417 - DNA, 4254 bp, Homo sapiens
  Payload ID: 1818
  Gene Symbol: B3GLCT
  Gene Name: beta 3-glucosyltransferase
  Uniprot ID: Q6Y288
  ENST ID: ENST00000343307
  CDS Start-End: 150-1646
cgatggcgcggcggagacggagggaggaggggagccggcagagaagggtcagccgcggcggcagggcggcggcggcagcggcgcagctccgctccccgcgcgtctcccttccccgcgcccaggtagggcgctcagcctccgccgccaggatgcggccgcccgcctgctggtggctgctcgcgccgccggcgctgctcgcgctcctcacctgctccctggcttttggtttggcttctgaagatacaaagaaagaggtcaagcagtctcaggatttggagaaaagtggtatatcaaggaaaaatgacatagacttaaaaggaattgtattcgtcatccagagtcaaagtaattcttttcatgcaaagagagcagagcagttaaaaaaaagcatcttaaagcaggctgcagatcttacacaggagctccccagtgtcctcctccttcatcagctggctaaacaagaaggtgcatggaccatacttccgttgttaccgcatttttctgtaacatatagcagaaattcatcttggattttcttctgtgaagaagagacaagaatacagattccaaaactcttggaaaccctcagaagatatgacccctctaaggaatggtttttgggaaaagcattacatgatgaagaagctacaataattcaccattatgccttttccgagaatcctacagtttttaagtatccagactttgctgcaggctgggccttaagtattccacttgtaaacaagcttaccaagagactaaagagtgaatccttgaaatccgactttacaatagatttaaaacatgagattgccctctacatctgggacaaaggcggaggacctcccctgaccccagtgcctgagttttgtaccaatgacgtggacttctactgtgctaccacattccattcttttctaccgctttgtagaaagccagtgaagaagaaggatatttttgttgcagtaaaaacatgcaagaaatttcatggtgacagaatacctattgttaagcagacttgggagagccaggcaagtctcattgaatactatagtgactatactgaaaattccattcctactgtggatttgggaattcctaatacagatagaggtcattgtggaaagacatttgccattttggaaagatttctgaatcgtagccaggacaaaacagcatggttagtcattgtggatgatgatacattaataagtatctccaggctccagcacttgcttagctgttatgactccggcgagcctgtgtttctgggagagcgctacggctacggcctgggcactggtggctacagctacatcacgggaggaggaggaatggtcttcagcagagaagccgtcaggagacttctcgccagtaaatgtcgatgctacagcaatgatgctcccgatgatatggtcctgggaatgtgctttagtggcttgggaatccctgtgacacacagccctctcttccatcaggctcggccggtggattaccctaaggactacctttctcatcaagttcccatatcgttccacaaacactggaacatcgatccagtgaaggtgtatttcacatggttggcacccagtgacgaagacaaagccaggcaggagacacagaaaggttttcgagaggagttataaatcagggtgacctgtgcgcctagcctgcgcagggaatgaactggagactgtggcctcatcccactgtgctgtgctcacaacacttgtgtctgccacatggcattgggtgcttcctgactttagggggagattttatgtatggtattttttgacagaggaagaaaaggggtcacaggagaaacatttttttttctgggaaaaatcacttgcttttgacttatgcagttgttttaacacttagtgatgactgtgtattctccaagctgtgatacagcagtttttttttattgtcacagggaaataaatggtaccagaagtccctttcctgttctgtctcttcattgtaatggaagtttcagttgggcatgagcctggagagatgtgactgtctacagttctatttgtatatataaaaagaagactgaaagtcttttgacatggatattgtgaatggtatgaacttttaaaccatattattgatgatgaaaattatttcctgggaactcagtaggaataataccgtattaaggaataatactgtacataaaacatcatgaaaccctagatatgaaatcccctgaagtctgtaatcatggtggttatgttttgtctattcttttgctgtttgtgcctcataaaaagagaatgaggtcttctgctagagcttcgtattgctttggaagttcatctgtgttttatttctccctgaagccctatctttatggcttacttgtaacatgaaagtagtagatgctgccagaaaatagtgtcctcaatattttaaaacaatgttgacatgttttgttcaagtcagcaagctctatgtgagtctcaggaagtgaattaaatttggaccttatgttttactcttgttttttttttttttttaaatgttacttaatgactctctcctgactcaggagagaaaccccttgtggaaggacagcatggtgatcaggcaatttctctgggttcccaaagaatgacatttgaacacagtattttgaaacagctctagttttcaaattatatctttaatatatagtaatgtaacatattcagtattaatgtataaaaagcactctaattatataattcagtttttgtaaaggtatttgcataaaatttaatatgtcttaaactaattttggtaaattacttcttttttttctttttaataaaaactgttactcattaactttgcttataatgctttttatagcccagcacagaatttaaagccataccaccaaaagtacctgtgtgtgttaatatgtttttcttgtagcatagattgactatttgcaatagtattagtatttaccatttttccaaattagcaactaccagacctcacgtgttgcagtgataacacaatgcattggattcagttttgtgaaaatggattctgtggccatccaagggatgtatcagggatgatcagctgatgagaggctccagaaggatttctagatcgcttcaagcctatactgatggccttagctttgttcagtcattgtaactgggattgttgtcattgctaccgtggtagtcaccttcatgtcatctataatagtactcctggagagccctggctgcctacaccagtggaaaagagtctccagttctgctctggcctactaactgttaccactgagagaacaacatgttcatttgacatgattgaagctggcatccgtatatgaagatccttgtcaagctttcttctgtggtctgattagtgccttctactgataccggggcacctcctctggtacttttaagtgttttgttaattatatttactttttggaatggtgtaagcctaaccacaagtaaaagatctttgcctaagtttttgatttctcaaatattgtgttcattagtctagactgggaatggggaggggaaatggggaaaatgaatgaatgaaatcagaaaaaagtcagcggctcagtaaatacagtttaaagagagaataattacttcagagctacccttttaagagaaaaccatcagaaattgataatgtttatataaagtttataaagccattgtgttttgttatataacaaatcagagatgttattttagaatcgattcccatctaaagaactcaattttgagtctgacatttccaggaccagatattgtcttactcacatttcctttgctttgaaatagggctttccttccaaatggctatttttaggctagggatgttaacatcagggatttgtgtgtggaataactggaatgtcatttttgcttttaagccatttctgatgatatagccaaagcaggttgtctgactatgtaggatttttacatcttgaaactaaatcagaaatccagacatgaaaataacctttctagaatgcctaggagcagaaaacaataatagcatgctaaatcacaaatgatgctatgtatgggtatgtaaatatcagtgctgtctgcatttctgggtttattgaagacctcttgttgtatatatcctcaaaaattaatgtaattgacatcttcaagaatgtttctattgtcttccattcataatcagagatgtaatttgtatggactaaataaaaactttattatgtaatgaaaa

SEQ ID NO: 111418 - DNA, 3652 bp, Homo sapiens
  Payload ID: 1819
  Gene Symbol: B3GAT1
  Gene Name: beta-1,3-glucuronyltransferase 1
  Uniprot ID: Q9P2W7
  ENST ID: ENST00000312527
  CDS Start-End: 394-1398
ggagggagccgcacgcggcccagggcagcggtctaggggcgccggggccggggcgtaggggccgttgcccgcgatggaccgcaccggagacgctccggactcgtcgccgcaggtgtccaccccccagggttcctgacccctgcccctggacagcgaccccttctcagactccagttgggccggactctccaaacctgcttccgcaatgggtgggttgtgagtgctggtaagacctgctagccaacattcagctgctctgtcctctccatgcctggccggcccggcccatgcctgttcttttctcccctgtgctgccgccgcccgtggccgcccctctcctgaacttaccgccactcaggtaatgaggagccgtgggtgcagccagccttggagatgccgaagagacgggacatcctagcgatcgtcctcatcgtgctgccctggactctgctcatcactgtctggcaccagagcaccctcgcacccctgctcgcggtacataaggatgagggcagtgacccccgacgcgaaacgccgcccggcgccgaccccagggagtactgcacgtctgaccgcgacatcgtggaggtggtgcgcaccgagtacgtgtacacgcggcccccgccatggtccgacacgctgcccaccatccacgtggtgacgcccacctacagccgcccggtgcagaaggccgagctgacgcgcatggccaacacgctgctgcacgtgcccaacctccactggctggtggtggaggatgcgccgcgccggacgccgctgaccgcgcgcctgctgcgcgacaccggcctcaactacacgcacctgcacgtggagacgccccgcaactacaagctgcgcggagacgcccgcgacccacgcatcccgcggggcaccatgcagcgcaacctggccctgcgctggctgcgcgagaccttcccgcgcaactccagccagcctggcgtggtctacttcgccgacgacgacaacacctacagcctggagctcttcgaagagatgcgcagcaccaggagggtgtccgtgtggcccgtcgccttcgtgggtggcctgcggtacgaggccccacgggtgaacggggcagggaaggtggtcggctggaagacggtgtttgacccccaccggccatttgcaatagacatggctggatttgccgtcaacctgcggctcattctgcagcgaagccaggcctacttcaagctgcgaggtgtgaagggaggctaccaggaaagcagcctccttcgagaacttgtcaccctcaacgacctggagcccaaggcagccaactgcaccaagatcctggtgtggcacacacggacagagaagccagtgctggtgaatgagggcaagaagggcttcactgacccctcggtggagatctgagcctcaggatgcaggagcctcctcctcagaccctgttcttggccttccatcctctccccacggctgatggtccctccaaggccgactcctaaggaatcaccatcaccctcctttctattctgggggcttctgagagagcccagcctgatgccagaacaaaggacagagaatttaagcacagaaatcccagacctgttgttctctccatccagcgtgaccagggcccgagagacctgatggccagggtggggtgtccagcaccagccaagctggtgctccagcgcacctccccagagctccccgcactgacggggctgcaggagcaggtgcagtgggcgcccacactggccctgcagtgatgcagggcgggagggagataagaagaccccgcagtcaagtggagcatggccctccctggctccctgtccctgggctcagcacgaccacacaggacacccagccagggaattctgaagaccagagagcagcccacgggcatcacgagcgctctgctcctctcctgggcccctgctcttcccgagagctgcccccaaatcagacatacctctgtggctctcctctggttcacgtttacagagcataaggctgtcttggatcccaacaggcacccagccctgcatggggggagcctgggcctaataggcaccccctgtacctcaggctgtggcgggagcagagtccccccctccggcccctcttcctttaccccttctcctccagcagtggcaaaggggtaggctctagagccagcacaggtcactgcctgacctggactaagaaccccacggccccactgtccacacactgcctccccaccgcccacctcggctgctaggcccctcgcctggactggactggggagggaaagcgccttttcctgcagctcttcagagccacagacctcagggtggagtgagcccatggtgggcagtgggcaaggcggtgggtggtgggcaaggtgggacctcctgcagcctggaaagaggagggaggccaaggccattccctaactccctcctgcccctggtctgaggaggagggactctggagtagcagaggggctgggaaagagggggcaggggctgctgggacactgagcaggagggaggcctgagcacactgctttggaaattattctaaacacaaaaaagggaaagaaaatgttatttctccctaagtcaggagcatgcagagctagcccacctcatgtccagctgtccactttccatcctggagaaagaacagtgtgcctcaaactcctgccctccccaggcctctggggcccactggaaagggctctgaccccctggcccagccgggctctctagtggtgatccggctcattctcctgcaagttggaagcacaattttccccccaagtggaggaaaaggaaagggccccagcctactgaagaggtgtttattttttaactaacagcctcccaccccattaagactcaccaggagaggtctgagggccattcagaacccactcctgagtgggtgggtgggtgggactcagtccagagacctaacattcagaatatagcattggttgcctattttgagatggatttaatctcccacagtattcatgagaccatctgatggaatcagatccctgagccaccttgcaggacgttttccccaacctcttacaccctggatgtcactttggaaaccaagcccttggaagcaagtggggtggcatgggagagaagggaggaggtgggcacaggtggtgagcttatgtgtgggcactctactgcctcacagaagccagccaagtgccaaggtcagcttggctggtctgaggccaccttcttagccaaaaacctagggttcattttcaggactttgataatgaacaacaaaatggggacttctttgggcagatgctaggtcagttgttttcacctaatatcctcttttagctgcatgtatatttatttataattataaccctggtggactgcagccttcatctttattgggaatgagtttgttataaatcagaaatgggtccatgatgaccactgttttccaaacccagtctgttccctgctccctcgctggcaagccccaccacacaggagtgaggccaggggctaggagttctaagaacagaggctggggtgagggtggcacccaggcagctgcatctggtctgttttaatttaactgtatttaatttgctttcaaaattaaaagtcaaatacagtttttaacagtc

SEQ ID NO: 111419 - DNA, 3522 bp, Homo sapiens
  Payload ID: 1819
  Gene Symbol: B3GAT1
  Gene Name: beta-1,3-glucuronyltransferase 1
  Uniprot ID: Q9P2W7
  ENST ID: ENST00000392580
  CDS Start-End: 262-1266
ggagggagccgcacgcggcccagggcagcggtctaggggcgccggggccggggcgtaggggccgttgcccgcgatggaccgcaccggagacgctccggactcgtcgccgcaggtgtccaccccccagggttcctgacccctgcccctggacagcgaccccttctcagactccagttgggccggactctccaaacctgcttccgcaatgggtgggttgtgagtgctggtaatgaggagccgtgggtgcagccagccttggagatgccgaagagacgggacatcctagcgatcgtcctcatcgtgctgccctggactctgctcatcactgtctggcaccagagcaccctcgcacccctgctcgcggtacataaggatgagggcagtgacccccgacgcgaaacgccgcccggcgccgaccccagggagtactgcacgtctgaccgcgacatcgtggaggtggtgcgcaccgagtacgtgtacacgcggcccccgccatggtccgacacgctgcccaccatccacgtggtgacgcccacctacagccgcccggtgcagaaggccgagctgacgcgcatggccaacacgctgctgcacgtgcccaacctccactggctggtggtggaggatgcgccgcgccggacgccgctgaccgcgcgcctgctgcgcgacaccggcctcaactacacgcacctgcacgtggagacgccccgcaactacaagctgcgcggagacgcccgcgacccacgcatcccgcggggcaccatgcagcgcaacctggccctgcgctggctgcgcgagaccttcccgcgcaactccagccagcctggcgtggtctacttcgccgacgacgacaacacctacagcctggagctcttcgaagagatgcgcagcaccaggagggtgtccgtgtggcccgtcgccttcgtgggtggcctgcggtacgaggccccacgggtgaacggggcagggaaggtggtcggctggaagacggtgtttgacccccaccggccatttgcaatagacatggctggatttgccgtcaacctgcggctcattctgcagcgaagccaggcctacttcaagctgcgaggtgtgaagggaggctaccaggaaagcagcctccttcgagaacttgtcaccctcaacgacctggagcccaaggcagccaactgcaccaagatcctggtgtggcacacacggacagagaagccagtgctggtgaatgagggcaagaagggcttcactgacccctcggtggagatctgagcctcaggatgcaggagcctcctcctcagaccctgttcttggccttccatcctctccccacggctgatggtccctccaaggccgactcctaaggaatcaccatcaccctcctttctattctgggggcttctgagagagcccagcctgatgccagaacaaaggacagagaatttaagcacagaaatcccagacctgttgttctctccatccagcgtgaccagggcccgagagacctgatggccagggtggggtgtccagcaccagccaagctggtgctccagcgcacctccccagagctccccgcactgacggggctgcaggagcaggtgcagtgggcgcccacactggccctgcagtgatgcagggcgggagggagataagaagaccccgcagtcaagtggagcatggccctccctggctccctgtccctgggctcagcacgaccacacaggacacccagccagggaattctgaagaccagagagcagcccacgggcatcacgagcgctctgctcctctcctgggcccctgctcttcccgagagctgcccccaaatcagacatacctctgtggctctcctctggttcacgtttacagagcataaggctgtcttggatcccaacaggcacccagccctgcatggggggagcctgggcctaataggcaccccctgtacctcaggctgtggcgggagcagagtccccccctccggcccctcttcctttaccccttctcctccagcagtggcaaaggggtaggctctagagccagcacaggtcactgcctgacctggactaagaaccccacggccccactgtccacacactgcctccccaccgcccacctcggctgctaggcccctcgcctggactggactggggagggaaagcgccttttcctgcagctcttcagagccacagacctcagggtggagtgagcccatggtgggcagtgggcaaggcggtgggtggtgggcaaggtgggacctcctgcagcctggaaagaggagggaggccaaggccattccctaactccctcctgcccctggtctgaggaggagggactctggagtagcagaggggctgggaaagagggggcaggggctgctgggacactgagcaggagggaggcctgagcacactgctttggaaattattctaaacacaaaaaagggaaagaaaatgttatttctccctaagtcaggagcatgcagagctagcccacctcatgtccagctgtccactttccatcctggagaaagaacagtgtgcctcaaactcctgccctccccaggcctctggggcccactggaaagggctctgaccccctggcccagccgggctctctagtggtgatccggctcattctcctgcaagttggaagcacaattttccccccaagtggaggaaaaggaaagggccccagcctactgaagaggtgtttattttttaactaacagcctcccaccccattaagactcaccaggagaggtctgagggccattcagaacccactcctgagtgggtgggtgggtgggactcagtccagagacctaacattcagaatatagcattggttgcctattttgagatggatttaatctcccacagtattcatgagaccatctgatggaatcagatccctgagccaccttgcaggacgttttccccaacctcttacaccctggatgtcactttggaaaccaagcccttggaagcaagtggggtggcatgggagagaagggaggaggtgggcacaggtggtgagcttatgtgtgggcactctactgcctcacagaagccagccaagtgccaaggtcagcttggctggtctgaggccaccttcttagccaaaaacctagggttcattttcaggactttgataatgaacaacaaaatggggacttctttgggcagatgctaggtcagttgttttcacctaatatcctcttttagctgcatgtatatttatttataattataaccctggtggactgcagccttcatctttattgggaatgagtttgttataaatcagaaatgggtccatgatgaccactgttttccaaacccagtctgttccctgctccctcgctggcaagccccaccacacaggagtgaggccaggggctaggagttctaagaacagaggctggggtgagggtggcacccaggcagctgcatctggtctgttttaatttaactgtatttaatttgctttcaaaattaaaagtcaaatacagtttttaacagtcct

SEQ ID NO: 111420 - DNA, 5737 bp, Homo sapiens
  Payload ID: 1819
  Gene Symbol: B3GAT1
  Gene Name: beta-1,3-glucuronyltransferase 1
  Uniprot ID: Q9P2W7
  ENST ID: ENST00000524765
  CDS Start-End: 4546-5550
agaggtgttcccagtatggccgatctccataggcatactggcccttaagtcaggactcagttccacgggcccttaagtcaggactcagttccatgggtgctggcccttaagtcaggactcagttccacgggtgctggcccttaagtcaggactcagttccacggaggctgttttgttggcgctcttgcctcgcctctggccctaggtgcccactgagctacactttcctcacataggacatcccttcatcttcgcagagccctatggtaacctccagttgctaaaatggcaggatcgttgaaacttccagctcaacctccctattgtaaagacgaggtcaaggagggcaatcagcatgacccaggtccccgtggagcacctgccggacacgtccaggccgccaccctcccactcccatgtgctgccccagcttctgctccccatctgggaaccaccctccactctcccacagggaagtgcttgcttccctctgaggctctgagggcacccggggagggcagggcacagccttttgtgtctctacttgccgagacgcctgagatctgaggttggtcacagatatggtgcaagtgtcaggatgggagttgtgaccacggcaggcctgggccctacactcacacacactgcccacgccgcgtcctgcctctccacgaagtcccccttgtgcctccacccatctcctcctccagcaccccattcttccccgtgcttgcctccatctcctgggctctcctgggtgtggccaagccactcctgcacctttgtgctgattcttctgcctgacccaaggtcctagaagccattctggggtccttgttagagacagcctgcgaccacagacaaacaccgccctcctccaagccccaggcagaagcagcaggctgcgagaggggaccagtgctggccaaccttgcagccccgtctcagactggggcccagagctgggggcaggtgcagcccacccgctgcctggccccaagcccctgcccagcccaggcatcacatcccacgacctgccccctgccggccagctggcgttctccaggctgggggctctctgtgttctgcttgataactgcctggtaattagctccacgattttgctactatgcttataatagcctccattaaagttatggggttttcaagccataatggcttccagagtaattaatgcacaactgggtttattgctgagtttatttttagaggttttctccctctctccccctcccttttctctcatagatgttttgaccaaaaagactggatgggagcagaaggcaccccacggcacccttgcccacaggccccatcctcccctctcttcccttcccgcccctccttcctgcttcagcctccaagcaggtgctagggccctgcagtgggggcagccattgcagaggagggtggctgtggtccaggccagaggaagcatttggcctgtgtgtgccccttacccaccctgcgcctggcccaggttcgagaggcttggaggcctgggacctcttatcctatgcccccgatgacagcatagagccagatggcctggactcaattccagctccaccatttcctaatggttgacctcaggcaagttactccccttctctggcctcgatgaacccacagggaccacagccatgcctactgcacagggctgctgtgacgttgcaggagcaggtgcatgtgaagagctgagcctcatcttcggacatctctcatgctatagggaagtttgtataaacaacagtgcaagcgggggctgagaggctgccccaaaggaaaggcagtggcccacagggactgagctggcaggacactcatcttctctccttggctttctccatcctggtattagaacctgcaccaacaccaggagcacttgagaaagctccttcgagagtctctgagaacacagaagaaatcttcctggacatttctgaagccccagccaggcccagcctccccatccttcatcagatgtggcctaagatccaaacgtgtcttggccaaagaaccaaaacgtgtcttgacacgcagccccatgcagccccagcagtggcctgggtgtggagggacaggctaaatctgggggatgtggcatgaagtcacttgcatctcagaccacaagacccagcaggcatcccgtgtggggttctaggctctgtccctcactgggccagcaaagaggagtttacgggcggacacagacacacacggcctagaatgtccactaggggaactacgtgcctgtgacgttgaaccccagtgggtcttccactccccggggaatgggtgggggagactctctggatggagtgggcctctgatggcggggtgtgggcaggggatgccggccgtcctgggaaaccacagtgctccttaatggaggggatgccggccgtcccgggaaaccacagtgctccttaatggaagacaaatcctggtcttccacaggcgtcagaactatttggagagaggacccggtgaggagaggaaaacacgctattttggaaactcaggggctaaaaaccctcctcggccatagcactcgactctgcctgaaatggtgagcacacgtgagctggggcaggagcaggcagcatggcccccaggtgaggtactgtccgtatccaacactgggcactgggacgggtgggcacagtgaggctggctgggctgcccgaggctgcctgccctccccaccacccccacgggtccctgctgcatcatgcatggtgctcagcacagaagtgaaaagggaggagaagaggatgtgacagtttccaaggcggtcaggaggtctcttcgcccagtgtccttgccatgtgagagaacggttcccagagatgctaccagtggaccctctgcaggactgaggaatcccagtggctcattctcctcacttgggccccctgctgttctcattttggaggactgtctcccctcaatgtggcagcccctgcggggacccctcttcttgctgctgcccagcccagcacctggtgctctgtcctgcacagagcggtgctccacaaggatgtcctattgacacggaagaggaaggcactctcgtacttccccccagggaccatcccagaaacatctcttctttgtcctcaaaagactgtcaccaaaatgcaaattgaaaccacagtgagatactatctcacaccagtcagaatggctattactaaaaagccaaaaaatattagatgctgatgaggctgcagagaaaaggcaacacgtatactctgttggtgggaatgtaaattagttcagccactatggaaagcaatttggagatctctcaagaacttaaaacagagctgccattctagccagcagtcccattactgggtatgtatccaaaggaaaataaagtgtttcacaaaaaaaacacctgcacctgtatgttcatcgcagcactattcccaatagcaaaggcatggaatcaatctaggtgcccatcagtggtgaactgggtaaagaaaacatggtgcatatacagcaaggaatactacacagccataaaaaaggacaaaatcatggcctttgcagcagcctggatgcagctggaggccattatcctgagcaaattgacacaggaacagaaaaccaaacacgatgcattctcacttatgagtgagagctaaacactgggtactcatgactgtaaacatgagaagaatacacactgaggactctcaaaggaagaacggctgaaaaacgccctgttgggtactatgctcatacctgggcagcgggattcatcatactccagatctcagcatcacatgcaatatgacccataacaaacctgcacatgtgcccccaaatctaaaatgttgaaattatttttaatataataattcgtggtccatatatggttaaaaaaaagaaaaaagagagagagaaaataaaacctctcacccctttatccaggctttgataagtagctggcattttagggctgcacgggagttaccctgtttaattctgagaatgaccttatgaggtagggatccacagtgccccattttatagatgggaaaactgtggcatggagaacggaaatgacttggcaaaggtcttacagcctgtgggtggcacagttgggatttaaacctggtgtctctgcagtctgtgcttctgacccctgcaccctactgactttcataaatggagcagagccatggccctgtgcctgtgggaaggacagagcccattccactctaacaggcagacaaaagaggtcctcaggtgatggacagttgaggctccattgtggaacccccgatgctgtgtgtcccagagcagggcccagccttgctggcatccattcctatacctgggtctctggctatccgcttctgctctctcttgcaggtgtccaccccccagggttcctgacccctgcccctggacagcgaccccttctcagactccagttgggccggactctccaaacctgcttccgcaatgggtaatgaggagccgtgggtgcagccagccttggagatgccgaagagacgggacatcctagcgatcgtcctcatcgtgctgccctggactctgctcatcactgtctggcaccagagcaccctcgcacccctgctcgcggtacataaggatgagggcagtgacccccgacgcgaaacgccgcccggcgccgaccccagggagtactgcacgtctgaccgcgacatcgtggaggtggtgcgcaccgagtacgtgtacacgcggcccccgccatggtccgacacgctgcccaccatccacgtggtgacgcccacctacagccgcccggtgcagaaggccgagctgacgcgcatggccaacacgctgctgcacgtgcccaacctccactggctggtggtggaggatgcgccgcgccggacgccgctgaccgcgcgcctgctgcgcgacaccggcctcaactacacgcacctgcacgtggagacgccccgcaactacaagctgcgcggagacgcccgcgacccacgcatcccgcggggcaccatgcagcgcaacctggccctgcgctggctgcgcgagaccttcccgcgcaactccagccagcctggcgtggtctacttcgccgacgacgacaacacctacagcctggagctcttcgaagagatgcgcagcaccaggagggtgtccgtgtggcccgtcgccttcgtgggtggcctgcggtacgaggccccacgggtgaacggggcagggaaggtggtcggctggaagacggtgtttgacccccaccggccatttgcaatagacatggctggatttgccgtcaacctgcggctcattctgcagcgaagccaggcctacttcaagctgcgaggtgtgaagggaggctaccaggaaagcagcctccttcgagaacttgtcaccctcaacgacctggagcccaaggcagccaactgcaccaagatcctggtgtggcacacacggacagagaagccagtgctggtgaatgagggcaagaagggcttcactgacccctcggtggagatctgagcctcaggatgcagggcagatgtgggcaggagtggagggcgtcgtcaccacagtccccttcccactgggccacctgaaagtatccaggcattaactttcacccacgcagctgggtccttctgccaccagactcttcagagggtgtcaccttccaaacatcttgctgatttttctgctggcagtgacg

SEQ ID NO: 111421 - DNA, 6565 bp, Homo sapiens
  Payload ID: 1820
  Gene Symbol: B3GAT2
  Gene Name: beta-1,3-glucuronyltransferase 2
  Uniprot ID: Q9NPZ5
  ENST ID: ENST00000230053
  CDS Start-End: 610-1581
tgagaagacaagagcaagggactgagagcaggcttccgctgcggcgcgcgaacacagccgggacacaacccccagcgtctccacccgctcctcgccaccccggcgggaatgtgaggaaggaaagcccccagcgccgccgcccgccctcgaaggcgtcccagagagcgtcctgggggcccgcggctggagcccttgtgcccgcagcaccgccggactggagcggcgaggcgcaccgggtgccgcttctcggcttccactcttcagaaagagcgcggtggggatcagcgcctttcccgcactcggcacaactccgggaccggcggcgcgcggctggaccgagtcccgcttcccgccagctcacctggagtcgggggcagcccctgcccgcccgcctgcaccccttgtcgctctagcttgcgcgaacctgccgctcctccacgcccaggtagtgagccccgcggctccaggtctctgcagcgccctcggccccatggacagcgcacccatcaccactccctaagtgctggcgccgccgctgtccaagctgcgcactggggtccctcggctcgcccctctctggggtgtccgagaggccagggagcgtgcaccatgaagtccgcgcttttcacccgcttctttatcctcctgccctggatcctaattgtcatcatcatgctcgacgtggacacgcgcaggccagtgcccccgctcaccccgcgcccctacttctctccctacgcggtgggccgcgggggcgcccgactcccgctccgcaggggcggcccggctcacgggacccaaaagcgcaaccagtctcggccgcagccacagccggagccgcagctgcccaccatctatgccatcacgcccacctacagccgcccggtgcagaaagcggagctgacccgcctggccaacacgttccgccaggtggcgcagctgcactggatcctggtggaggacgcggcggcgcgcagcgagctggtgagccgcttcctggcgcgggccgggctgcccagcactcacctgcacgtgcccacgccgcggcgctacaagcggcccgggctgccgcgcgccactgagcagcgcaacgcgggcctcgcctggctgcgccagaggcaccagcaccagcgcgcgcagcccggcgtgctcttcttcgctgacgacgacaacacctatagtctggagctcttccaggagatgcgaaccacccgcaaggtctccgtctggcctgtgggcctggttggtgggcggcgctacgaacgtccgctggtggaaaacggcaaagttgttggctggtacaccggctggagagcagacaggccttttgccatcgacatggcaggatttgctgtaagtcttcaagtcattttgtccaatccaaaagctgtatttaagcgtcgtggatcccagccagggatgcaagaatctgactttctcaaacagataacaacagtcgaagaactggaaccgaaagcaaataactgcactaaggttctcgtgtggcacactcggacagagaaggttaatctagccaacgagccaaagtaccacctggacacagtgaaaattgaggtataaattgaagcagcaactggtgcagtttgtccagccagtggatccatatggaagaggatgtttggagtttaggctacagagcattcaggtattgtttgttttacttcagtacagcagcctttcttgtcatctgatggacatctgtttaaatggagcttgtcagttaacataagctaattggatggttggtacaaaatgtatgttttgtcttcatttgttctgcatgttttctctacaacaactaaattggaagatttttttgtacagtgccgatactgcaagataccactcttgagtatatattttttctttttctccaatttgcccttataattggtagacttgaacaggttggtagacttgaacaggtttttaaaacagacaagtattttgtcagctaaacgttcctgatgattcctgactttgcaatactaagtaatttttggaaggttagtggcagtatacatcataggaaataaaaacccacaaatgaaaaggtctatggagtcatgtttaatgtagggaaataacattttgtcaatactaggcaccataaaatgtaaacacaattactgtcataaacctagatataccttcaaggattgaagattgaaagtggctttgttttagttagttaccctgtttgcatatagtgcagaaaaaggtcttcatgttagcactatgtacattaagaagagatccaaattacaagagaggcagataaaatttgaattctttaagcattcattaaacgaagttttggagtaacatccacgtttatcttcctttcactaatcacgttccctgttaagcacatcataacaacagcacagtgaagtgaatgatgaaataagagcattttgatacactagaaaacagtgctcagtgagacatttacattctatttatatgattaaacatttgatcatacagtaccttcctacaggattactggctaattttggggtggggtttatactattagaggtattactaacatgataactacttcccttatatgcaaacattagagctataattttattgagaggaaaactgattttgcaagttgagcagcttctcaaataatgcagtacatgaaatcatgggaaatatgagcaaagctgcccttgacataaaatgatttatcaacctgcttttcaccacatcaaattgaatcagtacagaccaacacggtcaatcagatcattcttaatatgaacaaatgggtaaaaagaaaaaaaatatgcatatgaataaacaggggaactagatgcgtttcagcaaggaatgtcaggtggtagttctggatgaaacttgtattgcagttttcatttccacagttgtgtgctgagagtctgacctgatgagcttccagaccatcctgctgttgtgctggagggctggccaaaacctgcagtaggggttgcactactgatactcatgccagccatctgctgattcatctgtgaaacatataaaaggcttagttcaagaggcttacttcacttttaattcttgtttctttagccacacagttggtcattttttcattaatgtgacaactagtccaagcactggaataaaaacagagtaccatacaaatatttcttaaagcaaatagctactttgttcccttctttatctactttctagatacagtttccccaaagattaaccacaacttacttaaaaaaaaataccaaagcaatcttgggattttaatgagtccgctactctaactaactttcacctacactaggatattgtgctttaactactaaggagtaagaaaattttaggaagtaaaatagtctaaaattatcctataaactttgtatgatagatattattctctattaaaatcttatatacttcctaaatatttttaaagtggtcataaagcatttatttctctcgctgatctaacaacataaacatctaaaatttattttcattgtatgcaataaagcataagattacatgtatttttcttcaagactggagtcaaatatatatatatataagcatcttaaccctgtgattctcttacttccaaaattggtgataagagaaggaaaggcaagatttaccatatagtgagtgggtttaaaacttacactcagagttagactgtgttcttaatttaatacatttgacttgacttatttacagtttcaaagacactaacataaactacatcactaatcaggcataagtgtctgaagaagcagatcacgtcttcatacctactaaaggacattttaaccaccttgtcattggccagtagattgcactgatggagtgctggagaacagcatcacccttctgcattatctggaagtaagagccagtattaactccttcctggttcatctagcaccttaacctgagctgggtgtgcttcagcatgttgaccatgtgactgacacttagcacatacaattttttagattcccagcgggtagagaccaatgttttacctatattcttgtaaatggtggtagcaaaattaactgtgatatatagtgattgtgctaatgttagaaatcactctagactattccctgaatgctctaaaggtaaaacaagtgaccaaacagaaaccaagattgccaaaatgctggaggaacatcaatgggaagtgtaaaaggaagaagagtgggagcatgaacctctctaagagcctttgtctgtgcagctagagaaaagtcagaacacagcacctgaaatagaaatgttctatctcagctctaacttaggtagaaataggattttataatatgaggggatgtctggttcacaccttatgggaattgaatctttttgtactctttttaaacataaaagtcattatagggtatgtaaaaagaaaatacaactttacaaaggtttctcaacaaaaagaatttttacagagccatggggcagtaatcatccgacctgaaaaatagccttagatccctcataaaatagtgctttgagaatatgaggctagatttttattttctaataaaagatcctaaaattattagtgaagctaagttgtctaagtggactgtaaaaatgtcccaccagcaagctggataaagcttagtgctaatctcagaggtgacagagagggagtctcatgatgcctgagataatttctggccattagtggtgttcacgttacagttacattacaatttgaaatgaaagatgtttaaccttttttttacagaatactctaaaatagcgataataacacatcatttgtctatctgatacaacttcataatatttatagatacttttgaccctataacatattatccctattgaattctttctgccagatcactagacttaaaaaaaaaaaaaaaaaaaaaaaaaaaagatttagaaaataaatctggtttgatttgggagaagctagaaagtaaatgacccctacctgtgagaggctccactggggctgctgagcttgcggcaggccaaacttactctggggtgcacccatttgtcccaccattcctccttgggggccaacaacgttctgaggaagtggcatcacaccagtttgtgcatttcccataaacccattgggcatgggcatgcccaccatcatgcttggactctgtcccatcacatttcctataaggccaggagctgcaggcacaggcacgcccatcgatggaaagccctgaaatgcagctggtgcttgtgaggtaaatggtatatttgtgggtcccataaatacacctgcaccacaaaaagaaaatgaatgaagacagagctatcacgtgtagttgcactcatctctataatcacagaaaaattgcctttctgaactactcacagcaaacattttaattccagtttggctgctcctactactcagaccaacccacacctaaaccctgagagctggttgtttctaggatgcagacaaatcagttattaacctgagtaaatttaattaagaaatgtaaatcatatgcaacagccacacaaaatatcttccactgtgaagaccaaactatgtagcatgacatcatacactgttttattgctgatttgtaccactggtcccccagtacgaaacagggaagtgagagctgactatatctcgcttcaataggtgtagtgggctgcccaacaattttagctcacatgtgaaatgcagctcattattttaaaggaaatggtgtgaaagattaaaactctgtaaacaataaggcttatgctaatattttgttatgattacaaaaaaattcatagattttttttaatccatgtggtaactcaagactgtttacctgcagagaaaatacactgtacgcagtcataaacttcatgcaaatcgtttcaataattcatcaaagataatccatgttctataagcttgtgaaacaacatttagtgatctatgaacagcttgttaattccaaataaagttctgtgaatcctgtacatgcctcttaattttttaattctaatgctcattcatttcggcttcatagttgtataaactgcaacaacaaaagcactcactacatggaacaataaaagatatataattgatcttattatataattacaaaggatgtacttctagtaatgtcactgaaagcagatatcaaaattcattaccaggagtactttgctgttgaatggttcctgtgccatacagagataagatggagtctttggaaagttgtttctttgccacttcttctgattttgtagtttgctcagtgaataaatctagatccccagatgttactgtagacagggttgcagctgctggtgcagagggtgtcccctgagacaaacaccaaaataagctatcaaattctgcatagtaaagcgcagcttatccattacttaaaatccaaataaagttataaaattagataggaatcaaacaattgtagaaggtaaaatggtgccattcaagaggatcacttacaagcccaagcccatataaaaacatctacaatca

SEQ ID NO: 111422 - DNA, 5206 bp, Homo sapiens
  Payload ID: 1820
  Gene Symbol: B3GAT2
  Gene Name: beta-1,3-glucuronyltransferase 2
  ENST ID: ENST00000615536
  CDS Start-End: 1-756
atgaagtccgcgcttttcacccgcttctttatcctcctgccctggatcctaattgtcatcatcatgctcgacgtggacacgcgcaggccagtgcccccgctcaccccgcgcccctacttctctccctacgcggtgggccgcgggggcgcccgactcccgctccgcaggggcggcccggctcacgggacccaaaagcgcaaccagtctcggccgcagccacagccggagccgcagctgcccaccatctatgccatcacgcccacctacagccgcccggtgcagaaagcggagctgacccgcctggccaacacgttccgccaggtggcgcagctgcactggatcctggtggaggacgcggcggcgcgcagcgagctgatgcgaaccacccgcaaggtctccgtctggcctgtgggcctggttggtgggcggcgctacgaacgtccgctggtggaaaacggcaaagttgttggctggtacaccggctggagagcagacaggccttttgccatcgacatggcaggatttgctgtaagtcttcaagtcattttgtccaatccaaaagctgtatttaagcgtcgtggatcccagccagggatgcaagaatctgactttctcaaacagataacaacagtcgaagaactggaaccgaaagcaaataactgcactaaggttctcgtgtggcacactcggacagagaaggttaatctagccaacgagccaaagtaccacctggacacagtgaaaattgaggtataaattgaagcagcaactggtgcagtttgtccagccagtggatccatatggaagaggatgtttggagtttaggctacagagcattcaggtattgtttgttttacttcagtacagcagcctttcttgtcatctgatggacatctgtttaaatggagcttgtcagttaacataagctaattggatggttggtacaaaatgtatgttttgtcttcatttgttctgcatgttttctctacaacaactaaattggaagatttttttgtacagtgccgatactgcaagataccactcttgagtatatattttttctttttctccaatttgcccttataattggtagacttgaacaggttggtagacttgaacaggtttttaaaacagacaagtattttgtcagctaaacgttcctgatgattcctgactttgcaatactaagtaatttttggaaggttagtggcagtatacatcataggaaataaaaacccacaaatgaaaaggtctatggagtcatgtttaatgtagggaaataacattttgtcaatactaggcaccataaaatgtaaacacaattactgtcataaacctagatataccttcaaggattgaagattgaaagtggctttgttttagttagttaccctgtttgcatatagtgcagaaaaaggtcttcatgttagcactatgtacattaagaagagatccaaattacaagagaggcagataaaatttgaattctttaagcattcattaaacgaagttttggagtaacatccacgtttatcttcctttcactaatcacgttccctgttaagcacatcataacaacagcacagtgaagtgaatgatgaaataagagcattttgatacactagaaaacagtgctcagtgagacatttacattctatttatatgattaaacatttgatcatacagtaccttcctacaggattactggctaattttggggtggggtttatactattagaggtattactaacatgataactacttcccttatatgcaaacattagagctataattttattgagaggaaaactgattttgcaagttgagcagcttctcaaataatgcagtacatgaaatcatgggaaatatgagcaaagctgcccttgacataaaatgatttatcaacctgcttttcaccacatcaaattgaatcagtacagaccaacacggtcaatcagatcattcttaatatgaacaaatgggtaaaaagaaaaaaaatatgcatatgaataaacaggggaactagatgcgtttcagcaaggaatgtcaggtggtagttctggatgaaacttgtattgcagttttcatttccacagttgtgtgctgagagtctgacctgatgagcttccagaccatcctgctgttgtgctggagggctggccaaaacctgcagtaggggttgcactactgatactcatgccagccatctgctgattcatctgtgaaacatataaaaggcttagttcaagaggcttacttcacttttaattcttgtttctttagccacacagttggtcattttttcattaatgtgacaactagtccaagcactggaataaaaacagagtaccatacaaatatttcttaaagcaaatagctactttgttcccttctttatctactttctagatacagtttccccaaagattaaccacaacttacttaaaaaaaaataccaaagcaatcttgggattttaatgagtccgctactctaactaactttcacctacactaggatattgtgctttaactactaaggagtaagaaaattttaggaagtaaaatagtctaaaattatcctataaactttgtatgatagatattattctctattaaaatcttatatacttcctaaatatttttaaagtggtcataaagcatttatttctctcgctgatctaacaacataaacatctaaaatttattttcattgtatgcaataaagcataagattacatgtatttttcttcaagactggagtcaaatatatatatatataagcatcttaaccctgtgattctcttacttccaaaattggtgataagagaaggaaaggcaagatttaccatatagtgagtgggtttaaaacttacactcagagttagactgtgttcttaatttaatacatttgacttgacttatttacagtttcaaagacactaacataaactacatcactaatcaggcataagtgtctgaagaagcagatcacgtcttcatacctactaaaggacattttaaccaccttgtcattggccagtagattgcactgatggagtgctggagaacagcatcacccttctgcattatctggaagtaagagccagtattaactccttcctggttcatctagcaccttaacctgagctgggtgtgcttcagcatgttgaccatgtgactgacacttagcacatacaattttttagattcccagcgggtagagaccaatgttttacctatattcttgtaaatggtggtagcaaaattaactgtgatatatagtgattgtgctaatgttagaaatcactctagactattccctgaatgctctaaaggtaaaacaagtgaccaaacagaaaccaagattgccaaaatgctggaggaacatcaatgggaagtgtaaaaggaagaagagtgggagcatgaacctctctaagagcctttgtctgtgcagctagagaaaagtcagaacacagcacctgaaatagaaatgttctatctcagctctaacttaggtagaaataggattttataatatgaggggatgtctggttcacaccttatgggaattgaatctttttgtactctttttaaacataaaagtcattatagggtatgtaaaaagaaaatacaactttacaaaggtttctcaacaaaaagaatttttacagagccatggggcagtaatcatccgacctgaaaaatagccttagatccctcataaaatagtgctttgagaatatgaggctagatttttattttctaataaaagatcctaaaattattagtgaagctaagttgtctaagtggactgtaaaaatgtcccaccagcaagctggataaagcttagtgctaatctcagaggtgacagagagggagtctcatgatgcctgagataatttctggccattagtggtgttcacgttacagttacattacaatttgaaatgaaagatgtttaaccttttttttacagaatactctaaaatagcgataataacacatcatttgtctatctgatacaacttcataatatttatagatacttttgaccctataacatattatccctattgaattctttctgccagatcactagacttaaaaaaaaaaaaaaaaaaaaaaaaaaaagatttagaaaataaatctggtttgatttgggagaagctagaaagtaaatgacccctacctgtgagaggctccactggggctgctgagcttgcggcaggccaaacttactctggggtgcacccatttgtcccaccattcctccttgggggccaacaacgttctgaggaagtggcatcacaccagtttgtgcatttcccataaacccattgggcatgggcatgcccaccatcatgcttggactctgtcccatcacatttcctataaggccaggagctgcaggcacaggcacgcccatcgatggaaagccctgaaatgcagctggtgcttgtgaggtaaatggtatatttgtgggtcccataaatacacctgcaccacaaaaagaaaatgaatgaagacagagctatcacgtgtagttgcactcatctctataatcacagaaaaattgcctttctgaactactcacagcaaacattttaattccagtttggctgctcctactactcagaccaacccacacctaaaccctgagagctggttgtttctaggatgcagacaaatcagttattaacctgagtaaatttaattaagaaatgtaaatcatatgcaacagccacacaaaatatcttccactgtgaagaccaaactatgtagcatgacatcatacactgttttattgctgatttgtaccactggtcccccagtacgaaacagggaagtgagagctgactatatctcgcttcaataggtgtagtgggctgcccaacaattttagctcacatgtgaaatgcagctcattattttaaaggaaatggtgtgaaagattaaaactctgtaaacaataaggcttatgctaatattttgttatgattacaaaaaaattcatagattttttttaatccatgtggtaactcaagactgtttacctgcagagaaaatacactgtacgcagtcataaacttcatgcaaatcgtttcaataattcatcaaagataatccatgttctataagcttgtgaaacaacatttagtgatctatgaacagcttgttaattccaaataaagttctgtgaatcctg

SEQ ID NO: 111423 - DNA, 1641 bp, Homo sapiens
  Payload ID: 1821
  Gene Symbol: B3GAT3
  Gene Name: beta-1,3-glucuronyltransferase 3
  Uniprot ID: O94766
  ENST ID: ENST00000265471
  CDS Start-End: 229-1236
gggaccggaaatcaagtctacaaggcgggggggtgcacagatgaccggaagcgtgccctggcggcgctgccagccccagctgggagctggtaggggagtgcgaggaaggcgggacgcagggcggagccgctgcaggggcggggcctgcggacaggagccggggtttggggcgggaacccctcgtcccctgcagaccccgcctgctcgggcgcgggcggcggcgcggccatgaagctgaagctgaagaacgtgtttctcgcctacttcctggtgtcgatcgccggcctcctctacgcgctggtacagctcggccagccatgtgactgccttcctcccctgcgggcagcagccgagcagctacggcagaaggatctgaggatttcccagctgcaagcggaactccgacggccaccccctgcccctgcccagccccctgaacccgaggccctgcctactatctatgttgttacccccacctatgccaggctggtacagaaggcagagctggtacgactgtcccagacactgagcctggtgccccggctgcattggctgctggtggaggatgctgagggtcccaccccgctggtctcagggctgctggctgcctctggcctcctcttcacacacctggtggtcctcacgcccaaagcccagcggcttcgggagggcgagcctggctgggttcatccccgtggtgtcgagcagcggaacaaggccctggactggctccggggcagagggggtgctgtgggtggggagaaggacccaccaccaccagggacccaaggagtcgtctactttgctgacgatgacaacacctacagccgggagctgtttgaggagatgcgctggacccgtggtgtctcagtgtggcctgtggggctggtgggcggcctgcgattcgagggccctcaggtacaggacggccgggtagtgggcttccacacagcatgggagcccagcaggcccttccctgtggatatggctggatttgccgtggccctgcccttgctgttagataagcccaatgcccaatttgattccaccgctccccggggccacctggagagcagtcttctgagccaccttgtggatcccaaggacctggagccacgggctgccaactgcactcgggtactggtgtggcatactcggacagagaagcccaagatgaagcaggaggagcagctgcagcggcagggccggggctcagacccagcaattgaggtgtgatggcggccccaccccaactaccacctcttttcaggcacagaccttgtgggactgggccccaggcctgcccaggatgtggttttccaagtcctgacccttggagccagaagtggcccctctgcccctccaggcccagggcatggtcctgctgcttcacccctcccctagcctgccgtgtggcactgcccacaggctggggacaagcagcccttgtgttgagtcaggttggccctgtctagggtggaacagaaggacagatggacccaggagggagggcagctgagtaactgggtaacttattggggctgggcatgcactggggggctggaggagctgggctggacccttcccacctgagcatgctgacccccttcctacctccagaataaagaatctcaacctgga

SEQ ID NO: 111424 - DNA, 2056 bp, Homo sapiens
  Payload ID: 1821
  Gene Symbol: B3GAT3
  Gene Name: beta-1,3-glucuronyltransferase 3
  ENST ID: ENST00000531383
  CDS Start-End: 208-1167
aaggcgggggggtgcacagatgaccggaagcgtgccctggcggcgctgccagccccagctgggagctggtaggggagtgcgaggaaggcgggacgcagggcggagccgctgcaggggcggggcctgcggacaggagccggggtttggggcgggaacccctcgtcccctgcagaccccgcctgctcgggcgcgggcggcggcgcggccatgaagctgaagctgaagaacgtgtttctcgcctacttcctggtgtcgatcgccggcctcctctacgcgctggtacagctcggccagccatgtgactgccttcctcccctgcgggcagcagccgagcagctacggcagaaggatctgaggatttcccagctgcaagcggaactccgacggccaccccctgcccctgcccagccccctgaacccgaggccctgcctactatctatgttgttacccccacctatgccaggctggtacagaaggcagagctggtacgactgtcccagacactgagcctggtgccccggctgcattggctgctggtggaggatgctgagggtcccaccccgctggtctcagggctgctggctgcctctggcctcctcttcacacacctggtggtcctcacgcccaaagcccagcggcttcgggagggcgagcctggctgggttcatccccgtggtgtcgagcagcggaacaaggccctggactggctccggggcagagggggtgctgtgggtggggagaaggacccaccaccaccagggacccaaggagtcgtctactttgctgacgatgacaacacctacagccgggagctgtttgaggagatgcgctggacccgtggtgtctcagtgtggcctgtggggctggtgggcggcctgcgattcgagggccctcaggtacaggacggccgggtagtgggcttccacacagcatgggagcccagcaggcccttccctgtggatatggctggatttgccgtggccctgcccttgctgttagataagcccaatgcccaatttgattccaccgctccccggggccacctggagagcagtcttctgagccaccttgtggatcccaaggacctggagccacgggctgccaactgcactcggagtctcgctgtgtcacccaggctggagtgcagtagcgcaatcttggcttagcgcaagctccgcctcccgggttcacaccattctcctgcctcagcctcccaagtagctgggactacaggcacccgctaccacgcccggctaatttttttgtgtttttagtagtgacggggtttcacggtgttagccaggatggtctcaatctcctgacctcgtgatccgccttcctcggcctcccaaagtgctggggttacaggcgtgagccacgcgcccggccaaggcccggttttagaggcactaagtcttcctccaccctgccctttacactttgaagcctatactgtatatgtcgatagggttagagaatccattccaggctcggggacccagaggcctggctgcagctgggcctggctctcactgcatccctcctggcacaggtactggtgtggcatactcggacagagaagcccaagatgaagcaggaggagcagctgcagcggcagggccggggctcagacccagcaattgaggtgtgatggcggccccaccccaactaccacctcttttcaggcacagaccttgtgggactgggccccaggcctgcccaggatgtggttttccaagtcctgacccttggagccagaagtggcccctctgcccctccaggcccagggcatggtcctgctgcttcacccctcccctagcctgccgtgtggcactgcccacaggctggggacaagcagcccttgtgttgagtcaggttggccctgtctagggtggaacagaaggacagatggacccaggagggagggcagctgagtaactgggtaacttattggggctgggcatgcactggggggctggaggagctgggctggacccttcccacctgagcatgctgacccccttcctacctccagaataaagaatctcaacctgg

SEQ ID NO: 111425 - DNA, 1120 bp, Homo sapiens
  Payload ID: 1821
  Gene Symbol: B3GAT3
  Gene Name: beta-1,3-glucuronyltransferase 3
  Uniprot ID: O94766
  ENST ID: ENST00000534026
  CDS Start-End: 38-985
agaccccgcctgctcgggcgcgggcggcggcgcggccatgaagctgaagctgaagaacgtgtttctcgcctacttcctggtgtcgatcgccggcctcctctacgcgctggtacagctcggccagccatgtgactgccttcctcccctgcgggcagcagccgagcagctacggcagaaggatctgaggatttcccagctgcaagcggaactccgacggccaccccctgcccctgcccagccccctgaacccgaggccctgcctactatctatgttgttacccccacctatgccaggctggtacagaaggcagagctggtacgactgtcccagacactgagcctggtgccccggctgcattggctgctggtggaggatgctgagggtcccaccccgctggtctcagggctgctggctgcctctggcctcctcttcacacacctggtggtcctcacgcccaaagcccagcggcttcgggagggcgagcctggctgggttcatccccgtggtgtcgagcagcggaacaaggccctggactggctccggggcagagggggtgctgtgggtggggagaaggacccaccaccaccagggacccaaggagtcgtctactttgctgacgatgacaacacctacagccgggagctgtttgaggagatgcgctggacccgtggtgtctcagtgtggcctgtggggctggtgggcggcctgcgattcgagggccctcaggtacaggacggccgggtagtgggcttccacacagcatgggagcccagcaggcccttccctgtggatatggctggatttgccgtggccctgcccttgctgttagataagcccaatgcccaatttgattccaccgctccccggggccacctggagagcagtcttctgagccaccttgtggatcccaaggacctggagccacgggctgccaactgcactcggacagagtctcgctgtgtcacccaggctggagtgcagtagcgcaatcttggcttagcgcaagctccgcctcccgggttcacaccattctcctgcctcagcctcccaagtagctgggactacaggcacccgctaccacgcccggctaatttttttgtgtttttagtagtgacgggg

SEQ ID NO: 111426 - DNA, 1534 bp, Homo sapiens
  Payload ID: 1821
  Gene Symbol: B3GAT3
  Gene Name: beta-1,3-glucuronyltransferase 3
  ENST ID: ENST00000532585
  CDS Start-End: 38-154
agaccccgcctgctcgggcgcgggcggcggcgcggccatgaagctgaagctgaagaacgtgtttctcgcctacttcctggtgtcgatcgccggcctcctctacgcgctggtacagctcgtgtctgcttcctccactaaacagaaagctcgatgagggcagggactgtgtctgttttgttccctgctgtatccccagcacctaaggcagtgcctcctaggaagagtattcaataaatatttatcctacgatggaatcaatgaatttaacaatgagtctttggtcacctagccaagggaatggatcgaaccctgccccttatgcaaagatttagggacagtgccactgcgttatcctcaggccagccatgtgactgccttcctcccctgcgggcagcagccgagcagctacggcagaaggatctgaggatttcccagctgcaagcggaactccgacggccaccccctgcccctgcccagccccctgaacccgaggccctgcctactatctatgttgttacccccacctatgccaggctggtacagaaggcagagctggtacgactgtcccagacactgagcctggtgccccggctgcattggctgctggtggaggatgctgagggtcccaccccgctggtctcagggctgctggctgcctctggcctcctcttcacacacctggtggtcctcacgcccaaagcccagcggcttcgggagggcgagcctggctgggttcatccccgtggtgtcgagcagcggaacaaggccctggactggctccggggcagagggggtgctgtgggtggggagaaggacccaccaccaccagggacccaaggagtcgtctactttgctgacgatgacaacacctacagccgggagctgtttgaggagatgcgctggacccgtggtgtctcagtgtggcctgtggggctggtgggcggcctgcgattcgagggccctcaggtacaggacggccgggtagtgggcttccacacagcatgggagcccagcaggcccttccctgtggatatggctggatttgccgtggccctgcccttgctgttagataagcccaatgcccaatttgattccaccgctccccggggccacctggagagcagtcttctgagccaccttgtggatcccaaggacctggagccacgggctgccaactgcactcgggtactggtgtggcatactcggacagagaagcccaagatgaagcaggaggagcagctgcagcggcagggccggggctcagacccagcaattgaggtgtgatggcggccccaccccaactaccacctcttttcaggcacagaccttgtgggactgggccccaggcctgcccaggatgtggttttccaagtcctgacccttggagccagaagtggcccctctgcccctccaggcccagggcatggtcctgctgcttcacccctcccctagcctgccgtgtggcactgcccacaggctggggacaagcagcccttgtgttgagtcaggttggccctgtctagggtggaacaga

SEQ ID NO: 111427 - DNA, 868 bp, Homo sapiens
  Payload ID: 1821
  Gene Symbol: B3GAT3
  Gene Name: beta-1,3-glucuronyltransferase 3
  ENST ID: ENST00000534715
  CDS Start-End: 200-868
ggggtgcacagatgaccggaagcgtgccctggcggcgctgccagccccagctgggagctggtaggggagtgcgaggaaggcgggacgcagggcggagccgctgcaggggcggggcctgcggacaggagccggggtttggggcgggaacccctcgtcccctgcagaccccgcctgctcgggcgcgggcggcggcgcggccatgaagctgaagctgaagaacgtgtttctcgcctacttcctggtgtcgatcgccggcctcctctacgcgctggtacagctcgccaagggaatggatcgaaccctgccccttatgcaaagatttagggacagtgccactgcgttatcctcaggccagccatgtgactgccttcctcccctgcgggcagcagccgagcagctacggcagaaggatctgaggatttcccagctgcaagcggaactccgacggccaccccctgcccctgcccagccccctgaacccgaggccctgcctactatctatgttgttacccccacctatgccaggctggtacagaaggcagagctggtacgactgtcccagacactgagcctggtgccccggctgcattggctgctggtggaggatgctgagggtcccaccccgctggtctcagggctgctggctgcctctggcctcctcttcacacacctggtggtcctcacgcccaaagcccagcggcttcgggagggcgagcctggctgggttcatccccgtggtgtcgagcagcggaacaaggccctggactggctccggggcagagggggtgctgtgggtggggagaaggacccaccaccaccagggacccaaggagtcgtctactttgctgacgatgacaacacctacagc

SEQ ID NO: 111428 - DNA, 3270 bp, Homo sapiens
  Payload ID: 1822
  Gene Symbol: B3GALNT1
  Gene Name: beta-1,3-N-acetylgalactosaminyltransferase 1 (globoside blood group)
  Uniprot ID: O75752
  ENST ID: ENST00000320474
  CDS Start-End: 399-1394
gtgcggatgcggggaggctgcgtgtgtgcgcagggagagaacgccggccaccttcccgcttccgagctgggtgcgcgccgagcacaggagattgcctgcgtttaggaggtggctgcgttgtgggaaaagctatcaaggaagaaattgccaaaccatgtctttttttctgttttcagagtagttcacaacagatctgagtgttttaattaagcatggaatacagaaaacaacaaaaaacttaagctttaatttcatctggaattccacagttttcttagctccctggacccggttgacctgttggctcttcccgctggctgctctatcacgtggtgctctccgactactcaccccgagtgtaaagaaccttcggctcgcgtgcttctgagctgctgtggatggcctcggctctctggactgtccttccgagtaggatgtcactgagatccctcaaatggagcctcctgctgctgtcactcctgagtttctttgtgatgtggtacctcagccttccccactacaatgtgatagaacgcgtgaactggatgtacttctatgagtatgagccgatttacagacaagactttcacttcacacttcgagagcattcaaactgctctcatcaaaatccatttctggtcattctggtgacctcccacccttcagatgtgaaagccaggcaggccattagagttacttggggtgaaaaaaagtcttggtggggatatgaggttcttacatttttcttattaggccaagaggctgaaaaggaagacaaaatgttggcattgtccttagaggatgaacaccttctttatggtgacataatccgacaagattttttagacacatataataacctgaccttgaaaaccattatggcattcaggtgggtaactgagttttgccccaatgccaagtacgtaatgaagacagacactgatgttttcatcaatactggcaatttagtgaagtatcttttaaacctaaaccactcagagaagtttttcacaggttatcctctaattgataattattcctatagaggattttaccaaaaaacccatatttcttaccaggagtatcctttcaaggtgttccctccatactgcagtgggttgggttatataatgtccagagatttggtgccaaggatctatgaaatgatgggtcacgtaaaacccatcaagtttgaagatgtttatgtcgggatctgtttgaatttattaaaagtgaacattcatattccagaagacacaaatcttttctttctatatagaatccatttggatgtctgtcaactgagacgtgtgattgcagcccatggcttttcttccaaggagatcatcactttttggcaggtcatgctaaggaacaccacatgccattattaacttcacattctacaaaaagcctagaaggacaggatactttgtggaaagtgttaaataaagtaggtactgtggaaaattcatggggaggtcagtgtgctggcttacactgaactgaaactcatgaaaaacccagactggagactggagggttacacttgtgatttattagtcaggcccttcaaagatgatatgtggaggaattaaatataaaggaattggaggtttttgctaaagaaattaataggaccaaacaatttggacatgtcattctgtagactagaatttcttaaaagggtgttactgagttataagctcactaggctgtaaaaacaaaacaatgtagagttttatttattgaacaatgtagtcacttgaaggttttgtgtatatcttatgtggattaccaatttaaaaatatatgtagttctgtgtcaaaaaacttcttcactgaagttatactgaacaaaattttacctgtttttggtcatttataaagtacttcaagatgttgcagtatttcacagttattattatttaaaattacttcaactttgtgtttttaaatgttttgacgatttcaatacaagataaaaaggatagtgaatcattctttacatgcaaacattttccagttacttaactgatcagtttattattgatacatcactccattaatgtaaagtcataggtcattattgcatatcagtaatctcttggactttgttaaatattttactgtggtaatatagagaagaattaaagcaagaaaatctgaagtattgtcttgtttttaaaaaatacagttcctagtgtttttagaagtcacttaatttgtctcatttttccacctggaaattaggaataatgtagaatgcaaggcagtaatttccttttggaaaggactctgaaggcagaaaagaagggagagaacctcatgggcagaatattataaaaagagtgtcatattccagcatttgaattggaaagagaagagtgaagatccaagttgcattattaatctgccctgtgttttttccttttaacaatcagtttgagctgctgctgttatgagtttctcatcaagatgaaagccctaatatgtaaagtcaaatccgatttaaattttgtgcttttatagaaagaaatttcttcatagacgtggtgatatatcatttgttggacctgctaatagtaggtcaaaggggagcactccttgccccctgttcctgggtttatgcagttttctttttagagtttatatagggcaagtggttctttttctctgaattacaggatggaaaaaggtcatatcctttgtcaggaaatataaacttgaaagtatgtagtcagctcttgtaatactcatatttatgattgtcctatatgaaaaacaacttcagttaaaactataatgtgtgattctgtataacaaggtgatgtctgtttcccagggctcagacctaatccagttataataaaatcaattaaatgaaatattctatagaatcgatctatgcccttgttaatctccatccatataggagtcacgttctttaagacagatggtggtagttatttttgtggcatggttagatttgactggttttgcagaagattacagttatgtactgcataatgacatatacaatagtggtcccataaaattataatggagcagaaaatctattgcctcatgatgttttagccgttttaatgtcatagcctagtgcattactcacgtgtctgtggagatgctggtgtaaacaaacctactacactgccagttgtataaaagtacagcacattcagttatgtacagtatgtaatactgataatgacaataaatgacaccggtttgtgtatttactttttataa

SEQ ID NO: 111429 - DNA, 3221 bp, Homo sapiens
  Payload ID: 1822
  Gene Symbol: B3GALNT1
  Gene Name: beta-1,3-N-acetylgalactosaminyltransferase 1 (globoside blood group)
  Uniprot ID: O75752
  ENST ID: ENST00000392779
  CDS Start-End: 350-1345
ttccggccgcggccctggcgcgtggtctgcgcgcgcccggccgtgcgtgcggatgcggggaggctgcgtgtgtgcgcagggagagaacgccggccaccttcccgcttccgagctgggtgcgcgccgagcacaggagattgcctgcgtttaggaggtggctgcgttgtgggaaaagctatcaaggaagaaattgccaaaccatgtctttttttctgttttcagagtagttcacaacagatctgagtgttttaattaagcatggaatacagaaaacaacaaaaaacttaagctttaatttcatctggaattccacagaaccttcggctcgcgtgcttctgagctgctgtggatggcctcggctctctggactgtccttccgagtaggatgtcactgagatccctcaaatggagcctcctgctgctgtcactcctgagtttctttgtgatgtggtacctcagccttccccactacaatgtgatagaacgcgtgaactggatgtacttctatgagtatgagccgatttacagacaagactttcacttcacacttcgagagcattcaaactgctctcatcaaaatccatttctggtcattctggtgacctcccacccttcagatgtgaaagccaggcaggccattagagttacttggggtgaaaaaaagtcttggtggggatatgaggttcttacatttttcttattaggccaagaggctgaaaaggaagacaaaatgttggcattgtccttagaggatgaacaccttctttatggtgacataatccgacaagattttttagacacatataataacctgaccttgaaaaccattatggcattcaggtgggtaactgagttttgccccaatgccaagtacgtaatgaagacagacactgatgttttcatcaatactggcaatttagtgaagtatcttttaaacctaaaccactcagagaagtttttcacaggttatcctctaattgataattattcctatagaggattttaccaaaaaacccatatttcttaccaggagtatcctttcaaggtgttccctccatactgcagtgggttgggttatataatgtccagagatttggtgccaaggatctatgaaatgatgggtcacgtaaaacccatcaagtttgaagatgtttatgtcgggatctgtttgaatttattaaaagtgaacattcatattccagaagacacaaatcttttctttctatatagaatccatttggatgtctgtcaactgagacgtgtgattgcagcccatggcttttcttccaaggagatcatcactttttggcaggtcatgctaaggaacaccacatgccattattaacttcacattctacaaaaagcctagaaggacaggatactttgtggaaagtgttaaataaagtaggtactgtggaaaattcatggggaggtcagtgtgctggcttacactgaactgaaactcatgaaaaacccagactggagactggagggttacacttgtgatttattagtcaggcccttcaaagatgatatgtggaggaattaaatataaaggaattggaggtttttgctaaagaaattaataggaccaaacaatttggacatgtcattctgtagactagaatttcttaaaagggtgttactgagttataagctcactaggctgtaaaaacaaaacaatgtagagttttatttattgaacaatgtagtcacttgaaggttttgtgtatatcttatgtggattaccaatttaaaaatatatgtagttctgtgtcaaaaaacttcttcactgaagttatactgaacaaaattttacctgtttttggtcatttataaagtacttcaagatgttgcagtatttcacagttattattatttaaaattacttcaactttgtgtttttaaatgttttgacgatttcaatacaagataaaaaggatagtgaatcattctttacatgcaaacattttccagttacttaactgatcagtttattattgatacatcactccattaatgtaaagtcataggtcattattgcatatcagtaatctcttggactttgttaaatattttactgtggtaatatagagaagaattaaagcaagaaaatctgaagtattgtcttgtttttaaaaaatacagttcctagtgtttttagaagtcacttaatttgtctcatttttccacctggaaattaggaataatgtagaatgcaaggcagtaatttccttttggaaaggactctgaaggcagaaaagaagggagagaacctcatgggcagaatattataaaaagagtgtcatattccagcatttgaattggaaagagaagagtgaagatccaagttgcattattaatctgccctgtgttttttccttttaacaatcagtttgagctgctgctgttatgagtttctcatcaagatgaaagccctaatatgtaaagtcaaatccgatttaaattttgtgcttttatagaaagaaatttcttcatagacgtggtgatatatcatttgttggacctgctaatagtaggtcaaaggggagcactccttgccccctgttcctgggtttatgcagttttctttttagagtttatatagggcaagtggttctttttctctgaattacaggatggaaaaaggtcatatcctttgtcaggaaatataaacttgaaagtatgtagtcagctcttgtaatactcatatttatgattgtcctatatgaaaaacaacttcagttaaaactataatgtgtgattctgtataacaaggtgatgtctgtttcccagggctcagacctaatccagttataataaaatcaattaaatgaaatattctatagaatcgatctatgcccttgttaatctccatccatataggagtcacgttctttaagacagatggtggtagttatttttgtggcatggttagatttgactggttttgcagaagattacagttatgtactgcataatgacatatacaatagtggtcccataaaattataatggagcagaaaatctattgcctcatgatgttttagccgttttaatgtcatagcctagtgcattactcacgtgtctgtggagatgctggtgtaaacaaacctactacactgccagttgtataaaagtacagcacattcagttatgtacagtatgtaatactgataatgacaataaatgacaccggtttgtgtatttactttttataa

SEQ ID NO: 111430 - DNA, 3606 bp, Homo sapiens
  Payload ID: 1822
  Gene Symbol: B3GALNT1
  Gene Name: beta-1,3-N-acetylgalactosaminyltransferase 1 (globoside blood group)
  Uniprot ID: O75752
  ENST ID: ENST00000392781
  CDS Start-End: 749-1744
gcgtggtctgcgcgcgcccggccgtgcgtgcggatgcggggaggctgcgtgtgtgcgcagggagagaacgccggccaccttcccgcttccgagctgggtgcgcgccgagcacaggagggtgcaatacctgccttgcgtcgcccgtgccgctccagccaccgtcaaatccgggtagcgacccggggcgtttgcagcggtgccgaggaagaggacgggaacggtgttacgattgcctgcgtttaggaggtggctgcgttgtgggaaaagctatcaaggaagaaattgccaaaccatgtctttttttctgttttcagagtagttcacaacagatctgagtgttttaattaagcatggaatacagaaaacaacaaaaaacttaagctttaatttcatctggaattccacagagacaaggccactttatgtttcccaggctggactggaacccctgggctcaaatgatcctcctacctaagcctgcagagtagcgaggacttcagttttcttagctccctggacccggttgacctgttggctcttcccgctggctgctctatcacgtggtgctctccgactactcaccccgagtgtaaagtcttgctgctctgttgcccaggctggagtacagtggcaggatctcagctcactgcaatctccgtctctcaggtttaagcagttctcctgcctcagcctcccaagtaggtgggactacagaaccttcggctcgcgtgcttctgagctgctgtggatggcctcggctctctggactgtccttccgagtaggatgtcactgagatccctcaaatggagcctcctgctgctgtcactcctgagtttctttgtgatgtggtacctcagccttccccactacaatgtgatagaacgcgtgaactggatgtacttctatgagtatgagccgatttacagacaagactttcacttcacacttcgagagcattcaaactgctctcatcaaaatccatttctggtcattctggtgacctcccacccttcagatgtgaaagccaggcaggccattagagttacttggggtgaaaaaaagtcttggtggggatatgaggttcttacatttttcttattaggccaagaggctgaaaaggaagacaaaatgttggcattgtccttagaggatgaacaccttctttatggtgacataatccgacaagattttttagacacatataataacctgaccttgaaaaccattatggcattcaggtgggtaactgagttttgccccaatgccaagtacgtaatgaagacagacactgatgttttcatcaatactggcaatttagtgaagtatcttttaaacctaaaccactcagagaagtttttcacaggttatcctctaattgataattattcctatagaggattttaccaaaaaacccatatttcttaccaggagtatcctttcaaggtgttccctccatactgcagtgggttgggttatataatgtccagagatttggtgccaaggatctatgaaatgatgggtcacgtaaaacccatcaagtttgaagatgtttatgtcgggatctgtttgaatttattaaaagtgaacattcatattccagaagacacaaatcttttctttctatatagaatccatttggatgtctgtcaactgagacgtgtgattgcagcccatggcttttcttccaaggagatcatcactttttggcaggtcatgctaaggaacaccacatgccattattaacttcacattctacaaaaagcctagaaggacaggatactttgtggaaagtgttaaataaagtaggtactgtggaaaattcatggggaggtcagtgtgctggcttacactgaactgaaactcatgaaaaacccagactggagactggagggttacacttgtgatttattagtcaggcccttcaaagatgatatgtggaggaattaaatataaaggaattggaggtttttgctaaagaaattaataggaccaaacaatttggacatgtcattctgtagactagaatttcttaaaagggtgttactgagttataagctcactaggctgtaaaaacaaaacaatgtagagttttatttattgaacaatgtagtcacttgaaggttttgtgtatatcttatgtggattaccaatttaaaaatatatgtagttctgtgtcaaaaaacttcttcactgaagttatactgaacaaaattttacctgtttttggtcatttataaagtacttcaagatgttgcagtatttcacagttattattatttaaaattacttcaactttgtgtttttaaatgttttgacgatttcaatacaagataaaaaggatagtgaatcattctttacatgcaaacattttccagttacttaactgatcagtttattattgatacatcactccattaatgtaaagtcataggtcattattgcatatcagtaatctcttggactttgttaaatattttactgtggtaatatagagaagaattaaagcaagaaaatctgaagtattgtcttgtttttaaaaaatacagttcctagtgtttttagaagtcacttaatttgtctcatttttccacctggaaattaggaataatgtagaatgcaaggcagtaatttccttttggaaaggactctgaaggcagaaaagaagggagagaacctcatgggcagaatattataaaaagagtgtcatattccagcatttgaattggaaagagaagagtgaagatccaagttgcattattaatctgccctgtgttttttccttttaacaatcagtttgagctgctgctgttatgagtttctcatcaagatgaaagccctaatatgtaaagtcaaatccgatttaaattttgtgcttttatagaaagaaatttcttcatagacgtggtgatatatcatttgttggacctgctaatagtaggtcaaaggggagcactccttgccccctgttcctgggtttatgcagttttctttttagagtttatatagggcaagtggttctttttctctgaattacaggatggaaaaaggtcatatcctttgtcaggaaatataaacttgaaagtatgtagtcagctcttgtaatactcatatttatgattgtcctatatgaaaaacaacttcagttaaaactataatgtgtgattctgtataacaaggtgatgtctgtttcccagggctcagacctaatccagttataataaaatcaattaaatgaaatattctatagaatcgatctatgcccttgttaatctccatccatataggagtcacgttctttaagacagatggtggtagttatttttgtggcatggttagatttgactggttttgcagaagattacagttatgtactgcataatgacatatacaatagtggtcccataaaattataatggagcagaaaatctattgcctcatgatgttttagccgttttaatgtcatagcctagtgcattactcacgtgtctgtggagatgctggtgtaaacaaacctactacactgccagttgtataaaagtacagcacattcagttatgtacagtatgtaatactgataatgacaataaatgacaccggtttgtgta

SEQ ID NO: 111431 - DNA, 1107 bp, Homo sapiens
  Payload ID: 1822
  Gene Symbol: B3GALNT1
  Gene Name: beta-1,3-N-acetylgalactosaminyltransferase 1 (globoside blood group)
  ENST ID: ENST00000417187
  CDS Start-End: 64-339
ctctccgactactcaccccgagtgtaaagaaccttcggctcgcgtgcttctgagctgctgtggatggcctcggctctctggactgtccttccgagtaggatgtcactgagatccctcaaatggagcctcctgctgctgtcactcctgagtttctttgtgatgtggtacctcagccttccccactacaatgtgatagaacgcgtgaactggatgtacttctatgaaatccatttggatgtctgtcaactgagacgtgtgattgcagcccatggcttttcttccaaggagatcatcactttttggcaggtcatgctaaggaacaccacatgccattattaacttcacattctacaaaaagcctagaaggacaggatactttgtggaaagtgttaaataaagtaggtactgtggaaaattcatggggaggtcagtgtgctggcttacactgaactgaaactcatgaaaaacccagactggagactggagggttacacttgtgatttattagtcaggcccttcaaagatgatatgtggaggaattaaatataaaggaattggaggtttttgctaaagaaattaataggaccaaacaatttggacatgtcattctgtagactagaatttcttaaaagggtgttactgagttataagctcactaggctgtaaaaacaaaacaatgtagagttttatttattgaacaatgtagtcacttgaaggttttgtgtatatcttatgtggattaccaatttaaaaatatatgtagttctgtgtcaaaaaacttcttcactgaagttatactgaacaaaattttacctgtttttggtcatttataaagtacttcaagatgttgcagtatttcacagttattattatttaaaattacttcaactttgtgtttttaaatgttttgacgatttcaatacaagataaaaaggatagtgaatcattctttacatgcaaacattttccagttacttaactgatcagtttattattgatacatcactccattaatgtaaagtcataggtcattattgcatatcagtaatctcttggactttgttaaatattttactgtggtaatatagagaagaattaaagcaagaa

SEQ ID NO: 111432 - DNA, 584 bp, Homo sapiens
  Payload ID: 1822
  Gene Symbol: B3GALNT1
  Gene Name: beta-1,3-N-acetylgalactosaminyltransferase 1 (globoside blood group)
  ENST ID: ENST00000460353
  CDS Start-End: 134-584
gtgtgtgcgcagggagagaacgccggccaccttcccgcttccgagctgggtgcgcgccgagcacaggagattgcctgcgtttaggaggtggctgcgttgtgggaaaagctatcaaggaagaaattgccaaaccatgtctttttttctgttttcagagttcacaacagatctgagtgttttaattaagcatggaatacagaaaacaacaaaaaacttaagctttaatttcatctggaattccacagttttcttagctccctggacccggttgacctgttggctcttcccgctggctgctctatcacgtggtgctctccgactactcaccccgagtgtaaagtcttgctgctctgttgcccaggctggagtacagtggcaggatctcagctcactgcaatctccgtctctcaggtttaagcagttctcctgcctcagcctcccaagtaggtgggactacagaaccttcggctcgcgtgcttctgagctgctgtggatggcctcggctctctggactgtccttccgagtaggatgtcactgagatccctcaaatggagcctcctgctgctgtcactcctgagtttct

SEQ ID NO: 111433 - DNA, 541 bp, Homo sapiens
  Payload ID: 1822
  Gene Symbol: B3GALNT1
  Gene Name: beta-1,3-N-acetylgalactosaminyltransferase 1 (globoside blood group)
  ENST ID: ENST00000498216
  CDS Start-End: 380-541
ggcccaggccgcggccgcgccgcatccgctggttgtccaccttgccttgccccagggtgcaatacctgccttgcgtcgcccgtgccgctccagccaccgtcaaatccgggtagcgacccggggcgtttgcagcggtgccgaggaagaggacgggaacggtgttacgattgcctgcgtttaggaggtggctgcgttgtgggaaaagctatcaaggaagaaattgccaaaccatgtctttttttctgttttcagagtagttcacaacagatctgagtgttttaattaagcatggaatacagaaaacaacaaaaaacttaagctttaatttcatctggaattccacagaaccttcggctcgcgtgcttctgagctgctgtggatggcctcggctctctggactgtccttccgagtaggatgtcactgagatccctcaaatggagcctcctgctgctgtcactcctgagtttctttgtgatgtggtacctcagccttccccactacaatgtgatagaacgcgtgaactggatgtacttctatgag

SEQ ID NO: 111434 - DNA, 2123 bp, Homo sapiens
  Payload ID: 1822
  Gene Symbol: B3GALNT1
  Gene Name: beta-1,3-N-acetylgalactosaminyltransferase 1 (globoside blood group)
  Uniprot ID: O75752
  ENST ID: ENST00000473285
  CDS Start-End: 352-1347
cacttttccaagcagtaaggaatgatgccatcctcaagtacggattgcctgcgtttaggaggtggctgcgttgtgggaaaagctatcaaggaagaaattgccaaaccatgtctttttttctgttttcagagtagttcacaacagatctgagtgttttaattaagcatggaatacagaaaacaacaaaaaacttaagctttaatttcatctggaattccacagttttcttagctccctggacccggttgacctgttggctcttcccgctggctgctctatcacgtggtgctctccgactactcaccccgagtgtaaagaaccttcggctcgcgtgcttctgagctgctgtggatggcctcggctctctggactgtccttccgagtaggatgtcactgagatccctcaaatggagcctcctgctgctgtcactcctgagtttctttgtgatgtggtacctcagccttccccactacaatgtgatagaacgcgtgaactggatgtacttctatgagtatgagccgatttacagacaagactttcacttcacacttcgagagcattcaaactgctctcatcaaaatccatttctggtcattctggtgacctcccacccttcagatgtgaaagccaggcaggccattagagttacttggggtgaaaaaaagtcttggtggggatatgaggttcttacatttttcttattaggccaagaggctgaaaaggaagacaaaatgttggcattgtccttagaggatgaacaccttctttatggtgacataatccgacaagattttttagacacatataataacctgaccttgaaaaccattatggcattcaggtgggtaactgagttttgccccaatgccaagtacgtaatgaagacagacactgatgttttcatcaatactggcaatttagtgaagtatcttttaaacctaaaccactcagagaagtttttcacaggttatcctctaattgataattattcctatagaggattttaccaaaaaacccatatttcttaccaggagtatcctttcaaggtgttccctccatactgcagtgggttgggttatataatgtccagagatttggtgccaaggatctatgaaatgatgggtcacgtaaaacccatcaagtttgaagatgtttatgtcgggatctgtttgaatttattaaaagtgaacattcatattccagaagacacaaatcttttctttctatatagaatccatttggatgtctgtcaactgagacgtgtgattgcagcccatggcttttcttccaaggagatcatcactttttggcaggtcatgctaaggaacaccacatgccattattaacttcacattctacaaaaagcctagaaggacaggatactttgtggaaagtgttaaataaagtaggtactgtggaaaattcatggggaggtcagtgtgctggcttacactgaactgaaactcatgaaaaacccagactggagactggagggttacacttgtgatttattagtcaggcccttcaaagatgatatgtggaggaattaaatataaaggaattggaggtttttgctaaagaaattaataggaccaaacaatttggacatgtcattctgtagactagaatttcttaaaagggtgttactgagttataagctcactaggctgtaaaaacaaaacaatgtagagttttatttattgaacaatgtagtcacttgaaggttttgtgtatatcttatgtggattaccaatttaaaaatatatgtagttctgtgtcaaaaaacttcttcactgaagttatactgaacaaaattttacctgtttttggtcatttataaagtacttcaagatgttgcagtatttcacagttattattatttaaaattacttcaactttgtgtttttaaatgttttgacgatttcaatacaagataaaaaggatagtgaatcattctttacatgcaaacattttccagttacttaactgatcagtttattattgatacatcactccattaatgtaaagtcataggtcattattgcatatcagtaatctcttggactttgttaaatattttactgtggtaatatagagaagaattaaagcaagaaaatctgaa

SEQ ID NO: 111435 - DNA, 662 bp, Homo sapiens
  Payload ID: 1822
  Gene Symbol: B3GALNT1
  Gene Name: beta-1,3-N-acetylgalactosaminyltransferase 1 (globoside blood group)
  ENST ID: ENST00000492353
  CDS Start-End: 467-662
agagaacgccggccaccttcccgcttccgagctgggtgcgcgccgagcacaggagattgcctgcgtttaggaggtggctgcgttgtgggaaaagctatcaaggaagaaattgccaaaccatgtctttttttctgttttcagagtagttcacaacagatctgagtgttttaattaagcatggaatacagaaaacaacaaaaaacttaagctttaatttcatctggaattccacagttttcttagctccctggacccggttgacctgttggctcttcccgctggctgctctatcacgtggtgctctccgactactcaccccgagtgtaaagtcttgctgctctgttgcccaggctggagtacagtggcaggatctcagctcactgcaatctccgtctctcaggtttaagcagttctcctgcctcagcctcccaaaaccttcggctcgcgtgcttctgagctgctgtggatggcctcggctctctggactgtccttccgagtaggatgtcactgagatccctcaaatggagcctcctgctgctgtcactcctgagtttctttgtgatgtggtacctcagccttccccactacaatgtgatagaacgcgtgaactggatgtacttctatgagtatgagccgatttacagacaagactttcacttca

SEQ ID NO: 111436 - DNA, 666 bp, Homo sapiens
  Payload ID: 1822
  Gene Symbol: B3GALNT1
  Gene Name: beta-1,3-N-acetylgalactosaminyltransferase 1 (globoside blood group)
  ENST ID: ENST00000494173
  CDS Start-End: 578-666
gtgcagccaggggcttccggccgcggccctggcgcgtggtctgcgcgcgcccggccgtgcgtgcggatgcggggaggctgcgtgtgtgcgcagggagagaacgccggccaccttcccgcttccgagctgggtgcgcgccgagcacaggagattgcctgcgtttaggaggtggctgcgttgtgggaaaagctatcaaggaagaaattgccaaaccatgtctttttttctgttttcagagtagttcacaacagatctgagtgttttaattaagcatggaatacagaaaacaacaaaaaacttaagctttaatttcatctggaattccacagttttcttagctccctggacccggttgacctgttggctcttcccgctggctgctctatcacgtggtgctctccgactactcaccccgagtgtaaagtcttgctgctctgttgcccaggctggagtacagtggcaggatctcagctcactgcaatctccgtctctcaggtttaagcagttctcctgcctcagcctcccaagtaggtgggactacagaaccttcggctcgcgtgcttctgagctgctgtggatggcctcggctctctggactgtccttccgagtaggatgtcactgagatccctcaaatggagcctcctgctgctgtcactcctgagttt

SEQ ID NO: 111437 - DNA, 914 bp, Homo sapiens
  Payload ID: 1822
  Gene Symbol: B3GALNT1
  Gene Name: beta-1,3-N-acetylgalactosaminyltransferase 1 (globoside blood group)
  ENST ID: ENST00000468268
  CDS Start-End: 582-914
gtgtgtgcgcagggagagaacgccggccaccttcccgcttccgagctgggtgcgcgccgagcacaggagggtgcaatacctgccttgcgtcgcccgtgccgctccagccaccgtcaaatccgggtagcgacccggggcgtttgcagcggtgccgaggaagaggacgggaacggtgttacgattgcctgcgtttaggaggtggctgcgttgtgggaaaagctatcaaggaagaaattgccaaaccatgtctttttttctgttttcagagtagttcacaacagatctgagtgttttaattaagcatggaatacagaaaacaacaaaaaacttaagctttaatttcatctggaattccacagagacaaggccactttatgtttcccaggctggactggaacccctgggctcaaatgatcctcctacctaagcctgcagagtagcgaggacttcagttttcttagctccctggacccggttgacctgttggctcttcccgctggctgctctatcacgtggtgctctccgactactcaccccgagtgtaaagaaccttcggctcgcgtgcttctgagctgctgtggatggcctcggctctctggactgtccttccgagtaggatgtcactgagatccctcaaatggagcctcctgctgctgtcactcctgagtttctttgtgatgtggtacctcagccttccccactacaatgtgatagaacgcgtgaactggatgtacttctatgagtatgagccgatttacagacaagactttcacttcacacttcgagagcattcaaactgctctcatcaaaatccatttctggtcattctggtgacctcccacccttcagatgtgaaagccaggcaggccattagagttacttggggtgaaaaaaagtcttggtggggatatgag

SEQ ID NO: 111438 - DNA, 552 bp, Homo sapiens
  Payload ID: 1822
  Gene Symbol: B3GALNT1
  Gene Name: beta-1,3-N-acetylgalactosaminyltransferase 1 (globoside blood group)
  ENST ID: ENST00000484127
  CDS Start-End: 429-552
gagctgggtgcgcgccgagcacaggagattgcctgcgtttaggaggtggctgcgttgtgggaaaagctatcaaggaagaaattgccaaaccatgtctttttttctgttttcagagtagttcacaacagatctgagtgttttaattaagcatggaatacagaaaacaacaaaaaacttaagctttaatttcatctggaattccacagagacaaggccactttatgtttcccaggctggactggaacccctgggctcaaatgatcctcctacctaagcctgcagagtagcgaggacttcagttttcttagctccctggacccggttgacctgttggctcttcccgctggctgctctatcacgtggtgctctccgactactcaccccgagtgtaaagaaccttcggctcgcgtgcttctgagctgctgtggatggcctcggctctctggactgtccttccgagtaggatgtcactgagatccctcaaatggagcctcctgctgctgtcactcctgagtttctttgtgatgtggtacctcagccttccccactaca

SEQ ID NO: 111439 - DNA, 1660 bp, Homo sapiens
  Payload ID: 1822
  Gene Symbol: B3GALNT1
  Gene Name: beta-1,3-N-acetylgalactosaminyltransferase 1 (globoside blood group)
  Uniprot ID: O75752
  ENST ID: ENST00000488170
  CDS Start-End: 665-1660
gcgccgtcctcggaaacgcctagaccccggcagctaggccgggaggcaccgcccactcctctagagcggagcgtggcccaggttgagccgccgcaccgtgggtctcgggtctcggtgacgagcagctgcccgcctccggtgagcgcgggagaaggggcccagtggggcagtgggcgacgcggagggcccaggcccaggccgcggccgcgccgcatccgctggttgtccaccttgccttgccccagggtgcaatacctgccttgcgtcgcccgtgccgctccagccaccgtcaaatccgggtagcgacccggggcgtttgcagcggtgccgaggaagaggacgggaacggtgttacgattgcctgcgtttaggaggtggctgcgttgtgggaaaagctatcaaggaagaaattgccaaaccatgtctttttttctgttttcagagtagttcacaacagatctgagtgttttaattaagcatggaatacagaaaacaacaaaaaacttaagctttaatttcatctggaattccacagttttcttagctccctggacccggttgacctgttggctcttcccgctggctgctctatcacgtggtgctctccgactactcaccccgagtgtaaagaaccttcggctcgcgtgcttctgagctgctgtggatggcctcggctctctggactgtccttccgagtaggatgtcactgagatccctcaaatggagcctcctgctgctgtcactcctgagtttctttgtgatgtggtacctcagccttccccactacaatgtgatagaacgcgtgaactggatgtacttctatgagtatgagccgatttacagacaagactttcacttcacacttcgagagcattcaaactgctctcatcaaaatccatttctggtcattctggtgacctcccacccttcagatgtgaaagccaggcaggccattagagttacttggggtgaaaaaaagtcttggtggggatatgaggttcttacatttttcttattaggccaagaggctgaaaaggaagacaaaatgttggcattgtccttagaggatgaacaccttctttatggtgacataatccgacaagattttttagacacatataataacctgaccttgaaaaccattatggcattcaggtgggtaactgagttttgccccaatgccaagtacgtaatgaagacagacactgatgttttcatcaatactggcaatttagtgaagtatcttttaaacctaaaccactcagagaagtttttcacaggttatcctctaattgataattattcctatagaggattttaccaaaaaacccatatttcttaccaggagtatcctttcaaggtgttccctccatactgcagtgggttgggttatataatgtccagagatttggtgccaaggatctatgaaatgatgggtcacgtaaaacccatcaagtttgaagatgtttatgtcgggatctgtttgaatttattaaaagtgaacattcatattccagaagacacaaatcttttctttctatatagaatccatttggatgtctgtcaactgagacgtgtgattgcagcccatggcttttcttccaaggagatcatcactttttggcaggtcatgctaaggaacaccacatgccattattaa

SEQ ID NO: 111440 - DNA, 572 bp, Homo sapiens
  Payload ID: 1822
  Gene Symbol: B3GALNT1
  Gene Name: beta-1,3-N-acetylgalactosaminyltransferase 1 (globoside blood group)
  ENST ID: ENST00000473142
  CDS Start-End: 397-572
tgcgcagggagagaacgccggccaccttcccgcttccgagctgggtgcgcgccgagcacaggagattgcctgcgtttaggaggtggctgcgttgtgggaaaagctatcaaggaagaaattgccaaaccatgtctttttttctgttttcagagtagttcacaacagatctgagtgttttaattaagcatggaatacagaaaacaacaaaaaacttaagctttaatttcatctggaattccacagtcttgctgctctgttgcccaggctggagtacagtggcaggatctcagctcactgcaatctccgtctctcaggtttaagcagttctcctgcctcagcctcccaagtaggtgggactacagaaccttcggctcgcgtgcttctgagctgctgtggatggcctcggctctctggactgtccttccgagtaggatgtcactgagatccctcaaatggagcctcctgctgctgtcactcctgagtttctttgtgatgtggtacctcagccttccccactacaatgtgatagaacgcgtgaactggatgtacttctatgagtatgagccgattta

SEQ ID NO: 111441 - DNA, 1874 bp, Homo sapiens
  Payload ID: 1823
  Gene Symbol: B3GALNT2
  Gene Name: beta-1,3-N-acetylgalactosaminyltransferase 2
  Uniprot ID: Q8NCR0
  ENST ID: ENST00000313984
  CDS Start-End: 171-1151
ggaggagcggggccgggagctgcgaggagccccccagacgtcgccgagcgcgagggcgggcgtgctcggagtggtcgctcgtcagccgccgcccctcagtctccgcacttgcaggtcccctccctctccgccgggacgcgggagagcccggctcgcggcgggggcggccaatgcgaaactggctggtgctgctgtgcccgtgtgtgctcggggccgcgctgcacctctggctgcggctgcgctccccgccgcccgcctgcgcctccggggccggccctgcaggtggagtctcactcttgttgcccaggctggagtgcaatggcgcggtctcggctcaccccaacctccacctcccgggttcaagagattctcctgcctcagcctcccaagtagctgggataacagatcagttggccttatttcctcagtggaaatctactcactatgatgtggtagttggcgtgttgtcagctcgcaataaccatgaacttcgaaacgtgataagaagcacctggatgagacatttgctacagcatcccacattaagtcaacgtgtgcttgtgaagttcataataggtgctcatggctgtgaagtgcctgtggaagacagggaggatccttattcctgtaaactactcaacatcacaaatccagttttgaatcaggaaattgaagcgttcagtctgtccgaagacacttcatcggggctgcctgaggatcgagttgtcagcgtgagtttccgagttctctaccccatcgttattaccagtcttggagtgttctacgatgccaatgatgtgggtttccagaggaacatcactgtcaaactttatcaggcagaacaagaggaggccctcttcattgctcgcttcagtcctccaagctgtggtgtgcaggtgaacaagctgtggtacaagcccgtggaacaattcatcttaccagagagctttgaaggtacaatcgtgtgggagagccaagacctccacggccttgtgtcaagaaatctccacaaagtgacagtgaatgatggagggggagttctcagagtcattacagctggggagggtgcattgcctcatgaattcttggaaggtgtggagggagttgcaggtggttttatatatactattcagggtaagtttgctagttgaaacttgaaaagtacactgaatgtcttatacttaatctttatacttgagagaaaaggattttttcttttttgtcttttaaaaaactttattcagataaaattcacccttttaaagtggttcagtggttttagtgtattcttagagttctacaaccggctccacctcccaaaaggaaaccccacacccattagcagttactcctcattcttacctccccaaccccccaccccctaacaactactgatgcactttctttctctatggatttgcctgttttgaacatttcacataaatggaaatgcacagtacgtactctgtgtgtcagtttctttgctgtaacatgtgttccaggtctgtccattttgtatgtatcagtacttcttttttatgatcatataatattctattgcatcgatatgccctattttattcattcattaatggatggacatttagattgcttctactttttgaatatgaataattctgtagtaaacatgtaggtacaagtttttgtgtggtcatatatttccatttctcttaaatgtctaggagtagaagacctgggtcatataattgtgtgtttaatcacttgaggcactgccaggttgttttctaaagcagcagcccactttacatttccatagtcagtatatgaggattctagtttctccatattcttgtcaacacttaataaattgtctgtcttttaaaatataccaa

SEQ ID NO: 111442 - DNA, 2015 bp, Homo sapiens
  Payload ID: 1823
  Gene Symbol: B3GALNT2
  Gene Name: beta-1,3-N-acetylgalactosaminyltransferase 2
  Uniprot ID: Q8NCR0
  ENST ID: ENST00000366600
  CDS Start-End: 230-1732
aggcggagggggcggggcttcggccggctaagccgcggccacccgcggtctgagggaccggaggagcggggccgggagctgcgaggagccccccagacgtcgccgagcgcgagggcgggcgtgctcggagtggtcgctcgtcagccgccgcccctcagtctccgcacttgcaggtcccctccctctccgccgggacgcgggagagcccggctcgcggcgggggcggccaatgcgaaactggctggtgctgctgtgcccgtgtgtgctcggggccgcgctgcacctctggctgcggctgcgctccccgccgcccgcctgcgcctccggggccggccctgcagatcagttggccttatttcctcagtggaaatctactcactatgatgtggtagttggcgtgttgtcagctcgcaataaccatgaacttcgaaacgtgataagaagcacctggatgagacatttgctacagcatcccacattaagtcaacgtgtgcttgtgaagttcataataggtgctcatggctgtgaagtgcctgtggaagacagggaggatccttattcctgtaaactactcaacatcacaaatccagttttgaatcaggaaattgaagcgttcagtctgtccgaagacacttcatcggggctgcctgaggatcgagttgtcagcgtgagtttccgagttctctaccccatcgttattaccagtcttggagtgttctacgatgccaatgatgtgggtttccagaggaacatcactgtcaaactttatcaggcagaacaagaggaggccctcttcattgctcgcttcagtcctccaagctgtggtgtgcaggtgaacaagctgtggtacaagcccgtggaacaattcatcttaccagagagctttgaaggtacaatcgtgtgggagagccaagacctccacggccttgtgtcaagaaatctccacaaagtgacagtgaatgatggagggggagttctcagagtcattacagctggggagggtgcattgcctcatgaattcttggaaggtgtggagggagttgcaggtggttttatatatactattcaggaaggtgatgctctcttacacaaccttcattctcgccctcaaagacttattgatcatataaggaatctccatgaggaagatgccttactgaaggaggaaagcagcatctatgatgatattgtttttgtggatgttgtcgacacttatcgtaatgttcctgcaaaattattgaacttctatagatggactgtggaaacaacgagcttcaatttgttgctgaagacagatgatgactgttacatagacctcgaagctgtatttaataggattgtccaaaagaatctggatgggcctaatttttggtggggaaatttcagactgaattgggcagttgaccgaaccggaaagtggcaggagttggagtacccgagccccgcttaccctgcctttgcatgtgggtcaggatatgtgatctccaaggacatcgtcaagtggctggcaagcaactcggggaggttaaagacctatcagggtgaagatgtaagcatgggcatctggatggctgccataggacctaaaagataccaggacagtctgtggctgtgtgagaagacctgtgagacaggaatgctgtcttctcctcagtattctccgtgggaactgacggaactgtggaaactgaaggaacggtgcggtgatccttgtcgatgtcaagcaagataacagggacttgaattagcagagtctaaaatcagggcaggcaaacgataatctgagtgcaagtctgaggagtcccagggtttagcagtagactgtatggtctttcaagagagttccagactggcactttcacccagaaccaatgcggtgtttcttaatgtttgcacaaatttccttaaaaatcaacttgtactgtagcataagaaaagtttttatttatctattggaagattatcagaaaaataccaagttattttataaaagaaaaaatatttctaaatcctga

SEQ ID NO: 111443 - DNA, 2920 bp, Homo sapiens
  Payload ID: 1823
  Gene Symbol: B3GALNT2
  Gene Name: beta-1,3-N-acetylgalactosaminyltransferase 2
  ENST ID: ENST00000612859
  CDS Start-End: 3-281
caatgcgaaactggctggtgctgctgtgcccgtgtgtgctcggggccgcgctgcacctctggctgcggctgcgctccccgccgcccgcctgcgcctccggggccggccctgcagatcagttggccttatttcctcagtggaaatctactcactatgatgtggtagttggcgtgttgtcagctcgcaataaccatgaacttcgaaacgtgataagaagcacctggatgagacatttgctacagcatcccacattaagtcaacgttttgaatcaggaaattgaagcgttcagtctgtccgaagacacttcatcggggctgcctgaggatcgagttgtcagcgtgagtttccgagttctctaccccatcgttattaccagtcttggagtgttctacgatgccaatgatgtgggtttccagaggaacatcactgtcaaactttatcaggcagaacaagaggaggccctcttcattgctcgcttcagtcctccaagctgtggtgtgcaggtgaacaagctgtggtacaagcccgtggaacaattcatcttaccagagagctttgaaggtacaatcgtgtgggagagccaagacctccacggccttgtgtcaagaaatctccacaaagtgacagtgaatgatggagggggagttctcagagtcattacagctggggagggtgcattgcctcatgaattcttggaaggtgtggagggagttgcaggtggttttatatatactattcagggtaagtttgctagttgaaacttgaaaagtacactgaatgtcttatacttaatctttatacttgagagaaaaggattttttcttttttgtcttttaaaaaactttattcagataaaattcacccttttaaagtggttcagtggttttagtgtattcttagagttctacaaccggctccacctcccaaaaggaaaccccacacccattagcagttactcctcattcttacctccccaaccccccaccccctaacaactactgatgcactttctttctctatggatttgcctgttttgaacatttcacataaatggaaatgcacagtacgtactctgtgtgtcagtttctttgctgtaacatgtgttccaggtctgtccattttgtatgtatcagtacttcttttttatgatcatataatattctattgcatcgatatgccctattttattcattcattaatggatggacatttagattgcttctactttttgaatatgaataattctgtagtaaacatgtaggtacaagtttttgtgtggtcatatatttccatttctcttaaatgtctaggagtagaagacctgggtcatataattgtgtgtttaatcacttgaggcactgccaggttgttttctaaagcagcagcccactttacatttccatagtcagtatatgaggattctagtttctccatattcttgtcaacacttaataaattgtctgtcttttaaaatataccaatcctagtgggtgtaaattgttatttcattgtgatttttattcgtatttccataataactaatgatgttgagcattttcttcatgtgcttattggccatttgtatatcttccttttttgtttcgttgtttttctttttttctgagacgaggcctcactctgttgcccaggctggagtgcagtggcatgatcacagctcactgtagccttgacctccccgggctcaagtgaacttcccatttcagcctcccgaatagctgggactacaagtgcatgccaccatgcccagctaattattaaatgttttgtagagacagggttttgtcatattgctgaggctgcacactgttaacagggtgaattattatggtatatgaactagatgtgggaagtgagggagggaggagggggaggaagtgagggaggaaggggtggagagagggagaaggtggtgagggagggaggggtggagggaagaagggaggaaaggaggggagagagagtcatttgtatatctttagagaaatatctattcagatcctttgcccatttataaaattattttattgttgaattgtaagagttctttatatatgctggatacaagtcccttatcagatacatgctttgcaaatggtgccctttaacacacaaaagttgtaaattttgatgaagtccaattttgtcacatgtttttgctgtcatatgtaaggaactattgtctaatgtgaggtcacaaagatttgtgcctttgttttacagttccaagagttttatagttttagcacttatacgtaggtcttggatccatgttcattttcatatatggcatgaaatagaggtttaacttcattcttttgcatgtggatatccagttgtcccagcacccatttgttgaaaatcagtgactgtagatgtaaggatttacttgaggactctcaattctattccattgatctatgtgtctgcgtctttaaccagtactacactgtcttgattatgtagctttttagtaagatttgaaattgggaggctgggcacggtggctcactcctgtaatcccagcactttgggagcccgaggcaggtggatcacgaggtcaggagttcgagaccagcctgaccaacatggtgaaaccctgtctctactaaaaatacaaaaaaattagccaggcatggtgtcgggcgcctgtaatcccagctactccagaggctgaggcagaagaatcgcttgaacctgggaggcagaggttgcattgagctgagattgccactgcatttcatcctgggtgacagcaagactccgtctcaaaaaaaaaaaaaaaaaaaaaagaaattaggaaatgtgaatcctccaaccttgttctttttcaagcttgattggctattctgggtctcttgcacttccatatgaattttatgatcagcttgttaatttgtg

SEQ ID NO: 111444 - DNA, 1874 bp, Homo sapiens; identical to SEQ ID NO: 111441
  Payload ID: 1823
  Gene Symbol: B3GALNT2
  Gene Name: Beta-1,3-N-acetylgalactosaminyltransferase 2
  ENST ID: ENST00000635244
  CDS Start-End: 171-1151

SEQ ID NO: 111445 - DNA, 2920 bp, Homo sapiens; identical to SEQ ID NO: 111443
  Payload ID: 1823
  Gene Symbol: B3GALNT2
  Gene Name: Beta-1,3-N-acetylgalactosaminyltransferase 2
  ENST ID: ENST00000635195
  CDS Start-End: 3-281

SEQ ID NO: 111446 - DNA, 2015 bp, Homo sapiens; identical to SEQ ID NO: 111442
  Payload ID: 1823
  Gene Symbol: B3GALNT2
  Gene Name: Beta-1,3-N-acetylgalactosaminyltransferase 2
  ENST ID: ENST00000635453
  CDS Start-End: 230-1732

SEQ ID NO: 111447 - DNA, 2072 bp, Homo sapiens
  Payload ID: 1824
  Gene Symbol: B4GAT1
  Gene Name: beta-1,4-glucuronyltransferase 1
  Uniprot ID: O43505
  ENST ID: ENST00000311181
  CDS Start-End: 148-1395
gggcggcgggcggggcggcgctcggggctcggctggcctcggctcgcctcggctgcgctcggcaggctgcggtaaatccgggcttgcggccgctggcgtagtctgtggccgggtggtcgttgctgcgcgccccgagccccgagagccatgcagatgtcctacgccatccggtgcgccttctaccagctgctgctggccgcgctcatgctggtggcgatgctgcagctgctctacctgtcgctgctgtccggactgcacgggcaggaggagcaagaccaatattttgagttctttcccccgtccccacggtccgtggaccaggtcaaggcgcagctccgcaccgcgctggcctctggaggcgtcctggacgctagcggcgattaccgcgtctacaggggcctgctgaagaccaccatggaccccaacgatgtgatcctggccacgcacgccagcgtggacaacctgctgcacctgtcgggtctgctggagcgctgggagggcccgctgtccgtgtcggtgttcgcggccaccaaggaggaggcgcagctggccacggtgctggcctacgcgctgagcagccactgccccgacatgcgcgccagggtcgccatgcacctcgtgtgcccctcgcgttacgaggcagccgtgcccgacccccgggagccgggggagtttgccctgctgcggtcctgccaggaggtctttgacaagctagccagggtggcccagcccgggattaattatgcgctgggcaccaatgtctcctaccccaataacctgctgaggaatctggctcgtgagggggccaactatgccctggtgatcgatgtggacatggtgcccagcgaggggctgtggagaggcctgcgggaaatgctggatcagagcaaccagtggggaggcaccgcgctggtggtgcctgccttcgaaatccgaagagcccgccgcatgcccatgaacaaaaacgagctggtgcagctctaccaggttggcgaggtgcggcccttctattatgggttgtgcaccccctgccaggcacccaccaactattcccgctgggtcaacctgccggaagagagcttgctgcggcccgcctacgtggtaccttggcaggacccctgggagccattctacgtggcaggaggcaaggtgcccaccttcgacgagcgctttcggcagtacggcttcaaccgaatcagccaggcctgcgagctgcatgtggcggggtttgattttgaggtcctgaacgaaggtttcttggttcataagggcttcaaagaagcgttgaagttccatccccaaaaggaggctgaaaatcagcacaataagatcctatatcgccagttcaaacaggagttgaaggccaagtaccccaactctccccgacgctgctgagcccttccctcccctaatctgagaagtcagcctcttggctcctcaggccaccatttaggcctgactggggtaagaaatgtcgctccactttacagaggtagctgtggtgttgaaacactggacttggatatggggtgctgggatcgattcctagctttaccactaactagctgtgtggccttgagtaaatcccgttacctctctgagcctcggttaccctgtctgtaaaaagggaggtgagaatacctacctcacggaactgttgggaggctcagatgagatgctatatgtgaaaacattctgtaagcttcgtacaaatgtgaagtattaatattatcgcagtattattgttgttattattattgttattattaacaatcttgggtgggtagtaggagagcaaaaagtatgaatgggatggagctaagaagtctgaatacttaatgaaatggactttttggaaagaaatcagatgaaggcataaaatttagttcttagctcttgaacagaagcctaaaattcctggttctctcagggcttcgccttcaagggttctggaggagggaagggtctgcaggttccatgggtgacagcctgagatctgtcccttcaacgggctgggctgggtatgtgcctaccgatgacaatgtgtaaataaatgcgtgttcacacccaca

SEQ ID NO: 111448 - DNA, 3036 bp, Homo sapiens
  Payload ID: 1825
  Gene Symbol: B4GALNT1
  Gene Name: beta-1,4-N-acetyl-galactosaminyl transferase 1
  Uniprot ID: Q00973
  ENST ID: ENST00000341156
  CDS Start-End: 586-2187
acgagcaggcaatggaatggatgtcgtgggagcaggcggttgagatgccagtgtttggaggctaaggactgggggctgtgagcgaggaccttcccgcgtttgctccgcgcccccgcagtttcctccgcgcccactagaaggcgccggggcgctcgcattccccgcgcggagccgaagcagccgcaacgagccgggagctgagccgcgctgcgctgcggtgcgaagagccgggcggcggccagagccctccccgcgctgccagtgggacgcggagccagggatccccggctttgccccggggctggggtgcaacagactcttaacttggtcctcgcgccccgccaaccgcccccgggcaggaaacgcccagaaccaccaccgcgccgcgctccacaaaagccccgggagttccaagacgggagggatcgggcgcgctccagaggcaggagggtcccccacaccctcaggctcatgcccagctcccccatcgggcagcccccagccccatgaggaccctcaggccggggcgagagcccggcacagcccggaccgaaattttgccgctgccttagagcgttagacaggatgtggctgggccgccgggccctgtgcgctctggtccttctgctcgcctgcgcctcgctggggctcctgtacgcgagcacccgggacgcgcccggcctccggctacctcttgcgccgtgggcgcccccgcaaagcccccgcaggcccgagctgccagatcttgctcctgagccccgctacgcacacatcccggtcaggatcaaggagcaagtagtggggctgctggcttggaacaactgcagttgtgagtccagtggggggggcctccccctccccttccagaaacaagtccgagctattgacctcaccaaggcctttgaccctgcagagctgagggctgcctctgccacaagagagcaggagttccaggcctttctgtcgaggagccagtccccagctgaccagctgctcatagcccctgccaactccccgctccagtaccccctacagggtgtggaagttcagcccctcaggagcatcttggtgccagggctgagccttcaggcagcttctggtcaggaggtataccaggtgaacctgactgcctccctaggcacctgggacgtggcaggggaagtgactggagttactctcactggagagggtcaggcagatctcacccttgtcagcccagggctggaccaactcaacaggcaactacaactggtcacttacagcagccgaagctaccagaccaacacagcagacacagtccggttctccaccgagggacatgaggctgctttcactatccgcataagacacccgcccaaccctcggctgtacccacctgggtctctaccccagggagcccagtacaacatcagcgctctagtcacgattgccaccaagaccttcctccgttatgatcggctacgggctctcatcaccagtatccgccgcttctacccaacggttaccgtggtcatcgctgacgacagcgacaagccagagcgcgttagtggcccctacgtggaacactatctcatgcccttcggcaagggctggttcgcaggccggaacctggccgtgtctcaagtaaccaccaagtacgtgctgtgggtggacgacgacttcgtcttcacggcgcggacgcggctggagaggcttgtggacgtgctggagcggacgccgctggacctggtggggggcgcggtgcgcgagatctccggctttgccaccacttatcggcagctgctgagcgtggagcccggcgccccaggcctcgggaactgcctccggcaaaggcgcggcttccaccacgagctcgtcggcttcccaggctgcgtggtcaccgacggcgtggttaacttcttcctggcgcggactgacaaggtgcgcgaggtcggtttcgacccccgcctcagccgcgtggctcatctggaattcttcttggatgggcttggttcccttcgggttggctcctgctccgacgtcgtggtggatcatgcatccaaactgaagctgccttggacatcaagggatgccggagcagagacttacgcccggtaccgttacccaggatcactggacgagagccagatggccaaacaccggctgctcttcttcaaacaccggctgcagtgcatgacctcccagtgatggcccgctggggatttctgactgtcaggctgggcctgcctccttgtccctgccaggaatttccaacaaaccccaccaccctgtgagcactctactggctgtccctgagcctctagttcctcactcttccttttcagaacctgatgcccagtaggggttgtcctggtgacacccctcctttttccagtgcccagaggcctggtggagccataacctctcccacagccagtgccaagtcctccccctgcccattctcatggggcaggaaatggggggatcactttccaagtgccaaagagcccagagggactctaagaacctaaggtggaaacactgtcctctcatcttgggaccgagggggtggggaagttccccaacacataatcccaagactgtgcccctcatctgcatcttcagatccagtactctgtgtacctgctccagccccacccccacagagagaacttgtggctctggggctggggtgagggctggtggttggtgaaagccattcttagttgtgtctctgcaatgctgtgggcacaaaagaaggggcaccagagtccctgtgcaaacacctagactcacttcatggattccaaagctctcagcttcattttattagttacgttaggtaagggggttcaagggtcatggtcctcatcacacacatgtcatcagggccctctgcactccacatgatgaggtcagacccacacggtgcaaatctttgggtcagtgagctcctggagaagagaggagacatgtcaggaatagattaggcacccctcttccttaatgaaatgtggcagtcctctcaggggtaccccacctacttagggatctgag

SEQ ID NO: 111449 - DNA, 1861 bp, Homo sapiens
  Payload ID: 1825
  Gene Symbol: B4GALNT1
  Gene Name: beta-1,4-N-acetyl-galactosaminyl transferase 1
  Uniprot ID: Q00973
  ENST ID: ENST00000418555
  CDS Start-End: 109-1545
tcatcgggtcacctccgccgggggcgcccgccagcacgggcatgattctgcattttttcctgacaggctaggtgtggagccgccctccgcagcccaccccggcccaggatgtggctgggccgccgggccctgtgcgctctggtccttctgctcgcctgcgcctcgctggggctcctgtacgcgagcacccgggacgcgcccggcctccggctacctcttgcgccgtgggcgcccccgcaaagcccccgcaggcccgagctgccagatcttgctcctgagccccgctacgcacacatcccggtcaggatcaaggagcaagtagtggggagccagtccccagctgaccagctgctcatagcccctgccaactccccgctccagtaccccctacagggtgtggaagttcagcccctcaggagcatcttggtgccagggctgagccttcaggcagcttctggtcaggaggtataccaggtgaacctgactgcctccctaggcacctgggacgtggcaggggaagtgactggagttactctcactggagagggtcaggcagatctcacccttgtcagcccagggctggaccaactcaacaggcaactacaactggtcacttacagcagccgaagctaccagaccaacacagcagacacagtccggttctccaccgagggacatgaggctgctttcactatccgcataagacacccgcccaaccctcggctgtacccacctgggtctctaccccagggagcccagtacaacatcagcgctctagtcacgattgccaccaagaccttcctccgttatgatcggctacgggctctcatcaccagtatccgccgcttctacccaacggttaccgtggtcatcgctgacgacagcgacaagccagagcgcgttagtggcccctacgtggaacactatctcatgcccttcggcaagggctggttcgcaggccggaacctggccgtgtctcaagtaaccaccaagtacgtgctgtgggtggacgacgacttcgtcttcacggcgcggacgcggctggagaggcttgtggacgtgctggagcggacgccgctggacctggtggggggcgcggtgcgcgagatctccggctttgccaccacttatcggcagctgctgagcgtggagcccggcgccccaggcctcgggaactgcctccggcaaaggcgcggcttccaccacgagctcgtcggcttcccaggctgcgtggtcaccgacggcgtggttaacttcttcctggcgcggactgacaaggtgcgcgaggtcggtttcgacccccgcctcagccgcgtggctcatctggaattcttcttggatgggcttggttcccttcgggttggctcctgctccgacgtcgtggtggatcatgcatccaaactgaagctgccttggacatcaagggatgccggagcagagacttacgcccggtaccgttacccaggatcactggacgagagccagatggccaaacaccggctgctcttcttcaaacaccggctgcagtgcatgacctcccagtgatggcccgctggggatttctgactgtcaggctgggcctgcctccttgtccctgccaggaatttccaacaaaccccaccaccctgtgagcactctactggctgtccctgagcctctagttcctcactcttccttttcagaacctgatgcccagtaggggttgtcctggtgacacccctcctttttccagtgcccagaggcctggtggagccataacctctcccacagccagtgccaagtcctccccctgcccattctcatggggcaggaaatggggggatcactttccaagtgccaaagagcccagagggactctaag

SEQ ID NO: 111450 - DNA, 837 bp, Homo sapiens
  Payload ID: 1825
  Gene Symbol: B4GALNT1
  Gene Name: beta-1,4-N-acetyl-galactosaminyl transferase 1
  ENST ID: ENST00000551220
  CDS Start-End: 477-837
gctcgcattccccgcgcggagccgaagcagccgcaacgagccgggagctgagccgcgctgcgctgcggtgcgaagagccgggcggcggccagagccctccccgcgctgccagtgggacgcggagccagggatccccggctttgccccggggctggggtgcaacagactcttaacttggtcctcgcgccccgccaaccgcccccgggcaggaaacgcccagaaccaccaccgcgccgcgctccacaaaagccccgggagttccaagacgggagggatcgggcgcgctccagaggcaggagggtcccccacaccctcaggctcatgcccagctcccccatcgggcagcccccagccccatgaggaccctcaggccggggcgagagcccggcacagcccggaccgaaattttgccgctgccttagagcgttagacaggctaggtgtggagccgccctccgcagcccaccccggcccaggatgtggctgggccgccgggccctgtgcgctctggtccttctgctcgcctgcgcctcgctggggctcctgtacgcgagcacccgggacgcgcccggcctccggctacctcttgcgccgtgggcgcccccgcaaagcccccgcaggcccgagctgccagatcttgctcctgagccccgctacgcacacatcccggtcaggatcaaggagcaagtagtggggctgctggcttggaacaactgcagttgtgagtccagtggggggggcctccccctccccttccagaaacaagtccgagctattgacctcaccaaggcctttgaccctgcagagctgagggctgcctctgccacaagagagcagg

SEQ ID NO: 111451 - DNA, 1945 bp, Homo sapiens
  Payload ID: 1825
  Gene Symbol: B4GALNT1
  Gene Name: beta-1,4-N-acetyl-galactosaminyl transferase 1
  ENST ID: ENST00000552798
  CDS Start-End: 117-812
gaggccactcatcgggtcacctccgccgggggcgcccgccagcacgggcatgattctgcattttttcctgacaggctaggtgtggagccgccctccgcagcccaccccggcccaggatgtggctgggccgccgggccctgtgcgctctggtccttctgctcgcctgcgcctcgctggggctcctgtacgcgagcacccgggacgcgcccggcctccggctacctcttgcgccgtgggcgcccccgcaaagcccccgcaggcccgagctgccagatcttgctcctgagccccgctacgcacacatcccggtcaggatcaaggagcaagtagtggggctgctggcttggaacaactgcagttgtgagtccagtggggggggcctccccctccccttccagaaacaagtccgagctattgacctcaccaaggcctttgaccctgcagagctgagggctgcctctgccacaagagagcaggagttccaggcctttctgtcgaggagccagtccccagctgaccagctgctcatagcccctgccaactccccgctccagtaccccctacagggtgtggaagttcagcccctcaggagcatcttggtgccaggtgaacctgactgcctccctaggcacctgggacgtggcaggggaagtgactggagttactctcactggagagggtcaggcagatctcacccttgtcagcccagggctggaccaactcaacaggcaactacaactggtcacttacagcagccgaagctaccagaccaacacagcagacacagtccggttctccaccgagggacatgaggctgctttcactatccgcataagacacccgcccaaccctcggctgtacccacctgggtctctaccccagggagcccagtacaacatcagcgctctagtcacgattgccaccaagaccttcctccgttatgatcggctacgggctctcatcaccagtatccgccgcttctacccaacggttaccgtggtcatcgctgacgacagcgacaagccagagcgcgttagtggcccctacgtggaacactatctcatgcccttcggcaagggctggttcgcaggccggaacctggccgtgtctcaagtaaccaccaagtacgtgctgtgggtggacgacgacttcgtcttcacggcgcggacgcggctggagaggcttgtggacgtgctggagcggacgccgctggacctggtggggggcgcggtgcgcgagatctccggctttgccaccacttatcggcagctgctgagcgtggagcccggcgccccaggcctcgggaactgcctccggcaaaggcgcggcttccaccacgagctcgtcggcttcccaggctgcgtggtcaccgacggcgtggttaacttcttcctggcgcggactgacaaggtgcgcgaggtcggtttcgacccccgcctcagccgcgtggctcatctggaattcttcttggatgggcttggttcccttcgggttggctcctgctccgacgtcgtggtggatcatgcatccaaactgaagctgccttggacatcaagggatgccggagcagagacttacgcccggtaccgttacccaggatcactggacgagagccagatggccaaacaccggctgctcttcttcaaacaccggctgcagtgcatgacctcccagtgatggcccgctggggatttctgactgtcaggctgggcctgcctccttgtccctgccaggaatttccaacaaaccccaccaccctgtgagcactctactggctgtccctgagcctctagttcctcactcttccttttcagaacctgatgcccagtaggggttgtcctggtgacacccctcctttttccagtgcccagaggcctggtggagccataacctctcccacagccagtgccaagtcctccccctgcccattctcatggggcaggaa

SEQ ID NO: 111452 - DNA, 879 bp, Homo sapiens
  Payload ID: 1825
  Gene Symbol: B4GALNT1
  Gene Name: beta-1,4-N-acetyl-galactosaminyl transferase 1
  ENST ID: ENST00000549391
  CDS Start-End: 1-383
ggagccagtccccagctgaccagctgctcatagcccctgccaactccccgctccagtaccccctacagggtgtggaagttcagcccctcaggagcatcttggtgccagggctgagccttcaggcagcttctggtcaggaggtataccaggtgaacctgactgcctccctaggcacctgggacgtggcaggggaagtgactggagttactctcactggagagggtcaggcagatctcacccttgtcagcccagggctggaccaactcaacaggcaactacaactggtcacttacagcagccgaagctaccagaccaacacagcagacacagggtcaaatgccatgtcctttcttcccagtccggttctccaccgagggacatgaggctgctttcactatccgcataagacacccgcccaaccctcggctgtacccacctgggtctctaccccagggagcccagtacaacatcagcgctctagtcacgattgccaccaagaccttcctccgttatgatcggctacgggctctcatcaccagtatccgccgcttctacccaacggttaccgtggtcatcgctgacgacagcgacaagccagagcgcgttagtggcccctacgtggaacactatctcatgcccttcggcaagctcctggcctttcgaaagcactcaaaagtctggagaagaatacaagctgagaagggtcgggggagagaaagaaaggtggcagagggccatgtcctatttctgcagcctccccaaccacacacacctttctgccagggctggttcgcaggccggaacctggccgtgtctcaagtaaccaccaagtacgtgctgtgggtggacgacgacttcgtcttcacggcgcggacgcgg

SEQ ID NO: 111453 - DNA, 841 bp, Homo sapiens
  Payload ID: 1825
  Gene Symbol: B4GALNT1
  Gene Name: beta-1,4-N-acetyl-galactosaminyl transferase 1
  ENST ID: ENST00000548888
  CDS Start-End: 130-841
cgcgccgcttgccgaggccactcatcgggtcacctccgccgggggcgcccgccagcacgggcatgattctgcattttttcctgacaggctaggtgtggagccgccctccgcagcccaccccggcccaggatgtggctgggccgccgggccctgtgcgctctggtccttctgctcgcctgcgcctcgctggggctcctgtacgcgagcacccgggacgcgcccggcctccggctacctcttgcgccgtgggcgcccccgcaaagcccccgcaggcccgagctgccagatcttgctcctgagccccgctacgcacacatcccggtcaggatcaaggagcaagtagtggggctgctggcttggaacaactgcagttgtgagtccagtggggggggcctccccctccccttccagaaacaagtccgagctattgacctcaccaaggcctttgaccctgcagagctgagggctgcctctgccacaagagagcaggagttccaggcctttctgtcgaggagccagtccccagctgaccagctgctcatagcccctgccaactccccgctccagtaccccctacagggtgtggaagttcagcccctcaggagcatcttggtgccagggctgagccttcaggcagcttctggtcaggaggtataccaggtgaacctgactgcctccctaggcacctgggacgtggcaggggaagtgactggagttactctcactggagagggtcaggcagatctcacccttgtcagcccagggctggaccaactcaacaggcaactacaactggtcacttacagcagccgaagctaccagaccaacacagcagacacag

SEQ ID NO: 111454 - DNA, 502 bp, Homo sapiens
  Payload ID: 1825
  Gene Symbol: B4GALNT1
  Gene Name: beta-1,4-N-acetyl-galactosaminyl transferase 1
  ENST ID: ENST00000552219
  CDS Start-End: 111-401
actcatcgggtcacctccgccgggggcgcccgccagcacgggcatgattctgcattttttcctgacaggctaggtgtggagccgccctccgcagcccaccccggcccaggatgtggctgggccgccgggccctgtgcgctctggtccttctgctcgcctgcgcctcgctggggctcctgtacgcgagcacccgggacgcgcccggcctccggctacctcttgcgccgtgggcgcccccgcaaagcccccgcaggcccgagctgccagatcttgctcctgagccccgctacgcacacatcccggtcaggatcaaggagcaagtagtgggagctgagggctgcctctgccacaagagagcaggagttccaggcctttctgtcgaggagccagtccccagctgaccagctgctcatagcccctgccaactccccgctccagtaccccctacagggtgtggaagttcagcccctcaggagcatcttggtgccagggctgagccttc

SEQ ID NO: 111455 - DNA, 1649 bp, Homo sapiens
  Payload ID: 1825
  Gene Symbol: B4GALNT1
  Gene Name: beta-1,4-N-acetyl-galactosaminyl transferase 1
  Uniprot ID: Q00973
  ENST ID: ENST00000552350
  CDS Start-End: 130-1116
cgcgccgcttgccgaggccactcatcgggtcacctccgccgggggcgcccgccagcacgggcatgattctgcattttttcctgacaggctaggtgtggagccgccctccgcagcccaccccggcccaggatgtggctgggccgccgggccctgtgcgctctggtccttctgctcgcctgcgcctcgctggggctcctgtacgcgagcacccgggacgcgcccggcctccggctacctcttgcgccgtgggcgcccccgcaaagcccccgcaggcccgagctgccagatcttgctcctgagccccgctacgcacacatcccggtcaggatcaaggagcaagtagtggggctgctggcttggaacaactgcagttgtgagtccagtggggggggcctccccctccccttccagaaacaagtccgagctattgacctcaccaaggcctttgaccctgcagagctgagggctgcctctgccacaagagagcaggagttccaggcctttctgtcgaggagccagtccccagctgaccagctgctcatagcccctgccaactccccgctccagtaccccctacagggtgtggaagttcagcccctcaggagcatcttggtgccagggctgagccttcaggcagcttctggtcaggaggtataccaggtgaacctgactgcctccctaggcacctgggacgtggcaggggaagtgactggagttactctcactggagagggtcaggcagatctcacccttgtcagcccagggctggaccaactcaacaggcaactacaactggtcacttacagcagccgaagctaccagaccaacacagcagacacaggtgcaaggcctgggtggagagacgggcaggctgggcaaacagagaagaaccagaaaggctggagtgggcaaatggcagagggcatgggaggcatctgggctatggccagagctgtccagccacacaatgggtgcttcaactggaccagcagggccagagggagaaagggggcctttgttcatctggggctggagcaggccagagggaaacccgagccttgggtgtgtctcccctttaggccaactgtggggggccccaggaagagacttgtctaaggagttagaagactatattcccaacccaccccttactagagggcaaaggtctttactttcctgagatcccatttctcttccagcaaaagaggcctaaaagccctctttgcttctccccaaagctggtttgttgcactaagtttgcttccaccttagggcctttgcactttctattttctcagcctggaatgctcttccccagatttttgcagactggcttcttcttgtcatttagatctcagttcaaatgcctcctcttcactatcacattacttgtttgtcttattttccactcaatacttaccagtatctgaattttttaatttacttagcctggcaccagactgactaggttgctatcagttttgttgcttaatagttgtgtaaatgtggcaagttacttttctgtgtctcagcttttttttctgttgtaggaatctacttaatagggctatcatggggataaaatgagtgcatatatttaaggtaattttttaacgggtctggcacatagtaagtgctcaataaagatt

SEQ ID NO: 111456 - DNA, 453 bp, Homo sapiens
  Payload ID: 1825
  Gene Symbol: B4GALNT1
  Gene Name: beta-1,4-N-acetyl-galactosaminyl transferase 1
  ENST ID: ENST00000547741
  CDS Start-End: 1-453
tcatgcccttcggcaagggctggttcgcaggccggaacctggccgtgtctcaagtaaccaccaagtacgtgctgtgggtggacgacgacttcgtcttcacggcgcggacgcggctggagaggcttgtggacgtgctggagcggacgccgctggacctggcccgcctggaggcaacctccctctccctgcaggtggggggcgcggtgcgcgagatctccggctttgccaccacttatcggcagctgctgagcgtggagcccggcgccccaggcctcgggaactgcctccggcaaaggcgcggcttccaccacgagctcgtcggcttcccaggctgcgtggtcaccgacggcgtggttaacttcttcctggcgcggactgacaaggtgcgcgaggtcggtttcgacccccgcctcagccgcgtggctcatctggaattcttcttggatgggcttg

SEQ ID NO: 111457 - DNA, 562 bp, Homo sapiens
  Payload ID: 1825
  Gene Symbol: B4GALNT1
  Gene Name: beta-1,4-N-acetyl-galactosaminyl transferase 1
  ENST ID: ENST00000548487
  CDS Start-End: 174-419
aagacgggagggatcgggcgcgctccagaggcaggagggtcccccacaccctcaggctcatgcccagctcccccatcgggcagcccccagccccatgaggaccctcaggccggggcgagagcccggcacagcccggaccgaaattttgccgctgccttagagcgttagacaggatgtggctgggccgccgggccctgtgcgctctggtccttctgctcgcctgcgcctcgctggggctcctgtacgcgagcacccgggacgcgcccggcctccggctacctcttgcgccgtgggcgcccccgcaaagcccccgcaggcccgagctgccagatcttgctcctgagccccgctacgcacacatcccggtcaggatcaaggagcaagtagtggggctgctggcttggaacaactgcagttagctgagggctgcctctgccacaagagagcaggagttccaggcctttctgtcgaggagccagtccccagctgaccagctgctcatagcccctgccaactccccgctccagtaccccctacagggtgtggaagttcagcccctcag

SEQ ID NO: 111458 - DNA, 1967 bp, Homo sapiens
  Payload ID: 1825
  Gene Symbol: B4GALNT1
  Gene Name: beta-1,4-N-acetyl-galactosaminyl transferase 1
  Uniprot ID: Q00973
  ENST ID: ENST00000550764
  CDS Start-End: 433-1419
cgcattccccgcgcggagccgaagcagccgcaacgagccgggagctgagccgcgctgcgctgcggtgcgaagagccgggcggcggccagagccctccccgcgctgccagtgggacgcggagccagggatccccggctttgccccggggctggggtgcaacagactcttaacttggtcctcgcgccccgccaaccgcccccgggcaggaaacgcccagaaccaccaccgcgccgcgctccacaaaagccccgggagttccaagacgggagggatcgggcgcgctccagaggcaggagggtcccccacaccctcaggctcatgcccagctcccccatcgggcagcccccagccccatgaggaccctcaggccggggcgagagcccggcacagcccggaccgaaattttgccgctgccttagagcgttagacaggatgtggctgggccgccgggccctgtgcgctctggtccttctgctcgcctgcgcctcgctggggctcctgtacgcgagcacccgggacgcgcccggcctccggctacctcttgcgccgtgggcgcccccgcaaagcccccgcaggcccgagctgccagatcttgctcctgagccccgctacgcacacatcccggtcaggatcaaggagcaagtagtggggctgctggcttggaacaactgcagttgtgagtccagtggggggggcctccccctccccttccagaaacaagtccgagctattgacctcaccaaggcctttgaccctgcagagctgagggctgcctctgccacaagagagcaggagttccaggcctttctgtcgaggagccagtccccagctgaccagctgctcatagcccctgccaactccccgctccagtaccccctacagggtgtggaagttcagcccctcaggagcatcttggtgccagggctgagccttcaggcagcttctggtcaggaggtataccaggtgaacctgactgcctccctaggcacctgggacgtggcaggggaagtgactggagttactctcactggagagggtcaggcagatctcacccttgtcagcccagggctggaccaactcaacaggcaactacaactggtcacttacagcagccgaagctaccagaccaacacagcagacacaggtgcaaggcctgggtggagagacgggcaggctgggcaaacagagaagaaccagaaaggctggagtgggcaaatggcagagggcatgggaggcatctgggctatggccagagctgtccagccacacaatgggtgcttcaactggaccagcagggccagagggagaaagggggcctttgttcatctggggctggagcaggccagagggaaacccgagccttgggtgtgtctcccctttaggccaactgtggggggccccaggaagagacttgtctaaggagttagaagactatattcccaacccaccccttactagagggcaaaggtctttactttcctgagatcccatttctcttccagcaaaagaggcctaaaagccctctttgcttctccccaaagctggtttgttgcactaagtttgcttccaccttagggcctttgcactttctattttctcagcctggaatgctcttccccagatttttgcagactggcttcttcttgtcatttagatctcagttcaaatgcctcctcttcactatcacattacttgtttgtcttattttccactcaatacttaccagtatctgaattttttaatttacttagcctggcaccagactgactaggttgctatcagttttgttgcttaatagttgtgtaaatgtggcaagttacttttctgtgtctcagcttttttttctgttgtaggaatctacttaatagggctatcatggggataaaatgagtgcatatatttaaggtaattttttaacgggtctggcacatagtaagtgctcaataaagattagcttttacttaaaa

SEQ ID NO: 111459 - DNA, 1633 bp, Homo sapiens
  Payload ID: 1825
  Gene Symbol: B4GALNT1
  Gene Name: beta-1,4-N-acetyl-galactosaminyl transferase 1
  ENST ID: ENST00000449184
  CDS Start-End: 470-1384
agtttcctccgcgcccactagaaggcgccggggcgctcgcattccccgcgcggagccgaagcagccgcaacgagccgggagctgagccgcgctgcgctgcggtgcgaagagccgggcggcggccagagccctccccgcgctgccagtgggacgcggagccagggatccccggctttgccccggggctggggtgcaacagactcttaacttggtcctcgcgccccgccaaccgcccccgggcaggaaacgcccagaaccaccaccgcgccgcgctccacaaaagccccgggagttccaagacgggagggatcgggcgcgctccagaggcaggagggtcccccacaccctcaggctcatgcccagctcccccatcgggcagcccccagccccatgaggaccctcaggccggggcgagagcccggcacagcccggaccgaaattttgccgctgccttagagcgttagacaggatgtggctgggccgccgggccctgtgcgctctggtccttctgctcgcctgcgcctcgctggggctcctgtacgcgagcacccgggacgcgcccggcctccggctacctcttgcgccgtgggcgcccccgcaaagcccccgcaggcccgagctgccagatcttgctcctgagccccgctacgcacacatcccggtcaggatcaaggagcaagtagtggggctgctggcttggaacaactgcagttgtgagtccagtggggggggcctccccctccccttccagaaacaagtccgagctattgacctcaccaaggcctttgaccctgcagagctgagggctgcctctgccacaagagagcaggagttccaggcctttctgtcgaggagccagtccccagctgaccagctgctcatagcccctgccaactccccgctccagtaccccctacagggtgtggaagttcagcccctcaggagcatcttggtgccagggctgagccttcaggcagcttctggtcaggaggtataccaggtgaacctgactgcctccctaggcacctgggacgtggcaggggaagtgactggagttactctcactggagagggtcaggcagatctcacccttgtcagcccagggctggaccaactcaacaggcaactacaactggtcacttacagcagccgaagctaccagaccaacacagcagacacagcccagtacaacatcagcgctctagtcacgattgccaccaagaccttcctccgttatgatcggctacgggctctcatcaccagtatccgccgcttctacccaacggttaccgtggtcatcgctgacgacagcgacaagccagagcgcgttagtggcccctacgtggaacactatctcatgcccttcggcaaggtgtgcagctagcaggctgaacggcaggccagaggactcccgcagggggtgtgccctcaatctgcagcctccagggtagtgattcgaggaccacctgcctcagaatcatggggtgcctgttaagcatgaggattcctggaatgtaagcttcgtgggagcaggaaattctctctgaattcttagaatggtgcttagtgcctaatggcattcaataaaatagctgatgaatgaataaataaatgcacacggaaattaaacgca

SEQ ID NO: 111460 - DNA, 1906 bp, Homo sapiens
  Payload ID: 1826
  Gene Symbol: B4GALNT2
  Gene Name: beta-1,4-N-acetyl-galactosaminyl transferase 2
  Uniprot ID: Q8NHY0
  ENST ID: ENST00000300404
  CDS Start-End: 60-1760
ataggtggctgcagaggcgaggtgacggcgcgtgcggaacgaactctgcacccccaggaatggggagcgctggcttttccgtgggaaaattccacgtggaagtggcctctcgcggccgggaatgtgtctcggggacgcccgagtgtgggaatcggctcgggagtgcgggcttcggggctctctgcttggaactcagaggcgctgacccagcctggggcccgtttgctgcccacgggaggagccgccgtcagggctcgagatttctgtggctcctcaagatattggtcataatcctggtacttggcattgttggatttatgttcggaagcatgttccttcaagcagtgttcagcagccccaagccagaactcccaagtcctgccccgggtgtccagaagctgaagcttctgcctgaggaacgtctcaggaacctcttttcctacgatggaatctggctgttcccgaaaaatcagtgcaaatgtgaagccaacaaagagcagggaggttacaactttcaggatgcctatggccagagcgacctcccagcggtgaaagcgaggagacaggctgaatttgaacactttcagaggagagaagggctgccccgcccactgcccctgctggtccagcccaacctcccctttgggtacccagtccacggagtggaggtgatgcccctgcacacggttcccatcccaggcctccagtttgaaggacccgatgcccccgtctatgaggtcaccctgacagcttctctggggacactgaacacccttgctgatgtcccagacagtgtggtgcagggcagaggccagaagcagctgatcatttctaccagtgaccggaagctgttgaagttcattcttcagcacgtgacatacaccagcacggggtaccagcaccagaaggtagacatagtgagtctggagtccaggtcctcagtggccaagtttccagtgaccatccgccatcctgtcatacccaagctatacgaccctggaccagagaggaagctcagaaacctggttaccattgctaccaagactttcctccgcccccacaagctcatgatcatgctccggagtattcgagagtattacccagacttgaccgtaatagtggctgatgacagccagaagcccctggaaattaaagacaatcacgtggagtattacactatgccctttgggaagggttggtttgctggtaggaacctggccatatctcaggtcaccaccaaatacgttctctgggtggacgatgattttctcttcaacgaggagaccaagattgaggtgctggtggatgtcctggagaaaacagaactggacgtggtaggcggcagtgtgctgggaaatgtgttccagtttaagttgttgctggaacagagtgagaatggggcctgccttcacaagaggatgggatttttccaacccctggatggcttccccagctgcgtggtgaccagtggcgtggtcaacttcttcctggcccacacggagcgactccaaagagttggctttgatccccgcctgcaacgagtggctcactcagaattcttcattgatgggctagggaccctactcgtggggtcatgcccagaagtgattataggtcaccagtctcggtctccagtggtggactcagaactggctgccctagagaagacctacaatacataccggtccaacaccctcacccgggtccagttcaagctggccctccactacttcaagaaccatctccaatgtgccgcataaaggtgtgagggcataggagaaacactaggctggctggttatggtatctatagcaggccaccaaaaactggactcctgataggtgaacgttgtaccaaaccagctggtgggtagggaaaagggaaatggctcagttactggaagtac

SEQ ID NO: 111461 - DNA, 8657 bp, Homo sapiens
  Payload ID: 1826
  Gene Symbol: B4GALNT2
  Gene Name: beta-1,4-N-acetyl-galactosaminyl transferase 2
  Uniprot ID: Q8NHY0
  ENST ID: ENST00000393354
  CDS Start-End: 25-1545
agtctgagggcggcgggattcgggatgacttcgggcggctcgagatttctgtggctcctcaagatattggtcataatcctggtacttggcattgttggatttatgttcggaagcatgttccttcaagcagtgttcagcagccccaagccagaactcccaagtcctgccccgggtgtccagaagctgaagcttctgcctgaggaacgtctcaggaacctcttttcctacgatggaatctggctgttcccgaaaaatcagtgcaaatgtgaagccaacaaagagcagggaggttacaactttcaggatgcctatggccagagcgacctcccagcggtgaaagcgaggagacaggctgaatttgaacactttcagaggagagaagggctgccccgcccactgcccctgctggtccagcccaacctcccctttgggtacccagtccacggagtggaggtgatgcccctgcacacggttcccatcccaggcctccagtttgaaggacccgatgcccccgtctatgaggtcaccctgacagcttctctggggacactgaacacccttgctgatgtcccagacagtgtggtgcagggcagaggccagaagcagctgatcatttctaccagtgaccggaagctgttgaagttcattcttcagcacgtgacatacaccagcacggggtaccagcaccagaaggtagacatagtgagtctggagtccaggtcctcagtggccaagtttccagtgaccatccgccatcctgtcatacccaagctatacgaccctggaccagagaggaagctcagaaacctggttaccattgctaccaagactttcctccgcccccacaagctcatgatcatgctccggagtattcgagagtattacccagacttgaccgtaatagtggctgatgacagccagaagcccctggaaattaaagacaatcacgtggagtattacactatgccctttgggaagggttggtttgctggtaggaacctggccatatctcaggtcaccaccaaatacgttctctgggtggacgatgattttctcttcaacgaggagaccaagattgaggtgctggtggatgtcctggagaaaacagaactggacgtggtaggcggcagtgtgctgggaaatgtgttccagtttaagttgttgctggaacagagtgagaatggggcctgccttcacaagaggatgggatttttccaacccctggatggcttccccagctgcgtggtgaccagtggcgtggtcaacttcttcctggcccacacggagcgactccaaagagttggctttgatccccgcctgcaacgagtggctcactcagaattcttcattgatgggctagggaccctactcgtggggtcatgcccagaagtgattataggtcaccagtctcggtctccagtggtggactcagaactggctgccctagagaagacctacaatacataccggtccaacaccctcacccgggtccagttcaagctggccctccactacttcaagaaccatctccaatgtgccgcataaaggtgtgagggcataggagaaacactaggctggctggttatggtatctatagcaggccaccaaaaactggactcctgataggtgaacgttgtaccaaaccagctggtgggtagggaaaagggaaatggctcagttactggaagtaccaatcaaaggtgaagggtcactggaaatgaaccagtcactgaccagggcaatggagactgtattaatagcaatgatgatttgtacaatgccctgccttttttgaagcatttgcatgggcagtatctcacatcatctcatctgatatcacacaaagatgacattggttggtgtcctcagtcaaaagaacagctgcctggtccttgatagttgtttggtggaaattctgtcacagtcagaagcatcggatccagcatcactgtcatccctatatttttattaggttctatcttgtagactcaaaaaatgtgaacattccagggtccttgccttgaggaggtttgcagcctggttcagttcagtccaatcacagaattaggcagccggggtcagaggatcagagaagggaaggggtcaccaggtcccaggtggtggaggaagactccgtggagtgaacttgttaggagcctgaaagcagacattcaggcatcagagagggtaggagggccctggggccatcccactgtccaccagaacaaaggctgccctggcatcagactcactccagacctgttccagaatgccagggattgaactcagagcccatgccaaggcatgatggtgaacagacagtgtgagtgtggtgacaagccactaaactccagggacctgaggccagttgctggtcactcaaaactcatgtcatttacagagtggttccatcactctgttgttggataagcctctttctgttgcctgggggttggcagattgccgagaccagcttggtcatggagaccctaacccagtggtgctagaggaattaaagacacacacatagaaatatagagtgtggagtgggaaatcaggggactcacagacttcagagctgagagccctgaacggagtttgacccacatatttattgacagcaagccagtgataagcattgtttctatagattatagataaactaaaagtattccttacaggaaacaaagggatgggccgaaacaaagggatgggctctggctagttatctgcagcaggaacatgtccttaaagcacagatagctcatactattatttgtggcttaggaatgctttaagcggttttccaccctgggtgggccaggtgttccttgcccttattctgataaacccacaaccttcagtttgggcatcatggccatcatgaacatgtcacagtactgcagagattttgtttatggccagttttggggccagtttatggccagatttgggggcctgttcccaacacgttcccctttttgttttccaaagtgataaaagcaaaggcagctttgtcatggtgagctaattctcacaggagtcaggatccgcacctgcagactatacaaagacaaacaacacagattaaaagcacaatcatcattgaaatcacagagcttccaagtgtctttatccactttaatgggttaatatctgctaatctgtctgcagctccttcaagcactccagttcctggcattaaggtcaagtgtgcctgggatgctttaaatatttgttcttttaattttgcaatatgcaaagacaagtttgtagagtgtccttctagatgcttttttattctttcccaaattttgatcttattaacagacattaatagtttccacaaatccttatgtttagcttctacagtggaccatatcatttgaggttgaggtgccactataccgccacgtttccagataatgggaactcttgctgtatttcttaccatttctaccatctgactgttttgtttagaccagctgaacatagtgtggctgtggcacacagactgagaggtgtaatttaagctaaacatccccttaggggaccaatcaataatgattccataggaatcgttgtgcagcacctctacctgttctgcaatgcaatcttcccaaacaagtacattcattatttctggccaggtctaattctatttacaaataggttttgagctgcctttgctttgcctcaattataggagcagatttattatggtaaatattaagagcagaaagcatgtgtaactgtgtcacacagtgattacatccaggcattattgccagccaagattgataaatatgcccaataagtataactgttctctgtgttgttccttgttgaaggaatactcatggcaatggtgatcaccactatcatatctatcattaaattactcattgtgactggttgtcccactttcctcaggttttcttccaccatctgtgacagcttcttgatctgtccccaggtaggtggctgtgttcgacagctgttgctcatgatagttggggtcctcctcagcatcagtcttgacatggctgcaaccaggggatcctcgggatcctcctggaatctcttcctcagcatctggctcgtggcaaggtttcaggtgtcttgatggcacccaaattggctattgattcggtcctggagaaacacaagcataacctctaccccaagttattattttacctatttcccaactttttgttattgtatctctccaccaaaccagttgttctgcttctgtctttgcagctggtttctgtagatgctgttcagctgctggcctttaagcaggctcaaaaaatttaaagtcaataatgctagaatcaattgcatatggggtgtcccgtagtccctgcttctccccttttgcttttgcaactgctgtttcagggagagattcattctttctactatggcttgtccttgagaattatatgggatgccagtaatgtgtttaatattccatatagagaaaaatgtagctagagcttggctagtacagcctggggcattatctgttttaatagaagctggaatgcccatcaccgcaaaacactgcaaaaggtgacgtttaacacaggcagaagactctcctgattggcatgtagcccagacaaagtgagaaaaggtgtccacacatacatgtacataagctagtctcccaaacgagggaacatgtgtgacatccatttgccaaagagaattaggttccaatccttgaggattaactcctcctgtaaaagatgaggaatgcaccatttggcaagttgggcatcgctggataatagctttagcttctttccaggtaatgccgtatctgtgtttgagaccagaggcattaacataggttaaattgtgaaagtgtctagcgttagatattgcattagcaactaggtgatcagccatttgattcccttcagttaaaggtcctggaagaggtgtatgagccctaatgtgagtgatgtaaaaaggatgcattctactcctgactgctgtttgcaattgggtaaataaagccatcagttgctcatctgtgtggaatcgtagttgagcattttcaattaattgtgtggaatgaatcatgtatgaagaatcagaaatcacattgataggcctattaaaagcagtcaatacctcaattacagctataagctctgctttttgaactgaagtatagggcatctgaagcccttacttttcaagccagagttagaagctttaccattactagacccatctgtgaagacattttcagcaccttcaagtggtttgaatttagttattttagggagaatccaattagttaatttcaaaaattgaaacaattttgttttgggaaaatgattatcaagaatacccacaaagtcagctaaatgggtttgccaggtaagactatttataaaagcttgctctatttgtgccttcatgagaaggacaataatttttccaggaccatatccatgtaatttaacaatctgagttctcccatttcctatcatagtagcgatttgatccaaataaggagttagagtccgtgaattagtatgtggaagaaaaagccgctctacaagatcttgctcttgaacaataacaccagtaggtgaatgccgagttgaaaaaattagcaaatctagagtcttttctggatctattatatttatttgagctttatggacttgctttttgatgagctgcagctctgcatcagcttcttttgttaattgccgagggctatgagactagcatctcctctaaggttagaaaatggcataggtaggaatgcctagagtaggtcatatccaattaatgtcccctggtaatttttgaaagtcatttaatgttttcagttgatccctacatatggttactttctgtggcacaatgatagtgtcatttactgaagtctccaagtaggagtaaggagtagcagtctgaattttgtcaggagctataattaaaccagcatgagaaatcaaattttgcaagtgatcataacattggagtaatatttctcgagtggggggcagcacaaagtatatcgtccatataatgaataatgtaacactgtgaaaattttttatgagtaggttcaattgtttgccctacataagtctggcaaattgttggactgtttaacatgccttgtggcaacagtttccagtgaaaatgcttagcaggctgcaggttgtttactgcaggaattgtaaatgcaaaccattcacagtcctgctcagctaaggggatagtaaagaaacagtcttttaaatctatgactattaaaggccaattctttggaatcatagcaggagaaggcagtcctggctgcaatgtccccataggttgtataactgaattaatggctcttaagtcagttaacagtctccatgtacctgattttttcttaattataaaaactggagagttccaaggggaaaatgttggagctatgtgtcctttttctaattgttcagtaactaagtcctctgagcctccagtttctctttacttagcagtcattgttctatccaaattggctcatctgttaaccattttaaaggtataggttctggaagcttaacaatggctgccatcaaaaatgatatcctaaaccttggcaggaactttgtctttccgcttgaagtggttccttcaaatcttgcaaattttttcctagtcccataccagggacataccccatttcatgcaccatacgttgactttgagggctatacaattgctctagaattagaacttgtgctatccattgttgtaacaaatctctttcccataaatgtataggtacagaagttataattggttgaatagtcccatgttgtccatcgggcccctcacaatgcaaaatataattactttgatatacttcaggggctttaccaactccaactatgttaaattgagtgggttgaatttgccacgtggacagccagtgctgtagagaaatgattgaaatgtctgctcctgtatctaccaaacctttaaatttctttccctgaatagttatttcacaggtaggatgtttatcagtaatttgattcacccaataagctgctttgtcttgtttatttgtgcttccaaattctcctattcgtttaatttcacttttccccatttccacatacggcacaatcagaagttgtgctatacgctttcctggctctgctttccaaggaaaagaagtaaatataacaatttgaatttccccattgtaatctgaatcaatgactcctgtatgtacttgcactccttttaaatttaaactagatctacctagaagtaatcctatcatccccccggcaagcatccacagacccctattggaactttttgtggggattccccaagcataaggctcacagcttttgtgcagtataaatctactgtggcactactggctgtcgtgggggacagacattgtacaggggtgagggagtgagctataatatttccctgttgatctggggggtatatcctaacagggaactgccaagcctctatatcaccctctcgtctagctggctcaattcctgcctgaatagaactgagagcagtcactcgaggcactgctagaacagtcactggggcaactacttttcacccagtgtcctctggaaaagaaagatctgtagggtcaggtcactctttttcttcaaaataatgagggggtgaagaagagtagggacaaacctcttcctcatttgccgctttagcttcagccagcaaacaaacctgctgtgtcatctcttctgttactttgttatactttccttccttctcatcattagtgtgaaaaggttctaaggtggaacgcaccagagcccacacttgtcccattgttaccctgatgtttccgagctccccttcttactcaccatggggattgcttaagggtactcgggtgtcctccagcttagttccacattctccaaccatcactccagcgacccttcaactggggttcaagccccacgttgggcgccacttgccgacaccagctcggtcttggagaccctaacccagcggcgctagaggaattaaagacacacacacagaaatatagagtgtggagtgggaaatcaggggactcacagccttcagagctgaaagccccgaacagagtttgactcacatgtttattgacagcaagccagtgataagcattgtttctaaagattatagattaactaaaagtattccttatgggaaacaaagggatggactgaaacaaagggatgggctctggctagttatctgccacgtccttaaggcacagctcgctcatgctattgtttgtggcttaggaacaccttaagaggttttcccccctgggtgggacaggtgttccttgccctcattccagtaaatccacaaccttcagtgtgtgcatcatggccatcatgaacatgtcacagtgctgcagagattttatttatggccagtttatggccagatttgggggcctgttcccaacagcagattctatgaccacttcagccctgcctttacagtttctgtttacctgtaaactttttcttcctgtggcctagggtagttcaggatcactaaaaatgtgttctgtgatatattaataaaaattcctgaaaaatggacttacagcaaaa

SEQ ID NO: 111462 - DNA, 1819 bp, Homo sapiens
  Payload ID: 1826
  Gene Symbol: B4GALNT2
  Gene Name: beta-1,4-N-acetyl-galactosaminyl transferase 2
  Uniprot ID: Q8NHY0
  ENST ID: ENST00000504681
  CDS Start-End: 116-1558
aaggccgcgaggttggagggcacggggacacagcatagcgaggaaggaacgctcgagatttctgtggctcctcaagatattggtcataatcctggtacttggcattgttggatttatgttcggaagcatgttccttcaagcagtgttcagcagccccaagccagaactcccaagtcctgccccgggtgtccagaagctgaagcttctgcctgaggaacgtctcaggaacctcttttcctacgatggaatctggctgttcccgaaaaatcagtgcaaatgtgaagccaacaaagagcagggaggttacaactttcaggatgcctatggccagagcgacctcccagcggtgaaagcgaggagacaggctgaatttgaacactttcagaggagagaagggctgccccgcccactgcccctgctggtccagcccaacctcccctttgggtacccagtccacggagtggaggtgatgcccctgcacacggttcccatcccaggcctccagtttgaaggacccgatgcccccgtctatgaggtcaccctgacagcttctctggggacactgaacacccttgctgatgtcccagacagtgtggtgcagggcagaggccagaagcagctgatcatttctaccagtgaccggaagctgttgaagttcattcttcagcacgtgacatacaccagcacggggtaccagcaccagaaggtagacatagtgagtctggagtccaggtcctcagtggccaagtttccagtgaccatccgccatcctgtcatacccaagctatacgaccctggaccagagaggaagctcagaaacctggttaccattgctaccaagactttcctccgcccccacaagctcatgatcatgctccggagtattcgagagtattacccagacttgaccgtaatagtggctgatgacagccagaagcccctggaaattaaagacaatcacgtggagtattacactatgccctttgggaagggttggtttgctggtaggaacctggccatatctcaggtcaccaccaaatacgttctctgggtggacgatgattttctcttcaacgaggagaccaagattgaggtgctggtggatgtcctggagaaaacagaactggacgtggtaggcggcagtgtgctgggaaatgtgttccagtttaagttgttgctggaacagagtgagaatggggcctgccttcacaagaggatgggatttttccaacccctggatggcttccccagctgcgtggtgaccagtggcgtggtcaacttcttcctggcccacacggagcgactccaaagagttggctttgatccccgcctgcaacgagtggctcactcagaattcttcattgatgggctagggaccctactcgtggggtcatgcccagaagtgattataggtcaccagtctcggtctccagtggtggactcagaactggctgccctagagaagacctacaatacataccggtccaacaccctcacccgggtccagttcaagctggccctccactacttcaagaaccatctccaatgtgccgcataaaggtgtgagggcataggagaaacactaggctggctggttatggtatctatagcaggccaccaaaaactggactcctgataggtgaacgttgtaccaaaccagctggtgggtagggaaaagggaaatggctcagttactggaagtaccaatcaaaggtgaagggtcactggaaatgaaccagtcactgaccagggcaatggagactgtattaatagcaatgatgatttgtacaatgccctgccttttttgaagcatttgcat

SEQ ID NO: 111463 - DNA, 5068 bp, Homo sapiens
  Payload ID: 1827
  Gene Symbol: B4GALNT3
  Gene Name: beta-1,4-N-acetyl-galactosaminyl transferase 3
  Uniprot ID: Q6L9W6
  ENST ID: ENST00000266383
  CDS Start-End: 14-3010
tcggcgcagcgccatggggagcccccgggccgcgcggcccccgctgctcctgcgcccggtgaagctgctgcggaggcgcttccggctgctgctggcgctcgccgtggtgtctgtggggctctggactctgtatctggaactggtggcgtcggcccaggtcggcgggaaccccctgaaccggaggtacggcagctggagagaactggccaaggctctggccagcaggaacattccagctgtggatccacacctccagttctaccatccccagaggctgagcctcgaggaccacgacattgaccaaggggtgagcagtaacagcagctacttgaagtggaacaagcctgtcccctggctctcagagttccggggccgtgccaacctgcatgtgtttgaagactggtgtggcagctctatccagcagctcaggaggaacctgcatttcccactgtacccccatattcgcacaaccctgaggaagcttgctgtgtcccccaaatggaccaactatggcctccgcatctttggctacctgcacccctttactgatgggaaaatccagtttgccattgctgcagatgacaacgcggagttctggctgagcctcgatgaccaggtctcaggcctccagctgctggccagtgtgggcaagactggaaaggagtggaccgccccgggagagtttgggaaatttcggagccaaatttccaagccggtgagcctgtcagcctcccacaggtactacttcgaggtgctgcacaagcagaatgaggagggcaccgaccacgtggaagttgcatggcgacggaacgaccctggagccaagttcaccatcattgactccctctccctgtccctcttcacaaatgagacgttcctacagatggatgaggtgggccacatcccacagacagcagccagccacgtggactcctccaacgctcttcccagggatgagcagccgcccgctgacatgcttcggcctgacccccgggacaccctctatcgagtgcctctgatccccaagtcgcatctccgccacgtcctgcctgactgtccctacaaacccagctatctggtggatgggcttcctctgcagcgctaccagggactccggtttgttcatctgtcttttgtttaccccaatgactatacccgcctgagccacatggagacccacaataaatgtttctaccaggaaaacgcctactaccaagaccggttcagctttcaggagtacatcaagattgaccagcctgagaagcaggggctggagcagccaggttttgaggaaaaccttctagaagagtcccagtatggggaagtggcagaggagacccctgcctccaacaaccagaatgccaggatgcttgagggaagacagacacctgcctccaccctggagcaagatgccactgactaccgcctccgaagcctgcggaaactcctggctcagccccgggagggcctgctggcccccttctccaagcggaactccacagcgtccttcccagggaggaccagccacattccagtgcagcagccagagaagaggaagcaaaaacccagccctgagcccagccaagattcacctcattccgacaagtggcctcctgggcaccctgtgaagaacctgcctcagatgagggggcccaggcccaggcccgctggtgacagccccaggaagactcagtggctgaaccaggtggagtcgtacatcgcagagcagagacggggtgacaggatgcggcctcaggcccctggaaggggctggcatggggaggaggaagtggtggcggccgcaggccaggaaggacaagtggagggagaggaagagggggaagaagaggaggaggaagaggatatgagtgaggtgttcgagtacgtacctgtgtttgacccggtagtaaactgggaccagaccttcagtgcccggaatctcgacttccaagccctgaggactgactggatcgatctgagctgtaacacatctggcaacctgctgcttccagagcaggaagctctggaggtcacgcgagtcttcttgaagaagctcaaccagaggagccgggggaggtaccagctacagcgcattgtgaacgtggaaaagcgtcaggaccagctacgtgggggtcgctacctcctggagcttgaactgttggaacaaggccagcgcgtggtgcggctctcggagtatgtgtctgcacgaggctggcagggcatcgatccagctggtggggaggaggtcgaggcccggaacctgcaaggcctggtctgggacccacacaaccgtaggagacaggtcctgaatacccgggcccaagagcccaagctgtgctggcctcagggtttctcctggagtcaccgagccgtggtccacttcgtcgtgcctgtgaagaaccaggcacgctgggtacagcaattcatcaaagacatggaaaacctgttccaggtcaccggtgacccacacttcaacatcgtcatcactgactatagcagtgaggacatggatgttgagatggcactgaagaggtccaagctgcggagctaccagtacgtgaagctaagtggaaactttgaacgctcagctggacttcaggctggcatagacctcgtgaaggacccgcacagcatcatcttcctctgtgacctccacatccacttcccagctggagtcatcgatgccattcggaagcactgtgtggagggaaagatggcctttgcccccatggtgatgaggctgcattgtggggccaccccccagtggcctgagggctactgggaggtgaatgggttcgggctgcttggcatctacaagtctgacctggacaggattgggggcatgaacaccaaggagttccgagaccgctggggcggggaagactgggagctgctggacaggatactccaagcgggcctggacgtggagcgtctctccctcaggaatttcttccatcatttccattccaagcgaggcatgtggagccgtcgccagatgaagacgctgtagccggagggtgtccgcggggcccagcactccccgctctggactagcagtggctccccagggccctgctactgttcagggatggggagtggggtgacggctggaccccaagaggcctcgaagctgacggcccactccacctggagctgtcccctcacagaggcaggttccggggctcctgtctctgcctcctgggccttcagaagggaggactttgagagagaggccaggagggaccacttgctcagtcgagaacgggaagagctcctgagaaggacgggtcaggaaggagagatctgactgagcgacaccatcctcatccatgaaggtgcacgcccacatcccccaagcgctcctcacgccaagcgctgaccaccagaccctcttctagtggacatattttattggggggcggggattttaaaaacagaaaaccgaaactgctgtccagagcgggggtgaggttgtgcactgagggactgtccccacgtgcaggcctcccgcccactcctatgtcccttgggcgttgtccctggccgcgggactggtcccacgtggggcaggtctctgctccaccccaggctcgtgccttccagagacacacatctcccagtagccaccaaacagctggccactgattagggcattaacttcctccggatggctcacgtcagaccagaagcacagaacgggctgtttctggtgcttgggcattgggaggtggggagctggcgggcagggggcttgccactccctggcactggacattgaggcctgcagaacaggcagggtgatgaaggcaggggagagaagccctttcccttaccggcgtgcctgtgggtaaggcctcccgagaggacatggagaagaggtaaagaggatgtggacatatctgtcaatttccttaggcaagaagcgggtgggggctggacagaaagggacgaaaagggaagtggaagctgtgagcctcacagtccagctccactgcagacctgcccttctgcagggagagccctggccacccggccttgagtggaagaagaggaaagggtgtacgggggcaaaaccctggacagggagcaggataagaagggggcgggatgagaggtttggggaggtgaggacattgccctgagatatcccctggaggcagggagaggagtgggggcaggaggaactgaagaggggggcagtttcagggaaaatagcccttagcctttttagtcgatgccaccctttctgtcacctggagaccttgtacttctcttgcactaataaccccggtgcttttgtggctgggggtttttctgttgctgctgctgcctccaccactgctgtgaattcacccatggtgcattggacactggatcttgaactccagagtctgtttagggaggtgagcacagggctgggggaggtgcggcggggcccagaagaccaggccactgagcccgcgctccaggctgtgacggtccaaaccacggcactggagctgcagggtctgcctagtgggctctgcattccccgagagcacgagtttggcacatgggagaatggagcccgtggagaaccttctggggggtcggggagaatccctgcctccctttaaggaatcatgaaggacagagacttttgagattgtggcttaggaaggccatacctgctccctgggctgtggctttttctggtccctgctgaggccgactggcccctggagaaggatggtggggcataggctagggctgcagttggccagtggggctgccagtttctttctgggaccactctcgtcctcgggcattgcactggaaggctggaaccagcccaaactgcccacctgcttcacttccaatgactaggagccagcccagcctcctgccctgcccacacccctgcgccctgggccagtgccttgcgtttgatgttacctccacaccatctgccttaagaggaagggccgggcaaggcccctactccctagagaaatgtcttgggtaggagagggtgtgggatggtgggaggggaagcattaaatacagcaacttcttagaaaaaaaaaaa

SEQ ID NO: 111464 - DNA, 1926 bp, Homo sapiens
  Payload ID: 1827
  Gene Symbol: B4GALNT3
  Gene Name: beta-1,4-N-acetyl-galactosaminyl transferase 3
  ENST ID: ENST00000322843
  CDS Start-End: 17-1926
atgtgtgtgtgtgtgcatggccagagcagaccttgtccccaaggccaggccatggggtgaacatcagcaccagttccggggccgtgccaacctgcatgtgtttgaagactggtgtggcagctctatccagcagctcaggaggaacctgcatttcccactgtacccccatattcgcacaaccctgaggaagcttgctgtgtcccccaaatggaccaactatggcctccgcatctttggctacctgcacccctttactgatgggaaaatccagtttgccattgctgcagatgacaacgcggagttctggctgagcctcgatgaccaggtctcaggcctccagctgctggccagtgtgggcaagactggaaaggagtggaccgccccgggagagtttgggaaatttcggagccaaatttccaagccggtgagcctgtcagcctcccacaggtactacttcgaggtgctgcacaagcagaatgaggagggcaccgaccacgtggaagttgcatggcgacggaacgaccctggagccaagttcaccatcattgactccctctccctgtccctcttcacaaatgagacgttcctacagatggatgaggtgggccacatcccacagacagcagccagccacgtggactcctccaacgctcttcccagggatgagcagccgcccgctgacatgcttcggcctgacccccgggacaccctctatcgagtgcctctgatccccaagtcgcatctccgccacgtcctgcctgactgtccctacaaacccagctatctggtggatgggcttcctctgcagcgctaccagggactccggtttgttcatctgtcttttgtttaccccaatgactatacccgcctgagccacatggagacccacaataaatgtttctaccaggaaaacgcctactaccaagaccggttcagctttcaggagtacatcaagattgaccagcctgagaagcaggggctggagcagccagcaggttttgaggaaaaccttctagaagagtcccagtatggggaagtggcagaggagacccctgcctccaacaaccagaatgccaggatgcttgagggaagacagacacctgcctccaccctggagcaagatgccactgactaccgcctccgaagcctgcggaaactcctggctcagccccgggagggcctgctggcccccttctccaagcggaactccacagcgtccttcccagggaggaccagccacattccagtgcagcagccagagaagaggaagcaaaaacccagccctgagcccagccaagattcacctcattccgacaagtggcctcctgggcaccctgtgaagaacctgcctcagatgagggggcccaggcccaggcccgctggtgacagccccaggaagactcagtggctgaaccaggtggagtcgtacatcgcagagcagagacggggtgacaggatgcggcctcaggcccctggaaggggctggcatggggaggaggaagtggtggcggccgcaggccaggaaggacaagtggagggagaggaagagggggaagaagaggaggaggaagaggatatgagtgaggtgttcgagtacgtacctgtgtttgacccggtagtaaactgggaccagaccttcagtgcccggaatctcgacttccaagccctgaggactgactggatcgatctgagctgtaacacatctggcaacctgctgcttccagagcaggaagctctggaggtcacgcgagtcttcttgaagaagctcaaccagaggagccggggctctgtggattttcctattccggacatcttatgcaaatggaaccatgtaatgtgtggcctttatatcgggctttttgcagaatattcacttagcacaagtttcattcgtgttgtagaatctattaaacacttcattcctcg

SEQ ID NO: 111465 - DNA, 3444 bp, Homo sapiens
  Payload ID: 1828
  Gene Symbol: B4GALNT4
  Gene Name: beta-1,4-N-acetyl-galactosaminyl transferase 4
  Uniprot ID: Q76KP1
  ENST ID: ENST00000329962
  CDS Start-End: 1-3120
atgccgcggctcccggtgaagaagatccgtaagcagatgaagctgctgctgctgctgctgctgctgagctgcgccgcgtggctcacctacgtgcacctgggcctggtgcgccagggacgcgcgctgcgccagcgcctgggctacgggcgagatggtgagaagctgaccagtgagaccgacggccggggggtccacgctgcgccatccacacagagggctgaggactccagtgagagccgtgaagaggagcaagcgcccgaaggtcgggacctagacatgctgtttcctgggggggctgggaggctgccactgaacttcacccatcagacacccccatggcgggaggagtacaaggggcaggtgaacctgcacgtgtttgaggactggtgtgggggcgccgtgggccacctgaggaggaacctgcacttcccgctgttccctcatacgcgcaccaccgtgaagaagttggccgtgtcccccaagtggaagaactatggactccgtatttttggtttcatccacccggcgagggacggagacgtccagttttctgtggcctcagacgacaactcggagttctggctgagtctggacgagagccctgctgctgcccagcttgtggcctttgtgggcaagactggctccgagtggacagcgcctggagaattcaccaagttcagctcccaggtgtccaagcccaggcggctcatggcctcccggaggtactactttgagttgctgcacaagcaggacgaccgcggctcggaccacgtggaagtgggctggcgagctttcctgcccggcctgaagttcgaggtcatcagctctgctcacatctccctgtacacagatgagtcagccttgaagatggaccacgtggcgcacgtcccccagtctccagccagccacgtgggggggcgtccgccgcaggaggagaccagcgcagacatgctgcggccagatcccagggatacctttttcctcactccacgcatggaatcttcgagcctggagaacgtgctggagccctgcgcctacgcccccacctacgtggtcaaggacttcccgatcgccagataccagggcctgcaatttgtgtacctgtccttcgtttatcccaacgactacactcgcctcacccacatggagacggacaacaagtgcttctaccgcgagtctccgctgtatctggagaggtttgggttctataaatacatgaagatggacaaggaggagggggatgaggatgaagaagacgaggtgcagcgccgagccttcctcttcctcaacccggacgacttcctggacgacgaggacgagggggagctgctcgacagcctggagcccaccgaggcggccccgcccaggagcggcccccagtcccccgccccagcagcccccgcccagcccggagccaccctcgccccgccgacccctccccgcccccgggacggggggacccccaggcactcccgggccctgagctgggccgccagggccgcccgccctttgccgctcttcttgggccgagctccgcccccgcgccctgcagtggagcagccgcccccaaaggtgtacgtgaccagggtgcggccgggacagcgggcatccccccgggccccagcgccgcgtgcgccctggccgcccttccctggcgtcttcctgcaccccaggcctctgcccagagtgcagctgcgggcgcccccacgcccaccccggccccacggccgcaggaccggcggcccccaggccacacagccgaggcccccagcccgggcgcaggccacccaagggggccgggagggccaggcgcgcacgctgggacctgcggcgcccacagtggactcaaacttgtcctccgaagcgcggcccgtgacctccttcctgagcttgtcccaggtgtccgggccgcagctgcccggggagggcgaagaggaggaggaaggggaggacgatggggccccgggcgacgaggccgcgtcggaggacagcgaggaggccgcgggcccggcgctcggacgctggcgtgaggacgccatcgactggcagcgcacgttcagcgtgggcgccgtggacttcgagctgctgcgctcggactggaacgacctgcgatgcaacgtttcggggaacctgcagctgccggaggcggaggccgtggacgtgaccgctcagtacatggagcggctgaacgcgcgccacggcgggcgcttcgcgcttctgcgcatcgtgaacgtggagaagcgccgggactcggcgcgagggagtcgcttcctgctggagctggagctgcaggagcgcgggggcggccgcctgcgactgtccgagtacgtcttcctgcggctgccgggagcccgcgtaggggatgcagacggagaaagtcccgaacccgctcccgccgcctccgtgcgccccgacggccgccccgagctctgccggccactgcgcctggcctggcgccaggacgtgatggttcacttcatcgtgccagtgaaaaaccaggcacggtgggtggcacagttcctggcggacatggctgcgctgcacgcgcgcaccggggactcgcgtttcagcgtcgtcctggtggatttcgagagcgaggatatggacgtggagcgggccctgcgcgccgcgcgcctgccccggtaccagtacctgagacgaaccgggaacttcgagcgctccgccgggctgcaggcgggagtggacgcggtagaggacgccagcagcatcgtgttcctctgcgacctgcacatccacttcccacccaacatcctggacggcatccgcaagcactgcgtggagggcaggctggccttcgcgcccgtggtcatgcgcctgagctgcgggagctcgccccgggacccccacggttactgggaggtgaacggctttggcctttttgggatctacaagtcggactttgaccgggttggaggaatgaacacggaggagttccgagaccagtgggggggtgaagactgggagctcctggacagggtcctgcaggcagggctggaggtggagcggctccgactgcggaatttctatcaccactaccactccaagaggggcatgtggagcgtccgcagcaggaagggctctcgcacgggggcgtcttgaggacgggcagcccctcccagccccggtgggagtcccgaggcagctgctgggggctgggctttgagctcggtcccgagagacccggcagggctggtcagaggggcacagccaccgcctgtgcctgcccctctctggcccactgggcgtcgtgcccctccccggagaggcagccttcacggcgggtcagggcctggccttggtccccactctgcgatgatttctgtgaaattttgctgtagcgatgacattgttttcagaatttccaagagttctgtctgttctgttttttattcagaatgaaatgaaatattttttttagttctg

SEQ ID NO: 111466 - DNA, 876 bp, Homo sapiens
  Payload ID: 1828
  Gene Symbol: B4GALNT4
  Gene Name: beta-1,4-N-acetyl-galactosaminyl transferase 4
  ENST ID: ENST00000534778
  CDS Start-End: 1-162
gacgccagcagcatcgtgttcctctgcgacctgcacatccacttcccacccaacatcctggacggcatccgcaagcactgcgtggagggcaggctggccttcgcgcccgtggtcatgcgcctgagctgcgggagctcgccccgggacccccacgggtcatgacccagtaccaccggacgactcccggaagcccccgtggtgatgggacccggcacctgacccctcccgaggtctcctagcggcgctttgccggggggaccttgcaggacctggtctgaagggtagcacccctcaccctcccgccccaggttactgggaggtgaacggctttggcctttttgggatctacaagtcggactttgaccgggttggaggaatgaacacggaggagttccgagaccagtgggggggtgaagactgggagctcctggacagggtcctgcaggcagggctggaggtggagcggctccgactgcggaatttctatcaccactaccactccaagaggggcatgtggagcgtccgcagcaggaagggctctcgcacgggggcgtcttgaggacgggcagcccctcccagccccggtgggagtcccgaggcagctgctgggggctgggctttgagctcggtcccgagagacccggcagggctggtcagaggggcacagccaccgcctgtgcctgcccctctctggcccactgggcgtcgtgcccctccccggagaggcagccttcacggcgggtcagggcctggccttggtccccactctgcgatgatttctgtgaaattttgctgtagcgatgacattgttttcagaatttccaagagttctgtctgttctgttttttattcagaatgaaatgaaatatttttttt

SEQ ID NO: 111467 - DNA, 421 bp, Homo sapiens
  Payload ID: 1828
  Gene Symbol: B4GALNT4
  Gene Name: beta-1,4-N-acetyl-galactosaminyl transferase 4
  ENST ID: ENST00000526584
  CDS Start-End: 1-81
gacgtggagcgggccctgcgcgccgcgcgcctgccccgagatcgtgcctgtgactcgccctccccaggtaccagtacctgagacgaaccgggaacttcgagcgctccgccgggctgcaggcgggagtggacgcggtagaggacgccagcagcatcgtgttcctctgcgacctgcacatccacttcccacccaacatcctggacggcatccgcaagcactgcgtggagggcaggctggccttcgcgcccgtggtcatgcgcctgagctgcgggagctcgccccgggacccccacggttactgggaggtgaacggctttggcctttttgggatctacaagtcggactttgaccgggttggaggaatgaacacggaggagttccgagaccagtgggggggtgaagactgggagctcctggacag

SEQ ID NO: 111468 - DNA, 732 bp, Homo sapiens
  Payload ID: 1829
  Gene Symbol: B2M
  Gene Name: beta-2-microglobulin
  ENST ID: ENST00000349264
  CDS Start-End: 31-204
attcctgaagctgacagcattcgggccgagatgtctcgctccgtggccttagctgtgctcgcgctactctctctttctggcctggagagagaattgaaaaagtggagcattcagacttgtctttcagcaaggactggtctttctatctcttgtactacactgaattcacccccactgaaaaagatgagtatgcctgccgtgtgaaccatgtgactttgtcacagcccaagatagttaagtgggatcgagacatgtaagcagcatcatggaggtttgaagatgccgcatttggattggatgaattccaaattctgcttgcttgctttttaatattgatatgcttatacacttacactttatgcacaaaatgtagggttataataatgttaacatggacatgatcttctttataattctactttgagtgctgtctccatgtttgatgtatctgagcaggttgctccacaggtagctctaggagggctggcaacttagaggtggggagcagagaattctcttatccaacatcaacatcttggtcagatttgaactcttcaatctcttgcactcaaagcttgttaagatagttaagcgtgcataagttaacttccaatttacatactctgcttagaatttgggggaaaatttagaaatataattgacaggattattggaaatttgttataatgaatgaaacattttgtcatataagattcatatttacttcttata

SEQ ID NO: 111469 - DNA, 933 bp, Homo sapiens
  Payload ID: 1829
  Gene Symbol: B2M
  Gene Name: beta-2-microglobulin
  ENST ID: ENST00000544417
  CDS Start-End: 61-366
aatataagtggaggcgtcgcgctggcgggcattcctgaagctgacagcattcgggccgagatgtctcgctccgtggccttagctgtgctcgcgctactctctctttctggcctggaggctatccagcgtactccaaagattcaggtttactcacgtcatccagccgacattgaagttgacttactgaagaatggagagagaattgaaaaagtggagcattcagacttgtctttcagcaaggactggtctttctatctcttgtactacactgaattcacccccactgaaaaagatgagtatgcctgccgtgtgaaccatgtgactttgtcacagcccaagatagttaagtgggatcgagacatgtaagcagcatcatggaggtttgaagatgccgcatttggattggatgaattccaaattctgcttgcttgctttttaatattgatatgcttatacacttacactttatgcacaaaatgtagggttataataatgttaacatggacatgatcttctttataattctactttgagtgctgtctccatgtttgatgtatctgagcaggttgctccacaggtagctctaggagggctggcaacttagaggtggggagcagagaattctcttatccaacatcaacatcttggtcagatttgaactcttcaatctcttgcactcaaagcttgttaagatagttaagcgtgcataagttaacttccaatttacatactctgcttagaatttgggggaaaatttagaaatataattgacaggattattggaaatttgttataatgaatgaaacattttgtcatataagattcatatttacttcttatacatttgataaagtaaggcatggttgtggttaatctggtttatttttgttccacaagttaaataaatcataaaacttgatgtgttatctctta

SEQ ID NO: 111470 - DNA, 1715 bp, Homo sapiens
  Payload ID: 1829
  Gene Symbol: B2M
  Gene Name: beta-2-microglobulin
  Uniprot ID: P61769
  ENST ID: ENST00000558401
  CDS Start-End: 71-430
gcacgcgtttaatataagtggaggcgtcgcgctggcgggcattcctgaagctgacagcattcgggccgagatgtctcgctccgtggccttagctgtgctcgcgctactctctctttctggcctggaggctatccagcgtactccaaagattcaggtttactcacgtcatccagcagagaatggaaagtcaaatttcctgaattgctatgtgtctgggtttcatccatccgacattgaagttgacttactgaagaatggagagagaattgaaaaagtggagcattcagacttgtctttcagcaaggactggtctttctatctcttgtactacactgaattcacccccactgaaaaagatgagtatgcctgccgtgtgaaccatgtgactttgtcacagcccaagatagttaagtgggatcgagacatgtaagcagcatcatggaggtttgaagatgccgcatttggattggatgaattccaaattctgcttgcttgctttttaatattgatatgcttatacacttacactttatgcacaaaatgtagggttataataatgttaacatggacatgatcttctttataattctactttgagtgctgtctccatgtttgatgtatctgagcaggttgctccacaggtagctctaggagggctggcaacttagaggtggggagcagagaattctcttatccaacatcaacatcttggtcagatttgaactcttcaatctcttgcactcaaagcttgttaagatagttaagcgtgcataagttaacttccaatttacatactctgcttagaatttgggggaaaatttagaaatataattgacaggattattggaaatttgttataatgaatgaaacattttgtcatataagattcatatttacttcttatacatttgataaagtaaggcatggttgtggttaatctggtttatttttgttccacaagttaaataaatcataaaacttgatgtgttatctcttatatctcactcccactattacccctttattttcaaacagggaaacagtcttcaagttccacttggtaaaaaatgtgaaccccttgtatatagagtttggctcacagtgtaaagggcctcagtgattcacattttccagattaggaatctgatgctcaaagaagttaaatggcatagttggggtgacacagctgtctagtgggaggccagccttctatattttagccagcgttctttcctgcgggccaggtcatgaggagtatgcagactctaagagggagcaaaagtatctgaaggatttaatattttagcaaggaatagatatacaatcatcccttggtctccctgggggattggtttcaggaccccttcttggacaccaaatctatggatatttaagtcccttctataaaatggtatagtatttgcatataacctatccacatcctcctgtatactttaaatcatttctagattacttgtaatacctaatacaatgtaaatgctatgcaaatagttgttattgtttaaggaataatgacaagaaaaaaaagtctgtacatgctcagtaaagacacaaccatccctttttttccccagtgtttttgatccatggtttgctgaatccacagatgtggagcccctggatacggaaggcccgctgtactttgaatgacaaataacagatttaaaattttcaaggcatagttttatacctga

SEQ ID NO: 111471 - DNA, 407 bp, Homo sapiens
  Payload ID: 1829
  Gene Symbol: B2M
  Gene Name: beta-2-microglobulin
  ENST ID: ENST00000557901
  CDS Start-End: 29-184
tcctgaagctgacagcattcgggccgagatgtctcgctccgtggccttagctgtgctcgcgctactctctctttctggcctggaggctatccagcattcaggtttactcacgtcatccagcagagaatggaaagtcaaatttcctgaattgctatgtgtctgggtttcatccatccgacattgaagttgacttactgaagaatggagagagaattgaaaaagtggagcattcagacttgtctttcagcaaggactggtctttctatctcttgtactacactgaattcacccccactgaaaaagatgagtatgcctgccgtgtgaaccatgtgactttgtcacagcccaagatagttaagtgggatcgagacatgtaagcagcatcatggaggtttgaagatgccgca

SEQ ID NO: 111472 - DNA, 717 bp, Homo sapiens
  Payload ID: 1829
  Gene Symbol: B2M
  Gene Name: beta-2-microglobulin
  ENST ID: ENST00000561139
  CDS Start-End: 1-216
gggtttcatccatccgacattgaagttgacttactgaagaatggagagagaattgaaaaagtggagcattcagacttgtctttcagcaaggactggtctttctatctcttgtactacactgaattcacccccactgaaaaagatgagtatgcctgccgtgtgaaccatgtgactttgtcacagcccaagatagttaagtgggatcgagacatgtaagcagcatcatggaggtttgaagatgccgcatttggattggatgaattccaaattctgcttgcttgctttttaatattgatatgcttatacacttacactttatgcacaaaatgtagggttataataatgttaacatggacatgatcttctttataattctactttgagtgctgtctccatgtttgatgtatctgagcagagaattctcttatccaacatcaacatcttggtcagatttgaactcttcaatctcttgcactcaaagcttgttaagatagttaagcgtgcataagttaacttccaatttacatactctgcttagaatttgggggaaaatttagaaatataattgacaggattattggaaatttgttataatgaatgaaacattttgtcatataagattcatatttacttcttatacatttgataaagtaaggcatggttgtggttaatctggtttatttttgttccacaagttaaataaatcataaaacttga

SEQ ID NO: 111473 - DNA, 604 bp, Homo sapiens
  Payload ID: 1829
  Gene Symbol: B2M
  Gene Name: beta-2-microglobulin
  Uniprot ID: P61769
  ENST ID: ENST00000561424
  CDS Start-End: 39-398
tggcgggcattcctgaagctgacagcattcgggccgagatgtctcgctccgtggccttagctgtgctcgcgctactctctctttctggcctggaggctatccagcgtactccaaagattcaggtttactcacgtcatccagcagagaatggaaagtcaaatttcctgaattgctatgtgtctgggtttcatccatccgacattgaagttgacttactgaagaatggagagagaattgaaaaagtggagcattcagacttgtctttcagcaaggactggtctttctatctcttgtactacactgaattcacccccactgaaaaagatgagtatgcctgccgtgtgaaccatgtgactttgtcacagcccaagatagttaagtgggatcgagacatgtaagcagcatcatggaggtttgaagatgccgcatttggattggatgaattccaaattctgcttgcttgctttttaatattgatatgcttatacacttacactttatgcacaaaattgtttttgatccatggtttgctgaatccacagatgtggagcccctggatacggaaggcccgctgtactttgaatgacaaataacagatttaaaa

SEQ ID NO: 111474 - DNA, 1081 bp, Homo sapiens
  Payload ID: 1829
  Gene Symbol: B2M
  Gene Name: beta-2-microglobulin
  Uniprot ID: P61769
  ENST ID: ENST00000559916
  CDS Start-End: 35-394
gggcattcctgaagctgacagcattcgggccgagatgtctcgctccgtggccttagctgtgctcgcgctactctctctttctggcctggaggctatccagcgtactccaaagattcaggtttactcacgtcatccagcagagaatggaaagtcaaatttcctgaattgctatgtgtctgggtttcatccatccgacattgaagttgacttactgaagaatggagagagaattgaaaaagtggagcattcagacttgtctttcagcaaggactggtctttctatctcttgtactacactgaattcacccccactgaaaaagatgagtatgcctgccgtgtgaaccatgtgactttgtcacagcccaagatagttaagtgggatcgagacatgtaagcagcatcatggaggtaagtttttgaccttgagaaaatgtttttgtttcactgtcctgaggactatttatagacagctctaacatgataaccctcactatgtggagaacattgacagagtaacattttagcagggaaagaagaatcctacagggtcatgttcccttctcctgtggagtggcatgaagaaggtgtatggccccaggtatggccatattactgaccctctacagagagggcaaaggaactgccagtatggtattgcaggataaaggcaggtggttacccacattacctgcaaggctttgatctttcttctgccatttccacattggacatctctgctgaggagagaaaatgaaccactcttttcctttgtataatgttgttttattcttcagacagaagagaggagttatacagctctgcagacatcccattcctgtatggggactgtgtttgcctcttagaggttcccaggccactagaggagataaagggaaacagattgttataacttgatataatgatactataatagatgtaactacaaggagctccagaagcaagagagagggaggaacttggacttctctgcatctttagttggagtccaaaggcttttcaatgaaattctactgcccagggtacattgatgctgaaaccccattcaaatctcctgttatat

SEQ ID NO: 111475 - DNA, 1715 bp, Homo sapiens
  Payload ID: 1829
  Gene Symbol: B2M
  Gene Name: beta-2-microglobulin
  Uniprot ID: P61769
  ENST ID: ENST00000617605
  CDS Start-End: 71-430
gcacgcgtttaatataagtggaggcgtcgcgctggcgggcattcctgaagctgacagcattcgggccgagatgtctcgctccgtggccttagctgtgctcgcgctactctctctttctggcctggaggctatccagcgtactccaaagattcaggtttactcacgtcatccagcagagaatggaaagtcaaatttcctgaattgctatgtgtctgggtttcatccatccgacattgaagttgacttactgaagaatggagagagaattgaaaaagtggagcattcagacttgtctttcagcaaggactggtctttctatctcttgtactacactgaattcacccccactgaaaaagatgagtatgcctgccgtgtgaaccatgtgactttgtcacagcccaagatagttaagtgggatcgagacatgtaagcagcatcatggaggtttgaagatgccgcatttggattggatgaattccaaattctgcttgcttgctttttaatattgatatgcttatacacttacactttatgcacaaaatgtagggttataataatgttaacatggacatgatcttctttataattctactttgagtgctgtctccatgtttgatgtatctgagcaggttgctccacaggtagctctagcagggctggcaacttagaggtggggagcagagaattctcttatccaacatcaacatcttggtcagatttgaactcttcaatctcttgcactcaaagcttgttaagatagttaagcgtgcataagttaacttccaatttacatactctgcttagaatttgggggaaaatttagaaatataattgacaggattattggaaatttgttataatgaatgaaacattttgtcatataagattcatatttacttcttatacatttgataaagtaaggcatggttgtggttaatctggtttatttttgttccacaagttaaataaatcataaaacttgatgtgttatctcttatatctcactcccactattacccctttattttcaaacagggaaacagtcttcaagttccacttggtaaaaaatgtgaaccccttgtatatagagtttggctcacagtgtaaagggcctcagtgattcacattttccagattaggaatctgatgctcaaagaagttaaatggcatagttggggtgacacagctgtctagtgggaggccagccttctatattttagccagcgttctttcctgcgggccaggtcatgaggagtatgcagactctaagagggagcaaaagtatctgaaggatttaatattttagcaaggaatagatatacagtcatcccttggtctccctgggggattggtttcaggaccccttcttggacaccaaatctatggatatttaagtcccttctataaaatggtatagtatttgcatataacctatccacatcctcctgtatactttaaatcatttctagattacttgtaatacctaatacaatgtaaatgctatgcaaatagttgttattgtttaaggaataatgacaagaaaaaaaagtctgtacatgctcagtaaagacacaaccatccctttttttccccagtgtttttgatccatggtttgctgaatccacagatgtggagcccctggatacggaaggccagctgtactttgaatgacaaataacagatttaaaattttcaaggcatagttttatacctga

SEQ ID NO: 111476 - DNA, 933 bp, Homo sapiens
  Payload ID: 1829
  Gene Symbol: B2M
  Gene Name: beta-2-microglobulin
  ENST ID: ENST00000619603
  CDS Start-End: 61-366
aatataagtggaggcgtcgcgctggcgggcattcctgaagctgacagcattcgggccgagatgtctcgctccgtggccttagctgtgctcgcgctactctctctttctggcctggaggctatccagcgtactccaaagattcaggtttactcacgtcatccagccgacattgaagttgacttactgaagaatggagagagaattgaaaaagtggagcattcagacttgtctttcagcaaggactggtctttctatctcttgtactacactgaattcacccccactgaaaaagatgagtatgcctgccgtgtgaaccatgtgactttgtcacagcccaagatagttaagtgggatcgagacatgtaagcagcatcatggaggtttgaagatgccgcatttggattggatgaattccaaattctgcttgcttgctttttaatattgatatgcttatacacttacactttatgcacaaaatgtagggttataataatgttaacatggacatgatcttctttataattctactttgagtgctgtctccatgtttgatgtatctgagcaggttgctccacaggtagctctagcagggctggcaacttagaggtggggagcagagaattctcttatccaacatcaacatcttggtcagatttgaactcttcaatctcttgcactcaaagcttgttaagatagttaagcgtgcataagttaacttccaatttacatactctgcttagaatttgggggaaaatttagaaatataattgacaggattattggaaatttgttataatgaatgaaacattttgtcatataagattcatatttacttcttatacatttgataaagtaaggcatggttgtggttaatctggtttatttttgttccacaagttaaataaatcataaaacttgatgtgttatctctta

SEQ ID NO: 111477 - DNA, 407 bp, Homo sapiens; identical to SEQ ID NO: 111471
  Payload ID: 1829
  Gene Symbol: B2M
  Gene Name: beta-2-microglobulin
  ENST ID: ENST00000633158
  CDS Start-End: 29-184

SEQ ID NO: 111478 - DNA, 717 bp, Homo sapiens; identical to SEQ ID NO: 111472
  Payload ID: 1829
  Gene Symbol: B2M
  Gene Name: beta-2-microglobulin
  ENST ID: ENST00000631575
  CDS Start-End: 1-216

SEQ ID NO: 111479 - DNA, 604 bp, Homo sapiens
  Payload ID: 1829
  Gene Symbol: B2M
  Gene Name: beta-2-microglobulin
  Uniprot ID: P61769
  ENST ID: ENST00000631728
  CDS Start-End: 39-398
tggcgggcattcctgaagctgacagcattcgggccgagatgtctcgctccgtggccttagctgtgctcgcgctactctctctttctggcctggaggctatccagcgtactccaaagattcaggtttactcacgtcatccagcagagaatggaaagtcaaatttcctgaattgctatgtgtctgggtttcatccatccgacattgaagttgacttactgaagaatggagagagaattgaaaaagtggagcattcagacttgtctttcagcaaggactggtctttctatctcttgtactacactgaattcacccccactgaaaaagatgagtatgcctgccgtgtgaaccatgtgactttgtcacagcccaagatagttaagtgggatcgagacatgtaagcagcatcatggaggtttgaagatgccgcatttggattggatgaattccaaattctgcttgcttgctttttaatattgatatgcttatacacttacactttatgcacaaaattgtttttgatccatggtttgctgaatccacagatgtggagcccctggatacggaaggccagctgtactttgaatgacaaataacagatttaaaa

SEQ ID NO: 111480 - DNA, 732 bp, Homo sapiens
  Payload ID: 1829
  Gene Symbol: B2M
  Gene Name: beta-2-microglobulin
  ENST ID: ENST00000632867
  CDS Start-End: 31-204
attcctgaagctgacagcattcgggccgagatgtctcgctccgtggccttagctgtgctcgcgctactctctctttctggcctggagagagaattgaaaaagtggagcattcagacttgtctttcagcaaggactggtctttctatctcttgtactacactgaattcacccccactgaaaaagatgagtatgcctgccgtgtgaaccatgtgactttgtcacagcccaagatagttaagtgggatcgagacatgtaagcagcatcatggaggtttgaagatgccgcatttggattggatgaattccaaattctgcttgcttgctttttaatattgatatgcttatacacttacactttatgcacaaaatgtagggttataataatgttaacatggacatgatcttctttataattctactttgagtgctgtctccatgtttgatgtatctgagcaggttgctccacaggtagctctagcagggctggcaacttagaggtggggagcagagaattctcttatccaacatcaacatcttggtcagatttgaactcttcaatctcttgcactcaaagcttgttaagatagttaagcgtgcataagttaacttccaatttacatactctgcttagaatttgggggaaaatttagaaatataattgacaggattattggaaatttgttataatgaatgaaacattttgtcatataagattcatatttacttcttata

SEQ ID NO: 111481 - DNA, 1081 bp, Homo sapiens; identical to SEQ ID NO: 111474
  Payload ID: 1829
  Gene Symbol: B2M
  Gene Name: beta-2-microglobulin
  Uniprot ID: P61769
  ENST ID: ENST00000631573
  CDS Start-End: 35-394

SEQ ID NO: 111482 - DNA, 2670 bp, Homo sapiens
  Payload ID: 1830
  Gene Symbol: BCO1
  Gene Name: beta-carotene oxygenase 1
  Uniprot ID: Q9HAY6
  ENST ID: ENST00000258168
  CDS Start-End: 462-2105
tcataaacaactccagctcttggattacgtcgggcaacataacagcaggcacggaattctctctgcttatttagaacctagtctgaagcaagcttttttttttttttggttaagtcaaaagtgaaactggagagggaaagctgagggaacaataagaggattaaagattagctatgacacatggcttggaaattaacctttaaccaaacatcttataagtaacgccagcgcagcttcccttgtgaatgtaaagagatccagggctcttggagagggacaagtgagagccagccaaaaaggaaaaagcaaaggcagaaacggcatcaggagagacagagatgtgaaggagggaaggagcaggagagcaggaaggaaacgcaggaggagggagcagcatctcctgtgaacacagaggagcacctgtttgctgttaaaatcgatctccctcggcaccctgagcaatggatataatatttggcaggaataggaaagaacagctggagcctgtgagggccaaagtgacaggcaagattccagcatggctgcagggaaccctgctccgcaatgggcctgggatgcacacagttggggagtccagatacaaccattggttcgacggccttgccctgctccacagcttcaccatcagagacggtgaagtctattacaggagcaaatacctgagaagcgatacctacaacaccaatattgaggcaaacaggattgtggtgtctgagtttggaacaatggcctatccggacccctgcaaaaacatattttccaaagctttctcctacttgtctcacaccatccccgatttcaccgacaactgcctgatcaacatcatgaagtgcggagaagacttctacgcgacctcagagaccaattacatcaggaaaatcaacccacagactctggaaaccctggagaaggttgattatcgtaaatacgtggcggtaaatctggcaacgtcacatccccattatgatgaggctggaaatgttctaaacatgggcacatccattgtggaaaaggggaagacaaagtatgtgatttttaagatccctgccacagtaccagagggcaagaagcaggggaagagcccctggaagcacacagaggtgttctgctccatcccatcccgctccctgctctccccaagctactaccacagctttggagtcaccgagaactatgtcatcttccttgagcagcctttcaggttggatattctcaagatggcaaccgcatacatccggagaatgagctgggcctcctgcctggctttccacagggaggagaagacttatatccacatcatcgaccaaaggaccaggcagcctgtgcagaccaagttttacacagacgccatggtggtcttccatcacgtcaacgcctacgaagaggacggctgcatcgtgtttgacgtcattgcctacgaggacaacagcctctaccagctcttctacctggccaacctgaaccaggacttcaaggagaactccaggctcacctcggtccccaccctcaggaggtttgccgtgcccctccacgtggacaagaatgcagaagtgggcacaaatttaatcaaagtggcatctacaacagccacggccctgaaggaagaagatggccaagtctactgccagccggaatttctttatgaaggcttagagcttccacgggtcaattatgctcacaatggaaagcaataccgatatgtctttgctacaggagttcagtggagtccaatcccaaccaagataataaaatatgacattctcacaaagtcatccttaaaatggagagaggacgactgctggccagcggaacccctgtttgtgcccgcgccaggtgccaaggatgaggatgacggagtaatcttatcagccattgtctctactgatccccaaaagctgccttttctgctcattctggatgccaaaagctttacggaattggcccgtgcctctgttgatgtcgatatgcacatggatctccatggattattcattacagacatggactgggacacaaaaaagcaggccgcttctgaggaacagcgggacagggcttccgactgccacggggctcctctgacctgatggtgttggggtttgggtaggggaggggagctcggctgtcagaactccatggatatgtttctttggatggaggggagggcctttgttaccttttgcacttattctttctgtgggtgctttgacaagggcatggcaagagagcttgtcagtatcatttctttcattttattttggctgtaaaaattttgtttgaaagtcaaacatttgaacatcaaatatgtattgattagatccagtccttctaagaaacctcctttcctttaacaaaaagaccttgaccatgaatcagagattgtattcaatgacattatcatcatttttagaacgagccactaacctattagagaagaggcagataattatttatcattgtgccttcctctgtctctttctctttcctttgctccctcccatgtttctggtggactaaattgtgtatctgggagttctcactttctagccaggcctgatgagttaagttacatgaccaggaaggttatgccactttgtggtcattccatgcaagtcatggcgtaatataaaataataaaaactttaaagtctg

SEQ ID NO: 111483 - DNA, 949 bp, Homo sapiens
  Payload ID: 1830
  Gene Symbol: BCO1
  Gene Name: beta-carotene oxygenase 1
  ENST ID: ENST00000564552
  CDS Start-End: 219-707
gaatgtaaagagatccagggctcttggagagggacaagtgagagccagccaaaaaggaaaaagcaaaggcagaaacggcatcaggagagacagagatgtgaaggagggaaggagcaggagagcaggaaggaaacgcaggaggagggagcagcatctcctgtgaacacagaggagcacctgtttgctgttaaaatcgatctccctcggcaccctgagcaatggatataatatttggcaggaataggaaagaacagctggagcctgtgagggccaaagtgacaggcaagattccagcatggctgcagggaaccctgctccgcaatgggcctgggatgcacacagttggggagtccagatacaaccattggttcgacggccttgccctgctccacagcttcaccatcagagacggtgaagtctattacaggagcaaatacctgagaagcgatacctacaacaccaatattgaggcaaacaggattgtggtgtctgagtttggaacaatggcctatccggacccctgcaaaaacatattttccaaagctttctcctacttgtctcacaccatccccgatttcaccgacaactgcctgatcaacatcatgaagtgcggagaagacttctacgcgacctcagagaccaattacatcaggaaaatcaacccacagactctggaaaccctggagaaggtatcaacacatatgtaaccagcatcacttcctgactcaagaaagggagagtcggcgacggccggggtgaggttgctcagcctgcaagcagcttaccaggggagcccctcctctaacaccgttggatcccgtgccctagcgccacacttactgctagatgctaggcagggactgtgttgtttttatcttcgtgtctgtatcagtttcctggggctgatgtaaccaagtcctacaaaaaagattgctttaaacaacagaaa

SEQ ID NO: 111484 - DNA, 1857 bp, Homo sapiens
  Payload ID: 1830
  Gene Symbol: BCO1
  Gene Name: beta-carotene oxygenase 1
  ENST ID: ENST00000563804
  CDS Start-End: 221-466
gtgaatgtaaagagatccagggctcttggagagggacaagtgagagccagccaaaaaggaaaaagcaaaggcagaaacggcatcaggagagacagagatgtgaaggagggaaggagcaggagagcaggaaggaaacgcaggaggagggagcagcatctcctgtgaacacagaggagcacctgtttgctgttaaaatcgatctccctcggcaccctgagcaatggatataatatttggcaggaataggaaagaacagctggagcctgtgagggccaaagtgacaggcaagattccagcatggctgcagggaaccctgctccgcaatgggcctgggatgcacacagttggggagtccagatacaaccattggttcgacggccttgccctgctccacagcttcaccatcagagacgagctttctcctacttgtctcacaccatccccgatttcaccgacaactgcctgatcaacatcatgaagtgcggagaagacttctacgcgacctcagagaccaattacatcaggaaaatcaacccacagactctggaaaccctggagaaggttgattatcgtaaatacgtggcggtaaatctggcaacgtcacatccccattatgatgaggctggaaatgttctaaacatgggcacatccattgtggaaaaggggaagacaaagtatgtgatttttaagatccctgccacagtaccagagggcaagaagcaggggaagagcccctggaagcacacagaggtgttctgctccatcccatcccgctccctgctctccccaagctactaccacagctttggagtcaccgagaactatgtcatcttccttgagcagcctttcaggttggatattctcaagatggcaaccgcatacatccggagaatgagctgggcctcctgcctggctttccacagggaggagaagacttatatccacatcatcgaccaaaggaccaggcagcctgtgcagaccaagttttacacagacgccatggtggtcttccatcacgtcaacgcctacgaagaggacggctgcatcgtgtttgacgtcattgcctacgaggacaacagcctctaccagctcttctacctggccaacctgaaccaggacttcaaggagaactccaggctcacctcggtccccaccctcaggaggtttgccgtgcccctccacgtggacaagaatgcagaagtgggcacaaatttaatcaaagtggcatctacaacagccacggccctgaaggaagaagatggccaagtctactgccagccggaatttctttatgaaggcttagagcttccacgggtcaattatgctcacaatggaaagcaataccgatatgtctttgctacaggagttcagtggagtccaatcccaaccaagataataaaatatgacattctcacaaagtcatccttaaaatggagagaggacgactgctggccagcggaacccctgtttgtgcccgcgccaggtgccaaggatgaggatgacggagtaatcttatcagccattgtctctactgatccccaaaagctgccttttctgctcattctggatgccaaaagctttacggaattggcccgtgcctctgttgatgtcgatatgcacatggatctccatggattattcattacagacatggactgggacacaaaaaagcaggccgcttctgaggaacagcgggacagggcttccgactgccacggggctcctctgacctgatggtgttggggtttgggtaggggaggggagctcggctgtcagaactccatggatatgtttctttggatggaggggagggcctttgttaccttttgcacttattctttctgtgggtgctttgac

SEQ ID NO: 111485 - DNA, 2930 bp, Homo sapiens
  Payload ID: 1831
  Gene Symbol: BCO2
  Gene Name: beta-carotene oxygenase 2
  Uniprot ID: Q9BYV7
  ENST ID: ENST00000357685
  CDS Start-End: 136-1875
aagctgcgtcctctctttgacctgtcagtgagggagggacagtccaggcagttctgtgcgtgttcactgtttagtagtactcaaaactgccagtgtgagaggatttggaaatcactggatctgctcaatacaaaaatgttttttcgagtctttctccattttatcaggagtcattctgccactgcagtggatttccttcctgtgatggtgcaccggctcccagttttcaaaaggtacatgggaaatactcctcagaaaaaagccgtctttgggcagtgtcggggtctgccatgtgttgcaccgctgctgaccacagtggaagaggctccacggggcatctctgctcgagtctggggacattttcctaagtggctcaatggctctctacttcgaattggacctgggaaattcgagtttgggaaggataagtacaatcattggtttgatgggatggcgctgcttcaccagttcagaatggcaaagggcacagtgacatacaggagcaagtttctacagagtgatacatataaggccaacagtgctaaaaaccgaattgtgatctcagaatttggcacactggctctcccggatccatgcaagaatgtttttgaacgtttcatgtccaggtttgagctgcctggtaaagctgcagccatgactgacaatactaatgtcaactatgtgcggtacaagggtgattactacctctgcactgagaccaactttatgaataaagtggacattgaaactctggaaaaaacagaaaaggtagattggagcaaatttattgctgtgaatggagcaactgcacatcctcattatgacctggatggaacagcatacaatatggggaactcctttgggccatatggtttctcctataaggttattcgggttcctccagagaaggtggaccttggggagacaatccatggagtccaggtgatatgttctattgcttctacagagaaagggaaaccttcttactaccatagctttggaatgacaaggaactatataattttcattgaacaacctctaaagatgaacctgtggaaaattgccacttctaaaattcggggaaaggccttttcagatgggataagctgggaaccccagtgtaatacgcggtttcatgtggtggaaaaacgcactggacagctccttccagggagatactacagcaaaccttttgttacatttcatcaaatcaatgcctttgaggaccagggctgtgttataattgatttgtgctgtcaagataatggaagaaccctagaagtttaccagttacagaatctcaggaaggctggggaagggcttgatcaggtccataattcagcagccaaatctttccctcgaaggtttgttttgcctttaaatgtcagtttgaatgcccctgagggagacaacctgagtccattgtcctatacttcagccagtgctgtgaaacaggctgatggaacgatctggtgctctcatgaaaatctacatcaggaggacctagaaaaggaaggaggcattgaatttcctcagatctactatgatcgattcagtggcaaaaagtatcatttcttttatggctgtggctttcggcatttagtgggggattctctgatcaaggttgatgtggtgaataagacactgaaggtttggagagaagatggcttttatccctcagaacctgtttttgttccagcaccaggaaccaatgaagaagatggtggggttattctttctgtggtgatcactcccaaccagaatgaaagcaattttatcctagttttggatgccaagaactttgaagagctgggccgagcagaggtacctgtgcagatgccttatgggttccatggtaccttcatacccatctgatgggacaaccacaaggtctggaaactaggtttaaaataagtgtgcacttggacataaagactggagaaataaacactgaggactccaaaaggggggcaaggaggaagaggggcaggggttaaaaagctacctattgaatactatgttccctatttgggtgatgggttcgttagaagtccaaacctcagcagcacacaatatactcatgtaacaagcctgcacatgtaccccagaatctaaaataaaaataaaaagaaaaacaaagaatgtactctatacaaaagacagagcataaagggcaccgtacctcccaaaccaatgtcccaaatagacatttagtttaaaaatttctgttaaaaacagaattcactatttccttgccactgccaagtcacgccatggcagaggctcgagtgcatacaagcttcggttttacccttaatacaccatcatgaccaatggaggcattgctgctggaggtgtcatggccattaacactactttataagaggtgcggaagactgccctcactcatcatggcctagcatgtgcaatttgtgaagctgccaaagcgttagacaagcaccaagcccacttttgtctgcctgcacccaactgcaatgagcctatgtatgtcaagttggtggagtcccatggtgctgaacaccaactcaccctaattaaggttgatgacaacaagaaaccagaggaatgggtaggcctctgtaaaactgagagggaaacccccgaaaagtggttggctgcagttgtgcagtagttaaggactaggtcaaagaatcttaagtcaaggatgtcatcgaagagtatttcaaatgtaagaaatgaacaaataaaactttggcactcatgtttcttaagaaaaaacaccacaaagcagaattcataatataactatggttatagatatttattttttagggctcttacttgaaataattaagaaagtattgatacaaccttttgaagagggttttaaatttcatttattggatatatcttcctctaggtaataataagaatacacgaaataaaaa

SEQ ID NO: 111486 - DNA, 1868 bp, Homo sapiens
  Payload ID: 1831
  Gene Symbol: BCO2
  Gene Name: beta-carotene oxygenase 2
  Uniprot ID: Q9BYV7
  ENST ID: ENST00000361053
  CDS Start-End: 81-1601
gtgcgtgttcactgtttagtagtactcaaaactgccagtgtgagaggatttggaaatcactggatctgctcaatacaaaaatgttttttcgagtctttctccattttatcaggagtcattctgccactgcagtggatttccttcctgtgatggtgcaccggctcccagttttcaaaaggtacatgggaaatactcctcagaaaaaagccgtctttgggcagtgtcggggtctgccatgtgttgcaccgctgctgaccacagtggaagaggctccacggggcatctctgctcgagtctggggacattttcctaagtggctcaatggctctctacttcgaattggacctgggaaattcgagtttgggaaggataagtacaatcattggtttgatgggatggcgctgcttcaccagttcagaatggcaaagggcacagtgacatacaggagcaagtttctacagagtgatacatataaggccaacagtgctaaaaaccgaattgtgatctcagaatttggcacactggctctcccggatccatgcaagaatgtttttgaacgtttcatgtccaggtttgagctgcctggtaaagctgcaggtttctcctataaggttattcgggttcctccagagaaggtggaccttggggagacaatccatggagtccaggtgatatgttctattgcttctacagagaaagggaaaccttcttactaccatagctttggaatgacaaggaactatataattttcattgaacaacctctaaagatgaacctgtggaaaattgccacttctaaaattcggggaaaggccttttcagatgggataagctgggaaccccagtgtaatacgcggtttcatgtggtggaaaaacgcactggacagctccttccagggagatactacagcaaaccttttgttacatttcatcaaatcaatgcctttgaggaccagggctgtgttataattgatttgtgctgtcaagataatggaagaaccctagaagtttaccagttacagaatctcaggaaggctggggaagggcttgatcaggtccataattcagcagccaaatctttccctcgaaggtttgttttgcctttaaatgtcagtttgaatgcccctgagggagacaacctgagtccattgtcctatacttcagccagtgctgtgaaacaggctgatggaacgatctggtgctctcatgaaaatctacatcaggaggacctagaaaaggaaggaggcattgaatttcctcagatctactatgatcgattcagtggcaaaaagtatcatttcttttatggctgtggctttcggcatttagtgggggattctctgatcaaggttgatgtggtgaataagacactgaaggtttggagagaagatggcttttatccctcagaacctgtttttgttccagcaccaggaaccaatgaagaagatggtggggttattctttctgtggtgatcactcccaaccagaatgaaagcaattttatcctagttttggatgccaagaactttgaagagctgggccgagcagaggtacctgtgcagatgccttatgggttccatggtaccttcatacccatctgatgggacaaccacaaggtctggaaactaggtttaaaataagtgtgcacttggacataaagactggagaaataaacactgaggactccaaaaggggggcaaggaggaagaggggcaggggttaaaaagctacctattgaatactatgttccctatttgggtgatgggttcgttagaagtccaaacctcagcagcacacaatatactcatgtaacaagcctgcacatgtaccccagaatctaaaataaaaataaaaagaaaaacaaagaa

SEQ ID NO: 111487 - DNA, 2598 bp, Homo sapiens
  Payload ID: 1831
  Gene Symbol: BCO2
  Gene Name: beta-carotene oxygenase 2
  Uniprot ID: Q9BYV7
  ENST ID: ENST00000438022
  CDS Start-End: 718-2355
gcctctttcctgaaggttgctgggagcttctgaagctttgtgtcctgtgtggctcagatgagatagcaattccgcagagtcctggaagttaaagaaggctgagttaggattgtttcctcatggtcagggaaacagccttcacatttgtatattttatgcaatatttaaggcaggattcagggacttggtattctttgggatttgcaataagaagaatattcaatatttaggcttttctaaattgaaaaatcactgccacacgttctaatgtaattgtttggtttctctatttgcattttgcggggactgccttaaaactcatttatgttttatagccttctattatagttaccattgttacatgattttatgtatagaaattggctgatctagagctttcagaaatcatactaatatgcactataaattttaaaattacttaatgtagtaatttaatgtttgcagtatgcaagggaatgtattacgtactggaaggagagaggagacaaacaccagaccctgtactcaaggagtactggtagtatcatttatcatacaagacagataagataaggtccatatgagagctataaacagatgctgtgagttcagactaaggagaatcagttcttgctgtaggtaaggggaatgctgtgtttataaagcaaatgacatggcaactggatcttgaaggatgagttagttttcaaaaggtacatgggaaatactcctcagaaaaaagccgtctttgggcagtgtcggggtctgccatgtgttgcaccgctgctgaccacagtggaagaggctccacggggcatctctgctcgagtctggggacattttcctaagtggctcaatggctctctacttcgaattggacctgggaaattcgagtttgggaaggataagtacaatcattggtttgatgggatggcgctgcttcaccagttcagaatggcaaagggcacagtgacatacaggagcaagtttctacagagtgatacatataaggccaacagtgctaaaaaccgaattgtgatctcagaatttggcacactggctctcccggatccatgcaagaatgtttttgaacgtttcatgtccaggtttgagctgcctggtaaagctgcagccatgactgacaatactaatgtcaactatgtgcggtacaagggtgattactacctctgcactgagaccaactttatgaataaagtggacattgaaactctggaaaaaacagaaaaggtagattggagcaaatttattgctgtgaatggagcaactgcacatcctcattatgacctggatggaacagcatacaatatggggaactcctttgggccatatggtttctcctataaggttattcgggttcctccagagaaggtggaccttggggagacaatccatggagtccaggtgatatgttctattgcttctacagagaaagggaaaccttcttactaccatagctttggaatgacaaggaactatataattttcattgaacaacctctaaagatgaacctgtggaaaattgccacttctaaaattcggggaaaggccttttcagatgggataagctgggaaccccagtgtaatacgcggtttcatgtggtggaaaaacgcactggacagctccttccagggagatactacagcaaaccttttgttacatttcatcaaatcaatgcctttgaggaccagggctgtgttataattgatttgtgctgtcaagataatggaagaaccctagaagtttaccagttacagaatctcaggaaggctggggaagggcttgatcaggtccataattcagcagccaaatctttccctcgaaggtttgttttgcctttaaatgtcagtttgaatgcccctgagggagacaacctgagtccattgtcctatacttcagccagtgctgtgaaacaggctgatggaacgatctggtgctctcatgaaaatctacatcaggaggacctagaaaaggaaggaggcattgaatttcctcagatctactatgatcgattcagtggcaaaaagtatcatttcttttatggctgtggctttcggcatttagtgggggattctctgatcaaggttgatgtggtgaataagacactgaaggtttggagagaagatggcttttatccctcagaacctgtttttgttccagcaccaggaaccaatgaagaagatggtggggttattctttctgtggtgatcactcccaaccagaatgaaagcaattttatcctagttttggatgccaagaactttgaagagctgggccgagcagaggtacctgtgcagatgccttatgggttccatggtaccttcatacccatctgatgggacaaccacaaggtctggaaactaggtttaaaataagtgtgcacttggacataaagactggagaaataaacactgaggactccaaaaggggggcaaggaggaagaggggcaggggttaaaaagctacctattgaatactatgttccctatttgggtgatgggttcgttagaagtccaaacctcagcagcacacaatatactcatgtaacaagcctgcacatgtaccccagaatctaaaat

SEQ ID NO: 111488 - DNA, 1647 bp, Homo sapiens
  Payload ID: 1831
  Gene Symbol: BCO2
  Gene Name: beta-carotene oxygenase 2
  Uniprot ID: Q9BYV7
  ENST ID: ENST00000532593
  CDS Start-End: 107-1531
agaatcagttcttgctgtaggtaaggggaatgctgtgtttataaagcaaatgacatggcaactggatcttgaaggatgagttaggtacaatcattggtttgatgggatggcgctgcttcaccagttcagaatggcaaagggcacagtgacatacaggagcaagtttctacagagtgatacatataaggccaacagtgctaaaaaccgaattgtgatctcagaatttggcacactggctctcccggatccatgcaagaatgtttttgaacgtttcatgtccaggtttgagctgcctggtaaagctgcagccatgactgacaatactaatgtcaactatgtgcggtacaagggtgattactacctctgcactgagaccaactttatgaataaagtggacattgaaactctggaaaaaacagaaaaggtagattggagcaaatttattgctgtgaatggagcaactgcacatcctcattatgacctggatggaacagcatacaatatggggaactcctttgggccatatggtttctcctataaggttattcgggttcctccagagaaggtggaccttggggagacaatccatggagtccaggtgatatgttctattgcttctacagagaaagggaaaccttcttactaccatagctttggaatgacaaggaactatataattttcattgaacaacctctaaagatgaacctgtggaaaattgccacttctaaaattcggggaaaggccttttcagatgggataagctgggaaccccagtgtaatacgcggtttcatgtggtggaaaaacgcactggacagctccttccagggagatactacagcaaaccttttgttacatttcatcaaatcaatgcctttgaggaccagggctgtgttataattgatttgtgctgtcaagataatggaagaaccctagaagtttaccagttacagaatctcaggaaggctggggaagggcttgatcaggtccataattcagcagccaaatctttccctcgaaggtttgttttgcctttaaatgtcagtttgaatgcccctgagggagacaacctgagtccattgtcctatacttcagccagtgctgtgaaacaggctgatggaacgatctggtgctctcatgaaaatctacatcaggaggacctagaaaaggaaggaggcattgaatttcctcagatctactatgatcgattcagtggcaaaaagtatcatttcttttatggctgtggctttcggcatttagtgggggattctctgatcaaggttgatgtggtgaataagacactgaaggtttggagagaagatggcttttatccctcagaacctgtttttgttccagcaccaggaaccaatgaagaagatggtggggttattctttctgtggtgatcactcccaaccagaatgaaagcaattttatcctagttttggatgccaagaactttgaagagctgggccgagcagaggtacctgtgcagatgccttatgggttccatggtaccttcatacccatctgatgggacaaccacaaggtctggaaactaggtttaaaataagtgtgcacttggacataaagactggagaaataaacactgaggactccaaaaggggggcaaggaggaagaggggcagg

SEQ ID NO: 111489 - DNA, 588 bp, Homo sapiens
  Payload ID: 1831
  Gene Symbol: BCO2
  Gene Name: beta-carotene oxygenase 2
  ENST ID: ENST00000525175
  CDS Start-End: 1-215
tgaaacaggctgatggaacgatctggtgctctcatgaaaatctacatcaggaggacctagaaaaggaaggaggcattgaatttcctcagatctactatgatcgattcagtggcaaaaagtttggagagaagatggcttttatccctcagaacctgtttttgttccagcaccaggaaccaatgaagaagatggtggggttattctttctgtggtgatcactcccaaccagaatgaaagcaattttatcctagttttggatgccaagaactttgaagagctgggccgagcagaggtacctgtgcagatgccttatgggttccatggtaccttcatacccatctgatgggacaaccacaaggtctggaaactaggtttaaaataagtgtgcacttggacataaagactggagaaataaacactgaggactccaaaaggggggcaaggaggaagaggggcaggggttaaaaagctacctattgaatactatgttccctatttgggtgatgggttcgttagaagtccaaacctcagcagcacacaatatactcatgtaacaagcctgcacatgtaccccagaatctaaaataa

SEQ ID NO: 111490 - DNA, 817 bp, Homo sapiens
  Payload ID: 1831
  Gene Symbol: BCO2
  Gene Name: beta-carotene oxygenase 2
  ENST ID: ENST00000530677
  CDS Start-End: 1-817
gtacaatcattggtttgatgggatggcgctgcttcaccagttcagaatggcaaagggcacagtgacatacaggagcaagtttctacagagtgatacatataaggccaacagtgctaaaaaccgaattgtgatctcagaatttggcacactggctctcccggatccatgcaagaatgtttttgaacgtttcatgtccaggtttgagctgcctgccatgactgacaatactaatgtcaactatgtgcggtacaagggtgattactacctctgcactgagaccaactttatgaataaagtggacattgaaactctggaaaaaacagaaaagctccttccagggagatactacagcaaaccttttgttacatttcatcaaatcaatgcctttgaggaccagggctgtgttataattgatttgtgctgtcaagataatggaagaaccctagaagtttaccagttacagaatctcaggaaggctggggaagggcttgatcaggtccataattcagcagccaaatctttccctcgaaggtttgttttgcctttaaatgtcagtttgaatgcccctgagggagacaacctgagtccattgtcctatacttcagccagtgctgtgaaacaggctgatggaacgatctggtgctctcatgaaaatctacatcaggaggacctagaaaaggaaggaggcattgaatttcctcagatctactatgatcgattcagtggcaaaaagtatcatttcttttatggctgtggctttcggcatttagtgggggattctctgatcaaggttgatgtggtgaataagacactgaag

SEQ ID NO: 111491 - DNA, 569 bp, Homo sapiens
  Payload ID: 1831
  Gene Symbol: BCO2
  Gene Name: beta-carotene oxygenase 2
  ENST ID: ENST00000534550
  CDS Start-End: 87-239
agttctgtgcgtgttcactgtttagtagtactcaaaactgccagtgtgagaggatttggaaatcactggatctgctcaatacaaaaatgttttttcgagtctttctccattttatcaggagtcattctgccactgcagtggatttccttcctgtgatggtgcaccggctcccaggtacaatcattggtttgatgggatggcgctgcttcaccagttcagaatggcaaagggcacagtgacatacaggagcaagtttctacagagtgatacatataaggccaacagtgctaaaaaccgaattgtgatctcagaatttggcacactggctctcccggatccatgcaagaatgtttttgaacgtttcatgtccaggtttgagctgcctggtaaagctgcaggtttctcctataaggttattcgggttcctccagagaaggtggaccttggggagacaatccatggagtccaggtgatatgttctattgcttctacagagaaagggaaaccttcttactaccatagctttggaatgacaaggaactatataattttcattgaacaacctctaa

SEQ ID NO: 111492 - DNA, 494 bp, Homo sapiens
  Payload ID: 1831
  Gene Symbol: BCO2
  Gene Name: beta-carotene oxygenase 2
  ENST ID: ENST00000531003
  CDS Start-End: 71-367
actgtttagtagtactcaaaactgccagtgtgagaggatttggaaatcactggatctgctcaatacaaaaatgttttttcgagtctttctccattttatcaggagtcattctgccactgcagtggatttccttcctgtgatggtgcaccggctcccagttttcaaaaggtacatgggaaatactcctcagaaaaaagccgtctttgggcagtgtcggggtctgccatgtgttgcaccgctgctgaccacagtggaagaggctccacggggcatctctgctcgagtctggggacattttcctaagtggctcaatggctctctacttcgaattggacctgggaaattcgagtttgggaaggataagtaagccttgattttggagaacaacttggatttcttggcatgggctggttctgtggaatatgcattaatatctgcttcctctgtgaggtacaatcattggtttgatgggatggcgctgcttcaccagttca

SEQ ID NO: 111493 - DNA, 1983 bp, Homo sapiens
  Payload ID: 1831
  Gene Symbol: BCO2
  Gene Name: beta-carotene oxygenase 2
  Uniprot ID: Q9BYV7
  ENST ID: ENST00000526088
  CDS Start-End: 103-1722
aaggagaatcagttcttgctgtaggtaaggggaatgctgtgtttataaagcaaatgacatggcaactggatcttgaaggatgagttagttttcaaaaggtacatgggaaatactcctcagaaaaaagccgtctttgggcagtgtcggggtctgccatgtgttgcaccgctgctgaccacagtggaagaggctccacggggcatctctgctcgagtctggggacattttcctaagtggctcaatggctctctacttcgaattggacctgggaaattcgagtttgggaaggataagtacaatcattggtttgatgggatggcgctgcttcaccagttcagaatggcaaagggcacagtgacatacaggagcaagtttctacagagtgatacatataaggccaacagtgctaaaaaccgaattgtgatctcagaatttggcacactggctctcccggatccatgcaagaatgtttttgaacgtttcatgtccaggtttgagctgcctggtaaagctgcagccatgactgacaatactaatgtcaactatgtgcggtacaagggtgattactacctctgcactgagaccaactttatgaataaagtggacattgaaactctggaaaaaacagaaaaggtagattggagcaaatttattgctgtgaatggagcaactgcacatcctcattatgacctggatggaacagcatacaatatggggaactcctttgggccatatggtttctcctataaggttattcgggttcctccagagaaggtggaccttggggagacaatccatggagtccaggtgatatgttctattgcttctacagagaaagggaaaccttcttactaccatagctttggaatgacaaggaactatataattttcattgaacaacctctaaagatgaacctgtggaaaattgccacttctaaaattcggggaaaggccttttcagatgggataagctgggaaccccagtgtaatacgcggtttcatgtggtggaaaaacgcactggacagctccttccagggagatactacagcaaaccttttgttacatttcatcaaatcaatgcctttgaggaccagggctgtgttataattgatttgtgctgtcaagataatggaagaaccctagaagtttaccagttacagaatctcaggaaggctggggaagggcttgatcaggtccataattcagcagccaaatctttccctcgaaggtttgttttgcctttaaatgtcagtttgaatgcccctgagggagacaacctgagtccattgtcctatacttcagccagtgctgtgaaacaggctgatggaacgatctggtgctctcatgaaaatctacatcaggaggacctagaaaaggaaggaggcattgaatttcctcagatctactatgatcgattcagtggcaaaaagtatcatttcttttatggctgtggctttcggcatttagtgggggattctctgatcaaggttgatgtggtttggagagaagatggcttttatccctcagaacctgtttttgttccagcaccaggaaccaatgaagaagatggtggggttattctttctgtggtgatcactcccaaccagaatgaaagcaattttatcctagttttggatgccaagaactttgaagagctgggccgagcagaggtacctgtgcagatgccttatgggttccatggtaccttcatacccatctgatgggacaaccacaaggtctggaaactaggtttaaaataagtgtgcacttggacataaagactggagaaataaacactgaggactccaaaaggggggcaaggaggaagaggggcaggggttaaaaagctacctattgaatactatgttccctatttgggtgatgggttcgttagaagtccaaacctcagcagcacacaatatactcatgtaacaagcctgcacatgtaccccagaatctaaaataaaaataaaaagaaaaac

SEQ ID NO: 111494 - DNA, 877 bp, Homo sapiens
  Payload ID: 1831
  Gene Symbol: BCO2
  Gene Name: beta-carotene oxygenase 2
  ENST ID: ENST00000527939
  CDS Start-End: 57-209
ctcaaaactgccagtgtgagaggatttggaaatcactggatctgctcaatacaaaaatgttttttcgagtctttctccattttatcaggagtcattctgccactgcagtggatttccttcctgtgatggtgcaccggctcccaggtacaatcattggtttgatgggatggcgctgcttcaccagttcagaatggcaaagggcacagtgacatacaggagcaagtttctacagagtgatacatataaggccaacagtgctaaaaaccgaattgtgatctcagaatttggcacactggctctcccggatccatgcaagaatgtttttgaacgtttcatgtccaggtttgagctgcctggtaaagctgcagccatgactgacaatactaatgtcaactatgtgcggtacaagggtgattactacctctgcactgagaccaactttatgaataaagtggacattgaaactctggaaaaaacagaaaaggtagattggagcaaatttattgctgtgaatggagcaactgcacatcctcattatgacctggatggaacagcatacaatatggggaactcctttgggccatatggtttctcctataaggttattcgggttcctccagagaaggtggaccttggggagacaatccatggagtccaggtgatatgttctattgcttctacagagaaagggaaaccttcttactaccatagctttggaatgacaaggaactatataattttcattgaacaacctctaaagatgaacctgtggaaaattgccacttctaaaattcggggaaaggccttttcagatgggataagctgggaaccccagtgtaatacgcggtttcatgtggtggaaaaacgcactggacag

SEQ ID NO: 111495 - DNA, 2493 bp, Homo sapiens
  Payload ID: 1831
  Gene Symbol: BCO2
  Gene Name: beta-carotene oxygenase 2
  Uniprot ID: Q9BYV7
  ENST ID: ENST00000531169
  CDS Start-End: 74-1711
gggaatgctgtgtttataaagcaaatgacatggcaactggatcttgaaggatgagttagttttcaaaaggtacatgggaaatactcctcagaaaaaagccgtctttgggcagtgtcggggtctgccatgtgttgcaccgctgctgaccacagtggaagaggctccacggggcatctctgctcgagtctggggacattttcctaagtggctcaatggctctctacttcgaattggacctgggaaattcgagtttgggaaggataagtacaatcattggtttgatgggatggcgctgcttcaccagttcagaatggcaaagggcacagtgacatacaggagcaagtttctacagagtgatacatataaggccaacagtgctaaaaaccgaattgtgatctcagaatttggcacactggctctcccggatccatgcaagaatgtttttgaacgtttcatgtccaggtttgagctgcctggtaaagctgcagccatgactgacaatactaatgtcaactatgtgcggtacaagggtgattactacctctgcactgagaccaactttatgaataaagtggacattgaaactctggaaaaaacagaaaaggtagattggagcaaatttattgctgtgaatggagcaactgcacatcctcattatgacctggatggaacagcatacaatatggggaactcctttgggccatatggtttctcctataaggttattcgggttcctccagagaaggtggaccttggggagacaatccatggagtccaggtgatatgttctattgcttctacagagaaagggaaaccttcttactaccatagctttggaatgacaaggaactatataattttcattgaacaacctctaaagatgaacctgtggaaaattgccacttctaaaattcggggaaaggccttttcagatgggataagctgggaaccccagtgtaatacgcggtttcatgtggtggaaaaacgcactggacagctccttccagggagatactacagcaaaccttttgttacatttcatcaaatcaatgcctttgaggaccagggctgtgttataattgatttgtgctgtcaagataatggaagaaccctagaagtttaccagttacagaatctcaggaaggctggggaagggcttgatcaggtccataattcagcagccaaatctttccctcgaaggtttgttttgcctttaaatgtcagtttgaatgcccctgagggagacaacctgagtccattgtcctatacttcagccagtgctgtgaaacaggctgatggaacgatctggtgctctcatgaaaatctacatcaggaggacctagaaaaggaaggaggcattgaatttcctcagatctactatgatcgattcagtggcaaaaagtatcatttcttttatggctgtggctttcggcatttagtgggggattctctgatcaaggttgatgtggtgaataagacactgaaggtttggagagaagatggcttttatccctcagaacctgtttttgttccagcaccaggaaccaatgaagaagatggtggggttattctttctgtggtgatcactcccaaccagaatgaaagcaattttatcctagttttggatgccaagaactttgaagagctgggccgagcagaggtacctgtgcagatgccttatgggttccatggtaccttcatacccatctgatgggacaaccacaaggaaacttttccaagcctgttattaatcagtgacttgtcctgcttttcatcatatacagtgatgatttttctcatatagagtggagctgtcctctccagtacctggaacaatgccagccacatagtagatgcccaataaatatttagtgaaagagtgaatggaagcaagaggtgacatgattctgggaactgtgtgtagtttggttactcttgtgagtagatgtgaggaaacaagatcctttcactctcaatgtgtctacactggcagaagaattgctaatatgtgtttaggggtgtctgtattcacactatgccaacccagagtaataaatgggtccatacatgcttgtggataagaatggctttagaatttcccttagtaaggatcattacacaacagtccaaaggactgttgtcacgtggtcctatttgtgctctcaaattcttgctctttaaaaatttttttttaaagaaacggtattaatcctaagcaaaaagaacaaagctggaggcatcacgctacctgacttcgaactatactacaagcctacagtaacaaaaacagcatggtatgggtaccaaaacagatatatacaccaatggaacacaacagaggcctcagaaataacaccacacatctacaaccatctgatcttagacaaacctgataaaaacaagaaatggggaaaggattccctattaaataaatggtgctgggaaaactggctagccatatgtagaaagctgaaactggatcccttccttaca

SEQ ID NO: 111496 - DNA, 635 bp, Homo sapiens
  Payload ID: 1831
  Gene Symbol: BCO2
  Gene Name: beta-carotene oxygenase 2
  ENST ID: ENST00000532612
  CDS Start-End: 1-635
tggtgcaccggctcccagttttcaaaaggtacatgggaaatactcctcagaaaaaagccgtctttgggcagtgtcggggtctgccatgtgttgcaccgctgctgaccacagtggaagaggctccacggggcatctctgctcgagtctggggacattttcctaagtggctcaatggctctctacttcgaattggacctgggaaattcgagtttgggaaggataagtacaatcattggtttgatgggatggcgctgcttcaccagttcagaatggcaaagggcacagtgacatacaggagcaagtttctacagagtgatacatataaggccaacagtgctaaaaaccgaattgtgatctcagaatttggcacactggctctcccggatccatgcaagaatgtttttgaacgtttcatgtccaggtttgagctgcctggtaaagctgcaggtttctcctataaggttattcgggttcctccagagaaggtggaccttggggagacaatccatggagtccaggtgatatgttctattgcttctacagagaaagggaaaccttcttactaccatagctttggaatgacaaggaactatataattttcattgaacaacctctaaagatgaacctgtggaaa

SEQ ID NO: 111497 - DNA, 2816 bp, Homo sapiens
  Payload ID: 1832
  Gene Symbol: BTC
  Gene Name: betacellulin
  Uniprot ID: P35070
  ENST ID: ENST00000395743
  CDS Start-End: 362-898
ctggtccgagggcagcccgaatatgtccctgggtgtgggtatgggtgtggggcaatttgggtgggagcagcgtggaggctcccaggaccaagtcctgcgcctctttggcggggtgtgtgcaggaggaggggggataaataggaggctccctcctcccggcgacattcacggagccggccggcctcccgccctgggtgtttccctgccttgtagccagggtgccagcctgggaagtagtttcgtttccttctgcctccgggattagtttccaggcaccctctcaggcgcccgaggcccgggaagggggcgaagaaggagggagacttgtctaggggctgcccggcccggcagagcggggttgatggaccgggccgcccggtgcagcggcgccagctccctgccactgctcctggcccttgccctgggtctagtgatccttcactgtgtggtggcagatgggaattccaccagaagtcctgaaactaatggcctcctctgtggagaccctgaggaaaactgtgcagctaccaccacacaatcaaagcggaaaggccacttctctaggtgccccaagcaatacaagcattactgcatcaaagggagatgccgcttcgtggtggccgagcagacgccctcctgtgtctgtgatgaaggctacattggagcaaggtgtgagagagttgacttgttttacctaagaggagacagaggacagattctggtgatttgtttgatagcagttatggtagtttttattattttggtcatcggtgtctgcacatgctgtcaccctcttcggaaacgtcgtaaaagaaagaagaaagaagaagaaatggaaactctgggtaaagatataactcctatcaatgaagatattgaagagacaaatattgcttaaaaggctatgaagttacctccaggttggtggcaagctgcaaagtgccttgctcatttgaaaatggacagaatgtgtctcaggaaaacagctagtagacatgaattttaaataatgtatttactttttatttgcaactttagtttgtgttattattttttaataagaacattaattatatgtatattgtctagtaattgggaaaaaagcaactggttaggtagcaacaacagaagggaaatttcaataacctttcacttaagtattgtcaccaggattactagtcaaacaaaaaagaaaagtagaaaggaggttaggtcttaggaattgaattaataataaagctaccatttatcaagcatttaccatgtgctaataagtttgaaatatattatttcctttattcctttcagcaatccatgagatagctattataatcctcatttcctacatatggaaacagggccaaagaagtcaagtcaaataatctaatccagatttagagagttggagattggtagagacagactagaaatcaagatttatctaaatcaaaatctatgctcttaaccatcatttttgttagtctgaatcggtgcaacctaactcaataatataacccaaggttttatactgaactgtgttttggtatgattgtgagatgtcaagaccgtcttcccacaggcacacagaatgagaaatcctggcctatattgctgttaccatcatgctttctatagaattggcttttattatgtttctttgctcctttataaattctcaatgatgtgactacatttttacattattaaagcaaatagattggccccataactagggaaatgaatagagatggaaaagtaaatgcttggcattccttaagccctgggtaagtgtttatgctcaataaaatataaataatattactgaaagaggctgtttatatgggagtaatggtcagtgacaacactggagagaccaggtagggaccggttgtgaccatatcctcatttatgttcttgatgacagcatatatgattgctctcaggtaaattttgatgcagtaaattcatgaccataacatctattacttgggaccatcttgccaagtgctcctttactccatgaaatatttaataaacactgctttaaacctggaaaagcacaatctacatttagtgaatatttcatagaatatttaactttttacattgattacgtggttcacttacaaaaatcgatggaagatgccccccaacttgtgcctgtcggccaagcagcttcttttttagaatctttgcaaattttactttgcaatgtagattccatagtgaagtggagaattcagacaaatgctgaaatcgcatattaccttctagcatccatggtgttttgagtgaagctggggctgtacttacatatgatacataaatagctcccctattagtaaaagctaagccaaacaactgataattttcaaaatctattttttctcctgatttaatggtcatacttgaaacacaattatatccaactgatccatgttgtatatgccttattttcaaaagtctcatttaagctcattcatgccctttctcttatgtagtcttcttcgatacgaaaggagcttggaataaatatccattagagcttttaaaaacacaaaacaatgctttaatgtttcttttttcctggactgagtttggctgaccaacaaaatctctcaagccattttgttttgatcctaaaatatcaatggtggctctcgaaatttggtagatctgatatcaagaaagaatttcaaagatttttatatcttttcaaaatgtattttatagttgctttgcatacactaaataactttgtttatgtaaactgtcaatattatcatgtaataaaataaatttatttttaaaacaaa

SEQ ID NO: 111498 - DNA, 624 bp, Homo sapiens
  Payload ID: 1832
  Gene Symbol: BTC
  Gene Name: betacellulin
  ENST ID: ENST00000512743
  CDS Start-End: 1-326
gtctagtgatccttcactgtgtggtggcagatgggaattccaccagaagtcctgaaactaatggcctcctctgtggagaccctgaggaaaactgtgcagctaccaccacacaatcaaagcggaaaggccacttctctaggtgccccaagcaatacaagcattactgcatcaaagggagatgccgcttcgtggtggccgagcagacgccctcctgtgtccctcttcggaaacgtcgtaaaagaaagaagaaagaagaagaaatggaaactctgggtaaagatataactcctatcaatgaagatattgaagagacaaatattgcttaaaaggctatgaagttacctccaggttggtggcaagctgcaaagtgccttgctcatttgaaaatggacagaatgtgtctcaggaaaacagctagtagacatgaattttaaataatgtatttactttttatttgcaactttagtttgtgttattattttttaataagaacattaattatatgtatattgtctagtaattgggaaaaaagcaactggttaggtagcaacaacagaagggaaatttcaataacctttcacttaagtattgtcaccaggattactagtcaaacaaaaaagaaaa

SEQ ID NO: 111499 - DNA, 10729 bp, Homo sapiens
  Payload ID: 1833
  Gene Symbol: CRYBG3
  Gene Name: beta-gamma crystallin domain containing 3
  Uniprot ID: Q68DQ2
  ENST ID: ENST00000389622
  CDS Start-End: 168-9080
gtcgcgtccgcacttctcctgcccgagagagactgagccgcgctggcagctcgcgtcgagtcggtctgccctagccgcatcccgcggcgcccggtcgggctccgggcaccaggcaacacctaggccgttcccttcagacagccccgggccagcggccccctcgggaaatgtccagcggccgcagaaggggcagcgccccctggcacagcttctcccggttcttcgctccccgaagtccttcccgggacaaggaagaggaagaggaggagaggccggggacgagcccgcctccagctccaggccggtccgctgccagtgttgaaaatgagcccatgagcacaagtcagaaaaaggaaaatgtactttcatcagaagcagtaaagattcgccaaagtgaggacaaaaggaaccatgctgagaagccagtcactcttccagtgcaggaagatcccaaaaaggcatatgatctttccagttccacttcagataccaaaataggagaaagtgacagacagccaaaagaaagcttttttcagtttcttggtaacttattcaatatctcggggaaatcatctctaggtgaagctaagcagtcttctttcaaagatgaccaggataaaactgagaaggatttacaaaatcccagtgaccatcatgaagacgggatcaaaagggagagagagattttcagtggctccctaagaacccagacacatccaacagaagaacaagactctaactcatccgaactctcagatgctttttctttggatacaacacaagacagtgaccaagaaaccactaatttgctaaaacaaatcgatggtaaaccagagaagccttcagtaacatatgcaacatatcgaggcccaagacacattgggaaatatttaaagcaacagacaggcttggcaactgtgaataccttggacagagaaaatgaaagttctgactctagtacaaacagacacattgaccctggaagtgagattgaggctggggtactgccactgttgttatcagctagtacagactcatctatgaaaggaaatctacttgaaggcccattagaagactctgattgtagcaaaacaagtttcaacaaggaaaattctttgacaaataacccagaactgcagaatattgcctcttccaataatcttttaaataaaaatgcttgggggagtattgagagaaataggtcatccccttcttctgtgactaactccagctacgatggagaatctgactcacagcaccatttaagttgtgaaccggtttctcagactaacagaaatttggtatgttcagcattgttaacaggaagtaaccatcgcaaagtcccttgcagcccagattttcagagagtaactacaacagaaaatacgataaaagaaaacagcactgtgatgagtaataggacattggtgcaaagagaggagcttgttgagcctcagggccctgctatttctgatttctcttgtagtaaatctgatgggagtgacactactgagcaggaaagtacaaatttgccaagtccaaataaatcaattaggcatgaacatctgcagttgccagagagtgagtgttctgacaagcaaaccatagatagctcatcaaagcaagctgccactcacaccaatatcattgctcttcagagacatgctgtgacagacacagaatttgtaaatgaaggaaagagattgtctgcccaagactcacagaaaaatgtggctgttagagaaatcaggcgagaaacagaaagtgcctcagctggtgaatccatagcttcaagtcatgtaaaagctccagaagataaaattgagtcattacccaaagatactgaccaatactttgaaaccaaagccaaaaagcttgattttaggtcacatgataaaattcctcatattagaatgaataaaaaagacctggcctctttaaattacatcagtgaatcagcagttgtagcaagcttaggaaatgaaaatgcacctgagttgaaatttgaacttaatagaagtcacatttcagaaactcctcttgactctgagagtcctcaacaagctgaagtatcacctgatgctaaaacatctcttagccttgactgtaaaaaactaaatttcagtatttcacctcctacctttgtttctggagttgggatgctgagcaagttggatattcctgatttaatgaatgagggttctcctgtgcccattgaaactgggaatgtcaacattgttggtatttcctatcagcctaggaagtgtaaagaagaaaatgtgaaaaaccatgttgaggctgcaggcaggaagagtcctcctccttccttttgccttgaatatacatctgcaatttttgaattcaaagaagttctttctaatagtgaaaaatgccaggttcttccaggttctgaagccagtggccctcacttaactgggttggagctattgagctttgactctggaaacctctctaaggattgcagttccattttatctcaagaccctaatagagtagagttagtgtcttcaaacactaaagcaaatatgagcataatagagaagtctgattctctttccttggaagccaaaactgctaacattgtatcaaaagctgaaattgatggtcagaacaatgttcttgtggagtcacattctggaagaggaaaaactatatccttgtccaaggtatctctttcaaaagtggagcccagaaacatttctcaggataaaatgtcttcttttccattgaaaattacccatgttccagaaaagcctattttgtcagaattaacctttctagaagttgaacagggcaaacgttttcaatcaattaatcataatgagataggagagaaatgttcagatgctggccttaaagagaattgccaagctgagctttctcctgctgcctccaaatatgaagataagccagaaccagaggtagatgccttaggctctcctcctgctcttcttaaaagtaatatatcttggattttaccacctattcatgatgaaaaaatcagtaggcaaatggcgcagaattgtgaagctcacacttgtgtgtttcatcaatctttggatatttgtgggactaaaaagatttctggtcactcagaaatggcggaactcagcttaactaatatttcccctaaattccaagaaactggcagcatgaaagtaaattcaccttttctggattctgattccagtttggaaaaaaattcttctgcatctgaggactcaagcttccttaaagtaccttctgtgctgaaattggaaaagaaatcctcatcttacagaaagaaagagaacatccattttttaaatggtggtattgatagtgtgtcatcttcctctagttaccctgaagaagttagcatgatagtaaattcacataagccccaaaataatttggattctatacaagttaccaaagatctcacacatgaaggtacctctgtaactaacctgttgtaccctactacctcttatttggaatttgaaacgtctgtctcaattgggacagaagtaaccccatttcaggaacattttgggatttatactgggaagatatccattgatttcccaactgctgcccaatttgacaatctcgtggaagcagagactggagcagttgctgggcctgcagcgtcagttaacagctcaggccaacagtgttctgaagcctctgctgagcacatagaagccaggagaagagcacatgaccaacttttggacctcaaaagtagtttactcaaaaaggccgatacattgattggtgagatttttaattctgtcagggaagaactaaaattcaaacacacagtgagtacctgccaggagcatatagccatagaaggtataatgaatctgggtaccctgaaagaagacatctctgagaaaaacccatcagaagtgacactaacagaaatacaacagacagagggtttggaagagcaaggcatggaaaacatgtcagaagtcaaagagaagccctgtgtttcaccaacagttggtgagaagaatcttcttgttgatcctaatagtatgaatgtatcttgtttgttagaagataaagctagggaattagtcaatgagattatttatgtagcccaagaaaaattgagaaatgatacttttgaagatactgaggatacttgggattctgaacttcaggctaatacttcaaaaattctgaacagtgatagtgttaagccacatgatgtagttagagagttcttggtttcagaacagccagtaaatcaaagcacacaaattagtgaaaataaagtattaaatgaattcttctccctaagtaacttagctagtggcacagagtcaattaagggaggagaaattgttctctaccaaaaatccctattttctggaaatggatctggactgtctgatagtataaatttgcaggaatcagatacggttttactagctgaagacatgtcacataaacggttagatgatagggtaaaaacacatttatttcgcagtgaggactgtaatgagacaatggaaatagagaatgtggataataacaaaactgagacagaggacagaagaactcttgtattaaatttcaaatggcctccacttgtgaatgatgacatccatgcacctggtacatctaaaagcagtttgtctgatagccttgtatgtatatctgaaaaaaacttgccaggacacagtaaaaacacacctcttgcaatgtcagatgtagggaaagtacacaagaaggataatgaaataaatatagggaaaattgaacttataccttccatgttagaaacagggaaaacaaacaaaaaggatgctgaattgaatattctgaaatatgaggcagtccctcctatgatagaaatgggaagaatacataaaatggatgctgaattgaatgtcacgaaaactgagccaaaagctaatgtttttaaaatgggagaagtataccaaatggatgccgagagctgtattgaaaaaactgagggatcagctgtcattttaggaatggaaaaagcttataagatgaaggatactgaaggggatattggcaaaattgaggtgatacctatgatgccagaagtgaaaaatatccaccaaaaggatgctgaaggggatattgtaaagactgagatgacacctgttacagtagacatggaaaatatttaccaaacgcatgctgaaggggatattggcaagactgggacgatagccttgtcagaagtggaaaatatccaccaaaaaggtggtgaagggattagtgaaaaggctgaagtgatacccgttacattagcaatggaaaatacttaccaaaaggatgctgaaggggatattggaaaggctgaagtgatgcctgtgaggttagaaatggaaaatacttacccaaaggatactgaaagagacggtggcaaaactgaggtgatgccccttgcattagaggtagtaaatacttaccaaaaaaatgccaaaggttttaccgggaacactgaagggtctgtgttgaaaatggaagctacttaccgaaagactgctgaagaggtcattaagaatactgaaatagtaccgtgtgtgttaaaagtgaaggaagcacacgagacagcacctgcccccttagaaatggaaaaagcatgcaagagagatgttaaagagactattggagcaactgtgtccacaccctctgtgatagaaatggaaaaaatatccccagaagatcgtggtgagaatattgggaaacacaaagtgttacccgcagtggtagacattgagaaaatacatggaacaggactagaattgaccactaaacaaggggaggccatgcttcctgcatttgaaagtaaaacaccacaagagtatgctgaagggagtgttgaagaaacaaaggaagagcctacagaaataaaggaaggcttgatagcacatgaaaatagacttcctacatatttcaggggatatgaatcccctacattaagtaaggattatgagggctacccagccccagcaatgccagattttcaacctggggataccacagtaagactagacaaaagaatgtctcttactgcaatatatgacaagaggagagagacagattatagtgacaaaggatataatttagcttttgtttctcaagatgaacaagaaaattcttcctttactatattatacgaagagccccttcaagaggaggacaagtatgcttccgcagaagcaagacaaacacagtctgtcttgtttcatgatacgtccgctgacagcatgcctgttctggcatgtgaaaggtctgagagtagaactgaccttgtccatcactttgaaaaaggtactaaattaggtgagacatttgatagtgatagttcagaaatgttcttatcagtggaggccaaaaggtacaaaatttatcctttagcattgtctcccatttatgaggatgacagctcacaggaggacattctatctagtgaggtttcacctggtcaccatggccccaggaaatcaagagacagtgaaaaccagtcctcttctgttttatcccttctccagtcagtgtcagaacgtttaaagatgaattttgatgaagatgacagagaggcagctgatgaggaagaagaggaggaggaggcagcagtattgcataaaggagatctgagagctggaagtggggagcgtgttaccttccagttgccagatccttccatcacattttaccctgatgaccaggagagcgttggaatttctaagaattcatatgtgatgccaaatgaacctactacctccaatctgcaagttggtctgtggccagaaaagacctcgtttctccagaaatctgaccttacttctaaactacattcttctttaaagagtgcttatcatcagtatctgcagacttcccaaagtcattcctcagaaaaaggagccagatttggtggaatttttcaggaaccagtgtcaaaatatttccgtgttcaagacagcccaggcagattgagcccatttatagagaatgttgacaaacaaactctgagatgtaacccaagacctgggaagatggttatctatgatctccatgaaagtacatataaacaagaagtctactgtaatattcctgatgctacatcatggtcttttccaaatggagttctaataaaagttgtaaggggctgctggattttatatgagaaaccacatttccgaggtcagaaatgtgtgctagaagaaggggaaaaggtgttaaatcgtgactggattcttcagaacagaaggcatccacaaagaaactttatattgggttctctcaaacgtgtcttaaaggactgcagcattccagaaatagagcttttcccacaatctgacccagcctgttgtcctgtctacatacagagagcagtccccaatttggaagaactgaatatctccaaatctgtgtccttcactgtgaagtcaggagtttggcttgcctacccagatattaattttaagggacaagctacagttctggaggaagaccatgggctctttgagatttctacagcagaaatgaaatcattacatccgcttcaaatgggtggactgaaagtggaaatgcccatgaacttaaaggttattatttatgaaaaacctcacttccatggacaggctaaagagtttagtgaacatatagattctgttcctaattttttgaaaaataatggagattttcacagaattggatcaattcgtgtcattggtggagtgtgggttgcctatgaaaaagaacattttaaaggccagcagtttctgcttgaagaaggagactttgaagacagtaatgcttgtggtgcattaagtagccctatcttgtctttccggtacttacaagctaattttatagaatcttctgtcacactatttgaatctgacctagaaagtgggaagtttattgacattacaaatcaggaaatttctgatttggaagaaattggctttggcagtaaaacaagatccattcatgttaaaagtggagtatgggttgcctaccagcaaaagttcttctgtggagaacaatacattttagaaaaagggaaatacaaatgcttttttgactggggaggatcaaataatataatcatgtcgatacggccaatccaactggaaccacttgggataaatgaacctccgcatttgctcaaagcattcagcaaaccagggttccaaggtgaatgtatagattttacagaagaaacttctgatttgacttcactcatgccatgttcttttaaagttcttcgaggttgctggctcctctattaccaagaagacatgtttgttaatcactgtgtgttagaagaaggcctctatgctgaccttacttcctgcggttgcccagcatctaaagtcaaatctctcaagcccattgactatgtttttgaagaaccctccatcagcctttttgctctggagcattgtgagggaagagagttacatctagaagaggctgtgaactctgttctgaacaaggacctacacttctacacccagtctgtgtgggtaaaaagtggactatggatagcttatgaaggatccaatttcttgggaagacaaatcctactcaggcctaatgagatcccaaactggacagcattcagcagatggaaaacaattggttccctccgtcctatgaagcagcctgcagtgtacatcagaataaagaaccgtgcccagggtgaatatctgacagtcactggaagtctagcagacaccagggcaacatctgtgtgcatttctccctatagtggaaagaatactcagatctggtactactgccgaggactctttaaatccaaggccagtgatacatgtcttgatgtgattggtggccgggacacacctggagctaaagtagctctatggactgaacatgggcaattcaggcagaagtggagactgaataaaaatggaactatcagctcttatctcagtgatcaacttgtccttgatgttaaaggaggaaattattgtgacaagactcatgtaattgtaaatcagcccctggagggagaagaaacacagaaatgggacattgaaatattgtgagagaatcaacatccctagaaagatccctagaaagagcaaagaaggaaacacatctgtcattgtcttgtggacgtggaaaggaagctactgtcctcacactcctggatcactgagcagaatgaacattttctccagcctctgagactatcgctcttaaccatggaaaagctcaaaatattcttgccattactcagtgttcctataaagaaaatattatgatatcttggaaaggttctattcctgatctccagctgtggtgagcaagtttcctgaagtgtttattttctctcatatccaccaaacgtgaatcctgttcctgatggcccgttattggacactggtgatgctattatcctgtattatttattaatatcctacctagatgcttgtatgagtacaaagcataaagaaacagatttctataggtcaagtcatacttttgcaaacagatgagtaattttttagcaacacctgaaaatatactaaactttcctagataaactttaaggtttctatactgaggcttttataatgaacgcacctcgttaagtatttatacttgtaactaaccccaggcagggacctcagctttgttaggaataaggcacaagaagtattttctgtagctattgtttcctcagtccttcaaactaaaaaagtacaaataaataacctatggccaaacttgcactgttacgtgttaaccaagacatccctttaggtgacaagactctataacagtggttacctgtctccatgttgacacttcatcctagatttaaggagaggcatcaatttttttttttttttgcctcaagagaaatttcaaatatccaaattaaaacacagtagcatttgaaccttgaccttaccatctctttaagtaaacgtggagttgatttctctactaaataacagaaacctcagtttttcactcccattgtaagtaacttttatttaagtaagtaaaatcaggtaggaaatcacctttgacttagcttccagtagtcattaccaccttttactgcacaattcacaagcatgttttcctggtgaattggactgaaaattacattttgacaactttttttccttttatccccaacttttgccagaaagcagaaaaatgctctatttttataaagaaagattaaattctccaatgatattttaaaaaatatcaacctacatgcactttagaatgtaaaataacaatgactattttaaactcgaagacccactattttgagtattttttatagactttaaatactgggtttttttcctccttcaatctcaggcttttctccatcttttaagcagcctctgtaactcccttttgtccataggtgttgcgtgcctctcatctgtggggaagtattatttaataaaatttatgttacaggataactttattttaatgggcatgggcttgtctatacacaaaggtatgtatattttcattataaaaaaccagtttaaaattttttcttattttaattgtttgaaatttttctagagccaaagaagctctttaaagaagttgtttcttccaaagaacaaagccaggttaatgacattcaattctaaatgatacattggaattgtgccttttctaccacactggattaaataaacttgtcaaaata

SEQ ID NO: 111500 - DNA, 578 bp, Homo sapiens
  Payload ID: 1833
  Gene Symbol: CRYBG3
  Gene Name: beta-gamma crystallin domain containing 3
  ENST ID: ENST00000495403
  CDS Start-End: 186-578
aattgacccattccatggaaaaagatagttagaatcctactttactccaaacacaaaaataagttccagatggattaataacaagctaaatgtgaaaagcaaactttacaacttagaagaaaatataggaatctaccctgatgatactgcagtaggatggatttcttcaaacagaaaaagcacaaatgaataagaaaaaggtttttgaagaaccctccatcagcctttttgctctggagcattgtgagggaagagagttacatctagaagaggctgtgaactctgttctgaacaaggacctacacttctacacccagtctgtgtgggtaaaaagtggactatggatagcttatgaaggatccaatttcttgggaagacaaatcctactcaggcctaatgagatcccaaactggacagcattcagcagatggaaaacaattggttccctccgtcctatgaagcagcctgcagtgtacatcagaataaagaaccgtgcccagggtgaatatctgacagtcactggaagtctagcagacaccagggcaacatctgtgtgcatttctccctatagtggaaag

SEQ ID NO: 111501 - DNA, 2502 bp, Homo sapiens
  Payload ID: 1834
  Gene Symbol: BHMT
  Gene Name: betaine--homocysteine S-methyltransferase
  Uniprot ID: Q93088
  ENST ID: ENST00000274353
  CDS Start-End: 108-1328
gtataaagaggcaggctgcggactcggagcagctcggggctgcgcagcgggaaggctcgcctagtcggtccgcatccgtgtcgaccacctgtctggacaccacgaagatgccacccgttgggggcaaaaaggccaagaagggcatcctagaacgtttaaatgctggagagattgtgattggagatggagggtttgtctttgcactggagaagaggggctacgtaaaggcaggaccctggactcctgaagctgctgtggagcacccagaagcagttcgccagcttcatcgagagttcctcagagctggctcaaacgtcatgcagaccttcaccttctatgcgagtgaagacaagctggagaacaggggcaactatgtcttagagaagatatctgggcaggaagtcaatgaagctgcttgcgacatcgcccgacaagtggctgatgaaggagatgctttggtagcaggaggagtgagtcagacaccttcataccttagctgcaagagtgaaactgaagtcaaaaaagtatttctgcaacagttagaggtctttatgaagaagaacgtggacttcttgattgcagagtattttgaacacgttgaagaagctgtgtgggcagttgaaaccttgatagcatccggtaaacctgtggcagcaaccatgtgcattggcccagaaggagatttgcatggcgtgccccccggcgagtgtgcagtgcgcctggtgaaagcaggagcatccatcattggtgtgaactgccactttgaccccaccattagtttaaaaacagtgaagctcatgaaggagggcttggaggctgcccgactgaaagctcacctgatgagccagcccttggcttaccacactcctgactgcaacaagcagggattcatcgatctcccagaattcccatttggactggaacccagagttgccaccagatgggatattcaaaaatacgccagagaggcctacaacctgggggtcaggtacattggcgggtgctgtggatttgagccctaccacatcagggcaattgcagaggagctggccccagaaaggggctttttgccaccagcttcagaaaaacatggcagctggggaagtggtttggacatgcacaccaaaccctgggttagagcaagggccaggaaggaatactgggagaatcttcggatagcctcaggccggccatacaacccttcaatgtcaaagccagatggctggggagtgaccaaaggaacagccgagctgatgcagcagaaagaagccacaactgagcagcagctgaaagagctctttgaaaaacaaaaattcaaatcacagtagcctcgatagaagctatttttgatgaatttctaggtgtttgggtcacagttcctacaaatacggaaaagggggttaaaaagcagtgctttcatgaatgccatcctacacatattattgctattacctgaacaaaatagaattacaaatagcacttgataattttaaagtatgttttagaaattttcttaggagcaaaataagtacaaagtaaatcttgaacaggttcactaagcacccaccctgtgaaaagtattatggaaatcactgctgcacaggaaaagtaattcagatgttaatgccacttgaagaagttggtaggctagcaaagaggatgagacatgaactgtcataaaggactcagcaaccagccagggacagataaagcgctatggaaaggggcttccaagttcttttgaacatgacccttagtaacaaacacaatttatataatgacccagcaaaacacatcacatcttactgtcgaaattaaatgtgtgatccatcctagtattttctgttccattccttttcattctatttcatttataaaacatgctagttgagacttttcaaatggatttttatgacccactactgggtttggatccacagtttgaaaaatattgctacaagacacttaaggagaccatcctgtttaagtttattcttataagtaggtcagtcatatgagacctgatcaataaatatccaatacccagagtcctgctctcagagttcttctgtttcgtgacccacttttctaccagtaaaagacatagaccaatggggaggaggggaggagagatggatatttcagccctctccatcctagtcaacactggatccacctagtgcctctgggccataaggctgagcagagtgagcttgtattagttggtagcttttaaaaaatataataagaaaaaagtagagattctccaaactctagcctggtttcctagattgagaactatgatatttttctctgataatttaatatctactctcctacaaaagctcaagcctgaagatacaagactattagaagaaacatgactaccctcagtgtattagaaaagaggtcatgcagctttctaaacattattgaattgtttgagctgttttgaaattgtaattcttttcagctattaaaaagaagagcaatgagactata

SEQ ID NO: 111502 - DNA, 1207 bp, Homo sapiens
  Payload ID: 1834
  Gene Symbol: BHMT
  Gene Name: betaine--homocysteine S-methyltransferase
  ENST ID: ENST00000524080
  CDS Start-End: 78-839
agctcggggctgcgcagcgggaaggctcgcctagtcggtccgcatccgtgtcgaccacctgtctggacaccacgaagatgccacccgttgggggcaaaaaggccaagaagggcatcctagaacgtttaaatgctggagagattgtgattggagatggagggtttgtctttgcactggagaagaggggctacgtaaaggcaggaccctggactcctgaagctgctgtggagcacccagaagcaggagcatccatcattggtgtgaactgccactttgaccccaccattagtttaaaaacagtgaagctcatgaaggagggcttggaggctgcccgactgaaagctcacctgatgagccagcccttggcttaccacactcctgactgcaacaagcagggattcatcgatctcccagaattcccatttggactggaacccagagttgccaccagatgggatattcaaaaatacgccagagaggcctacaacctgggggtcaggtacattggcgggtgctgtggatttgagccctaccacatcagggcaattgcagaggagctggccccagaaaggggctttttgccaccagcttcagaaaaacatggcagctggggaagtggtttggacatgcacaccaaaccctgggttagagcaagggccaggaaggaatactgggagaatcttcggatagcctcaggccggccatacaacccttcaatgtcaaagccagatggctggggagtgaccaaaggaacagccgagctgatgcagcagaaagaagccacaactgagcagcagctgaaagagctctttgaaaaacaaaaattcaaatcacagtagcctcgatagaagctatttttgatgaatttctaggtgtttgggtcacagttcctacaaatacggaaaagggggttaaaaagcagtgctttcatgaatgccatcctacacatattattgctattacctgaacaaaatagaattacaaatagcacttgataattttaaagtatgttttagaaattttcttaggagcaaaataagtacaaagtaaatcttgaacaggttcactaagcacccaccctgtgaaaagtattatggaaatcactgctgcacaggaaaagtaattcagatgttaatgccacttgaagaagttggtaggctagcaaagaggatgagacatgaactgtcataaaggactcagcaaccag

SEQ ID NO: 111503 - DNA, 2050 bp, Homo sapiens
  Payload ID: 1835
  Gene Symbol: BHMT2
  Gene Name: betaine--homocysteine S-methyltransferase 2
  Uniprot ID: Q9H2M3
  ENST ID: ENST00000255192
  CDS Start-End: 67-1158
gggctgggggcgggctcctagacggccgcgcgcccgggaacccggcgcccacagagccgcggcaccatggcacctgctggacgcccgggggccaagaaggggattttggagcgcctggagagtggggaggttgtgattggagatggcagctttctcattactctggagaagagaggctatgtgaaggctgggctctggactccagaggcagtgatagaacacccagacgcagttcgtcaacttcacatggaattcttgagagcaggatcaaatgtcatgcagacttttaccttttctgccagtgaggacaatatggaaagcaagtgggaagatgtaaatgctgctgcctgtgacctcgccagggaagtggctggcaaaggtgatgctttggtagcaggggggatctgccagacatcaatatacaaataccagaaggatgaagctagaattaaaaaactttttcgacaacagctagaagtttttgcctggaaaaatgtggacttcttgattgcagagtattttgagcacgttgaagaagctgtgtgggctgtggaagtcttaaaagaatcagatagacccgtggcagttaccatgtgcataggcccagagggagacatgcatgatataacccccggagaatgtgctgtgaggctggtgaaggcaggggcttccatcgttggcgtgaactgccgctttgggcccgacaccagcttgaagacgatggagctcatgaaggagggtcttgagtgggcagggctgaaagcgcacctcatggtgcagcctctggggttccacgcgcctgactgtggcaaagaggggtttgtggatctcccagaatatccctttggactggagtccagagttgccaccagatgggatattcaaaaatacgccagagaggcctacaacctgggggtcaggtacattggcgggtgctgtggatttgagccctaccacatcagggcaattgcagaggagctggccccagaaaggggctttttgccaccagcttcagaaaaacacggcagctggggaagtggtttggacatgcacaccaaaccctggattagagcaagggctcgaagggagtattgggagaatctgctgccagcttcaggcagacctttctgtccttcgctgtcaaagccagacttctaaggagtagtgaaagaaaaccctgaaataatcgaacaggaaaaagttgccctcaagcctgacctggaaccgttcctcaccttcatcctcaccatgccctgctatctccagctgctgagcagctgaggtgctgcagccccttcccttccagcccacaagtgtgtgcatattgagctcctgctgtggttaagcactgcaacagactctaccagagatgcaaagagaagcgagagaggcaccttgttctccaagaacttactgtccaatcatgctgtggtgcattcctttgaagatcatgaagaatagccaaacttgtctttgagggtgaatttgacactttaaaataatcagaagtcactgagacccaaagctagtgaataattcaagtgactaagctagatacttgaggatgatagagcaacactaaactaaagcaatgagtctgctttttttaatgatttatacaatgactccaaaggcaatcccaaagaaaagatgtaaagaatgttttgagcaatggtagcattattgaaataaatgtttaactatccaaagtgattactttcaaagatgatttttacttaaagatattaggtctggccaggcgaagtgactcacacctgcaatcccagcactttgggaggccgaggcgggcggatcacctgaggtcagcagttcaagaccagcctgaccaacatggtgaaaccctgtctctaccaaaatacaaaaattagccgggcatgatggcgggtgcctgtaatcccagctactcgggaggctgaggcaggagaatcgcttgaacccaggaggcggagcttgcagtgagccgagatcaggccattgcacttcagcctgggtgacagagtgagactccatctcaaaaaaaaaaaaaaaa

SEQ ID NO: 111504 - DNA, 524 bp, Homo sapiens
  Payload ID: 1835
  Gene Symbol: BHMT2
  Gene Name: betaine--homocysteine S-methyltransferase 2
  ENST ID: ENST00000518666
  CDS Start-End: 320-524
acagagccgcggcaccatggcacctgctggacgcccgggggccaagaagtgtctttggggcctctactgttacaacaccaagattatcacacactaatccatgtgaatgtgtacctgggagttaaggtgttaatgggaaggaactaatctcacctctctcctcagctagcaggggattttggagcgcctggagagtggggaggttgtgattggagatggcagctttctcattactctggagaagagaggctatgtgaaggctgggctctggactccagaggcagtgatagaacacccagacgcagttcgtcaacttcacatggaattcttgagagcaggatcaaatgtcatgcagacttttaccttttctgccagtgaggacaatatggaaagcaagtgggaagatgtaaatgctgctgcctgtgacctcgccagggaagtggctggcaaaggtgatgctttggtagcaggggggatctgccagacatcaatatacaaataccagaaggatgaagctagaatta

SEQ ID NO: 111505 - DNA, 578 bp, Homo sapiens
  Payload ID: 1835
  Gene Symbol: BHMT2
  Gene Name: betaine--homocysteine S-methyltransferase 2
  ENST ID: ENST00000519743
  CDS Start-End: 15-191
agagccgcggcaccatggcacctgctggacgcccgggggccaagaaggggattttggagcgcctggagagtggggaggttgtgattggagatggcagtgatagaacacccagacgcagttcgtcaacttcacatggaattcttgagagcaggatcaaatgtcatgcagacttttaccttttctgccagtgaggacaatatggaaagcaagtgggaagatgtaaatgctgctgcctgtgacctcgccagggaagtggctggcaaaggtgatgctttggtagcaggggggatctgccagacatcaatatacaaataccagaaggatgaagctagaattaaaaaactttttcgacaacagctagaagtttttgcctggaaaaatgtggacttcttgattgcagagtattttgagcacgttgaagaagctgtgtgggctgtggaagtcttaaaagaatcagatagacccgtggcagttaccatgtgcataggcccagagggagacatgcatgatataacccccggagaatgtgctgtgaggctggtgaaggcaggggcttccatcgttggcgtgaactgccg

SEQ ID NO: 111506 - DNA, 1537 bp, Homo sapiens
  Payload ID: 1835
  Gene Symbol: BHMT2
  Gene Name: betaine--homocysteine S-methyltransferase 2
  Uniprot ID: Q9H2M3
  ENST ID: ENST00000521567
  CDS Start-End: 17-916
acagagccgcggcaccatggcacctgctggacgcccgggggccaagaaggggattttggagcgcctggagagtggggaggttgtgattggagatggcagctttctcattactctggagaagagaggctatgtgaaggctgggctctggactccagaggcagtgatagaacacccagacgcagttcgtcaacttcacatggaattcttgagagcaggatcaaatgtcatgcagacttttaccttttctgccagtgaggacaatatggaaagcaagtattttgagcacgttgaagaagctgtgtgggctgtggaagtcttaaaagaatcagatagacccgtggcagttaccatgtgcataggcccagagggagacatgcatgatataacccccggagaatgtgctgtgaggctggtgaaggcaggggcttccatcgttggcgtgaactgccgctttgggcccgacaccagcttgaagacgatggagctcatgaaggagggtcttgagtgggcagggctgaaagcgcacctcatggtgcagcctctggggttccacgcgcctgactgtggcaaagaggggtttgtggatctcccagaatatccctttggactggagtccagagttgccaccagatgggatattcaaaaatacgccagagaggcctacaacctgggggtcaggtacattggcgggtgctgtggatttgagccctaccacatcagggcaattgcagaggagctggccccagaaaggggctttttgccaccagcttcagaaaaacacggcagctggggaagtggtttggacatgcacaccaaaccctggattagagcaagggctcgaagggagtattgggagaatctgctgccagcttcaggcagacctttctgtccttcgctgtcaaagccagacttctaaggagtagtgaaagaaaaccctgaaataatcgaacaggaaaaagttgccctcaagcctgacctggaaccgttcctcaccttcatcctcaccatgccctgctatctccagctgctgagcagctgaggtgctgcagccccttcccttccagcccacaagtgtgtgcatattgagctcctgctgtggttaagcactgcaacagactctaccagagatgcaaagagaagcgagagaggcaccttgttctccaagaacttactgtccaatcatgctgtggtgcattcctttgaagatcatgaagaatagccaaacttgtctttgagggtgaatttgacactttaaaataatcagaagtcactgagacccaaagctagtgaataattcaagtgactaagctagatacttgaggatgatagagcaacactaaactaaagcaatgagtctgctttttttaatgatttatacaatgactccaaaggcaatcccaaagaaaagatgtaaagaatgttttgagcaatggtagcattattgaaataaatgtttaactatccaaagtgattactttcaaagatgatttttacttaaagatattaggtctggccaggcgaagtgactcacacctgc

SEQ ID NO: 111507 - DNA, 6326 bp, Homo sapiens
  Payload ID: 1836
  Gene Symbol: BACE1
  Gene Name: beta-site APP-cleaving enzyme 1
  Uniprot ID: P56817
  ENST ID: ENST00000313005
  CDS Start-End: 462-1967
acaagtctttccgcctccccagcccgcccgggagctgcgagccgcgagctggattatggtggcctgagcagccaacgcagccgcaggagcccggagcccttgcccctgcccgcgccgccgcccgccggggggaccagggaagccgccaccggcccgccatgcccgcccctcccagccccgccgggagcccgcgcccgctgcccaggctggccgccgccgtgccgatgtagcgggctccggatcccagcctctcccctgctcccgtgctctgcggatctcccctgaccgctctccacagcccggacccgggggctggcccagggccctgcaggccctggcgtcctgatgcccccaagctccctctcctgagaagccaccagcaccacccagacttgggggcaggcgccagggacggacgtgggccagtgcgagcccagagggcccgaaggccggggcccaccatggcccaagccctgccctggctcctgctgtggatgggcgcgggagtgctgcctgcccacggcacccagcacggcatccggctgcccctgcgcagcggcctggggggcgcccccctggggctgcggctgccccgggagaccgacgaagagcccgaggagcccggccggaggggcagctttgtggagatggtggacaacctgaggggcaagtcggggcagggctactacgtggagatgaccgtgggcagccccccgcagacgctcaacatcctggtggatacaggcagcagtaactttgcagtgggtgctgccccccaccccttcctgcatcgctactaccagaggcagctgtccagcacataccgggacctccggaagggtgtgtatgtgccctacacccagggcaagtgggaaggggagctgggcaccgacctggtaagcatcccccatggccccaacgtcactgtgcgtgccaacattgctgccatcactgaatcagacaagttcttcatcaacggctccaactgggaaggcatcctggggctggcctatgctgagattgccaggcctgacgactccctggagcctttctttgactctctggtaaagcagacccacgttcccaacctcttctccctgcagctttgtggtgctggcttccccctcaaccagtctgaagtgctggcctctgtcggagggagcatgatcattggaggtatcgaccactcgctgtacacaggcagtctctggtatacacccatccggcgggagtggtattatgaggtgatcattgtgcgggtggagatcaatggacaggatctgaaaatggactgcaaggagtacaactatgacaagagcattgtggacagtggcaccaccaaccttcgtttgcccaagaaagtgtttgaagctgcagtcaaatccatcaaggcagcctcctccacggagaagttccctgatggtttctggctaggagagcagctggtgtgctggcaagcaggcaccaccccttggaacattttcccagtcatctcactctacctaatgggtgaggttaccaaccagtccttccgcatcaccatccttccgcagcaatacctgcggccagtggaagatgtggccacgtcccaagacgactgttacaagtttgccatctcacagtcatccacgggcactgttatgggagctgttatcatggagggcttctacgttgtctttgatcgggcccgaaaacgaattggctttgctgtcagcgcttgccatgtgcacgatgagttcaggacggcagcggtggaaggcccttttgtcaccttggacatggaagactgtggctacaacattccacagacagatgagtcaaccctcatgaccatagcctatgtcatggctgccatctgcgccctcttcatgctgccactctgcctcatggtgtgtcagtggcgctgcctccgctgcctgcgccagcagcatgatgactttgctgatgacatctccctgctgaagtgaggaggcccatgggcagaagatagagattcccctggaccacacctccgtggttcactttggtcacaagtaggagacacagatggcacctgtggccagagcacctcaggaccctccccacccaccaaatgcctctgccttgatggagaaggaaaaggctggcaaggtgggttccagggactgtacctgtaggaaacagaaaagagaagaaagaagcactctgctggcgggaatactcttggtcacctcaaatttaagtcgggaaattctgctgcttgaaacttcagccctgaacctttgtccaccattcctttaaattctccaacccaaagtattcttcttttcttagtttcagaagtactggcatcacacgcaggttaccttggcgtgtgtccctgtggtaccctggcagagaagagaccaagcttgtttccctgctggccaaagtcagtaggagaggatgcacagtttgctatttgctttagagacagggactgtataaacaagcctaacattggtgcaaagattgcctcttgaattaaaaaaaaaaactagattgactatttatacaaatgggggcggctggaaagaggagaaggagagggagtacaaagacagggaatagtgggatcaaagctaggaaaggcagaaacacaaccactcaccagtcctagttttagacctcatctccaagatagcatcccatctcagaagatgggtgttgttttcaatgttttcttttctgtggttgcagcctgaccaaaagtgagatgggaagggcttatctagccaaagagctcttttttagctctcttaaatgaagtgcccactaagaagttccacttaacacatgaatttctgccatattaatttcattgtctctatctgaaccaccctttattctacatatgataggcagcactgaaatatcctaaccccctaagctccaggtgccctgtgggagagcaactggactatagcagggctgggctctgtcttcctggtcataggctcactctttcccccaaatcttcctctggagctttgcagccaaggtgctaaaaggaataggtaggagacctcttctatctaatccttaaaagcataatgttgaacattcattcaacagctgatgccctataacccctgcctggatttcttcctattaggctataagaagtagcaagatctttacataattcagagtggtttcattgccttcctaccctctctaatggcccctccatttatttgactaaagcatcacacagtggcactagcattataccaagagtatgagaaatacagtgctttatggctctaacattactgccttcagtatcaaggctgcctggagaaaggatggcagcctcagggcttccttatgtcctccaccacaagagctccttgatgaaggtcatctttttcccctatcctgttcttcccctccccgctcctaatggtacgtgggtacccaggctggttcttgggctaggtagtggggaccaagttcattacctccctatcagttctagcatagtaaactacggtaccagtgttagtgggaagagctgggttttcctagtatacccactgcatcctactcctacctggtcaacccgctgcttccaggtatgggacctgctaagtgtggaattacctgataagggagagggaaatacaaggagggcctctggtgttcctggcctcagccagctgcccacaagccataaaccaataaaacaagaatactgagtcagttttttatctgggttctcttcattcccactgcacttggtgctgctttggctgactgggaacaccccataactacagagtctgacaggaagactggagactgtccacttctagctcggaacttactgtgtaaataaactttcagaactgctaccatgaagtgaaaatgccacattttgctttataatttctacccatgttgggaaaaactggctttttcccagccctttccagggcataaaactcaaccccttcgatagcaagtcccatcagcctattatttttttaaagaaaacttgcacttgtttttctttttacagttacttccttcctgccccaaaattataaactctaagtgtaaaaaaaagtcttaacaacagcttcttgcttgtaaaaatatgtattatacatctgtatttttaaattctgctcctgaaaaatgactgtcccattctccactcactgcatttggggcctttcccattggtctgcatgtcttttatcattgcaggccagtggacagagggagaagggagaacaggggtcgccaacacttgtgttgctttctgactgatcctgaacaagaaagagtaacactgaggcgctcgctcccatgcacaactctccaaaacacttatcctcctgcaagagtgggctttccagggtctttactgggaagcagttaagccccctcctcaccccttccttttttctttctttactcctttggcttcaaaggattttggaaaagaaacaatatgctttacactcattttcaatttctaaatttgcaggggatactgaaaaatacggcaggtggcctaaggctgctgtaaagttgaggggagaggaaatcttaagattacaagataaaaaacgaatcccctaaacaaaaagaacaatagaactggtcttccattttgccacctttcctgttcatgacagctactaacctggagacagtaacatttcattaaccaaagaaagtgggtcacctgacctctgaagagctgagtactcaggccactccaatcaccctacaagatgccaaggaggtcccaggaagtccagctccttaaactgacgctagtcaataaacctgggcaagtgaggcaagagaaatgaggaagaatccatctgtgaggtgataggcaaggatgaaagacaaagaaggaaaagagtatcaaaggcagaaaggagatcatttagttgggtctgaaaggaaaagtctttgctatccgacatgtactgctagtacctgtaagcattttaggtcccagaatggaaaaaaaaatcagctattggtaatataataatgtcctttccctggagtcagtttttttaaaaagttaactcttagtttttacttgtttaattctaaaagagaagggagctgaggccattccctgtaggagtaaagataaaaggataggaaaagattcaaagctctaatagagtcacagctttcccaggtataaaacctaaaattaagaagtacaataagcagaggtggaaaatgatctagttcctgatagctacccacagagcaagtgatttataaatttgaaatccaaactactttcttaatatcactttggtctccatttttcccaggacaggaaatatgtccccccctaactttcttgcttcaaaaattaaaatccagcatcccaagatcattctacaagtaattttgcacagacatctcctcaccccagtgcctgtctggagctcacccaaggtcaccaaacaacttggttgtgaaccaactgccttaaccttctgggggagggggattagctagactaggagaccagaagtgaatgggaaagggtgaggacttcacaatgttggcctgtcagagcttgattagaagccaagacagtggcagcaaaggaagacttggcccaggaaaaacctgtgggttgtgctaatttctgtccagaaaatagggtggacagaagcttgtggggtacatggaggaattgggacctggttatgttgttattctcggactgtgaattttggtgatgtaaaacagaatattctgtaaacctaatgtctgtataaataatgagcgttaacacagtaaaatattcaataagaagtcaaactactagggttacttttttttcctcaatcagagtctcattttatccatttggagtagagtggctaaaacaatactgaggcttctggaggctttcggtaagcaaggcatctggttggacagtgggtgagcaccaggctttaaatctgcatacatgagccttaaggaaatggactagaggctgagccaaaccaaagcagaatggccttagagcaacagcaggttcctaggtggtttttatattgtatttgaaaacagccctgggcagggatatcataatttcaaggccaaactaaacatcatcttccctacaatctgcatcccccaaaggaattgcaagatgagggggaacagactgtttctgcataatatacatagtttcatttacgaacattggaatacagactttctatacacacattacctatataataaaaatgtacatggcatgagtatatgtcactgtataaatatagagttttagaaatcttgaa

SEQ ID NO: 111508 - DNA, 1333 bp, Homo sapiens
  Payload ID: 1836
  Gene Symbol: BACE1
  Gene Name: beta-site APP-cleaving enzyme 1
  Uniprot ID: P56817
  ENST ID: ENST00000428381
  CDS Start-End: 4-1302
accatggcccaagccctgccctggctcctgctgtggatgggcgcgggagtgctgcctgcccacggcacccagcacggcatccggctgcccctgcgcagcggcctggggggcgcccccctggggctgcggctgccccgggagaccgacgaagagcccgaggagcccggccggaggggcagctttgtggagatggtggacaacctgaggggcaagtcggggcagggctactacgtggagatgaccgtgggcagccccccgcagacgctcaacatcctggtggatacaggcagcagtaactttgcagtgggtgctgccccccaccccttcctgcatcgctactaccagaggcagctgtccagcacataccgggacctccggaagggtgtgtatgtgccctacacccagggcaagtgggaaggggagctgggcaccgacctgctttgtggtgctggcttccccctcaaccagtctgaagtgctggcctctgtcggagggagcatgatcattggaggtatcgaccactcgctgtacacaggcagtctctggtatacacccatccggcgggagtggtattatgaggtgatcattgtgcgggtggagatcaatggacaggatctgaaaatggactgcaaggagtacaactatgacaagagcattgtggacagtggcaccaccaaccttcgtttgcccaagaaagtgtttgaagctgcagtcaaatccatcaaggcagcctcctccacggagaagttccctgatggtttctggctaggagagcagctggtgtgctggcaagcaggcaccaccccttggaacattttcccagtcatctcactctacctaatgggtgaggttaccaaccagtccttccgcatcaccatccttccgcagcaatacctgcggccagtggaagatgtggccacgtcccaagacgactgttacaagtttgccatctcacagtcatccacgggcactgttatgggagctgttatcatggagggcttctacgttgtctttgatcgggcccgaaaacgaattggctttgctgtcagcgcttgccatgtgcacgatgagttcaggacggcagcggtggaaggcccttttgtcaccttggacatggaagactgtggctacaacattccacagacagatgagtcaaccctcatgaccatagcctatgtcatggctgccatctgcgccctcttcatgctgccactctgcctcatggtgtgtcagtggcgctgcctccgctgcctgcgccagcagcatgatgactttgctgatgacatctccctgctgaagtgaggaggcccatgggcagaagatagagattccc

SEQ ID NO: 111509 - DNA, 1408 bp, Homo sapiens
  Payload ID: 1836
  Gene Symbol: BACE1
  Gene Name: beta-site APP-cleaving enzyme 1
  Uniprot ID: P56817
  ENST ID: ENST00000445823
  CDS Start-End: 4-1377
accatggcccaagccctgccctggctcctgctgtggatgggcgcgggagtgctgcctgcccacggcacccagcacggcatccggctgcccctgcgcagcggcctggggggcgcccccctggggctgcggctgccccgggagaccgacgaagagcccgaggagcccggccggaggggcagctttgtggagatggtggacaacctgaggggcaagtcggggcagggctactacgtggagatgaccgtgggcagccccccgcagacgctcaacatcctggtggatacaggcagcagtaactttgcagtgggtgctgccccccaccccttcctgcatcgctactaccagaggcagctgtccagcacataccgggacctccggaagggtgtgtatgtgccctacacccagggcaagtgggaaggggagctgggcaccgacctgcctgacgactccctggagcctttctttgactctctggtaaagcagacccacgttcccaacctcttctccctgcagctttgtggtgctggcttccccctcaaccagtctgaagtgctggcctctgtcggagggagcatgatcattggaggtatcgaccactcgctgtacacaggcagtctctggtatacacccatccggcgggagtggtattatgaggtgatcattgtgcgggtggagatcaatggacaggatctgaaaatggactgcaaggagtacaactatgacaagagcattgtggacagtggcaccaccaaccttcgtttgcccaagaaagtgtttgaagctgcagtcaaatccatcaaggcagcctcctccacggagaagttccctgatggtttctggctaggagagcagctggtgtgctggcaagcaggcaccaccccttggaacattttcccagtcatctcactctacctaatgggtgaggttaccaaccagtccttccgcatcaccatccttccgcagcaatacctgcggccagtggaagatgtggccacgtcccaagacgactgttacaagtttgccatctcacagtcatccacgggcactgttatgggagctgttatcatggagggcttctacgttgtctttgatcgggcccgaaaacgaattggctttgctgtcagcgcttgccatgtgcacgatgagttcaggacggcagcggtggaaggcccttttgtcaccttggacatggaagactgtggctacaacattccacagacagatgagtcaaccctcatgaccatagcctatgtcatggctgccatctgcgccctcttcatgctgccactctgcctcatggtgtgtcagtggcgctgcctccgctgcctgcgccagcagcatgatgactttgctgatgacatctccctgctgaagtgaggaggcccatgggcagaagatagagattccc

SEQ ID NO: 111510 - DNA, 1236 bp, Homo sapiens
  Payload ID: 1836
  Gene Symbol: BACE1
  Gene Name: beta-site APP-cleaving enzyme 1
  Uniprot ID: P56817
  ENST ID: ENST00000510630
  CDS Start-End: 27-1157
aatagataggagagcaagcctcaccaatggttcccttcatctatctgcaagcccactttacactctgttctgggtggtccagcacataccgggacctccggaagggtgtgtatgtgccctacacccagggcaagtgggaaggggagctgggcaccgacctggtaagcatcccccatggccccaacgtcactgtgcgtgccaacattgctgccatcactgaatcagacaagttcttcatcaacggctccaactgggaaggcatcctggggctggcctatgctgagattgccaggctttgtggtgctggcttccccctcaaccagtctgaagtgctggcctctgtcggagggagcatgatcattggaggtatcgaccactcgctgtacacaggcagtctctggtatacacccatccggcgggagtggtattatgaggtgatcattgtgcgggtggagatcaatggacaggatctgaaaatggactgcaaggagtacaactatgacaagagcattgtggacagtggcaccaccaaccttcgtttgcccaagaaagtgtttgaagctgcagtcaaatccatcaaggcagcctcctccacggagaagttccctgatggtttctggctaggagagcagctggtgtgctggcaagcaggcaccaccccttggaacattttcccagtcatctcactctacctaatgggtgaggttaccaaccagtccttccgcatcaccatccttccgcagcaatacctgcggccagtggaagatgtggccacgtcccaagacgactgttacaagtttgccatctcacagtcatccacgggcactgttatgggagctgttatcatggagggcttctacgttgtctttgatcgggcccgaaaacgaattggctttgctgtcagcgcttgccatgtgcacgatgagttcaggacggcagcggtggaaggcccttttgtcaccttggacatggaagactgtggctacaacattccacagacagatgagtcaaccctcatgaccatagcctatgtcatggctgccatctgcgccctcttcatgctgccactctgcctcatggtgtgtcagtggcgctgcctccgctgcctgcgccagcagcatgatgactttgctgatgacatctccctgctgaagtgaggaggcccatgggcagaagatagagattcccctggaccacacctccgtggttcactttggtcacaagtaggagacacag

SEQ ID NO: 111511 - DNA, 1465 bp, Homo sapiens
  Payload ID: 1836
  Gene Symbol: BACE1
  Gene Name: beta-site APP-cleaving enzyme 1
  Uniprot ID: P56817
  ENST ID: ENST00000513780
  CDS Start-End: 4-1434
accatggcccaagccctgccctggctcctgctgtggatgggcgcgggagtgctgcctgcccacggcacccagcacggcatccggctgcccctgcgcagcggcctggggggcgcccccctggggctgcggctgccccgggagaccgacgaagagcccgaggagcccggccggaggggcagctttgtggagatggtggacaacctgaggggcaagtcggggcagggctactacgtggagatgaccgtgggcagccccccgcagacgctcaacatcctggtggatacaggcagcagtaactttgcagtgggtgctgccccccaccccttcctgcatcgctactaccagaggcagctgtccagcacataccgggacctccggaagggtgtgtatgtgccctacacccagggcaagtgggaaggggagctgggcaccgacctggtaagcatcccccatggccccaacgtcactgtgcgtgccaacattgctgccatcactgaatcagacaagttcttcatcaacggctccaactgggaaggcatcctggggctggcctatgctgagattgccaggctttgtggtgctggcttccccctcaaccagtctgaagtgctggcctctgtcggagggagcatgatcattggaggtatcgaccactcgctgtacacaggcagtctctggtatacacccatccggcgggagtggtattatgaggtgatcattgtgcgggtggagatcaatggacaggatctgaaaatggactgcaaggagtacaactatgacaagagcattgtggacagtggcaccaccaaccttcgtttgcccaagaaagtgtttgaagctgcagtcaaatccatcaaggcagcctcctccacggagaagttccctgatggtttctggctaggagagcagctggtgtgctggcaagcaggcaccaccccttggaacattttcccagtcatctcactctacctaatgggtgaggttaccaaccagtccttccgcatcaccatccttccgcagcaatacctgcggccagtggaagatgtggccacgtcccaagacgactgttacaagtttgccatctcacagtcatccacgggcactgttatgggagctgttatcatggagggcttctacgttgtctttgatcgggcccgaaaacgaattggctttgctgtcagcgcttgccatgtgcacgatgagttcaggacggcagcggtggaaggcccttttgtcaccttggacatggaagactgtggctacaacattccacagacagatgagtcaaccctcatgaccatagcctatgtcatggctgccatctgcgccctcttcatgctgccactctgcctcatggtgtgtcagtggcgctgcctccgctgcctgcgccagcagcatgatgactttgctgatgacatctccctgctgaagtgaggaggcccatgggcagaagatagagattccc

SEQ ID NO: 111512 - DNA, 4083 bp, Homo sapiens
  Payload ID: 1836
  Gene Symbol: BACE1
  Gene Name: beta-site APP-cleaving enzyme 1
  ENST ID: ENST00000528053
  CDS Start-End: 465-1868
gccacaagtctttccgcctccccagcccgcccgggagctgcgagccgcgagctggattatggtggcctgagcagccaacgcagccgcaggagcccggagcccttgcccctgcccgcgccgccgcccgccggggggaccagggaagccgccaccggcccgccatgcccgcccctcccagccccgccgggagcccgcgcccgctgcccaggctggccgccgccgtgccgatgtagcgggctccggatcccagcctctcccctgctcccgtgctctgcggatctcccctgaccgctctccacagcccggacccgggggctggcccagggccctgcaggccctggcgtcctgatgcccccaagctccctctcctgagaagccaccagcaccacccagacttgggggcaggcgccagggacggacgtgggccagtgcgagcccagagggcccgaaggccggggcccaccatggcccaagccctgccctggctcctgctgtggatgggcgcgggagtgctgcctgcccacggcacccagcacggcatccggctgcccctgcgcagcggcctggggggcgcccccctggggctgcggctgccccgggagaccgacgaagagcccgaggagcccggccggaggggcagctttgtggagatggtggacaacctgaggggcaagtcggggcagggctactacgtggagatgaccgtgggcagccccccgcagacgctcaacatcctggtggatacaggcagcagtaactttgcagtgggtgctgccccccaccccttcctgcatcgctactaccagaggcagctgtccagcacataccgggacctccggaagggtgtgtatgtgccctacacccagggcaagtgggaaggggagctgggcaccgacctggtaagcatcccccatggccccaacgtcactgtgcgtgccaacattgctgccatcactgaatcagacaagttcttcatcaacggctccaactgggaaggcatcctggggctggcctatgctgagattgccaggcctgacgactccctggagcctttctttgactctctggtaaagcagacccacgttcccaacctcttctccctgcagctttgtggtgctggcttccccctcaaccagtctgaagtgctggcctctgtcggagggagcatgatcattggaggtatcgaccactcgctgtacacaggcagtctctggtatacacccatccggcgggagtggtattatgaggtgatcattgtgcgggtggagatcaatggacaggatctgaaaatggactgcaaggagacggagaagttccctgatggtttctggctaggagagcagctggtgtgctggcaagcaggcaccaccccttggaacattttcccagtcatctcactctacctaatgggtgaggttaccaaccagtccttccgcatcaccatccttccgcagcaatacctgcggccagtggaagatgtggccacgtcccaagacgactgttacaagtttgccatctcacagtcatccacgggcactgttatgggagctgttatcatggagggcttctacgttgtctttgatcgggcccgaaaacgaattggctttgctgtcagcgcttgccatgtgcacgatgagttcaggacggcagcggtggaaggcccttttgtcaccttggacatggaagactgtggctacaacattccacagacagatgagtcaaccctcatgaccatagcctatgtcatggctgccatctgcgccctcttcatgctgccactctgcctcatggtgtgtcagtggcgctgcctccgctgcctgcgccagcagcatgatgactttgctgatgacatctccctgctgaagtgaggaggcccatgggcagaagatagagattcccctggaccacacctccgtggttcactttggtcacaagtaggagacacagatggcacctgtggccagagcacctcaggaccctccccacccaccaaatgcctctgccttgatggagaaggaaaaggctggcaaggtgggttccagggactgtacctgtaggaaacagaaaagagaagaaagaagcactctgctggcgggaatactcttggtcacctcaaatttaagtcgggaaattctgctgcttgaaacttcagccctgaacctttgtccaccattcctttaaattctccaacccaaagtattcttcttttcttagtttcagaagtactggcatcacacgcaggttaccttggcgtgtgtccctgtggtaccctggcagagaagagaccaagcttgtttccctgctggccaaagtcagtaggagaggatgcacagtttgctatttgctttagagacagggactgtataaacaagcctaacattggtgcaaagattgcctcttgaattaaaaaaaaaaactagattgactatttatacaaatgggggcggctggaaagaggagaaggagagggagtacaaagacagggaatagtgggatcaaagctaggaaaggcagaaacacaaccactcaccagtcctagttttagacctcatctccaagatagcatcccatctcagaagatgggtgttgttttcaatgttttcttttctgtggttgcagcctgaccaaaagtgagatgggaagggcttatctagccaaagagctcttttttagctctcttaaatgaagtgcccactaagaagttccacttaacacatgaatttctgccatattaatttcattgtctctatctgaaccaccctttattctacatatgataggcagcactgaaatatcctaaccccctaagctccaggtgccctgtgggagagcaactggactatagcagggctgggctctgtcttcctggtcataggctcactctttcccccaaatcttcctctggagctttgcagccaaggtgctaaaaggaataggtaggagacctcttctatctaatccttaaaagcataatgttgaacattcattcaacagctgatgccctataacccctgcctggatttcttcctattaggctataagaagtagcaagatctttacataattcagagtggtttcattgccttcctaccctctctaatggcccctccatttatttgactaaagcatcacacagtggcactagcattataccaagagtatgagaaatacagtgctttatggctctaacattactgccttcagtatcaaggctgcctggagaaaggatggcagcctcagggcttccttatgtcctccaccacaagagctccttgatgaaggtcatctttttcccctatcctgttcttcccctccccgctcctaatggtacgtgggtacccaggctggttcttgggctaggtagtggggaccaagttcattacctccctatcagttctagcatagtaaactacggtaccagtgttagtgggaagagctgggttttcctagtatacccactgcatcctactcctacctggtcaacccgctgcttccaggtatgggacctgctaagtgtggaattacctgataagggagagggaaatacaaggagggcctctggtgttcctggcctcagccagctgcccacaagccataaaccaataaaacaagaatactgagtcagttttttatctgggttctcttcattcccactgcacttggtgctgctttggctgactgggaacaccccataactacagagtctgacaggaagactggagactgtccacttctagctcggaacttactgtgtaaataaactttcagaactgctaccatgaagtgaaaatgccacattttgctttataatttctacccatgttgggaaaaactggctttttcccagccctttccagggcataaaactcaaccccttcgatagcaagtcccatcagcctattatttttttaaagaaaacttgcacttgtttttctttttacagttacttccttcctgccccaaaattataaactctaagtgtaaaaaaaagtcttaacaacagcttcttgcttgtaaaaatatgtattatacatctgtatttttaaattctgctcctgaaaaatgactgtcccattctccact

SEQ ID NO: 111513 - DNA, 611 bp, Homo sapiens
  Payload ID: 1836
  Gene Symbol: BACE1
  Gene Name: beta-site APP-cleaving enzyme 1
  ENST ID: ENST00000504995
  CDS Start-End: 491-611
ctggagctggtggctgcccagagaccggggagagagaccacgggtagagctcaacatcctggtggatacaggcagcagtaactttgcagtgggtgctgccccccaccccttcctgcatcgctactaccagaggcagctgtccagcacataccgggacctccggaagggtgtgtatgtgccctacacccagggcaagtgggaaggggagctgggcaccgacctggtaagcatcccccatggccccaacgtcactgtgcgtgccaacattgctgccatcactgaatcagacaagttcttcatcaacggctccaactgggaaggcatcctggggctggcctatgctgagattgccaggcctgacgactccctggagcctttctttgactctctggtaaagcagacccacgttcccaacctcttctccctgcagctttgtggtgctggcttccccctcaaccagtctgaagtgctggcctctgtcggagggagcatgatcattggaggtatcgaccactcgctgtacacaggcagtctctggtatacacccatccggcgggagtggtattatgaggtgatcattgtgcgggtggagatcaatggacaggatctga

SEQ ID NO: 111514 - DNA, 561 bp, Homo sapiens
  Payload ID: 1836
  Gene Symbol: BACE1
  Gene Name: beta-site APP-cleaving enzyme 1
  ENST ID: ENST00000510915
  CDS Start-End: 409-561
atgttttgctgagcagcctgaaagcagactctaggattcccctgagatgagataaggtccagcacataccgggacctccggaagggtgtgtatgtgccctacacccagggcaagtgggaaggggagctgggcaccgacctggtaagcatcccccatggccccaacgtcactgtgcgtgccaacattgctgccatcactgaatcagacaagttcttcatcaacggctccaactgggaaggcatcctggggctggcctatgctgagattgccaggcctgacgactccctggagcctttctttgactctctggtaaagcagacccacgttcccaacctcttctccctgcagctttgtggtgctggcttccccctcaaccagtctgaagtgctggcctctgtcggagggagcatgatcattggaggtatcgaccactcgctgtacacaggcagtctctggtatacacccatccggcgggagtggtattatgaggtgatcattgtgcgggtggagatcaatggacaggatctgaaaatggactgcaaggagtacaactatgacaag

SEQ ID NO: 111515 - DNA, 5155 bp, Homo sapiens
  Payload ID: 1836
  Gene Symbol: BACE1
  Gene Name: beta-site APP-cleaving enzyme 1
  Uniprot ID: P56817
  ENST ID: ENST00000392937
  CDS Start-End: 90-1295
acaatgcacaaagcccaggcttgttcttcacagggcctgagctcaagatctaggaatatgagcaatagataggagagcaagcctcaccaatggttcccttcatctatctgcaagcccactttacactctgttctgggtggtccagcacataccgggacctccggaagggtgtgtatgtgccctacacccagggcaagtgggaaggggagctgggcaccgacctggtaagcatcccccatggccccaacgtcactgtgcgtgccaacattgctgccatcactgaatcagacaagttcttcatcaacggctccaactgggaaggcatcctggggctggcctatgctgagattgccaggcctgacgactccctggagcctttctttgactctctggtaaagcagacccacgttcccaacctcttctccctgcagctttgtggtgctggcttccccctcaaccagtctgaagtgctggcctctgtcggagggagcatgatcattggaggtatcgaccactcgctgtacacaggcagtctctggtatacacccatccggcgggagtggtattatgaggtgatcattgtgcgggtggagatcaatggacaggatctgaaaatggactgcaaggagtacaactatgacaagagcattgtggacagtggcaccaccaaccttcgtttgcccaagaaagtgtttgaagctgcagtcaaatccatcaaggcagcctcctccacggagaagttccctgatggtttctggctaggagagcagctggtgtgctggcaagcaggcaccaccccttggaacattttcccagtcatctcactctacctaatgggtgaggttaccaaccagtccttccgcatcaccatccttccgcagcaatacctgcggccagtggaagatgtggccacgtcccaagacgactgttacaagtttgccatctcacagtcatccacgggcactgttatgggagctgttatcatggagggcttctacgttgtctttgatcgggcccgaaaacgaattggctttgctgtcagcgcttgccatgtgcacgatgagttcaggacggcagcggtggaaggcccttttgtcaccttggacatggaagactgtggctacaacattccacagacagatgagtcaaccctcatgaccatagcctatgtcatggctgccatctgcgccctcttcatgctgccactctgcctcatggtgtgtcagtggcgctgcctccgctgcctgcgccagcagcatgatgactttgctgatgacatctccctgctgaagtgaggaggcccatgggcagaagatagagattcccctggaccacacctccgtggttcactttggtcacaagtaggagacacagatggcacctgtggccagagcacctcaggaccctccccacccaccaaatgcctctgccttgatggagaaggaaaaggctggcaaggtgggttccagggactgtacctgtaggaaacagaaaagagaagaaagaagcactctgctggcgggaatactcttggtcacctcaaatttaagtcgggaaattctgctgcttgaaacttcagccctgaacctttgtccaccattcctttaaattctccaacccaaagtattcttcttttcttagtttcagaagtactggcatcacacgcaggttaccttggcgtgtgtccctgtggtaccctggcagagaagagaccaagcttgtttccctgctggccaaagtcagtaggagaggatgcacagtttgctatttgctttagagacagggactgtataaacaagcctaacattggtgcaaagattgcctcttgaattaaaaaaaaaaactagattgactatttatacaaatgggggcggctggaaagaggagaaggagagggagtacaaagacagggaatagtgggatcaaagctaggaaaggcagaaacacaaccactcaccagtcctagttttagacctcatctccaagatagcatcccatctcagaagatgggtgttgttttcaatgttttcttttctgtggttgcagcctgaccaaaagtgagatgggaagggcttatctagccaaagagctcttttttagctctcttaaatgaagtgcccactaagaagttccacttaacacatgaatttctgccatattaatttcattgtctctatctgaaccaccctttattctacatatgataggcagcactgaaatatcctaaccccctaagctccaggtgccctgtgggagagcaactggactatagcagggctgggctctgtcttcctggtcataggctcactctttcccccaaatcttcctctggagctttgcagccaaggtgctaaaaggaataggtaggagacctcttctatctaatccttaaaagcataatgttgaacattcattcaacagctgatgccctataacccctgcctggatttcttcctattaggctataagaagtagcaagatctttacataattcagagtggtttcattgccttcctaccctctctaatggcccctccatttatttgactaaagcatcacacagtggcactagcattataccaagagtatgagaaatacagtgctttatggctctaacattactgccttcagtatcaaggctgcctggagaaaggatggcagcctcagggcttccttatgtcctccaccacaagagctccttgatgaaggtcatctttttcccctatcctgttcttcccctccccgctcctaatggtacgtgggtacccaggctggttcttgggctaggtagtggggaccaagttcattacctccctatcagttctagcatagtaaactacggtaccagtgttagtgggaagagctgggttttcctagtatacccactgcatcctactcctacctggtcaacccgctgcttccaggtatgggacctgctaagtgtggaattacctgataagggagagggaaatacaaggagggcctctggtgttcctggcctcagccagctgcccacaagccataaaccaataaaacaagaatactgagtcagttttttatctgggttctcttcattcccactgcacttggtgctgctttggctgactgggaacaccccataactacagagtctgacaggaagactggagactgtccacttctagctcggaacttactgtgtaaataaactttcagaactgctaccatgaagtgaaaatgccacattttgctttataatttctacccatgttgggaaaaactggctttttcccagccctttccagggcataaaactcaaccccttcgatagcaagtcccatcagcctattatttttttaaagaaaacttgcacttgtttttctttttacagttacttccttcctgccccaaaattataaactctaagtgtaaaaaaaagtcttaacaacagcttcttgcttgtaaaaatatgtattatacatctgtatttttaaattctgctcctgaaaaatgactgtcccattctccactcactgcatttggggcctttcccattggtctgcatgtcttttatcattgcaggccagtggacagagggagaagggagaacaggggtcgccaacacttgtgttgctttctgactgatcctgaacaagaaagagtaacactgaggcgctcgctcccatgcacaactctccaaaacacttatcctcctgcaagagtgggctttccagggtctttactgggaagcagttaagccccctcctcaccccttccttttttctttctttactcctttggcttcaaaggattttggaaaagaaacaatatgctttacactcattttcaatttctaaatttgcaggggatactgaaaaatacggcaggtggcctaaggctgctgtaaagttgaggggagaggaaatcttaagattacaagataaaaaacgaatcccctaaacaaaaagaacaatagaactggtcttccattttgccacctttcctgttcatgacagctactaacctggagacagtaacatttcattaaccaaagaaagtgggtcacctgacctctgaagagctgagtactcaggccactccaatcaccctacaagatgccaaggaggtcccaggaagtccagctccttaaactgacgctagtcaataaacctgggcaagtgaggcaagagaaatgaggaagaatccatctgtgaggtgataggcaaggatgaaagacaaagaaggaaaagagtatcaaaggcagaaaggagatcatttagttgggtctgaaaggaaaagtctttgctatccgacatgtactgctagtacctgtaagcattttaggtcccagaatggaaaaaaaaatcagctattggtaatataataatgtcctttccctggagtcagtttttttaaaaagttaactcttagtttttacttgtttaattctaaaagagaagggagctgaggccattccctgtaggagtaaagataaaaggataggaaaagattcaaagctctaatagagtcacagctttcccaggtataaaacctaaaattaagaagtacaataagcagaggtggaaaatgatctagttcctgatagctacccacagagcaagtgatttataaatttgaaatccaaactactttcttaatatcactttggtctccatttttcccaggacaggaaatatgtccccccctaactttcttgcttcaaaaattaaaatccagcatcccaagatcattctacaagtaattttgcacagacatctcctcaccccagtgcctgtctggagctcacccaaggtcaccaaacaacttggttgtgaaccaactgccttaaccttctgggggagggggattagctagactaggagaccagaagtgaatgggaaagggtgaggacttcacaatgttggcctgtcagagcttgattagaagccaagacagtggcagcaaaggaagacttggcccaggaaaaacctgtgggttgtgctaatttctgtccagaaaatagggtggacagaagcttgtggggtacatggaggaattgggacctggttatgttgttattctcggactgtgaattttggtgatgtaaaacagaatattctgtaaacctaatgtctgtataaataatgagcgttaacacagtaaaatattcaataag

SEQ ID NO: 111516 - DNA, 8764 bp, Homo sapiens
  Payload ID: 1837
  Gene Symbol: BACE2
  Gene Name: beta-site APP-cleaving enzyme 2
  Uniprot ID: Q9Y5Z0
  ENST ID: ENST00000347667
  CDS Start-End: 464-1870
cgctggggcgctttccgaggaaattcgggactcgagtttcccggggaagaggcgcggcctgagcccggcgagggtggggagggcaggcgcaggtggaccccggcgccccccgagccccgctgtgaccttggccgcgggggaggggctgggccgctgcggggcagtcgcggccgccagagggggcagcggagaagaacttgcccaacttggcggcgcgggctggggcggctctgcgcctccgcgcccgcctccccggcctccgccttctcccctcccgcgagcctcctcccctcccgcgagcctcctcccctgggccctcctcccgtcctccccgccgccgccggtcccggtgcgcgcccatccctgcccgcagccccgcgcgccggccgagtcgctgagccgcggctgccggacgggacgggaccggctaggctgggcgcgccccccgggccccgccgtgggcatgggcgcactggcccgggcgctgctgctgcctctgctggcccagtggctcctgcgcgccgccccggagctggcccccgcgcccttcacgctgcccctccgggtggccgcggccacgaaccgcgtagttgcgcccaccccgggacccgggacccctgccgagcgccacgccgacggcttggcgctcgccctggagcctgccctggcgtcccccgcgggcgccgccaacttcttggccatggtagacaacctgcagggggactctggccgcggctactacctggagatgctgatcgggacccccccgcagaagctacagattctcgttgacactggaagcagtaactttgccgtggcaggaaccccgcactcctacatagacacgtactttgacacagagaggtctagcacataccgctccaagggctttgacgtcacagtgaagtacacacaaggaagctggacgggcttcgttggggaagacctcgtcaccatccccaaaggcttcaatacttcttttcttgtcaacattgccactatttttgaatcagagaatttctttttgcctgggattaaatggaatggaatacttggcctagcttatgccacacttgccaagccatcaagttctctggagaccttcttcgactccctggtgacacaagcaaacatccccaacgttttctccatgcagatgtgtggagccggcttgcccgttgctggatctgggaccaacggaggtagtcttgtcttgggtggaattgaaccaagtttgtataaaggagacatctggtatacccctattaaggaagagtggtactaccagatagaaattctgaaattggaaattggaggccaaagccttaatctggactgcagagagtataacgcagacaaggccatcgtggacagtggcaccacgctgctgcgcctgccccagaaggtgtttgatgcggtggtggaagctgtggcccgcgcatctctgctttacattcagcccatgatgggggccggcctgaattatgaatgttaccgattcggcatttccccatccacaaatgcgctggtgatcggtgccacggtgatggagggcttctacgtcatcttcgacagagcccagaagagggtgggcttcgcagcgagcccctgtgcagaaattgcaggtgctgcagtgtctgaaatttccgggcctttctcaacagaggatgtagccagcaactgtgtccccgctcagtctttgagcgagcccattttgtggattgtgtcctatgcgctcatgagcgtctgtggagccatcctccttgtcttaatcgtcctgctgctgctgccgttccggtgtcagcgtcgcccccgtgaccctgaggtcgtcaatgatgagtcctctctggtcagacatcgctggaaatgaatagccaggcctgacctcaagcaaccatgaactcagctattaagaaaatcacatttccagggcagcagccgggatcgatggtggcgctttctcctgtgcccacccgtcttcaatctctgttctgctcccagatgccttctagattcactgtcttttgattcttgattttcaagctttcaaatcctccctacttccaagaaaaataattaaaaaaaaaacttcattctaaaccaaaacagagtggattgggctgcaggctctatggggttcgttatgccaaagtgtctacatgtgccaccaacataaaacaaaaccaagccttggctcgttctcttctctcttcaatctctggaaaaataagtacatatagttgataacccctcttagcttacaggaagctttttgtattaattgcctttgaggttattttccgccagacctcaacctgggtcaaagtggtacaggaaggcttgcagtatgatggcaggagaatcagcctggggcctggggatgtaaccaagctgtacccttgagacctggaaccagagccacaggccccttttgtgggtttctctgtgctctgaatgggagccagaattcactaggaggtcatcaaccgatggtcctcacaagcctcttctgaagatggaaggccttttgcccgttgaggtagaggggaaggaaatctcctcttttgtacccaatacttatgttgtattgttggtgcgaaagtaaaaacactacctcttttgagactttgcccagggtcctgtgcctggatgggggtgcaggcagccttgaccacggctgttcccctcacccaaaagaattatcatcccaacagccaagacccaacaggtgctgaactgtgcatcaaccaggaagagttctatccccaagctggccactatcacatatgcttactcttgcttaaaattaataaatcatgttttgatgagaaaaaactattctatttcactagcttagttgtctctttttccaaatcttctctggaagtaggttggctattaccctgttgggaaacagggaaatggcctgatgcccctatttctgaccagctgtcagggaaggaagatgcaagatgtgcagaagacacaaggtaacgtctacttatccccgtgcttcgaaaccgtgtgtttccctttgcagaactggttagcctcaagcatacccatccaatcagcttaaattgttcagcagttgacctctgtgcttcttcctttgggggtgtttaatctttggtaacagttgtgcagtggtagccttatttcggggggcagtccctactttctgtcacttatcgaggcctttgccaaagaaaagtggaagccgtttccttgacatagccttatatgacctgatgtcattaggagaagagttaaaagacagtatcccctctctcctgcttgtgtgccaagttcagtgttccctttgcatttttttggggtgggttggctatattacagaattccaccaaaagtgctaagtgtcccctcctgcagaagtatcgtttgtattcacagtaggctacgtgtggatgtttcagccatctgctctgctccctgggtccccgggtcaccaccatactgagaaatataggactctgccaaagagacgtggaggccacgtcggcttgtcatggtgtcctggaagactctccagcagccagaagaaccttctgtgctgttttcactagagaagatttgagttgcagcctcttggaaagaacatgacggcacggaacgggaggagggggctcttgtatcagggcccgttgtcacatccgctctcagcttgttgaaaactcataatctcagaatgcatttcacacggagagatgtctggaagtccaattctcatcccattggctttttccgtggttgctgttttgtgggccgctttgcacaggagtgaagccaacacccctagattgtgccttcacccttgctgtgaaaaattcaaagccctgaaataagaggagggaatcgcagacatgccctgattagttttcctgcttatttcttcatacaggcatcttctgttccgttgtattgtgttaggtttcagaggcggggagcttcctcctgcagcagatgaacaggcatagttcttaaaatacaggaaagtaacaagtgaggtttccaggtagagtaggtgaatgaagtttgccgtcatgctctgtatttcatatcagatttctttatcttttcatatcgcatgtcattggatgtgacattttgatgaaaatactgaaactacaaaagcataacttcgcaacaagaatgagatagacaattgaatgtgggacatttttctggcatgtcttgctgctgagaatcggacttccagtcaaaaccctgttagtgacacccacctcctccagttatgcaaattgatgcttagcttggcaagctttcaaggaggtttgcttggaacaggaaaggaattaacaaccctttgagggtgtcatttttaccttgtaatacactgtggaaaattctggaagacggtccttgcctgaaaaggtgcaacttagcattaggttgttatcagaaaccttgtcaagtctgatgggaaatgaatagatgctgctttatttccttgataacttctttggaagtctgaaataaatcctgccttcagtaactgaaaccatttattaaaaatagcaagaaacaagatggggaccaattctatttttattcttgggaatttgaaagagccacaagtgattggtgtccgatctcccagcatatactgtacactattttgtatttctcctgaaccaaaaccaagtacttagcactcaagaaacagatgccctgtgtgtgaccgaggggagtgtttttccacaacaggttccacttctgaacacttggaaggaccttgcctgattcatggtgaaacacagaggttttggttggagataaatttggggtcagttactgttcaaaattgtgaaagtagttcccaggaagacagcattagtgactccgcagtgctttgggtaatagattttgaaaagcaattgtgagttggggattccatcatttcatttaagaggtgaagagggatttaattatttaatacgccgggtgcaaacttgttaaattcctctttccctgtccctgcttggtggagctgccacgtgtggttcagttctaagttctggactagtgccactcgatatcattgggaataaatcgttgttcaacagtctgttccacaaacaacagtaattgaatttcacagactttatcctgattagtggaaatcaaataatggagtggaatccccatgtgttttctcttgcacaaacttattagacttgattagaaaactgtttggaggaaaaacttgccagtaagttttttggttgttgttttgttttttttgaaaaacgacgcaacaccataaagtgtaaaattaggggttctggccaagagaggtactagatttttttaatgccgagaaaagtccatgccacagaagttattgtgtatgtctctagggagctttaagaatttcacgtttgaactttacagctgtttaccaattaaatggcaagctggaaaaatacattttgagaggggtagaaagaataagaatataattaaaagtatgctaacaaaataagcagtacatatttttttagaaaatgcagtttaggccaggcacggtagctcgtgcctgtaatcccagcactttgggaggccgaggcaggtggatcacctgaggtcaggagtttgagaccagcctggacaacatggtgaaaccccgtctctactaaaaatacaaaaaattagccaacgatggtgatgcctgtctgtaatcccagctactctggaggctgaggcaggagaatcgcttgaaccggggaggcagaggttgtagtgagccaagattgcgccactgcactccagcctgggcaacagagcaagactccgtctcaaaaaaggaaagaaaatgcagtttcattccagccatccttagatttcttttccccttaaagtggctgaatccattggagatgtgatttattttgcagatccaccaattccaaacttcaggaatattcaagcgggagtcatgtgtaagtgacagctttgacaaagagagactgtggctgggtggcccgggtgttgcccacgcggagcaaggattggttcattcaacggatggagagtacaggatggctgggacctgggaagttccagaatctgaaaagagggcagggcaagaaggagccagaagagaggtcccacccctcagttggcagtggggcacggaggtccgcatcagccaagaacgtccccaggatgccgtgggcacctcatttcaccccacgtttttggcacagtctactttttaggtattttgtaaaggaacttctcaggattgattatttgccagaggaacaattaggccaagagaaacttgcttgacagccatgtgtaaaacacgtctgtcctaatcaaactagagatgcctcaaggcccacgcaggacacaggcaggttcaaggtcatgcacctggaaatttgtaggggagggtcaagcaactgaggccaaagggggccggtaaagtggcttctggggtctgagcatctggaaggctcctggcagcagttacctgacagtgtcgttgaggggcacggcagctgggccctcaccgtttccgccagctctgctgagccagcccagcccatgcattccgaacatccgacagcttctttctccagaatgtcttctgtcagagacttccaggaaaggagctccctcctgtctcactgctgtcagcgtgggagccctgctccccaggctccacgtccccggaaggtccatcttgtcctggagcacacccagccccattcagggtcagtgcaggagggaacagggaatctgcatttcagtaagctccccaggtgaggctgcagagcagaaaccacggctttcagacgtgagcaggctccctgggctcttggtgtcaccctgttagccacatctgcggaatgtggaaggcagaacatagccacgctgcttagtgctgccagcgaacctcaggttgcatcagtggctggaatctatcacagctgttggggatacgtaactcccagcaataaatccagtattttcttccctgccctgagcttcctctgggtttcttatcagcagctattacacacagatgtccagtgcttctaaactaaattgtactgtgtaacttttacatcacacttgtgtgcttaaaaagcacaccgtgggtagtgactgggccaagagacatcacaaagcttcctgataaatttgaatccagccacggcaagagcgacgtgcgggtacctggtccctgatgcttgggtgccccgttgagcctcgggtacttcttggacactattgtgagagcagccatcctggtgtctctgccagcatcttggggaacgctgtgatggtaaaatatctgtctctcctctgggaatcagggcagccctgagaagtgagcagttccctttacagatggataattgtttgtgtaagaccaaccagataaagtccaaactgtgtagaacacacgtgtgcctcacacatagccatctgagtaaaatattttttccaatgtagatttataattagaaatgacagatttataatatagacttcagtaagttgggcacagctgtcactttcgtggtatcaataaaaggctagaaaccttgggtgtccttggcaacctagcctttgacattgatgtttttccataggattttcttcatttgggttggaataaaaatgcatttttattcacaaggcacagacagataagaatatcataagcagggaagtgtctccaaaggtcaggacatatgtttttctgttgagtgctatatgtggaggtcattgcaagttccctgatatgagtatggtttcgcttgctacattgtgcctattaaagtaaaattttacacaagcctcgcatttctaagattagtgttcctgaatgaaatgttaagaaaacattaaaagattatctctttttaagatggaggaaaaaaagtgaacaaagctaattaatctatcatgaaaattgcacaaaataacatttcttaacaaatttaatacaattttgtgttctttgttgctagtggtataaaacgagatttttttccctcatttttctcattgtagatgtcatctctcacatttatatcagtgaggtttgaaattctgtgtagcagttactcagcacatatgagagggcagcgaatgaatgagatttgtcatgtgctaataaaagctgaatttttgtaatctaaaatgatgtattttctactattgctgttaatttgcattgttaaaaattcttaaagtttaatatgttatgttcagtcattgaaagcgaccactcatttttttcttaaagttgatgccttttctgctgtgctagagtcagtattttgcttctggcaggagagctgcaaactgtgtatcctcaaacagatgcaaaaagtagtgctttgcaaaacgtttgttttctgtttatctcagattaacatcctttaatacaagtttcttaagtgtaacttgtatttctgaaaatgcttaaaattattttatatttccctttgggaatttttctctatttccagcacgctgatttgatttaaaaatgtaataagaccaagagttggagtaaagggatattcattccatgttaaaagtggcttcatagctactgacaaatgtctgaactattgtcgtgcccttcaaaactggagttttctaaaataatcttatttttatacttgtatgttccagcaatttaagatatataccattgaaagggaaataaaacatttttgtttatttgaataaa

SEQ ID NO: 111517 - DNA, 2993 bp, Homo sapiens
  Payload ID: 1837
  Gene Symbol: BACE2
  Gene Name: beta-site APP-cleaving enzyme 2
  Uniprot ID: Q9Y5Z0
  ENST ID: ENST00000330333
  CDS Start-End: 464-2020
cgctggggcgctttccgaggaaattcgggactcgagtttcccggggaagaggcgcggcctgagcccggcgagggtggggagggcaggcgcaggtggaccccggcgccccccgagccccgctgtgaccttggccgcgggggaggggctgggccgctgcggggcagtcgcggccgccagagggggcagcggagaagaacttgcccaacttggcggcgcgggctggggcggctctgcgcctccgcgcccgcctccccggcctccgccttctcccctcccgcgagcctcctcccctcccgcgagcctcctcccctgggccctcctcccgtcctccccgccgccgccggtcccggtgcgcgcccatccctgcccgcagccccgcgcgccggccgagtcgctgagccgcggctgccggacgggacgggaccggctaggctgggcgcgccccccgggccccgccgtgggcatgggcgcactggcccgggcgctgctgctgcctctgctggcccagtggctcctgcgcgccgccccggagctggcccccgcgcccttcacgctgcccctccgggtggccgcggccacgaaccgcgtagttgcgcccaccccgggacccgggacccctgccgagcgccacgccgacggcttggcgctcgccctggagcctgccctggcgtcccccgcgggcgccgccaacttcttggccatggtagacaacctgcagggggactctggccgcggctactacctggagatgctgatcgggacccccccgcagaagctacagattctcgttgacactggaagcagtaactttgccgtggcaggaaccccgcactcctacatagacacgtactttgacacagagaggtctagcacataccgctccaagggctttgacgtcacagtgaagtacacacaaggaagctggacgggcttcgttggggaagacctcgtcaccatccccaaaggcttcaatacttcttttcttgtcaacattgccactatttttgaatcagagaatttctttttgcctgggattaaatggaatggaatacttggcctagcttatgccacacttgccaagccatcaagttctctggagaccttcttcgactccctggtgacacaagcaaacatccccaacgttttctccatgcagatgtgtggagccggcttgcccgttgctggatctgggaccaacggaggtagtcttgtcttgggtggaattgaaccaagtttgtataaaggagacatctggtatacccctattaaggaagagtggtactaccagatagaaattctgaaattggaaattggaggccaaagccttaatctggactgcagagagtataacgcagacaaggccatcgtggacagtggcaccacgctgctgcgcctgccccagaaggtgtttgatgcggtggtggaagctgtggcccgcgcatctctgattccagaattctctgatggtttctggactgggtcccagctggcgtgctggacgaattcggaaacaccttggtcttacttccctaaaatctccatctacctgagagacgagaactccagcaggtcattccgtatcacaatcctgcctcagctttacattcagcccatgatgggggccggcctgaattatgaatgttaccgattcggcatttccccatccacaaatgcgctggtgatcggtgccacggtgatggagggcttctacgtcatcttcgacagagcccagaagagggtgggcttcgcagcgagcccctgtgcagaaattgcaggtgctgcagtgtctgaaatttccgggcctttctcaacagaggatgtagccagcaactgtgtccccgctcagtctttgagcgagcccattttgtggattgtgtcctatgcgctcatgagcgtctgtggagccatcctccttgtcttaatcgtcctgctgctgctgccgttccggtgtcagcgtcgcccccgtgaccctgaggtcgtcaatgatgagtcctctctggtcagacatcgctggaaatgaatagccaggcctgacctcaagcaaccatgaactcagctattaagaaaatcacatttccagggcagcagccgggatcgatggtggcgctttctcctgtgcccacccgtcttcaatctctgttctgctcccagatgccttctagattcactgtcttttgattcttgattttcaagctttcaaatcctccctacttccaagaaaaataattaaaaaaaaaacttcattctaaaccaaaacagagtggattgggctgcaggctctatggggttcgttatgccaaagtgtctacatgtgccaccaacataaaacaaaaccaagccttggctcgttctcttctctcttcaatctctggaaaaataagtacatatagttgataacccctcttagcttacaggaagctttttgtattaattgcctttgaggttattttccgccagacctcaacctgggtcaaagtggtacaggaaggcttgcagtatgatggcaggagaatcagcctggggcctggggatgtaaccaagctgtacccttgagacctggaaccagagccacaggccccttttgtgggtttctctgtgctctgaatgggagccagaattcactaggaggtcatcaaccgatggtcctcacaagcctcttctgaagatggaaggccttttgcccgttgaggtagaggggaaggaaatctcctcttttgtacccaatacttatgttgtattgttggtgcgaaagtaaaaacactacctcttttgagactttgcccagggtcctgtgcctggatgggggtgcaggcagccttgaccacggctgttcccctcacccaaaagaattatcatcccaacagccaagacccaacaggtgctgaactgtgcatcaaccaggaagagttctatccccaagctggccactatcacatatgcttactcttgcttaaaattaataaatcatgttttgatgagaaaaaactattcta

SEQ ID NO: 111518 - DNA, 2824 bp, Homo sapiens
  Payload ID: 1837
  Gene Symbol: BACE2
  Gene Name: beta-site APP-cleaving enzyme 2
  Uniprot ID: Q9Y5Z0
  ENST ID: ENST00000328735
  CDS Start-End: 464-1654
cgctggggcgctttccgaggaaattcgggactcgagtttcccggggaagaggcgcggcctgagcccggcgagggtggggagggcaggcgcaggtggaccccggcgccccccgagccccgctgtgaccttggccgcgggggaggggctgggccgctgcggggcagtcgcggccgccagagggggcagcggagaagaacttgcccaacttggcggcgcgggctggggcggctctgcgcctccgcgcccgcctccccggcctccgccttctcccctcccgcgagcctcctcccctcccgcgagcctcctcccctgggccctcctcccgtcctccccgccgccgccggtcccggtgcgcgcccatccctgcccgcagccccgcgcgccggccgagtcgctgagccgcggctgccggacgggacgggaccggctaggctgggcgcgccccccgggccccgccgtgggcatgggcgcactggcccgggcgctgctgctgcctctgctggcccagtggctcctgcgcgccgccccggagctggcccccgcgcccttcacgctgcccctccgggtggccgcggccacgaaccgcgtagttgcgcccaccccgggacccgggacccctgccgagcgccacgccgacggcttggcgctcgccctggagcctgccctggcgtcccccgcgggcgccgccaacttcttggccatggtagacaacctgcagggggactctggccgcggctactacctggagatgctgatcgggacccccccgcagaagctacagattctcgttgacactggaagcagtaactttgccgtggcaggaaccccgcactcctacatagacacgtactttgacacagagaggtctagcacataccgctccaagggctttgacgtcacagtgaagtacacacaaggaagctggacgggcttcgttggggaagacctcgtcaccatccccaaaggcttcaatacttcttttcttgtcaacattgccactatttttgaatcagagaatttctttttgcctgggattaaatggaatggaatacttggcctagcttatgccacacttgccaagccatcaagttctctggagaccttcttcgactccctggtgacacaagcaaacatccccaacgttttctccatgcagatgtgtggagccggcttgcccgttgctggatctgggaccaacggaggtagtcttgtcttgggtggaattgaaccaagtttgtataaaggagacatctggtatacccctattaaggaagagtggtactaccagatagaaattctgaaattggaaattggaggccaaagccttaatctggactgcagagagtataacgcagacaaggccatcgtggacagtggcaccacgctgctgcgcctgccccagaaggtgtttgatgcggtggtggaagctgtggcccgcgcatctctgattccagaattctctgatggtttctggactgggtcccagctggcgtgctggacgaattcggaaacaccttggtcttacttccctaaaatctccatctacctgagagacgagaactccagcaggtcattccgtatcacaatcctgcctcagaaattgcaggtgctgcagtgtctgaaatttccgggcctttctcaacagaggatgtagccagcaactgtgtccccgctcagtctttgagcgagcccattttgtggattgtgtcctatgcgctcatgagcgtctgtggagccatcctccttgtcttaatcgtcctgctgctgctgccgttccggtgtcagcgtcgcccccgtgaccctgaggtcgtcaatgatgagtcctctctggtcagacatcgctggaaatgaatagccaggcctgacctcaagcaaccatgaactcagctattaagaaaatcacatttccagggcagcagccgggatcgatggtggcgctttctcctgtgcccacccgtcttcaatctctgttctgctcccagatgccttctagattcactgtcttttgattcttgattttcaagctttcaaatcctccctacttccaagaaaaataattaaaaaaaaaacttcattctaaaccaaaacagagtggattgggctgcaggctctatggggttcgttatgccaaagtgtctacatgtgccaccaacataaaacaaaaccaagccttggctcgttctcttctctcttcaatctctggaaaaataagtacatatagttgataacccctcttagcttacaggaagctttttgtattaattgcctttgaggttattttccgccagacctcaacctgggtcaaagtggtacaggaaggcttgcagtatgatggcaggagaatcagcctggggcctggggatgtaaccaagctgtacccttgagacctggaaccagagccacaggccccttttgtgggtttctctgtgctctgaatgggagccagaattcactaggaggtcatcaaccgatggtcctcacaagcctcttctgaagatggaaggccttttgcccgttgaggtagaggggaaggaaatctcctcttttgtacccaatacttatgttgtattgttggtgcgaaagtaaaaacactacctcttttgagactttgcccagggtcctgtgcctggatgggggtgcaggcagccttgaccacggctgttcccctcacccaaaagaattatcatcccaacagccaagacccaacaggtgctgaactgtgcatcaaccaggaagagttctatccccaagctggccactatcacatatgcttactcttgcttaaaattaataaatcatgttttgatgagaaaaaactattcta

SEQ ID NO: 111519 - DNA, 655 bp, Homo sapiens
  Payload ID: 1838
  Gene Symbol: BTRC
  Gene Name: beta-transducin repeat containing E3 ubiquitin protein ligase
  ENST ID: ENST00000370183
  CDS Start-End: 83-655
actgaaaagcggaggaagctctctggagaaacgccgtgaggccgctggcggggccttcctggtgtcagggttaccgtgctctatgcccaggtctctgtggctgggctgctccagcctggcggacagcatgccttcgctgcgatgcctgtataacccagggactggcgcactcacagctttccagaattcctcagagagagaagactgtaataatggcgaaccccctaggaagataataccagagaagaattcacttagacagacatacaacagctgtgccagactctgcttaaaccaagaaacagtatgtttagcaagcactgctatgaagactgagaattgtgtggccaaaacaaaacttgccaatggcacttccagtatgattgtgcccaagcaacggaaactctcagcaagctatgaaaaggaaaaggaactgtgtgtcaaatactttgagcagtggtcagagtcagatcaagtggaatttgtggaacatcttatatcccaaatgtgtcattaccaacatgggcacataaactcgtatcttaaacctatgttgcagagagatttcataactgctctgccagctcggggattggatcatattgctgagaacattctgtcatacctggatgccaaatcactatgtgctgctgaa

SEQ ID NO: 111520 - DNA, 6134 bp, Homo sapiens
  Payload ID: 1838
  Gene Symbol: BTRC
  Gene Name: beta-transducin repeat containing E3 ubiquitin protein ligase
  Uniprot ID: Q9Y297
  ENST ID: ENST00000370187
  CDS Start-End: 119-1936
agaggtaagagagggcggggggaaggaagaggaggcgggatccgggcgctgcgttggctgcggcctggcaccaaaggggcggccccggcggagagcggacccagtggcctcggcgattatggacccggccgaggcggtgctgcaagagaaggcactcaagtttatgtgctctatgcccaggtctctgtggctgggctgctccagcctggcggacagcatgccttcgctgcgatgcctgtataacccagggactggcgcactcacagctttccagaattcctcagagagagaagactgtaataatggcgaaccccctaggaagataataccagagaagaattcacttagacagacatacaacagctgtgccagactctgcttaaaccaagaaacagtatgtttagcaagcactgctatgaagactgagaattgtgtggccaaaacaaaacttgccaatggcacttccagtatgattgtgcccaagcaacggaaactctcagcaagctatgaaaaggaaaaggaactgtgtgtcaaatactttgagcagtggtcagagtcagatcaagtggaatttgtggaacatcttatatcccaaatgtgtcattaccaacatgggcacataaactcgtatcttaaacctatgttgcagagagatttcataactgctctgccagctcggggattggatcatattgctgagaacattctgtcatacctggatgccaaatcactatgtgctgctgaacttgtgtgcaaggaatggtaccgagtgacctctgatggcatgctgtggaagaagcttatcgagagaatggtcaggacagattctctgtggagaggcctggcagaacgaagaggatggggacagtatttattcaaaaacaaacctcctgacgggaatgctcctcccaactctttttatagagcactttatcctaaaattatacaagacattgagacaatagaatctaattggagatgtggaagacatagtttacagagaattcactgccgaagtgaaacaagcaaaggagtttactgtttacagtatgatgatcagaaaatagtaagcggccttcgagacaacacaatcaagatctgggataaaaacacattggaatgcaagcgaattctcacaggccatacaggttcagtcctctgtctccagtatgatgagagagtgatcataacaggatcatcggattccacggtcagagtgtgggatgtaaatacaggtgaaatgctaaacacgttgattcaccattgtgaagcagttctgcacttgcgtttcaataatggcatgatggtgacctgctccaaagatcgttccattgctgtatgggatatggcctccccaactgacattaccctccggagggtgctggtcggacaccgagctgctgtcaatgttgtagactttgatgacaagtacattgtttctgcatctggggatagaactataaaggtatggaacacaagtacttgtgaatttgtaaggaccttaaatggacacaaacgaggcattgcctgtttgcagtacagggacaggctggtagtgagtggctcatctgacaacactatcagattatgggacatagaatgtggtgcatgtttacgagtgttagaaggccatgaggaattggtgcgttgtattcgatttgataacaagaggatagtcagtggggcctatgatggaaaaattaaagtgtgggatcttgtggctgctttggacccccgtgctcctgcagggacactctgtctacggacccttgtggagcattccggaagagtttttcgactacagtttgatgaattccagattgtcagtagttcacatgatgacacaatcctcatctgggacttcctaaatgatccagctgcccaagctgaacccccccgttccccttctcgaacatacacctacatctccagataaataaccatacactgacctcatacttgcccaggacccattaaagttgcggtatttaacgtatctgccaataccaggatgagcaacaacagtaacaatcaaactactgcccagtttccctggactagccgaggagcagggctttgagactcctgttgggacacagttggtctgcagtcggcccaggacggtctactcagcacaactgactgcttcagtgctgctatcagaagatgtcttctatcttttgtgaatgattggaacttttaaacctcccctcctctcctcctttcacctctgcacctagttttttcccattggttccagacaaaggtgacttataaatatatttagtgttttgccagaatctctcttgctttgccattaagcagaagaactagtttccctgtatagcctgctgggagagacccacttctagggtatgggggatgcagcttcaagcccagtgcccagtgtctccctgttaactgcaggaatgccaagcacctggccagagcagcccagccccaatatgcttaggaggagacagagttccctctgtatagcctctgggacaagaaaaagaaaacacaagaatgtatacactggaagatttgggcctcctgcctgccttctctttgtttctgttcctcttcccatctactcccctacgccccttcaaccttttttctctgtctgcttcacctgagaagaaagtgtacgaagagagtgtcctcctctcacatgagccagatcagccagaaaatgcaacacttggaagagttaaatgctgttcagtgaagatttcagccccaggcctttgctgcaagtgaccctgtggcaacagtggattctcagacatgatactctcatcatatttgcaactcttctctctctttcttccccacacccaagaggaggattggtggtagggggcaggcagagggggtggggagaagtttcctgggctccatcaatggctgcatcttttctggactcagcagtctccttgattccatgtagagtgtggaaaggagttgctgattgcatttcctctcattaacaattgggtgtgtaataaaaagcattgtacttcatcttaaatcactggtaaggctcagcctacagaaagatttgaaatggccagagccaatcgcttggtgcattctgcgtaatggtttccatctccgatttcctcatcagggcctgtgaatacccaggtgcctgtatctttgccaagaccgtgatcaaggtagcttaagagagatggtcaggagaaaacactgtttttgttttttttgttgttttgttttgttttggccagttaaatatcatctctcaaatattgatctcaccgtgtcaaccttgcactgcacaaccttccttctgcttctcccacacccagtatttgcagaagggcaaagctgcttaagagagaggatcagggtgaagtttggcacacagggtttattaatggggcaaaaactgccttttcttcctcctcctgaccttattttgctcttcactctccccagccaataaagcgtctgtggcgattggtgaacagcataaacagctggacctcagcaagggtcaggcaaacccagtcactcggaaggcagctgtgtgagctgccaagctagtgggcttcaggtgcaagggtacctgtgccacaccaacctgggagcacacagaatactattaatgtgcacccagctggtctccccaggcaagaaggtatcctcttcccaaggtgtacccactgaatgttgttactacatattgagagtcattttatgcatatgcattctacctttcctgctttatgagtatttttaagcttttagttcaaggttatattcagaaaatatttcccagtataatgatacatcgtagcctaagaaatattttctcaatgtaattcccttcccagctacccaaatgctacagagaaatgttttctacttggccactatcagggttcgtcatctattgtgttgactattaatggctttttgattgggtaaggattttgctatagatgaaggtagagggctgtcagccctgaaaaacacacaggtcagacatttaaaaggcatgggtttcgagctgtctcaaaatattgcccaatagccataattttaccagcctttctgtcatatgctgctattacaaagtggaagctgttgaatgtttattggtgcccagggttttgctctccaatctaggttcagttgaaggaatattgtttctaagactgttttgagacatgtccagtacatcacaaaggagatcggggcgacccctgcagatgtggagccattagcccagttgaggatattctccaagttgtcctctctcctgctgatggaaatgggaatgaagttaagtggtctgaaaaacttgaatcgttcacatttctcagctctgggggtcatttaccagtttgttgtagaagaaataatcaggtaagttaaaagttcatttccagagaaggtaaaccccacttaccatctctgcatgatttcagtgggaattgattatcactaatccccaactgggctagaataaatgtaaagtttgacctttttaaaacgaaaagagagacaaagtctcagcacattccaaggagtggtagaaacagagctgaaggtgtccccattgtagattagtctcttctcactaaaatttactttccaacgtagggcctaaaggaaacctttcttaaagacaggctgaaaccccttcaaaggcagatgaggaggtacagacacgtgaccttttggtgcacactggagctacttggacaagaccagcatgccttgctgcacgtgtgtgtatttcactgctgagaacatcctttaacttggtgtgcaatttgaaaggatgtgaatcatggatggaaggccatttgtacatgtcccttggcaaaattctttctggtgtctcctaacttcagagacagggactctttttggatctctattgacaagtaataaaagtctggccctcataacttgtttccgaactagaaaagtctgtgagacccctacatcattctggtttttttgcttgagtaagaacaatccttttttatttttcttctgtacagtctaaagctacagagaaaaaaaaatgcactcttcccttgccggctcctggtaccattggtctgaacagctgtagttggtctactccttacttagcacttgattgtgtggggaaacaaaggtgggaggggtggggaatactggaaataatcagggcaatttttttctttcccataattggactagataccttggtactgttgaccttctcagcatctcccttttgccttagatggcaacaccctccagtctgtagcagagcagtccaacccagattagtgcagcccggaggcttagggtgcagcctccctggtcttcctccacacagttgttcaccaacagaccagacctcctttaaccacagtgtcaacatagtatcggaaagagagccatttcttaggggaataaaacagtttcgcttctttagctcatctgtggtgtcagaatccttggagctgaagagagaaatcaaaagagcatgatgatggctgcctggtttcaggtggaacttaatgcattgatctttagaagctccttctgttggaagttgagtacctgtgatctaaaatgtcctggaggcagatgacatctaaaatatgtgctttccaaccagcacagctggcgctcttagctcctgattggttgtgtgttttattaaggatcagtgcagttaagtcgtattttaaagtgttacctcccctcctaacccttccccttcttggacactgaaggaaaaggccaactagggtgttagccctctgggcaccaaggaaactaacagctttctcaaagcggtgaccactcaggccagcccagacaaatctgagggatggccagtgcactccaatgatgggacaggcctaacaacacatgtaagcttccccgagagctttcagctggttcacctctttgttctctagactcttaagtactgactgctttgacttttgtgattatgttatggtgatgtgtagtcagtgtaccaatatgttcacaacctaggatcatgataatggagtgtgttttgggttttttttaactgttcagaaaaaaagtaaattacaaatataagattaaagtgaattttctaa

SEQ ID NO: 111521 - DNA, 6084 bp, Homo sapiens
  Payload ID: 1838
  Gene Symbol: BTRC
  Gene Name: beta-transducin repeat containing E3 ubiquitin protein ligase
  ENST ID: ENST00000393441
  CDS Start-End: 149-1888
gattctccttggcccctcagcctgcgcctgagaggtaagagagggcggggggaaggaagaggaggcgggatccgggcgctgcgttggctgcggcctggcaccaaaggggcggccccggcggagagcggacccagtggcctcggcgattatggacccggccgaggcggtgctgcaagagaaggcactcaagtttatgtgctctatgcccaggtctctgtggctgggctgctccagcctggcggacagcatgccttcgctgcgatgcctgtataacccagggactggcgcactcacagctttccagacatacaacagctgtgccagactctgcttaaaccaagaaacagtatgtttagcaagcactgctatgaagactgagaattgtgtggccaaaacaaaacttgccaatggcacttccagtatgattgtgcccaagcaacggaaactctcagcaagctatgaaaaggaaaaggaactgtgtgtcaaatactttgagcagtggtcagagtcagatcaagtggaatttgtggaacatcttatatcccaaatgtgtcattaccaacatgggcacataaactcgtatcttaaacctatgttgcagagagatttcataactgctctgccagctcggggattggatcatattgctgagaacattctgtcatacctggatgccaaatcactatgtgctgctgaacttgtgtgcaaggaatggtaccgagtgacctctgatggcatgctgtggaagaagcttatcgagagaatggtcaggacagattctctgtggagaggcctggcagaacgaagaggatggggacagtatttattcaaaaacaaacctcctgacgggaatgctcctcccaactctttttatagagcactttatcctaaaattatacaagacattgagacaatagaatctaattggagatgtggaagacatagtttacagagaattcactgccgaagtgaaacaagcaaaggagtttactgtttacagtatgatgatcagaaaatagtaagcggccttcgagacaacacaatcaagatctgggataaaaacacattggaatgcaagcgaattctcacaggccatacaggttcagtcctctgtctccagtatgatgagagagtgatcataacaggatcatcggattccacggtcagagtgtgggatgtaaatacaggtgaaatgctaaacacgttgattcaccattgtgaagcagttctgcacttgcgtttcaataatggcatgatggtgacctgctccaaagatcgttccattgctgtatgggatatggcctccccaactgacattaccctccggagggtgctggtcggacaccgagctgctgtcaatgttgtagactttgatgacaagtacattgtttctgcatctggggatagaactataaaggtatggaacacaagtacttgtgaatttgtaaggaccttaaatggacacaaacgaggcattgcctgtttgcagtacagggacaggctggtagtgagtggctcatctgacaacactatcagattatgggacatagaatgtggtgcatgtttacgagtgttagaaggccatgaggaattggtgcgttgtattcgatttgataacaagaggatagtcagtggggcctatgatggaaaaattaaagtgtgggatcttgtggctgctttggacccccgtgctcctgcagggacactctgtctacggacccttgtggagcattccggaagagtttttcgactacagtttgatgaattccagattgtcagtagttcacatgatgacacaatcctcatctgggacttcctaaatgatccagctgcccaagctgaacccccccgttccccttctcgaacatacacctacatctccagataaataaccatacactgacctcatacttgcccaggacccattaaagttgcggtatttaacgtatctgccaataccaggatgagcaacaacagtaacaatcaaactactgcccagtttccctggactagccgaggagcagggctttgagactcctgttgggacacagttggtctgcagtcggcccaggacggtctactcagcacaactgactgcttcagtgctgctatcagaagatgtcttctatcttttgtgaatgattggaacttttaaacctcccctcctctcctcctttcacctctgcacctagttttttcccattggttccagacaaaggtgacttataaatatatttagtgttttgccagaatctctcttgctttgccattaagcagaagaactagtttccctgtatagcctgctgggagagacccacttctagggtatgggggatgcagcttcaagcccagtgcccagtgtctccctgttaactgcaggaatgccaagcacctggccagagcagcccagccccaatatgcttaggaggagacagagttccctctgtatagcctctgggacaagaaaaagaaaacacaagaatgtatacactggaagatttgggcctcctgcctgccttctctttgtttctgttcctcttcccatctactcccctacgccccttcaaccttttttctctgtctgcttcacctgagaagaaagtgtacgaagagagtgtcctcctctcacatgagccagatcagccagaaaatgcaacacttggaagagttaaatgctgttcagtgaagatttcagccccaggcctttgctgcaagtgaccctgtggcaacagtggattctcagacatgatactctcatcatatttgcaactcttctctctctttcttccccacacccaagaggaggattggtggtagggggcaggcagagggggtggggagaagtttcctgggctccatcaatggctgcatcttttctggactcagcagtctccttgattccatgtagagtgtggaaaggagttgctgattgcatttcctctcattaacaattgggtgtgtaataaaaagcattgtacttcatcttaaatcactggtaaggctcagcctacagaaagatttgaaatggccagagccaatcgcttggtgcattctgcgtaatggtttccatctccgatttcctcatcagggcctgtgaatacccaggtgcctgtatctttgccaagaccgtgatcaaggtagcttaagagagatggtcaggagaaaacactgtttttgttttttttgttgttttgttttgttttggccagttaaatatcatctctcaaatattgatctcaccgtgtcaaccttgcactgcacaaccttccttctgcttctcccacacccagtatttgcagaagggcaaagctgcttaagagagaggatcagggtgaagtttggcacacagggtttattaatggggcaaaaactgccttttcttcctcctcctgaccttattttgctcttcactctccccagccaataaagcgtctgtggcgattggtgaacagcataaacagctggacctcagcaagggtcaggcaaacccagtcactcggaaggcagctgtgtgagctgccaagctagtgggcttcaggtgcaagggtacctgtgccacaccaacctgggagcacacagaatactattaatgtgcacccagctggtctccccaggcaagaaggtatcctcttcccaaggtgtacccactgaatgttgttactacatattgagagtcattttatgcatatgcattctacctttcctgctttatgagtatttttaagcttttagttcaaggttatattcagaaaatatttcccagtataatgatacatcgtagcctaagaaatattttctcaatgtaattcccttcccagctacccaaatgctacagagaaatgttttctacttggccactatcagggttcgtcatctattgtgttgactattaatggctttttgattgggtaaggattttgctatagatgaaggtagagggctgtcagccctgaaaaacacacaggtcagacatttaaaaggcatgggtttcgagctgtctcaaaatattgcccaatagccataattttaccagcctttctgtcatatgctgctattacaaagtggaagctgttgaatgtttattggtgcccagggttttgctctccaatctaggttcagttgaaggaatattgtttctaagactgttttgagacatgtccagtacatcacaaaggagatcggggcgacccctgcagatgtggagccattagcccagttgaggatattctccaagttgtcctctctcctgctgatggaaatgggaatgaagttaagtggtctgaaaaacttgaatcgttcacatttctcagctctgggggtcatttaccagtttgttgtagaagaaataatcaggtaagttaaaagttcatttccagagaaggtaaaccccacttaccatctctgcatgatttcagtgggaattgattatcactaatccccaactgggctagaataaatgtaaagtttgacctttttaaaacgaaaagagagacaaagtctcagcacattccaaggagtggtagaaacagagctgaaggtgtccccattgtagattagtctcttctcactaaaatttactttccaacgtagggcctaaaggaaacctttcttaaagacaggctgaaaccccttcaaaggcagatgaggaggtacagacacgtgaccttttggtgcacactggagctacttggacaagaccagcatgccttgctgcacgtgtgtgtatttcactgctgagaacatcctttaacttggtgtgcaatttgaaaggatgtgaatcatggatggaaggccatttgtacatgtcccttggcaaaattctttctggtgtctcctaacttcagagacagggactctttttggatctctattgacaagtaataaaagtctggccctcataacttgtttccgaactagaaaagtctgtgagacccctacatcattctggtttttttgcttgagtaagaacaatccttttttatttttcttctgtacagtctaaagctacagagaaaaaaaaatgcactcttcccttgccggctcctggtaccattggtctgaacagctgtagttggtctactccttacttagcacttgattgtgtggggaaacaaaggtgggaggggtggggaatactggaaataatcagggcaatttttttctttcccataattggactagataccttggtactgttgaccttctcagcatctcccttttgccttagatggcaacaccctccagtctgtagcagagcagtccaacccagattagtgcagcccggaggcttagggtgcagcctccctggtcttcctccacacagttgttcaccaacagaccagacctcctttaaccacagtgtcaacatagtatcggaaagagagccatttcttaggggaataaaacagtttcgcttctttagctcatctgtggtgtcagaatccttggagctgaagagagaaatcaaaagagcatgatgatggctgcctggtttcaggtggaacttaatgcattgatctttagaagctccttctgttggaagttgagtacctgtgatctaaaatgtcctggaggcagatgacatctaaaatatgtgctttccaaccagcacagctggcgctcttagctcctgattggttgtgtgttttattaaggatcagtgcagttaagtcgtattttaaagtgttacctcccctcctaacccttccccttcttggacactgaaggaaaaggccaactagggtgttagccctctgggcaccaaggaaactaacagctttctcaaagcggtgaccactcaggccagcccagacaaatctgagggatggccagtgcactccaatgatgggacaggcctaacaacacatgtaagcttccccgagagctttcagctggttcacctctttgttctctagactcttaagtactgactgctttgacttttgtgattatgttatggtgatgtgtagtcagtgtaccaatatgttcacaacctaggatcatgataatggagtgtgttttgggttttttttaactgttcagaaaaaaagtaaattacaaatataagattaaagtgaattttct

SEQ ID NO: 111522 - DNA, 5982 bp, Homo sapiens
  Payload ID: 1838
  Gene Symbol: BTRC
  Gene Name: beta-transducin repeat containing E3 ubiquitin protein ligase
  Uniprot ID: Q9Y297
  ENST ID: ENST00000408038
  CDS Start-End: 75-1784
ggcgctgcgttggctgcggcctggcaccaaaggggcggccccggcggagagcggacccagtggcctcggcgattatggacccggccgaggcggtgctgcaagagaaggcactcaagtttatgaattcctcagagagagaagactgtaataatggcgaaccccctaggaagataataccagagaagaattcacttagacagacatacaacagctgtgccagactctgcttaaaccaagaaacagtatgtttagcaagcactgctatgaagactgagaattgtgtggccaaaacaaaacttgccaatggcacttccagtatgattgtgcccaagcaacggaaactctcagcaagctatgaaaaggaaaaggaactgtgtgtcaaatactttgagcagtggtcagagtcagatcaagtggaatttgtggaacatcttatatcccaaatgtgtcattaccaacatgggcacataaactcgtatcttaaacctatgttgcagagagatttcataactgctctgccagctcggggattggatcatattgctgagaacattctgtcatacctggatgccaaatcactatgtgctgctgaacttgtgtgcaaggaatggtaccgagtgacctctgatggcatgctgtggaagaagcttatcgagagaatggtcaggacagattctctgtggagaggcctggcagaacgaagaggatggggacagtatttattcaaaaacaaacctcctgacgggaatgctcctcccaactctttttatagagcactttatcctaaaattatacaagacattgagacaatagaatctaattggagatgtggaagacatagtttacagagaattcactgccgaagtgaaacaagcaaaggagtttactgtttacagtatgatgatcagaaaatagtaagcggccttcgagacaacacaatcaagatctgggataaaaacacattggaatgcaagcgaattctcacaggccatacaggttcagtcctctgtctccagtatgatgagagagtgatcataacaggatcatcggattccacggtcagagtgtgggatgtaaatacaggtgaaatgctaaacacgttgattcaccattgtgaagcagttctgcacttgcgtttcaataatggcatgatggtgacctgctccaaagatcgttccattgctgtatgggatatggcctccccaactgacattaccctccggagggtgctggtcggacaccgagctgctgtcaatgttgtagactttgatgacaagtacattgtttctgcatctggggatagaactataaaggtatggaacacaagtacttgtgaatttgtaaggaccttaaatggacacaaacgaggcattgcctgtttgcagtacagggacaggctggtagtgagtggctcatctgacaacactatcagattatgggacatagaatgtggtgcatgtttacgagtgttagaaggccatgaggaattggtgcgttgtattcgatttgataacaagaggatagtcagtggggcctatgatggaaaaattaaagtgtgggatcttgtggctgctttggacccccgtgctcctgcagggacactctgtctacggacccttgtggagcattccggaagagtttttcgactacagtttgatgaattccagattgtcagtagttcacatgatgacacaatcctcatctgggacttcctaaatgatccagctgcccaagctgaacccccccgttccccttctcgaacatacacctacatctccagataaataaccatacactgacctcatacttgcccaggacccattaaagttgcggtatttaacgtatctgccaataccaggatgagcaacaacagtaacaatcaaactactgcccagtttccctggactagccgaggagcagggctttgagactcctgttgggacacagttggtctgcagtcggcccaggacggtctactcagcacaactgactgcttcagtgctgctatcagaagatgtcttctatcttttgtgaatgattggaacttttaaacctcccctcctctcctcctttcacctctgcacctagttttttcccattggttccagacaaaggtgacttataaatatatttagtgttttgccagaatctctcttgctttgccattaagcagaagaactagtttccctgtatagcctgctgggagagacccacttctagggtatgggggatgcagcttcaagcccagtgcccagtgtctccctgttaactgcaggaatgccaagcacctggccagagcagcccagccccaatatgcttaggaggagacagagttccctctgtatagcctctgggacaagaaaaagaaaacacaagaatgtatacactggaagatttgggcctcctgcctgccttctctttgtttctgttcctcttcccatctactcccctacgccccttcaaccttttttctctgtctgcttcacctgagaagaaagtgtacgaagagagtgtcctcctctcacatgagccagatcagccagaaaatgcaacacttggaagagttaaatgctgttcagtgaagatttcagccccaggcctttgctgcaagtgaccctgtggcaacagtggattctcagacatgatactctcatcatatttgcaactcttctctctctttcttccccacacccaagaggaggattggtggtagggggcaggcagagggggtggggagaagtttcctgggctccatcaatggctgcatcttttctggactcagcagtctccttgattccatgtagagtgtggaaaggagttgctgattgcatttcctctcattaacaattgggtgtgtaataaaaagcattgtacttcatcttaaatcactggtaaggctcagcctacagaaagatttgaaatggccagagccaatcgcttggtgcattctgcgtaatggtttccatctccgatttcctcatcagggcctgtgaatacccaggtgcctgtatctttgccaagaccgtgatcaaggtagcttaagagagatggtcaggagaaaacactgtttttgttttttttgttgttttgttttgttttggccagttaaatatcatctctcaaatattgatctcaccgtgtcaaccttgcactgcacaaccttccttctgcttctcccacacccagtatttgcagaagggcaaagctgcttaagagagaggatcagggtgaagtttggcacacagggtttattaatggggcaaaaactgccttttcttcctcctcctgaccttattttgctcttcactctccccagccaataaagcgtctgtggcgattggtgaacagcataaacagctggacctcagcaagggtcaggcaaacccagtcactcggaaggcagctgtgtgagctgccaagctagtgggcttcaggtgcaagggtacctgtgccacaccaacctgggagcacacagaatactattaatgtgcacccagctggtctccccaggcaagaaggtatcctcttcccaaggtgtacccactgaatgttgttactacatattgagagtcattttatgcatatgcattctacctttcctgctttatgagtatttttaagcttttagttcaaggttatattcagaaaatatttcccagtataatgatacatcgtagcctaagaaatattttctcaatgtaattcccttcccagctacccaaatgctacagagaaatgttttctacttggccactatcagggttcgtcatctattgtgttgactattaatggctttttgattgggtaaggattttgctatagatgaaggtagagggctgtcagccctgaaaaacacacaggtcagacatttaaaaggcatgggtttcgagctgtctcaaaatattgcccaatagccataattttaccagcctttctgtcatatgctgctattacaaagtggaagctgttgaatgtttattggtgcccagggttttgctctccaatctaggttcagttgaaggaatattgtttctaagactgttttgagacatgtccagtacatcacaaaggagatcggggcgacccctgcagatgtggagccattagcccagttgaggatattctccaagttgtcctctctcctgctgatggaaatgggaatgaagttaagtggtctgaaaaacttgaatcgttcacatttctcagctctgggggtcatttaccagtttgttgtagaagaaataatcaggtaagttaaaagttcatttccagagaaggtaaaccccacttaccatctctgcatgatttcagtgggaattgattatcactaatccccaactgggctagaataaatgtaaagtttgacctttttaaaacgaaaagagagacaaagtctcagcacattccaaggagtggtagaaacagagctgaaggtgtccccattgtagattagtctcttctcactaaaatttactttccaacgtagggcctaaaggaaacctttcttaaagacaggctgaaaccccttcaaaggcagatgaggaggtacagacacgtgaccttttggtgcacactggagctacttggacaagaccagcatgccttgctgcacgtgtgtgtatttcactgctgagaacatcctttaacttggtgtgcaatttgaaaggatgtgaatcatggatggaaggccatttgtacatgtcccttggcaaaattctttctggtgtctcctaacttcagagacagggactctttttggatctctattgacaagtaataaaagtctggccctcataacttgtttccgaactagaaaagtctgtgagacccctacatcattctggtttttttgcttgagtaagaacaatccttttttatttttcttctgtacagtctaaagctacagagaaaaaaaaatgcactcttcccttgccggctcctggtaccattggtctgaacagctgtagttggtctactccttacttagcacttgattgtgtggggaaacaaaggtgggaggggtggggaatactggaaataatcagggcaatttttttctttcccataattggactagataccttggtactgttgaccttctcagcatctcccttttgccttagatggcaacaccctccagtctgtagcagagcagtccaacccagattagtgcagcccggaggcttagggtgcagcctccctggtcttcctccacacagttgttcaccaacagaccagacctcctttaaccacagtgtcaacatagtatcggaaagagagccatttcttaggggaataaaacagtttcgcttctttagctcatctgtggtgtcagaatccttggagctgaagagagaaatcaaaagagcatgatgatggctgcctggtttcaggtggaacttaatgcattgatctttagaagctccttctgttggaagttgagtacctgtgatctaaaatgtcctggaggcagatgacatctaaaatatgtgctttccaaccagcacagctggcgctcttagctcctgattggttgtgtgttttattaaggatcagtgcagttaagtcgtattttaaagtgttacctcccctcctaacccttccccttcttggacactgaaggaaaaggccaactagggtgttagccctctgggcaccaaggaaactaacagctttctcaaagcggtgaccactcaggccagcccagacaaatctgagggatggccagtgcactccaatgatgggacaggcctaacaacacatgtaagcttccccgagagctttcagctggttcacctctttgttctctagactcttaagtactgactgctttgacttttgtgattatgttatggtgatgtgtagtcagtgtaccaatatgttcacaacctaggatcatgataatggagtgtgttttgggttttttttaactgttcagaaaaaaagtaaattacaaatataagattaaagtgaattttctaa

SEQ ID NO: 111523 - DNA, 2495 bp, Homo sapiens
  Payload ID: 1839
  Gene Symbol: BID
  Gene Name: BH3 interacting domain death agonist
  Uniprot ID: P55957
  ENST ID: ENST00000317361
  CDS Start-End: 328-1053
gagaaaacccgcgggcctggccgggtgcaggccacccttgccggcggatcggaatccccgcccacaccgtggtctttccagcaccgcagacacctgccggctcctcccgagcggagctcagggctgacaaagcgcggtcagagcggccgcttactggggctcgcccgctccttagagcactggcaatgatgtgcggatcctcgctgctgctgctgggaaactgttgagtggctgaatgaccccaggggaccctgggagagctctgaagccctcagccaccaagtggctgggctggcaagggttcattcattcattcaacaaatacgaatgtgcagcggtgctggggtcatgatggctcggtgggcagcgaggggccgggccggctggaggagcacagtgcggattctgtcgccactgggacactgtgaaccaggagtgagtcggagctgccgcgctgcccaggccatggactgtgaggtcaacaacggttccagcctcagggatgagtgcatcacaaacctactggtgtttggcttcctccaaagctgttctgacaacagcttccgcagagagctggacgcactgggccacgagctgccagtgctggctccccagtgggagggctacgatgagctgcagactgatggcaaccgcagcagccactcccgcttgggaagaatagaggcagattctgaaagtcaagaagacatcatccggaatattgccaggcacctcgcccaggtcggggacagcatggaccgtagcatccctccgggcctggtgaacggcctggccctgcagctcaggaacaccagccggtcggaggaggaccggaacagggacctggccactgccctggagcagctgctgcaggcctaccctagagacatggagaaggagaagaccatgctggtgctggccctgctgctggccaagaaggtggccagtcacacgccgtccttgctccgtgatgtctttcacacaacagtgaattttattaaccagaacctacgcacctacgtgaggagcttagccagaaatgggatggactgaacggacagttccagaagtgtgactggctaaagctcgatgtggtcacagctgtatagctgcttccagtgtagacggagccctggcatgtcaacagcgttcctagagaagacaggctggaagatagctgtgacttctattttaaagacaatgttaaacttataacccactttaaaatatctacattaatatacttgaatgaaaatgtccatttacacgtatttgaatggccttcatatcatccacacatgaatctgcacatctgtaaatctacacacggtgcctttatttccactgtgcaggttcccacttaaaaattaaattggaaagcaggtttcaaggaagtagaaacaaaatacaatttttttggtaaaaaaaaattactgtttattaaagtacaaccatagaggatggtcttacagcaggcagtatcctgtttgaggaaagcaagaatcagagaaggaacataccccttacaaatgaaaaattccactcaaaatagggactatctatcttaatactaaggaaccaacaatcttcctgtttaaaaaaccacatggcacagagattctgaactaaagtgctgcactcaaatgatgggaagtccggccccagtacacaggggcttgactttttcaacttcgtttcctttgttggagtcaaaaagaaccacttgtggttctaaaaggtgtgaaggtgatttaagggcccaggtcagccactgtttgtttacaaaatcaggtaactaactgcatacactttttctctttccatgacatcaagactttgctaaagacatgaagccacgggtgccagaagctactgcgatgccccgggagttagccccctggtaatagctgtaaacttccaatttctagccatacgctcagctcatccatgcctcagaagtgcatctggagagaacaggtttctaagcataaaagatgaaagagcagttggactttttaaaaattcagcaaagtggttccctctcttagggacagtcaaaaccaagtcacttaggtagtaccaaaataaataaggaaaagcttagctttagaaacagtgcaacactggtctgctgttccagtggtaagctatgtcccaggaatcagtttaaaagcacgacagtggatgctgggtccatatcacacacattgctgtgaacaggaaactcctgtgaccacaacatgaggccactggagacgcatatgagtaagggcactgacggactcatgatttcttcttaccagatgctttcctgttctttaagagtttaaaatcatcagaaaggaaaaacaaactctatattgttcagcatgcaatacataccacgctagggctggctcaattgaaagtgggcaaaagcttacaaatactaaaaagaagtgctgccgcgcagtgtggaggccactgtttggaaataaatcttcctaacactacga

SEQ ID NO: 111524 - DNA, 854 bp, Homo sapiens
  Payload ID: 1839
  Gene Symbol: BID
  Gene Name: BH3 interacting domain death agonist
  Uniprot ID: P55957
  ENST ID: ENST00000342111
  CDS Start-End: 91-504
ggacgcgcccgcgcccccgcggctggagggtggtcgccactgggacactgtgaaccaggagtgagtcggagctgccgcgctgcccaggccatggactgtgaggtcaacaacggttccagcctcagggatgagtgcatcacaaacctactggtgtttggcttcctccaaagctgttctgacaacagcttccgcagagagctggacgcactgggccacgagctgccagtgctggctccccagtgggagggctacgatgagctgcagactgatggcaaccgcagcagccactcccgcttgggaagaatagaggcaggggcgtcagacaataacacagcaagtgctgaggaagaaacggaggcggcagggagcgtggcagttgagcgtggccttcatggagctgcgacagtgattctgaaagtcaagaagacatcatccggaatattgccaggcacctcgcccaggtcggggacagcatggaccgtagcatccctccgggcctggtgaacggcctggccctgcagctcaggaacaccagccggtcggaggaggaccggaacagggacctggccactgccctggagcagctgctgcaggcctaccctagagacatggagaaggagaagaccatgctggtgctggccctgctgctggccaagaaggtggccagtcacacgccgtccttgctccgtgatgtctttcacacaacagtgaattttattaaccagaacctacgcacctacgtgaggagcttagccagaaatgggatggactgaacggacagttccagaagtgtgactggctaaagctcgatgtggtcacagctgtatagctgcttccagtgtagacggagccct

SEQ ID NO: 111525 - DNA, 1879 bp, Homo sapiens
  Payload ID: 1839
  Gene Symbol: BID
  Gene Name: BH3 interacting domain death agonist
  Uniprot ID: P55957
  ENST ID: ENST00000399765
  CDS Start-End: 175-474
ggaagcgcgcggggcgccataaggaggaagcgggtagtcgaccgtgtccgcgcgcctgggagacgctgcctcggcccggacgcgcccgcgcccccgcggctggagggtgattctgaaagtcaagaagacatcatccggaatattgccaggcacctcgcccaggtcggggacagcatggaccgtagcatccctccgggcctggtgaacggcctggccctgcagctcaggaacaccagccggtcggaggaggaccggaacagggacctggccactgccctggagcagctgctgcaggcctaccctagagacatggagaaggagaagaccatgctggtgctggccctgctgctggccaagaaggtggccagtcacacgccgtccttgctccgtgatgtctttcacacaacagtgaattttattaaccagaacctacgcacctacgtgaggagcttagccagaaatgggatggactgaacggacagttccagaagtgtgactggctaaagctcgatgtggtcacagctgtatagctgcttccagtgtagacggagccctggcatgtcaacagcgttcctagagaagacaggctggaagatagctgtgacttctattttaaagacaatgttaaacttataacccactttaaaatatctacattaatatacttgaatgaaaatgtccatttacacgtatttgaatggccttcatatcatccacacatgaatctgcacatctgtaaatctacacacggtgcctttatttccactgtgcaggttcccacttaaaaattaaattggaaagcaggtttcaaggaagtagaaacaaaatacaatttttttggtaaaaaaaaattactgtttattaaagtacaaccatagaggatggtcttacagcaggcagtatcctgtttgaggaaagcaagaatcagagaaggaacataccccttacaaatgaaaaattccactcaaaatagggactatctatcttaatactaaggaaccaacaatcttcctgtttaaaaaaccacatggcacagagattctgaactaaagtgctgcactcaaatgatgggaagtccggccccagtacacaggggcttgactttttcaacttcgtttcctttgttggagtcaaaaagaaccacttgtggttctaaaaggtgtgaaggtgatttaagggcccaggtcagccactgtttgtttacaaaatcaggtaactaactgcatacactttttctctttccatgacatcaagactttgctaaagacatgaagccacgggtgccagaagctactgcgatgccccgggagttagccccctggtaatagctgtaaacttccaatttctagccatacgctcagctcatccatgcctcagaagtgcatctggagagaacaggtttctaagcataaaagatgaaagagcagttggactttttaaaaattcagcaaagtggttccctctcttagggacagtcaaaaccaagtcacttaggtagtaccaaaataaataaggaaaagcttagctttagaaacagtgcaacactggtctgctgttccagtggtaagctatgtcccaggaatcagtttaaaagcacgacagtggatgctgggtccatatcacacacattgctgtgaacaggaaactcctgtgaccacaacatgaggccactggagacgcatatgagtaagggcactgacggactcatgatttcttcttaccagatgctttcctgttctttaagagtttaaaatcatcagaaaggaaaaacaaactctatattgttcagcatgcaatacataccacgctagggctggctcaattgaaagtgggcaaaagcttacaaatactaaaaagaagtgctgccgcgcagtgtgga

SEQ ID NO: 111526 - DNA, 2129 bp, Homo sapiens
  Payload ID: 1839
  Gene Symbol: BID
  Gene Name: BH3 interacting domain death agonist
  Uniprot ID: P55957
  ENST ID: ENST00000399767
  CDS Start-End: 392-691
gaaggaggaagcgcgcggggcgccataaggaggaagcgggtagtcgaccgtgtccgcgcgcctgggagacgctgcctcggcccggacgcgcccgcgcccccgcggctggagggtggtcaacaacggttccagcctcagggatgagtgcatcacaaacctactggtgtttggcttcctccaaagctgttctgacaacagcttccgcagagagctggacgcactgggccacgagctgccagtgctggctccccagtgggagggctacgatgagctgcagactgatggcaaccgcagcagccactcccgcttgggaagaatagaggcagattctgaaagtcaagaagacatcatccggaatattgccaggcacctcgcccaggtcggggacagcatggaccgtagcatccctccgggcctggtgaacggcctggccctgcagctcaggaacaccagccggtcggaggaggaccggaacagggacctggccactgccctggagcagctgctgcaggcctaccctagagacatggagaaggagaagaccatgctggtgctggccctgctgctggccaagaaggtggccagtcacacgccgtccttgctccgtgatgtctttcacacaacagtgaattttattaaccagaacctacgcacctacgtgaggagcttagccagaaatgggatggactgaacggacagttccagaagtgtgactggctaaagctcgatgtggtcacagctgtatagctgcttccagtgtagacggagccctggcatgtcaacagcgttcctagagaagacaggctggaagatagctgtgacttctattttaaagacaatgttaaacttataacccactttaaaatatctacattaatatacttgaatgaaaatgtccatttacacgtatttgaatggccttcatatcatccacacatgaatctgcacatctgtaaatctacacacggtgcctttatttccactgtgcaggttcccacttaaaaattaaattggaaagcaggtttcaaggaagtagaaacaaaatacaatttttttggtaaaaaaaaattactgtttattaaagtacaaccatagaggatggtcttacagcaggcagtatcctgtttgaggaaagcaagaatcagagaaggaacataccccttacaaatgaaaaattccactcaaaatagggactatctatcttaatactaaggaaccaacaatcttcctgtttaaaaaaccacatggcacagagattctgaactaaagtgctgcactcaaatgatgggaagtccggccccagtacacaggggcttgactttttcaacttcgtttcctttgttggagtcaaaaagaaccacttgtggttctaaaaggtgtgaaggtgatttaagggcccaggtcagccactgtttgtttacaaaatcaggtaactaactgcatacactttttctctttccatgacatcaagactttgctaaagacatgaagccacgggtgccagaagctactgcgatgccccgggagttagccccctggtaatagctgtaaacttccaatttctagccatacgctcagctcatccatgcctcagaagtgcatctggagagaacaggtttctaagcataaaagatgaaagagcagttggactttttaaaaattcagcaaagtggttccctctcttagggacagtcaaaaccaagtcacttaggtagtaccaaaataaataaggaaaagcttagctttagaaacagtgcaacactggtctgctgttccagtggtaagctatgtcccaggaatcagtttaaaagcacgacagtggatgctgggtccatatcacacacattgctgtgaacaggaaactcctgtgaccacaacatgaggccactggagacgcatatgagtaagggcactgacggactcatgatttcttcttaccagatgctttcctgttctttaagagtttaaaatcatcagaaaggaaaaacaaactctatattgttcagcatgcaatacataccacgctagggctggctcaattgaaagtgggcaaaagcttacaaatactaaaaagaagtgctgccgcgcagtgtggaggccactgtttggaaataaatcttcctaacact

SEQ ID NO: 111527 - DNA, 2167 bp, Homo sapiens
  Payload ID: 1839
  Gene Symbol: BID
  Gene Name: BH3 interacting domain death agonist
  Uniprot ID: P55957
  ENST ID: ENST00000399774
  CDS Start-End: 171-758
ggaggaagcgcgcggggcgccataaggaggaagcgggtagtcgaccgtgtccgcgcgcctgggagacgctgcctcggcccggacgcgcccgcgcccccgcggctggagggtggtcgccactgggacactgtgaaccaggagtgagtcggagctgccgcgctgcccaggccatggactgtgaggtcaacaacggttccagcctcagggatgagtgcatcacaaacctactggtgtttggcttcctccaaagctgttctgacaacagcttccgcagagagctggacgcactgggccacgagctgccagtgctggctccccagtgggagggctacgatgagctgcagactgatggcaaccgcagcagccactcccgcttgggaagaatagaggcagattctgaaagtcaagaagacatcatccggaatattgccaggcacctcgcccaggtcggggacagcatggaccgtagcatccctccgggcctggtgaacggcctggccctgcagctcaggaacaccagccggtcggaggaggaccggaacagggacctggccactgccctggagcagctgctgcaggcctaccctagagacatggagaaggagaagaccatgctggtgctggccctgctgctggccaagaaggtggccagtcacacgccgtccttgctccgtgatgtctttcacacaacagtgaattttattaaccagaacctacgcacctacgtgaggagcttagccagaaatgggatggactgaacggacagttccagaagtgtgactggctaaagctcgatgtggtcacagctgtatagctgcttccagtgtagacggagccctggcatgtcaacagcgttcctagagaagacaggctggaagatagctgtgacttctattttaaagacaatgttaaacttataacccactttaaaatatctacattaatatacttgaatgaaaatgtccatttacacgtatttgaatggccttcatatcatccacacatgaatctgcacatctgtaaatctacacacggtgcctttatttccactgtgcaggttcccacttaaaaattaaattggaaagcaggtttcaaggaagtagaaacaaaatacaatttttttggtaaaaaaaaattactgtttattaaagtacaaccatagaggatggtcttacagcaggcagtatcctgtttgaggaaagcaagaatcagagaaggaacataccccttacaaatgaaaaattccactcaaaatagggactatctatcttaatactaaggaaccaacaatcttcctgtttaaaaaaccacatggcacagagattctgaactaaagtgctgcactcaaatgatgggaagtccggccccagtacacaggggcttgactttttcaacttcgtttcctttgttggagtcaaaaagaaccacttgtggttctaaaaggtgtgaaggtgatttaagggcccaggtcagccactgtttgtttacaaaatcaggtaactaactgcatacactttttctctttccatgacatcaagactttgctaaagacatgaagccacgggtgccagaagctactgcgatgccccgggagttagccccctggtaatagctgtaaacttccaatttctagccatacgctcagctcatccatgcctcagaagtgcatctggagagaacaggtttctaagcataaaagatgaaagagcagttggactttttaaaaattcagcaaagtggttccctctcttagggacagtcaaaaccaagtcacttaggtagtaccaaaataaataaggaaaagcttagctttagaaacagtgcaacactggtctgctgttccagtggtaagctatgtcccaggaatcagtttaaaagcacgacagtggatgctgggtccatatcacacacattgctgtgaacaggaaactcctgtgaccacaacatgaggccactggagacgcatatgagtaagggcactgacggactcatgatttcttcttaccagatgctttcctgttctttaagagtttaaaatcatcagaaaggaaaaacaaactctatattgttcagcatgcaatacataccacgctagggctggctcaattgaaagtgggcaaaagcttacaaatactaaaaagaagtgctgccgcgcagtgtggaggcc

SEQ ID NO: 111528 - DNA, 700 bp, Homo sapiens
  Payload ID: 1839
  Gene Symbol: BID
  Gene Name: BH3 interacting domain death agonist
  Uniprot ID: P55957
  ENST ID: ENST00000551952
  CDS Start-End: 85-672
cactgtctgaaacagtcgcgtaaggggtcgccactgggacactgtgaaccaggagtgagtcggagctgccgcgctgcccaggccatggactgtgaggtcaacaacggttccagcctcagggatgagtgcatcacaaacctactggtgtttggcttcctccaaagctgttctgacaacagcttccgcagagagctggacgcactgggccacgagctgccagtgctggctccccagtgggagggctacgatgagctgcagactgatggcaaccgcagcagccactcccgcttgggaagaatagaggcagattctgaaagtcaagaagacatcatccggaatattgccaggcacctcgcccaggtcggggacagcatggaccgtagcatccctccgggcctggtgaacggcctggccctgcagctcaggaacaccagccggtcggaggaggaccggaacagggacctggccactgccctggagcagctgctgcaggcctaccctagagacatggagaaggagaagaccatgctggtgctggccctgctgctggccaagaaggtggccagtcacacgccgtccttgctccgtgatgtctttcacacaacagtgaattttattaaccagaacctacgcacctacgtgaggagcttagccagaaatgggatggactgaacggacagttccagaagtgtgactggct

SEQ ID NO: 111529 - DNA, 1988 bp, Homo sapiens
  Payload ID: 1839
  Gene Symbol: BID
  Gene Name: BH3 interacting domain death agonist
  Uniprot ID: P55957
  ENST ID: ENST00000614949
  CDS Start-End: 251-550
gaaggaggaagcgcgcggggcgccataaggaggaagcgggtagtcgaccgtgtccgcgcgcctgggagacgctgcctcggcccggacgcgcccgcgcccccgcggctggagggtggtcgccactgggacactgtgaaccaggagtgagtcggagctgccgcgctgcccaggccatggactgtgagattctgaaagtcaagaagacatcatccggaatattgccaggcacctcgcccaggtcggggacagcatggaccgtagcatccctccgggcctggtgaacggcctggccctgcagctcaggaacaccagccggtcggaggaggaccggaacagggacctggccactgccctggagcagctgctgcaggcctaccctagagacatggagaaggagaagaccatgctggtgctggccctgctgctggccaagaaggtggccagtcacacgccgtccttgctccgtgatgtctttcacacaacagtgaattttattaaccagaacctacgcacctacgtgaggagcttagccagaaatgggatggactgaacggacagttccagaagtgtgactggctaaagctcgatgtggtcacagctgtatagctgcttccagtgtagacggagccctggcatgtcaacagcgttcctagagaagacaggctggaagatagctgtgacttctattttaaagacaatgttaaacttataacccactttaaaatatctacattaatatacttgaatgaaaatgtccatttacacgtatttgaatggccttcatatcatccacacatgaatctgcacatctgtaaatctacacacggtgcctttatttccactgtgcaggttcccacttaaaaattaaattggaaagcaggtttcaaggaagtagaaacaaaatacaatttttttggtaaaaaaaaattactgtttattaaagtacaaccatagaggatggtcttacagcaggcagtatcctgtttgaggaaagcaagaatcagagaaggaacataccccttacaaatgaaaaattccactcaaaatagggactatctatcttaatactaaggaaccaacaatcttcctgtttaaaaaaccacatggcacagagattctgaactaaagtgctgcactcaaatgatgggaagtccggccccagtacacaggggcttgactttttcaacttcgtttcctttgttggagtcaaaaagaaccacttgtggttctaaaaggtgtgaaggtgatttaagggcccaggtcagccactgtttgtttacaaaatcaggtaactaactgcatacactttttctctttccatgacatcaagactttgctaaagacatgaagccacgggtgccagaagctactgcgatgccccgggagttagccccctggtaatagctgtaaacttccaatttctagccatacgctcagctcatccatgcctcagaagtgcatctggagagaacaggtttctaagcataaaagatgaaagagcagttggactttttaaaaattcagcaaagtggttccctctcttagggacagtcaaaaccaagtcacttaggtagtaccaaaataaataaggaaaagcttagctttagaaacagtgcaacactggtctgctgttccagtggtaagctatgtcccaggaatcagtttaaaagcacgacagtggatgctgggtccatatcacacacattgctgtgaacaggaaactcctgtgaccacaacatgaggccactggagacgcatatgagtaagggcactgacggactcatgatttcttcttaccagatgctttcctgttctttaagagtttaaaatcatcagaaaggaaaaacaaactctatattgttcagcatgcaatacataccacgctagggctggctcaattgaaagtgggcaaaagcttacaaatactaaaaagaagtgctgccgcgcagtgtggaggccactgtttggaaataaatcttcctaacact

SEQ ID NO: 111530 - DNA, 2199 bp, Homo sapiens
  Payload ID: 1839
  Gene Symbol: BID
  Gene Name: BH3 interacting domain death agonist
  Uniprot ID: P55957
  ENST ID: ENST00000622694
  CDS Start-End: 174-761
gaaggaggaagcgcgcggggcgccataaggaggaagcgggtagtcgaccgtgtccgcgcgcctgggagacgctgcctcggcccggacgcgcccgcgcccccgcggctggagggtggtcgccactgggacactgtgaaccaggagtgagtcggagctgccgcgctgcccaggccatggactgtgaggtcaacaacggttccagcctcagggatgagtgcatcacaaacctactggtgtttggcttcctccaaagctgttctgacaacagcttccgcagagagctggacgcactgggccacgagctgccagtgctggctccccagtgggagggctacgatgagctgcagactgatggcaaccgcagcagccactcccgcttgggaagaatagaggcagattctgaaagtcaagaagacatcatccggaatattgccaggcacctcgcccaggtcggggacagcatggaccgtagcatccctccgggcctggtgaacggcctggccctgcagctcaggaacaccagccggtcggaggaggaccggaacagggacctggccactgccctggagcagctgctgcaggcctaccctagagacatggagaaggagaagaccatgctggtgctggccctgctgctggccaagaaggtggccagtcacacgccgtccttgctccgtgatgtctttcacacaacagtgaattttattaaccagaacctacgcacctacgtgaggagcttagccagaaatgggatggactgaacggacagttccagaagtgtgactggctaaagctcgatgtggtcacagctgtatagctgcttccagtgtagacggagccctggcatgtcaacagcgttcctagagaagacaggctggaagatagctgtgacttctattttaaagacaatgttaaacttataacccactttaaaatatctacattaatatacttgaatgaaaatgtccatttacacgtatttgaatggccttcatatcatccacacatgaatctgcacatctgtaaatctacacacggtgcctttatttccactgtgcaggttcccacttaaaaattaaattggaaagcaggtttcaaggaagtagaaacaaaatacaatttttttggtaaaaaaaaattactgtttattaaagtacaaccatagaggatggtcttacagcaggcagtatcctgtttgaggaaagcaagaatcagagaaggaacataccccttacaaatgaaaaattccactcaaaatagggactatctatcttaatactaaggaaccaacaatcttcctgtttaaaaaaccacatggcacagagattctgaactaaagtgctgcactcaaatgatgggaagtccggccccagtacacaggggcttgactttttcaacttcgtttcctttgttggagtcaaaaagaaccacttgtggttctaaaaggtgtgaaggtgatttaagggcccaggtcagccactgtttgtttacaaaatcaggtaactaactgcatacactttttctctttccatgacatcaagactttgctaaagacatgaagccacgggtgccagaagctactgcgatgccccgggagttagccccctggtaatagctgtaaacttccaatttctagccatacgctcagctcatccatgcctcagaagtgcatctggagagaacaggtttctaagcataaaagatgaaagagcagttggactttttaaaaattcagcaaagtggttccctctcttagggacagtcaaaaccaagtcacttaggtagtaccaaaataaataaggaaaagcttagctttagaaacagtgcaacactggtctgctgttccagtggtaagctatgtcccaggaatcagtttaaaagcacgacagtggatgctgggtccatatcacacacattgctgtgaacaggaaactcctgtgaccacaacatgaggccactggagacgcatatgagtaagggcactgacggactcatgatttcttcttaccagatgctttcctgttctttaagagtttaaaatcatcagaaaggaaaaacaaactctatattgttcagcatgcaatacataccacgctagggctggctcaattgaaagtgggcaaaagcttacaaatactaaaaagaagtgctgccgcgcagtgtggaggccactgtttggaaataaatcttcctaacact

SEQ ID NO: 111531 - DNA, 542 bp, Homo sapiens
  Payload ID: 1839
  Gene Symbol: BID
  Gene Name: BH3 interacting domain death agonist
  ENST ID: ENST00000617586
  CDS Start-End: 174-542
gaaggaggaagcgcgcggggcgccataaggaggaagcgggtagtcgaccgtgtccgcgcgcctgggagacgctgcctcggcccggacgcgcccgcgcccccgcggctggagggtggtcgccactgggacactgtgaaccaggagtgagtcggagctgccgcgctgcccaggccatggactgtgaggtcaacaacggttccagcctcagggatgagtgcatcacaaacctactggtgtttggcttcctccaaagctgttctgacaacagcttccgcagagagctggacgcactgggccacgagctgccagtgctggctccccagtgggagggctacgatgagctgcagactgatggcaaccgcagcagccactcccgcttgggaagaatagaggcaggggcgtcagacaataacacagcaagtgctgaggaagaaacggaggcggcagggagcgtggcagttgagcgtggccttcatggagctgcgacagtggtactcgggcaggggcagcacggaggctgtgcgccagaggaggaggactga

SEQ ID NO: 111532 - DNA, 2236 bp, Homo sapiens
  Payload ID: 1839
  Gene Symbol: BID
  Gene Name: BH3 interacting domain death agonist
  Uniprot ID: P55957
  ENST ID: ENST00000615414
  CDS Start-End: 499-798
gaggggccgaggccagccccggagaggagaaaacccgcgggcctggccgggtgcaggccacccttgccggcggatcggaatccccgcccacaccgtggtctttccagcaccgcagacacctgccggctcctcccgagcggagctcagggctgacaaagcgcggtcagagcggccgcttactggggctcgcccgctccttagagcactggcaatgatgtgcggatcctcgctgctgctgctgggaaactgttgagtggctgaatgaccccaggggaccctgggagagctctgaagccctcagccaccaagtggctgggctggcaagggttcattcattcattcaacaaatacgaatgtgcagcggtgctggggtcatgatggctcggtgggcagcgaggggccgggccggctggaggagcacagtgcggattctattctgaaagtcaagaagacatcatccggaatattgccaggcacctcgcccaggtcggggacagcatggaccgtagcatccctccgggcctggtgaacggcctggccctgcagctcaggaacaccagccggtcggaggaggaccggaacagggacctggccactgccctggagcagctgctgcaggcctaccctagagacatggagaaggagaagaccatgctggtgctggccctgctgctggccaagaaggtggccagtcacacgccgtccttgctccgtgatgtctttcacacaacagtgaattttattaaccagaacctacgcacctacgtgaggagcttagccagaaatgggatggactgaacggacagttccagaagtgtgactggctaaagctcgatgtggtcacagctgtatagctgcttccagtgtagacggagccctggcatgtcaacagcgttcctagagaagacaggctggaagatagctgtgacttctattttaaagacaatgttaaacttataacccactttaaaatatctacattaatatacttgaatgaaaatgtccatttacacgtatttgaatggccttcatatcatccacacatgaatctgcacatctgtaaatctacacacggtgcctttatttccactgtgcaggttcccacttaaaaattaaattggaaagcaggtttcaaggaagtagaaacaaaatacaatttttttggtaaaaaaaaattactgtttattaaagtacaaccatagaggatggtcttacagcaggcagtatcctgtttgaggaaagcaagaatcagagaaggaacataccccttacaaatgaaaaattccactcaaaatagggactatctatcttaatactaaggaaccaacaatcttcctgtttaaaaaaccacatggcacagagattctgaactaaagtgctgcactcaaatgatgggaagtccggccccagtacacaggggcttgactttttcaacttcgtttcctttgttggagtcaaaaagaaccacttgtggttctaaaaggtgtgaaggtgatttaagggcccaggtcagccactgtttgtttacaaaatcaggtaactaactgcatacactttttctctttccatgacatcaagactttgctaaagacatgaagccacgggtgccagaagctactgcgatgccccgggagttagccccctggtaatagctgtaaacttccaatttctagccatacgctcagctcatccatgcctcagaagtgcatctggagagaacaggtttctaagcataaaagatgaaagagcagttggactttttaaaaattcagcaaagtggttccctctcttagggacagtcaaaaccaagtcacttaggtagtaccaaaataaataaggaaaagcttagctttagaaacagtgcaacactggtctgctgttccagtggtaagctatgtcccaggaatcagtttaaaagcacgacagtggatgctgggtccatatcacacacattgctgtgaacaggaaactcctgtgaccacaacatgaggccactggagacgcatatgagtaagggcactgacggactcatgatttcttcttaccagatgctttcctgttctttaagagtttaaaatcatcagaaaggaaaaacaaactctatattgttcagcatgcaatacataccacgctagggctggctcaattgaaagtgggcaaaagcttacaaatactaaaaagaagtgctgccgcgcagtgtggaggccactgtttggaaataaatcttcctaacact

SEQ ID NO: 111533 - DNA, 419 bp, Homo sapiens
  Payload ID: 1839
  Gene Symbol: BID
  Gene Name: BH3 interacting domain death agonist
  Uniprot ID: P55957
  ENST ID: ENST00000611040
  CDS Start-End: 92-391
cactgtctgaaacagtcgcgtaagggattctgaaagtcaagaagacatcatccggaatattgccaggcacctcgcccaggtcggggacagcatggaccgtagcatccctccgggcctggtgaacggcctggccctgcagctcaggaacaccagccggtcggaggaggaccggaacagggacctggccactgccctggagcagctgctgcaggcctaccctagagacatggagaaggagaagaccatgctggtgctggccctgctgctggccaagaaggtggccagtcacacgccgtccttgctccgtgatgtctttcacacaacagtgaattttattaaccagaacctacgcacctacgtgaggagcttagccagaaatgggatggactgaacggacagttccagaagtgtgactggct

SEQ ID NO: 111534 - DNA, 862 bp, Homo sapiens
  Payload ID: 1840
  Gene Symbol: BLID
  Gene Name: BH3-like motif containing, cell death inducer
  Uniprot ID: Q8IZY5
  ENST ID: ENST00000560104
  CDS Start-End: 294-620
atgatgttgtgtttggagaaaagagagaagagaattgaataagtacatgaccccttggaagctgttttcagttgaggattttggtgagtagccacttgaaatcaagggaaattccatgaatagcaggagctgggaagaaaggaagaggaggaaggatcccaccacttttttcttcccatctaacaccgtgcttatgcaaagcatagtccatatgagatctgccttataaaaacttgctgaataaagcgaatggaagttaaattttggactttcttccataatagcttcaaattatggtgactttgttgcctatagagggccaggaaatacatttctttgagatcctagaatctgagtgtgtgctctacacaggatggatagagcgagcctctggcagttccatttatccagaggcaaaagcacgcctgccactggaggcgctcttgggttccaacaaagaacctatgttgcctaaggaaacagtgctttctcttaaaaggtacaatcttggctcctctgccatgaagcggaatgttcctggacatgtgcttcagagaccttcctatttaaccaggatacaagttacattgttatgcaattcctctgctgaggccctgtaaaaggagtgagttaggacagatgcagcaagatattaggacagatttcgcccattattcaggctgcacaacacagaaggaaacttgatttcaataagacccaattcttaacagtcttttctacccacttttacccataacttttccaaatttggttcaaattgtgcagagaaacaataaaatttttaaaaaggataaactggctagttaaaagtaaatggcatttaattaaaacaaatcttgca

SEQ ID NO: 111535 - DNA, 3281 bp, Homo sapiens
  Payload ID: 1841
  Gene Symbol: BICD1
  Gene Name: bicaudal D homolog 1 (Drosophila)
  Uniprot ID: Q96G01
  ENST ID: ENST00000281474
  CDS Start-End: 104-3031
ccgtttccacccatcccttcccatttccttctccctttccccgccagcttcgcatccatctcccccaccccgtaaccccctcctgcctccatccaccggggctatggccgcagaagaggtattgcagacggtggaccattataagactgagatagagaggctaaccaaggagctcacggagaccacccacgagaagatccaggctgccgagtacgggctggtggtgctggaggagaagctgaccctcaaacagcagtatgatgaactggaggctgagtacgacagcctcaaacaggagctggagcagctcaaagaggcatttgggcagtccttctccatccaccggaaggttgctgaagatggagagactcgggaggaaacgcttctgcaggagtcagcatcgaaggaggcttactatctggggaagatcttggagatgcagaacgagctgaaacagagccgggctgtggtcactaatgtacaggcagaaaacgagaggctcaccgcagtcgtgcaggatctgaaggagaacaatgagatggtggagctacagagaatacggatgaaggatgaaatccgagaatataagttccgggaggcacggctccttcaggactatactgaattggaagaagaaaatatcacattgcagaaactagtgtccacgttgaagcagaaccaggttgaatacgaaggcttaaagcatgagattaagcgatttgaggaggagacggtactgctgaacagccagctggaagatgccatccgattgaaagagattgctgagcaccaactggaagaagccctcgagactttaaaaaatgaaagagagcaaaagaacaacctgcggaaggagctctcccagtatatcagcctcaatgataaccatatcagcatctcagtagatggactcaaatttgccgaggatgggagtgaaccaaacaatgatgacaaaatgaacggtcatatccatgggcctcttgtgaaactgaatggagactatcggactcccaccttaaggaaaggagagtctctgaaccctgtctctgacttattcagtgagctgaacatttcagaaatacagaagttgaagcagcagcttatgcaggtagagcgggaaaaggccattcttttggccaacctacaggagtcacagacacagctggaacacaccaagggggcactgacggagcagcatgagcgggtgcaccggctcacagagcacgtcaatgccatgaggggcctgcaaagcagcaaggagctcaaggctgagctggacggggagaagggccgggactcaggggaggaggcccatgactatgaggtggacatcaatggtttagagatccttgaatgcaaatacagggtggcagtaactgaggtgattgatctgaaagctgaaattaaggccttaaaggagaaatataataaatctgtagaaaactacactgatgagaaggccaagtatgagagtaaaatccagatgtatgatgagcaggtgacaagccttgagaagaccaccaaggagagtggtgagaagatggcccacatggagaaggagttgcaaaagatgaccagcatagccaacgaaaatcacagtacccttaatacggcccaggatgagttagtgacattcagtgaggagttagctcagctttaccaccatgtgtgtctatgtaataatgaaactcccaacagggtcatgctggattactataggcagagcagagtcacccgcagtggcagcctgaaagggcccgatgatcccagaggacttttgtccccacgattagccaggcggggtgtgtcatccccggtagaaacaaggacctcatctgaaccagttgcaaaagaaagcacagaggccagcaaagaaccaagtccaactaagacccccacaatctctcctgttattactgccccaccgtcatctccagtattggatacaagtgacatccgcaaagagccaatgaatatctacaaccttaatgccataatccgggaccaaatcaagcatctgcagaaagctgtggaccggtccttgcaactgtctcgtcaaagagcagcggctcgggagctagcccccatgattgataaagacaaggaagccttaatggaagagatcctcaagctaaagtccctgctgagcaccaaacgggagcagatcgccacattgagggcggtgttgaaagccaacaagcagacagctgaggtggcgctagctaatctcaagaacaaatatgaaaatgaaaaagcaatggtgactgaaaccatgacgaagcttagaaatgaactgaaggctttgaaagaagatgctgcaaccttctcatccctgagagcaatgtttgcaacaagatgtgatgaatatgtcacccagttggatgagatgcagagacagttagcagctgcagaggatgagaagaagactctgaacactttgttacgaatggctatccagcaaaaactcgccctgacccagaggctggaggacttagagtttgaccatgagcagtcccgacgcagcaaaggcaaacttggaaagagcaagatcggcagccctaaagtaagtggggaggcatcagtcaccgtgcccaccatagacacttacctcctgcatagtcagggcccacagacacccaacattcgggtcagcagtggcactcagaggaaaagacaattttcaccttccctttgtgatcagagccgtcccaggacttcaggggcttcctacctacagaatttattaagagttccccctgatcccacctccacagaatcatttcttctgaagggccccccttccatgagtgaattcatccaagggcaccggctcagcaaggaaaaaaggttaaccgtggctccaccagattgtcagcagcctgctgcctccgtaccgccacagtgctcacaactagccgggaggcaagactgcccaactgtcagtcctgacacagctctccctgaggagcagccacattccagctcccagtgcgcccctctccactgtctctccaagcctcctcacccctagtcttcatctcctgtggacgaacatctggggtggaagttttgtagccacacacaggatactgcccaagatccagcgggtgttttcttctcggttgttagatgtacaattggattaatgtccatcgttttggaagacgagagaaagttgagaagaacacgaagcacagaccctgatgtgataaaacattttgtggtttctctgagtcacagataaacttctgccatcaaatggctacagttcatttaaattt

SEQ ID NO: 111536 - DNA, 3194 bp, Homo sapiens
  Payload ID: 1841
  Gene Symbol: BICD1
  Gene Name: bicaudal D homolog 1 (Drosophila)
  ENST ID: ENST00000395758
  CDS Start-End: 81-2564
tttccttctccctttccccgccagcttcgcatccatctcccccaccccgtaaccccctcctgcctccatccaccggggctatggccgcagaagaggtattgcagacggtggaccattataagactgagatagagaggctaaccaaggagctcacggagaccacccacgagaagatccaggctgccgagtacgggctggtggtgctggaggagaagctgaccctcaaacagcagtatgatgaactggaggctgagtacgacagcctcaaacaggagctggagcagctcaaagaggcatttgggcagtccttctccatccaccggaaggttgctgaagatggagagactcgggaggaaacgcttctgcaggagtcagcatcgaaggaggcttactatctggggaagatcttggagatgcagaacgagctgaaacagagccgggctgtggtcactaatgtacaggcagaaaacgagaggctcaccgcagtcgtgcaggatctgaaggagaacaatgagatggtggagctacagagaatacggatgaaggatgaaatccgagaatataagttccgggaggcacggctccttcaggactatactgaattggaagaagaaaatatcacattgcagaaactagtgtccacgttgaagcagaaccaggttgaatacgaaggcttaaagcatgagattaagcgatttgaggaggagacggtactgctgaacagccagctggaagatgccatccgattgaaagagattgctgagcaccaactggaagaagccctcgagactttaaaaaatgaaagagagcaaaagaacaacctgcggaaggagctctcccagtatatcagcctcaatgataaccatatcagcatctcagtagatggactcaaatttgccgaggatgggagtgaaccaaacaatgatgacaaaatgaacggtcatatccatgggcctcttgtgaaactgaatggagactatcggactcccaccttaaggaaaggagagtctctgaaccctgtctctgacttattcagtgagctgaacatttcagaaatacagaagttgaagcagcagcttatgcaggtagagcgggaaaaggccattcttttggccaacctacaggagtcacagacacagctggaacacaccaagggggcactgacggagcagcatgagcgggtgcaccggctcacagagcacgtcaatgccatgaggggcctgcaaagcagcaaggagctcaaggctgagctggacggggagaagggccgggactcaggggaggaggcccatgactatgaggtggacatcaatggtttagagatccttgaatgcaaatacagggtggcagtaactgaggtgattgatctgaaagctgaaattaaggccttaaaggagaaatataataaatctgtagaaaactacactgatgagaaggccaagtatgagagtaaaatccagatgtatgatgagcaggtgacaagccttgagaagaccaccaaggagagtggtgagaagatggcccacatggagaaggagttgcaaaagatgaccagcatagccaacgaaaatcacagtacccttaatacggcccaggatgagttagtgacattcagtgaggagttagctcagctttaccaccatgtgtgtctatgtaataatgaaactcccaacagggtcatgctggattactataggcagagcagagtcacccgcagtggcagcctgaaagggcccgatgatcccagaggacttttgtccccacgattagccaggcggggtgtgtcatccccggtagaaacaaggacctcatctgaaccagttgcaaaagaaagcacagaggccagcaaagaaccaagtccaactaagacccccacaatctctcctgttattactgccccaccgtcatctccagtattggatacaagtgacatccgcaaagagccaatgaatatctacaaccttaatgccataatccgggaccaaatcaagcatctgcagaaagctgtggaccggtccttgcaactgtctcgtcaaagagcagcggctcgggagctagcccccatgattgataaagacaaggaagccttaatggaagagatcctcaagctaaagtccctgctgagcaccaaacgggagcagatcgccacattgagggcggtgttgaaagccaacaagcagacagctgaggtggcgctagctaatctcaagaacaaatatgaaaatgaaaaagcaatggtgactgaaaccatgacgaagcttagaaatgaactgaaggctttgaaagaagatgctgcaaccttctcatccctgagagcaatgtttgcaacaagatgtgatgaatatgtcacccagttggatgagatgcagagacagttagcagctgcagaggatgagaagaagactctgaacactttgttacgaatggctatccagcaaaaactcgccctgacccagaggctggaggacttagagtttgaccatgagcagtcccgacgcagcaaaggcaaacttggaaagagcaagatcggcagccctaaaacaattttcaccttccctttgtgatcagagccgtcccaggacttcaggggcttcctacctacagaatttattaagagttccccctgatcccacctccacagaatcatttcttctgaagggccccccttccatgagtgaattcatccaagggcaccggctcagcaaggaaaaaaggttaaccgtggctccaccagattgtcagcagcctgctgcctccgtaccgccacagtgctcacaactagccgggaggcaagactgcccaactgtcagtcctgacacagctctccctgaggagcagccacattccagctcccagtgcgcccctctccactgtctctccaagcctcctcacccctagtcttcatctcctgtggacgaacatctggggtggaagttttgtagccacacacaggatactgcccaagatccagcgggtgttttcttctcggttgttagatgtacaattggattaatgtccatcgttttggaagacgagagaaagttgagaagaacacgaagcacagaccctgatgtgataaaacattttgtggtttctctgagtcacagataaacttctgccatcaaatggctacagttcatttaaatttaaaaaaaagaaaaaagaaacagaaaacgtgtctcagatggctggct

SEQ ID NO: 111537 - DNA, 8811 bp, Homo sapiens
  Payload ID: 1841
  Gene Symbol: BICD1
  Gene Name: bicaudal D homolog 1 (Drosophila)
  Uniprot ID: Q96G01
  ENST ID: ENST00000548411
  CDS Start-End: 182-2689
ctcgggcggtgtagctgccgctgccaccagagccggcggggcatcgcgctgctcattcatccggccgcactttcttttccgtttccacccatcccttcccatttccttctccctttccccgccagcttcgcatccatctcccccaccccgtaaccccctcctgcctccatccaccggggctatggccgcagaagaggtattgcagacggtggaccattataagactgagatagagaggctaaccaaggagctcacggagaccacccacgagaagatccaggctgccgagtacgggctggtggtgctggaggagaagctgaccctcaaacagcagtatgatgaactggaggctgagtacgacagcctcaaacaggagctggagcagctcaaagaggcatttgggcagtccttctccatccaccggaaggttgctgaagatggagagactcgggaggaaacgcttctgcaggagtcagcatcgaaggaggcttactatctggggaagatcttggagatgcagaacgagctgaaacagagccgggctgtggtcactaatgtacaggcagaaaacgagaggctcaccgcagtcgtgcaggatctgaaggagaacaatgagatggtggagctacagagaatacggatgaaggatgaaatccgagaatataagttccgggaggcacggctccttcaggactatactgaattggaagaagaaaatatcacattgcagaaactagtgtccacgttgaagcagaaccaggttgaatacgaaggcttaaagcatgagattaagcgatttgaggaggagacggtactgctgaacagccagctggaagatgccatccgattgaaagagattgctgagcaccaactggaagaagccctcgagactttaaaaaatgaaagagagcaaaagaacaacctgcggaaggagctctcccagtatatcagcctcaatgataaccatatcagcatctcagtagatggactcaaatttgccgaggatgggagtgaaccaaacaatgatgacaaaatgaacggtcatatccatgggcctcttgtgaaactgaatggagactatcggactcccaccttaaggaaaggagagtctctgaaccctgtctctgacttattcagtgagctgaacatttcagaaatacagaagttgaagcagcagcttatgcaggtagagcgggaaaaggccattcttttggccaacctacaggagtcacagacacagctggaacacaccaagggggcactgacggagcagcatgagcgggtgcaccggctcacagagcacgtcaatgccatgaggggcctgcaaagcagcaaggagctcaaggctgagctggacggggagaagggccgggactcaggggaggaggcccatgactatgaggtggacatcaatggtttagagatccttgaatgcaaatacagggtggcagtaactgaggtgattgatctgaaagctgaaattaaggccttaaaggagaaatataataaatctgtagaaaactacactgatgagaaggccaagtatgagagtaaaatccagatgtatgatgagcaggtgacaagccttgagaagaccaccaaggagagtggtgagaagatggcccacatggagaaggagttgcaaaagatgaccagcatagccaacgaaaatcacagtacccttaatacggcccaggatgagttagtgacattcagtgaggagttagctcagctttaccaccatgtgtgtctatgtaataatgaaactcccaacagggtcatgctggattactataggcagagcagagtcacccgcagtggcagcctgaaagggcccgatgatcccagaggacttttgtccccacgattagccaggcggggtgtgtcatccccggtagaaacaaggacctcatctgaaccagttgcaaaagaaagcacagaggccagcaaagaaccaagtccaactaagacccccacaatctctcctgttattactgccccaccgtcatctccagtattggatacaagtgacatccgcaaagagccaatgaatatctacaaccttaatgccataatccgggaccaaatcaagcatctgcagaaagctgtggaccggtccttgcaactgtctcgtcaaagagcagcggctcgggagctagcccccatgattgataaagacaaggaagccttaatggaagagatcctcaagctaaagtccctgctgagcaccaaacgggagcagatcgccacattgagggcggtgttgaaagccaacaagcagacagctgaggtggcgctagctaatctcaagaacaaatatgaaaatgaaaaagcaatggtgactgaaaccatgacgaagcttagaaatgaactgaaggctttgaaagaagatgctgcaaccttctcatccctgagagcaatgtttgcaacaagatgtgatgaatatgtcacccagttggatgagatgcagagacagttagcagctgcagaggatgagaagaagactctgaacactttgttacgaatggctatccagcaaaaactcgccctgacccagaggctggaggacttagagtttgaccatgagcagtcccgacgcagcaaaggcaaacttggaaagagcaagatcggcagccctaaaattgtcagcagcctgctgcctccgtaccgccacagtgctcacaactagccgggaggcaagactgcccaactgtcagtcctgacacagctctccctgaggagcagccacattccagctcccagtgcgcccctctccactgtctctccaagcctcctcacccctagtcttcatctcctgtggacgaacatctggggtggaagttttgtagccacacacaggatactgcccaagatccagcgggtgttttcttctcggttgttagatgtacaattggattaatgtccatcgttttggaagacgagagaaagttgagaagaacacgaagcacagaccctgatgtgataaaacattttgtggtttctctgagtcacagataaacttctgccatcaaatggctacagttcatttaaatttaaaaaaaagaaaaaagaaacagaaaacgtgtctcagatggctggctttacctcgatagcataagagagacctaagacatgtaaaatacgtatattgcagtatcatctttcctcacactccaaattcagctagggaagttgattccaatatgtttgtcattgatatttattttgtactttatttgctacatgatttatgtctatacaaataatttctctgaggtgaatttaattcatttattttcaaataagcataatttgctcaattaagtatgagtttgaatttagtttgaaatctggaattggccagactgtggtcatttttcttgcacaaaatgataaatgaggtgcatcagaatgttaacaataactgtattttgctgctacgctggtattgtttaggcacttactttctaatcagtagctcattaactgctgggttttgtttttgtatttttaactagagttcttcactggacattactaagtaaatctaagaaagagactaagttatgatttattgacttattcaagttttgatggcatctttacttttattttttcattgcagttgagtagatgtactggtgctgctcctttgtatgtgtgtatgtgtgtgataacgttaaagaaggctcaataacttgaagggaaaaaaatggtgtgtttatttaatgaccagaattttttttacttctcccaaaatcagggtcctactgagtctttcctgataaaaggtatcaagtacaaatgggaaaatatatacatatatagatgtaagatagcctttaattaattaatttacccagagagtgttcaaagtttgattaaaattgtatgttttgttgttgttagtttttttcataacgaatcttccttgccaaaaaaacaatagataataaaccttagctcattgtctacttttgacaaacactcaggtgcctacaaacattctattatcttgagataatacatgttcctggttaatttacagattctgctgggtaacttttatgacttgatttaaggcagtggattttcatagcaaaatttattttgcacataatctgacaaacaaggaaaacagctaactgagctgaaaggtctaacactctcgggctccttaaccatcaagtgctgcccacacaattgctcctagccctgattccttgtctttgtcaggtagccttaacttatttaaaaccataagggtttgaccttttcatataaagacatctgtaacttctcttcaaaacaaaaatgaccctcactgttaacacaaaggacagttaccagtgtagggcactgagaaaggagatccaggagccactcagcttattgagcggacatgggtggcacagaaatggagtggtccatcagagaccaaatggtaagtcgtaaagcacattgcaggagctttcgttagtcatacgcctattaagtagtggtcgctattaccaaagcaaccaggacgttttgtgttctttatatgagtgctattttccacagtgtcatttattatgcaacgtggagtaaagagttgaaatcttcaccaaaataagggttcaggttaaagtacagaaacagaaacaaaacgattcgacatgaagttcccaaccatagcagcctaaccttctgctcttttctacctgcatggccttgctgttcctaaacattgtcttcatttcactggcgttgtatctgcctagtaccagtattagtgagactgtggattttatcagagttcaatgaaagaaagcttacccctgccctcactttgtgttttttatttttccccctttctcaagcaccacgtatttggacctgagaagtggcatagctgctaagttgacttttaataaaaaactgtttgtgcctgagggaaatatatgcctttttaaaaagtacctcagaacatgttcgtagatcgtctcatcggttttgtttggtgggactgggagttcagcaggaagtattgtctgtgtgtgatgacggggcagtattgccagtcggcaatgttgtatttgcattctttatccctaactctgaatctaggactccatgaaaagccgggtcacccacaaaacatttcttccaatacaaagtgtattattacgtctattataaactagtttcatttcagttatttatcttcatagagtgggaaagtctttttctgaaatactaattctatgaaaataataattttagtgaatctttgccaagaagttatagaaacttggaaataaatttctcattttcagcacaaaattaagtgatagtccctaagcagtaagagagaataccatgtatttacactgtggcatcatttagtatagtttacactgagccatatttatttataggcatttaaagtgaatcagtatgtgtagtgttgataaaaatcagtatctgtaaagataacatcaggaattcaaaaggaaattgaaaaggggcagaactagtgagaaccaaaaagaatgaactccagtaagactaattgaagacatacttggagaggaaaaataaacagcagaaatgcactaaaaaatactggctaattattgcaaacagagtgagcaaagattaatgctaactagtaaaagtagttagcaaagtaaacaggtagttttttaaaagtaagcacaattacaatattgaatagtatggagaaatgcttttctcctgaggattttccttaatcaaaaaataagaagaagcaataaattgtctttggcctgagtgctgagtggcataaataaaggagcttggcttaatctttctggtccacacataatccattagatcccattcatatatccaactctggattctaataaaataatttggagaactttgagaaaaaggaaaactgttaaataagaaaagacctatttagaaattatactttagtctaacgaagaggaggtacaatagtagtcttcaagaaaagaatatttaacaaatgatagatatcagctatagatattgttactaagtctagaataaaaaaggcttcagtgtgaaggatgtatagtaactctaggaaagagatttttaacactgggaaattaacgtggaaattgataatcataaagaatatttgttttgtaaaaattgaatatcattggtggtctagtaagtattaagtggcaagataggagaatgcatttcagttctgggagctcataatcctgtgattcttttattttaagttttaaaatacattaaaattttactggttaatcataaaatattttatatttgaaaataggatggcaatctttatttttccaagatatttgttggaaaaaaatgatcgttggtattattttttctttcagctatattccatggtatctttaaaattgttcagaatataggacttttactaaaaaaattcaattgtcagagtctaaaaaaacaatgtcctcaggaatacttcagaaatagaaggtatgcaatcccttagtggggggcaaacacatttcagatttcgtctttatttaaaaggatcttcagtctacaacatttgcttttttcgtgctttggaaaatatccttgtgcagataagttcttctgtttgaaacaagcatgaaacattggtccaataacctaagaatgtggagatttcttgatattctgtattaattaaagttctctacatgtctcaaatggagatcacaaaacatgaaaaggaagaaatgaaatatcttttcttctgggatgagtgtcaattttaatgtataattgtcataatcaatcagccaaaagttacaatctgtccctcagagacattgggggaagctgatggatttccagtaaggaactgtggtgggttcaaactcaggctgccacaaatacattgatatggtaggtaggaagtaggactaaatttgaaagaaacttatgggataaagttcacaattttaaaaaggttgccctccagtttttttgtttgtttataaactagagtgatttttaagtaacccttatatttaaggctgcaaaaaatgtacaagagtatgttttcaagtaaagggaacataattcttcaaaaagctgttgaactggagttatgataggttatgacagagagcatgatcagtgctgatactgacaagtacttttttaccttaaaatcaacttctatggaactacaagatcaatctagctcccgagtgacattttccattgtctgtaataatgccctcggatgagttgtgtctaaaattaagttcatctttatttatatgcgaacttaactgccatagtccctaatgtattgcgtttgtaacctgatcgtattatgtttacagctgaaagatttcatctagacatgtctttcgtccttattattcaaagtgtaattgaaagagatatttagtattaagacatgttccccaattgagaattttccagaatattctacttaagaagaagaagagcaattaactgcctttagtgtaagggcgagagtgcatagaaatatgcaatgtaaaatgtttgcatgaattatttcacatcatgtaagctttcccatattcataagatgaacactatagaagtctcatttctctgtgatcttctgtccattaggaaagtaaggagattgttatctatatctagtctcctttccatattgaactgcatggctctaatcctcagtgtatttttatcccttctcgagttatttaaaatttgccctatttaagctgaagcctggataaactgctgagccagattattcctgtgattggagtttaattgctgtagaacacttgttgagaacacattttttactttttttctttcagaattattcctcaatcattgttctctaatgaaaacaccgagaagtaaatctggtgcttcttagtgtaaatatgtttttctttttaaaaagtcattttaaaacaaagatgagagaactataaagtaaggggaaatatcattttatttaaaaataattattcaatgatagataatggagatacagaatgactcattgggttcataggtatgatttgtgcagccagtcttagaggaaatacatcattttaacattattcccacaaaatgttaaagctcaatggtttgactatgagagtcaaacaattactatttgaaaatctcttatgacatttttataatctactctgtttttatttgcatgattatgcttatgtgatgaaccatccatgattctgatattgtatttctttccagtattaacatgtgtattgtgtggccaactctgatttgtacaccgtattattgttgtaatgattcaactgttcctacatttaattgcagtttaattattatgccttttggggttaaatgatgtgaagtgtttccacctactgataaataccatatgaaaacacgactaaaagactgatttaagaaacttgttatttttaaaaatatgaatttcaaaagaaatgttctcaaagacacatgcatttattttaaattcaaaaaattcttatgaatttattattgcttgtactttaactttttttattgtagacaatcctaagtgaataatgtctcatgggagaacacatgatatgtgcttgtatttgtgtaatctgatcatgcactcaatggttggaaaaggcactccagtgctaagaaaataaccagaagccaatatatcgattcttatatctcggtttatgttaccaactgaatatggtgtaatgcataactttttccagtaaataaactggttattttttgttcatttca

SEQ ID NO: 111538 - DNA, 423 bp, Homo sapiens
  Payload ID: 1841
  Gene Symbol: BICD1
  Gene Name: bicaudal D homolog 1 (Drosophila)
  ENST ID: ENST00000551086
  CDS Start-End: 37-318
ccccgtaaccccctcctgcctccatccaccggggctatggccgcagaagaggtattgcagacggtggaccattataagactgagatagagaggctaaccaaggagctcacggagaccacccacgagaagatccaggctgccgagtacgggctggtggtgctggaggagaagctgaccctcaaacagcagtatgatgaactggaggctgagtacgacagcctcaaacaggagctggagcagctcaaagagggccctttgttgttaaaagatgtgatttatgacatactgaatcaacttgccttccaatttagtgtgtaatatggtaagcatttatacttttagatatgtcttatttttatttggatgcctgtctaccaaaaaataaatgtactacctatgattaaaaatcccaactaggaatct

SEQ ID NO: 111539 - DNA, 1328 bp, Homo sapiens
  Payload ID: 1841
  Gene Symbol: BICD1
  Gene Name: bicaudal D homolog 1 (Drosophila)
  ENST ID: ENST00000550207
  CDS Start-End: 448-687
ggtggagcgagagagcgagccgcgagccggagcgcgccagacccagggcgagactgcagtgacgcggcccgggagacatggcggacgggcgtctctgaataagcagaatccggagcccctcgctacccgcggccgccgcagcccgggccatgccgcacggctgctgaccgcacgcaggggccggccccgaggacacatgcggcggcctttgccgcctcgcccctgaccctctgccctgttctccatgttgcatttctcgtcagtttctcgggcggtgtagctgccgctgccaccagagccggcggggcatcgcgctgctcattcatccggccgcactttcttttccgtttccacccatcccttcccatttccttctccctttccccgccagcttcgcatccatctcccccaccccgtaaccccctcctgcctccatccaccggggctatggccgcagaagaggtattgcagacggtggaccattataagactgagatagagaggctaaccaaggagctcacggagaccacccacgagaagatccaggctgccgagtacgggctggtggtgctggaggagaagctgaccctcaaacagcagtatgatgaactggaggctgagtacgacagcctcaaacaggagctggagcagctcaaagagggccctttgttggtaagagaagattgaaagagtccattgtttcctcccccaagagaaaaattgcctaagaaatgaatatataagctggaatttgggaggcaatggctgtttggcctgcgggggagggagattagtaagagtcatcaagtctcagcactctaagacgacattcaagtgggttggaatgtataaatcaaacttctcaaaaccgctgttatctcaaacccaggtttcagcgacaatttcgtagtccacaaaagtgatgaggtttgtgcctgaggacccacaatttcaggatttagactgtgtggcacctcagctttcctctggatgtaaccactccttggtgagagagggaactcctcaccaatcccatttgacaaaggctaggcaatcttcattctgcttggctttagtcattcttgtcattgggctgcagaagaaaaacaactttgctgggtgatcccactgccttgatttcacctcggagcgaggctgggccatgtccaagtcttatgaggtcaccctgactagaaaaaattgaactcacctacaaatagtctgaaagagtggtgtatatcaaatacgtgggtagtgttgcatttcaaatgaggctcttctggttgaaatgatatatttataaaaccagaatatcaaaaatgggtgat

SEQ ID NO: 111540 - DNA, 1962 bp, Homo sapiens
  Payload ID: 1841
  Gene Symbol: BICD1
  Gene Name: bicaudal D homolog 1 (Drosophila)
  Uniprot ID: Q96G01
  ENST ID: ENST00000551848
  CDS Start-End: 498-779
ccccgagactgcatcattccgcaccggctgctgcagggccagagggagcaggtggagcgagagagcgagccgcgagccggagcgcgccagacccagggcgagactgcagtgacgcggcccgggagacatggcggacgggcgtctctgaataagcagaatccggagcccctcgctacccgcggccgccgcagcccgggccatgccgcacggctgctgaccgcacgcaggggccggccccgaggacacatgcggcggcctttgccgcctcgcccctgaccctctgccctgttctccatgttgcatttctcgtcagtttctcgggcggtgtagctgccgctgccaccagagccggcggggcatcgcgctgctcattcatccggccgcactttcttttccgtttccacccatcccttcccatttccttctccctttccccgccagcttcgcatccatctcccccaccccgtaaccccctcctgcctccatccaccggggctatggccgcagaagaggtattgcagacggtggaccattataagactgagatagagaggctaaccaaggagctcacggagaccacccacgagaagatccaggctgccgagtacgggctggtggtgctggaggagaagctgaccctcaaacagcagtatgatgaactggaggctgagtacgacagcctcaaacaggagctggagcagctcaaagaggtgagttgcctgtcacctctccctttcctggccctcactccccccacccgcaaggcccactcatcatgatcaagaagtcataaaggaggtgattgaaaggactgttttttcttctagggccctttgttggtaagagaagattgaaagagtccattgtttcctcccccaagagaaaaattgcctaagaaatgaatatataagctggaatttgggaggcaatggctgtttggcctgcgggggagggagattagtaagagtcatcaagtctcagcactctaagacgacattcaagtgggttggaatgtataaatcaaacttctcaaaaccgctgttatctcaaacccaggtttcagcgacaatttcgtagtccacaaaagtgatgaggtttgtgcctgaggacccacaatttcaggatttagactgtgtggcacctcagctttcctctggatgtaaccactccttggtgagagagggaactcctcaccaatcccatttgacaaaggctaggcaatcttcattctgcttggctttagtcattcttgtcattgggctgcagaagaaaaacaactttgctgggtgatcccactgccttgatttcacctcggagcgaggctgggccatgtccaagtcttatgaggtcaccctgactagaaaaaattgaactcacctacaaatagtctgaaagagtggtgtatatcaaatacgtgggtagtgttgcatttcaaatgaggctcttctggttgaaatgatatatttataaaaccagaatatcaaaaatgggtgatgtataatgtctctttagttttttggtatttggcctcttttaaagcctgtcggatgtatgggagaaaacaatgaacgtgctttgatttcctatcagtcactcttaagaacatacatattgtttaagtaactcggtcttttttatctgattcttgaggcactatgggtagcaaataaccacttacaaatttaaatgtaatatacactccttttctgtgtgtcaagtccttatttttaggtgcatattgacatttaaatgttaattattgtttggcatataatatcaaaaatctattatttattttatgctgttacagttaaaagatgtgatttatgacatactgaatcaacttgccttccaatttagtgtgtaatatggtaagcatttatacttttagatatgtcttatttttatttggatgcctgtctaccaaaaaataaatgtactacctatgattaaaaatcccaa

SEQ ID NO: 111541 - DNA, 766 bp, Homo sapiens
  Payload ID: 1841
  Gene Symbol: BICD1
  Gene Name: bicaudal D homolog 1 (Drosophila)
  ENST ID: ENST00000547680
  CDS Start-End: 1-208
gtctcgtcaaagagcagcggctcgggagctagcccccatgattgataaagacaaggaagccttaatggaagagatcctcaagctaaagtccctgctgagcaccaaacgggagcagatcgccacattgagggcggtgttgaaagccaacaagcaggcacagtgccttctgatgaagtcagtaaatgcttatgaagcaccgtccatctagcactgtgctagatgctgaagattcaaagaagactaacacatggtccctgccttccagaagactcagcctcctggggatgtcaggatagaaacacaattacagttcaacgttacacatgctgtaatccaagttatgagaacaatgcagaggaagcaactaaggtttcctagaggagcggaaaagacttcacagaagcaattataccttagtttgttattaaaggataagaagttgttttccagaggaggaggaagtaattccagacagaacagtaggtagagaggctttggagtgacaaaatagaataatatattcagggaatgctcacaaaggcctatgtggctggaaataagactttttttatttagaaagtcaactttggaatgtgtggagaaagtggtgaaagcagaaatcagcaaatccagtgagttatggatacttaaaattacttaattctggaaaaactttgcacagtcaatggacaaacaaatctacaaacaaaactgaggctttggggtatttgtcacaaacaataaatgattttgtatttctgtttca

SEQ ID NO: 111542 - DNA, 1583 bp, Homo sapiens
  Payload ID: 1841
  Gene Symbol: BICD1
  Gene Name: bicaudal D homolog 1 (Drosophila)
  ENST ID: ENST00000552160
  CDS Start-End: 1-521
cagctgaggtggcgctagctaatctcaagaacaaatatgaaaatgaaaaagcaatggtgactgaaaccatgacgaagcttagaaatgaactgaaggctttgaaagaagatgctgcaaccttctcatccctgagagcaatgtttgcaacaagatgtgatgaatatgtcacccagttggatgagatgcagagacagttagcagctgcagaggatgagaagaagactctgaacactttgttacgaatggctatccagcaaaaactcgccctgacccagaggctggaggacttagagtttgaccatgagcagtcccgacgcagcaaaggcaaacttggaaagagcaagatcggcagccctaaagtaagtggggaggcatcagtcaccgtgcccaccatagacacttacctcctgcatagtcagggcccacagacacccaacattcgggtcagcagtggcactcagaggaaaaggtatgcatgcagcgatcttcatagtacggtgcagtggccagattttagttaactgcaaaaataaatgtgctcttgttgtggaggatggaggaggggaagcaaaagaaaaaatgggagctggcatataaatggtcttgctaatgtgggtctttccagatcaaaacctttttgataattgtgtttatgtagtcctttctaaccccctgcccaatccctcctcttgattaatcgtaatataattttcaagtgtctgttaatatttttgctactctttgtatgtgtaaatatgcctctcccttacctccaacctgagaattggtagataaaggtggatattaagaatgaagctgtgttctacctgggttataattttaaaagtcattgtacctttggaaatggtgctgtttatcagcttctctttaacggggcaaggatatgaatatgttctcttagggaaacttttgtccatatgaccaaaactgatgacagactgaaaggggatgtctatatctagataaaatgggatggaatacgcacagtccttttcttgaaagcaggtttttgtgctttttcatttggcatgggaatattgcccagagaaaccacttgtaaggtttttaggggcttgattttgtgagtcctggctgttgagttacttaccctgtattttcggttaatggtaacatttttattttaggagctttcattaaagactcaaataatatattttctatttgcggttcaagctgactaactgtaataaatcttttttccagtatccagaacagtttccaaatagggttgtatcctgatgtggaaactaaaaaaaaaaaaagcaaaaagattgatttacatatttaaaaaattaaatgccagtataaataatgttgtcactggtgaggcgttaaaaggtaattaaagtaaaacttttttgtttcctatatgtatttttcttggatctcctgcaagacaattttcaccttccctttgtgatcagagccgtcccaggacttcaggggcttcctacctacagaatttattaagagttccccctgatcccacctccacagaatcatttcttctgaagggccccccttccatgagtgaattcatc

SEQ ID NO: 111543 - DNA, 6427 bp, Homo sapiens
  Payload ID: 1842
  Gene Symbol: BICD2
  Gene Name: bicaudal D homolog 2 (Drosophila)
  Uniprot ID: Q8TD16
  ENST ID: ENST00000356884
  CDS Start-End: 69-2636
gcggcggcggctgaggagggcccggcctgcgagagcctcagtgggagccggctcagccctcggccaccatgtcggcgccgtcggaggaggaggagtacgcgcggctggtgatggaggcgcagccggagtggctgcgcgccgaggtgaagcggctgtcccacgagctggccgagaccacgcgtgagaagatccaggcggccgagtacgggctggcggtgctcgaggagaagcaccagctcaagctgcagttcgaggagctcgaggtggactatgaggctatccgcagcgagatggagcagctcaaggaggcctttggacaagcacacacaaaccacaagaaggtggctgctgacggagagagccgggaggagagcctgatccaggagtcggcctccaaggagcagtactacgtgcggaaggtgctagagctgcagacggagctgaagcagttgcgcaatgtcctcaccaacacgcagtcggagaatgagcgcctggcctctgtggcccaggagctgaaggagatcaaccagaatgtggagatccagcgtggccgcctgcgggatgacatcaaggagtacaaattccgggaagctcgtctgctgcaggactactcggaactggaggaggagaacatcagcctgcagaagcaagtgtctgtgctcagacagaaccaggtggagtttgagggcctcaagcatgagatcaagcgtctggaggaggagaccgagtacctcaacagccagctggaggatgccatccgcctcaaggagatctcagagcggcagctggaggaggcgctggagaccctgaagacggagcgcgaacagaagaacagcctgcgcaaggagctgtcacactacatgagcatcaatgactccttctacaccagccacctgcatgtctcgctggatggcctcaagttcagtgacgatgctgccgagcccaacaacgatgccgaggccctggtcaatggctttgagcacggcggcctggccaagctgccactggacaacaagacctccacgcccaagaaggagggcctcgcaccgccctcccccagcctcgtctccgacctactcagtgagctcaacatctctgagatccagaagctgaagcagcagctgatgcagatggagcgggaaaaggcgggcctgctggcaacgctgcaggacacacagaagcagctggagcacacgcggggctccctgtcagaacagcaggagaaggtgacccgcctcacagagaatctgagtgccctgcggcgcctgcaggccagcaaggagcggcagacagccctggacaacgagaaggaccgtgacagccatgaggatggggactactacgaggtggacatcaacgggcctgagatcttggcctgcaagtaccatgtggctgtggctgaggctggcgagctccgcgagcagctcaaggcactgcgcagcacgcacgaggctcgtgaggcccagcacgccgaggagaagggccgctatgaggctgagggccaggcactcacggagaaggtctccctgctagagaaggccagccgccaggaccgcgagctgctggcccggctggagaaggagctaaagaaggtgagcgacgtcgccggcgagacacagggcagcctgagtgtggcccaggatgagctggtgaccttcagtgaggagctggccaatctctaccaccacgtgtgcatgtgcaacaatgagacacccaaccgtgtcatgctggactactaccgcgagggccagggcggggccggccgcaccagtcccgggggccgcaccagccccgaggcgcgtggccggcgctcacccatcctcctacccaaggggctgctggctcctgaggcgggccgagcagatggtgggacgggggacagcagcccctcgcctggctcctcactgccatcacccctgagtgacccacgccgggagcccatgaacatctacaacctgatcgctatcatccgtgaccagatcaagcacctgcaggcagccgtggaccgcaccacggagctgtcacgccagcgcattgcctctcaggagctgggccccgccgtggacaaggacaaggaagcgcttatggaggagatcctcaagctgaagtcgctgctcagcaccaagcgggagcagatcaccacgctgcgcactgtgctcaaggccaacaagcagacggccgaggtggcccttgccaacctgaagagcaagtatgagaatgagaaggccatggttaccgagaccatgatgaagctgcgcaatgagctcaaggccctcaaggaggacgcagccaccttctcctcgctgcgtgctatgtttgccaccaggtgtgacgagtacattacacagctggatgagatgcagcggcagctggcggctgctgaggacgagaagaagacgctgaactcgctgctgcgcatggccatccagcagaagctggcgctgacccagcggctggagctgctcgagctggaccatgagcagacccggcgtggccgtgccaaagccgccccgaagaccaagccagccacaccgagcgtaagtcacacctgtgcctgtgccagcgacagggccgagggcaccgggctggccaaccaggtgttctgcagcgagaagcacagcatttactgtgattaggggctgtggggcgccgcacgctgcagctaacatctgcttcacctcaactaacccagcagcagcgggacggcggtgctaggtcaatcttaacgtgactaatgcacagagggtaggagtctagccgaggcgccatggggcgttgcatcagcaggacacttgtgagagctttgtgtcgcttctcactcctcaaagccccctcaggagcacccagtcctcagctgctctcttaggtgggggtcagaggtggggatagagctgcacattcttgcagcagatgtgtgatgaaagcatcttctaagccctgcgcacccgtggggaaacccaagggaggagtcctggtcctgctccctcagcacccaaaaggggcagaacctgagttgagacttgcatgttcctcgcatgtgtctaatgtcagcactagaaagcagttttaggaggttccagcctgcagcataggtacgacctcagaggatggctttgcacttggcatagtttcatggaaaggagtacgttgtagtttatgcagtatctgactgcaaatcatattcaggaaagaagtgcagaatttcttccccaagcccagagaagagcagccctgagcccctgtattctgctggccagacacacatggcacagacacagctgaccataacccaggaatccagagctcggtttctcatttctgagatcaggatgcttgtatagtggcctgtgaggtgacagattggcagggcccaaggccccaggttttcatttttcatgagaaaagctttccaagtgcctggccagaccttggtccttagtgcagagcccgtccttttgtacttggggtgaccccagcagccaattatccggccttccatagggggttcagtcccaaagacatggggctttgaaaaccctagcctgaagtctgagccaccaagggcttggctgggttggacacccacaggtgtatccagagcccagcccggtgctgggaaagctttgcatagggccagggccacttgtcaggattcacaggtaggagatgtttaggtctctttatttagtgcaatctgggggatggcaacagagaaagaggaaaggtagctgtagggttctcccatttccagaggctccatccacacctgccttcccacattctgagcagaacttttctcagtacttttttcccgatcaccctgtgggaccagctggacctgaggctgcagtcttctctcctgcaggctgcttgccttgtctctcatgcggaagaggcattcgagttacctggtgagagaccgtgttgccccctcccacagctctctgccctgcgcgttcttccctttggtgccgagtatgtttcggtcccctccagactccaggacacgcccatgtatgtcccctgcgtgttcatcctgggcccagatccccctgccccagcaagactcgcagtgggatggctgctggcatgcccaccctgcatgcgctttgccctctccttgcaagcctggcacatagcttctctccatactcctaagggactttgcagacacccaagccactgggacccctgctaacacatgcaggtcttctcttctgccaactaacgtgctcgcgccctcccagcacgtggagagcttcaattgtcagataaacaggaagcgacagatgaccgctttctaacgctctcttttctcccgttttcagctgtagagtagctgccaggaggacttggccacccggccctgtcacactgcagccccttccccttccctctcgtggcccacaaggaggaaggaagggcaacctaaaagcccacttagaaactttttggatatgccactgcaattcttttcaaaatagcattccccaggtttttaatgggaggaaaaaaagctttaatgttgagcatgctgcgagctgctgcgtggaaaggcctctgtatgggccgaagacccttcttccctggctgccaggctcgccaggagcccactggaaacgcccaccacgggggctccttgttacacatgttctttttttatccgatcaacctgtgcacttttgatattttgatattatatttgcttccttaattcctcgcgtagagacggtctcaggtgccgtggtctatgctcgtggtcctgtagctgtccgcctcagctcccaccgtgtttgtctggtgtcagcacgaggcagagctgtgtgctccatagcgtgtagctttagactcggagatgagtgctttgacccagcgaggagctcagctaagtgtatccacgctgtggttcagcagcctttagatcatacggcattgtggttcatgtttgaaattacagattttaaatgccatgttcattaagaaatccagggtattcagattctggggtttttcatattgtattattattattcttaggaatagttcaatgtaacaagaagaaaacttgacctttgctctggttaaaacagtaataggcacttgaaaaaaaaagataaattattgaatgagtagtattacctacaaattccagaattttctgggttttaggacgttgtgaagcatgactgattaacagaattttatacaactgtaccaataaaattccaaattggaattgttttgttactctggttgttgtgccaaattgtggtacacttagaaaattctacagtcgtcgatttttagggtgttctctttcaacacctttttgttagtaatcattgccagtagtgccttcatcagttaagggaggtgtcccagcacagatcattctcaaaagcgagcagggaagagctagtgggcatgctgaaggccagcgtggacagcaggtgaggcaggtgctcctcacacccagacctgggcatcttcattgagggaaagaaaacagtcattgtgcaaaattctgttagtcagtgattctttacttgcaaattcaggggcttagaaaatgaaagcaaacacaaaaccttgagtgtgctttgggaaccaaatggaccttctgggacaagctgagcaagctgtatgaacgccacgtttgtgaagagctgagggtatcaggagggccgacgctgtgttggcatgcgcagtaggggatgagggttagccatagtattctttgcaaatgtgaaagcgagacattatatcttctcttgcttggtgtaactaatcactgttaatttcaggaaacagaactcattaaaactccttagcaaaccaggtctacatcctgttttgtttgctgagtgaggttagtgggagtggtcaaattggtactcttggaggaagaaaaactgtccttccttctccaaaaaaggaaaaattataataatataaatgacaaaaataaaagaattctgtttcctggaataagcatttcttattcctagttgtagggactcctatttttaccttccgttacagtgttgattcataagaaatattgttacatttgagataacttcatctgtatggggtatttatttgcaatgatgtctgagtactgtattttttctgtgcattaccttagtgtcagaatgttggtctttattttaaagtcatatgcatgttctcctgccaaggaacctttacacagacccaaacaaaaaaataataatcaaatgccttcaatttctgagaaaatgaggcagagcatggaaaaggaataggaaggagaaattaattgagattttcaggacacagacatatgatgtgaatgcctacaaagccagtgcgcataggaacagtgggcctgggtaaagagtcacattggtaggaccaataaagaataataaaaagacaaagcaca

SEQ ID NO: 111544 - DNA, 4636 bp, Homo sapiens
  Payload ID: 1842
  Gene Symbol: BICD2
  Gene Name: bicaudal D homolog 2 (Drosophila)
  Uniprot ID: Q8TD16
  ENST ID: ENST00000375512
  CDS Start-End: 69-2543
gcggcggcggctgaggagggcccggcctgcgagagcctcagtgggagccggctcagccctcggccaccatgtcggcgccgtcggaggaggaggagtacgcgcggctggtgatggaggcgcagccggagtggctgcgcgccgaggtgaagcggctgtcccacgagctggccgagaccacgcgtgagaagatccaggcggccgagtacgggctggcggtgctcgaggagaagcaccagctcaagctgcagttcgaggagctcgaggtggactatgaggctatccgcagcgagatggagcagctcaaggaggcctttggacaagcacacacaaaccacaagaaggtggctgctgacggagagagccgggaggagagcctgatccaggagtcggcctccaaggagcagtactacgtgcggaaggtgctagagctgcagacggagctgaagcagttgcgcaatgtcctcaccaacacgcagtcggagaatgagcgcctggcctctgtggcccaggagctgaaggagatcaaccagaatgtggagatccagcgtggccgcctgcgggatgacatcaaggagtacaaattccgggaagctcgtctgctgcaggactactcggaactggaggaggagaacatcagcctgcagaagcaagtgtctgtgctcagacagaaccaggtggagtttgagggcctcaagcatgagatcaagcgtctggaggaggagaccgagtacctcaacagccagctggaggatgccatccgcctcaaggagatctcagagcggcagctggaggaggcgctggagaccctgaagacggagcgcgaacagaagaacagcctgcgcaaggagctgtcacactacatgagcatcaatgactccttctacaccagccacctgcatgtctcgctggatggcctcaagttcagtgacgatgctgccgagcccaacaacgatgccgaggccctggtcaatggctttgagcacggcggcctggccaagctgccactggacaacaagacctccacgcccaagaaggagggcctcgcaccgccctcccccagcctcgtctccgacctactcagtgagctcaacatctctgagatccagaagctgaagcagcagctgatgcagatggagcgggaaaaggcgggcctgctggcaacgctgcaggacacacagaagcagctggagcacacgcggggctccctgtcagaacagcaggagaaggtgacccgcctcacagagaatctgagtgccctgcggcgcctgcaggccagcaaggagcggcagacagccctggacaacgagaaggaccgtgacagccatgaggatggggactactacgaggtggacatcaacgggcctgagatcttggcctgcaagtaccatgtggctgtggctgaggctggcgagctccgcgagcagctcaaggcactgcgcagcacgcacgaggctcgtgaggcccagcacgccgaggagaagggccgctatgaggctgagggccaggcactcacggagaaggtctccctgctagagaaggccagccgccaggaccgcgagctgctggcccggctggagaaggagctaaagaaggtgagcgacgtcgccggcgagacacagggcagcctgagtgtggcccaggatgagctggtgaccttcagtgaggagctggccaatctctaccaccacgtgtgcatgtgcaacaatgagacacccaaccgtgtcatgctggactactaccgcgagggccagggcggggccggccgcaccagtcccgggggccgcaccagccccgaggcgcgtggccggcgctcacccatcctcctacccaaggggctgctggctcctgaggcgggccgagcagatggtgggacgggggacagcagcccctcgcctggctcctcactgccatcacccctgagtgacccacgccgggagcccatgaacatctacaacctgatcgctatcatccgtgaccagatcaagcacctgcaggcagccgtggaccgcaccacggagctgtcacgccagcgcattgcctctcaggagctgggccccgccgtggacaaggacaaggaagcgcttatggaggagatcctcaagctgaagtcgctgctcagcaccaagcgggagcagatcaccacgctgcgcactgtgctcaaggccaacaagcagacggccgaggtggcccttgccaacctgaagagcaagtatgagaatgagaaggccatggttaccgagaccatgatgaagctgcgcaatgagctcaaggccctcaaggaggacgcagccaccttctcctcgctgcgtgctatgtttgccaccaggtgtgacgagtacattacacagctggatgagatgcagcggcagctggcggctgctgaggacgagaagaagacgctgaactcgctgctgcgcatggccatccagcagaagctggcgctgacccagcggctggagctgctcgagctggaccatgagcagacccggcgtggccgtgccaaagccgccccgaagaccaagccagccacaccgagcctgtagagtagctgccaggaggacttggccacccggccctgtcacactgcagccccttccccttccctctcgtggcccacaaggaggaaggaagggcaacctaaaagcccacttagaaactttttggatatgccactgcaattcttttcaaaatagcattccccaggtttttaatgggaggaaaaaaagctttaatgttgagcatgctgcgagctgctgcgtggaaaggcctctgtatgggccgaagacccttcttccctggctgccaggctcgccaggagcccactggaaacgcccaccacgggggctccttgttacacatgttctttttttatccgatcaacctgtgcacttttgatattttgatattatatttgcttccttaattcctcgcgtagagacggtctcaggtgccgtggtctatgctcgtggtcctgtagctgtccgcctcagctcccaccgtgtttgtctggtgtcagcacgaggcagagctgtgtgctccatagcgtgtagctttagactcggagatgagtgctttgacccagcgaggagctcagctaagtgtatccacgctgtggttcagcagcctttagatcatacggcattgtggttcatgtttgaaattacagattttaaatgccatgttcattaagaaatccagggtattcagattctggggtttttcatattgtattattattattcttaggaatagttcaatgtaacaagaagaaaacttgacctttgctctggttaaaacagtaataggcacttgaaaaaaaaagataaattattgaatgagtagtattacctacaaattccagaattttctgggttttaggacgttgtgaagcatgactgattaacagaattttatacaactgtaccaataaaattccaaattggaattgttttgttactctggttgttgtgccaaattgtggtacacttagaaaattctacagtcgtcgatttttagggtgttctctttcaacacctttttgttagtaatcattgccagtagtgccttcatcagttaagggaggtgtcccagcacagatcattctcaaaagcgagcagggaagagctagtgggcatgctgaaggccagcgtggacagcaggtgaggcaggtgctcctcacacccagacctgggcatcttcattgagggaaagaaaacagtcattgtgcaaaattctgttagtcagtgattctttacttgcaaattcaggggcttagaaaatgaaagcaaacacaaaaccttgagtgtgctttgggaaccaaatggaccttctgggacaagctgagcaagctgtatgaacgccacgtttgtgaagagctgagggtatcaggagggccgacgctgtgttggcatgcgcagtaggggatgagggttagccatagtattctttgcaaatgtgaaagcgagacattatatcttctcttgcttggtgtaactaatcactgttaatttcaggaaacagaactcattaaaactccttagcaaaccaggtctacatcctgttttgtttgctgagtgaggttagtgggagtggtcaaattggtactcttggaggaagaaaaactgtccttccttctccaaaaaaggaaaaattataataatataaatgacaaaaataaaagaattctgtttcctggaataagcatttcttattcctagttgtagggactcctatttttaccttccgttacagtgttgattcataagaaatattgttacatttgagataacttcatctgtatggggtatttatttgcaatgatgtctgagtactgtattttttctgtgcattaccttagtgtcagaatgttggtctttattttaaagtcatatgcatgttctcctgccaaggaacctttacacagacccaaacaaaaaaataataatcaaatgccttcaatttctgagaaaatgaggcagagcatggaaaaggaataggaaggagaaattaattgagattttcaggacacagacatatgatgtgaatgcctacaaagccagtgcgcataggaacagtgggcctgggtaaagagtcacattggtaggaccaataaagaataataaaaagacaaagcaca

SEQ ID NO: 111545 - DNA, 1763 bp, Homo sapiens
  Payload ID: 1843
  Gene Symbol: BICC1
  Gene Name: BicC family RNA binding protein 1
  ENST ID: ENST00000263103
  CDS Start-End: 25-1545
gatccacaattcattgcgcagttgatggaacagcttgatgtcttcatcagtattaaaccaaagcccaaacagccaagcaagtctgtgattgtgaaaagtgttgagcgaaatgccttaaatatgtatgaagcaaggaaatgtctcctcggacttgaaagcagtggggttaccatagcaaccagtccatccccagcatcctgccctgccggcctggcatgtcccagcctggatatcttagcttcagcaggccttggactcactggactaggtcttttgggacccaccaccttatctctgaacacttcaacaaccccaaactcactcttgaatgctcttaatagctcagtcagtcctttgcaaagtccaagttctggtacacccagccccacattatgggcacccccacttgctaatacttcaagtgccacaggtttttctgctataccacaccttatgattccatctactgcccaagccacattaactaatattttgttgtctggagtgcccacctatgggcacacagctccatctccccctcctggcttgactcctgttgatgtccatatcaacagtatgcagaccgaaggcaaaaaaatctctgctgctttaaatggacatgcacagtctccagatataaaatatggtgcaatatccacttcatcacttggagaaaaagtgctgagtgcaaatcacggggatccgtccatccagacaagtgggtctgagcagacatctcccaaatcaagccccactgaaggttgtaatgatgcttttgttgaagtaggcatgcctcgaagtccttcccattctgggaatgctggtgacttgaaacagatgatgtgtccctccaaggtttcctgtgccaaaaggcagacagtggaactattgcaaggcacgaaaaactcacacttacacagcactgacaggttgctctcagaccctgaactgagtgctaccgaaagccctttggctgacaagaaggctccagggagtgagcgcgctgcagagagggcagcagctgcccagcaaaactccgaaagggcccaccttgctccacggtcatcatatgtcaacatgcaggcatttgactatgaacagaagaagctattagccaccaaagctatgttaaagaaaccagtggtgacggaggtcagaacgcccacaaatacctggagtggcctgggtttttctaaatccatgccagctgaaactatcaaggagttgagaagggccaatcatgtgtcctataagcccacaatgacaaccacttatgagggctcatccatgtccctttcacggtccaacagtcgtgagcacttgggaggtggaagcgaatctgataactggagagaccgaaatggaattggacctggaagtcatagtgaatttgcagcttctattggcagccctaagcgtaaacaaaacaaatcaagtgagcgttgtgttttatgcacacttttaggtatccccagattagaatgtgtttatttgggttggagtatcactgactgtggcctctctgacttcaagtgcttggtgtaattcacatgccatctcctctgtgaagcctccttgtttctcccagtgaagcaggccacctggttctctttcctctcactccattttgtgcgtgctttcactctagcacttgccataccaaagggcaattatttatctacctatctgtatctccttgtgaaatttgtgctccacaaaccaaagactgtatttgttcattttataaacatttatgaagtgtc

SEQ ID NO: 111546 - DNA, 5475 bp, Homo sapiens
  Payload ID: 1843
  Gene Symbol: BICC1
  Gene Name: BicC family RNA binding protein 1
  Uniprot ID: Q9H694
  ENST ID: ENST00000373886
  CDS Start-End: 5-2929
caccatggccgcccagggagagcccggctacctggcggcgcagtcggaccccggctccaacagcgagcgcagcaccgactccccagtgcccggctccgaggacgacttggtcgccggggcgaccctgcacagcccggagtggagcgaggagcgcttccgcgtggacaggaagaaacttgaggccatgttacaagctgctgctgaagggaaaggcagaagtggggaagacttttttcaaaagatcatggaggaaacaaatacgcagattgcttggccatcaaaactgaagatcggagccaaatccaagaaagatccccatattaaggtttctggaaagaaagaagatgttaaagaagccaaggaaatgatcatgtctgtcttagacacaaaaagcaatcgagtcacactgaagatggatgtttcacatacagaacattcacatgtaatcggcaaaggtggcaacaatattaaaaaagtgatggaagaaaccggatgccatatccactttccagattccaacaggaataaccaagcagaaaaaagcaaccaggtatctatagcgggacaaccagcaggagtagaatctgcccgagttagaattcgggagctgcttcctttggtgctgatgtttgagctaccaattgctggaattcttcaaccggttcctgatcctaattccccctctattcagcatatatcacaaacgtacaatatttcagtatcatttaaacagcgttcccgaatgtatggtgctactgtcatagtacgagggtctcagaataacactagtgctgtgaaggaaggaactgccatgctgttagaacatcttgctgggagcttagcatcagctattcctgtgagcacacaactagatattgcagctcaacatcatctctttatgatgggtcgaaatgggagcaacatcaaacatatcatgcagagaacaggtgctcagatccactttcctgatcccagtaatccacaaaagaaatctaccgtctacctccagggcaccattgagtctgtctgtcttgcaaggcaatatctcatgggttgtcttcctcttgtgttgatgtttgatatgaaggaagaaattgaagtagatccacaattcattgcgcagttgatggaacagcttgatgtcttcatcagtattaaaccaaagcccaaacagccaagcaagtctgtgattgtgaaaagtgttgagcgaaatgccttaaatatgtatgaagcaaggaaatgtctcctcggacttgaaagcagtggggttaccatagcaaccagtccatccccagcatcctgccctgccggcctggcatgtcccagcctggatatcttagcttcagcaggccttggactcactggactaggtcttttgggacccaccaccttatctctgaacacttcaacaaccccaaactcactcttgaatgctcttaatagctcagtcagtcctttgcaaagtccaagttctggtacacccagccccacattatgggcacccccacttgctaatacttcaagtgccacaggtttttctgctataccacaccttatgattccatctactgcccaagccacattaactaatattttgttgtctggagtgcccacctatgggcacacagctccatctccccctcctggcttgactcctgttgatgtccatatcaacagtatgcagaccgaaggcaaaaaaatctctgctgctttaaatggacatgcacagtctccagatataaaatatggtgcaatatccacttcatcacttggagaaaaagtgctgagtgcaaatcacggggatccgtccatccagacaagtgggtctgagcagacatctcccaaatcaagccccactgaaggttgtaatgatgcttttgttgaagtaggcatgcctcgaagtccttcccattctgggaatgctggtgacttgaaacagatgatgtgtccctccaaggtttcctgtgccaaaaggcagacagtggaactattgcaaggcacgaaaaactcacacttacacagcactgacaggttgctctcagaccctgaactgagtgctaccgaaagccctttggctgacaagaaggctccagggagtgagcgcgctgcagagagggcagcagctgcccagcaaaactccgaaagggcccaccttgctccacggtcatcatatgtcaacatgcaggcatttgactatgaacagaagaagctattagccaccaaagctatgttaaagaaaccagtggtgacggaggtcagaacgcccacaaatacctggagtggcctgggtttttctaaatccatgccagctgaaactatcaaggagttgagaagggccaatcatgtgtcctataagcccacaatgacaaccacttatgagggctcatccatgtccctttcacggtccaacagtcgtgagcacttgggaggtggaagcgaatctgataactggagagaccgaaatggaattggacctggaagtcatagtgaatttgcagcttctattggcagccctaagcgtaaacaaaacaaatcaacggaacactatctcagcagtagcaattacatggactgcatttcctcgctgacaggaagcaatggctgtaacttaaatagctctttcaaaggttctgacctccctgagctcttcagcaaactgggcctgggcaaatacacagatgttttccagcaacaagagatcgatcttcagacattcctcactctcacagatcaggatctgaaggagctgggaataactacttttggtgccaggaggaaaatgctgcttgcaatttcagaactaaataaaaaccgaagaaagctttttgaatcgccaaatgcacgcacctctttcctggaaggtggagcgagtggaaggctaccccgtcagtatcactcagacattgctagtgtcagtggccgctggtagcagcaccctcttggcacatgcccgctgactaactgtaaagtggacacaggagatgtatgaacagccttcacagcacaccatccttagcactctgggtgtctggtatcaggaccaaagcattttattcgcacctgtactttatggcaaaaaggaagaagagagagaagatgttcttatgatgtcatacagaacaccaaatatggattacttttttaaaatggcagttggacagaatttgcaatataaggatagggctttatttcctgtttttatttacctatataacatatgcactgatgatttttttttttttttttttttttttttttttacttaaaatgaaggatgaattgacatctgggatgccagaagacttagaagttattttgtttgcttgttttgtttgggtatttggggatttttaaaaaataatcaaagtggaattttctggtactgctttaaaataattattgtggtctttcagcactttacacgttctaatttcttgtcctatggaagttctcgctgtctccatctctctcatttttgtgtcacctaatatgttggtacagataagagttagtcacatttttctgactgcatcaaacttttatttgaaatggtactggatcttagtttctgtgcagaatattctgtgattttgggaaatgtaagtgagtccacttgcttctggaccaattctgtttcatgtatgttagcatcctagaaacacctagcaatggacctagttcacagtaataggtgcaaagaaagaccaaatggactttgcagtattaaccctttgcagtcgtcatacttagctgctgcctgtaatgctaaaatgattttaatggttgtctggaggcaaagggctgttttttagtatattgccactaaaggacatttatttatatcaaacttttatttttagatattataagcatacagtacataattgatgaaattgatatttactagagatttatggtagagaatggacgacattcaataactggagcccgagattgtcactttatttaaaaagacaaataatcatctgacaagacagcactgttgccattataaggagaaatagattacaatccttatcatgtacacgttagctatgttccgtatggccacaggactttcctgaaaccgtatctgtctgcttgaagtagacttatgtttgttgagaatgaacaggcttatttgagcctccagggtggcagttcataaagacagctaagttctgaaggaaaaaaaaaatatatctttttaagtggctagagtcattattacaatcttatactgtgaaagtccaagaaatcaggcaacattgtttcctgggtcttttcagagatcttatagatttatgaagtgtttttaatccatgaagaaacactaaagtgcctttctttcttcaaagcaatattatttccaagtatattaatttgttagaaaactttcccataggaaatgttgtcaagttacctgtactgtaaagagttatttatgttcagtagtcaagattttctacatggacataaaccactctcacgtgctctcagcagaaggcattagataagcatatacaagaattgggtacttttatacaaatatgggataagaaatacttgcctgacacttttccatggctgagtctgaccattacagtaagaacaagaattgaagaggcattttgcacacagaaacattctcactttaaaaaatggtattggttaccttgaaggcatagataatgggcctgtcataaaattatcaattataactggcaccgagggactgccctttttaagctaaactaagccttatctgcttaaggatgttgaactgaatcactccctttactcatcctgtgcatatgtgtacaaatggtcatgtggatcatgtgatgatcatccatcttatttgattgtattaatgcatcatgctaaacatgtagtacaggttaacaataccagatttatgtcctgttcaacaactcagtactctaaatgttgttatgcttttaataagaccttcccagataataatcttggagctcttttcccagctgtctaccatgcatttgcaacaggaggaagatgtaatgaatatgcagtattaagttgatttatgaacagtgctttgatatgccaaagggaaaactgtcccacttaaattagattaagtagggtggctaaaaataaataaaaacactggaaattctttctctcactttctcttgatgcaatgaagggaatatgacactacagtatacagagttgttgttatatgatgcacaaaatattttgatgatttgaataaatgttaacttttaatctgcgccttaataatgactggttatctgtaaatatagaacagatacagattgtatttttctgtgggtttttgtccttttagtgatttttttccaaaaacgagagatggaattaacattgaaaatgggaaatttttctaactgaatcaattgttacatgaaaaataaatttatataacccctttgtattgctcttgctata

SEQ ID NO: 111547 - DNA, 3039 bp, Homo sapiens
  Payload ID: 1844
  Gene Symbol: BFAR
  Gene Name: bifunctional apoptosis regulator
  Uniprot ID: Q9NZS9
  ENST ID: ENST00000261658
  CDS Start-End: 278-1630
gtggccgctctaggcagcggggaggtcgcggggttgaggggggttgtgaaaggagagcggcctctcctctatggtcacggggccggggcacgcttcccccactctgtcttgttacttccggtagcgaagcctctccctcttcctctgctcccgcggggtctgtgctgagaataatggcccggttggcccgggacgagtggaatgattaatgatgttttgcagcagttttctacgtctgaaattttttatgtctctggaacccagaatttgctaagagatggaggaacctcagaaaagctatgtgaacacaatggaccttgagagagatgaacctctcaaaagcaccggccctcagatttctgttagtgaattttcttgccactgctgctacgacatcctggttaaccccaccaccttgaactgtgggcacagcttctgccgtcactgccttgctttatggtgggcatcttcaaagaaaacagaatgtccagaatgcagagaaaaatgggaaggtttccccaaagtcagtattctcctcagggatgccattgaaaagttatttcctgatgccattagactgagatttgaagacattcagcagaataatgacatagtccaaagtcttgcagcctttcagaaatatgggaatgatcagattcctttagctcctaacacaggccgagcgaatcagcagatgggagggggattcttttccggtgtgctcacagctttaactggagtggcagtggtcctgctcgtctatcactggagcagcagggaatctgaacacgacctcctggtccacaaggctgtggccaaatggacggcggaagaagttgtcctctggctggagcagctgggcccttgggcatctctttacagggaaaggtttttatctgaacgagtaaatggaaggttgcttttaactttgacagaggaagaattttccaagacgccctataccatagaaaacagcagccacaggagagccatcctcatggagctagaacgtgtcaaagcattaggcgtgaagcccccccagaatctctgggaatataaggctgtgaacccaggcaggtccctgttcctgctatacgccctcaagagctcccccaggctgagtctgctctacctgtacctgtttgactacaccgacaccttcctacctttcatccacaccatctgccctctgcaagaagacagctctggggaggacatcgtcaccaagcttctggatcttaaggagcctacgtggaagcagtggagagagttcctggtcaaatactccttccttccataccagctgattgctgagtttgcttgggactggttggaggtccattactggacatcacggtttctcatcatcaatgctatgttactctcagttctggaattattctccttttggagaatctggtcgagaagtgaactgaagaccgtgcctcagaggatgtggagccatttctggaaagtatcaacgcaggggctttttgtggccatgttctggcccctcatccctcagtttgtttgcaactgtttgttttactgggccctgtactttaacccaattattaacattgatcttgtggtcaaggaactccggcggctggaaacccaggtgttgtgactggcactgcccaggctgagactcttcaagtcccgctgacgtctgagctttgatgcttaagaggggtgaggcagggagcggacttcctattttctaccctcagtaaaacaaggtgctgctttgtatatcaaaagctccaaccatgtcctctccccctcagcctgtgggtggcacgagcaaggactgacatccgcacagggaggattgtctgtttggctgacacagcagcagcccttcccacccagccaccttcctcacagggactaggaggctcagtccccaacggctggcaagactcagggtcctcagtggacatggtgtgggtgacatcagaagggtgccacatcagtcccctccccaacctcagtgactgacagaggatccggatctcagagcctgagaccaggtttattggggcctggcctgtcctctaagtcaagtttaggaaaacaaggataagattctgtcataggcatagagagttgcacataaaaaataccgaagaaaacccaaaattcaatcaacaattctgtcttattgaagagttgctaggattcagagtaaaactcaaaggattcagtttgagcctagaatgatggttagacttgtagtcactgggcttttgttttgctttatggaaatcattgaaggtctggatccctttctctgaatggagagattgagagggatgtcgggcagttcccattagatttagtggccttcatgttattcagaattgttttggtgatacctcacccctgtaatcccagcactttgggtgggtgaggcaggcggatcacttgaagccaggacttcaagaccagcttggccaacatggtgaaacctcatctctactaaaaatacaaaaattagccaagtgtgatggcacatacctgtaatcccagctacttggaattggaaatcgcctgaacccaggaggcggaggttgcagggagggagactgcaccactgcacttcagcctgggtgacagagggagactctgtcttaaaaaaaaaaaaaaaatcatctgtaaaataaattccgggatagtcgttttgttcaaggaaatgttttgtaaattgagctcacactatataatctttattgtcctatcctgatgtataatacagcaggtataattacaccaagcgctatagttataaatatggcatgaagtgaactatggccttttatttccttccagtgtgaacacagcaggtgtgagatgtcatcttggaagacaggccttgcagaaataggcctacatccaaaatattatcttgtgactccatgaaccattcattaaccctttgtatctttgagtgaaaattttactcaaaagttgcatctggaagttcgaagaaattacttgaaataaaaataaagatttctatatagataaaaccta

SEQ ID NO: 111548 - DNA, 1662 bp, Homo sapiens
  Payload ID: 1844
  Gene Symbol: BFAR
  Gene Name: bifunctional apoptosis regulator
  ENST ID: ENST00000563971
  CDS Start-End: 162-1139
tccggtagcgaagcctctccctcttcctctgctcccgcggggtctgtgctgagaataatggcccggttggcccgggacgagtggaatgattaatgatgttttgcagcagttttctacgtctgaaattttttatgtctctggaacccagaatttgctaagagatggaggaacctcagaaaagctatgtgaacacaatggaccttgagagagatgaacctctcaaaagcaccggccctcagatttctgttagtgaattttcttgccactgctgctacgacatcctggttaaccccaccaccttgaactgtgggcacagcttctgccgtcactgccttgctttatggtgggcatcttcaaagaaaacagaatgtccagaatgcagagaaaaatgggaaggtttccccaaagtcagtattctcctcaggttgcttttaactttgacagaggaagaattttccaagacgccctataccatagaaaacagcagccacaggagagccatcctcatggagctagaacgtgtcaaagcattaggcgtgaagcccccccagaatctctgggaatataaggctgtgaacccaggcaggtccctgttcctgctatacgccctcaagagctcccccaggctgagtctgctctacctgtacctgtttgactacaccgacaccttcctacctttcatccacaccatctgccctctgcaagaagacagctctggggaggacatcgtcaccaagcttctggatcttaaggagcctacgtggaagcagtggagagagttcctggtcaaatactccttccttccataccagctgattgctgagtttgcttgggactggttggaggtccattactggacatcacggtttctcatcatcaatgctatgttactctcagttctggaattattctccttttggagaatctggtcgagaagtgaactgaagaccgtgcctcagaggatgtggagccatttctggaaagtatcaacgcaggggctttttgtggccatgttctggcccctcatccctcagtttgtttgcaactgtttgttttactgggccctgtactttaacccaattattaacattgatcttgtggtcaaggaactccggcggctggaaacccaggtgttgtgactggcactgcccaggctgagactcttcaagtcccgctgacgtctgagctttgatgcttaagaggggtgaggcagggagcggacttcctattttctaccctcagtaaaacaaggtgctgctttgtatatcaaaagctccaaccatgtcctctccccctcagcctgtgggtggcacgagcaaggactgacatccgcacagggaggattgtctgtttggctgacacagcagcagcccttcccacccagccaccttcctcacagggactaggaggctcagtccccaacggctggcaagactcagggtcctcagtggacatggtgtgggtgacatcagaagggtgccacatcagtcccctccccaacctcagtgactgacagaggatccggatctcagagcctgagaccaggtttattggggcctggcctgtcctctaagtcaagtttaggaaaacaaggataagattctgtcataggcatagagagttgcacataaaaaataccgaagaaaacccaaaattcaatca

SEQ ID NO: 111549 - DNA, 415 bp, Homo sapiens
  Payload ID: 1844
  Gene Symbol: BFAR
  Gene Name: bifunctional apoptosis regulator
  ENST ID: ENST00000564078
  CDS Start-End: 1-309
ctgtacctgtttgactacaccgacaccttcctacctttcatccacaccatctgccctctgcaagaagacagctctggggaggacatcgtcaccaagcttctggatcttaaggagcctacgtggaagcagtggagagagttcctggtcaaatactccttccttccataccagctgattgctgagtttgcttgggactggttggaggtccattactggacatcacggtttctcatcatcaatgctatgttactctcagttctggaattattctccttttggagaatctggtcgagaagtgaactgaagtaagtatgttttaatggttgtcacaacaggggatgggaaagaaataccaagtgagagaaagatcctcttttatttctcacacttgaaataaatcctccatccacccaga

SEQ ID NO: 111550 - DNA, 706 bp, Homo sapiens
  Payload ID: 1844
  Gene Symbol: BFAR
  Gene Name: bifunctional apoptosis regulator
  ENST ID: ENST00000563313
  CDS Start-End: 119-388
ctgtgctgagaataatggcccggttggcccgggacgagtggaatgattaatgatgttttgcagcagttttctacgtctgaaattttttatgtctctggaacccagaatttgctaagagatggaggaacctcagaaaagctatgtgaacacaatggaccttgagagagatgaacctctcaaaagcaccggccctcagatttctgttagtgaattttcttgccactgctgctacgacatcctggttaaccccaccaccttgaactgtgggcacagcttctgccgtcactgccttgctttatggtgggcatcttcaaagaaaacagaatgtccagaatgcagagaaaaatgggaaggtttccccaaagtcagtattctcctcaggctgtgaacccaggcaggtccctgttcctgctatacgccctcaagagctcccccaggctgagtctgctctacctgtacctgtttgactacaccgacaccttcctacctttcatccacaccatctgccctctgcaagaagacagctctggggaggacatcgtcaccaagcttctggatcttaaggagcctacgtggaagcagtggagagagttcctggtcaaatactccttccttccataccagctgattgctgagtttgcttgggactggttggaggtccattactggacatcacggtttctcatcatcaatgctatgttactct

SEQ ID NO: 111551 - DNA, 722 bp, Homo sapiens
  Payload ID: 1844
  Gene Symbol: BFAR
  Gene Name: bifunctional apoptosis regulator
  ENST ID: ENST00000570219
  CDS Start-End: 395-722
gcccgagtcctgagcatccccactcctggccgcggggttcggaccccagcttggccaactgcgctatcccttcccgagagccccacgtccgcacagccggtcgctgggcctcgcctgcgtcctttcgggggtcagggtcagagccactccctcctggggctccctagggcgggaaggaggaggggtcgcttccaaacaccttggaggggaaccacggggcgcctgcccgccaggagcgcttgccacaccctgcaacagccggaccagaattgatgaggcttctgatagtcgccacgctgagtttacggtctaattgtcgagattaatgatgttttgcagcagttttctacgtctgaaattttttatgtctctggaacccagaatttgctaagagatggaggaacctcagaaaagctatgtgaacacaatggaccttgagagagatgaacctctcaaaagcaccggccctcagatttctgttagtgaattttcttgccactgctgctacgacatcctggttaaccccaccaccttgaactgtgggcacagcttctgccgtcactgccttgctttatggtgggcatcttcaaagaaaacagaatgtccagaatgcagagaaaaatgggaaggtttccccaaagtcagtattctcctcagggatgccattgaaaagttatttcctgatgccattagactgagatttgaagacattcagcagaata

SEQ ID NO: 111552 - DNA, 629 bp, Homo sapiens
  Payload ID: 1844
  Gene Symbol: BFAR
  Gene Name: bifunctional apoptosis regulator
  ENST ID: ENST00000562545
  CDS Start-End: 1-619
gggagggggattcttttccggtgtgctcacagctttaactggagtggcagctgtgaacccaggcaggtccctgttcctgctatacgccctcaagagctcccccaggctgagtctgctctacctgtacctgtttgactacaccgacaccttcctacctttcatccacaccatctgccctctgcaagaagacagctctggggaggacatcgtcaccaagcttctggatcttaaggagcctacgtggaagcagtggagagagttcctggtcaaatactccttccttccataccagctgattgctgagtttgcttgggactggttggaggtccattactggacatcacggtttctcatcatcaatgctatgttactctcagttctggaattattctccttttggagaatctggtcgagaagtgaactgaagaccgtgcctcagaggatgtggagccatttctggaaagtatcaacgcaggggctttttgtggccatgttctggcccctcatccctcagtttgtttgcaactgtttgttttactgggccctgtactttaacccaattattaacattgatcttgtggtcaaggaactccggcggctggaaacccaggtgttgtgactggcactgc

SEQ ID NO: 111553 - DNA, 438 bp, Homo sapiens
  Payload ID: 1844
  Gene Symbol: BFAR
  Gene Name: bifunctional apoptosis regulator
  ENST ID: ENST00000565478
  CDS Start-End: 1-294
gacagctctggggaggacatcgtcaccaagcttctggatcttaaggagcctacgtggaagcagtggagagagttcctggtcaaatactccttccttccataccagctgattgctgagtttgcttgggactggttggaggtccattactggacatcacggtttctcatcatcaatgctatgttactctcagttctggaattattctccttttggagaatctggtcgagaagtgaactgaatgtgaacacagcaggtgtgagatgtcatcttggaagacaggccttgcagaaataggcctacatccaaaatattatcttgtgactccatgaaccattcattaaccctttgtatctttgagtgaaaattttactcaaaagttgcatctggaagttcgaagaaattacttgaaataaaaataaagatttctatatagataaa

SEQ ID NO: 111554 - DNA, 1448 bp, Homo sapiens
  Payload ID: 1844
  Gene Symbol: BFAR
  Gene Name: bifunctional apoptosis regulator
  ENST ID: ENST00000566710
  CDS Start-End: 60-485
gcagcagttttctacgtctgaaattttttatgtctctggaacccagaatttgctaagagatggaggaacctcagaaaagctatgtgaacacaatggaccttgagagagatgaacctctcaaaagcaccggccctcagatttctgttagtgaattttcttgccactgctgctacgacatcctggttaaccccaccaccttgaactgtgggcacagcttctgccgtcactgccttgctttatggtgggcatcttcaaagaaaacagaatgtccagaatgcagagaaaaatgggaaggtttccccaaagtcagtattctcctcaggtggtcctgctcgtctatcactggagcagcagggaatctgaacacgacctcctggtccacaaggctgtggccaaatggacggcggaagaagttgtcctctggctggagcagctgggcccttgggcatctctttacagggaaaggtttttatctgaacgagtaaatggaaggttgcttttaactttgacagaggaagaattttccaagacgccctataccatagaaaacagcagccacaggagagccatcctcatggagctagaacgtgtcaaagcattaggcgtgaagcccccccagaatctctgggaatataaggctgtgaacccaggcaggtccctgttcctgctatacgccctcaagagctcccccaggctgagtctgctctacctgtacctgtttgactacaccgacaccttcctacctttcatccacaccatctgccctctgcaagaagacagctctggggaggacatcgtcaccaagcttctggatcttaaggagcctacgtggaagcagtggagagagttcctggtcaaatactccttccttccataccagctgattgctgagtttgcttgggactggttggaggtccattactggacatcacggtttctcatcatcaatgctatgttactctcagttctggaattattctccttttggagaatctggtcgagaagtgaactgaagaccgtgcctcagaggatgtggagccatttctggaaagtatcaacgcaggggctttttgtggccatgttctggcccctcatccctcagtttgtttgcaactgtttgttttactgggccctgtactttaacccaattattaacattgatcttgtggtcaaggaactccggcggctggaaacccaggtgttgtgactggcactgcccaggctgagactcttcaagtcccgctgacgtctgagctttgatgcttaagaggggtgaggcagggagcggacttcctattttctaccctcagtaaaacaaggtgctgctttgtatatcaaaagctccaaccatgtcctctccccctcagcctgtgggtggcacgagcaaggactgacatccgcacagggaggattgtctgtttggctgacacagcagcagcccttcccac

SEQ ID NO: 111555 - DNA, 3039 bp, Homo sapiens; identical to SEQ ID NO: 111547
  Payload ID: 1844
  Gene Symbol: BFAR
  Gene Name: bifunctional apoptosis regulator
  Uniprot ID: Q9NZS9
  ENST ID: ENST00000619034
  CDS Start-End: 278-1630

SEQ ID NO: 111556 - DNA, 1414 bp, Homo sapiens
  Payload ID: 1844
  Gene Symbol: BFAR
  Gene Name: bifunctional apoptosis regulator
  ENST ID: ENST00000562442
  CDS Start-End: 161-802
ccggtagcgaagcctctccctcttcctctgctcccgcggggtctgtgctgagaataatggcccggttggcccgggacgagtggaatgattaatgatgttttgcagcagttttctacgtctgaaattttttatgtctctggaacccagaatttgctaagagatggaggaacctcagaaaagctatgtgaacacaatggaccttgagagagatgaacctctcaaaagcaccggccctcagatttctgttagtgaattttcttgccactgctgctacgacatcctggttaaccccaccaccttgaactgtgggcacagcttctgccgtcactgccttgctttatggtgggcatcttcaaagaaaacagaatgtccagaatgcagagaaaaatgggaaggtttccccaaagtcagtattctcctcagggatgccattgaaaagttatttcctgatgccattagactgagatttgaagacattcagcagaataatgacatagtccaaagtcttgcagcctttcagaaatatgggaatgatcagattcctttagctcctaacacaggccgagcgaatcagcagatgggagggggattcttttccggtgtgctcacagctttaactggagtggcagtggtcctgctcgtctatcactggagcagcagggaatctgaacacgacctcctggtccacaaggctgtggccaaatggacggcggaagaagttgtcctctggctggagcagctgggcccttgggcatctctttacagggaaaggtttttatctgaacgagtaaatggaaggtgaggagcaaagtcttctgacacaccgtggacattttagaaaacagctttcttgagatataatccaggccaggcgcggtggctcacacctggatcccagcactttgggaggccgaggcggatcgatcatttgaggtcaggagttccagaccagcctgaccaatatgatgaaaccccatctctactaaaaatacaaaaaaaaaaaattggccaggcttggtagtgcacaccttgtaatcccatctattcgggaggctgagacaggagaatcacttgaacccaagaggtggaggttacaatgagccaagatcatgccactgcactccagcctaggcaacaaggcaagactccatctcaaaaagagagagagagagatgtaatctacataaaattcacacgtttgaagtgcacaatccatggtttttaatgtgttcacaaatagtgtgattatcaccacagctggttttagaacattttcatcaccctaaaagaaagcttttacccttcagtcaatcctcatttctccccaacccccagcccctggcaaacaccattctactttctgtctttatggatttgtctattctggacgtttgatataaatggattcatacaa

SEQ ID NO: 111557 - DNA, 1662 bp, Homo sapiens; identical to SEQ ID NO: 111548
  Payload ID: 1844
  Gene Symbol: BFAR
  Gene Name: bifunctional apoptosis regulator
  ENST ID: ENST00000632391
  CDS Start-End: 162-1139

SEQ ID NO: 111558 - DNA, 706 bp, Homo sapiens; identical to SEQ ID NO: 111550
  Payload ID: 1844
  Gene Symbol: BFAR
  Gene Name: bifunctional apoptosis regulator
  ENST ID: ENST00000631407
  CDS Start-End: 119-388

SEQ ID NO: 111559 - DNA, 1414 bp, Homo sapiens; identical to SEQ ID NO: 111556
  Payload ID: 1844
  Gene Symbol: BFAR
  Gene Name: bifunctional apoptosis regulator
  ENST ID: ENST00000632966
  CDS Start-End: 161-802

SEQ ID NO: 111560 - DNA, 1448 bp, Homo sapiens; identical to SEQ ID NO: 111554
  Payload ID: 1844
  Gene Symbol: BFAR
  Gene Name: bifunctional apoptosis regulator
  ENST ID: ENST00000631651
  CDS Start-End: 60-485

SEQ ID NO: 111561 - DNA, 629 bp, Homo sapiens; identical to SEQ ID NO: 111552
  Payload ID: 1844
  Gene Symbol: BFAR
  Gene Name: bifunctional apoptosis regulator
  ENST ID: ENST00000633638
  CDS Start-End: 1-619

SEQ ID NO: 111562 - DNA, 438 bp, Homo sapiens; identical to SEQ ID NO: 111553
  Payload ID: 1844
  Gene Symbol: BFAR
  Gene Name: bifunctional apoptosis regulator
  ENST ID: ENST00000632031
  CDS Start-End: 1-294

SEQ ID NO: 111563 - DNA, 415 bp, Homo sapiens; identical to SEQ ID NO: 111549
  Payload ID: 1844
  Gene Symbol: BFAR
  Gene Name: bifunctional apoptosis regulator
  ENST ID: ENST00000634083
  CDS Start-End: 1-309

SEQ ID NO: 111564 - DNA, 722 bp, Homo sapiens; identical to SEQ ID NO: 111551
  Payload ID: 1844
  Gene Symbol: BFAR
  Gene Name: bifunctional apoptosis regulator
  ENST ID: ENST00000634109
  CDS Start-End: 395-722

SEQ ID NO: 111565 - DNA, 2402 bp, Homo sapiens
  Payload ID: 1845
  Gene Symbol: BGN
  Gene Name: biglycan
  Uniprot ID: P21810
  ENST ID: ENST00000331595
  CDS Start-End: 187-1293
cctgcccagcctttagcctcccgcccgccgcctctgtctccctctctccacaaactgcccaggagtgagtagctgctttcggtccgccggacacaccggacagatagacgtgcggacggcccaccaccccagcccgccaactagtcagcctgcgcctggcgcctcccctctccaggtccatccgccatgtggcccctgtggcgcctcgtgtctctgctggccctgagccaggccctgccctttgagcagagaggcttctgggacttcaccctggacgatgggccattcatgatgaacgatgaggaagcttcgggcgctgacacctcgggcgtcctggacccggactctgtcacacccacctacagcgccatgtgtcctttcggctgccactgccacctgcgggtggttcagtgctccgacctgggtctgaagtctgtgcccaaagagatctcccctgacaccacgctgctggacctgcagaacaacgacatctccgagctccgcaaggatgacttcaagggtctccagcacctctacgccctcgtcctggtgaacaacaagatctccaagatccatgagaaggccttcagcccactgcggaagctgcagaagctctacatctccaagaaccacctggtggagatcccgcccaacctacccagctccctggtggagctccgcatccacgacaaccgcatccgcaaggtgcccaagggagtgttcagcgggctccggaacatgaactgcatcgagatgggcgggaacccactggagaacagtggctttgaacctggagccttcgatggcctgaagctcaactacctgcgcatctcagaggccaagctgactggcatccccaaagacctccctgagaccctgaatgaactccacctagaccacaacaaaatccaggccatcgaactggaggacctgcttcgctactccaagctgtacaggctgggcctaggccacaaccagatcaggatgatcgagaacgggagcctgagcttcctgcccaccctccgggagctccacttggacaacaacaagttggccagggtgccctcagggctcccagacctcaagctcctccaggtggtctatctgcactccaacaacatcaccaaagtgggtgtcaacgacttctgtcccatgggcttcggggtgaagcgggcctactacaacggcatcagcctcttcaacaaccccgtgccctactgggaggtgcagccggccactttccgctgcgtcactgaccgcctggccatccagtttggcaactacaaaaagtagaggcagctgcagccaccgcggggcctcagtgggggtctctggggaacacagccagacatcctgatggggaggcagagccaggaagctaagccagggcccagctgcgtccaacccagccccccacctcgggtccctgaccccagctcgatgccccatcaccgcctctccctggctcccaagggtgcaggtgggcgcaaggcccggcccccatcacatgttcccttggcctcagagctgcccctgctctcccaccacagccacccagaggcaccccatgaagcttttttctcgttcactcccaaacccaagtgtccaaggctccagtcctaggagaacagtccctgggtcagcagccaggaggcggtccataagaatggggacagtgggctctgccagggctgccgcacctgtccagacacacatgttctgttcctcctcctcatgcatttccagcctttcaaccctccccgactctgcggctcccctcagcccccttgcaagttcatggcctgtccctcccagacccctgctccactggcccttcgaccagtcctcccttctgttctctctttccccgtccttcctctctctctctctctctctctctctctctttctgtgtgtgtgtgtgtgtgtgtgtgtgtgtgtgtgtgtgtgtgtgtcttgtgcttcctcagacctttctcgcttctgagcttggtggcctgttccctccatctctccgaacctggcttcgcctgtccctttcactccacaccctctggccttctgccttgagctgggactgctttctgtctgtccggcctgcacccagcccctgcccacaaaaccccagggacagcagtctccccagcctgccctgctcaggccttgcccccaaacctgtactgtcccggaggaggttgggaggtggaggcccagcatcccgcgcagatgacaccatcaaccgccagagtcccagacaccggttttcctagaagcccctcacccccactggcccactggtggctaggtctccccttatccttctggtccagcgcaaggaggggctgcttctgaggtcggtggctgtctttccattaaagaaacaccgtgcaacgtggctccgtg

SEQ ID NO: 111566 - DNA, 846 bp, Homo sapiens
  Payload ID: 1845
  Gene Symbol: BGN
  Gene Name: biglycan
  ENST ID: ENST00000431891
  CDS Start-End: 133-846
ctgcccaggagtgagtagctgctttcggtccgccggacacaccggacagatagacgtgcggacggcccaccaccccagcccgccaactagtcagcctgcgcctggcgcctcccctctccaggtccatccgccatgtggcccctgtggcgcctcgtgtctctgctggccctgagccaggccctgccctttgagcagagaggcttctgggacttcaccctggacgatgggccattcatgatgaacgatgaggaagcttcgggcgctgacacctcgggcgtcctggacccggactctgtcacacccacctacagcgccatgtgtcctttcggctgccactgccacctgcgggtggttcagtgctccgacctgggtctgaagtctgtgcccaaagagatctcccctgacaccacgctgctggacctgcagaacaacgacatctccgagctccgcaaggatgacttcaagggtctccagcacctctacgtaaggagctgggaggaaccagcaggcctacagcagagggcaggggtccgggccctcgtcctggtgaacaacaagatctccaagatccatgagaaggccttcagcccactgcggaagctgcagaagctctacatctccaagaaccacctggtggagatcccgcccaacctacccagctccctggtggagctccgcatccacgacaaccgcatccgcaaggtgcccaagggagtgttcagcgggctccggaacatgaactgcatcgagatgggcgggaacccactggagaacagtggctttgaacctggagccttcgatggcctgaagctcaactacctgcgcatctcagaggccaagctgact

SEQ ID NO: 111567 - DNA, 3377 bp, Homo sapiens
  Payload ID: 1846
  Gene Symbol: BAAT
  Gene Name: bile acid CoA:amino acid N-acyltransferase
  Uniprot ID: Q14032
  ENST ID: ENST00000259407
  CDS Start-End: 110-1366
gtcattttccctctactgctggaaaagaaggctcaagaggaagaatccaggttttgaggttttgctgaagatattcctgaagaatcatcccaggtgccacactaaaaaaatgatccagttgacagctacccctgtgagtgcacttgttgatgagccagtgcatatccgagctacaggcctgattccctttcagatggtgagttttcaggcatcactggaagatgaaaacggagacatgttttattctcaagcccactatagggccaatgaattcggtgaggtggacctgaatcatgcttcttcacttggaggggattatatgggagtccaccccatgggtctcttctggtctctgaaacctgaaaagctattaacaagactgttgaaaagagatgtgatgaataggcctttccaggtccaagtaaaactttatgacttagagttaatagtgaacaataaagttgccagtgctccaaaggccagcctgactttggagaggtggtatgtggcacctggtgtcacacgaattaaggttcgagaaggccgccttcgaggagctctctttctccctccaggagagggtctcttcccaggggtaattgatttgtttggtggtttgggtgggctgcttgaatttcgggccagcctcctagccagtcgtggcttcgcctccttggccttggcttaccataactatgaagacctgccccgcaaaccagaagtaacagatttggaatattttgaggaggctgccaactttctcctgagacatccaaaggtctttggctcaggcgttggggtagtctctgtatgtcaaggagtacagattggactatctatggctatttacctaaagcaagtcacagccacggtacttattaatgggaccaactttccttttggcattccacaggtatatcatggtcagatccatcagccccttccccattctgcacaattaatatccaccaatgccttggggttactagagctctatcgcacttttgagacaactcaagttggggccagtcaatatttgtttcctattgaagaggcccaggggcaattcctcttcattgtaggagaaggtgataagactatcaacagcaaagcacacgctgaacaagccataggacagctgaagagacatgggaagaacaactggaccctgctatcttaccctggggcaggccacctgatagaacctccctattctcctctgtgctgtgcctcaacgacccacgatttgaggttacactggggaggagaggtgatcccacacgcagctgcacaggaacatgcttggaaggagatccagagatttctcaggaagcacctcattccagatgtgaccagtcaactctaagaagactagatattcctagaaaataaagaagcaaatctctttaccgggaccttctctcaattttcatggcggaatgtctcccccagctgccacacacacattttgtattaattttaatgattaaaaagagcatagggtaaaaacctgatatttcacttatactgcataacaagctaaccaaactggacatggtgaataaatcataaaacaaatcattttacttattatttacatgacttttctttccatcaggtcttctaaataggactgaggtatagtacactggcaaaaataagaaaaggcaaacaagaatagcaccaaagtaacagatataaaaccaaataccatgtcagaaaacactatatagtaagaatttatcagattagagcagcaggagaaaattaatactaaattataatcattttagtgatatttttcaacttcaccacagtaactttgcaacatcatttttcatttgtggggtagtaaaattcatgtcaaaaaggaaagaaggaatggaggaggtcagttagttcattgcaataaattacctcttcagttcttaaaaacatgcccattggcacataactgagacataataactaagactggaagagccttggtttaagttatgaagcaaattaaaatggaaaatacaagaaaatagaaccaattaggttgaaaatgccccttactgaaaatctgtattaaaaataaaattaataaaagtaaaaaataaaaatagaaacacaactctactagtacaggctagcctggggagtttgataaactgagtgattgggtcaactatcactgtacttccataatgaatttcttcagtcatgttagagtagcacatgaatgtgagctctataaggacaggtactatatttccgtaagacccaatagttactgtacatcccataaataaaaaatactttagtttgctaaccaactgaatatatgaggactgcatgtaattcaaccacatggttgtttgctgtacagtcctttgcaaatattaaaaaattttttttgctataaggctttgatcatatagtcctcatagcaacataactaccatctagcatgtaccacattttgcaagactttaagttcaacattccaaactgccaatttgtattatgtccaaatgcagtatccttgaggaatatagtgggtcagttaaatatctagagacatacaaacatctgctaattcatctcattgagatggatcattctgatctccatcatccacccacttttcatcagcttctcctacttcattctcctcatagtctttatcatgagggattctgtatcctgtctctcatctacacttgctggccttcctggttgtgatttattggaacagtctacacaaaaaccatagggtcaagatccatgtcttactccaacactggctgctaacatgatcttacataccatacatttgcatttttatccttcttgtgcaccaagaaatgttttcttacatgttttctccaagtgtaaaaagtcacagctaaatgatctcactcctgtatgaataagcaagtgcttttttagtgtttgtttgcatttggctgcatagctacaatgatggcattttaacttattcatgattagagatgatgatatggtttggatatttgttgtgcccaaatttcatgctgaaatgtaatccctagtgttggaggtgaggcctggtgggagttgtttgggtcatgggggtggaccctcatggcttggtactgtcctcatgagagtatgatagtgagtgagttctcaagagatatgactgtttaaaagtgtgtggcacctcctccccatcctcacactctttcttgcctcctctctcgccatgtgagatgcctcctcgctgttcacctgctgccatgattgtaaacttcctgaggcctccccagaagccaagtagatgcaagcattatgcttctgtaaagcctgcaggaccatgatccaattaaatctcttttctttataaatta

SEQ ID NO: 111568 - DNA, 2252 bp, Homo sapiens
  Payload ID: 1846
  Gene Symbol: BAAT
  Gene Name: bile acid CoA:amino acid N-acyltransferase
  Uniprot ID: Q14032
  ENST ID: ENST00000395051
  CDS Start-End: 72-1328
ttcttttttgaggttttgaggttttgctgaagatattcctgaagaatcatcccaggtgccacactaaaaaaatgatccagttgacagctacccctgtgagtgcacttgttgatgagccagtgcatatccgagctacaggcctgattccctttcagatggtgagttttcaggcatcactggaagatgaaaacggagacatgttttattctcaagcccactatagggccaatgaattcggtgaggtggacctgaatcatgcttcttcacttggaggggattatatgggagtccaccccatgggtctcttctggtctctgaaacctgaaaagctattaacaagactgttgaaaagagatgtgatgaataggcctttccaggtccaagtaaaactttatgacttagagttaatagtgaacaataaagttgccagtgctccaaaggccagcctgactttggagaggtggtatgtggcacctggtgtcacacgaattaaggttcgagaaggccgccttcgaggagctctctttctccctccaggagagggtctcttcccaggggtaattgatttgtttggtggtttgggtgggctgcttgaatttcgggccagcctcctagccagtcgtggcttcgcctccttggccttggcttaccataactatgaagacctgccccgcaaaccagaagtaacagatttggaatattttgaggaggctgccaactttctcctgagacatccaaaggtctttggctcaggcgttggggtagtctctgtatgtcaaggagtacagattggactatctatggctatttacctaaagcaagtcacagccacggtacttattaatgggaccaactttccttttggcattccacaggtatatcatggtcagatccatcagccccttccccattctgcacaattaatatccaccaatgccttggggttactagagctctatcgcacttttgagacaactcaagttggggccagtcaatatttgtttcctattgaagaggcccaggggcaattcctcttcattgtaggagaaggtgataagactatcaacagcaaagcacacgctgaacaagccataggacagctgaagagacatgggaagaacaactggaccctgctatcttaccctggggcaggccacctgatagaacctccctattctcctctgtgctgtgcctcaacgacccacgatttgaggttacactggggaggagaggtgatcccacacgcagctgcacaggaacatgcttggaaggagatccagagatttctcaggaagcacctcattccagatgtgaccagtcaactctaagaagactagatattcctagaaaataaagaagcaaatctctttaccgggaccttctctcaattttcatggcggaatgtctcccccagctgccacacacacattttgtattaattttaatgattaaaaagagcatagggtaaaaacctgatatttcacttatactgcataacaagctaaccaaactggacatggtgaataaatcataaaacaaatcattttacttattatttacatgacttttctttccatcaggtcttctaaataggactgaggtatagtacactggcaaaaataagaaaaggcaaacaagaatagcaccaaagtaacagatataaaaccaaataccatgtcagaaaacactatatagtaagaatttatcagattagagcagcaggagaaaattaatactaaattataatcattttagtgatatttttcaacttcaccacagtaactttgcaacatcatttttcatttgtggggtagtaaaattcatgtcaaaaaggaaagaaggaatggaggaggtcagttagttcattgcaataaattacctcttcagttcttaaaaacatgcccattggcacataactgagacataataactaagactggaagagccttggtttaagttatgaagcaaattaaaatggaaaatacaagaaaatagaaccaattaggttgaaaatgccccttactgaaaatctgtattaaaaataaaattaataaaagtaaaaaataaaaatagaaacacaactctactagtacaggctagcctggggagtttgataaactgagtgattgggtcaactatcactgtacttccataatgaatttcttcagtcatgttagagtagcacatgaatgtgagctctataaggacaggtactatatttccgtaagacccaatagttactgtacatccca

SEQ ID NO: 111569 - DNA, 2252 bp, Homo sapiens
  Payload ID: 1846
  Gene Symbol: BAAT
  Gene Name: bile acid CoA:amino acid N-acyltransferase
  Uniprot ID: Q14032
  ENST ID: ENST00000621712
  CDS Start-End: 72-1328
ttcttttttgaggttttgaggttttgctgaagatattcctgaagaatcatcccaggtgccacactaaaaaaatgatccagttgacagctacccctgtgagtgcacttgttgatgagccagtgcatatccgagctacaggcctgattccctttcagatggtgagttttcaggcatcactggaagatgaaaacggagacatgttttattctcaagcccactatagggccaatgaattcggtgaggtggacctgaatcatgcttcttcacttggaggggattatatgggagtccaccccatgggtctcttctggtctctgaaacctgaaaagctattaacaagactgttgaaaagagatgtgatgaataggcctttccaggtccaagtaaaactttatgacttagagttaatagtgaacaataaagttgccagtgctccaaaggccagcctgactttggagaggtggtatgtggcacctggtgtcacacgaattaaggttcgagaaggccgccttcgaggagctctctttctccctccaggagagggtctcttcccaggggtaattgatttgtttggtggtttgggtgggctgcttgaatttcgggccagcctcctagccagtcgtggcttcgcctccttggccttggcttaccataactatgaagacctgccccgcaaaccagaagtaacagatttggaatattttgaggaggctgccaactttctcctgagacatccaaaggtctttggctcaggcgttggggtagtctctgtatgtcaaggagtacagattggactatctatggctatttacctaaagcaagtcacagccacggtacttattaatgggaccaactttccttttggcattccacaggtatatcatggtcagatccatcagccccttccccattctgcacaattaatatccaccaatgccttggggttactagagctctatcgcacttttgagacaactcaagttggggccagtcaatatttgtttcctattgaagaggcccaggggcaattcctcttcattgtaggagaaggtgataagactatcaacagcaaagcacacgctgaacaagccataggacagctgaagagacatgggaagaacaactggaccctgctatcttaccctggggcaggccacctgatagaacctccctattctcctctgtgctgtgcctcaacgacccacgatttgaggttacactggggaggagaggtgatcccacacgcagctgcacaggaacatgcttggaaggagatccagagatttctcaggaagcacctcattccagatgtgaccagtcaactctaagaagactagatattcctagaaaataaagaagcaaatctctttaccaggaccttctctcaattttcatggcggaatgtctcccccagctgccacacacacattttgtattaattttaatgattaaaaagagcatagggtaaaaacctgatatttcacttatactgcataacaagctaaccaaactggacatggtgaataaatcataaaacaaatcattttacttattatttacatgacttttctttccatcaggtcttctaaataggactgaggtatagtacactggcaaaaataagaaaaggcaaacaagaatagcaccaaagtaacagatataaaaccaaataccatgtcagaaaacactatatagtaagaatttatcagattagagcagcaggagaaaattaatactaaattataatcattttagtgatatttttcaacttcaccacagtaactttgcaacatcatttttcatttgtggggtagtaaaattcatgtcaaaaaggaaagaaggaatggaggaggtcagttagttcattgcaataaattacctcttcagttcttaaaaacatgcccattggcacataattgagacataataactaagactagaagagccttggtttaagttatgaagcaaattaaaatggaaaatacaagaaaatagaaccaattaggttgaaaatgccccttactgaaaatctgtattaaaaataaaattaataaaagtaaaaaataaaaatagaaacacaactctactagtacaggctagcctggggagtttgataaactgagtgattgggtcaactatcactgtacttccataatgaatttcttcagtcatgttagagtagcacatgaatgtgagctctataaggacaggtactatatttccgtaagacccaatagttactgtacatccca

SEQ ID NO: 111570 - DNA, 1071 bp, Homo sapiens
  Payload ID: 1847
  Gene Symbol: BLVRA
  Gene Name: biliverdin reductase A
  Uniprot ID: P53004
  ENST ID: ENST00000265523
  CDS Start-End: 77-967
ggtccgcaaagccggtggcgcccggaggctgcacggagagcggtgcccgcgtcagtgaccgaaggaagagaccaagatgaatgcagagcccgagaggaagtttggcgtggtggtggttggtgttggccgagccggctccgtgcggatgagggacttgcggaatccacacccttcctcagcgttcctgaacctgattggcttcgtgtcgagaagggagctcgggagcattgatggagtccagcagatttctttggaggatgctctttccagccaagaggtggaggtcgcctatatctgcagtgagagctccagccatgaggactacatcaggcagttccttaatgctggcaagcacgtccttgtggaataccccatgacactgtcattggcggccgctcaggaactgtgggagctggctgagcagaaaggaaaagtcttgcacgaggagcatgttgaactcttgatggaggaattcgctttcctgaaaaaagaagtggtggggaaagacctgctgaaagggtcgctcctcttcacagctggcccgttggaagaagagcggtttggcttccctgcattcagcggcatctctcgcctgacctggctggtctccctctttggggagctttctcttgtgtctgccactttggaagagcgaaaggaagatcagtatatgaaaatgacagtgtgtctggagacagagaagaaaagtccactgtcatggattgaagaaaaaggacctggtctaaaacgaaacagatatttaagcttccatttcaagtctgggtccttggagaatgtgccaaatgtaggagtgaataagaacatatttctgaaagatcaaaatatatttgtccagaaactcttgggccagttctctgagaaggaactggctgctgaaaagaaacgcatcctgcactgcctggggcttgcagaagaaatccagaaatattgctgttcaaggaagtaagaggaggaggtgatgtagcacttccaagatggcaccagcatttggttcttctcaagagttgaccattatctctattcttaaaattaaacatgttggggaaacaa

SEQ ID NO: 111571 - DNA, 1161 bp, Homo sapiens
  Payload ID: 1847
  Gene Symbol: BLVRA
  Gene Name: biliverdin reductase A
  Uniprot ID: P53004
  ENST ID: ENST00000402924
  CDS Start-End: 164-1054
aaagccggtggcgcccggaggctgcacggagagcggtgcccgcgtcagagcctcgccctgtcaccaggctggagtacagtggcgcgatctcggctcactgcaacttccacctgctgggttcaagcaattcttctgacctcagtgaccgaaggaagagaccaagatgaatgcagagcccgagaggaagtttggcgtggtggtggttggtgttggccgagccggctccgtgcggatgagggacttgcggaatccacacccttcctcagcgttcctgaacctgattggcttcgtgtcgagaagggagctcgggagcattgatggagtccagcagatttctttggaggatgctctttccagccaagaggtggaggtcgcctatatctgcagtgagagctccagccatgaggactacatcaggcagttccttaatgctggcaagcacgtccttgtggaataccccatgacactgtcattggcggccgctcaggaactgtgggagctggctgagcagaaaggaaaagtcttgcacgaggagcatgttgaactcttgatggaggaattcgctttcctgaaaaaagaagtggtggggaaagacctgctgaaagggtcgctcctcttcacagctggcccgttggaagaagagcggtttggcttccctgcattcagcggcatctctcgcctgacctggctggtctccctctttggggagctttctcttgtgtctgccactttggaagagcgaaaggaagatcagtatatgaaaatgacagtgtgtctggagacagagaagaaaagtccactgtcatggattgaagaaaaaggacctggtctaaaacgaaacagatatttaagcttccatttcaagtctgggtccttggagaatgtgccaaatgtaggagtgaataagaacatatttctgaaagatcaaaatatatttgtccagaaactcttgggccagttctctgagaaggaactggctgctgaaaagaaacgcatcctgcactgcctggggcttgcagaagaaatccagaaatattgctgttcaaggaagtaagaggaggaggtgatgtagcacttccaagatggcaccagcatttggttcttctcaagagttgaccattatctctattcttaaaattaaacatgttggggaaacaagaa

SEQ ID NO: 111572 - DNA, 443 bp, Homo sapiens
  Payload ID: 1847
  Gene Symbol: BLVRA
  Gene Name: biliverdin reductase A
  ENST ID: ENST00000424330
  CDS Start-End: 137-443
ttgtgcctgtgtacgcagttcctgtagcactcggctgggcagaaatcatctttcagcactaagggaacatagttatgatctggaccttctgggagtggtcagtgcccaagaacagtgaccgaaggaagagaccaagatgaatgcagagcccgagaggaagtttggcgtggtggtggttggtgttggccgagccggctccgtgcggatgagggacttgcggaatccacacccttcctcagcgttcctgaacctgattggcttcgtgtcgagaagggagctcgggagcattgatggagtccagcagatttctttggaggatgctctttccagccaagaggtggaggtcgcctatatctgcagtgagagctccagccatgaggactacatcaggcagttccttaatgctggcaagcacgtccttgtggaataccccatgacactgt

SEQ ID NO: 111573 - DNA, 873 bp, Homo sapiens
  Payload ID: 1848
  Gene Symbol: BLVRB
  Gene Name: biliverdin reductase B
  Uniprot ID: P30043
  ENST ID: ENST00000263368
  CDS Start-End: 153-773
gagccgcgggcggagagtctgaggcgtggcccttcgagccagctccgccccgttgttcctggcttgagtagggcagagagcaccgcccagcagccagtgggttcccgcgcgtgccgagactctgaggccttgcacccccacgatcccgtacgatggccgtcaagaagatcgcgatcttcggcgccactggccagaccgggctcaccaccctggcgcaggcggtgcaagcaggttacgaagtgacagtgctggtgcgggactcctccaggctgccatcagaggggccccggccggcccacgtggtagtgggagatgttctgcaggcagccgatgtggacaagaccgtggctgggcaggacgctgtcatcgtgctgctgggcacccgcaatgacctcagtcccacgacagtgatgtccgagggcgcccggaacattgtggcagccatgaaggctcatggtgtggacaaggtcgtggcctgcacctcggctttcctgctctgggaccctaccaaggtgcccccacgactgcaggctgtgactgatgaccacatccggatgcacaaggtgctgcgggaatcaggcctgaagtacgtggctgtgatgccgccacacataggagaccagccactaactggggcgtacacagtgaccctggatggacgagggccctcaagggtcatctccaaacatgacctgggccatttcatgctgcgctgcctcaccaccgatgagtacgacggacacagcacctacccctcccaccagtaccagtagcactctgtccccatctgggagggtggcattctgggacatgaggagcaaaggaagggggcaataaatgttgagccaagagcttcaaattactctagagaaa

SEQ ID NO: 111574 - DNA, 1392 bp, Homo sapiens
  Payload ID: 1848
  Gene Symbol: BLVRB
  Gene Name: biliverdin reductase B
  ENST ID: ENST00000597870
  CDS Start-End: 48-512
cgcgcgtgccgagactctgaggccttgcacccccacgatcccgtacgatggccgtcaagaagatcgcgatcttcggcgccactggccagaccgggctcaccaccctggcgcaggcggtgcaagcaggttacgaagtgacagtgctggtgcgggactcctccaggctgccatcagaggggccccggccggcccacgtggtagtgggagatgttctgcaggcagccgatgtggacaagaccgtggctgggcaggacgctgtcatcgtgctgctgggcacccgcaatgacctcagtcccacgacagtgatgtccgagggcgcccggaacattgtggcagccatgaaggctcatggtgtggacaaggtcgtggcctgcacctcgggtgggtggtgggatcatggaggtggggctgaactggggggtactggggaggcagcccaggggcctctgaaaggtgacgctgaagccattccatgttactgtgcatttactgaacaccagctgtgtgcctgaaccttactgggtgatgctggggacacagtggtgacctgtacagccctgggccctgctcacacaaggctcacagagagaggtggtaaacagatccatgatcaaactgacatccagatcatcggagctgggatcgggaggcaggcagaggggatagggccacaatgggagaaactacaggactatgggagcccagaggaggcgtccgacttaggctgagagaggtcagggtaggcctcccagaggaagtgatagagctgtggatagacactaggtctctgccctcacagagctcccgattatggggacacagacattaagcaaatagttgccctgtataatcatttatttatttatttatttatttatagttattttgaggtttgtttgagatagagtcttgctctgatgcccaggctggagtgcagtggcgtgatcttggctccctgcaacctccgcctcccggaggtggttctcctgcctcaagtgattctcctgcctctgcctcccaggtagctgggactacagctttcctgctctgggaccctaccaaggtgcccccacgactgcaggctgtgactgatgaccacatccggatgcacaaggtgctgcgggaatcaggcctgaagtacgtggctgtgatgccgccacacataggagaccagccactaactggggcgtacacagtgaccctggatggacgagggccctcaagggtcatctccaaacatgacctgggccatttcatgctgcgctgcctcaccaccgatgagtacgacggacacagcacctacccctcccaccagtaccagtagcactctgtccccatctgggagggtggcattctgggacatgaggagcaaaggaagggggcaataaatgt

SEQ ID NO: 111575 - DNA, 649 bp, Homo sapiens
  Payload ID: 1848
  Gene Symbol: BLVRB
  Gene Name: biliverdin reductase B
  ENST ID: ENST00000595483
  CDS Start-End: 58-549
agtgggttcccgcgcgtgccgagactctgaggccttgcacccccacgatcccgtacgatggccgtcaagaagatcgcgatcttcggcgccactggccagaccgggctcaccaccctggcgcaggcggtgcaagcaggttacgaagtgacagtgctggtgcgggactcctccaggctgccatcagaggggccccggccggcccacgtggtagtgggagatgttctgcaggcagccgatgtggacaagaccgtggctgggcaggacgctgtcatcgtgctgctgggcacccgcaatgacctcagtcccacgacagtgatgtccgagggcgcccggaacattgtggcagccatgaaggctcatggtgtggacaaggtcgtggcctgcacctcgggagaccagccactaactggggcgtacacagtgaccctggatggacgagggccctcaagggtcatctccaaacatgacctgggccatttcatgctgcgctgcctcaccaccgatgagtacgacggacacagcacctacccctcccaccagtaccagtagcactctgtccccatctgggagggtggcattctgggacatgaggagcaaaggaagggggcaataaatgttgagccaagagcttcaaattactctagagaaa

SEQ ID NO: 111576 - DNA, 654 bp, Homo sapiens
  Payload ID: 1849
  Gene Symbol: BSPH1
  Gene Name: binder of sperm protein homolog 1
  Uniprot ID: Q075Z2
  ENST ID: ENST00000344839
  CDS Start-End: 90-488
aagcctccctgggcctctccaggggattcttgagccctggctgacaaagaccaggaagatctgagataccgggaagcctgtgactgcccatgggctccctgatgcttctcttcgtggaaacgacgcgaaattcctcagcttgcatcttccctgttattttaaatgaattatcatcaactgtggaaactataactcattttccagaagttacagatggggagtgtgtctttccattccactataaaaatggaacatattatgactgcatcaagtccaaggcaagacacaagtggtgctcgttaaacaagacctacgaaggatactggaagttttgcagtgcagaagattttgcaaactgtgtatttcccttctggtacagacgcttgatctactgggagtgtactgatgatggggaagcatttgggaaaaaatggtgttcactgaccaagaattttaacaaggaccgaatttggaaatactgtgaatgatggtttgcttgcatctgctggctatcagatacagacaaaacatgatcgatgcatccagcagtaataatcttcttcctgaaagccatggattcttcagcaggtcagaatggtctgatatacagtaacccccaattttcttaataaaataaaactctttttctccagc

SEQ ID NO: 111577 - DNA, 421 bp, Homo sapiens
  Payload ID: 1850
  Gene Symbol: BLOC1S1
  Gene Name: biogenesis of lysosomal organelles complex-1, subunit 1
  ENST ID: ENST00000553100
  CDS Start-End: 1-136
cagcttccggagccggagggggcccggcgtacccagcccccagcccgacgtgaccatgctgtcccgcctcctaaaagaacaccaggccaagcagaatgaacgcaaggagctgcaggtgtggcccaggcctacatgaaccagagaaagctggaccatgaggtgaagaccctacaggtccaggctgcccaatttgccaagcagacaggccagtggatcggaatggtggagaacttcaaccaggcactcaaggaaattggggatgtggagaactgggctcggagcatcgagctggacatgcgcaccattgccactgcactggaatatgtctacaaagggcagctgcagtctgccccttcctagcccctgttccctcccccaaccctatccctcctacctcacccgcagggggaaggagggaggc

SEQ ID NO: 111578 - DNA, 571 bp, Homo sapiens
  Payload ID: 1850
  Gene Symbol: BLOC1S1
  Gene Name: biogenesis of lysosomal organelles complex-1, subunit 1
  Uniprot ID: P78537
  ENST ID: ENST00000548925
  CDS Start-End: 16-477
cagcggtcacgtgacatggccccggggagccgaggtgagcgttccagcttccggagccggagggggcccggcgtacccagcccccagcccgacgtgaccatgctgtcccgcctcctaaaagaacaccaggccaagcagaatgaacgcaaggagctgcaggaaaagaggaggcgagaggctatcactgcagcgacctgcctgacagaagctttggtggatcacctcaatgtgggtgtggcccaggcctacatgaaccagagaaagctggaccatgaggtgaagaccctacaggtccaggctgcccaatttgccaagcagacaggccagtggatcggaatggtggagaacttcaaccaggcactcaaggaaattggggatgtggagaactgggctcggagcatcgagctggacatgcgcaccattgccactgcactggaatatgtctacaaagggcagctgcagtctgccccttcctagcccctgttccctcccccaaccctatccctcctacctcacccgcagggggaaggagggaggctgacaagccttgaataaaacacaagcctccgtt

SEQ ID NO: 111579 - DNA, 531 bp, Homo sapiens
  Payload ID: 1850
  Gene Symbol: BLOC1S1
  Gene Name: biogenesis of lysosomal organelles complex-1, subunit 1
  ENST ID: ENST00000551926
  CDS Start-End: 295-489
cgactctggagggaggagggtgtggggaaccccccagagatgggcttcttggaggcctgaaaccaccggaacggaggtggggcacttgtttcctgagtccgggctggaaatctcggagttaccgattctgcggccgagtagtggagaaagagtgcctgggagtcaggagtcctgggcgctgccgctgacttcctggcgtccctgaaaaagaggaggcgagaggctatcactgcagcgacctgcctgacagaagctttggtggatcacctcaatgtgggtgtggcccaggcctacatgaaccagagaaagctggaccatgaggtgaagaccctacaggtccaggctgcccaatttgccaagcagacaggccagtggatcggaatggtggagaacttcaaccaggcactcaaggtgggccatactccctacctcaccaccccaatcctgggcccccattggctgcctccagtcaggttacctcaggtttaggttaaggaggaagtagggtggtcccagaaaccccatctatag

SEQ ID NO: 111580 - DNA, 837 bp, Homo sapiens
  Payload ID: 1850
  Gene Symbol: BLOC1S1
  Gene Name: biogenesis of lysosomal organelles complex-1, subunit 1
  ENST ID: ENST00000547076
  CDS Start-End: 516-743
gacgccagctagcgggcaacgggcatgggggagagggaatttcagagaggctttttttgaaactcctttcccttgccaactggctccggtcccttgggcaatactccggtcccctcggcaacgcccccaatccccgacctgccgcaccttagccccgcccctgccccggagcgccctgcctattggccctgggagcctctcgtcctggcggcgggaaggagcgactctggagggaggagggtgtggggaaccccccagagatgggcttcttggaggcctgaaaccaccggaacggaggtggggcacttgtttcctgagtccgggctggaaatctcggagttaccgattctgcggccgagtagtggagaaagagtgcctgggagtcaggagtcctgggcgctgccgctgacttcctggcgtccctgaaaaagaggaggcgagaggctatcactgcagcgacctgcctgacagaagctttggtggatcacctcaatgtgggtgtggcccaggcctacatgaaccagagaaagctggaccatgaggtgaagaccctacaggtccaggctgcccaatttgccaagcagacaggccagtggatcggaatggtggagaacttcaaccaggcactcaaggaaattggggatgtggagaactgggctcggagcatcgagctggacatgcgcaccattgccactgcactggaatatgtctacaaagggcagctgcagtctgccccttcctagcccctgttccctcccccaaccctatccctcctacctcacccgcagggggaaggagggaggctgacaagccttgaataaaacacaagcctccgtt

SEQ ID NO: 111581 - DNA, 525 bp, Homo sapiens
  Payload ID: 1850
  Gene Symbol: BLOC1S1
  Gene Name: biogenesis of lysosomal organelles complex-1, subunit 1
  ENST ID: ENST00000548556
  CDS Start-End: 204-431
ggtgtggggaaccccccagagatgggcttcttggaggcctgaaaccaccggaacggaggtggggcacttgtttcctgagtccgggctggaaatctcggagttaccgattctgcggccgagtagtggagaaagagtgcctgggagtcaggagtcctgggcgctgccgctgacttcctggcgtccctgatgtggcccaggcctacatgaaccagagaaagctggaccatgaggtgaagaccctacaggtccaggctgcccaatttgccaagcagacaggccagtggatcggaatggtggagaacttcaaccaggcactcaaggaaattggggatgtggagaactgggctcggagcatcgagctggacatgcgcaccattgccactgcactggaatatgtctacaaagggcagctgcagtctgccccttcctagcccctgttccctcccccaaccctatccctcctacctcacccgcagggggaaggagggaggctgacaagccttgaataaaacacaagcctccgtt

SEQ ID NO: 111582 - DNA, 1229 bp, Homo sapiens
  Payload ID: 1850
  Gene Symbol: BLOC1S1
  Gene Name: biogenesis of lysosomal organelles complex-1, subunit 1
  ENST ID: ENST00000549147
  CDS Start-End: 15-443
agcggtcacgtgacatggccccggggagccgaggtgagcgttccagcttccggagccggagggggcccggcgtacccagcccccagcccgacgtgaccatgctgtcccgcctcctaaaagaacaccaggccaagcagaatgaacgcaaggagctgcaggaaaagaggaggcgagaggctatcactgcagcgacctgcctgacagaagctttggtggatcacctcaatgtgggtgtggcccaggcctacatgaaccagagaaagctggaccatgaggtgaagaccctacaggtccaggctgcccaatttgccaagcagacaggccagtggatcggaatggtggagaacttcaaccaggcactcaaggtgggccatactccctacctcaccaccccaatcctgggcccccattggctgcctccagtcaggttacctcaggtttaggttaaggaggaagtagggtggtcccagaaaccccatctatagccccagtgtcagaaaaggtagagaaagaaagaaaagcagttggtgggtccaagtaaagccttttccaggagatgaataaaacgtattccccagactggaagccatactctacccattctgattcctgggctcccacctcctctcccccttcccaggaaattggggatgtggagaactgggctcggagcatcgagctggacatgcgcaccattgccactgcactggaatatgtctacaaagggcagctgcagtctgccccttcctagcccctgttccctcccccaaccctatccctcctacctcacccgcagggggaaggagggaggctgacaagccttgaataaaacacaagcctccgtttctctgtggtgtgtttcagagagctactagctccagtgtcgggggtgggagtggaaggttcaaaggtggtttccctgagggacaggtaccttttggggagagggtggaactagcttcctcttactatcccaactctcttctcctccatggcccttgtgcaggtgtctgttaggcaagcagagggtgggagttcccatccctcctgagagaaggtcctagtagccctgccccaagcttcctaattcaggacttgtttcctacagaagagaaacaaggcaaggtacaggcctggtccccagctctggctttctgcctctccacgtgctcatggcctctcccaggctaactctaagcagtgtcatgagtctgagccaggtgggagat

SEQ ID NO: 111583 - DNA, 1249 bp, Homo sapiens
  Payload ID: 1851
  Gene Symbol: BLOC1S2
  Gene Name: biogenesis of lysosomal organelles complex-1, subunit 2
  Uniprot ID: Q6QNY1
  ENST ID: ENST00000370372
  CDS Start-End: 54-482
acacccagtgcgcatgcgcagcaccccggcccggaaacagcgcggggtccgctatggcggcggcagccgagggcgtactggcgacccggagtgatgagcccgcccgagacgatgccgccgtggagacagctgaggaagcaaaggagcctgctgaagctgacatcactgagctctgccgggacatgttctccaaaatggccacttacctgactggggaactgacggccaccagtgaagactataagctcctggaaaatatgaataaactcaccagcttgaagtatcttgaaatgaaagatattgctataaacattagtaggaacttaaaggacttaaaccagaaatatgctggactgcagccttatctggatcagatcaatgtcattgaagagcaggtagcagctcttgagcaggcagcttacaagttggatgcatattcaaaaaaactggaagccaagtacaagaagctggagaagcgatgagaaacttatttctatgggacagagtcttttttttttaatgtggaagaatgtcttataaaacctgaatcctgaggctgatgaattgtgaaaattcctcaaaaggaaattatgctggtcatcacaggaacatctcaacgttcgagtaaactggaggactgtggctattcctgaaccttctttgagacagaatccctcagaatctcacacttataacttcctaccttttacttgaatgctttgccatattcaggacagagactctcacaaagttcagaaaacagctggacttaccagtaaaatcaaatgagaggacctattttctctggtagtggttgattactacattattttcttaagtggctggttttttagttactatgtaaatggtcgtttttctgttaatgatgctaatgtgttgtaaacaagattctaaatttaaaaaggaaaacaaaacaaacttgttctttgcagcttatcaccttgtgaatgtcggtaacttacttttccataatattgcaaataacataaaatcttaaaataattccaagctgagtcttctagattgagcagaaatggtgaaaggagtattgataacttggcgtatgtgatgggcccctcttgtttattttctatgtgagtcacattgacatgcgatcagtttgggaaatgtgatgaaaacaaagactagatgggtatgtgtgtttatgtgttgggtagggaggtgacgattgccactcataaaataaaggattttataaaataccttc

SEQ ID NO: 111584 - DNA, 2024 bp, Homo sapiens
  Payload ID: 1851
  Gene Symbol: BLOC1S2
  Gene Name: biogenesis of lysosomal organelles complex-1, subunit 2
  Uniprot ID: Q6QNY1
  ENST ID: ENST00000441611
  CDS Start-End: 219-518
agtgaaggacttgaaattatggcagatggagaatggagccgacttgatggaatgaaggcaagtggagggatgtcggaacaggctgctttggctggattagcaccgggtgtaggcgggacacttagtcattctcccttggcccagacgatgccgccgtggagacagctgaggaagcaaaggagcctgctgaagctgacatcactgagctctgccgggacatgttctccaaaatggccacttacctgactggggaactgacggccaccagtgaagactataagctcctggaaaatatgaataaactcaccagcttgaagtatcttgaaatgaaagatattgctataaacattagtaggaacttaaaggacttaaaccagaaatatgctggactgcagccttatctggatcagatcaatgtcattgaagagcaggtagcagctcttgagcaggcagcttacaagttggatgcatattcaaaaaaactggaagccaagtacaagaagctggagaagcgatgagaaacttatttctatgggacagagtcttttttttttaatgtggaagaatgtcttataaaacctgaatcctgaggctgatgaattgtgaaaattcctcaaaaggaaattatgctggtcatcacaggaacatctcaacgttcgagtaaactggaggactgtggctattcctgaaccttctttgagacagaatccctcagaatctcacacttataacttcctaccttttacttgaatgctttgccatattcaggacagagactctcacaaagttcagaaaacagctggacttaccagtaaaatcaaatgagaggacctattttctctggtagtggttgattactacattattttcttaagtggctggttttttagttactatgtaaatggtcgtttttctgttaatgatgctaatgtgttgtaaacaagattctaaatttaaaaaggaaaacaaaacaaacttgttctttgcagcttatcaccttgtgaatgtcggtaacttacttttccataatattgcaaataacataaaatcttaaaataattccaagctgagtcttctagattgagcagaaatggtgaaaggagtattgataacttggcgtatgtgatgggcccctcttgtttattttctatgtgagtcacattgacatgcgatcagtttgggaaatgtgatgaaaacaaagactagatgggtatgtgtgtttatgtgttgggtagggaggtgacgattgccactcataaaataaaggattttataaaataccttcctactgtgtatgtaggatttggggggatcttagggacctaatcgacttctttgcacactaaaaacatcagacaatgggacatactgactgaccagtctaggttgaaagataggcagccttacccagaacacaacattagcagctgggaaggtgtctgaggtccccaattacatatcccaaagagtttcttacttctgtttctgtcatttcccctctgttccagacagtcatcatttatcctctgttcttcctggactgttgctgtggtctcttctcatcttaactgtcccttccaaccaccctccacactgctgccagagcaatcttaaaaatgtaaactggccctattactcctgcttagaaccctgtagtgacttatcatggcctctgaaaaatctagactttcattatgcatacaagtcccttgtgtttttttgtttgtttatagacagggtctctattgtcacccaggctggagtgtggtggtgtgataatagctcaccttgacctcctaggctcaactgatcttcccacctcagcctcctgaatagctgggactaccagcacgctccaccatgccttgctaattattttttatacagatggagtctcactatgttgtccaggctggtcttgaactggcctcaagtgattctcttaccacagcctgccagagtgctgagattgtaggcatgaaccaccgtgcctaacataaggcccctatttaaacatttttctt

SEQ ID NO: 111585 - DNA, 360 bp, Homo sapiens
  Payload ID: 1851
  Gene Symbol: BLOC1S2
  Gene Name: biogenesis of lysosomal organelles complex-1, subunit 2
  ENST ID: ENST00000579542
  CDS Start-End: 1-354
tgccgggacatgttctccaaaatggccacttacctgactggggaactgacggccaccagtgaagactataagctcctggaaaatatgaataaactcaccagcttgaagtatcttgaaatgaaagatattgctataaacattagtaggaacttaaaggacttaaaccagaaatatgctggactgcagccttatctggatcagatcaatgtcattgaagagcaggtagcagctcttgagcaggcagcttacaagttggatgcatattcaaaaaaactgggtaaccgtttttacttctgttttgatgtaataaagactgcttcttgccagcatattcttagtaaacataatagttaacattta

SEQ ID NO: 111586 - DNA, 2634 bp, Homo sapiens
  Payload ID: 1851
  Gene Symbol: BLOC1S2
  Gene Name: biogenesis of lysosomal organelles complex-1, subunit 2
  Uniprot ID: Q6QNY1
  ENST ID: ENST00000614731
  CDS Start-End: 153-452
gtgtcagatgggcagggacgcagtgaaggacttgaaattatggcagatggagaatggagccgacttgatggaatgaagacgatgccgccgtggagacagctgaggaagcaaaggagcctgctgaagctgacatcactgagctctgccgggacatgttctccaaaatggccacttacctgactggggaactgacggccaccagtgaagactataagctcctggaaaatatgaataaactcaccagcttgaagtatcttgaaatgaaagatattgctataaacattagtaggaacttaaaggacttaaaccagaaatatgctggactgcagccttatctggatcagatcaatgtcattgaagagcaggtagcagctcttgagcaggcagcttacaagttggatgcatattcaaaaaaactggaagccaagtacaagaagctggagaagcgatgagaaacttatttctatgggacagagtcttttttttttaatgtggaagaatgtcttataaaacctgaatcctgaggctgatgaattgtgaaaattcctcaaaaggaaattatgctggtcatcacaggaacatctcaacgttcgagtaaactggaggactgtggctattcctgaaccttctttgagacagaatccctcagaatctcacacttataacttcctaccttttacttgaatgctttgccatattcaggacagagactctcacaaagttcagaaaacagctggacttaccagtaaaatcaaatgagaggacctattttctctggtagtggttgattactacattattttcttaagtggctggttttttagttactatgtaaatggtcgtttttctgttaatgatgctaatgtgttgtaaacaagattctaaatttaaaaaggaaaacaaaacaaacttgttctttgcagcttatcaccttgtgaatgtcggtaacttacttttccataatattgcaaataacataaaatcttaaaataattccaagctgagtcttctagattgagcagaaatggtgaaaggagtattgataacttggcgtatgtgatgggcccctcttgtttattttctatgtgagtcacattgacatgcgatcagtttgggaaatgtgatgaaaacaaagactagatgggtatgtgtgtttatgtgttgggtagggaggtgacgattgccactcataaaataaaggattttataaaataccttcctactgtgtatgtaggatttggggggatcttagggacctaatcgacttctttgcacactaaaaacatcagacaatgggacatactgactgaccagtctaggttgaaagataggcagccttacccagaacacaacattagcagctgggaaggtgtctgaggtccccaattacatatcccaaagagtttcttacttctgtttctgtcatttcccctctgttccagacagtcatcatttatcctctgttcttcctggactgttgctgtggtctcttctcatcttaactgtcccttccaaccaccctccacactgctgccagagcaatcttaaaaatgtaaactggccctattactcctgcttagaaccctgtagtgacttatcatggcctctgaaaaatctagactttcattatgcatacaagtcccttgtgtttttttgtttgtttatagacagggtctctattgtcacccaggctggagtgtggtggtgtgataatagctcaccttgacctcctaggctcaactgatcttcccacctcagcctcctgaatagctgggactaccagcacgctccaccatgccttgctaattattttttatacagatggagtctcactatgttgtccaggctggtcttgaactggcctcaagtgattctcttaccacagcctgccagagtgctgagattgtaggcatgaaccaccgtgcctaacataaggcccctatttaaacatttttcttaaataaaaaacaaaagaattaaactgtaactctactatcttaacatagaatcagtcttaccccttcttccaacccttttccttttccgtgcatgtattgatctattttttttttttttttgagatgaagtcttgctctgtcgcctgggctggagtgcagtggtgcgatcttagctcactgcaacctctgtttcctgggttcaagcgattctcctgcctcagcctcccgagtagttgagatttacaggtgcccaccaccatgccaggctaatttttgtatttttagtagagacggggtttcaccatgttggccaggctggtctcgaactcctgaccccaaatgatccacccacctcggcctcccaaagtgctgggattacaggtgtgagccaccgcacccagccatgttgatctatttttaaaaagtttttatttcctgttacactgtgttcagctatcttcagccaccttaaattcccatggatgagttttcataaactttttgaaaatagatttagatttacgggaaagttgcaaagataatacagaatttaatggatgagtttttttattgatgtgtaatagatgtatgtattttcagagtacaagtgataatttaatacatgtatataatgtgtaaatattaaatcaagagttattgggatgtccttcacctt

SEQ ID NO: 111587 - DNA, 2470 bp, Homo sapiens
  Payload ID: 1851
  Gene Symbol: BLOC1S2
  Gene Name: biogenesis of lysosomal organelles complex-1, subunit 2
  ENST ID: ENST00000618916
  CDS Start-End: 1-288
atgagattgccaaggaagagcttagaagtagccaccagtgaagactataagctcctggaaaatatgaataaactcaccagcttgaagtatcttgaaatgaaagatattgctataaacattagtaggaacttaaaggacttaaaccagaaatatgctggactgcagccttatctggatcagatcaatgtcattgaagagcaggtagcagctcttgagcaggcagcttacaagttggatgcatattcaaaaaaactggaagccaagtacaagaagctggagaagcgatgagaaacttatttctatgggacagagtcttttttttttaatgtggaagaatgtcttataaaacctgaatcctgaggctgatgaattgtgaaaattcctcaaaaggaaattatgctggtcatcacaggaacatctcaacgttcgagtaaactggaggactgtggctattcctgaaccttctttgagacagaatccctcagaatctcacacttataacttcctaccttttacttgaatgctttgccatattcaggacagagactctcacaaagttcagaaaacagctggacttaccagtaaaatcaaatgagaggacctattttctctggtagtggttgattactacattattttcttaagtggctggttttttagttactatgtaaatggtcgtttttctgttaatgatgctaatgtgttgtaaacaagattctaaatttaaaaaggaaaacaaaacaaacttgttctttgcagcttatcaccttgtgaatgtcggtaacttacttttccataatattgcaaataacataaaatcttaaaataattccaagctgagtcttctagattgagcagaaatggtgaaaggagtattgataacttggcgtatgtgatgggcccctcttgtttattttctatgtgagtcacattgacatgcgatcagtttgggaaatgtgatgaaaacaaagactagatgggtatgtgtgtttatgtgttgggtagggaggtgacgattgccactcataaaataaaggattttataaaataccttcctactgtgtatgtaggatttggggggatcttagggacctaatcgacttctttgcacactaaaaacatcagacaatgggacatactgactgaccagtctaggttgaaagataggcagccttacccagaacacaacattagcagctgggaaggtgtctgaggtccccaattacatatcccaaagagtttcttacttctgtttctgtcatttcccctctgttccagacagtcatcatttatcctctgttcttcctggactgttgctgtggtctcttctcatcttaactgtcccttccaaccaccctccacactgctgccagagcaatcttaaaaatgtaaactggccctattactcctgcttagaaccctgtagtgacttatcatggcctctgaaaaatctagactttcattatgcatacaagtcccttgtgtttttttgtttgtttatagacagggtctctattgtcacccaggctggagtgtggtggtgtgataatagctcaccttgacctcctaggctcaactgatcttcccacctcagcctcctgaatagctgggactaccagcacgctccaccatgccttgctaattattttttatacagatggagtctcactatgttgtccaggctggtcttgaactggcctcaagtgattctcttaccacagcctgccagagtgctgagattgtaggcatgaaccaccgtgcctaacataaggcccctatttaaacatttttcttaaataaaaaacaaaagaattaaactgtaactctactatcttaacatagaatcagtcttaccccttcttccaacccttttccttttccgtgcatgtattgatctattttttttttttttttgagatgaagtcttgctctgtcgcctgggctggagtgcagtggtgcgatcttagctcactgcaacctctgtttcctgggttcaagcgattctcctgcctcagcctcccgagtagttgagatttacaggtgcccaccaccatgccaggctaatttttgtatttttagtagagacggggtttcaccatgttggccaggctggtctcgaactcctgaccccaaatgatccacccacctcggcctcccaaagtgctgggattacaggtgtgagccaccgcacccagccatgttgatctatttttaaaaagtttttatttcctgttacactgtgttcagctatcttcagccaccttaaattcccatggatgagttttcataaactttttgaaaatagatttagatttacgggaaagttgcaaagataatacagaatttaatggatgagtttttttattgatgtgtaatagatgtatgtattttcagagtacaagtgataatttaatacatgtatataatgtgtaaatattaaatcaagagttattgggatgtccttcacctt

SEQ ID NO: 111588 - DNA, 2601 bp, Homo sapiens
  Payload ID: 1852
  Gene Symbol: BLOC1S3
  Gene Name: biogenesis of lysosomal organelles complex-1, subunit 3
  Uniprot ID: Q6QNY0
  ENST ID: ENST00000433642
  CDS Start-End: 97-705
gaaatcacagcccttcagctgccacggtgagaacgcagcactcgggttaggaagcggatctcgcaagctccgagcgtcagctgccggttcggtgccatggcgtcccagggtcgtcggcggaggcccctgcggaggccggagacggtggtgccgggggaggcgaccgagacggattccgagcgctctgcgtcctcgtcggaggaggaggagctgtacctgggtccttcgggcccgacgcgcggccgccccacggggctgcgggtggctggggaagccgcggagaccgactcggagccggagccggagccggaaccgacggccgcgccgagggacctgcctccactcgtggtgcagcgggaatcggcggaggaggcctggggcacggaggaggccccggcgcccgcccccgcgcgctcgctcctgcaacttcggctggcggagagccaggcgcggctggaccacgacgtggcggccgccgtgagcggtgtctaccgccgtgcaggccgcgacgtggccgccctggctagtaggctggcggcagcccaggcggcggggctggcggcggcccacagcgtgcgcctggcgcgcggggacctttgtgcgctggccgagcgtctggacatcgtggctggctgccgcctgctgccggacatccgcggcgtgccagggaccgagcctgagaaagacccggggccgcgggcctagccatgattctacttcccaacctgactgcaatttgggggtaggccttgctgcctctgggacctgactctgtctcctgtgtctcttatcaccccccacccccgctcccatcttggtgtcacccatgggggctaatccggtccccttggataatgctttatattggatatagttcaacccctactgcggagaccagggccccactatccttagatctggttcctctcccgatcctgaccctgccgcctggttctgagccttcccctggggcttggctccagcctttgttacatagttgctccttaatctgtttccaccctgggggctcaccaattttttttttttttttttttttttggagacagggtgtttatctgtcacccaggctagagtgcagtggcgggattactgctcactgcaacctcgacctcctgggctcaagtgatcctcccagctcagccttcaagagtagctgggactgcagacctgcaccaccacgtccagctgcccggttaatttttttctgtcggtttgaagaggggagaaggtctcactatgttgcccaggcttgtctcaaactcccgggctcaagcaatcctcccactgtggcgtcccaaagtgctggggttacaggtgtgagccaccacacactgggctctgctctgcctttctgagtttggtttctgcttatggtggggagcttgttcccgttcttcccacaagaacccaggatgtggcacagcttccctgccgtcttccttcactcagttggctacgcctcccatcctagctccacttccagaactgccttcaccctaggctgggtccttgttttgtttttagagacagggtctcactgtgtctcccaggctggagtacagtggcgtgatctcggctcactgccacctccacctcccgagttcaagcgattctcctgcctcagcctcccgagtagctaggattacaggcatgcaccaccacgcctggctactttttatatttttagtagagatgaggtttcaccttgttggccaggctggtctcgaactcctggcctcaggtgatccacccgcctcacctcctaaaatgctgggattacaggcgtgggccactgcgcctagccagctgggtccttgttctgctgcccaagcttggccctggttccgtgtgctggttctactttttgttctcccatctgcctcctgcctcctcccctttgagcttagccccgccctctcagcctgatttctgtttcccaagtccagcagtgtcgtgggataggttttgctttcttttactgtctccatcctacttacacctccctgatcctggggtctggggactccccatggtttccttccttctgcaggcccaaaatgatggcccctcttaacccaaggcaggggatcttcctcccaactccctggaccaaggtggcatttcctgcacacccctccaggccaagatgatgctcgctctcaactctgtaggccaaggtggcgtctcctcttgactctccagacctaaagtgacacccttcaggcacttcgggcccaattcagcccagtcctggtgctttcagcgccagatgacagcactttgcagataagaacgatatgatgtgtggatttcactacatttggctcctggatgctataaaaggacttggatttctgacttggctcagggactggggttagcagtctctttctgctccttttcacctgtgttttcttccgatcccagctctggtccctcagccgcattcatatttactctcctctcccagcctgatatccctgtccctcatctcaacccgaagccaagatctgagcccccaagatggagaatggggaggagctttttatggcggactgattaaaactcttaagcatttac

SEQ ID NO: 111589 - DNA, 469 bp, Homo sapiens
  Payload ID: 1852
  Gene Symbol: BLOC1S3
  Gene Name: biogenesis of lysosomal organelles complex-1, subunit 3
  ENST ID: ENST00000592910
  CDS Start-End: 1-237
gcggccgccgtgagcggtgtctaccgccgtgcaggccgcgacgtggccgccctggctagtaggctggcggcagcccaggcggcggggctggcggcggcccacagcgtgcgcctggcgcgcggggacctttgtgcgctggccgagcgtctggacatcgtggctggctgccgcctgctgccggacatccgcggcgtgccagggaccgagcctgagaaagacccggggccgcgggcctagccatgattctacttcccaacctgactgcaatttgggggcccaaaatgatggcccctcttaacccaaggcaggggatcttcctcccaactccctggaccaaggtggcatttcctgcacacccctccaggccaagatgatgctcgctctcaactctgtaggccaaggtggcgtctcctcttgactctccagacctaaagtgacacccttcaggcacttcgggcccaattcagcc

SEQ ID NO: 111590 - DNA, 732 bp, Homo sapiens
  Payload ID: 1852
  Gene Symbol: BLOC1S3
  Gene Name: biogenesis of lysosomal organelles complex-1, subunit 3
  Uniprot ID: Q6QNY0
  ENST ID: ENST00000587722
  CDS Start-End: 75-683
gacctgcgccttttacccaccgcggcgccggtctcacgtgcagtcccttcgctcttctcccctagttcggtgccatggcgtcccagggtcgtcggcggaggcccctgcggaggccggagacggtggtgccgggggaggcgaccgagacggattccgagcgctctgcgtcctcgtcggaggaggaggagctgtacctgggtccttcgggcccgacgcgcggccgccccacggggctgcgggtggctggggaagccgcggagaccgactcggagccggagccggagccggaaccgacggccgcgccgagggacctgcctccactcgtggtgcagcgggaatcggcggaggaggcctggggcacggaggaggccccggcgcccgcccccgcgcgctcgctcctgcaacttcggctggcggagagccaggcgcggctggaccacgacgtggcggccgccgtgagcggtgtctaccgccgtgcaggccgcgacgtggccgccctggctagtaggctggcggcagcccaggcggcggggctggcggcggcccacagcgtgcgcctggcgcgcggggacctttgtgcgctggccgagcgtctggacatcgtggctggctgccgcctgctgccggacatccgcggcgtgccagggaccgagcctgagaaagacccggggccgcgggcctagccatgattctacttcccaacctgactgcaatttgggggtaggccttgct

SEQ ID NO: 111591 - DNA, 1617 bp, Homo sapiens
  Payload ID: 1853
  Gene Symbol: BLOC1S4
  Gene Name: biogenesis of lysosomal organelles complex-1, subunit 4, cappuccino
  Uniprot ID: Q9NUP1
  ENST ID: ENST00000320776
  CDS Start-End: 156-809
gggaggccggaaacaaaggtggatgcgcgtgaacagacgccctcgcaggccgccggaagcaaaggcgtgagcgcgcgtgcgtgcgtgtgcgggtgcgtgagcgtgagcgcgcggaggccggaagcgagcgctgcgcagtcgggtggtcgcgggccatggagggtagcttttcggatggcggagcgctgccggaggggctcgcggaagaggccgagccgcagggcgccgcctggagcggggacagtggcactgtttcccagagccacagcagcgcctcggggccgtgggaggacgagggcgcggaggacggcgcgccgggccgcgacctgccgctgcttcgccgcgccgctgcgggctacgccgcctgcctgctgcccggggccggggcgcggcccgaggtcgaggccctggacgcgagcctagaggacctgcttaccagagtggacgagttcgtgggcatgctggacatgcttcgcggcgactcgtcccacgtcgtcagcgagggcgtgccgcgcatccacgcgaaggccgccgagatgcggcgcatctacagcaggatcgaccggctggaggccttcgtgaggatggtggggggccgcgtggccaggatggaggagcaggtcaccaaggccgaggccgagctgggcaccttccccagggcgttcaagaagctcctgcacacgatgaacgtgccctcgctctttagcaagtctgctccctcgaggccacagcaagccggctacgaagcccccgtcctgtttcggaccgaagactacttcccttgttgcagtgaaaggcctcagctctgacggcctgaccactgcggcaagaggaccccagctggggtgcttacctccagtatgaagtgaattgcaaatcctgcttatggacatatatgatgttggagtgtgggattttaaagtttactttctacaaactctccgtagtatattcatgattcagtgtagaatgtatagactttatgtcttccaagtttaaaaaaagagacagggtcttggtatgttgcccagactgttcggaaactcctgggctcaagtgatccttccacctcagcctccccagtagctgggactacggggtcgccactgcacccagcctgtgtcttccagctctaatcagaaagctgcttgtcgagggcatggggaatcaaactgaatgaacttttctctgcactgtggcaaaactgttatttttatggattttactaaatggcgttaccttttcaagatttatatgtttgtataatcataagaaaattgagccattaaagccttgttattcaatcctaatagtcagttttctagaacctacttttagggtaaatggtacattatttaatattatattaaacctcctatagcgtggattgtagaccaaaggaaatggtacaatttctgagaatatatgttgattttttgtgactaattccaaagttgtatttgaaagtatgacctcacagtcttcatttgtccatagcaaacatatgtgtgtgtgtgtgtatatatatatgtgggttgccaatgtttggtttataatttaaatgttaatagaaattttgagttttattggaaatgatttccttctgaaaagagcttt

SEQ ID NO: 111592 - DNA, 2445 bp, Homo sapiens
  Payload ID: 1854
  Gene Symbol: BLOC1S5
  Gene Name: biogenesis of lysosomal organelles complex-1, subunit 5, muted
  ENST ID: ENST00000244777
  CDS Start-End: 18-362
gggcggaactggtcgggatgagtggcggagggacagagacccctgtgggttgtgaggccgccccgggcggtggcagcaagaagagggactccctggggactgcgggctcagcgcacctcattatcaaggatcttggagaaattcattcaaggcttttggatcacagaccagttattcaaggtgaaactcgttattttgtaaaagaatttgaagaaaaacgtggtcttcgagaaatgcgagttcttgaaaatttgaagaacatgatccatgaaacaaatgaacatactcttcccaaatgtagagacacaatgcgggacagcctcagccaggttctccagagatatgaggaactaagttgctgagagataggaggaccaacaagaacagtgcctggcacaaagcacatgctcagtaaacatttgtcaaatgaataattgagcgagcaaacatgcccaagatcattcacacaactgagtgccaaatttgactaaggctcactcttaacctgcacactacatgtctttatttggataaatgcaagcagctaatgactcagtctgtagactccaacagagggaacaggaacgaaaaaagattcatagtgaccacttagtagctagtgagaaacagcatatgctccagtgggacaacttcatgaaggagcaacccaacaaaagggctgaagtggatgaagagcacagaaaagccatggaaaggcttaaagaacaatatgctgagatggagaaggacctagcgaaattttcaaccttttaagaacttgaaccacaacaatcacaaactaatgagaagatgttcacctctctcctgaaaactattcccaccagaccgtttagcctctgcttcaagcttagcaatatattcagtggcactcttatatcagaagaaagaagtttctactggcattctgattggatatttaaagaagggtgccacatttttccagctttaagtgcctatatatgattatttgaatgaagaggagtaggaaggaaaatggaatcaatatactctttgttagtcagaattgatcatcttttccattgattagctcagagaactgtaggtatagacttcttagaaagataatttcattcatttctatacagggttaacaatagtttattattgtggcttaatgggaaggtatagaagctacctgtcatagcctccttggctgttggaaggatgtataaagtgttactgcatgagtaatgtagacaaaaaaaaaagccagctgtccttggagcagagatcacatttcagagaggtgagagtgaacacattgtctctgctgtggcaaagatggccacgctggtgtttgagctgcctcttgggaagcgttgcatattttacagtgcagcataatgccatgggcttccgtggatgggaagacacatgttaagttttgtggccttccagcacttactattttcagctttttaaagcatgcttagaaggaaaagcttaccaaaaatatattttgacatttagtttttccaagagctataatcttgcccatagtatttacctcatttttgtgtctgttttgctgtgggtaagctttataagataaataatgtctatacatgtttcgactgtttaatgagtaatcaacaaaatctgccagagagtccctctggaaccatataaagttcctggctttgaatgaaccagaagtgtttgcccacacagcaaatggtccatgttaaatgtaaatcctttttagtgttaatgtctgttctcataagcaggtatattatgatgaaacatgtaccagttctgtcatcactgtgatctttaaaaacctgcatttaacagtctaatttgaggctgggtgcagtggctcacacctgtaatctcaacactttgggaggccgaggcaggcggatcatttgaagtcaggagttcaagcctagcctggccaacatggtgaaaccccgtctctactaaaaatacaaaaattagcccggcatgttggtgcacgcttgtaatcccagctactcaggagtctgaggcacgagaatcacctgaactcaggaggcggaggttgcggtgagctgagatggcaccactgcactccagcttgggtgacagagtgagactccatctcaacaaaaaaaaaatctaactgaagaactaagttgattttttatttgccataaaccaagcaaaagtaaatgcaataatttcgagatttatggtaaacaaatttgaggtatggataaatctttcacatattttttattgctctttagtaaagaaaggcacaagaaagaaaatatccagctctcttgtgttatctcagtgtggcgactgcagaaaattgacaatgcctgcctgtgtaaatgtatggcttactgtcaaagcttcattcttggctgcatgttgaaaatgtgattaaagttaatagaggagatgaaataa

SEQ ID NO: 111593 - DNA, 2684 bp, Homo sapiens
  Payload ID: 1854
  Gene Symbol: BLOC1S5
  Gene Name: biogenesis of lysosomal organelles complex-1, subunit 5, muted
  Uniprot ID: Q8TDH9
  ENST ID: ENST00000397457
  CDS Start-End: 39-602
aggcgcagcgtggccgcgggtgggcggaactggtcgggatgagtggcggagggacagagacccctgtgggttgtgaggccgccccgggcggtggcagcaagaagagggactccctggggactgcgggctcagcgcacctcattatcaaggatcttggagaaattcattcaaggcttttggatcacagaccagttattcaaggtgaaactcgttattttgtaaaagaatttgaagaaaaacgtggtcttcgagaaatgcgagttcttgaaaatttgaagaacatgatccatgaaacaaatgaacatactcttcccaaatgtagagacacaatgcgggacagcctcagccaggttctccagagattgcaagcagctaatgactcagtctgtagactccaacagagggaacaggaacgaaaaaagattcatagtgaccacttagtagctagtgagaaacagcatatgctccagtgggacaacttcatgaaggagcaacccaacaaaagggctgaagtggatgaagagcacagaaaagccatggaaaggcttaaagaacaatatgctgagatggagaaggacctagcgaaattttcaaccttttaagaacttgaaccacaacaatcacaaactaatgagaagatgttcacctctctcctgaaaactattcccaccagaccgtttagcctctgcttcaagcttagcaatatattcagtggcactcttatatcagaagaaagaagtttctactggcattctgattggatatttaaagaagggtgccacatttttccagctttaagtgcctatatatgattatttgaatgaagaggagtaggaaggaaaatggaatcaatatactctttgttagtcagaattgatcatcttttccattgattagctcagagaactgtaggtatagacttcttagaaagataatttcattcatttctatacagggttaacaatagtttattattgtggcttaatgggaaggtatagaagctacctgtcatagcctccttggctgttggaaggatgtataaagtgttactgcatgagtaatgtagacaaaaaaaaaagccagctgtccttggagcagagatcacatttcagagaggtgagagtgaacacattgtctctgctgtggcaaagatggccacgctggtgtttgagctgcctcttgggaagcgttgcatattttacagtgcagcataatgccatgggcttccgtggatgggaagacacatgttaagttttgtggccttccagcacttactattttcagctttttaaagcatgcttagaaggaaaagcttaccaaaaatatattttgacatttagtttttccaagagctataatcttgcccatagtatttacctcatttttgtgtctgttttgctgtgggtaagctttataagataaataatgtctatacatgtttcgactgtttaatgagtaatcaacaaaatctgccagagagtccctctggaaccatataaagttcctggctttgaatgaaccagaagtgtttgcccacacagcaaatggtccatgttaaatgtaaatcctttttagtgttaatgtctgttctcataagcaggtatattatgatgaaacatgtaccagttctgtcatcactgtgatctttaaaaacctgcatttaacagtctaatttgaggctgggtgcagtggctcacacctgtaatctcaacactttgggaggccgaggcaggcggatcatttgaagtcaggagttcaagcctagcctggccaacatggtgaaaccccgtctctactaaaaatacaaaaattagcccggcatgttggtgcacgcttgtaatcccagctactcaggagtctgaggcacgagaatcacctgaactcaggaggcggaggttgcggtgagctgagatggcaccactgcactccagcttgggtgacagagtgagactccatctcaacaaaaaaaaaatctaactgaagaactaagttgattttttatttgccataaaccaagcaaaagtaaatgcaataatttcgagatttatggtaaacaaatttgaggtatggataaatctttcacatattttttattgctctttagtaaagaaaggcacaagaaagaaaatatccagctctcttgtgttatctcagtgtggcgactgcagaaaattgacaatgcctgcctgtgtaaatgtatggcttactgtcaaagcttcattcttggctgcatgttgaaaatgtgattaaagttaatagaggagatgaaataagtatttgagatttttttcaataacactgaacttctgccaactttctctatccgctactgtaggcttgacaggctcatcaatcatttgctggtacctggactaaaaagcgcacttgctgacaccaaggcatgttggaattttcttaattcagtggatggaaaaagaaatacttccaaaaatatcccacacatgaaaagggaggggagccttaaatgaaaattccctttgtaccgtagacactttttggaatgcgattaattgccaacacatcattgaacgaatgctgtaaccaagaaattaagattgtgtgtgtgaagggaatatattcttaactgtggctacccaacttgtatagcaaagatttctgatagtttgtgttcatctcatgtgaataataaatactttacccta

SEQ ID NO: 111594 - DNA, 273 bp, Homo sapiens
  Payload ID: 1854
  Gene Symbol: BLOC1S5
  Gene Name: biogenesis of lysosomal organelles complex-1, subunit 5, muted
  ENST ID: ENST00000543936
  CDS Start-End: 1-273
atgagtggcggagggacagagacccctgtgggttgtgaggccgccccgggcggtggcagcaagaagagggactccctggggactgcgggctcagcgcacctcattatcaaggatcttggagaaattcattcaaggcttttggatcacagaccagttattcaaggtgaaactcgttattttgtaaaagaatttgaatgcaagcagctaatgactcagtctgtagactccaacagagggaacaggaacgaaaaaagattcatagtgaccacttag

SEQ ID NO: 111595 - DNA, 1273 bp, Homo sapiens
  Payload ID: 1854
  Gene Symbol: BLOC1S5
  Gene Name: biogenesis of lysosomal organelles complex-1, subunit 5, muted
  ENST ID: ENST00000627748
  CDS Start-End: 21-227
ggtgggcggaactggtcgggatgagtggcggagggacagagacccctgtgggttgtgaggccgccccgggcggtggcagcaagaagagggactccctggggactgcgggctcagcgcacctcattatcaaggatcttggagaaattcattcaaggcttttggatcacagaccagttattcaaggtgaaactcgttattttgtaaaagaatttgaaaatgaagactaaaccatagttaaaggcagacagtgtaatatccagtggctgtgtgttctgacggtgaagatgtagtgtaactatcagaaaatagaaggagatggaaaaacgtggtcttcgagaaatgcgagttcttgaaaatttgaagaacatgatccatgaaacaaatgaacatactcttcccaaatgtagagacacaatgcgggacagcctcagccaggttctccagagattgcaagcagctaatgactcagtctgtagactccaacagagggaacaggaacgaaaaaagattcatagtgaccacttagtagctagtgagaaacagcatatgctccagtgggacaacttcatgaaggagcaacccaacaaaagggctgaagtggatgaagagcacagaaaagccatggaaaggcttaaagaacaatatgctgagatggagaaggacctagcgaaattttcaaccttttaagaacttgaaccacaacaatcacaaactaatgagaagatgttcacctctctcctgaaaactattcccaccagaccgtttagcctctgcttcaagcttagcaatatattcagtggcactcttatatcagaagaaagaagtttctactggcattctgattggatatttaaagaagggtgccacatttttccagctttaagtgcctatatatgattatttgaatgaagaggagtaggaaggaaaatggaatcaatatactctttgttagtcagaattgatcatcttttccattgattagctcagagaactgtaggtatagacttcttagaaagataatttcattcatttctatacagggttaacaatagtttattattgtggcttaatgggaaggtatagaagctacctgtcatagcctccttggctgttggaaggatgtataaagtgttactgcatgagtaatgtagacaaaaaaaaaagccagctgtccttggagcagagatcacatttcagagaggtgagagtgaacacattgtctctgctgtggcaaagatggccacgctggtgtttgagctgcctcttgggaagc

SEQ ID NO: 111596 - DNA, 4037 bp, Homo sapiens
  Payload ID: 1855
  Gene Symbol: BLOC1S6
  Gene Name: biogenesis of lysosomal organelles complex-1, subunit 6, pallidin
  Uniprot ID: Q9UL45
  ENST ID: ENST00000220531
  CDS Start-End: 322-840
acccaccccgtgagcagcccaaaccgaccaccgtcctcccccagctcccaccaatcggatcgcagggactcgagccccacactgctgagtccgctgacactgcgtccggggccagacgacgatatcagcgcggggtccccacaacgccatggggcagagccaactctcgagcgcgtgatcgaagcccgcagttttttcgcccccgtcacttccgggtgcgacaatctcttctgtccggccagccgctggagtcgttaggtgccgccttgcttctgacgagccacacgtttgcttcttccctgtgttcccagctggagggacatgagtgtccctgggccgtcgtctccggacggggccctgacacggccaccctactgcctggaggccggggagccgacgcctggtttaagtgacacttctccagatgaagggttaatagaggacttgactatagaagacaaagcagtggagcaactggcagaaggattgctttctcattatttgccagatctgcagagatcaaaacaagccctccaggaactcacacagaaccaagttgtattgttagacacactggaacaagagatttcaaaatttaaagaatgtcattctatgttggatattaatgctttgtttgctgaggctaaacactatcatgccaagttggtgaatataagaaaagagatgctgatgcttcatgaaaaaacatcaaagttaaaaaaaagagcacttaaactgcagcagaagaggcaaaaagaagagttggaaagggagcagcaacgagagaaggagtttgaaagagaaaagcagttaactgccagaccagccaaaaggatgtgaaaagttgtgtttgtgtgttttcttctcctgtcccatatttgggttatgatgactcaagtgtagactgaagttgaggtagtgccttatgccattatgtcatatgttgaaatccttattccggtattactgtgtctccatgccttttttccaagtagcagacgtcatgttgcatggtttttgatatttatatgtaagtttttcaaattttgcttaattttaaaatttattattttgatcttgaattatttataaactggaaagtggtttgattattgtgagtcaaaactctaagtggttaaaaattagtatgaattttttagcttcttaatgaatatggatttaaaactctccagttcttattttatgaaatgacttgcctttctggtaatacaatgctgattttttagtaattgccttttcattactttgttaagaagaaatgccagctgtttaatcacacctacccctggaaaagaggtaaaccttttgaacagttgaatttcatcagaagctctatagctttttggtgagaggaagtgatactctttattacaagaaacaaggaattaacaaaaataaggaacttgttgctacctttcttttctgttgaacattaaaaataatttggtttgtggactgggcatggtggcttatggaaaagaggtgagcctttgtgaagaacataatggaaaagtgcatgtacgggaaataacagcactttaggtgtagttcaggtgagcaagatgccagatagtttctactaaccatatactctttctgcttcttagcgtcgttgtcactgcttctgtggcttttgggttcaaagtagattatatatattcctaaagcttggtggaggtagtggagctatcacacactcaaatgagcttgtatatttataatacaatatagtattatagtaacagttatcatacactgagatatagtttctgtgcttgtaaaaaattcttgaagtgaggccgggtgcggtggctcatgcctgtaatcccaacgctttgggacgccgaggcgggtggatcatgaggtcaaaagattgagaccatcctggccaacatggtgaaaccccgtctctactagaaatacaaaaattagctgggtgtgggggcgtgcgcctgtagtcccagctacttgggaggctgaggcaggagaattgcttgaacccaggaggcagaggttgcagtaagccaagatcgtgccactgcactccagccttggtgacagagcaagactccgtctccaaaaaaaagaaaaaaaaatttcttgaagtggaatgatgtacaccaaatacccactttatagataattacagggatggtgaaaaattagtaaatagcttcacaaaagaggcagcgtgatacctttagtgttttctagaatttttttctggatattatatgtaagaatttattgtttgagggaaatacgaggtttcattgtttaaaatcaagagtgtattgtttactgttttacagtattatttaatatccaactggtctccaatctccattacatagggactgtacagagcctgtgaagatgtatgaatggtatcttttataatccacaatacatttctggtaagatggaatcactacctctgatcacatatcaggctaacgatagagaaagcattaggtttaagttgagggctaagaactggtttgtttaaaggtttaaattgttggaaaagagcatttgccttctttaatgaatgatggtctcacaattcagttgactttgacctaatatttaagaatataaatatattttatttgaaaggctgagtgttgccctcaaacacttgctaaaactgcctagggcaggattcattagggcttgcagacaatgtcacctaaattgctgaatgtactcattataatatgatatctgacaaaggtagtacagcgtttctgagtcatttgggaccaactgcagtggttgtttaaaatgctggttcctgcacacaattctctatctactgaagcacatctgttttctttgtttgttttgctttgctttttgtttttaaagtttcccccagtgattccagtgcacctgaaaagttgagaaccacaggcttagtggtacgttggggtttcccacgctaggctgcatagcattataacctgggaacgttaaaaaaaatacagacattcttgattcttagtgtagttatgatgtggatcctacgtattttttaaaaaactctccagataattttgatgtcacgagtcactagtatagactatctatctagtgagttgtattataagcgatgaaatactttaaaagctacccagtaactcttgggattaattttatgaaataaattctgagctgctgcttttgatatagtcagacttaagactgaaccccagtagacaggcaatagatatagaattctggttagctaattgaacttttgtgacctgtttaaaaacaaatcaaatttattgaacaaatgacaaggcacaaatactttcagaattgtatttcagttttgaagatttaaaaaaaatgtgaaaataaatatatattagtatcctttattttaaagtcaattgtaaaccagaagtactgttattttggtgattaaaatccaaaactttagctgtatttcagtaacaaaaacataccttactagactgtgatggctcacacctgtaatcccagtgctttgggaggctgaggtgggaagattctttgagcccaggagttcaaggctgcagtgaattctgatcgcaccactgaactccagcccgtatgacagagtgagaccctgtttctaaaaacaaaacaaacaaacaaacaaacaacgtatcttactgactaaactggaatggaaatcttataattagtgttgtatttttctgcaaaatagtgaattggtacttgggagacttctgttctttgttgaaaaaaattgcctttgttttgaaattatatcacctgtgttctgaactaaaatgatgggagttcattttgtatttactttgcagtaagtatcatgtaaatatgcaaatgttgaatgtaatatagattgtgtcctcattgagtttttgggtgatacagtttataaatataacaattatacaccctcatacattcgtctgattttgagcttgtaagatgagaactgctttttacacatttaataaaaaaaggtctctgaatta

SEQ ID NO: 111597 - DNA, 480 bp, Homo sapiens
  Payload ID: 1855
  Gene Symbol: BLOC1S6
  Gene Name: biogenesis of lysosomal organelles complex-1, subunit 6, pallidin
  ENST ID: ENST00000568963
  CDS Start-End: 93-224
tctgtccggccagccgctggagtcgttaggtgccgccttgcttctgacgagccacacgtttgcttcttccctgtgttcccagctggagggacatgagtgtccctgggccgtcgtctccggacggggccctgacacggccaccctactgcctggaggccggggagccgacgcctgaaccaagttgtattgttagacacactggaacaagagatttcaaaatttaaagaatgtcattctatgttggatattaatgctttgtttgctgaggctaaacactatcatgccaagttggtgaatataagaaaagagatgctgatgcttcatgaaaaaacatcaaagttaaaaaaaagagcacttaaactgcagcagaagaggcaaaaagaagagttggaaagggagcagcaacgagagaaggagtttgaaagagaaaagcagttaactgccagaccagccaaaaggatgtgaaaagttgtgtttgtg

SEQ ID NO: 111598 - DNA, 706 bp, Homo sapiens
  Payload ID: 1855
  Gene Symbol: BLOC1S6
  Gene Name: biogenesis of lysosomal organelles complex-1, subunit 6, pallidin
  ENST ID: ENST00000564765
  CDS Start-End: 262-402
agtggtgggggatggatttaccagaaagatgatcagcttataattcagagaggtttaagtgacacttctccagatgaagggttaatagaggacttgactatagaagacaaagcagtggagcaactggcagaaggattgctttctcattatttgccagatctgcagagatcaaaacaagccctccaggaactcacacagaaccaagttgtattgttagacacactggaacaagagatttcaaaatttaaagaatgtcattctatgttggatattaatgctttgaaaagagcacttaaactgcagcagaagaggcaaaaagaagagttggaaagggagcagcaacgagagaaggagtttgaaagagaaaagcagttaactgccagaccagccaaaaggatgtgaaaagttgtgtttgtgtgttttcttctcctgtcccatatttgggttatgatgactcaagtgtagactgaagttgaggtagtgccttatgccattatgtcatatgttgaaatccttattccggtattactgtgtctccatgccttttttccaagtagcagacgtcatgttgcatggtttttgatatttatatgtaagtttttcaaattttgcttaattttaaaatttattattttgatcttgaattatttataaactggaaagtggtttgattattgtgagtcaaaactctaagtggttaaaaatt

SEQ ID NO: 111599 - DNA, 592 bp, Homo sapiens
  Payload ID: 1855
  Gene Symbol: BLOC1S6
  Gene Name: biogenesis of lysosomal organelles complex-1, subunit 6, pallidin
  ENST ID: ENST00000568597
  CDS Start-End: 69-329
gttaggtgccgccttgcttctgacgagccacacgtttgcttcttccctgtgttcccagctggagggacatgagtgtccctgggccgtcgtctccggacggggccctgacacggccaccctactgcctggaggccggggagccgacgcctggtttaagtgacacttctccagatgaagggttaatagaggacttgactatagaagacaaagcagtggagcaactggcagaaggattgctttctcattatttgccagatctgcagagatcaaaacaagccctccaggaactcactttgctgaggctaaacactatcatgccaagttggtgaatataagaaaagagatgctgatgcttcatgaaaaaacatcaaagttaaaaaaaagagcacttaaactgcagcagaagaggcaaaaagaagagttggaaagggagcagcaacgagagaaggagtttgaaagagaaaagcagttaactgccagaccagccaaaaggatgtgaaaagttgtgtttgtgtgttttcttctcctgtcccatatttgggttatgatgactcaagtgtagactgaagttgaggtagtgccttatgccatt

SEQ ID NO: 111600 - DNA, 338 bp, Homo sapiens
  Payload ID: 1855
  Gene Symbol: BLOC1S6
  Gene Name: biogenesis of lysosomal organelles complex-1, subunit 6, pallidin
  ENST ID: ENST00000566801
  CDS Start-End: 275-338
agaactccggagaaaccctgggggagtaagcggtttttggcggctgcggcccccgggccctgccccgagtgcagaaatggggaaccgcgccggcccctctgcccagcgcaatgggcggaactgaagtcccgaggggaagctttgtattgggggtgcaattgaaggcggttgatggtgaagccattctgagtttatgtgttgactccgacagaaccaagttgtattgttagacacactggaacaagagatttcaaaatttaaagaatgtcattctatgttggatattaatgctttgtttgctgaggctaaacactatcatgccaagttggtgaatataa

SEQ ID NO: 111601 - DNA, 557 bp, Homo sapiens
  Payload ID: 1855
  Gene Symbol: BLOC1S6
  Gene Name: biogenesis of lysosomal organelles complex-1, subunit 6, pallidin
  ENST ID: ENST00000569076
  CDS Start-End: 217-557
ctgtccggccagccgctggagtcgttaggtgccgccttgcttctgacgagccacacgtttgcttcttccctgtgttcccagctggagggacatgagtgtccctgggccgtcgtctccggacggggccctgacacggccaccctactgcctggaggccggggagccgacgcctgcttggacttaaagtatgatgttgaatatccttgatgaacattgatgcaaaaatcctcaataaaatactggcaaaccgaatccagcagcacatcaaaaagcttatccaccatgatcaaacagaaccaagttgtattgttagacacactggaacaagagatttcaaaatttaaagaatgtcattctatgttggatattaatgctttgtttgctgaggctaaacactatcatgccaagttggtgaatataagaaaagagatgctgatgcttcatgaaaaaacatcaaagttaaaaaaaagagcacttaaactgcagcagaagaggcaaaaagaagagttggaaagggagcagcaacgagagaaggagtttgaaagagaaaagcagtt

SEQ ID NO: 111602 - DNA, 4013 bp, Homo sapiens
  Payload ID: 1855
  Gene Symbol: BLOC1S6
  Gene Name: biogenesis of lysosomal organelles complex-1, subunit 6, pallidin
  ENST ID: ENST00000568816
  CDS Start-End: 590-817
gaactccggagaaaccctgggggagtaagcggtttttggcggctgcggcccccgggccctgccccgagtgcagaaatggggaaccgcgccggcccctctgcccagcgcaatgggcggaactgaagtcccgaggggaagctttgtattgggggtgcaattgaaggcggttgatggtgaagccattctgagtttatgtgttgactccggtttaagtgacacttctccagatgaagggttaatagaggacttgactatagaagacaaagcagtggagcaactggcagaaggattgctttctcattatttgccagatctgcagagatcaaaacaagccctccaggaactcaccacagctgcagttgactgtacgtgcctaaaactgaagaaagcaaaactgcagataaaggaggactgacatattttctggaagagactgtggggaattggtatcacgtcttccttaaatgtttggtaaaaattaccagtgaagccgtttggtcccggtactgtcttttttggaagacagaaccaagttgtattgttagacacactggaacaagagatttcaaaatttaaagaatgtcattctatgttggatattaatgctttgtttgctgaggctaaacactatcatgccaagttggtgaatataagaaaagagatgctgatgcttcatgaaaaaacatcaaagttaaaaaaaagagcacttaaactgcagcagaagaggcaaaaagaagagttggaaagggagcagcaacgagagaaggagtttgaaagagaaaagcagttaactgccagaccagccaaaaggatgtgaaaagttgtgtttgtgtgttttcttctcctgtcccatatttgggttatgatgactcaagtgtagactgaagttgaggtagtgccttatgccattatgtcatatgttgaaatccttattccggtattactgtgtctccatgccttttttccaagtagcagacgtcatgttgcatggtttttgatatttatatgtaagtttttcaaattttgcttaattttaaaatttattattttgatcttgaattatttataaactggaaagtggtttgattattgtgagtcaaaactctaagtggttaaaaattagtatgaattttttagcttcttaatgaatatggatttaaaactctccagttcttattttatgaaatgacttgcctttctggtaatacaatgctgattttttagtaattgccttttcattactttgttaagaagaaatgccagctgtttaatcacacctacccctggaaaagaggtaaaccttttgaacagttgaatttcatcagaagctctatagctttttggtgagaggaagtgatactctttattacaagaaacaaggaattaacaaaaataaggaacttgttgctacctttcttttctgttgaacattaaaaataatttggtttgtggactgggcatggtggcttatggaaaagaggtgagcctttgtgaagaacataatggaaaagtgcatgtacgggaaataacagcactttaggtgtagttcaggtgagcaagatgccagatagtttctactaaccatatactctttctgcttcttagcgtcgttgtcactgcttctgtggcttttgggttcaaagtagattatatatattcctaaagcttggtggaggtagtggagctatcacacactcaaatgagcttgtatatttataatacaatatagtattatagtaacagttatcatacactgagatatagtttctgtgcttgtaaaaaattcttgaagtgaggccgggtgcggtggctcatgcctgtaatcccaacgctttgggacgccgaggcgggtggatcatgaggtcaaaagattgagaccatcctggccaacatggtgaaaccccgtctctactagaaatacaaaaattagctgggtgtgggggcgtgcgcctgtagtcccagctacttgggaggctgaggcaggagaattgcttgaacccaggaggcagaggttgcagtaagccaagatcgtgccactgcactccagccttggtgacagagcaagactccgtctccaaaaaaaagaaaaaaaaatttcttgaagtggaatgatgtacaccaaatacccactttatagataattacagggatggtgaaaaattagtaaatagcttcacaaaagaggcagcgtgatacctttagtgttttctagaatttttttctggatattatatgtaagaatttattgtttgagggaaatacgaggtttcattgtttaaaatcaagagtgtattgtttactgttttacagtattatttaatatccaactggtctccaatctccattacatagggactgtacagagcctgtgaagatgtatgaatggtatcttttataatccacaatacatttctggtaagatggaatcactacctctgatcacatatcaggctaacgatagagaaagcattaggtttaagttgagggctaagaactggtttgtttaaaggtttaaattgttggaaaagagcatttgccttctttaatgaatgatggtctcacaattcagttgactttgacctaatatttaagaatataaatatattttatttgaaaggctgagtgttgccctcaaacacttgctaaaactgcctagggcaggattcattagggcttgcagacaatgtcacctaaattgctgaatgtactcattataatatgatatctgacaaaggtagtacagcgtttctgagtcatttgggaccaactgcagtggttgtttaaaatgctggttcctgcacacaattctctatctactgaagcacatctgttttctttgtttgttttgctttgctttttgtttttaaagtttcccccagtgattccagtgcacctgaaaagttgagaaccacaggcttagtggtacgttggggtttcccacgctaggctgcatagcattataacctgggaacgttaaaaaaaatacagacattcttgattcttagtgtagttatgatgtggatcctacgtattttttaaaaaactctccagataattttgatgtcacgagtcactagtatagactatctatctagtgagttgtattataagcgatgaaatactttaaaagctacccagtaactcttgggattaattttatgaaataaattctgagctgctgcttttgatatagtcagacttaagactgaaccccagtagacaggcaatagatatagaattctggttagctaattgaacttttgtgacctgtttaaaaacaaatcaaatttattgaacaaatgacaaggcacaaatactttcagaattgtatttcagttttgaagatttaaaaaaaatgtgaaaataaatatatattagtatcctttattttaaagtcaattgtaaaccagaagtactgttattttggtgattaaaatccaaaactttagctgtatttcagtaacaaaaacataccttactagactgtgatggctcacacctgtaatcccagtgctttgggaggctgaggtgggaagattctttgagcccaggagttcaaggctgcagtgaattctgatcgcaccactgaactccagcccgtatgacagagtgagaccctgtttctaaaaacaaaacaaacaaacaaacaaacaacgtatcttactgactaaactggaatggaaatcttataattagtgttgtatttttctgcaaaatagtgaattggtacttgggagacttctgttctttgttgaaaaaaattgcctttgttttgaaattatatcacctgtgttctgaactaaaatgatgggagttcattttgtatttactttgcagtaagtatcatgtaaatatgcaaatgttgaatgtaatatagattgtgtcctcattgagtttttgggtgatacagtttataaatataacaattatacaccctcatacattcgtctgattttgagcttgtaagatgagaactgctttttacacatttaataaaaaaaggtctctgaatt

SEQ ID NO: 111603 - DNA, 636 bp, Homo sapiens
  Payload ID: 1855
  Gene Symbol: BLOC1S6
  Gene Name: biogenesis of lysosomal organelles complex-1, subunit 6, pallidin
  ENST ID: ENST00000564310
  CDS Start-End: 1-172
gctggggacaggtttaagtgacacttctccagatgaagggttaatagaggacttgactatagaagacaaagcagtggagcaactggcagaaggattgctttctcattatttgccagatctgcagagatcaaaacaagccctccaggaactcacaaccaagttgtattgttagacacactggaacaagagatttcaaaatttaaagaatgtcattctatgttggatattaatgctttgtttgctgaggctaaacactatcatgccaagttggtgaatataagaaaagagatgctgatgcttcatgaaaaaacatcaaagttaaaagaattcaaggacgaagatatcaatgaccagcacagagatgtaatcttcctctcggccacacacctgggtgtttcccttatttttttgctgcgtgtttccttcatgtcgtccaatttcttttcttattctcatatttggctagatttttaataccagatctatgtcagctccttctcaaacctaaaattcagagccccagctctgttgagcgtgtattatatttcagttgctttatacatgttatctcataacagcaaccttaggaggtaactattgttattaccattttacaggtgaggaagctgagacgca

SEQ ID NO: 111604 - DNA, 616 bp, Homo sapiens
  Payload ID: 1855
  Gene Symbol: BLOC1S6
  Gene Name: biogenesis of lysosomal organelles complex-1, subunit 6, pallidin
  ENST ID: ENST00000565409
  CDS Start-End: 302-529
gtgttgactccggtacgtcattggttatttgtcatacggcagtggtgggggatggatttaccagaaagatgatcagcttataattcagagaggtttaagtgacacttctccagatgaagggttaatagaggacttgactatagaagacaaagcagtggagcaactggcagaaggattgctttctcattatttgccagatctgcagagatcaaaacaagccctccaggaactcacacagaaccaagttgtattgttagacacactggaacaagagatttcaaaatttaaagaatgtcattctatgttggatattaatgctttgtttgctgaggctaaacactatcatgccaagttggtgaatataagaaaagagatgctgatgcttcatgaaaaaacatcaaagttaaaaaaaagagcacttaaactgcagcagaagaggcaaaaagaagagttggaaagggagcagcaacgagagaaggagtttgaaagagaaaagcagttaactgccagaccagccaaaaggatgtgaaaagttgtgtttgtgtgttttcttctcctgtcccatatttgggttatgatgactcaagtgtagactgaagttgaggtagtgccttat

SEQ ID NO: 111605 - DNA, 573 bp, Homo sapiens
  Payload ID: 1855
  Gene Symbol: BLOC1S6
  Gene Name: biogenesis of lysosomal organelles complex-1, subunit 6, pallidin
  ENST ID: ENST00000565216
  CDS Start-End: 21-416
gtgttcccagctggagggacatgagtgtccctgggccgtcgtctccggacggggccctgacacggccaccctactgcctggaggccggggagccgacgcctgcattctttaaaatattcagacagaaccaagttgtattgttagacacactggaacaagagatttcaaaatttaaagaatgtcattctatgttggatattaatgctttgtttgctgaggctaaacactatcatgccaagttggtgaatataagaaaagagatgctgatgcttcatgaaaaaacatcaaagttaaaaaaaagagcacttaaactgcagcagaagaggcaaaaagaagagttggaaagggagcagcaacgagagaaggagtttgaaagagaaaagcagttaactgccagaccagccaaaaggatgtgaaaagttgtgtttgtgtgttttcttctcctgtcccatatttgggttatgatgactcaagtgtagactgaagttgaggtagtgccttatgccattatgtcatatgttgaaatccttattccggtattactgtgtctccatgccttttttccaagtagca

SEQ ID NO: 111606 - DNA, 1052 bp, Homo sapiens
  Payload ID: 1855
  Gene Symbol: BLOC1S6
  Gene Name: biogenesis of lysosomal organelles complex-1, subunit 6, pallidin
  ENST ID: ENST00000567461
  CDS Start-End: 358-585
agacgacgatatcagcgcggggtccccacaacgccatggggcagagccaactctcgagcgcgtgatcgaagcccgcagttttttcgcccccgtcacttccgggtgcgacaatctcttctgtccggccagccgctggagtcgttaggtgccgccttgcttctgacgagccacacgtttgcttcttccctgtgttcccagctggagggacatgagtgtccctgggccgtcgtctccggacggggccctgacacggccaccctactgcctggaggccggggagccgacgcctgacagaaccaagttgtattgttagacacactggaacaagagatttcaaaatttaaagaatgtcattctatgttggatattaatgctttgtttgctgaggctaaacactatcatgccaagttggtgaatataagaaaagagatgctgatgcttcatgaaaaaacatcaaagttaaaaaaaagagcacttaaactgcagcagaagaggcaaaaagaagagttggaaagggagcagcaacgagagaaggagtttgaaagagaaaagcagttaactgccagaccagccaaaaggatgtgaaaagttgtgtttgtgtgttttcttctcctgtcccatatttgggttatgatgactcaagtgtagactgaagttgaggtagtgccttatgccattatgtcatatgttgaaatccttattccggtattactgtgtctccatgccttttttccaagtagcagacgtcatgttgcatggtttttgatatttatatgtaagtttttcaaattttgcttaattttaaaatttattattttgatcttgaattatttataaactggaaagtggtttgattattgtgagtcaaaactctaagtggttaaaaattagtatgaattttttagcttcttaatgaatatggatttaaaactctccagttcttattttatgaaatgacttgcctttctggtaatacaatgctgattttttagtaattgccttttcattactttgttaagaagaaatgccagctgtttaatcacacctacccc

SEQ ID NO: 111607 - DNA, 1839 bp, Homo sapiens
  Payload ID: 1855
  Gene Symbol: BLOC1S6
  Gene Name: biogenesis of lysosomal organelles complex-1, subunit 6, pallidin
  Uniprot ID: Q9UL45
  ENST ID: ENST00000567523
  CDS Start-End: 66-308
aggtgccgccttgcttctgacgagccacacgtttgcttcttccctgtgttcccagctggagggacatgagtgtccctgggccgtcgtctccggacggggccctgacacggccaccctactgcctggaggccggggagccgacgcctggtttaagtgacacttctccagatgaagggttaatagaggacttgactatagaagacaaagcagtggagcaactggcagaaggattgctttctcattatttgccagatctgcagagatcaaaacaagccctccaggaactcacaaccaagttgtattgttagacacactggaacaagagatttcaaaatttaaagaatgtcattctatgttggatattaatgctttgtttgctgaggctaaacactatcatgccaagttggtgaatataagaaaagagatgctgatgcttcatgaaaaaacatcaaagttaaaaaaaagagcacttaaactgcagcagaagaggcaaaaagaagagttggaaagggagcagcaacgagagaaggagtttgaaagagaaaagcagttaactgccagaccagccaaaaggatgtgaaaagttgtgtttgtgtgttttcttctcctgtcccatatttgggttatgatgactcaagtgtagactgaagttgaggtagtgccttatgccattatgtcatatgttgaaatccttattccggtattactgtgtctccatgccttttttccaagtagcagacgtcatgttgcatggtttttgatatttatatgtaagtttttcaaattttgcttaattttaaaatttattattttgatcttgaattatttataaactggaaagtggtttgattattgtgagtcaaaactctaagtggttaaaaattagtatgaattttttagcttcttaatgaatatggatttaaaactctccagttcttattttatgaaatgacttgcctttctggtaatacaatgctgattttttagtaattgccttttcattactttgttaagaagaaatgccagctgtttaatcacacctacccctggaaaagaggtaaaccttttgaacagttgaatttcatcagaagctctatagctttttggtgagaggaagtgatactctttattacaagaaacaaggaattaacaaaaataaggaacttgttgctacctttcttttctgttgaacattaaaaataatttggtttgtggactgggcatggtggcttatggaaaagaggtgagcctttgtgaagaacataatggaaaagtgcatgtacgggaaataacagcactttaggtgtagttcaggtgagcaagatgccagatagtttctactaaccatatactctttctgcttcttagcgtcgttgtcactgcttctgtggcttttgggttcaaagtagattatatatattcctaaagcttggtggaggtagtggagctatcacacactcaaatgagcttgtatatttataatacaatatagtattatagtaacagttatcatacactgagatatagtttctgtgcttgtaaaaaattcttgaagtgaggccgggtgcggtggctcatgcctgtaatcccaacgctttgggacgccgaggcgggtggatcatgaggtcaaaagattgagaccatcctggccaacatggtgaaaccccgtctctactagaaatacaaaaattagctgggtgtgggggcgtgcgcctgtagtcccagctacttgggaggctgaggcaggagaattgcttgaacccaggaggcagaggttgcagtaagccaagatcgtgccactgcactccagccttggtgacagagcaagactccgtctcc

SEQ ID NO: 111608 - DNA, 688 bp, Homo sapiens
  Payload ID: 1855
  Gene Symbol: BLOC1S6
  Gene Name: biogenesis of lysosomal organelles complex-1, subunit 6, pallidin
  ENST ID: ENST00000565323
  CDS Start-End: 84-617
aagcggtttttggcggctgcggcccccgggccctgccccgagtgcagaaatggggaaccgcgccggcccctctgcccagcgcaatgggcggaactgaagtcccgaggggaagctttgtattgggggtgcaattgaaggcggttgatggtgaagccattctgagtttatgtgttgactccggtttaagtgacacttctccagatgaagggttaatagaggacttgactatagaagacaaagcagtggagcaactggcagaaggattgctttctcattatttgccagatctgcagagatcaaaacaagccctccaggaactcacacagaaccaagttgtattgttagacacactggaacaagagatttcaaaatttaaagaatgtcattctatgttggatattaatgctttgtttgctgaggctaaacactatcatgccaagttggtgaatataagaaaagagatgctgatgcttcatgaaaaaacatcaaagttaaaaaaaagagcacttaaactgcagcagaagaggcaaaaagaagagttggaaagggagcagcaacgagagaaggagtttgaaagagaaaagcagttaactgccagaccagccaaaaggatgtgaaaagttgtgtttgtgtgttttcttctcctgtcccatatttgggttatgatgactcaagtgtagactgaagt

SEQ ID NO: 111609 - DNA, 494 bp, Homo sapiens
  Payload ID: 1855
  Gene Symbol: BLOC1S6
  Gene Name: biogenesis of lysosomal organelles complex-1, subunit 6, pallidin
  ENST ID: ENST00000562384
  CDS Start-End: 254-481
tctgtccggccagccgctggagtcgttaggtgccgccttgcttctgacgagccacacgtttgcttcttccctgtgttcccagctggagggacatgagtgtccctgggccgtcgtctccggacggggccctgacacggccaccctactgcctggaggccggggagccgacgcctgcttggacttaaaacagaaccaagttgtattgttagacacactggaacaagagatttcaaaatttaaagaatgtcattctatgttggatattaatgctttgtttgctgaggctaaacactatcatgccaagttggtgaatataagaaaagagatgctgatgcttcatgaaaaaacatcaaagttaaaaaaaagagcacttaaactgcagcagaagaggcaaaaagaagagttggaaagggagcagcaacgagagaaggagtttgaaagagaaaagcagttaactgccagaccagccaaaaggatgtgaaaagttgtgtttg

SEQ ID NO: 111610 - DNA, 1996 bp, Homo sapiens
  Payload ID: 1855
  Gene Symbol: BLOC1S6
  Gene Name: biogenesis of lysosomal organelles complex-1, subunit 6, pallidin
  ENST ID: ENST00000566753
  CDS Start-End: 90-347
gtccggccagccgctggagtcgttaggtgccgccttgcttctgacgagccacacgtttgcttcttccctgtgttcccagctggagggacatgagtgtccctgggccgtcgtctccggacggggccctgacacggccaccctactgcctggaggccggggagccgacgcctggtttaagtgacacttctccagatgaagggttaatagaggacttgactatagaagacaaagcagtggagcaactggcagaaggattgctttctcattatttgccagatctgcagagatcaaaacaagccctccaggaactcaccttggacttaaagtatgatgttgaatatccttgatgaacattgatgcaaaaatcctcaataaaatactggcaaaccgaatccagcagcacatcaaaaagcttatccaccatgatcaagtaggcttcatccctgggatgcaaggctggttcaatatacgcaaatcaataaatgtaatccagcatataaacagagccaaagacaaaaaccacatgattatctcaatagatgcaaaaagcctttgacaaaattcaacaacccttcatgctaaaaactctcaataaattaggtattgatgggacgtatttcaaaataatagctatctatgacaaacccacagccaatatcatactgaatgggcaaaaactggaagcattccctttgaaaactggcacaagacagggatgccctctctcaccgctcctattcaacatagtgttggaagttctggccagggcaatcaggcaggagaaggaaataaagggtattcaattaggaaaagaggaagtcaaattgtccctgtttgcagacgacatgattgtttatctagaaaaccccatcgtctcagcccaaaatctccttaagctgataagcaacttcagcaaagtctcaggatacaaaatcaatgtacaaaaatcacaagcattcttataccccaacaacagacaaacagagagccaaatcatgagtgaactcccattcacaattgcttcaaagagaataaaatacctaggaatccaacttacaagggatgtgaaggacctcttcaaggagaactacaaaccactgctcaaggaaataaaagaggatacaaacaaatggaagaacattccatgctcatgggtaggaagaatcaatatcatgaaaatggccatactgcccaaggtaatttacagattcaatgccatccccatcaagctaccaatgactttcttcacagaattggaaaaaactactttaaagttcatatggaaccaaaaaagagcctgcatcgccaagtcaatcctaagccaaaagaacaaagctggaggcatcacactacctgacttcaaactatactacaaggctacagtaaccaaaacagcatggtactggtaccaaaacagagatataaatcaatggaacagaacagagccctcagaaataatgccgcatatctacaactatctgatctttgacaaacctgagaaaaacaagcaatggggaaaggattccctatttaataaatggtgctgggaaaactggctagccatatgtagaaagctgaaactggatcccttccttacaccttatacaaaaatcaattcaagatggattaaagatttaaacgttagacctaaaaccataaaaaccctagaagaaaacctaggcattaccattcaggacataggcatgggcaaggacttcatgtccaaaacaccaaaagcaatggcaacaaaagccaaaattgacaaatgggatctaattaaactaaagagcttctgcacagcaaaagaaactaccatcagagtgaacaggcaacctacaacatgggagaaaattttcgcaacctactcatctgacaaagggctaatacccagaatctacaatgaactcaaacaaatttacaagaaaaaaacaaccccatcaaaaagtgggcgaaggacatgaacagacacttctcaaaagaagacatttatgcagcc

SEQ ID NO: 111611 - DNA, 1286 bp, Homo sapiens
  Payload ID: 1856
  Gene Symbol: BOD1
  Gene Name: biorientation of chromosomes in cell division 1
  Uniprot ID: Q96IK1
  ENST ID: ENST00000285908
  CDS Start-End: 153-542
caccaccgcccctgccgccatcgccacctccgccgctgccgccttggggccctcctccttcaccgcccccttcaccacctctacacgttctaggccttctgtcctggagaagaagctatagtcgttctcccttgtgggcccggggcgcagccatggcggacggcggcggcggcgggggaactggcgcggtgggcggcggcggaactagccaggcctctgccggggcagcgactggcgctactggggccagcgggggcggtggccccatcaacccggcctcgctgcctcccggcgacccgcagctcatcgctctcatcgtggagcagctcaagagccggggcctttttgacagcttccgccgggactgcctggccgacgtggacaccaagccagcttaccaaaacctgaggcagaaagtggataattttgtgtcaacacatctggacaagcaggaatggaatcctacgatgaacaaaaaccagttgcgaaatggtctgaggcagagtgtggttcaaatacgccagacaccttttgaaagctaatttttggtgaagaaatggattcggttacataagagtgcaacttcagactgaagataggccaaggtcgtcactgatctcaagatttcaaccttgaccatgggcagtgaccagattgaaaggggagcaagttcggcagtgggagagttgaccgtgtcaccccctgcattgtgctgccatttggccagcctgtccaagggcatgacaccaagtagacactacagagagagaaacactacagcaacccagggttgtcctgaaacagacttttatacttgaacatggagactgcacatggactttagggtttgtgctgtgggataaacggaagctacagtgagaacatagccagtcccaaagacaatttcaaagaaaaatgacagtaaagattagctgggagtagtctttgacagtgcttatttgatactgtctctcagagtttgcaaaccagattgtacaagtcattagcgtcagatagctttaaagttgtgaccttcttgtacatgaatcttctagccagtttcctttcctttgtaacgaaacatgaaatcctagaatgtatgagaagttcagacattaggcataaggaaactcgtttgcaggctctctgtccagggctgcttcctgtcctggaggggccagtgagtcttaggtatgtttattttattctcacatttgtgtttttttagaaaagtgaatggtcaataaatggcttatctttcataataaaattatttgatactttta

SEQ ID NO: 111612 - DNA, 1562 bp, Homo sapiens
  Payload ID: 1856
  Gene Symbol: BOD1
  Gene Name: biorientation of chromosomes in cell division 1
  Uniprot ID: Q96IK1
  ENST ID: ENST00000311086
  CDS Start-End: 225-782
cgagcaggccgtttctgccgcgtccaccacaacctctgctgtatcagagggggccttcgccgccgccgcccccaccaccgcccctgccgccatcgccacctccgccgctgccgccttggggccctcctccttcaccgcccccttcaccacctctacacgttctaggccttctgtcctggagaagaagctatagtcgttctcccttgtgggcccggggcgcagccatggcggacggcggcggcggcgggggaactggcgcggtgggcggcggcggaactagccaggcctctgccggggcagcgactggcgctactggggccagcgggggcggtggccccatcaacccggcctcgctgcctcccggcgacccgcagctcatcgctctcatcgtggagcagctcaagagccggggcctttttgacagcttccgccgggactgcctggccgacgtggacaccaagccagcttaccaaaacctgaggcagaaagtggataattttgtgtcaacacatctggacaagcaggaatggaatcctacgatgaacaaaaaccagttgcgaaatggtctgaggcagagtgtggttcagtcagggatgttggaagctggagtagacaggattatttctcaggtggtggatccaaaacttaaccacatcttcaggccacaaatagaacgagcaattcatgagttcctggcggcccagaaaaaagcagctgtgccagcaccccctccagagcccgaaggccaggaccctccagctccatctcaggacacttcctaagaatacgccagacaccttttgaaagctaatttttggtgaagaaatggattcggttacataagagtgcaacttcagactgaagataggccaaggtcgtcactgatctcaagatttcaaccttgaccatgggcagtgaccagattgaaaggggagcaagttcggcagtgggagagttgaccgtgtcaccccctgcattgtgctgccatttggccagcctgtccaagggcatgacaccaagtagacactacagagagagaaacactacagcaacccagggttgtcctgaaacagacttttatacttgaacatggagactgcacatggactttagggtttgtgctgtgggataaacggaagctacagtgagaacatagccagtcccaaagacaatttcaaagaaaaatgacagtaaagattagctgggagtagtctttgacagtgcttatttgatactgtctctcagagtttgcaaaccagattgtacaagtcattagcgtcagatagctttaaagttgtgaccttcttgtacatgaatcttctagccagtttcctttcctttgtaacgaaacatgaaatcctagaatgtatgagaagttcagacattaggcataaggaaactcgtttgcaggctctctgtccagggctgcttcctgtcctggaggggccagtgagtcttaggtatgtttattttattctcacatttgtgtttttttagaaaagtgaatggtcaataaatggcttatctttcataataaaattatttgatacttttactccgaa

SEQ ID NO: 111613 - DNA, 353 bp, Homo sapiens
  Payload ID: 1856
  Gene Symbol: BOD1
  Gene Name: biorientation of chromosomes in cell division 1
  ENST ID: ENST00000462674
  CDS Start-End: 229-353
agtactacctgaggtttcaggcacccactggggatcttggaacgtatcccctgaggggggaggggactaccctcttgagcggctggtgagggagagtggttggaaccttcccatgtacagctccttagctgttccttctgagaattccagccagcttaccaaaacctgaggcagaaagtggataattttgtgtcaacacatctggacaagcaggaatggaatcctacgatgaacaaaaaccagttgcgaaatggtctgaggcagagtgtggttcagtcagggatgttggaagctggagtagacaggattatttctcaggtggtggatccaaaacttaaccacatcttcaggcc

SEQ ID NO: 111614 - DNA, 850 bp, Homo sapiens
  Payload ID: 1856
  Gene Symbol: BOD1
  Gene Name: biorientation of chromosomes in cell division 1
  ENST ID: ENST00000477985
  CDS Start-End: 1-355
actggcgctactggggccagcgggggcggtggccccatcaacccggcctcgctgcctcccggcgacccgcagctcatcgctctcatcgtggagcagctcaagagccggggcctttttgacagcttccgccgggactgcctggccgacgtggacaccaaggtcagggatgttggaagctggagtagacaggattatttctcaggtggtggatccaaaacttaaccacatcttcaggccacaaatagaacgagcaattcatgagttcctggcggcccagaaaaaagcagctgtgccagcaccccctccagagcccgaaggccaggaccctccagctccatctcaggacacttcctaagaatacgccagacaccttttgaaagctaatttttggtgaagaaatggattcggttacataagagtgcaacttcagactgaagataggccaaggtcgtcactgatctcaagatttcaaccttgaccatgggcagtgaccagattgaaaggggagcaagttcggcagtgggagagttgaccgtgtcaccccctgcattgtgctgccatttggccagcctgtccaagggcatgacaccaagtagacactacagagagagaaacactacagcaacccagggttgtcctgaaacagacttttatacttgaacatggagactgcacatggactttagggtttgtgctgtgggataaacggaagctacagtgagaacatagccagtcccaaagacaatttcaaagaaaaatgacagtaaagattagctgggagtagtctttgacagtgcttatttgatactgtctctcagagtttgcaaaccagattgtacaagtcattagc

SEQ ID NO: 111615 - DNA, 814 bp, Homo sapiens
  Payload ID: 1856
  Gene Symbol: BOD1
  Gene Name: biorientation of chromosomes in cell division 1
  ENST ID: ENST00000480951
  CDS Start-End: 218-475
gccgtttctgccgcgtccaccacaacctctgctgtatcagagggggccttcgccgccgccgcccccaccaccgcccctgccgccatcgccacctccgccgctgccgccttggggccctcctccttcaccgcccccttcaccacctctacacgttctaggccttctgtcctggagaagaagctatagtcgttctcccttgtgggcccggggcgcagccatggcggacggcggcggcggcgggggaactggcgcggtgggcggcggcggaactagccaggcctctgccggggcagcgactggcgctactggggccagcgggggcggtggccccatcaacccggcctcgctgcctcccggcgacccgcagctcatcgctctcatcgtggagcagctcaagagccggggcctttttgacagcttccgccgggactgcctggccgacgtggacaccaagaatacgccagacaccttttgaaagctaatttttggtgaagaaatggattcggttacataagagtgcaacttcagactgaagataggccaaggtcgtcactgatctcaagatttcaaccttgaccatgggcagtgaccagattgaaaggggagcaagttcggcagtgggagagttgaccgtgtcaccccctgcattgtgctgccatttggccagcctgtccaagggcatgacaccaagtagacactacagagagagaaacactacagcaacccagggttgtcctgaaacagacttttatacttgaacatggagactgcacatggactttagggtttgtgctgtgggataaacggaagctac

SEQ ID NO: 111616 - DNA, 10565 bp, Homo sapiens
  Payload ID: 1857
  Gene Symbol: BOD1L1
  Gene Name: biorientation of chromosomes in cell division 1-like 1
  Uniprot ID: Q8NFC6
  ENST ID: ENST00000040738
  CDS Start-End: 137-9292
ttccggggttgctctggatccgctggttccgtaacaacatcccgttggcttccctcaggcggcgggaccagtgcagccgccgcctcccaggatcgtccgccggtcagggcccttgccctccccggcacaggccaccatggccaccaacccacagccgcagccgcctcctccggcgccgccgcctcccccgccgcagccgcagccgcagccaccgccgccgccgccgggccccggggctggccccggcgcgggcggggcgggcggcgcgggtgcgggcgccggggacccgcagctcgtggccatgatcgtgaaccacctcaagagccaggggctcttcgaccagttccgcagagactgcctggccgacgtggacaccaagcctgcgtatcagaatctgagacagcgtgttgacaactttgttgcaaatcacttggcaactcacacatggagtccgcatctcaataagaaccagctaagaaacaacattagacaacaagtcctcaaatcaggaatgttggagtctggtattgaccgaattatttctcaggttgtggacccaaagatcaaccacacattcagacctcaggtagagaaagctgtgcatgagtttttggccacgctaaatcacaaagaggaaggaagtggcaacacagctcccgatgatgagaaaccagacacttcccttattacacaaggtgttcctactcctgggcccagtgctaatgtagccaatgatgccatgtcgatattggaaaccataacttctcttaaccaagaagccagtgctgctagggcttcaacagaaacatcaaatgccaagaccagtgagagagcgtcaaaaaaacttccatctcagccaaccactgatactagtactgacaaagaaagaacttcagaggacatggctgataaagaaaaatctacagctgactctggaggtgaaggactggaaacagccccaaagtctgaagagttcagcgacctcccctgtccagtcgaagaaattaaaaattacacaaaagagcataataatttaattctgctaaataaggatgttcaacaggaaagcagtgagcaaaaaaataaatcaacagacaaaggtgaaaagaagccagacagcaatgagaaaggagaaagaaagaaagaaaagaaggaaaagactgaaaagaaatttgatcactcaaaaaagagtgaagatacacagaaagttaaagatgaaaaacaagcaaaggaaaaagaagtagagagtttaaaacttccttcagaaaagaacagtaataaagctaaaactgttgaagggacaaaagaagatttctctttgatagattctgatgtggatggacttacagacatcacagttagctctgttcataccagtgacctttcatcttttgaagaagatactgaggaggaagttgtaacgtctgatagcatggaagaaggagagattacgtcagatgatgaagagaagaacaaacagaataaaacaaaaactcaaactagtgattctagtgaaggaaaaacaaaaagtgtacggcatgcgtatgtccacaaaccatatctttactcaaaatactatagtgattctgatgatgagcttactgtagaacaacgacgacagtccattgccaaagaaaaagaagagaggcttttaagaaggcaaatcaatagagaaaaacttgaagaaaaacgaaaacagaaagcagaaaagacaaagtcttcaaaaaccaagggtcaaggcaggagtagtgtggacttagaagaatcatcaacaaagagtttggaacctaaagccgccagaattaaagaagtccttaaagaacggaaagttttagaaaaaaaagtagccttaagcaaaaagagaaaaaaagattcaaggaatgttgaagagaactccaaaaagaaacagcaatatgaagaagattccaaagaaacccttaaaacaagtgagcattgtgaaaaggaaaaaatttcttcttcaaaggagctgaagcatgttcatgcaaaaagtgaaccaagtaaacctgcccggagactttcagagtctttgcatgtagttgacgaaaacaaaaatgaatccaaattagaaagagaacataaaagacggacatctacccctgttatcatggagggggtacaggaagagactgacacaagagatgtaaaaaggcaagtagaacgctcagaaatttgcaccgaagagccccagaaacagaaaagcacacttaaaaacgaaaagcatctaaagaaagatgattctgaaacaccacatttgaaaagcctacttaagaaagaggtgaaatcctccaaggagaagcctgaaagagagaaaactccatcggaagacaaattgtctgtgaaacataaatataaaggtgattgtatgcataaaacaggtgatgagactgagcttcactcttctgagaaaggtttaaaagtagaggaaaatattcaaaagcaaagtcaacaaacaaagctttcttcagatgataaaaccgaacgaaaaagtaaacataggaatgaaaggaaattatcagtattaggcaaagatggaaagccagtttctgaatatattataaaaacagatgagaatgttcgtaaagaaaacaacaaaaaagagagacgcttgtcagctgaaaaaactaaggcagagcacaaatcaagaaggtcaagtgattctaaaattcagaaagattctctgggttccaagcaacatggtatcacattacagagaagaagtgaaagttattcggaagataagtgtgatatggactccactaacatggatagtaatttgaaaccagaagaggttgttcacaaggagaaacgacgaacaaagagcttgttagaagagaaacttgtgttgaagtctaaatcaaaaactcaaggcaaacaggtaaaagttgtagaaacagaattacaagaaggtgccacaaaacaggcaaccactccaaaaccagacaaggagaagaacacagaagaaaatgactcagaaaaacagcgtaagtctaaagttgaagacaaaccttttgaagaaactggtgttgaacctgtattagagactgcttcttcttcagcacatagtacacagaaggattctagtcatagagccaagttaccattagcaaaggagaaatataagagtgataaagactccacttccaccaggcttgagagaaagttgtcagatggccacaaaagcagaagcttaaagcatagtagtaaagacataaaaaagaaggacgaaaataaatcagatgacaaggatggtaaagaagttgacagtagtcatgaaaaggccagaggtaatagttcactcatggaaaagaaattaagtagaaggttgtgcgaaaatcggagaggaagcttgtcacaagaaatggccaaaggagaagaaaaattagcagcaaacactttgagcactcccagcggttcctcccttcagagaccaaaaaagagtggtgatatgacattgatccctgaacaagagccaatggaaattgattctgagccaggtgttgaaaatgtgtttgaagtatctaaaacccaagacaaccgcaataataattctcagcaagacattgactctgaaaatatgaaacaaaaaacttctgccactgttcaaaaggatgaattgagaacttgcacagcagattcaaaagcaacagctccagcttataagccaggccgtggaacaggagttaatagtaattctgaaaagcatgccgatcatagaagcaccttgaccaagaaaatgcatatacaaagtgctgtgtccaaaatgaaccctggggagaaagaacccattcatagaggaactactgaagtgaatatagattctgaaactgttcatagaatgttactgagtgccccatcagaaaatgatagggtacagaagaatttgaaaaacacagctgctgaagaacatgttgctcaaggagatgccactcttgaacattccacaaatttagactcctcaccatccttaagttcagtgactgttgtgcctctgagggaatcgtatgatccagatgtaattcctctgtttgacaaaagaactgttttggaaggtagcacagccagcacctcccctgcggatcactctgctctccctaaccaaagtctgactgttagggaatcagaagtccttaagacaagtgacagcaaagaaggtggtgaaggtttcacagtagatacaccagcaaaagcaagcatcactagcaaaagacacattccagaagctcaccaggctactttattggatggtaaacaaggaaaggtaatcatgcctcttggaagtaagttaacgggcgtgattgtggaaaatgagaatattaccaaagaaggtggcttagtggacatggccaagaaagaaaatgacttaaatgcagagcccaatttaaagcagacaattaaagcaacagtagagaatggcaagaaggatggcattgctgttgatcatgttgtaggcctgaatacagaaaaatatgctgaaactgtcaaacttaagcataaaagaagcccaggtaaagtaaaagacatatcaattgatgttgaaagaaggaatgaaaacagtgaggtagacaccagtgctggaagtggctctgcaccctctgttttacaccaaaggaacggacaaactgaggatgtggcaactgggcctaggagagcagaaaagacttctgttgccactagtactgaagggaaggacaaagatgtcaccttaagtccagtgaaggctgggcctgccacaaccacttcttcagaaacaagacaaagtgaggtggctttgccttgcaccagcattgaggcagatgaaggcctcataataggaacacattccagaaataatcctcttcatgttggtgcagaagccagtgaatgcactgtttttgctgcagctgaagaaggtggggctgttgtcacagagggatttgctgaaagtgaaaccttcctcacaagcactaaggaaggggaaagtggggagtgtgctgtggctgaatctgaggacagagcagcagacctactggctgtgcatgcagttaaaatcgaagccaatgtaaatagcgttgtgacagaggaaaaggatgatgctgtaaccagtgcaggctctgaagaaaaatgtgatggttctttaagtagagactcagaaatagttgaaggaactattacttttattagtgaagttgaaagtgatggagcagttacaagtgctggaacagagataagagcaggatctataagcagtgaagaggtggatggctcccagggaaatatgatgagaatgggtcccaaaaaagaaacagagggcactgtgacatgtacaggagcagaaggcagaagtgataactttgtgatctgctcagtaactggagcagggccccgggaggaacgcatggttacaggtgcaggtgttgtcctgggagataatgatgcaccaccaggaacaagtgccagccaagaaggagatggttctgtgaatgatggtacagaaggtgagagtgcagtcaccagcacggggataacagaagatggagaggggccagcaagttgcacaggttcagaagatagcagcgaaggctttgctataagttctgaatcggaagaaaatggagagagtgcaatggacagcacagtggccaaagaaggcactaatgtaccattagttgctgctggtccttgtgatgatgaaggcattgtgactagcacaggcgcaaaagaggaagacgaggaaggggaggatgttgtgactagtactggaagaggaaatgaaattgggcatgcttcaacttgtacagggttaggagaagaaagtgaaggggtcttgatttgtgaaagtgcagaaggggacagtcagattggtactgtggtagagcatgtggaagctgaggctggagctgccatcatgaatgcaaatgaaaataatgttgacagcatgagtggcacagagaaaggaagtaaagacacagatatctgctccagtgcaaaagggattgtagaaagcagtgtgaccagtgcagtctcaggaaaggatgaagtgacaccagttccaggaggttgtgagggtcctatgactagtgctgcatctgatcaaagtgacagtcagctcgaaaaagttgaagataccactatttccactggcctggtcgggggtagttacgatgttcttgtatctggtgaagtcccagaatgtgaagttgctcacacatcaccaagtgaaaaagaagatgaggacatcatcacctctgtagaaaatgaagagtgtgatggtctcatggcaactacagccagtggtgatattaccaaccagaatagcttagcagggggtaaaaatcaaggcaaagttttgattatttccaccagtaccacaaatgattacacccctcaggtaagcgcaattacagatgtggaaggaggtctctcagatgctctgagaactgaagaaaatatggaaggtaccagagtaaccacagaagaatttgaggcccccatgcccagtgcagtctcaggagatgacagccaactcactgccagcagaagtgaagagaaagatgagtgtgccatgatttccacaagcataggggaagaattcgaattgcctatctccagtgcaacaaccatcaagtgtgctgaaagtcttcagccggttgctgcagcagtggaagaaagggctacaggtccagtcttgataagcaccgccgactttgaggggcctatgcccagtgcgcccccagaagctgaaagtcctcttgcctcaaccagcaaggaggagaaggatgaatgtgctctcatttccactagcatagcagaagaatgtgaggcttctgtttccggtgtagttgttgaaagtgaaaatgagcgagctggcacagtcatggaagaaaaagacgggagtggcatcatctctacgagctcggtggaagactgtgagggcccagtgtccagtgctgtccctcaagaggaaggcgacccctcagtcacaccagcggaagagatgggtgacaccgccatgatttccacaagcacctctgaagggtgtgaagcagtcatgattggtgctgtcctccaggatgaagatcggctcaccatcacaagagtagaagacttgagcgatgctgccatcatctccaccagcacagcagaatgtatgccaatttccgccagcattgacagacatgaagagaatcagctgactgcagacaacccagaagggaacggtgacctgtcagccacagaagtgagcaagcacaaggtccccatgcccagcctaattgctgagaataactgtcggtgtcctgggccagtcaggggaggcaaagaaccgggtcccgtgttggcagtgagcaccgaggaggggcacaacgggccatcagtccacaagccctctgcagggcaaggccatccaagtgctgtttgtgcggaaaaagaagagaagcatggcaaggagtgccccgaaataggaccatttgcaggaagaggacagaaagagagcactttacacctcataaatgcagaagagaagaatgtattgttgaactcccttcagaaagaagataagagcccagagacagggacagcagggggcagtagcacagcaagttattcagcaggaaggggcttagaggggaatgctaactcacctgcccacctgagaggaccagaacagacgtctgggcagacggctaaggatccctctgtcagcattcgctatttggcagcagtaaacaccggtgctataaaagctgatgacatgccacctgttcaagggaccgtggctgagcattcctttcttcctgctgagcagcaggggtctgaagacaacttgaaaaccagtaccaccaaatgtattactggccaagaatcaaaaattgctccttcccacacaatgatccctccagctacttacagtgtagctctgttggctcctaaatgtgagcaggacttgactataaagaatgattatagtggcaaatggactgatcaagcatctgctgagaaaacaggagatgataacagcacaaggaaatcattccctgaggaaggagacataatggttactgtgtcttctgaagaaaatgtgtgtgacataggcaatgaagagtctccattgaatgttttgggaggattgaaactgaaagccaacttgaaaatggaggcttatgtgccttcagaggaagagaaaaatggtgaaattctggcaccaccagaaagtctgtgtgggggaaagccaagtggaatagctgaactccagagggagcctttgttggtgaatgaatcactaaatgttgaaaattcaggcttcagaacaaatgaagaaattcatagcgaatcttataacaaaggagagatatccagtggtagaaaagacaacgcagaagccataagcggtcacagtgttgaagcagatcctaaagaggttgaagaggaagaaaggcatatgcctaaaagaaaaagaaagcagcattatctctcttcagaagatgaaccagatgataatccagatgtcctggattccagaatagaaacagcacaaaggcagtgtcctgaaacggagccacatgacacaaaggaagagaactccagagatttggaagaattacctaaaaccagttctgagacaaatagcactacctcaagggtcatggaagaaaaagatgaatatagcagcagtgaaactactggtgaaaagccagagcagaacgatgatgacaccataaaatctcaggaggaagatcagccaataattattaaaaggaaaagaggaagacctcgcaaataccctgtagaaacaacgttaaaaatgaaagacgactccaaaacagatactggcattgtcactgtagaacaatctccatctagcagcaaactgaaagtaatgcaaacagatgaatccaataaagaaacagctaacctacaagaaagaagtataagcaatgatgatggtgaagaaaaaatagtaacaagtgtgcgtcggagaggaagaaaacccaaacgttctctcactgtatcagatgatgctgaatcctcagagccagaaagaaaacgccagaaatcagtttctgatccagtggaggacaagaaagagcaggagtctgatgaggaagaggaagaagaggaagaggacgagccttcaggagccaccacaagatccaccaccagatcagaggctcagagatcaaagacacagctctccccttctatcaagcgcaagagagaagtcagccctcctggggcccgaacaagaggccagcaaagggtggaggaagcccctgtgaaaaaagcgaagcgataatcctgaccactgctgccctaggcttatggaggaacacggtggagaggaaagagacatgccttggtggccataggcttctctttaaccaggaaaaagatatgcatgtgctgtaagtccctaggtgcaagctttttcttgttatgttttaaacagctttataaactattgttcatagaagatattatgtacatttatttcagataaaggacaataagtttactttgtatctgaactcaaaacaaagtagttgtatattttaacattcaaaattgggatttcccaatgtgacacatcatgaatgcaaacccctccagcccatcagacgccaggctgcctactggtaatctgtgtatagtatataaacatgtaaaaataggttgtattttactctatgtatgatgctaatcaatgaacactttatttattttacagagaaaacttatctgtgaactttactatatatctgtttattttactttattttttttttaaataaaaagggttttaaatgctatgcagtcattagtagaaaattttttaggactctgcctgctctgtaactatcttaatatgatctggcagaaactcgcatgtatccaagtaaagtagtttagctaaagaaaggttcttcattgcttttctgttcacagttgtggctctgttttttaagaatgtaacttgtttttagattatacttgcatctgtgactttactaccagccacgttgacacaaaacaggttctggttcaggtaaagttgcgtcagtcacctgcagcagaaatccctcttcattcctcttctctgtgttcattcctcttctgtgctgttctgaagcttctaccaatactctttccatattgtctttttcagtgaagagaaatgcattcaagattaggtccctcctgtctatccagtttcaggattttatgttgttttatacacagttatttcagtatagaaactggctttattgccaagtgtttttttaaacatgttttaactctcatatgagcaaactgtccaacttcagtttttcataagattaaacttcttacgatcaaatttgtctcttgcaatgatgtgatgagttgccaaataattgagattattttaaaatgttttgttcatattcttgttttataattaaaatttacattcagtgtgtatgggtttttttttttattttgactcttaatgtaaggtggatatttctgtcattttacatggtttcttactgagattttatatataaattataaaatgtttaccaaaa

SEQ ID NO: 111617 - DNA, 4367 bp, Homo sapiens
  Payload ID: 1857
  Gene Symbol: BOD1L1
  Gene Name: biorientation of chromosomes in cell division 1-like 1
  ENST ID: ENST00000482713
  CDS Start-End: 115-396
ctggttccgtaacaacatcccgttggcttccctcaggcggcgggaccagtgcagccgccgcctcccaggatcgtccgccggtcagggcccttgccctccccggcacaggccaccatggccaccaacccacagccgcagccgcctcctccggcgccgccgcctcccccgccgcagccgcagccgcagccaccgccgccgccgccgggccccggggctggccccggcgcgggcggggcgggcggcgcgggtgcgggcgccggggacccgcagctcgtggccatgatcgtgaaccacctcaagagccaggggctcttcgaccagttccgcagagactgcctggccgacgtggacaccaagagtctcgccctgtcgccaggctggaatgcaatggcgtgatctcggctcactgcaacctccgcctcccgggttcaagcgactctcctgtctcagcctcccaagtagctgggattacaagcgcgtgccaccacgccctgctaatttttgtatttttagtagacacaaggtttcaccgtgttggccaggatggtctcgatctcctgacctcgtgattcgcccagtaggcatgagccaccgcgcccggtcgagggttttctcatagtatgtttagttgttctgaggagctttgtatctttgagaaatgcatgtttacaacatccacagtttcttctaaagctttcaggtgaactgcacacagttccactatgtcttctggggaaactcttgaatatcctggtacatcttcctttataaggactcatactgggcccactatgtaaaacgtggtttttcgggatattggaggttttgcaccacagagaattcaattcacttgggagtgttcatctatttaggaagtatagttttttttacttttgtcttcaggaatatgcactgctaccttttagaaataatttctattgcctttattatttttgttgttatttaatgggaaaaggttagacatggccaggtaaatgttatcaaataaagttagttattcgtattcaacaagtggaatttttactttgctgttctcagaaacccatgaatctgtgtgttctcagaaacccatgaatcattatgtatacaaattaaaaattgtaatgtactgctgcaatgtctgaggctcaacttttttattatcctattcccacaaaatgttattggtatgtgtctataatatccctgccagacccttcaaagtaaaggattaaaaccttttttggagggaaggagggaagcacagtatctctgatcatctaatgaaagttaggaccttctctcaagaaaaatgcgcaagtaacacattaaaacgctgtttttctacttcagaatggtcaactataggcaatttcatgagaatcaatctaataacatatacagtttcagtgagttcaggaaccatggaataagaacctattttaatgttcttagcctcttttttgaggtcaagaattgaatgatattgttacaacaaaactcttccattccgaggcacagtacttgtttatatgaacaaggtttctcagggcgcatgactataaaaattagaaataggaatagaattgatgatcaacccttcttctagtaataagacatattcagccacagatgcaggaactttaaaaagcaacagtatggccaggcccggtggctcatgcctggccaccgtgggccaaagtagaagattccctgttcatgcaaagaaccatcactttaatggaatccttgagtttcatctgccacttgaacctcaaagactgacctgctttctgtcaaaaagtcttaacttgtagcatatagagttatagtggattatgtctgtcacgtgcatatttaagaatgaagacatttgatacctgccaggtgctaagagcaaaactgtcatccagtttagtgtgtttaaaccaggatgagaagtaccaaagtctgctgctacaccagaagaccacagaaccctggtcttctgggaggccgaggtgggtggatcattagaggtcaggagttcgaggccaacctgaccaaaatggtgaaaccccatctctagtaaaaatacaaaaaaagtagccatgtatggtggcacatgcctgtagtcccagctactcgggaggctgaggcaggagaattgcttgaagccaggagacagaggttgcagttagccgagattgtgccagtgcactccagcctgggagacagaacaagacttggtctaaaaaacaaaaatttttaaaaagcaacaatacacatttttcaatacagttgcatatactatttaataattatgaaaatttctaatatttctgttgctttgagaaattagaactgaaatgacaccctcccagacaaaaaagaacactcagctatggttgaagttctggtgctcagacgctagcttaaactctcccacaaaatctctctctctctccccctccctgccactaacctctgtacctgctcctggttatgttacaggttatgttctggtacttcctttaccccatgactctctccttctcttctactcccttagttagcaattaggtagattttaatttgatttaaaagatttgttctcattgaataccattttatacttcattttcttatttgaaaaaaaaaaaaatatattcccccctgcttcccaaaaagccaaagttttcttcatcagaacataacattcatatcaatatgatgagtgggccaaagtagaagattccctgttcatgcaaagaaccatcactttaatggaatccttgagtttcatctgccacttgaacctcaaagactgacctgctttctgtcaaaaagtcttaacttgtagcatatagagttatagtggattatgtctgtcacatgcatatttaagaatgaagacatttgatacctgccaggtgctaagagcaaaactgtcatccagtttagtgtgtttaaaccaggatgagaagtaccaaagtctgctgctacaccagaagaccatagaacccccctccaaactgtccagggtcattgatagtccttaaccaggagagagatctgactgtaacagaccaaatcagcccttcccacccaaagaaatggaaccatgggcaaccctaagctccaactactgcaaagactcctccgttatagactaccagtttccagatctctggagcaagcttagtggttacaaagccattctgtctcctttgcactgattagcatctggagcgtgtgaggagggatgatcaagaggcccttcagggagctcgccagccagcctgcgtatcagaatctgagacagcgtgttgacaactttgttgcaaatcacttggcaactcacacatggagtccgcatctcaataagaaccagctaagaaacaacattagacaacaagtcctcaaatcaggaatgttggagtctggtattgaccgaattatttctcaggttgtggacccaaagatcaaccacacattcagacctcaggtagagaaagctgtgcatgagtttttggccacgctaaatcacaaagaggaaggaagtggcaacacagctcccgatgatgagaaaccagacacttcccttattacacaaggtgttcctactcctgggcccagtgctaatgtagccaatgatgccatgtcgatattggaaaccataacttctcttaaccaagaagccagtgctgctagggcttcaacagaaacatcaaatgccaagaccagtgagagagcgtcaaaaaaacttccatctcagccaaccactgatactagtactgacaaagaaagaacttcagaggacatggctgataaagaaaaatctacagctgactctggaggtgaaggactggaaacagccccaaagtctgaagagttcagcgacctcccctgtccagtcgaagaaattaaaaattacacaaaagagcataataatttaattctgctaaataaggatgttcaacaggaaagcagtgagcaaaaaaataaatcaacagacaaaggtgaaaagaagccagacagcaatgagaaaggagaaagaaagaaagaaaagaaggaaaagactgaaaagaaatttgatcactcaaaaaagagtgaagatacacagaaagttaaagatgaaaaacaagcaaaggaaaaagaagtagagagtttaaaacttccttcagaaaagaacagtaataaagctaaaactgttgaagggacaaaagaagatttctctttgatagattctgatgtggatggacttacagacatcacagttagctctgttcataccagtgacctttcatcttttgaagaagatactgaggaggaagttgtaacgtctgatagcatggaagaaggagagattacgtcagatggtaaag

SEQ ID NO: 111618 - DNA, 1128 bp, Homo sapiens
  Payload ID: 1857
  Gene Symbol: BOD1L1
  Gene Name: biorientation of chromosomes in cell division 1-like 1
  ENST ID: ENST00000507943
  CDS Start-End: 1-623
actccaaaacagatactggcattgtcactgtagaacaatctccatctagcagcaaactgaaagtaatgcaaacagatgaatccaataaagaaacagctaacctacaagaaagaagtataagcaatgatgatggtgaagaaaaaatagtaacaagtgtgcgtcggagaggaagaaaacccaaacgttctctcactgtatcagatgatgctgaatcctcagagccagaaagaaaacgccagaaatcagtttctgatccagtggaggacaagaaagagcaggagtctgatgaggaagaggaagaagaggaagaggacgagccttcaggagccaccacaagatccaccaccagatcagaggctcagagaaagcaacatagcaagccatctgcacgtgcaacatccaaacttggcagcccagacacagtttctcctagaaatcgccaaaaattagcaaaagagaagttacctaccagcgaaaaagttagtaactctcccccattaggaagatcaaagacacagctctccccttctatcaagcgcaagagagaagtcagccctcctggggcccgaacaagaggccagcaaagggtggaggaagcccctgtgaaaaaagcgaagcgataatcctgaccactgctgccctaggcttatggaggaacacggtggagaggaaagagacatgccttggtggccataggcttctctttaaccaggaaaaagatatgcatgtgctgtaagtccctaggtgcaagctttttcttgttatgttttaaacagctttataaactattgttcatagaagatattatgtacatttatttcagataaaggacaataagtttactttgtatctgaactcaaaacaaagtagttgtatattttaacattcaaaattgggatttcccaatgtgacacatcatgaatgcaaacccctccagcccatcagacgccaggctgcctactggtaatctgtgtatagtatataaacatgtaaaaataggttgtattttactctatgtatgatgctaatcaatgaacactttatttattttacagagaaaacttatctgtgaactttactatatatctgtttattttactttattttttttttaaataaaaagggttt

SEQ ID NO: 111619 - DNA, 3239 bp, Homo sapiens
  Payload ID: 1858
  Gene Symbol: BOD1L2
  Gene Name: biorientation of chromosomes in cell division 1-like 2
  Uniprot ID: Q8IYS8
  ENST ID: ENST00000585477
  CDS Start-End: 252-770
atctggagcgcgcttggaatccagcaggcggttgctgccgcgtcttccacaacctccgcggtctggagctggcctcccccaccgccgccccaaccaccggccccgccgccatcaccaccaccgtcacctccgccgctgcctccttggggccctcctccttcaccgcccccttagccacctctacacattctaggctttctgtcctggagaagaagctataatcggtttccttgtgggcccggtgcgcagccatggcggacggtggcggcggcggcagcggcggtgcgggcccggcctcgacccgggccagcgggggcggcggccccatcaacccggcctcgttgccccctggcgaccctcagctcatcgctatcatcgtggggcagctcaagagcaggggcctttttgacagcttccgccgggactgcaaggctgacgtggacaccaagccagcttaccaaaacctgagccagaaagcggataattttgtgtcgacacatctggacaagcaggaatggaatcctccagcaaacgacaaccaactgcacgatggtctgaggcagagtgtggttcagtcagggaggtcagaagctggagtggacaggattagttctcaggtggtggatccaaaactaaaccacatcttcaggccacaaatagaacaaataattcatgaattcctggtggcccagaaagaagcagctgtgccagcactccctccagagccagaaggccaggaccctccagctccgtctcaggacacttcctaagaatatgcctgacagcttttgaaagcgctatttaatttttggtgaagaaatggattcggttacataagagtgcagtttcagattgaagataagccaagttcatcactgagctcaagatttccacctcgaccatgagcagtgaccagattgaaagggaagcaagttcgccagagagaaagttgaccgtggcaccctcctgcattgcgctgccatttggccagcctttccaagggcatgacaccaaacacacactacagagagggaaacactaccgcgacccaggattgtcctgaaacagacatctatacttgaacatggagactgcacatggattttagggtttgtgctctgagataaacgaaagctacagcgagagaacataaccaatcccaaagacaatttcaaagaacaatgacagtaaaggttaactgggaggaatatttgacagtacttatttgatattgtctctcagagttgcaaactagattgtacacaacattagtgtcagatagctttgaagttgtgaccttcttgtacatgaatcttctagccagtttcctttcctttgtaagagataacaaagcatgaaaccctagaatgagtgagaagttcagacattaggtataaggaaactcatttgcagactctctgtccaagaatgcttcctgtcttgcaggggctagtgagtcttgggtgtgtttatgttatgctcacatttgtgttttatttgaaaagtggatggtcaataaatggcttatctttcaactgcaacaacaaaaaagaaatgcagatttacatccttttcctctttaagctccgtcagttttctgatatttctagaaggtcagacacctggcatggtttatgaggcccgtgataatggggcccctggtcacctctgctgccccgtacactgtcatttctcatatgacaaccatgcccatgactatcctggacaccctgtgttccctctgctcactgtgaagggaatgccctcaaccactcctaccctcctttaagactcagctcctgaggagccacacatcgtctaagcaggagtgacagactccttcctctgtgctcccatagatctcataagggatgaccacacttactatagtagctaggtctgacgaagcacttgctctattgctctacagctggcagtgtactaaacgcttaacttcgcttaccgtagtaagtcctcatgatctaattgaagaaatcgtatctttattcccatttttattcccatttataaatgtagaaaccaaagctcagacactgcctaagtggtggggctggggctgagcctgtattgagcacagagccctcacttttaacccttttaaccatgcttttagccacaccacctcaccacagtgaactgtctttgcttacagatctgtcatccccacttaaatgtgagcttcctccagggcagggatttgctttgttcatttcttttccttaaccccaggacctagcacatcacaggagctcagcaatttgtagaaagaaaccagttctggatttgtcttttccaacatttaatttctcagatggcagtatttatcatctaaaaagtgaacaaaaattaattttgcatctagtgtctacatgtctaagcaagaaagagctttcttatccctggaggtattttatctgtaatgtttacctatgagctattttaaatgattcttcaaaatttagagtccagaaggtagaagaccatgtcctttctgaaaatgtcccttcctttcccaggtaccaggctctttttaaaattagcttctgaatatgaacaacccagctctttaaagtttaatgtcccagccattttaattgtttctttcgaagtacaaaagagcagctgggccacatcggcactaatcacttgccaactttcctttttacaaaaacagctaagctctttctgagatttaaaatcactccatctgagaccccagcttggcacctatctttgcactaacataaaaggaacctaatttctgcttttaagaaatgtgttgcggaagtgatttttggtttggggtttgttctccttcttctttttaaaaataacgtaataaagtgtaatacaacttttaaagttttttttttcctttaccagttctctattctccttttctacttgaattgtcctgagacaggttgccagataaaatacaggttgctcagcaaatgtgaatttcagagaaacaacagatactctcctagggcatggaccgtgcaatatttgaaacatacttgtattaaaaagttatttgttgtttatttgaaattcaaatttactggggccccatgctttagtttgccaaatctgccaaccatagcctgaatgcttcccgttcccaccatgagtttggcaaatggaaaatgctaacctatgcgatggacactgctgtattctgaaaatgaatatgtaaataaatcaaactaccgtga

SEQ ID NO: 111620 - DNA, 2075 bp, Homo sapiens
  Payload ID: 1859
  Gene Symbol: BTD
  Gene Name: biotinidase
  Uniprot ID: P43251
  ENST ID: ENST00000303498
  CDS Start-End: 110-1741
agcaggagattgctgcctatgcaaagcaggtaagaagccgaactctgaggcctctcgccattgtctccgagtcggccagctggagcgttttcggggctgtaaagggagaatggcgcatgcgcatattcagggcggaaggcgcgctaagagcagatttgtggtctgcattatgtctggagccagaagtaagcttgctcttttcctctgcggctgttacgtggttgccctgggagcccacaccggggaggagagcgtggctgaccatcacgaggctgaatattatgtggctgccgtgtatgagcatccatccatcctgagtctgaaccctctggctctcatcagccgccaagaggccttggagctcatgaaccagaaccttgacatctatgaacagcaagtgatgactgcagcccaaaaggatgtacagattatagtgtttccagaagatggcattcatggattcaactttacaagaacatccatttatccatttttggacttcatgccgtctccccaggtggtcaggtggaacccatgcctggagcctcaccgcttcaatgacacagaggtgctccagcgcctgagttgtatggccatcaggggagatatgttcttggtggccaatcttgggacaaaggagccttgtcatagcagtgacccaaggtgcccaaaagatgggagataccagttcaacacaaatgtcgtgttcagcaataatggaacccttgttgaccgctaccgtaaacacaacctctactttgaggcagcattcgatgttcctcttaaagtggatctcatcacctttgataccccctttgctggcaggtttggcatcttcacatgctttgatatattgttctttgaccctgccatcagagtcctcagagactacaaggtgaagcatgttgtgtacccaactgcctggatgaaccagctcccactcttggcagcaattgagattcagaaagcttttgctgttgcctttggcatcaacgttctggcagctaatgtccaccacccagttctggggatgacaggaagtggcatacacacccctctggagtccttttggtaccatgacatggaaaatcccaaaagtcaccttataattgcccaggtggccaaaaatccagtgggtctcattggtgcagagaatgcaacaggtgaaacggacccatcccatagtaagtttttaaaaattttgtcaggcgatccgtactgtgagaaggatgctcaggaagtccactgtgatgaggccaccaagtggaacgtgaatgctcctcccacatttcactctgagatgatgtatgacaatttcaccctggtccctgtctggggaaaggaaggctatctccacgtctgttccaatggcctctgctgttatttactttacgagaggcccaccttatccaaagagctgtatgccctgggggtctttgatgggcttcacacagtacatggcacttactacatccaagtgtgtgccctggtcaggtgtgggggtcttggcttcgacacctgtggacaggaaatcacagaggccacggggatatttgagtttcacctgtggggcaacttcagtacttcctatatctttcctttgtttctgacctcagggatgaccctagaagtccctgaccagcttggctgggagaatgaccactatttcctgaggaaaagtaggctgtcctctgggctggtgacggcggctctctatgggcgcttgtatgagagggactaggaaaagtgtgtggtctgtggggcggactctggccatcatgttgacagccttgcacttccacaggctacaagccctgggaccatctttctgccttaagggcaggagcccacttctgtggcaccagattccaccctgggaactgtggaaaaagtaggagaggcagattccctcagtgtcttcctcttaaacctcaatcatcgagacattagggggtattttctgttcacatttatctttttcaagccacatcttcctctaacaaatctctcagtatgcgattggtctcaagctaaaacaaaaataaatgtcagtttatattttacacatccacaaa

SEQ ID NO: 111621 - DNA, 2261 bp, Homo sapiens
  Payload ID: 1859
  Gene Symbol: BTD
  Gene Name: biotinidase
  Uniprot ID: P43251
  ENST ID: ENST00000383778
  CDS Start-End: 359-1930
agttggacttggggagggctgcgcaaaggctgccgggagctgggaagcccggcgcgcgtcgtttgctggggctgtttgtgcgttgctgctgtgctaccgcgttgcgttttctaggcatttacttacacgctttgtggtttacgctctcataaccttgtggttttatagtccttaaattattgtagcgcacgttacttaaatccagaagcagatgtgtaccccagcaagagataaaatgacgctcagagtcagtagatccagaccgtgcctgagatcctgaatcctgtttcctacccactattcagccattgggtcacaagcgatgaaaagagcaccttgaagatttgtggtctgcattatgtctggagccagaagtaagcttgctcttttcctctgcggctgttacgtggttgccctgggagcccacaccggggaggagagcgtggctgaccatcacgaggctgaatattatgtggctgccgtgtatgagcatccatccatcctgagtctgaaccctctggctctcatcagccgccaagaggccttggagctcatgaaccagaaccttgacatctatgaacagcaagtgatgactgcagcccaaaaggatgtacagattatagtgtttccagaagatggcattcatggattcaactttacaagaacatccatttatccatttttggacttcatgccgtctccccaggtggtcaggtggaacccatgcctggagcctcaccgcttcaatgacacagaggtgctccagcgcctgagttgtatggccatcaggggagatatgttcttggtggccaatcttgggacaaaggagccttgtcatagcagtgacccaaggtgcccaaaagatgggagataccagttcaacacaaatgtcgtgttcagcaataatggaacccttgttgaccgctaccgtaaacacaacctctactttgaggcagcattcgatgttcctcttaaagtggatctcatcacctttgataccccctttgctggcaggtttggcatcttcacatgctttgatatattgttctttgaccctgccatcagagtcctcagagactacaaggtgaagcatgttgtgtacccaactgcctggatgaaccagctcccactcttggcagcaattgagattcagaaagcttttgctgttgcctttggcatcaacgttctggcagctaatgtccaccacccagttctggggatgacaggaagtggcatacacacccctctggagtccttttggtaccatgacatggaaaatcccaaaagtcaccttataattgcccaggtggccaaaaatccagtgggtctcattggtgcagagaatgcaacaggtgaaacggacccatcccatagtaagtttttaaaaattttgtcaggcgatccgtactgtgagaaggatgctcaggaagtccactgtgatgaggccaccaagtggaacgtgaatgctcctcccacatttcactctgagatgatgtatgacaatttcaccctggtccctgtctggggaaaggaaggctatctccacgtctgttccaatggcctctgctgttatttactttacgagaggcccaccttatccaaagagctgtatgccctgggggtctttgatgggcttcacacagtacatggcacttactacatccaagtgtgtgccctggtcaggtgtgggggtcttggcttcgacacctgtggacaggaaatcacagaggccacggggatatttgagtttcacctgtggggcaacttcagtacttcctatatctttcctttgtttctgacctcagggatgaccctagaagtccctgaccagcttggctgggagaatgaccactatttcctgaggaaaagtaggctgtcctctgggctggtgacggcggctctctatgggcgcttgtatgagagggactaggaaaagtgtgtggtctgtggggcggactctggccatcatgttgacagccttgcacttccacaggctacaagccctgggaccatctttctgccttaagggcaggagcccacttctgtggcaccagattccaccctgggaactgtggaaaaagtaggagaggcagattccctcagtgtcttcctcttaaacctcaatcatcgagacattagggggtattttctgttcacatttatctttttcaagccacatcttcctctaacaaatctctcagtatgcgattggtctcaagctaaaacaaaaataaatgtcagtttatattttacacatccac

SEQ ID NO: 111622 - DNA, 1820 bp, Homo sapiens
  Payload ID: 1859
  Gene Symbol: BTD
  Gene Name: biotinidase
  Uniprot ID: P43251
  ENST ID: ENST00000449107
  CDS Start-End: 89-1726
cacttcccgggagaggtgagaatgtaaacacgcgcgttctccaatcagaactgcgctctcttctcggctcctccattcgcgcgccagaatgccagagggaggcgggactagcaggagattgctgcctatgcaaagcagatttgtggtctgcattatgtctggagccagaagtaagcttgctcttttcctctgcggctgttacgtggttgccctgggagcccacaccggggaggagagcgtggctgaccatcacgaggctgaatattatgtggctgccgtgtatgagcatccatccatcctgagtctgaaccctctggctctcatcagccgccaagaggccttggagctcatgaaccagaaccttgacatctatgaacagcaagtgatgactgcagcccaaaaggatgtacagattatagtgtttccagaagatggcattcatggattcaactttacaagaacatccatttatccatttttggacttcatgccgtctccccaggtggtcaggtggaacccatgcctggagcctcaccgcttcaatgacacagaggtgctccagcgcctgagttgtatggccatcaggggagatatgttcttggtggccaatcttgggacaaaggagccttgtcatagcagtgacccaaggtgcccaaaagatgggagataccagttcaacacaaatgtcgtgttcagcaataatggaacccttgttgaccgctaccgtaaacacaacctctactttgaggcagcattcgatgttcctcttaaagtggatctcatcacctttgataccccctttgctggcaggtttggcatcttcacatgctttgatatattgttctttgaccctgccatcagagtcctcagagactacaaggtgaagcatgttgtgtacccaactgcctggatgaaccagctcccactcttggcagcaattgagattcagaaagcttttgctgttgcctttggcatcaacgttctggcagctaatgtccaccacccagttctggggatgacaggaagtggcatacacacccctctggagtccttttggtaccatgacatggaaaatcccaaaagtcaccttataattgcccaggtggccaaaaatccagtgggtctcattggtgcagagaatgcaacaggtgaaacggacccatcccatagtaagtttttaaaaattttgtcaggcgatccgtactgtgagaaggatgctcaggaagtccactgtgatgaggccaccaagtggaacgtgaatgctcctcccacatttcactctgagatgatgtatgacaatttcaccctggtccctgtctggggaaaggaaggctatctccacgtctgttccaatggcctctgctgttatttactttacgagaggcccaccttatccaaagagctgtatgccctgggggtctttgatgggcttcacacagtacatggcacttactacatccaagtgtgtgccctggtcaggtgtgggggtcttggcttcgacacctgtggacaggaaatcacagaggccacggggatatttgagtttcacctgtggggcaacttcagtacttcctatatctttcctttgtttctgacctcagggatgaccctagaagtccctgaccagcttggctgggagaatgaccactatttcctgaggaaaagtaggctgtcctctgggctggtgacggcggctctctatgggcgcttgtatgagagggactaggaaaagtgtgtggtctgtggggcggactctggccatcatgttgacagccttgcacttccacaggctacaagccctgggaccatctttctgcctt

SEQ ID NO: 111623 - DNA, 1112 bp, Homo sapiens
  Payload ID: 1859
  Gene Symbol: BTD
  Gene Name: biotinidase
  ENST ID: ENST00000436193
  CDS Start-End: 359-1112
agttggacttggggagggctgcgcaaaggctgccgggagctgggaagcccggcgcgcgtcgtttgctggggctgtttgtgcgttgctgctgtgctaccgcgttgcgttttctaggcatttacttacacgctttgtggtttacgctctcataaccttgtggttttatagtccttaaattattgtagcgcacgttacttaaatccagaagcagatgtgtaccccagcaagagataaaatgacgctcagagtcagtagatccagaccgtgcctgagatcctgaatcctgtttcctacccactattcagccattgggtcacaagcgatgaaaagagcaccttgaagatttgtggtctgcattatgtctggagccagaagtaagcttgctcttttcctctgcggctgttacgtggttgccctgggagcccacaccggggaggagagcgtggctgaccatcacgaggctgaatattatgtggctgccgtgtatgagcatccatccatcctgagtctgaaccctctggctctcatcagccgccaagaggccttggagctcatgaaccagaaccttgacatctatgaacagcaagtgatgactgcagcccaaaaggatgtacagattatagtgtttccagaagatggcattcatggattcaactttacaagaacatccatttatccatttttggacttcatgccgtctccccaggtggtcaggtggaacccatgcctggagcctcaccgcttcaatgacacagaggtgctccagcgcctgagttgtatggccatcaggggagatatgttcttggtggccaatcttgggacaaaggagccttgtcatagcagtgacccaaggtgcccaaaagatgggagataccagttcaacacaaatgtcgtgttcagcaataatggaacccttgttgaccgctaccgtaaacacaacctctactttgaggcagcattcgatgttcctcttaaagtggatctcatcacctttgataccccctttgctggcaggtttggcatcttcacatgctttgatatattgttctttgaccctgccatcagagtcctcagagactacaaggtgaagcatgttgtgtacccaactgcct

SEQ ID NO: 111624 - DNA, 499 bp, Homo sapiens
  Payload ID: 1859
  Gene Symbol: BTD
  Gene Name: biotinidase
  ENST ID: ENST00000427382
  CDS Start-End: 324-499
agcttccgtaggagcctttcattccaggaaggtccatcgtacttgcgttttcagggcctgagcgatgactttagcaccagacacctgctcctcgctgcgctctgcgaagttactgtccggcatcttccaccgaaaagctctaagcactcacgcagccggcaaacaagcggaatcatccagcaaggcaaacgcgaaatcggcagcacgccacctctggtactgcacctctgacggacaggagggcaaccaactgccttaaacaacgggaaggaagaggcggtctaaattcgtccacttcccgggagagatttgtggtctgcattatgtctggagccagaagtaagcttgctcttttcctctgcggctgttacgtggttgccctgggagcccacaccggggaggagagcgtggctgaccatcacgaggctgaatattatgtggctgccgtgtatgagcatccatccatcctgagtctgaaccctctggctctcatcagccg

SEQ ID NO: 111625 - DNA, 2097 bp, Homo sapiens
  Payload ID: 1859
  Gene Symbol: BTD
  Gene Name: biotinidase
  Uniprot ID: P43251
  ENST ID: ENST00000437172
  CDS Start-End: 233-1870
attgtctccgagtcggccagctggagcgttttcggggctgtaaagggagaatggcgcatgcgcatattcagggcggaaggcgcgctaagagcagacagatttccccacgcagacgctgtgtgtcacagggggaatgggcagcgtcactttttacatccagtcatattgtatgaaattgcaacaaattcaaaaagatgccatcgtgggagtgtgaagacactattgtaatagcatggctaggaaggaaacacagctaattattaagatgaatcatttagcaagatttgtggtctgcattatgtctggagccagaagtaagcttgctcttttcctctgcggctgttacgtggttgccctgggagcccacaccggggaggagagcgtggctgaccatcacgaggctgaatattatgtggctgccgtgtatgagcatccatccatcctgagtctgaaccctctggctctcatcagccgccaagaggccttggagctcatgaaccagaaccttgacatctatgaacagcaagtgatgactgcagcccaaaaggatgtacagattatagtgtttccagaagatggcattcatggattcaactttacaagaacatccatttatccatttttggacttcatgccgtctccccaggtggtcaggtggaacccatgcctggagcctcaccgcttcaatgacacagaggtgctccagcgcctgagttgtatggccatcaggggagatatgttcttggtggccaatcttgggacaaaggagccttgtcatagcagtgacccaaggtgcccaaaagatgggagataccagttcaacacaaatgtcgtgttcagcaataatggaacccttgttgaccgctaccgtaaacacaacctctactttgaggcagcattcgatgttcctcttaaagtggatctcatcacctttgataccccctttgctggcaggtttggcatcttcacatgctttgatatattgttctttgaccctgccatcagagtcctcagagactacaaggtgaagcatgttgtgtacccaactgcctggatgaaccagctcccactcttggcagcaattgagattcagaaagcttttgctgttgcctttggcatcaacgttctggcagctaatgtccaccacccagttctggggatgacaggaagtggcatacacacccctctggagtccttttggtaccatgacatggaaaatcccaaaagtcaccttataattgcccaggtggccaaaaatccagtgggtctcattggtgcagagaatgcaacaggtgaaacggacccatcccatagtaagtttttaaaaattttgtcaggcgatccgtactgtgagaaggatgctcaggaagtccactgtgatgaggccaccaagtggaacgtgaatgctcctcccacatttcactctgagatgatgtatgacaatttcaccctggtccctgtctggggaaaggaaggctatctccacgtctgttccaatggcctctgctgttatttactttacgagaggcccaccttatccaaagagctgtatgccctgggggtctttgatgggcttcacacagtacatggcacttactacatccaagtgtgtgccctggtcaggtgtgggggtcttggcttcgacacctgtggacaggaaatcacagaggccacggggatatttgagtttcacctgtggggcaacttcagtacttcctatatctttcctttgtttctgacctcagggatgaccctagaagtccctgaccagcttggctgggagaatgaccactatttcctgaggaaaagtaggctgtcctctgggctggtgacggcggctctctatgggcgcttgtatgagagggactaggaaaagtgtgtggtctgtggggcggactctggccatcatgttgacagccttgcacttccacaggctacaagccctgggaccatctttctgccttaagggcaggagcccacttctgtggcaccagattccaccctgggaactgtggaaaaagtaggagaggcagattccctcagtgtcttcctcttaaacctcaatcatcgagacattagggggtattttctgttcac

SEQ ID NO: 111626 - DNA, 541 bp, Homo sapiens
  Payload ID: 1859
  Gene Symbol: BTD
  Gene Name: biotinidase
  ENST ID: ENST00000417015
  CDS Start-End: 19-213
gttttcagggcctgagcgatgactttagcaccagacacctgctcctcgctgcgctctgcgaagttactgtccggcatcttccaccgaaaagctctaagcactcacgcagccggcaaacaagcggaatcatccagcaaggcaaacgcgaaatcggcagcacgccacctctggtactgcacctctgacggacaggagggcaaccaactgccttaaacaacgggaaggaagaggcggtctaaattcgtccacttcccgggagaggtgagaatgtaaacacgcgcgttctccaatcagaactgcgctctcttctcggctcctccattcgcgcgccagaatgccagagggaggcgggactagcaggagattgctgcctatgcaaagcaggtaagaagccgaactctgaggcctctcgccattgtctccgagtcggccagctggagcgttttcggggctgtaaagggagaatggcgcatgcgcatattcagggcggaaggcgcgctaagagcagatttgtggtctgcattatgtctggagccagaag

SEQ ID NO: 111627 - DNA, 797 bp, Homo sapiens
  Payload ID: 1860
  Gene Symbol: BPHL
  Gene Name: biphenyl hydrolase-like (serine hydrolase)
  ENST ID: ENST00000380368
  CDS Start-End: 213-797
ggatccacgtcccacgggccggacccgcggccgcgttcggaaatcagcctgagcctgagtaccgctaaggctttaatcacgggtcccgagagccctaagtcttctctttgcttgctgatctcgtaccttaatgtgcaaaagaatcacgttgggaactgaaaattcagaatcctgggcctcactcccagaggatctgatctacatgtgtggagatgcccaggaatctgctttattctcttttgtcctcccacctgtccccccatttcagcacctcggtaacctctgccaaagtggctgtgaatggcgttcagctgcattaccagcagactggagagggagatcacgcagtcctgctacttcctgggatgttaggaagtggagagactgattttggacctcagctcaagaacctcaataagaagctcttcacggtggtcgcctgggatcctcgaggctatggacattccaggcccccagatcgcgatttcccagcagacttttttgaaagggatgcaaaagatgctgttgatttgatgaaggcgctgaagtttaagaaggtttctctgctggggtggagtgatgggggcataaccgcactcattgctgctgcaaaatatccatcttacatccacaagatggtgatctggggcgccaacgcctacgtcactgacgaagacagcatgatatatgagggcatccgagatgtttccaaatggagtgagagaacaagaaagcctctagaagccctctatggatggagtctcactctgtcaccaggctggaatgcaatggcatga

SEQ ID NO: 111628 - DNA, 1050 bp, Homo sapiens
  Payload ID: 1860
  Gene Symbol: BPHL
  Gene Name: biphenyl hydrolase-like (serine hydrolase)
  Uniprot ID: Q86WA6
  ENST ID: ENST00000380375
  CDS Start-End: 132-956
ggtcccgagagccctaagtcttctctttgcttgctgatctcgtaccttaatgtgcaaaagaatcacgttgggaactgaaaattcagaatcctgggcctcactcccagaggatctgatctacatgtgtggagatgcccaggaatctgctttattctcttttgtcctcccacctgtccccccatttcagcacctcggtaacctctgccaaagtggctgtgaatggcgttcagctgcattaccagcagactggagagggagatcacgcagtcctgctacttcctgggatgttaggaagtggagagactgattttggacctcagctcaagaacctcaataagaagctcttcacggtggtcgcctgggatcctcgaggctatggacattccaggcccccagatcgcgatttcccagcagacttttttgaaagggatgcaaaagatgctgttgatttgatgaaggcgctgaagtttaagaaggtttctctgctggggtggagtgatgggggcataaccgcactcattgctgctgcaaaatatccatcttacatccacaagatggtgatctggggcgccaacgcctacgtcactgacgaagacagcatgatatatgagggcatccgagatgtttccaaatggagtgagagaacaagaaagcctctagaagccctctatgggtatgactactttgccagaacctgtgaaaagtgggtggatggcataagacagtttaaacatctcccagatggtaacatctgccggcacctgctgccccgggtccagtgccccgccttgattgtgcacggtgagaaggatcctctggtcccacggtttcatgccgacttcattcataagcacgtgaaaggctcacggctgcatttgatgccagaaggcaaacacaacctgcatttgcgttttgcagatgaattcaacaagttagcagaagacttcctacaatgagaatgcacactccagtcttggtggttccttcgtgtggggcttgatcgtgttgctgcctgttaacatgatgcctttgaaactctccgcctttgaa

SEQ ID NO: 111629 - DNA, 1928 bp, Homo sapiens
  Payload ID: 1860
  Gene Symbol: BPHL
  Gene Name: biphenyl hydrolase-like (serine hydrolase)
  Uniprot ID: Q86WA6
  ENST ID: ENST00000380379
  CDS Start-End: 50-925
gcttggtcttagcgcatgcgcactcccggcagctacgcgacctgtgaccatggtggctgtgctgggcggccggggcgtgttgcgcctgcggctgcttctctcagcgctgaagcccgggatccacgtcccacgggccggacccgcggccgcgttcggcacctcggtaacctctgccaaagtggctgtgaatggcgttcagctgcattaccagcagactggagagggagatcacgcagtcctgctacttcctgggatgttaggaagtggagagactgattttggacctcagctcaagaacctcaataagaagctcttcacggtggtcgcctgggatcctcgaggctatggacattccaggcccccagatcgcgatttcccagcagacttttttgaaagggatgcaaaagatgctgttgatttgatgaaggcgctgaagtttaagaaggtttctctgctggggtggagtgatgggggcataaccgcactcattgctgctgcaaaatatccatcttacatccacaagatggtgatctggggcgccaacgcctacgtcactgacgaagacagcatgatatatgagggcatccgagatgtttccaaatggagtgagagaacaagaaagcctctagaagccctctatgggtatgactactttgccagaacctgtgaaaagtgggtggatggcataagacagtttaaacatctcccagatggtaacatctgccggcacctgctgccccgggtccagtgccccgccttgattgtgcacggtgagaaggatcctctggtcccacggtttcatgccgacttcattcataagcacgtgaaaggctcacggctgcatttgatgccagaaggcaaacacaacctgcatttgcgttttgcagatgaattcaacaagttagcagaagacttcctacaatgagaatgcacactccagtcttggtggttccttcgtgtggggcttgatcgtgttgctgcctgttaacatgatgcctttgaaactctccgcctttgaaactttctacccctcccttcaatcttatcctaaccaaatgagaataatgacatattgaaaacagcctctagcttcaggctgggcacggtggctcacagctataatctcagcactttgggaggctgaggtgggagaattgcctgagcccaggagttcaagaccagcttgtgcaatatagggagactccggctctacaaaaaagagtttttcaaaattagccaggcgaagtggcacacatctgtggtcccaggtgctcaggaagctgaggtgggaggatcacttgagcccaattcaaagctgcagtgagctgtaattgcatcactgcactccaacctgggcaacagagtaagaccttgtcttaaaaaaaaataaaaacataaaaaaaaataaaaaaggaataaagcctctaacttcaatagctatgaaaattaaatccgattttctaagatgaagttgtgacaagttataccattgtcttaacaggtgaattcctgccataatttattttcaaataaattttaggtggagaatgtgtagtgttaatgttggagattttaagacatcttgaatttgtactgtaccttttatctgagaggttcaagcttcacttgtgtttttatttgtgtttatctatcatattcaaagagaagtagggagagtccgtgcccgaggtcctcaattctaagatcagaggatgtccagaacagcagcagataggggcaggtttgctttaccccatatccctctcctggttcacttttgagagatgaatactttgggccagtaaaggtgaacaaaatatgtattttcatcactctgtactaaaaggacaggaatgttattaattaaaacactaaagcagaaatcctacattgctattaaaattaaactttgattaccacaataaaaa

SEQ ID NO: 111630 - DNA, 1186 bp, Homo sapiens
  Payload ID: 1860
  Gene Symbol: BPHL
  Gene Name: biphenyl hydrolase-like (serine hydrolase)
  Uniprot ID: Q86WA6
  ENST ID: ENST00000434640
  CDS Start-End: 362-1186
ccgacgcagcgagggcgctatggctggcggcctcgcctcctggaaaggccatggtcgctgaggcgacgagcgagggcggggcagcgccgacggggacactcatcccgggagccagagccagcaccgagaggggacggtctacgcgggtgccggcggttccaggactgcgaaaccacgagccgagtttcgaaatcagcctgagcctgagtaccgctaaggctttaatcacgggtcccgagagccctaagtcttctctttgcttgctgatctcgtaccttaatgtgcaaaagaatcacgttgggaactgaaaattcagaatcctgggcctcactcccagaggatctgatctacatgtgtggagatgcccaggaatctgctttattctcttttgtcctcccacctgtccccccatttcagcacctcggtaacctctgccaaagtggctgtgaatggcgttcagctgcattaccagcagactggagagggagatcacgcagtcctgctacttcctgggatgttaggaagtggagagactgattttggacctcagctcaagaacctcaataagaagctcttcacggtggtcgcctgggatcctcgaggctatggacattccaggcccccagatcgcgatttcccagcagacttttttgaaagggatgcaaaagatgctgttgatttgatgaaggcgctgaagtttaagaaggtttctctgctggggtggagtgatgggggcataaccgcactcattgctgctgcaaaatatccatcttacatccacaagatggtgatctggggcgccaacgcctacgtcactgacgaagacagcatgatatatgagggcatccgagatgtttccaaatggagtgagagaacaagaaagcctctagaagccctctatgggtatgactactttgccagaacctgtgaaaagtgggtggatggcataagacagtttaaacatctcccagatggtaacatctgccggcacctgctgccccgggtccagtgccccgccttgattgtgcacggtgagaaggatcctctggtcccacggtttcatgccgacttcattcataagcacgtgaaaggctcacggctgcatttgatgccagaaggcaaacacaacctgcatttgcgttttgcagatgaattcaacaagttagcagaagacttcctacaatga

SEQ ID NO: 111631 - DNA, 1563 bp, Homo sapiens
  Payload ID: 1860
  Gene Symbol: BPHL
  Gene Name: biphenyl hydrolase-like (serine hydrolase)
  ENST ID: ENST00000424847
  CDS Start-End: 366-500
gacgcagcgagggcgctatggctggcggcctcgcctcctggaaaggccatggtcgctgaggcgacgagcgagggcggggcagcgccgacggggacactcatcccgggagccagagccagcaccgagaggggacggtctacgcgggtgccggcggttccaggactgcgaaaccacgagccgagtttcggtcgcccatgggaaagcacccggcagggcgtggcttcggggcggggcgggcagagggcggagcaggatggagaggcgaggtgggcggagcagagggcgtggcttcggggcagagtgggccgggtaccgcgcttggtcttagcgcatgcgcactcccggcagctacgcgacctgtgaccatggtggctgtgctgggcggccggggcgtgttgcgcctgcggctgcttctctcagcgctgaagcccgggatccacgtcccacgggccggacccgcggccgcgttcggaaatcagcctgagcctgagtaccgctaaggctttaatcacgggtcccgagagccctaagtcttctctttgcttgctgatctcgtaccttaatgtgcaaaagaatcacgttgggaactgaaaattcagaatcctgggcctcactcccagaggatctgatctacatgtgtggagatgcccaggaatctgctttattctcttttgtcctcccacctgtccccccatttcagcacctcggtaacctctgccaaagtggctgtgaatggcgttcagctgcattaccagcagactggagagggagatcacgcagtcctgctacttcctgggatgttaggaagtggagagactgattttggacctcagctcaagaacctcaataagaagctcttcacggtggtcgcctgggatcctcgaggctatggacattccaggcccccagatcgcgatttcccagcagacttttttgaaagggatgcaaaagatgctgttgatttgatgaaggcgctgaagtttaagaaggtttctctgctggggtggagtgatgggggcataaccgcactcattgctgctgcaaaatatccatcttacatccacaagatggtgatctggggcgccaacgcctacgtcactgacgaagacagcatgatatatgagggcatccgagatgtttccaaatggagtgagagaacaagaaagcctctagaagccctctatgggtatgactactttgccagaacctgtgaaaagtgggtggatggcataagacagtttaaacatctcccagatggtaacatctgccggcacctgctgccccgggtccagtgccccgccttgattgtgcacggtgagaaggatcctctggtcccacggtttcatgccgacttcattcataagcacgtgaaaggctcacggctgcatttgatgccagaaggcaaacacaacctgcatttgcgttttgcagatgaattcaacaagttagcagaagacttcctacaatgagaatgcacactccagtcttggtggttccttcgtgtggggcttgatcgtgttgctgcctgttaacatgatgcctttgaaactctccgcctttgaa

SEQ ID NO: 111632 - DNA, 576 bp, Homo sapiens
  Payload ID: 1860
  Gene Symbol: BPHL
  Gene Name: biphenyl hydrolase-like (serine hydrolase)
  ENST ID: ENST00000423798
  CDS Start-End: 1-89
ccgccttgattgtgcacggtgagaaggatcctctggtcccacggtttcatgccgacttcattcataagcacgtgaaaggctcacgatgaattcaacaagttagcagaagacttcctacaatgagaatgcacactccagtcttggtggttccttcgtgtggggcttgatcgtgttgctgcctgttaacatgatgcctttgaaactctccgcctttgaaactttctacccctcccttcaatcttatcctaaccaaatgagaataatgacatattgaaaacagcctctagcttcaggctgggcacggtggctcacagctataatctcagcactttgggaggctgaggtgggagaattgcctgagcccaggagttcaagaccagcttgtgcaatatagggagactccggctctacaaaaaagagtttttcaaaattagccaggcgaagtggcacacatctgtggtcccaggtgctcaggaagctgaggtgggaggatcacttgagcccaattcaaagctgcagtgagctgtaattgcatcactgcactccaacctgggcaacagagtaagaccttgtctt

SEQ ID NO: 111633 - DNA, 2157 bp, Homo sapiens
  Payload ID: 1860
  Gene Symbol: BPHL
  Gene Name: biphenyl hydrolase-like (serine hydrolase)
  ENST ID: ENST00000430655
  CDS Start-End: 366-500
gacgcagcgagggcgctatggctggcggcctcgcctcctggaaaggccatggtcgctgaggcgacgagcgagggcggggcagcgccgacggggacactcatcccgggagccagagccagcaccgagaggggacggtctacgcgggtgccggcggttccaggactgcgaaaccacgagccgagtttcggtcgcccatgggaaagcacccggcagggcgtggcttcggggcggggcgggcagagggcggagcaggatggagaggcgaggtgggcggagcagagggcgtggcttcggggcagagtgggccgggtaccgcgcttggtcttagcgcatgcgcactcccggcagctacgcgacctgtgaccatggtggctgtgctgggcggccggggcgtgttgcgcctgcggctgcttctctcagcgctgaagcccgggatccacgtcccacgggccggacccgcggccgcgttcggaaatcagcctgagcctgagtaccgctaaggctttaatcacgggtcccgagagccctaagtcttctctttgcttgctgatctcgtaccttaatgtgcaaaagaatcacgttgggaactgaaaattcagaatcctgggcctcactcccagaggatctgatctacatgtgtggagatgcccaggaatctgctttattctcttttgtcctcccacctgtccccccatttcagcacctcggtaacctctgccaaagtggctgtgaatggcgttcagctgcattaccagcagactggagagggagatcacgcagtcctgctacttcctgggatgttaggaagtggagagactgattttggacctcagctcaagaacctcaataagaagctcttcacggtggtcgcctgggatcctcgaggctatggacattccaggcccccagatcgcgatttcccagcagacttttttgaaagggatgcaaaagatgctgttgatttgatgaaggcgctgaagtttaagaaggtttctctgctggggtggagtgatgggggcataaccgcactcattgctgctgcaaaatatccatcttacatccacaagatggtgatctggggcgccaacgcctacgtcactgacgaagacagcatgatatatgagggcatccgagatgtttccaaatggagtgagagaacaagaaagcctctagaagccctctatggatggagtctcactctgtcaccaggctggaatgcaatggcatgatctcagctcactgcaatctctgtctcctgggttcaagcgattgctctgcctcagcctcccaagtagctgggaccacaggcgtgcaccaccacacaggtaacatctgccggcacctgctgccccgggtccagtgccccgccttgattgtgcacggtgagaaggatcctctggtcccacggtttcatgccgacttcattcataagcacgtgaaaggctcacggctgcatttgatgccagaaggcaaacacaacctgcatttgcgttttgcagatgaattcaacaagttagcagaagacttcctacaatgagaatgcacactccagtcttggtggttccttcgtgtggggcttgatcgtgttgctgcctgttaacatgatgcctttgaaactctccgcctttgaaactttctacccctcccttcaatcttatcctaaccaaatgagaataatgacatattgaaaacagcctctagcttcaggctgggcacggtggctcacagctataatctcagcactttgggaggctgaggtgggagaattgcctgagcccaggagttcaagaccagcttgtgcaatatagggagactccggctctacaaaaaagagtttttcaaaattagccaggcgaagtggcacacatctgtggtcccaggtgctcaggaagctgaggtgggaggatcacttgagcccaattcaaagctgcagtgagctgtaattgcatcactgcactccaacctgggcaacagagtaagaccttgtcttaaaaaaaaataaaaacataaaaaaaaataaaaaaggaataaagcctctaacttcaatagctatgaaaattaaatccgattttctaagatgaagttgtgacaagttataccattgtcttaacaggtgaattcctgccataatttattttcaaataaattttaggtgga

SEQ ID NO: 111634 - DNA, 1063 bp, Homo sapiens
  Payload ID: 1860
  Gene Symbol: BPHL
  Gene Name: biphenyl hydrolase-like (serine hydrolase)
  ENST ID: ENST00000433912
  CDS Start-End: 50-685
gcttggtcttagcgcatgcgcactcccggcagctacgcgacctgtgaccatggtggctgtgctgggcggccggggcgtgttgcgcctgcggctgcttctctcagcgctgaagcccgggatccacgtcccacgggccggacccgcggccgcgttcggcacctcggtaacctctgccaaagtggctgtgaatggcgttcagctgcattaccagcagactggagagggagatcacgcagtcctgctacttcctgggatgttaggaagtggagagactgattttggacctcagctcaagaacctcaataagaagctcttcacggtggtcgcctgggatcctcgaggctatggacattccaggcccccagatcgcgatttcccagcagacttttttgaaagggatgcaaaagatgctgttgatttgatgaaggcgctgaagtttaagaaggtttctctgctggggtggagtgatgggggcataaccgcactcattgctgctgcaaaatatccatcttacatccacaagatggtgatctggggcgccaacgcctacgtcactgacgaagacagcatgatatatgagggcatccgagatgtttccaaatggagtgagagaacaagaaagcctctagaagccctctatggatggagtctcactctgtcaccaggctggaatgcaatggcatgatctcagctcactgcaatctctgtctcctgggttcaagcgattgctctgcctcagcctcccaagtagctgggaccacaggcgtgcaccaccacacaggtaacatctgccggcacctgctgccccgggtccagtgccccgccttgattgtgcacggtgagaaggatcctctggtcccacggtttcatgccgacttcattcataagcacgtgaaaggctcacggctgcatttgatgccagaaggcaaacacaacctgcatttgcgttttgcagatgaattcaacaagttagcagaagacttcctacaatgagaatgcacactccagtcttggtggttccttcgtgtggggcttgatcgtgttgctgcctgttaacatgatg

SEQ ID NO: 111635 - DNA, 4155 bp, Homo sapiens
  Payload ID: 1861
  Gene Symbol: BIVM-ERCC5
  Gene Name: BIVM-ERCC5 readthrough
  ENST ID: ENST00000602836
  CDS Start-End: 1-4155
acaaggtgctgtaaaatctttctgcacaagtgcctcaggagcacccttgggtcccaaaggagatggtcattatccatggagttgtccagtgactcatacacgggaaaaaatttatgccatctgttcggactatgcctttctcaaccaggcgacctcaatctataaaactccaaatccatcccgctctccttgcctccctgatagtacctctttatctgctggaaataattcatcaagatacattggtatcccgactagtacatcggaaattatctacaatgaagaaaatagcttggaaaacttatccaacagcctgggcaagctacctctcgcatgggaaattgataaatctgaatttgatggggtgaccacaaattcgaaacacaaatcaggcaatgcaaagaaacaagtttccaagagaaaaacttcagataaaaagggaagatatcagaaggaatgtcctcagcattctcctcttgaagatattaaacagcggaaagtattagacctcagacgatggtactgcataagccgaccacagtataagacttcttgtggcatctcttcattaatttcttgttggaatttcttatacagcacaatgggagctggaaaccttccacctattacccaagaagaagctttacatattctgggctttcaacctccatttgaagatattaggtttggtcctttcacggggaatacaacacttatgaggtggtttagacaaattaatgaccacttccatgtaaaaggatgctcttatgttctatataagcctcatgggaagaataaaacagcaggagaaactgcttcaggggccctgtcaaagttaacccgtggattgaaagatgaatcgctggcttatatctatcattgccaaaatcattatttttgtccaattggcttcgaagcaacccctgttaaagctaataaagcattcagcaggggacctctctcaccacaggaagttgaatattggatcttaattggagaatcaagtagaaaacatcctgccattcactgtaaaaaatgggcagatattgttactgatctaaacactcaaaatccagaatacctggatatccggcacttagagaggggactgcagtatagaaaaacaaagaaggttgggggaaatttgcattgcatcatagcattccagagacttaactggcaaagatttggcctttggaactttccatttggaaccattagacaagaatcacaacctccaacacatgcccagggaattgccaaatctgagagtgaagacaatatttccaagaagcagcatgggcgtctgggccggtctttcagtgctagtttccatcaggactcggcatggaaaaagatgtctaatattagcatttggttaaaccaagcacttaaaggagtccgggatcgccatgggaactcaatagaaaatcctcatcttctcactttgtttcatcggctctgcaaactcttattttttcgaattcgtcctatttttgtgtttgatggggatgctccactattgaagaaacagactttggtgaagagaaggcagagaaaggacttagcgtccagtgactccaggaaaacgacagagaagcttctgaaaacatttttgaaaagacaagccatcaaaactgccttcagaagcaaaagagatgaagcactacccagtcttacccaagttcgaagagaaaacgacctctatgttttgcctcctttacaagaggaagaaaaacacagttcagaagaggaagatgaaaaagaatggcaagaaagaatgaatcaaaaacaagcattacaggaagagttctttcataatcctcaagcgatagatattgagtctgaggacttcagcagcctgccccctgaagtaaagcatgaaatcttgactgatatgaaagagttcaccaagcgcagaagaacattatttgaagcaatgccagaggagtctgatgacttttcacagtaccaactcaaaggcttgcttaaaaagaactatctgaaccagcatatagaacatgtccaaaaggaaatgaatcagcaacattcaggacacatccgaaggcagtatgaagatgaagggggctttctgaaggaggtagagtcaaggagagtggtctctgaagacacttcacattacatcttgataaaaggtattcaagctaagacagttgcagaagtggattcagagtctcttccttcttccagcaaaatgcacggcatgtcttttgacgtgaagtcatctccatgtgaaaaactgaagacagagaaagagcctgatgctacccctccttctccaagaactttactagctatgcaagctgccctgctgggaagtagctcagaagaggagctggagagtgaaaatcgaaggcaggcccgtgggaggaacgcacctgctgctgtagacgaaggctccatatcaccccggactctttcagccattaagagagctcttgacgatgacgaagatgtaaaagtgtgtgctggggatgatgtgcagacgggagggccaggagcagaagaaatgcgtataaacagctccaccgagaacagtgatgaaggacttaaagtgagagatggaaaaggaataccgtttactgcaacacttgcgtcatctagtgtgaactctgcagaggagcacgtagccagcactaatgaggggagagagcccacagactcagttccaaaagaacaaatgtcacttgttcacgtggggactgaagcctttccgataagtgatgagtctatgattaaggacagaaaagatcggctgcctctggagagtgcagtggttagacatagtgacgcacctgggctcccgaatggaagggaactgacaccggcatctccaacttgtacaaattctgtgtcaaagaatgaaacacatgctgaagtgcttgagcagcagaacgaactttgcccatatgagagtaaattcgattcttctcttctttcaagtgatgatgaaacaaaatgtaaaccgaattctgcttctgaagtcattggccctgtcagtttgcaagaaacaagtagcatagtaagtgtcccttcagaggcagtagataatgtggaaaatgtggtgtcatttaatgctaaagagcatgagaattttctggaaaccatccaagaacagcagaccactgaatctgcaggccaggatttaatttccattccaaaggccgtggaaccaatggaaattgactcggaagaaagtgaatctgatggaagtttcattgaagtgcaaagtgtgattagtgatgaggaacttcaagcagaattccctgaaacttccaaacctccctcagaacaaggcgaagaggaactggtaggaactagggagggagaagcccctgctgagtccgagagcctcctgagggacaactctgagagggacgacgtggatggtgagccacaggaagctgagaaagatgcggaagattcgctccatgaatggcaagatattaatttggaggagttggaaactctggagagcaacctcttagcacagcagaattcactgaaagctcaaaaacagcagcaagaacggatcgctgctactgtcaccggacagatgttcctggaaagccaggaactcctgcgcctgttcggcattccctacatccaggctcccatggaagcagaggcgcagtgcgccatcctggacctgactgatcagacttccggaaccatcactgatgacagtgatatctggctgtttggagcgcggcatgtctatagaaacttttttaataaaaacaagtttgtagaatattatcaatatgtggactttcacaatcaattgggattggaccggaataagttaataaatttggcttatttgcttggaagtgattataccgaaggaataccaactgtgggttgtgtaaccgccatggaaattctcaatgaattccctgggcatggcctggaacctctcctaaaattctcagaatggtggcatgaagctcaaaaaaatccaaagataagacctaatcctcatgacaccaaagtgaaaaaaaaattacggacattgcaactcacccctggctttcctaacccagctgttgccgaggcctacctcaaacccgtggtggatgactcgaagggatcctttctgtgggggaaacctgatctcgacaaaattagaga

SEQ ID NO: 111636 - DNA, 2073 bp, Homo sapiens
  Payload ID: 1862
  Gene Symbol: BLCAP
  Gene Name: bladder cancer associated protein
  Uniprot ID: P62952
  ENST ID: ENST00000373537
  CDS Start-End: 316-579
aggatgggtcctcggccggctcgactagaagactaagggggcgtctccccggcttcctgcggcgtcggtggcgagctgaggtggaggcaggctgcggcagacggcgacagtggcggcggcgccatggcagggcttgcaggatccctgctgccttggtgatcccgggctgacagccagagagcacagcggctcagctcctggagagtgagggttgaagaaagcggagggcagccgcctgcgcccgctggctcccattaggtcggttcctgcagcggtgcccggcagccttggtgaaggccctgcccggcagagatcatgtattgcctccagtggctgctgcccgtcctcctcatccccaagcccctcaaccccgccctgtggttcagccactccatgttcatgggcttctacctgctcagcttcctcctggaacggaagccttgcacaatttgtgccttggttttcctggcagccctgttccttatctgctatagctgctggggaaactgtttcctgtaccactgctccgattccccgcttccagaatcggcgcatgatcccggcgttgtgggcacctaacggcctgccctgttagctttccaaggaagcagaagacgggaggggaggcattgacataggtcataaagcattggagtttcaaatcccgcagcctcgcgggtgtcacattcctgacggcgcctttttggcctgtgatgttttatccttacaatgtgaataatggcactgaccggtgcttttattgtaaagtcctatagtcgtgggtggtcttgtggttgtgtgtgttctgtccccatctaggtcctggctggccgcatgaccacccctctcgcctcattactgtgaggagtctgggtccatcctggtcagctgccccaatgtgacctggggcagataaaatgccagtctcattgtcacctctgtgacccctccttgtcagggtctccttccttcccagaatgttactgactcctcagtccctcttctggtttccctttatttctcttctacccttttccttttttggggagtacctgtccaagacagggctcatttttgcacttatctcgaatttgaagagattgctgacgcccgagagcctcgctttttcatccttctttccttgttcagcaggctagacagaaacatgtcttgactgttagttgtccacaaatcttcagtattttctccacttcatttttaagaaaggaagcaacagatagatgttgctctttcacctgggtgtctgggctcaagctttcccgcccagcctcacttcctttgcccttcctcctgcctttctcaactgtcccaaggagggggcctcattgtgtctcccgtgcatgctctgcagcattgaagtatggtgtgttcacgtagttctagcagtccccagctgagtgagtgggagagtacctgtgtgtttcgtaacggccttgatccccttgatagatgtttggatattttttggtgtgccctgtgtgtgtgtgtgtacaaatacatgtgtatattccttttaaagaagctttatcgaacgtggtctgattttgaggtttagcaatagctagctatatatggtaggtgccgctacagtttttatttagcatggggattgcagagtgaccagcacactggactccgaggtggttcagacaagacagaggggagcagtggccatcatcctcccgccaggagcttcttcgttcctgcgcatatagactgtacattatgaagaatacccaggaagactttgtgactgtcacttgctgctttttctgcgcttcagtaacaagtgttggcaaacgagactttctcctggcccctgcctgctggagatcagcatgcctgtcctttcagtctgatccatccatctctctcttgcctgaggggaaagagagatgggccaggcagagaacagaactggaggcagtccatctagggaatgggactgtgaggccatacttgtgaaacgtctggactgctattctagagcttttatttggtgtgttcgttgcacagctgtttgaaatgtttaataaagctttataaacttta

SEQ ID NO: 111637 - DNA, 633 bp, Homo sapiens
  Payload ID: 1862
  Gene Symbol: BLCAP
  Gene Name: bladder cancer associated protein
  Uniprot ID: P62952
  ENST ID: ENST00000397131
  CDS Start-End: 352-615
acataaagccagagacaaggctgaacaggcggcagggccatttggtgagacagtcagctgaccccgtgtagaaagagccctgactcactggggagtgggagaggaagacaagtccgaggccgagcactgcccaccctgacgtgatggcaggggagagcccagggccacggacctggatccctgctgccttggtgatcccgggctgacagccagagagcacagcggctcagctcctggagagtgagggttgaagaaagcggagggcagccgcctgcgcccgctggctcccattaggtcggttcctgcagcggtgcccggcagccttggtgaaggccctgcccggcagagatcatgtattgcctccagtggctgctgcccgtcctcctcatccccaagcccctcaaccccgccctgtggttcagccactccatgttcatgggcttctacctgctcagcttcctcctggaacggaagccttgcacaatttgtgccttggttttcctggcagccctgttccttatctgctatagctgctggggaaactgtttcctgtaccactgctccgattccccgcttccagaatcggcgcatgatcccggcgttgtgggcacctaacggcctgccctgttagct

SEQ ID NO: 111638 - DNA, 566 bp, Homo sapiens
  Payload ID: 1862
  Gene Symbol: BLCAP
  Gene Name: bladder cancer associated protein
  Uniprot ID: P62952
  ENST ID: ENST00000397134
  CDS Start-End: 245-508
tagaccgccagtcttgtgggtccctcgcacagcgcggattttcgggcgggaagaccggaatgcggtttgatccctgctgccttggtgatcccgggctgacagccagagagcacagcggctcagctcctggagagtgagggttgaagaaagcggagggcagccgcctgcgcccgctggctcccattaggtcggttcctgcagcggtgcccggcagccttggtgaaggccctgcccggcagagatcatgtattgcctccagtggctgctgcccgtcctcctcatccccaagcccctcaaccccgccctgtggttcagccactccatgttcatgggcttctacctgctcagcttcctcctggaacggaagccttgcacaatttgtgccttggttttcctggcagccctgttccttatctgctatagctgctggggaaactgtttcctgtaccactgctccgattccccgcttccagaatcggcgcatgatcccggcgttgtgggcacctaacggcctgccctgttagctttccaaggaagcagaagacgggaggggaggcattgacata

SEQ ID NO: 111639 - DNA, 685 bp, Homo sapiens
  Payload ID: 1862
  Gene Symbol: BLCAP
  Gene Name: bladder cancer associated protein
  Uniprot ID: P62952
  ENST ID: ENST00000397135
  CDS Start-End: 327-590
cttctgggtcaccttaggcgtcgccgggtccccgtcactggggttttccttccgcataccccgggaaggcagggcgcccctgtccggcttcaggtgattgccgtgattggacctagcctgggccttggggggtcccttcccagcccggaggatccctgctgccttggtgatcccgggctgacagccagagagcacagcggctcagctcctggagagtgagggttgaagaaagcggagggcagccgcctgcgcccgctggctcccattaggtcggttcctgcagcggtgcccggcagccttggtgaaggccctgcccggcagagatcatgtattgcctccagtggctgctgcccgtcctcctcatccccaagcccctcaaccccgccctgtggttcagccactccatgttcatgggcttctacctgctcagcttcctcctggaacggaagccttgcacaatttgtgccttggttttcctggcagccctgttccttatctgctatagctgctggggaaactgtttcctgtaccactgctccgattccccgcttccagaatcggcgcatgatcccggcgttgtgggcacctaacggcctgccctgttagctttccaaggaagcagaagacgggaggggaggcattgacataggtcataaagcattggagtttcaaatcccgcagcctc

SEQ ID NO: 111640 - DNA, 2036 bp, Homo sapiens
  Payload ID: 1862
  Gene Symbol: BLCAP
  Gene Name: bladder cancer associated protein
  Uniprot ID: P62952
  ENST ID: ENST00000397137
  CDS Start-End: 279-542
atattgtcccttctgggtcaccttaggcgtcgccgggtccccgtcactggggttttccttccgcataccccgggaaggcagggcgcccctgtccggcttcaggatccctgctgccttggtgatcccgggctgacagccagagagcacagcggctcagctcctggagagtgagggttgaagaaagcggagggcagccgcctgcgcccgctggctcccattaggtcggttcctgcagcggtgcccggcagccttggtgaaggccctgcccggcagagatcatgtattgcctccagtggctgctgcccgtcctcctcatccccaagcccctcaaccccgccctgtggttcagccactccatgttcatgggcttctacctgctcagcttcctcctggaacggaagccttgcacaatttgtgccttggttttcctggcagccctgttccttatctgctatagctgctggggaaactgtttcctgtaccactgctccgattccccgcttccagaatcggcgcatgatcccggcgttgtgggcacctaacggcctgccctgttagctttccaaggaagcagaagacgggaggggaggcattgacataggtcataaagcattggagtttcaaatcccgcagcctcgcgggtgtcacattcctgacggcgcctttttggcctgtgatgttttatccttacaatgtgaataatggcactgaccggtgcttttattgtaaagtcctatagtcgtgggtggtcttgtggttgtgtgtgttctgtccccatctaggtcctggctggccgcatgaccacccctctcgcctcattactgtgaggagtctgggtccatcctggtcagctgccccaatgtgacctggggcagataaaatgccagtctcattgtcacctctgtgacccctccttgtcagggtctccttccttcccagaatgttactgactcctcagtccctcttctggtttccctttatttctcttctacccttttccttttttggggagtacctgtccaagacagggctcatttttgcacttatctcgaatttgaagagattgctgacgcccgagagcctcgctttttcatccttctttccttgttcagcaggctagacagaaacatgtcttgactgttagttgtccacaaatcttcagtattttctccacttcatttttaagaaaggaagcaacagatagatgttgctctttcacctgggtgtctgggctcaagctttcccgcccagcctcacttcctttgcccttcctcctgcctttctcaactgtcccaaggagggggcctcattgtgtctcccgtgcatgctctgcagcattgaagtatggtgtgttcacgtagttctagcagtccccagctgagtgagtgggagagtacctgtgtgtttcgtaacggccttgatccccttgatagatgtttggatattttttggtgtgccctgtgtgtgtgtgtgtacaaatacatgtgtatattccttttaaagaagctttatcgaacgtggtctgattttgaggtttagcaatagctagctatatatggtaggtgccgctacagtttttatttagcatggggattgcagagtgaccagcacactggactccgaggtggttcagacaagacagaggggagcagtggccatcatcctcccgccaggagcttcttcgttcctgcgcatatagactgtacattatgaagaatacccaggaagactttgtgactgtcacttgctgctttttctgcgcttcagtaacaagtgttggcaaacgagactttctcctggcccctgcctgctggagatcagcatgcctgtcctttcagtctgatccatccatctctctcttgcctgaggggaaagagagatgggccaggcagagaacagaactggaggcagtccatctagggaatgggactgtgaggccatacttgtgaaacgtctggactgctattctagagcttttatttggtgtgttcgttgcacagctgtttgaaatgtttaataaagctttataaacttta

SEQ ID NO: 111641 - DNA, 572 bp, Homo sapiens
  Payload ID: 1862
  Gene Symbol: BLCAP
  Gene Name: bladder cancer associated protein
  ENST ID: ENST00000456058
  CDS Start-End: 552-572
cttaccgcgtaggtcgctaaatgcctgggtgatcgtccgcagcggtcgcccgccgcgccccgagtctttgttccctggcaggcgcgggcgcactagggagggtcagcgcgaggaggacggcgcagggaatgggcagggggcgcgcggtgccggcagcggcacttgggcaggcaaggatcgcggcaatcggaataggacgggtccgggaagcggcaatcgcgacgcagtcttgcgggttctaggggcgcgagttgggaaccctctcccacccgaaaccccgtcagacttacctgcagcagcacgcggaagatgtaccagccgatgatgagcagttcagccgaggccgccgccactgccgccatggttccaagaatggatccctgctgccttggtgatcccgggctgacagccagagagcacagcggctcagctcctggagagtgagggttgaagaaagcggagggcagccgcctgcgcccgctggctcccattaggtcggttcctgcagcggtgcccggcagccttggtgaaggccctgcccggcagagatcatgtattgcctccagtggctg

SEQ ID NO: 111642 - DNA, 581 bp, Homo sapiens
  Payload ID: 1862
  Gene Symbol: BLCAP
  Gene Name: bladder cancer associated protein
  ENST ID: ENST00000414080
  CDS Start-End: 396-581
ttcctgcggcgtcggtggcgagctgaggtggaggcaggctgcggcagacggcgacagtggcggcggcgccatggcagggcttgcaggggcgcgagttgggaaccctctcccacccgaaaccccgtcagacttacctgcagcagcacgcggaagatgtaccagccgatgatgagcagttcagccgaggccgccgccactgccgccatggttccaagaatggatccctgctgccttggtgatcccgggctgacagccagagagcacagcggctcagctcctggagagtgagggttgaagaaagcggagggcagccgcctgcgcccgctggctcccattaggtcggttcctgcagcggtgcccggcagccttggtgaaggccctgcccggcagagatcatgtattgcctccagtggctgctgcccgtcctcctcatccccaagcccctcaaccccgccctgtggttcagccactccatgttcatgggcttctacctgctcagcttcctcctggaacggaagccttgcacaatttgtgccttggttttcctggcagccctgttccttatctgctatagctgctgg

SEQ ID NO: 111643 - DNA, 2205 bp, Homo sapiens
  Payload ID: 1862
  Gene Symbol: BLCAP
  Gene Name: bladder cancer associated protein
  Uniprot ID: P62952
  ENST ID: ENST00000414542
  CDS Start-End: 449-712
aggatgggtcctcggccggctcgactagaagactaagggggcgtctccccggcttcctgcggcgtcggtggcgagctgaggtggaggcaggctgcggcagacggcgacagtggcggcggcgccatggcagggcttgcaggggcgcgagttgggaaccctctcccacccgaaaccccgtcagacttacctgcagcagcacgcggaagatgtaccagccgatgatgagcagttcagccgaggccgccgccactgccgccatggttccaagaatggatccctgctgccttggtgatcccgggctgacagccagagagcacagcggctcagctcctggagagtgagggttgaagaaagcggagggcagccgcctgcgcccgctggctcccattaggtcggttcctgcagcggtgcccggcagccttggtgaaggccctgcccggcagagatcatgtattgcctccagtggctgctgcccgtcctcctcatccccaagcccctcaaccccgccctgtggttcagccactccatgttcatgggcttctacctgctcagcttcctcctggaacggaagccttgcacaatttgtgccttggttttcctggcagccctgttccttatctgctatagctgctggggaaactgtttcctgtaccactgctccgattccccgcttccagaatcggcgcatgatcccggcgttgtgggcacctaacggcctgccctgttagctttccaaggaagcagaagacgggaggggaggcattgacataggtcataaagcattggagtttcaaatcccgcagcctcgcgggtgtcacattcctgacggcgcctttttggcctgtgatgttttatccttacaatgtgaataatggcactgaccggtgcttttattgtaaagtcctatagtcgtgggtggtcttgtggttgtgtgtgttctgtccccatctaggtcctggctggccgcatgaccacccctctcgcctcattactgtgaggagtctgggtccatcctggtcagctgccccaatgtgacctggggcagataaaatgccagtctcattgtcacctctgtgacccctccttgtcagggtctccttccttcccagaatgttactgactcctcagtccctcttctggtttccctttatttctcttctacccttttccttttttggggagtacctgtccaagacagggctcatttttgcacttatctcgaatttgaagagattgctgacgcccgagagcctcgctttttcatccttctttccttgttcagcaggctagacagaaacatgtcttgactgttagttgtccacaaatcttcagtattttctccacttcatttttaagaaaggaagcaacagatagatgttgctctttcacctgggtgtctgggctcaagctttcccgcccagcctcacttcctttgcccttcctcctgcctttctcaactgtcccaaggagggggcctcattgtgtctcccgtgcatgctctgcagcattgaagtatggtgtgttcacgtagttctagcagtccccagctgagtgagtgggagagtacctgtgtgtttcgtaacggccttgatccccttgatagatgtttggatattttttggtgtgccctgtgtgtgtgtgtgtacaaatacatgtgtatattccttttaaagaagctttatcgaacgtggtctgattttgaggtttagcaatagctagctatatatggtaggtgccgctacagtttttatttagcatggggattgcagagtgaccagcacactggactccgaggtggttcagacaagacagaggggagcagtggccatcatcctcccgccaggagcttcttcgttcctgcgcatatagactgtacattatgaagaatacccaggaagactttgtgactgtcacttgctgctttttctgcgcttcagtaacaagtgttggcaaacgagactttctcctggcccctgcctgctggagatcagcatgcctgtcctttcagtctgatccatccatctctctcttgcctgaggggaaagagagatgggccaggcagagaacagaactggaggcagtccatctagggaatgggactgtgaggccatacttgtgaaacgtctggactgctattctagagcttttatttggtgtgttcgttgcacagctgtttgaaatgtttaataaagctttataaacttt

SEQ ID NO: 111644 - DNA, 588 bp, Homo sapiens
  Payload ID: 1862
  Gene Symbol: BLCAP
  Gene Name: bladder cancer associated protein
  ENST ID: ENST00000445723
  CDS Start-End: 354-588
ttcctgcggcgtcggtggcgagctgaggtggaggcaggctgcggcagacggcgacagtggcggcggcgccatggcagggcttgcagacttacctgcagcagcacgcggaagatgtaccagccgatgatgagcagttcagccgaggccgccgccactgccgccatggttccaagaatggatccctgctgccttggtgatcccgggctgacagccagagagcacagcggctcagctcctggagagtgagggttgaagaaagcggagggcagccgcctgcgcccgctggctcccattaggtcggttcctgcagcggtgcccggcagccttggtgaaggccctgcccggcagagatcatgtattgcctccagtggctgctgcccgtcctcctcatccccaagcccctcaaccccgccctgtggttcagccactccatgttcatgggcttctacctgctcagcttcctcctggaacggaagccttgcacaatttgtgccttggttttcctggcagccctgttccttatctgctatagctgctggggaaactgtttcctgtaccactgctccgattccccgcttccagaatcgg

SEQ ID NO: 111645 - DNA, 591 bp, Homo sapiens
  Payload ID: 1862
  Gene Symbol: BLCAP
  Gene Name: bladder cancer associated protein
  Uniprot ID: P62952
  ENST ID: ENST00000432507
  CDS Start-End: 329-591
atctgtaggagggatacaggaaggattggcgcccttcgtatgcacggaaggaatgagctctacggagaagtggttggaatatgcttggggatagttttctgctggacaggtcgtttcgacctcagtcttccgctcccctcccccaagccctggatccctgctgccttggtgatcccgggctgacagccagagagcacagcggctcagctcctggagagtgagggttgaagaaagcggagggcagccgcctgcgcccgctggctcccattaggtcggttcctgcagcggtgcccggcagccttggtgaaggccctgcccggcagagatcatgtattgcctccagtggctgctgcccgtcctcctcatccccaagcccctcaaccccgccctgtggttcagccactccatgttcatgggcttctacctgctcagcttcctcctggaacggaagccttgcacaatttgtgccttggttttcctggcagccctgttccttatctgctatagctgctggggaaactgtttcctgtaccactgctccgattccccgcttccagaatcggcgcatgatcccggcgttgtgggcaccta

SEQ ID NO: 111646 - DNA, 2365 bp, Homo sapiens
  Payload ID: 1863
  Gene Symbol: BLMH
  Gene Name: bleomycin hydrolase
  Uniprot ID: Q13867
  ENST ID: ENST00000261714
  CDS Start-End: 176-1543
agcctcagcctccccgccgccgccgccgccgccgccgccgagccggtttcctttttccggcgctccgggtgcgagagacaggtcgggccccctaggcagcgagccgcagcgcaatcccggcgctcgcccaaggaccctggaagctaccgttaccccgccgggcagcgtgggcgccatgagcagctcgggactgaattcggagaaggtagctgctctgatacagaaactgaattccgacccccagttcgtacttgcccagaatgtcgggaccacccacgacctgctggacatctgtctgaagcgggccacggtgcagcgcgcgcagcatgtgttccagcacgccgtgccccaggagggcaagccaatcaccaaccagaagagctcagggcgatgctggatcttttcttgtctgaatgttatgaggcttccattcatgaaaaagttaaatattgaagaatttgagtttagccaatcttacctgtttttttgggacaaggttgaacgctgttatttcttcttgagtgcttttgtggacacagcccagagaaaggagcctgaggatgggaggctggtgcagtttttgcttatgaaccctgcaaatgatggtggccaatgggatatgcttgttaatattgttgaaaaatatggtgttatccctaagaaatgcttccctgaatcttatacaacagaggcaaccagaaggatgaatgatattctgaatcacaagatgagagaattctgtatacgactgcggaacctggtacacagtggagcaaccaaaggagaaatctcggccacacaggacgtcatgatggaggagatattccgagtggtgtgcatctgtttgggtaatccaccagagacattcacctgggaatatcgagacaaagataaaaattatcagaaaattggccccataacacccttggagttttacagggaacatgtcaagccactcttcaatatggaagataagatttgtttagtgaatgaccctaggccccagcacaagtacaacaaactttacacagtggaatacttaagcaatatggttggagggagaaaaactctatacaacaaccagcccattgacttcctgaaaaagatggttgctgcctccatcaaagatggagaggctgtgtggtttggctgtgatgttggaaaacacttcaatagcaagctgggcctcagtgacatgaatctctatgaccatgagttagtgtttggtgtctccttgaagaacatgaataaagcggagaggctgacttttggtgagtcacttatgacccacgccatgaccttcactgctgtctcagagaaggatgatcaggatggtgctttcacaaaatggagagtggagaattcatggggtgaagaccatggccacaaaggttacctgtgcatgacagatgagtggttctctgagtatgtctacgaagtggtggtggacaggaagcatgtccctgaagaggtgctagctgtgttagagcaggaacccattatcctgccagcatgggaccccatgggagctttggctgagtgatactgccctccagctctttcctccttccatggaacctgacgtagctgcaaaggacagatccagggactgaagccaaagttatgcaagggactgtgtgttgccacaggacacagtcagatttccagtctccaccaggaacctcttcagaaagtgtgctttatgctgaaacagaatactgttaaaggaaaaaaaagaggggggaagatcaggtcatactatctactctcctcatctctaacagctcaggatctcttagcattttaattagatgtaattgtttgtctttaactgtcaaaaagtttggttctgtgtctgtgttttaataagacgagaggacgagcgattgaggtgtatggagagaaaacagacctaatgctccttgttcctagagtagagtggagggagggtggcctaagagttgagctctcggaactgcatgctgctggacagtatcactgtctttcctagatggcagtcactgaattccattttttcaaggtaatttcttgtgcctctaatagcccaagaatgggaggttgatcagatctgacatgattccttcctgttctgaactgtggggtgtgcacatctctgcttgagtcaggtttgagtagaggcttagagacagttgggtgagaacaaccaaaatcttatcatggtctcagtcataatcattagggggaactctagccaaatggtttaacttctgcctgtggaactggggattgggtgggcaggaaaaggtgatatccattctttctgataactagatggtgctgagaagcttttgaataaaaactttgctaaatgagaataagctga

SEQ ID NO: 111647 - DNA, 1483 bp, Homo sapiens
  Payload ID: 1863
  Gene Symbol: BLMH
  Gene Name: bleomycin hydrolase
  ENST ID: ENST00000578090
  CDS Start-End: 31-246
accgttaccccgccgggcagcgtgggcgccatgagcagctcgggactgaattcggagaaggtagctgctctgatacagaaactgaattccgacccccagttcgtacttgcccagaatgtcgggaccacccacgacctgctggacatctgtctgaagcgggccacggtgcagcgcgcgcagcatgtgttccagcacgccgtgccccaggagggcaagccaatcaccaaccagaagagctcaggttgaacgctgttatttcttcttgagtgcttttgtggacacagcccagagaaaggagcctgaggatgggaggctggtgcagtttttgcttatgaaccctgcaaatgatggtggccaatgggatatgcttgttaatattgttgaaaaatatggtgttatccctaagaaatgcttccctgaatcttatacaacagaggcaaccagaaggatgaatgatattctgaatcacaagatgagagaattctgtatacgactgcggaacctggtacacagtggagcaaccaaaggagaaatctcggccacacaggacgtcatgatggaggagatattccgagtggtgtgcatctgtttgggtaatccaccagagacattcacctgggaatatcgagacaaagataaaaattatcagaaaattggccccataacacccttggagttttacagggaacatgtcaagccactcttcaatatggaagataagatttgtttagtgaatgaccctaggccccagcacaagtacaacaaactttacacagtggaatacttaagcaatatggttggagggagaaaaactctatacaacaaccagcccattgacttcctgaaaaagatggttgctgcctccatcaaagatggagaggctgtgtggtttggctgtgatgttggaaaacacttcaatagcaagctgggcctcagtgacatgaatctctatgaccatgagttagtgtttggtgtctccttgaagaacatgaataaagcggagaggctgacttttggtgagtcacttatgacccacgccatgaccttcactgctgtctcagagaaggatgatcaggatggtgctttcacaaaatggagagtggagaattcatggggtgaagaccatggccacaaaggttacctgtgcatgacagatgagtggttctctgagtatgtctacgaagtggtggtggacaggaagcatgtccctgaagaggtgctagctgtgttagagcaggaacccattatcctgccagcatgggaccccatgggagctttggctgagtgatactgccctccagctctttcctccttccatggaacctgacgtagctgcaaaggacagatccagggactgaagccaaagttatgcaagggactgtgtgttgccacaggacacagtcagatttccagtctccaccaggaacctcttcagaaagtgtgctttatgctgaaacagaatactgttaaaggaaaaaaaaga

SEQ ID NO: 111648 - DNA, 788 bp, Homo sapiens
  Payload ID: 1863
  Gene Symbol: BLMH
  Gene Name: bleomycin hydrolase
  ENST ID: ENST00000581037
  CDS Start-End: 1-788
gtggacacagcccagagaaaggagcctgaggatgggaggctggtgcagtttttgcttatgaaccctgcaaatgatggtggccaatgggatatgcttgttaatattgttgaaaaatatggtgttatccctaagaaatgcttccctgaatcttatacaacagaggcaaccagaaggatgaatgatattctgaatcacaagatgagagaattctgtatacgactgcggaacctggtacacagtggagcaaccaaaggagaaatctcggccacacaggacgtcatgatggaggagatattccgagtggtgtgcatctgtttgggtaatccaccagagacattcacctgggaatatcgagacaaagataaaaattatcagaaaattggccccataacacccttggagttttacagggaacatgtcaagccactcttcaatatggaagataaggttgtgaatgaccctaggccccagcacaagtacaacaaactttacacagtggaatacttaagcaatatggttggagggagaaaaactctatacaacaaccagcccattgacttcctgaaaaagatggttgctgcctccatcaaagatggagaggctgtgtggtttggctgtgatgttggaaaacacttcaatagcaagctgggcctcagtgacatgaatctctatgaccatgagttagtgtttggtgtctccttgaagaacatgaataaagcggagaggctgacttttggtgagtcacttatgacccacgccatgaccttcactgctgtctcagagaaggt

SEQ ID NO: 111649 - DNA, 561 bp, Homo sapiens
  Payload ID: 1863
  Gene Symbol: BLMH
  Gene Name: bleomycin hydrolase
  ENST ID: ENST00000580709
  CDS Start-End: 360-561
agcaacgcgaggggggagttttgtccctccgcggaccccgtttctcccagcctcagcctccccgccgccgccgccgccgccgccgccgagccggtttcctttttccggcgctccgggtgcgagagacaggactgaattcggagaaggtagctgctctgatacagaaactgaattccgacccccagttcgtacttgcccagaatgtcgggaccacccacgacctgctggacatctgtctgaagcgggccacggtgcagcgcgcgcagcatgtgttccagcacgccgtgccccaggagggcaagccaatcaccaaccagaagagctcagggcgatgctggatcttttcttgtctgaatgttatgaggcttccattcatgaaaaagttaaatattgaagaatttgagtttagccaatcttacctgtttttttgggacaaggttgaacgctgttatttcttcttgagtgcttttgtggacacagcccagagaaaggagcctgaggatgggaggctggtgcagtttttgcttatgaaccctgcaaatgatggtggccaatgggata

SEQ ID NO: 111650 - DNA, 586 bp, Homo sapiens
  Payload ID: 1863
  Gene Symbol: BLMH
  Gene Name: bleomycin hydrolase
  ENST ID: ENST00000577290
  CDS Start-End: 176-457
agcctcagcctccccgccgccgccgccgccgccgccgccgagccggtttcctttttccggcgctccgggtgcgagagacaggtcgggccccctaggcagcgagccgcagcgcaatcccggcgctcgcccaaggaccctggaagctaccgttaccccgccgggcagcgtgggcgccatgagcagctcgggactgaattcggagaaggtagctgctctgatacagaaactgaattccgacccccagttcgtacttgcccagaatgtcgggaccacccacgacctgctggacatctgtctgaagcgggccacggtgcagcgcgcgcagcatgtgttccagcacgccgtgccccaggagggcaagccaatcaccaaccagaagagctcaggtgtgggcttccacttctcccatacgttccttgaccttcctgacagcgtcccattttggtgtcttatttaagagtggtcttaaattcgtactgaaagaactggtcgtaaattcgtaaagaatgaggcacagggcgatgctggatcttttcttgtctgaatgttatgaggcttccattcatgaaaaagttaaatattgaag

SEQ ID NO: 111651 - DNA, 1020 bp, Homo sapiens
  Payload ID: 1863
  Gene Symbol: BLMH
  Gene Name: bleomycin hydrolase
  ENST ID: ENST00000584603
  CDS Start-End: 67-1020
gagggagacagctccttggaggaggatgccgcttatgggtttccccgctgcagcgggcaccccaggatgcgcttacgaagactgaattcggagaaggtagctgctctgatacagaaactgaattccgacccccagttcgtacttgcccagaatgtcgggaccacccacgacctgctggacatctgtctgaagcgggccacggtgcagcgcgcgcagcatgtgttccagcacgccgtgccccaggagggcaagccaatcaccaaccagaagagctcagggcgatgctggatcttttcttgtctgaatgttatgaggcttccattcatgaaaaagttaaatattgaagaatttgagtttagccaatcttacctgtttttttgggacaaggttgaacgctgttatttcttcttgagtgcttttgtggacacagcccagagaaaggagcctgaggatgggaggctggtgcagtttttgcttatgaaccctgcaaatgatggtggccaatgggatatgcttgttaatattgttgaaaaatatggtgttatccctaagaaatgcttccctgaatcttatacaacagaggcaaccagaaggatgaatgatattctgaatcacaagatgagagaattctgtatacgactgcggaacctggtacacagtggagcaaccaaaggagaaatctcggccacacaggacgtcatgatggaggagatattccgagtggtgtgcatctgtttgggtaatccaccagagacattcacctgggaatatcgagacaaagataaaaattatcagaaaattggccccataacacccttggagttttacagggaacatgtcaagccactcttcaatatggaagataaggttgtgaatgaccctaggccccagcacaagtacaacaaactttacacagtggaatacttaagcaatatggttggagggagaaaaactctatacaacaaccagcccattgacttcctgaaaaagatggttgctgcctccatcaaagatggagag

SEQ ID NO: 111652 - DNA, 823 bp, Homo sapiens
  Payload ID: 1863
  Gene Symbol: BLMH
  Gene Name: bleomycin hydrolase
  ENST ID: ENST00000577623
  CDS Start-End: 130-823
cctaggcagcgagccgcagcgcaatcccggcgctcgcccaaggaccctggaagctaccgttaccccgccgggcagcgtgggcgccatgagcagctcgggactgaattcggagaagaggcaaccagaaggatgaatgatattctgaatcacaagatgagagaattctgtatacgactgcggaacctggtacacagtggagcaaccaaaggagaaatctcggccacacaggacgtcatgatggaggagatattccgagtggtgtgcatctgtttgggtaatccaccagagacattcacctgggaatatcgagacaaagataaaaattatcagaaaattggccccataacacccttggagttttacagggaacatgtcaagccactcttcaatatggaagataagatttgtttagtgaatgaccctaggccccagcacaagtacaacaaactttacacagtggaatacttaagcaatatggttggagggagaaaaactctatacaacaaccagcccattgacttcctgaaaaagatggttgctgcctccatcaaagatggagaggctgtgtggtttggctgtgatgttggaaaacacttcaatagcaagctgggcctcagtgacatgaatctctatgaccatgagttagtgtttggtgtctccttgaagaacatgaataaagcggagaggctgacttttggtgagtcacttatgacccacgccatgaccttcactgctgtctcagagaaggatgatcaggatggtgctttcacaaaatggagagtggagaattcatggggtgaagaccatggccacaaaggtgagc

SEQ ID NO: 111653 - DNA, 2606 bp, Homo sapiens
  Payload ID: 1864
  Gene Symbol: BLK
  Gene Name: BLK proto-oncogene, Src family tyrosine kinase
  Uniprot ID: P51451
  ENST ID: ENST00000259089
  CDS Start-End: 593-2110
ctgccctggtgcacacagatggcacatggcagagcccaagccctctccatgagatctgcagcgtttgtccacacggcagggcaaattaccttgtagagtcagcatggaggtttgctaactctgccggacttggtgcagaaaaaataccagccgtgctgttaaaccaaaaccccaggagaaaactttctggtgacagaagggcattgtgacccacgttgcccagggccagggacagggcagctgctcatggtccttcctcacgagttttcctggagcagagggatacccccaaacccagggagcccacaggagcttcagaagggctcggctggagggcggggcccctgttgcacttgctcactggggactggggaggctctgatcgcagaccgggggtgctgccacctctgtctgctgccggcagaaagccacaagccatgaaaactgattgagatgagaagaattcatctgggactggcttttgctttaggatggtgttggaagttgctcgttgtcgctaggagcctgctccactgtaagggtgtcaggatctgaagagctatggtgaaacaccactgaagcattgccaaggatggggctggtaagtagcaaaaagccggacaaggaaaagccgatcaaagagaaggacaagggccaatggagccccctgaaggtcagcgcccaagacaaggacgccccgccactgccgcccctggttgtcttcaaccaccttactcctccaccgcccgatgaacacctggatgaagacaagcatttcgtggtggctctgtatgactacaccgctatgaatgatcgggacctgcagatgctgaagggggagaagctacaggtcctgaagggaactggagactggtggctggccaggtcactcgtcacaggaagagaaggctatgtgcccagtaactttgtggcccgagtggagagcctggaaatggaaaggtggttctttagatcacagggtcggaaggaggctgagaggcagcttcttgctccaatcaacaaggccggctcctttcttatcagagagagtgaaaccaacaaaggtgccttctccctgtctgtgaaggatgtcaccacccagggggagctgatcaagcactataagatccgctgcctggatgaagggggctactacatctccccccggatcaccttcccctcgctccaggccctggtgcagcactattctaagaagggggatggtctatgccagaggctgaccctgccctgtgtgcgcccggccccgcagaatccctgggcccaggatgaatgggagatcccccggcagtctctcaggctggtcaggaaactcgggtctggacaattcggcgaagtctggatgggttactacaaaaacaacatgaaggtggccattaagacgctgaaggagggaaccatgtctccagaagcctttctgggtgaggccaacgtgatgaaggctctgcagcacgagcggctggtccgactctacgcagtggtcaccaaggagcccatctacattgtcaccgagtacatggccagaggatgcctgctggatttcctgaagacagatgaagggagcagattgtcactcccaaggctgattgacatgtcggcgcagattgctgaagggatggcatacattgagcgcatgaattccatccaccgcgacctgcgggcggccaacatcctggtgtctgaggccttgtgctgcaaaattgctgattttggcttggctcgaatcatcgacagtgaatacacggcccaagagggggccaagttccccatcaagtggacagccccggaagccatccacttcggggtcttcaccatcaaagcagacgtgtggtcgtttggagtcctcctgatggaagttgtcacttatgggcgggtgccatacccagggatgagcaaccccgaggtcatccgcaacctggagcgcggctaccgcatgccgcgccccgacacctgcccgcccgagctgtaccgcggcgtcatcgccgagtgctggcgcagccggcccgaggagcggcccaccttcgagttcctgcagtcggtgctggaggacttctacacggccaccgagcggcagtacgagctgcagccctagccggccgcgcccgcctgcgccccgtgcccacctctgcgcggacgaccccgacttccgtgccatcccagacgggccgcgaaggcggggtgtcgcctgtgcccttttctcagacccggaatccagtgggcagaggcagcttcgcagggggtccccggacggactccttcaccgactgcacccccgggcgagttacgcggcctctctgtgccgcttcatttgtagagggctgtaacagtgacctcgcacggtcatccggagtactaagccccagtaaggtgttcaggactggtaagcgactgtcatcaagtaaggcccccgtgctgggcaccccccgtgctggccgcgtccccgcctctgcgccctgcgtggaccccgccctgccccgctacagaagccagactgggtcccgcggacgccagcaggggcagccccagcctaggctgcgctccagcactgcggggcttttctgcaataaagtcacgagcgttcgagctgt

SEQ ID NO: 111654 - DNA, 2017 bp, Homo sapiens
  Payload ID: 1864
  Gene Symbol: BLK
  Gene Name: BLK proto-oncogene, Src family tyrosine kinase
  ENST ID: ENST00000529894
  CDS Start-End: 293-1597
ccgggggtgctgccacctctgtctgctgccggcagaaagccacaagccatgaaaactgattgagatgagaagaattcatctgggactggcttttgctttaggatggtgttggaagttgctcgttgtcgctaggagcctgctccactgtaagggtgtcaggatctgaagagctatggtgaaacaccactgaagcattgccaaggttgtcttcaaccaccttactcctccaccgcccgatgaacacctggatgaagacaagcatttcgtggtggctctgtatgactacaccgctatgaatgatcgggacctgcagatgctgaagggggagaagctacaggtcctgaagggaactggagactggtggctggccaggtcactcgtcacaggaagagaaggctatgtgcccagtaactttgtggcccgagtggagagcctggaaatggaaaggtggttctttagatcacagggtcggaaggaggctgagaggcagcttcttgctccaatcaacaaggccggctcctttcttatcagagagagtgaaaccaacaaaggtgccttctccctgtctgtgaaggatgtcaccacccagggggagctgatcaagcactataagatccgctgcctggatgaagggggctactacatctccccccggatcaccttcccctcgctccaggccctggtgcagcactattctaagaagggggatggtctatgccagaggctgaccctgccctgtgtgcgcccggccccgcagaatccctgggcccaggatgaatgggagatcccccggcagtctctcaggctggtcaggaaactcgggtctggacaattcggcgaagtctggatgggttactacaaaaacaacatgaaggtggccattaagacgctgaaggagggaaccatgtctccagaagcctttctgggtgaggccaacgtgatgaaggctctgcagcacgagcggctggtccgactctacgcagtggtcaccaaggagcccatctacattgtcaccgagtacatggccagaggatgcctgctggatttcctgaagacagatgaagggagcagattgtcactcccaaggctgattgacatgtcggcgcagattgctgaagggatggcatacattgagcgcatgaattccatccaccgcgacctgcgggcggccaacatcctggtgtctgaggccttgtgctgcaaaattgctgattttggcttggctcgaatcatcgacagtgaatacacggcccaagagggggccaagttccccatcaagtggacagccccggaagccatccacttcggggtcttcaccatcaaagcagacgtgtggtcgtttggagtcctcctgatggaagttgtcacttatgggcgggtgccatacccagggatgagcaaccccgaggtcatccgcaacctggagcgcggctaccgcatgccgcgccccgacacctgcccgcccgagctgtaccgcggcgtcatcgccgagtgctggcgcagccggcccgaggagcggcccaccttcgagttcctgcagtcggtgctggaggacttctacacggccaccgagcggcagtacgagctgcagccctagccggccgcgcccgcctgcgccccgtgcccacctctgcgcggacgaccccgacttccgtgccatcccagacgggccgcgaaggcggggtgtcgcctgtgcccttttctcagacccggaatccagtgggcagaggcagcttcgcagggggtccccggacggactccttcaccgactgcacccccgggcgagttacgcggcctctctgtgccgcttcatttgtagagggctgtaacagtgacctcgcacggtcatccggagtactaagccccagtaaggtgttcaggactggtaagcgactgtcatcaagtaaggcccccgtgctgggcaccccccgtgctggccgcgtccccgcctctgcgccctgcgtggaccccgccctgccccgctacagaagccagactgggtcccgcggacgccagc

SEQ ID NO: 111655 - DNA, 549 bp, Homo sapiens
  Payload ID: 1865
  Gene Symbol: BORCS5
  Gene Name: BLOC-1 related complex subunit 5
  Uniprot ID: Q969J3
  ENST ID: ENST00000298571
  CDS Start-End: 35-481
ccgccgttcttctgctgccaccgctgtcggcaccatgggcagtgagcagagctccgaggccgagagccgacccaacgatctgaactcctcagggctattgagtggccagacttccccaacaaatgccaaattggagaaactggactctcagcaggtgttgcagctctgcctccgatatcaagatcacctgcatcagtgtgcagaggccgttgcttttgaccagaatgctttggttaaacgaatcaaagagatggatctgtctgtagaaactctgttcagcttcatgcaggagcgccagaaaagatacgccaagtatgccgagcagatccagaaagtgaacgagatgtccgccatcctccgccgcatacagatgggcatcgaccagactgtgcccctgctggacaggctcaacagcatgctgcccgagggcgagcggctggagcccttcagcatgaagcccgaccgcgagctcaggctgtagctgctgcccggcctgcctggggctgggagccccagacaccgacaccctgaggacgtgtggagctaagg

SEQ ID NO: 111656 - DNA, 4840 bp, Homo sapiens
  Payload ID: 1865
  Gene Symbol: BORCS5
  Gene Name: BLOC-1 related complex subunit 5
  Uniprot ID: Q969J3
  ENST ID: ENST00000314565
  CDS Start-End: 332-922
gagtgaaagcggcgccgcccgccggccgcaggtgcggcaaagccagtgtcatctgccggttctcttagggctcccggaaagaaggagggctagccgcgtgcgttcgcgccgcgcctccttgcgtttctgttccccaaatagggcctctccttctcccgccgcccaggcccctgcgtgggctggacgcgtcagccccacacattagcctcgctgcggcgcccagactctgctttgcctccccgtcccggtccctggcccctgccctgtcgcccgccgccggagcggtgaccgcccggcccgccgttcttctgctgccaccgctgtcggcaccatgggcagtgagcagagctccgaggccgagagccgacccaacgatctgaactcctcagtgactccttcaccagccaagcatagagccaagatggatgatattgtggttgtagctcagggctcccaggcctcacggaacgtcagcaacgatcccgatgtcatcaagttgcaagagattccaaccttccagccccttttgaaagggctattgagtggccagacttccccaacaaatgccaaattggagaaactggactctcagcaggtgttgcagctctgcctccgatatcaagatcacctgcatcagtgtgcagaggccgttgcttttgaccagaatgctttggttaaacgaatcaaagagatggatctgtctgtagaaactctgttcagcttcatgcaggagcgccagaaaagatacgccaagtatgccgagcagatccagaaagtgaacgagatgtccgccatcctccgccgcatacagatgggcatcgaccagactgtgcccctgctggacaggctcaacagcatgctgcccgagggcgagcggctggagcccttcagcatgaagcccgaccgcgagctcaggctgtagctgctgcccggcctgcctggggctgggagccccagacaccgacaccctgaggacgtgtggagctaaggtcatatcatctgaccaggtctggaggctggcgggaggctccctgaaagtgggtgcgaaggagtccggctggcatgaaaatctgactttgcccagctcttttccttgatgcagtttcccggtgtggaaggaacctaaccagttctcggtgataactgaagctggaacgtgtgaattattaggaattctttgaagaactctgcattgagaattatttttatttagtttttttttttttttaattgagagtatatagtccagtccaggtaccggaataaaaatatggagacaaggggaaaatattttacgaagctctgtgttctcaacgccctcatgaacttttcagtaggctgtctggtttatgtgtggtcaacttgaaaaactaattgaatctaggtctctgtattgttcctgtttctaccctgactgtttccgtcacaccaagcccttatctggggcgcgtcttcctgcccaggtggaacactggcattttgttgactgtcaggttaggtgtcccttagtcgtcatcagaagctgaagccttcctttccacaccctcatcagattcatctccactgataaccggtttccttgatgcagacatagtttagctttctttgactgcagagatgtctcattccacagacatttcttgaacccatttgatgtgtccaatattgtgccagggatacaaatatggccgtatagcctcaggccttcatttctgaaaagaaaaaagctcaaaaagctgctgaatttctctgggagtttaggaaaggaagttatttgagtaacaacaaaagtgcttagtgtcgtactttacacatcataggtgttctaatggaagcaaggactggagaagcaaagagtggaatgtgaggagcagacctaggcagacaccttgagactaaaagtcagagctgaagggagtcgctggggccaggacggcatgcaggcctgtaccctgttccctaagttcctgcaagcgtcgggaggtgtgttttcagataccagaaagagccttcagtagattcacaagattaaaattgatgcgcttaatttaatgtatcttggctaaacttgatctgattctaatcttggtttgagacagggtcttgtgctgttgctcaggctggagtgcagtggcgcaatcatagcacactgactcctcaaactcccgggctccggggatcctcacgcctcagactcctgagtagctgggattacaggtgtgtgccaccaaatccagctaattaaaaaaaattaattaattttacattttcaaattcaaaagaataatacaatgaatattcatatttctttcacctagattgacaaaaagtggtatatttaagacatcaccatcattgtctttcttctggagtatacagaacctggttctgaacacagggatatgtttgtagcttcgaggaatgaagggctgtttacagagctacaaaaatagcttaggtgccattatcctcactgcacttaatacaggtgacacatgaaagcacagagtgggtggcagttcaagcctgcgagggccgagcctttccactgctgcagctgttagtggctggcacagggcaggatggcagacctagtgcagcacaaacaaaccacgcagtcagccagctctccagccaactgtgtctacttctaaagtagaagttagacaaaacatggggttcacttagactggggtcctgagtaggtgataggctacttattactgggtggaagcggagaagtatggcagaagaacaataggcaaattcaatactcccggaaagaattctagttagtttaatattttgatggcatgttgtggtttctgcagtgtcgtgaacttggctaaactgaactgtgttcccagaattcccttccttgtttgtttctctggtgagggttggccacgagagagatttgcatgaggtttggaagtggaagtagagcaacagccatgtgtattcactggaagtggatgtaggtcaggccctgttccatcacgtgcacgttaccatggatctcctgcacttgtggtgtgggcagccgctgggcccacggctcctcccactcccgcagaactctgcctttggcttttccagaccctgggccgggtatgagaaccagcttcttggtctgcagccacaaggatgaaggtttggggatgagagaccagcacgggctctgatgagagacaggtgcaggtcccagcttgtggcttgcaggtctcagtcgtacttgctctccctcaccatcctttccaaccgcctggcctgtggtctggtgaagaagaaacagccgaaccgagactttcaccagcccctctaattgctcaaaccgctttcacaatcctctctttctacatcattcctagtggttcttttctgatggaacctctgactggtaacatggcattaccagtcctttccctctcatgttttgctatttcctgatggaacctgggagtctgagtgatttgtatttcaagaagcagttatgctggatctctttgttggttaataccccatgacctatctggccgttatgggatatttcagggataggagttgtgaaagagcccttggctggacgtttctagccttaatctttggcaagccatttcatttccctgagcctcagtttccgccttcctacagcgtgagcaggtctgggtgggctctcaagcccctttcagctctaagattccaagtctgtgattccgatacatcttgactacaatgagcgtgtttaccttttgtctctgagcagtggccctgggtcttggtagtgactaaattccgagctcccaaggtgcagctgcttttcttccttttaattataaattagctgttcattggctgcttctttctagagcctgttttgcttatcttgcaatctgttcatttctgttgatgaacacagtcaaataggcctctatgtgcagtctcctggtttccctggtcaaagtggaaggttggtagaaactggccttcatgtctttgtttccctcaaagttttattcttagtaacgctatatatggttttatagaccacacatatatagtttcctgtgtcttagatgataacatccttaaaatatgaaatatattttgaacctagatacctacccagtattctctgcacagagtaaacatttcattaaatgagtttcaaggactccataccctgatataggagtacattcaagaaatgagtttaggccgggcgcggtggctcacacctgtaatcccagcactttgggaggccgagacgagtggatcacctgaggtcaggagttccagaccagcctgaccaacatggtgaaaccccatctctactaaaaaaaatacagaaattacccgggcatggtggctggtgcctgtaatccccgctacttgggaggccaaggtgggagaatcgcttgaacctgggaggcggaggttgcagtgagccaagttcgtgccattgcactctggcctgggtaacaagagtgaaactccgtttagaaatgagtttagtctgggagaatctgctttttgagtaaaaaagtttgattttatgtatgtgtgcgtctgtatatatgtttctgtatcctgagtatttctttgcggcttcttcagttatgaaagaggttggtactgttacccttacgttataggtattacaaactcggttttacaaggttacataaactaatggccctggggcgaatgacgtatgccacttttgtgttgatttgtagaacttacttagctttggcatttcccctagtaattcccaaggcaaaaccaggaattgtcagagacgtgaccagacatgtattaaaattctagtgcaattggg

SEQ ID NO: 111657 - DNA, 580 bp, Homo sapiens
  Payload ID: 1865
  Gene Symbol: BORCS5
  Gene Name: BLOC-1 related complex subunit 5
  ENST ID: ENST00000542728
  CDS Start-End: 40-573
tctgcgtcccggaaggagcgagcttgcggagcgtgaaccatgactccttcaccagccaagcatagagccaagatggatgatattgtggttgtagctcagggctcccaggcctcacggaacgtcagcaacgatcccgatgtcatcaagttgcaagagattccaaccttccagccccttttgaaagggctattgagtggccagacttccccaacaaatgccaaattggagaaactggactctcagcaggtgttgcagctctgcctccgatatcaagatcacctgcatcagtgtgcagaggccgttgcttttgaccagaatgctttggttaaacgaatcaaagagatggatctgtctgtagaaactctgttcagcttcatgcaggagcgccagaaaagatacgccaagtatgccgagcagatccagaaagtgaacgagatgtccgccatcctccgccgcatacagatgggcatcgaccagactgtgcccctgctggacaggctcaacagcatgctgcccgagggcgagcggctggagcccttcagcatgaagcccgaccgcgagctcaggctgtagctgctgc

SEQ ID NO: 111658 - DNA, 580 bp, Homo sapiens; identical to SEQ ID NO: 111657
  Payload ID: 1865
  Gene Symbol: BORCS5
  Gene Name: BLOC-1 related complex subunit 5
  ENST ID: ENST00000625206
  CDS Start-End: 40-573

SEQ ID NO: 111659 - DNA, 4840 bp, Homo sapiens; identical to SEQ ID NO: 111656
  Payload ID: 1865
  Gene Symbol: BORCS5
  Gene Name: BLOC-1 related complex subunit 5
  ENST ID: ENST00000627374
  CDS Start-End: 332-922

SEQ ID NO: 111660 - DNA, 549 bp, Homo sapiens; identical to SEQ ID NO: 111655
  Payload ID: 1865
  Gene Symbol: BORCS5
  Gene Name: BLOC-1 related complex subunit 5
  ENST ID: ENST00000627461
  CDS Start-End: 35-481

SEQ ID NO: 111661 - DNA, 2575 bp, Homo sapiens
  Payload ID: 1866
  Gene Symbol: BORCS6
  Gene Name: BLOC-1 related complex subunit 6
  Uniprot ID: Q96GS4
  ENST ID: ENST00000389017
  CDS Start-End: 768-1841
tctcaatcataacactttatttcctgtatagcacatatcaaaatttgtgatcatttcatttgttgaatattttacctcgtggcaaaatcacacgccatcctccaaggggcgagacccctcagtgtgaaaggggcaagagacacagaacaagagtgacaaacgcataggaaagcccagaggccgctgccttgaccacagtgggtcgctctgagcagttcagtggttaggtctcttaaccaagaaagatagagcaaaccattcatgctcatgctggacttctggtttccttctttttagtcaactaggttcaaccctgatggtccaagaaggatatgccattttcatcctaagaacctctctaggaaccccaagtgggctccccacttggtatttttgctaagcaatcactgttggggggggtacaattacaggcagaaaggatctgagccccacccctcgggactcaggaatttgaggaccttggtctttaagatctgccccatcagctttcagaaagggcggggcgacgggagcagctgtcacctccttctctccaccctgccggcgttcacgtgtgttccgctgtgcagtaacagctcttcttccgggacttcctggtcgccgcgaccaatcaaaatgcttttcctgtccttaccattgtcagccgctgccaatcggctcgcctctaccaacgccccttaaaggcgcagccactgcctccggagccggggcgaaccaattcctccgttgcggcccccacctgcagtatggagtcgtctcgggggcggcccgggcccgagacggaccttctggctgtagcggaacatcaggccctagtctttggcggcgggccgggccgaacgtcctctgagccgcccgcaggcctccgggtgtccggggaggaagagaccgagaacgttgggggcgcgaaccgccaccccaggacgtccccgaagacgtcaagctgcggcgtcgtccaccggccggaacgggaggctctggagaacgagcccggccctcaagggacgctgtctggggccgggagccgcaggggggcgccgggtgcagagcacgaaccttccctgtcctcccggcacaagaacccggcgccgcccgagggcaagccctcctccgggagggactgccgtcgagggggaccaggcggcgggatggatgttgagcagcaggaggaggaagacaacgacgaggaggcggccgcgggcagcagagccggccgctcgttctccagccgtcttcaggacagccgcagcctggacgggctgagcgaggcgtgcggtggcgccgggtcctcagggagtgccgagtccggcgcgggcggcggacgccgcgccaccatctccagtcccctggagctcgaaggcacagtgagccgccacggcgaccttacccactttgtcgccaacaacctgcaactcaagatccgtctgagcggcgcgcctccacccccgccttctgcccctgcgcggccctgcccagcgcctgcacccacacccacaccggccattcccccaatcgaccccgaggtgctgcgggatctggagcggttgagtcgggagctgggaggccgggtggaccgtctgcttcgcggtctgggtggcgcggtgcaggagctgacggcgctgagcgtgggttgcatccagacctaccgcgatgctgtggactccttaggtgaagccgtggacatgagcatcaagggcatgtacaccctgctggcgcgctgcgaggagctggagcgggctctgcagccggttcaggggctggcgcgccaagtccgggatatccgacgtactctggaggtgttggaggccctgtgcaagtgaccaggaggacaggagaggccggtcctggccagggcagggcccagcaggaccctaaggactcttcagggagtcctggtgggaagtgcccactgaggggaggcctgtgtgttggaggctcttccagatgcgttcagctggcccgtgcccactcgctgggccttaggctggtgtatgtggggaagttctaacggctctcctggtgggaagggatgttgctctgcttgtattcagttggccatctgtagctaccctgttcttcccaactctcctccctagctagagcaccagccctgggaacacggggctttaggtctgcttgaaggtgaggacgtgactcccacatgtaatcaggagaaagggacagaggaagccccagcccccactgtggctatcctgactccagtggccacatctcaggtgccaggggctgtgggagcttgtgccgtccttggccaaacaccccgcaggcaaagatgcacccctgctgatggagagccttctgcttctgccctctggccctctaccataccacttccccagccagaaccggcgtgcagctaggaggaatgggttgcacggcggagggggtgaggtgggaggcgtctcactgctctcagggttcaggtagaatgttgctggttttgaagctcacctgttgtggagtgttctaatcagttttggctttctgagtttttgtggaattaaagtgctgctgctgcgaaggctgaggctga

SEQ ID NO: 111662 - DNA, 2422 bp, Homo sapiens
  Payload ID: 1867
  Gene Symbol: BORCS7
  Gene Name: BLOC-1 related complex subunit 7
  Uniprot ID: Q96B45
  ENST ID: ENST00000339834
  CDS Start-End: 65-385
gctttgcttgtcttttggccccggcgactcaccatcgtcagtgcgcaaccgttcgctaactgaaatgatggcgactggaacgccagagtctcaagcgcggttcggtcagtccgtgaaggggcttctcacggagaaggtgaccacctgtggtactgacgtaatcgcgctcaccaagcaggtgctgaaaggctcccggagctccgagctgctaggtcaggcagctcgaaacatggtactccaggaagatgccatcttgcactcagaagatagtttaaggaagatggcaataataacaacacatcttcaataccagcaagaagctattcagaagaatgttgaacagtcatcggatctacaggaccagttgaatcatctgttgaaatagaatgacatgtaagagtgctgtaggactcctttgcctaatgctgaggagtaaataccttacacagctgtcctctgggtttggttttctattttcttctccaaaagttaagttagaaaagttctgtgttagggccgggcgcggtagctcacgcctgtaatcccagcactttgggaggccgaggcgggtggatcacgaggtcaggagttcgagaccagcctggccaagatggtgaaaccccgtctctactaaaaatacaaagaattagctgggcgtggtggcgggcgcctgtaatcccagctactcgggaagctgaggcaagagaatcgcttgaacccaggaggtggaggttgcagtgagccaagatcgcgccactgcactccagcctgggcgacagagtgagattccatctccaaaaaaaaaaaaagaaaaaaaaaagaaaagttctgtgttgatgtacagtttctcctaagaagaagcgaggtggttgaattttggaagcacttcttgaatcggattaacccatgctcttattgaattttttcatctgctctgtttagtttgatattaaagcaaaattaagaggtcttagtttttcctatagaacttttaatatgtcaaaagctatattgtctaaatttcagtacttaagcaaatactgagtagtgttttaaattcagaaatagagcttctattatgaacacatgagaatgatttttttctcttaatcattattaaggaaatattttaatttcatggtcatataatggtgataagtaatacctgattgtttccttttctgttctagtaactcagaggagatacgtgttttatttgtgatagcaaattcctaaatgaacattaggcaagtggtatcattatcaggccagctgcagcctcttgccttgacctgcattcctagaatttctttgttgctgtaattcttgattaagtgaccttgactttcattttgtaattttgctaatcatcagcaaattcacttgcatgacgttactgccaaatatgaaggcagttgaattattatgagtgattgtggcagaggtttgtgccatggtgaaaactttgatgtttgtctgtgttcattggatccatctttttaaatgacattaccatgagtctgttgtcaaacctaaatatctttgtttgaatttaaaatgggactctatattgttgtagttcaggtcttcattgactaagagattgagagaaatctgacataagaaaatattgttttcactgcaggaataaagaggaagtaacagtgaatccaatatagttcatattgttattgtccaatcatcaagttaactaagcattatcagattacgtttatttctcatacatatggatattaacttaaggtaaaaaagctggatgtgaaggatctgaaaaggcattaatttatgtactaattctataaacatgtattaataattgcagtattattaaatacagatggactcaatgtacctttgaaaagaccactaatttagaaaacaaagctaagtgcagtcattacaagaagcaaagaaatacttaagttagaaaaaaattaaaatgaagggatggtctaagttttcttcatgctggaacaaatgttaaagaagcagtgattgcttacaatgtatgtgataaaataatacctttcacaatcaaaattttaatagtaaatataagataaaatttatattaaataatgaaaacgtatttgtactgaatttagtcactagagaacatcgtaacaaaatacatgaaacaaaagtagccagaaatgttagaacaggtggaaatgtatacattatttgatggtttgtttttttatggaaataaacaacatacatagaattaaatggtgatcaaaaacatggaaaaaatacttcactaaataacgtctaagttgtagaggttgtgccggaagataatatttttaaaataacaaatgttcaaatgccataaaagaaaatttgtgtgataataccaaagcagtactataagaaaataagcatgctttaaatccct

SEQ ID NO: 111663 - DNA, 838 bp, Homo sapiens
  Payload ID: 1867
  Gene Symbol: BORCS7
  Gene Name: BLOC-1 related complex subunit 7
  Uniprot ID: Q96B45
  ENST ID: ENST00000369883
  CDS Start-End: 26-346
agtgcgcaaccgttcgctaactgaaatgatggcgactggaacgccagagtctcaagcgcggttcggtcagtccgtgaaggggcttctcacggagaaggtgaccacctgtggtactgacgtaatcgcgctcaccaagcaggtgctgaaaggctcccggagctccgagctgctaggtcaggcagctcgaaacatggtactccaggaagatgccatcttgcactcagaagatagtttaaggaagatggcaataataacaacacatcttcaataccagcaagaagctattcagaagaatgttgaacagtcatcggatctacaggaccagttgaatcatctgttgaaatagaatgacattaactcagaggagatacgtgttttatttgtgatagcaaattcctaaatgaacattaggcaagtggtatcattatcaggccagctgcagcctcttgccttgacctgcattcctagaatttctttgttgctgtaattcttgattaagtgaccttgactttcattttgtaattttgctaatcatcagcaaattcacttgcatgacgttactgccaaatatgaaggcagttgaattattatgagtgattgtggcagaggtttgtgccatggtgaaaactttgatgtttgtctgtgttcattggatccatctttttaaatgacattaccatgagtctgttgtcaaacctaaatatctttgtttgaatttaaaatgggactctatattgttgtagttcaggtcttcattgactaagagattgagagaaatctgacataagaaaatattgttttcactgcaggaataaagaggaagtaacagtgaatccaa

SEQ ID NO: 111664 - DNA, 1489 bp, Homo sapiens
  Payload ID: 1868
  Gene Symbol: BORCS8
  Gene Name: BLOC-1 related complex subunit 8
  Uniprot ID: Q96FH0
  ENST ID: ENST00000477565
  CDS Start-End: 473-802
acgcggggcgtctggaacttaaaggggcagcgtaccttggccgtcccgttccacaacaaggtcccttctgcggtctcaaaggcttataagcaagggcgggggcagagggctaaagaagggagtttttgcggcccgagtgggtaatgcgtggaggactcccccaactcgtctctcaaggaaaagggggttcagaaagggagagagttcttccccctctcctgcctgggtgtcgctccaccagcctcctggccgtcgcgccccctcctcactgcgccacccccgggtgtgcctccttccctgcgtctcacacagcccctttcttgtccgcaaagactgaggagcggggagggcgggccctctgacaccggaacaggagccgtgcggcgtccggtttcagcagggaaggcttaggcgggcgtcccaacctccgggcttccggtgccgtttcccggttcgctcggccgcggtcgctatggaggagccggagatgcagctcaaggggaagaaagtcacggacaagttcactgagagcgtctacgtcctggccaacgagccatccgtggccctgtaccggctgcaggagcatgtgcgtcgctccctccccgagctggcccagcacaaggcagacatgcagcgttgggaggagcagagccagggagccatctacactgtggagtacgcctgcagcgccgtgaagaacctggtggacagcagcgtctacttccgcagcgtggagggtctgctcaaacaggccatcagcatccgggaccatatgaatgccagtgcccagggccacaggtagctcctgggaccgcccgcccccactgccactcccagctgcaaggaccgtctctcagctgcgctgggaaccgctgcttctcgcttattagaaaactgtctctttccttttgtcctggtgtctggtgacctcctcttgtcctgtggcatctataacctgagttcagtcacttaataccgaggtcctgcgctctgctgtgtgcctggccctgggctgggcactggggacatagcagtgaccgagacagacaggctcacaaggagacatacgacaaccaggtaaacatggcagacaagagcatgtcagatgcgctgtgaagaacactgcggggcccctcctaggaggtggcatgagttacatgcagacagagacgatccgggggcagacggagttccatgtggggcagtggtgagggcagacgctctggggctgggatccctgggagtgttcgagaagcaccgagaaggcttctgtggctggagccggccagctgggggagatggggccagggagatggcaggggcctctccctgtcccaggacccagagccaagggaggctttaagcccaggaccaggggtctgaaaacgaaaagcactcacagtccttgaacattggaaagagaatttttgaagagtagcccttctttttgtttttgttggcattctaagttaataaacacgcttatgaa

SEQ ID NO: 111665 - DNA, 1429 bp, Homo sapiens
  Payload ID: 1868
  Gene Symbol: BORCS8
  Gene Name: BLOC-1 related complex subunit 8
  Uniprot ID: Q96FH0
  ENST ID: ENST00000462790
  CDS Start-End: 473-832
acgcggggcgtctggaacttaaaggggcagcgtaccttggccgtcccgttccacaacaaggtcccttctgcggtctcaaaggcttataagcaagggcgggggcagagggctaaagaagggagtttttgcggcccgagtgggtaatgcgtggaggactcccccaactcgtctctcaaggaaaagggggttcagaaagggagagagttcttccccctctcctgcctgggtgtcgctccaccagcctcctggccgtcgcgccccctcctcactgcgccacccccgggtgtgcctccttccctgcgtctcacacagcccctttcttgtccgcaaagactgaggagcggggagggcgggccctctgacaccggaacaggagccgtgcggcgtccggtttcagcagggaaggcttaggcgggcgtcccaacctccgggcttccggtgccgtttcccggttcgctcggccgcggtcgctatggaggagccggagatgcagctcaaggggaagaaagtcacggacaagttcactgagagcgtctacgtcctggccaacgagccatccgtggccctgtaccggctgcaggagcatgtgcgtcgctccctccccgagctggcccagcacaaggcagacatgcagcgttgggaggagcagagccagggagccatctacactgtggagtacgcctgcagcgccgtgaagaacctggtggacagcagcgtctacttccgcagcgtggagggtctgctcaaacaggccatcagcatccgggaccatatgaatgccagtgcccagggccacagcccggaggaaccacccccgccctcctcagcctgatcctggaagagactcggggccccccagcctccgccaacccagagacggggtttcaccatgttggctaggctggtctcaaactcctgagctcgtgatcctcccgcctcagcctcccaaagtgctgggattataggtgtgagccaccgcacccagccttggttctccctttcttcatctggataaggaaggctggactgcaccttctctacaggctgagttggacattcgcagatctaccctcccaacctgcattctgcctcaagcagcaacgcccaccccaggctcaggccacatggagaagccacccctagttccagtggtggatgtggcacctcggcctggccaatcagagctcccttgtcctaggttcctagtgattggtttgagatggacacgtgacccaatgagcgacctttcctgggagttctaccaggagcatcaggaaggttgagctgggtgtatgggaaccaggccggggcgaggggttccggggggacctgagaacattgtgtggagccctggatccaactgtacctgacactagccaatttcatttcttcagtttcatggacccctaaattatgatttttgccaaaa

SEQ ID NO: 111666 - DNA, 457 bp, Homo sapiens
  Payload ID: 1868
  Gene Symbol: BORCS8
  Gene Name: BLOC-1 related complex subunit 8
  ENST ID: ENST00000588208
  CDS Start-End: 1-210
gcagacatgcagcgttgggaggagcagagccagggagccatctacactgtggagtacgcctgcagcgccgtgaagaacctggtggacagcagcgtctacttccgcagcgtggagggtctgctcaaacaggccatcagcatccgggaccatatgaatgccagtgcccagggccacagcccggaggaaccacccccgccctcctcagcctgatcctggaagagactcggggccccccagcctccgccaacccaggttcctagtgattggtttgagatggacacgtgacccaatgagcgacctttcctgggagttctaccaggagcatcaggaaggttgagctgggtgtatgggaaccaggccggggcgaggggttccggggggacctgagaacattgtgtggagccctggatccaactgtacctgacactagccaatttcatttcttcagtttcatgga

SEQ ID NO: 111667 - DNA, 3149 bp, Homo sapiens
  Payload ID: 1868
  Gene Symbol: BORCS8
  Gene Name: BLOC-1 related complex subunit 8
  Uniprot ID: Q96FH0
  ENST ID: ENST00000488252
  CDS Start-End: 296-655
gaaaagggggttcagaaagggagagagttcttccccctctcctgcctgggtgtcgctccaccagcctcctggccgtcgcgccccctcctcactgcgccacccccgggtgtgcctccttccctgcgtctcacacagcccctttcttgtccgcaaagactgaggagcggggagggcgggccctctgacaccggaacaggagccgtgcggcgtccggtttcagcagggaaggcttaggcgggcgtcccaacctccgggcttccggtgccgtttcccggttcgctcggccgcggtcgctatggaggagccggagatgcagctcaaggggaagaaagtcacggacaagttcactgagagcgtctacgtcctggccaacgagccatccgtggccctgtaccggctgcaggagcatgtgcgtcgctccctccccgagctggcccagcacaaggcagacatgcagcgttgggaggagcagagccagggagccatctacactgtggagtacgcctgcagcgccgtgaagaacctggtggacagcagcgtctacttccgcagcgtggagggtctgctcaaacaggccatcagcatccgggaccatatgaatgccagtgcccagggccacagcccggaggaaccacccccgccctcctcagcctgatcctggaagagactcggggccccccagcctccgccaacccaggtcagtgccgagggtagccacgagcctctctctctgctctgaactaaccaacccgcccgcttggcagccaggcaggcacctgcttgtctaaccacttggggtttctcactgggcttgtgggatgatttcggaggtggcaggtggaggggtgtctgcaggtccagaatgttccaccctgctgctcagggaccatgtcagcccatctctcccactctctctccaccaccttcctctctcttttccaggccataggccccatgctagtcccagagatttccaccccccaagacagagaagggagcccacatttcctctatcctaccacgtgccagcagcctgctttacccgtgcacagtctctcaggcagagcccggcatgggcaattacccacctatctctgggacctccccacccatctactgcctacctgctgtgtgaccgagcaaattcactaccctctctggtctctgcatttactttctgtaaaggtggctctcaggtgaccaagagggtgcagggcacagtgacggatgtgctttggagcagtcggctattgctgcataacacagcatcccaaaacagtggtttacagccccagtaattaacctactcatgattctgcactttgggctgggctcagctgggtggttctgctgctgtccctggggctcacccatgtggtgctcatgggagctcagctgcacctgcatagtcagggggtcccttggccaggactgttggcagcaggggtcagattttcctcatggcctctccagcaggccagcccgggtttctcctggtggctgggagccaggagagcggctcccatgcagagtgctggtttcacatttgtgggtggcccatccgttgaggccagtcacgtggccaggcccaggaccagatgggagaggaccgcacaagtgcagcgtgagctgtgggaggtgtggctgaccacgcttagagagtgtggtgccaggaaagatctgatgtgtcaccattctatatctgtgatgggcagacgcaggcaggtcaaaggggccctggggacttaccgagcccctgcctattggccaggcactgtgattgtcctcggtgccatgtgccatggaagccctctcagaggtcgaggggaggcaggtggagacagagcctctgtaggcctttcaagctgtagccccagagcccagaggcagccgaattcatgtgtgcagtcagagagcacttagtgggcactgtagtcaatcagtgagcgcttactggacaccacaggcagcaagcatttactgagtacctctggcagttgatgcatacttcctgagtacctgttcatagcaggcttagctctggatgtggggtggtgaggaatcccacaggctgaggggtggcctgggagctttccagggggcctgaagcaggaggggctgcctgagtgggtcagcagcccagcccagtgccctacgcagccctgcccacacccccaacccagcctctgtctccccagtcccatcccccacaccctggtccctcctactttgtgcctcgaggacactgccccgctgccctcctcacttcccagcgtctgctgtcccctccgctgctgctgcccggcaggattgctctgtgtctcatccacgtttgtccctgcagagttcctcgcctctccctggaaccgccagcctcatgccgcatctcagaggctttttttttctctcttttttttttttttgagatggagtctcactctgtcacccaggctagagtgcggtggtgcgatctcggttcagtgtaacctctgcctgtcaggttcaagcgattatcccgcttcagcctcccgagtagctgggactacaggcgcacaccactacccccagctaattttttgtattttttgtagagacggggtttcaccatgttggctaggctggtctcaaactcctgagctcgtgatcctcccgcctcagcctcccaaagtgctgggattataggtgtgagccaccgcacccagccttggttctccctttcttcatctggataaggaaggctggactgcaccttctctacaggctgagttggacattcgcagatctaccctcccaacctgcattctgcctcaagcagcaacgcccaccccaggctcaggccacatggagaagccacccctagttccagtggtggatgtggcacctcggcctggccaatcagagctcccttgtcctaggttcctagtgattggtttgagatggacacgtgacccaatgagcgacctttcctgggagttctaccaggagcatcaggaaggttgagctgggtgtatgggaaccaggccggggcgaggggttccggggggacctgagaacattgtgtggagccctggatccaactgtacctgacactagccaatttcatttcttcagtttcatggacccctaaattatgatttttgccaaaatgg

SEQ ID NO: 111668 - DNA, 801 bp, Homo sapiens
  Payload ID: 1868
  Gene Symbol: BORCS8
  Gene Name: BLOC-1 related complex subunit 8
  ENST ID: ENST00000585679
  CDS Start-End: 149-337
ggttcgctcggccgcggtcgctatggaggagccggagatgcagctcaaggggaagaaagcgccgtgaagaacctggtggacagcagcgtctacttccgcagcgtggagggtctgctcaaacaggccatcagcatccgggaccatatgaatgccagtgcccagggccacagcccggaggaaccacccccgccctcctcagcctgatcctggaagagactcggggccccccagcctccgccaacccagagacggggtttcaccatgttggctaggctggtctcaaactcctgagctcgtgatcctcccgcctcagcctcccaaagtgctgggattataggtgtgagccaccgcacccagccttggttctccctttcttcatctggataaggaaggctggactgcaccttctctacaggctgagttggacattcgcagatctaccctcccaacctgcattctgcctcaagcagcaacgcccaccccaggctcaggccacatggagaagccacccctagttccagtggtggatgtggcacctcggcctggccaatcagagctcccttgtcctaggttcctagtgattggtttgagatggacacgtgacccaatgagcgacctttcctgggagttctaccaggagcatcaggaaggttgagctgggtgtatgggaaccaggccggggcgaggggttccggggggacctgagaacattgtgtggagccctggatccaactgtacctgacactagccaatttcatttcttcagtttcatggacccctaaattatgatttttgccaaaa

SEQ ID NO: 111669 - DNA, 3030 bp, Homo sapiens
  Payload ID: 1869
  Gene Symbol: BLOC1S5-TXNDC5
  Gene Name: BLOC1S5-TXNDC5 readthrough (NMD candidate)
  ENST ID: ENST00000439343
  CDS Start-End: 1-411
gggacagagacccctgtgggttgtgaggccgccccgggcggtggcagcaagaagagggactccctggggactgcgggctcagcgcacctcattatcaaggatcttggagaaattcattcaaggcttttggatcacagaccagttattcaaggtgaaactcgttattttgtaaaagaatttgaagaaaaacgtggtcttcgagaaatgcgagttcttgaaaatttgaagaacatgatccatgaaacaaatgaacatactcttcccaaatgtagagacacaatgcgggacagcctcagccaggttctccagagattgcaagcagctaatgactcagtctgtagactccaacagagggaacaggaacgaaaaaaggtgtggacactgccagcggctgcagccgacttggaatgacctgggagacaaatacaacagcatggaagatgccaaagtctatgtggctaaagtggactgcacggcccactccgacgtgtgctccgcccagggggtgcgaggataccccaccttaaagcttttcaagccaggccaagaagctgtgaagtaccagggtcctcgggacttccagacactggaaaactggatgctgcagacactgaacgaggagccagtgacaccagagccggaagtggaaccgcccagtgcccccgagctcaagcaagggctgtatgagctctcagcaagcaactttgagctgcacgttgcacaaggcgaccactttatcaagttcttcgctccgtggtgtggtcactgcaaagccctggctccaacctgggagcagctggctctgggccttgaacattccgaaactgtcaagattggcaaggttgattgtacacagcactatgaactctgctccggaaaccaggttcgtggctatcccactcttctctggttccgagatgggaaaaaggtggatcagtacaagggaaagcgggatttggagtcactgagggagtacgtggagtcgcagctgcagcgcacagagactggagcgacggagaccgtcacgccctcagaggccccggtgctggcagctgagcccgaggctgacaagggcactgtgttggcactcactgaaaataacttcgatgacaccattgcagaaggaataaccttcatcaagttttatgctccatggtgtggtcattgtaagactctggctcctacttgggaggaactctctaaaaaggaattccctggtctggcgggggtcaagatcgccgaagtagactgcactgctgaacggaatatctgcagcaagtattcggtacgaggctaccccacgttattgcttttccgaggagggaagaaagtcagtgagcacagtggaggcagagaccttgactcgttacaccgctttgtcctgagccaagcgaaagacgaactttaggaacacagttggaggtcacctctcctgcccagctcccgcaccctgcgtttaggagttcagtcccacagaggccactgggttcccagtggtggctgttcagaaagcagaacatactaagcgtgaggtatcttctttgtgtgtgtgttttccaagccaacacactctacagattctttattaagttaagtttctctaagtaaatgtgtaactcatggtcactgtgtaaacattttcagtggcgatatatcccctttgaccttctcttgatgaaatttacatggtttcctttgagactaaaatagcgttgagggaaatgaaattgctggactatttgtggctcctgagttgagtgattttggtgaaagaaagcacatccaaagcatagtttacctgcccacgagttctggaaaggtggccttgtggcagtattgacgttcctctgatcttaaggtcacagttgactcaatactgtgttggtccgtagcatggagcagattgaaatgcaaaaacccacacctctggaagataccttcacggccgctgctggagcttctgttgctgtgaatacttctctcagtgtgagaggttagccgtgatgaaagcagcgttacttctgaccgtgcctgagtaagagaatgctgatgccataactttatgtgtcgatacttgtcaaatcagttactgttcaggggatccttctgtttctcacggggtgaaacatgtctttagttcctcatgttaacacgaagccagagcccacatgaactgttggatgtcttccttagaaagggtaggcatggaaaattccacgaggctcattctcagtatctcattaactcattgaaagattccagttgtatttgtcacctggggtgacaagaccagacaggctttcccaggcctgggtatccagggaggctctgcagccctgctgaagggccctaactagagttctagagtttctgattctgtttctcagtagtccttttagaggcttgctatacttggtctgcttcaaggaggtcgaccttctaatgtatgaagaatgggatgcatttgatctcaagaccaaagacagatgtcagtgggctgctctggccctggtgtgcacggctgtggcagctgttgatgccagtgtcctctaactcatgctgtccttgtgattaaacacctctatctcccttgggaataagcacatacaggcttaagctctaagatagataggtgtttgtccttttaccatcgagctacttcccataataaccactttgcatccaacactcttcacccacctcccatacgcaaggggatgtggatacttggcccaaagtaactggtggtaggaatcttagaaacaagaccacttatactgtctgtctgaggcagaagataacagcagcatctcgaccagcctctgccttaaaggaaatctttattaatcacgtatggttcacagataattctttttttaaaaaaacccaacctcctagagaagcacaactgtcaagagtcttgtacacacaacttcagctttgcatcacgagtcttgtattccaagaaaatcaaagtggtacaatttgtttgtttacactatgatactttctaaataaactctttttttt

SEQ ID NO: 111670 - DNA, 2303 bp, Homo sapiens
  Payload ID: 1870
  Gene Symbol: BOP1
  Gene Name: block of proliferation 1
  Uniprot ID: Q14137
  ENST ID: ENST00000569669
  CDS Start-End: 1-2241
atggcgggttcgcggggtgcggggcgcacggcggcgccgagcgtgcggccggagaagcggcggtctgagcccgaactggagcctgagcccgagccggagccccccctcctctgcacctctcctctcagccacagcaccggcagcgattctggcgtctccgacagcgaggaaagtgtgttctcaggcctggaagattccggcagtgacagcagtgaggatgatgacgaaggcgacgaggagggagaggacggagcccttgatgacgagggccacagtgggattaaaaagaccactgaggagcaggtgcaggccagcactccttgcccgaggacagagatggcgagcgcccggattggggatgagtatgcggaggacagctctgatgaggaggacatccggaacacggtgggcaacgtgcccttggagtggtacgatgacttcccccacgtgggctacgacctggatggcaggcgcatctacaagcccctgcggacccgggatgagctggaccagttcctggacaagatggacgatcctgactactggcgcaccgtgcaggacccgatgacagggcgggacctgagactgacggatgagcaggtggccctggtgcggcggctgcagagtggccagtttggggatgtgggcttcaacccctatgagccggctgtcgacttcttcagcggggacgtcatgatccacccggtgaccaaccgcccggccgacaagcgcagcttcatcccctccctggtggagaaggagaaggtctctcgcatggtgcacgccatcaagatgggctggatccagcctcgccggccccgagaccccacccccagcttctatgacctgtgggcccaggaggaccccaacgccgtgctcgggcgccacaagatgcacgtacctgctcccaagctggccctgccaggccacgccgagtcgtacaacccaccccctgaatacctgctcagcgaggaggagcgcttggcgtgggaacagcaggagccaggcgagaggaagctgagctttttgccacgcaagttcccgagcctgcgggccgtgcctgcctacggacgcttcatccaggaacgcttcgagcgctgccttgacctgtacctgtgcccacggcagcgcaagatgagggtgaatgtagaccctgaggacctcatccccaagctgcctcggccgagggacctgcagcccttccccacgtgccaggccctggtctacaggggccacagtgaccttgtccggtgcctcagtgtctctcctgggggccagtggctggtttcaggctctgacgacggctccctgcggctctgggaggtggccactgcccgctgtgtgaggactgttcccgtggggggcgtggtgaagagtgtggcctggaaccccagccccgctgtctgcctggtggctgcagccgtggaggactcggtgctgctgctgaacccagctctgggggaccggctggtggcgggcagcacagatcagctgttgagcgccttcgtcccgcctgaggagccccccttgcagccggcccgctggctggaggcctcagaggaggagcgccaagtgggcctgcggctgcgcatctgccacgggaagccagtgacgcaggtgacctggcacgggcgtggggactacctggccgtggtgctggccacccaaggccacacccaggtgctgattcaccagctgagccgtcgccgcagccagagtccgttccgccgcagccacggacaggtgcagcgagtggccttccaccctgcccggcccttcctgttggtggcgtcccagcgcagcgtccgcctctaccacctgctgcgccaggagctcaccaagaagctgatgcccaactgcaagtgggtgtccagcctggcggtgcaccctgcaggtgacaacgtcatctgtgggagctacgatagcaagctggtgtggtttgacctggatctttccaccaagccatacaggatgctgagacaccacaagaaggctctgcgggctgtggccttccacccgcggtacccactctttgcgtcaggctcggacgacggcagtgtcatcgtctgccatggcatggtgtacaatgaccttctgcagaaccccttgctggtgcccgtcaaggtgctgaagggacacgtgctgacccgagatctgggagtgctggacgtcatcttccaccccacccagccgtgggtcttctcctcgggggcagacgggactgtccgcctcttcacctagctgttctgcctgcctggggctggggtggtcgtgctgaagtcaacagagcctttaccctgtgc

SEQ ID NO: 111671 - DNA, 651 bp, Homo sapiens
  Payload ID: 1870
  Gene Symbol: BOP1
  Gene Name: block of proliferation 1
  ENST ID: ENST00000569403
  CDS Start-End: 1-651
atggcgggttcgcggggtgcggggcgcacggcggcgccgagcgtgcggccggagaagcggcggtctgagcccgaactggagcctgagcccgagccggaggccagcactccttgcccgaggacagagatggcgagcgcccggattggggatgagtatgcggaggacagctctgatgaggaggacatccggaacacggtgggcaacgtgcccttggagtggtacgatgacttcccccacgtgggctacgacctggatggcaggcgcatctacaagcccctgcggacccgggatgagctggaccagttcctggacaagatggacgatcctgactactggcgcaccgtgcaggacccgatgacagggcgggacctgagactgacggatgagcaggtggccctggtgcggcggctgcagagtggccagtttggggatgtgggcttcaacccctatgagccggctgtcgacttcttcagcggggacgtcatgatccacccggtgaccaaccgcccggccgacaagcgcagcttcatcccctccctggtggagaaggagaaggtctctcgcatggtgcacgccatcaagatgggctggatccagcctcgccggccccgagaccccacccccagcttctatgacctgtgggcccaggag

SEQ ID NO: 111672 - DNA, 5567 bp, Homo sapiens
  Payload ID: 1871
  Gene Symbol: BVES
  Gene Name: blood vessel epicardial substance
  Uniprot ID: Q8NE79
  ENST ID: ENST00000314641
  CDS Start-End: 218-1300
gtcgcgatgcctattttagtcaaagcggctgcgggcttggggacccggcccgggcagcggagcttccggacccgccgacccgccgaggagcgcgcgtcgggctcccgtcgagcagctgagcccgtgtgccccgcgtcccgcgccccgaagctgccgctccgaactttggtcggcgctgcccaggctccccgccagggaccagccgggaattttcaaaatgaattatacagagtccagcccattgagagaatcaactgccataggttttacacctgagttagaaagtatcatacctgtgccttccaataagaccacttgtgaaaactggagagagatacatcatctggtttttcatgtagcaaatatttgttttgcagttgggttggttattccaactactcttcaccttcatatgatatttcttaggggaatgttaactctaggatgtaccctttatatcgtctgggccactctctaccgatgtgccttggatataatgatctggaactctgtgttcttgggtgtcaacattttgcatctgtcgtatcttttatacaagaagagaccggtaaagattgaaaaggaactcagtggcatgtaccggcgattgtttgaaccactccgtgtgcctccagatttgttcagaagactaactggacagttttgcatgatccaaaccttgaaaaagggccaaacttatgctgcagaggataaaacctcagttgatgaccgtctgagtattctcttgaagggaaaaatgaaggtctcctatcgaggacattttctgcataacatttacccctgtgcctttatagattctcctgaatttagatcaactcagatgcacaaaggtgaaaaattccaggtcaccattattgcagatgataactgcagatttttatgctggtcaagagaaagattaacatactttctggaatcagaacctttcttgtatgaaatctttaggtatcttattggaaaagacatcacaaataagctctactcattgaatgatcccaccttaaatgataaaaaagccaaaaagctggaacatcagctcagcctctgcacacagatctccatgttggaaatgaggaacagtatagccagctccagtgacagtgacgacggcttgcaccagtttcttcggggtacctccagcatgtcctctcttcatgtgtcatccccacaccagcgagcctctgccaagatgaaaccgatagaagaaggagcagaagatgatgatgacgtttttgaaccggcatctccaaatacattgaaagtccatcagctgccttgatcagagagagaattcaggttaccaagacggaaggtgtcttgaagagatcctgaaaaataccagcactttttcatggcttttaggttattctgctttagtgcatccagactggtggagtcggagggaggaagtgaggaagggtcaaggatggaagagttctttcacttaccctttttattagtcagcttttaaagtaattgttttactgagccttctgactatgccttgttctcttttgagatatatattttcacagtcttttctagatatattattgttttaacttaacaaatcttagcaatctctcaatgccttttcacttatttttttccaagttatgattctttttcctcacagtcttttttgttccatagcaatgaggttgtccatttgataattttaacaaacaatgtaagtttaaaattgaggctaaggtaacatgaaaaagcagggaatctcaaactttattccatatatacacacacacacacacacacacacacacacatacatacatacatatatatatatatatacatatatatacatacacacatacatataattttttttttttttgagatggagtttcactctgtcgcccaggctggagtgtagtggcacattctcagctcactgcaaactccacctcctggattcacgccactctcctgcctcagcctcccgagtagctgggactacaggcacctgccaccgcgcccagctaatttttttgtatttttagtagagatggggtttcactgtgttagccaggatggtctcgatctcctgacctcgtgatccgcccaccttggcctcccagagtgctgggattacaggcgtgagccaccgcgcccggcctattccatatttttttaatgggacattttagagaaaggtgtgatttgactggttttatttttctcccaggccagaagtattactccactagatcaccttacttaattgggcactgtgtggataacttgataatgaacaaaactctcagattttactcacattacccttgtattatgccatttataaactgctctgaaacctgaagctggaaagataacagatgggtttctgagcacggggttaacctccagctaaactcaacttccttgggatttggagtcaccatgttgtgcacactctggtgtgggaaacactttatgtagggtgggaggacaggggagttaaatggctgggcaggtgccacaggatgaggccactgaaagatctgcttcattctttgatctgtattctgaagttccagattgttcatctagaggcagagacatctcttttaaaaaagtgccagatgccccagtgccagagctgcgaacgtgaacacagtggaaggcagagggtttactacaggccaggccatggacaccccacccaggtactgcagtgagggccttgattccagagctctttttcctactgaaatcatggtttagtaaacagtggcatttggctggtgggaaatgcgtaactggtcagtgtgtctggccagcgtggctgtggcacttggccaggacgctccgttgaatgaagctcattgattggccatgctggtcatgtctattttgcttcatccactagaaccaactttgagtcagtctcctgttacgttaaatggctaagaaaagttccaaatgaagttgttctcaggtgaactgagccaaaagaagcaactcttaccatgaggtgatttctgttagaggagacatataaataagctcatctagggtcacctcattttcctaaatatgtttttaaagcaattattgtagtaatttcatttgagttaaatttacatgctcggtcactcattgagaaaatttacacagactctgaatccagttcctgtcatcttcagatgttggtttattgacatcacagtaaaaaggctactgtcgactggacacagtggctcacacatgtaatcacagcactttggggggccaaggtgggtggattgcttaagcccaggagttcaagaccagcctgggcaacatggctaaaccccatctctacaaaaaaaattagctgggtgtggtggtacatacctgtagtcccagctactcagaaggctgaggtgggaggttcacttgaacctgggaggttgaggttgcagtgagcacagatcacaccactgcactccagcctgggcaacagagtgagaccctatttcaaaaaaaggctgctttcactgtactgctgcagcagtctcttcaggtagctaaattaggagcttgttttggagaaatgaagcaaaggtgaatgacagcctaggcttgaaattataaagctctctcaggttgaactctctcgtgcgctctcgctctcactttcgccctgtacctgagagcacaggtgtaactgtgatgtcatagtgccgagactactttcctttaaccattggggttaagttgggcagcccatttagtttacacgcgcataagactaatttacaaaatcactctatacagtcattagatgtaacatccttccctgagtagaaagtaatgcatgtgtttggagattattttctgtaatgctgggaacaaacctgttttaaaagcacactgctaaaagtaggtgatataagaccatttgctgtttttattaaagtatgtgtgtgtatcagtgtctcaatgtgaagattgtaacctcaagattaggaatcttaaaagagccacttagcctgaatgggaaacgtgagactatttttaaacacacacctctaaggaagaagcctcccatatagacttgatctcaaagaagcagataagaagacagaaaagtgttttaagtgtaagatctcctatggagtactttaaattcatttatacaaatgaataagtgtatctttgtataatgcataaatacatagataaaaacatgtttgctgccaaagttcccaataagatgcttcctgtgttttttggcctttacttagctgaatgatcaaagttcagaaaatggtctgcaaaagttactccatatacaaccccaaatctactactttaaatgtaacatcaactcagttgtatgaatctggagtgtaatatttatattagaatgtatatgtcatttaaaatattttgaaagccctcataaatatttatatttactaaactaatagcatagacactatataaatccgcagtgatgcttatatatcttaaattagtaataatgggtgctatataattattttcagttactatccctgacactctggaatcttctccatttctccctatcactcaatttcattttaatcattggacacctttgcgttttgctgctaacagtgtgtgtatgtcaccctctttatatctggttttcccacttgtctgaagctctcctgatcttagaacctggagctgcagattcctccatgtcagctcccatcacggccccaaagacagagtcacttggttgctgagtcacttggttgctggaaaaatctttggggaaagctggtataagctacacactgacctgtccccagtgtttccaggtaatgacttggcactccagagaaagtttcatgctgttgcgtgtggtggctccaagccaagcacctggcatgcaggtcagcccttcccagcgggcgtggcgtcgtcctcttcacagatgccacgttgcagccccaaggcctcaccattttgcgttttttagaaacccattttcttggtcatttataaagctgctttatagatatctttgatcctggcatgccttggtttcctctcccttccctctttccaatcctggtttcctaacctcctcttgtagtaattctcaactcaactcaaagtcccaagaatttggaatggtaggatgctgtgcggggagctcgaggctgaggcataatcactgcttcggttctgctcatcaggggacacgctcccttactcatggcagccatgtttgattgtcacagagccccccgaatactctgtctatagtgacacactgtaggtgtcataaattttaagaaacctgcttttaagtactatttataggtttttctgttatacttgcaacctagttttaaaatacatgaggattttatgaaagctttatacagacatttataggaaactcattctttgattttaggtgccatttaaattgataacacttactttataaaaagatgctttttgtctggatagagccttatagtttaaaatatcttcatatattgccatttgatcaaataaatttcttacttagaaaa

SEQ ID NO: 111673 - DNA, 1663 bp, Homo sapiens
  Payload ID: 1871
  Gene Symbol: BVES
  Gene Name: blood vessel epicardial substance
  Uniprot ID: Q8NE79
  ENST ID: ENST00000336775
  CDS Start-End: 105-1187
gcggccgccgctcaggtcaggcagccccagcgtccccgggccctcggccccaccgagtgccggctcccgcgctctgcggcggcaagccccttggaattttcaaaatgaattatacagagtccagcccattgagagaatcaactgccataggttttacacctgagttagaaagtatcatacctgtgccttccaataagaccacttgtgaaaactggagagagatacatcatctggtttttcatgtagcaaatatttgttttgcagttgggttggttattccaactactcttcaccttcatatgatatttcttaggggaatgttaactctaggatgtaccctttatatcgtctgggccactctctaccgatgtgccttggatataatgatctggaactctgtgttcttgggtgtcaacattttgcatctgtcgtatcttttatacaagaagagaccggtaaagattgaaaaggaactcagtggcatgtaccggcgattgtttgaaccactccgtgtgcctccagatttgttcagaagactaactggacagttttgcatgatccaaaccttgaaaaagggccaaacttatgctgcagaggataaaacctcagttgatgaccgtctgagtattctcttgaagggaaaaatgaaggtctcctatcgaggacattttctgcataacatttacccctgtgcctttatagattctcctgaatttagatcaactcagatgcacaaaggtgaaaaattccaggtcaccattattgcagatgataactgcagatttttatgctggtcaagagaaagattaacatactttctggaatcagaacctttcttgtatgaaatctttaggtatcttattggaaaagacatcacaaataagctctactcattgaatgatcccaccttaaatgataaaaaagccaaaaagctggaacatcagctcagcctctgcacacagatctccatgttggaaatgaggaacagtatagccagctccagtgacagtgacgacggcttgcaccagtttcttcggggtacctccagcatgtcctctcttcatgtgtcatccccacaccagcgagcctctgccaagatgaaaccgatagaagaaggagcagaagatgatgatgacgtttttgaaccggcatctccaaatacattgaaagtccatcagctgccttgatcagagagagaattcaggttaccaagacggaaggtgtcttgaagagatcctgaaaaataccagcactttttcatggcttttaggttattctgctttagtgcatccagactggtggagtcggagggaggaagtgaggaagggtcaaggatggaagagttctttcacttaccctttttattagtcagcttttaaagtaattgttttactgagccttctgactatgccttgttctcttttgagatatatattttcacagtcttttctagatatattattgttttaacttaacaaatcttagcaatctctcaatgccttttcacttatttttttccaagttatgattctttttcctcacagtcttttttgttccatagcaatgaggttgtccatttgataattttaacaaacaatgtaagtttaaaattgaggctaaggtaacatgaaaaagcagggaatctcaaactttattccatata

SEQ ID NO: 111674 - DNA, 1500 bp, Homo sapiens
  Payload ID: 1871
  Gene Symbol: BVES
  Gene Name: blood vessel epicardial substance
  Uniprot ID: Q8NE79
  ENST ID: ENST00000446408
  CDS Start-End: 160-1242
ggagagcgccgatggctggggacccgaggtccgcgccacccacccgcaacctccttccccgagcctttgggaacgggttgttggccagacaagtcccagaaactgcctgctttgaagcatgaataagtgcgaaaagactcttagcaatgaattttcaaaatgaattatacagagtccagcccattgagagaatcaactgccataggttttacacctgagttagaaagtatcatacctgtgccttccaataagaccacttgtgaaaactggagagagatacatcatctggtttttcatgtagcaaatatttgttttgcagttgggttggttattccaactactcttcaccttcatatgatatttcttaggggaatgttaactctaggatgtaccctttatatcgtctgggccactctctaccgatgtgccttggatataatgatctggaactctgtgttcttgggtgtcaacattttgcatctgtcgtatcttttatacaagaagagaccggtaaagattgaaaaggaactcagtggcatgtaccggcgattgtttgaaccactccgtgtgcctccagatttgttcagaagactaactggacagttttgcatgatccaaaccttgaaaaagggccaaacttatgctgcagaggataaaacctcagttgatgaccgtctgagtattctcttgaagggaaaaatgaaggtctcctatcgaggacattttctgcataacatttacccctgtgcctttatagattctcctgaatttagatcaactcagatgcacaaaggtgaaaaattccaggtcaccattattgcagatgataactgcagatttttatgctggtcaagagaaagattaacatactttctggaatcagaacctttcttgtatgaaatctttaggtatcttattggaaaagacatcacaaataagctctactcattgaatgatcccaccttaaatgataaaaaagccaaaaagctggaacatcagctcagcctctgcacacagatctccatgttggaaatgaggaacagtatagccagctccagtgacagtgacgacggcttgcaccagtttcttcggggtacctccagcatgtcctctcttcatgtgtcatccccacaccagcgagcctctgccaagatgaaaccgatagaagaaggagcagaagatgatgatgacgtttttgaaccggcatctccaaatacattgaaagtccatcagctgccttgatcagagagagaattcaggttaccaagacggaaggtgtcttgaagagatcctgaaaaataccagcactttttcatggcttttaggttattctgctttagtgcatccagactggtggagtcggagggaggaagtgaggaagggtcaaggatggaagagttctttcacttaccctttttattagtcagcttttaaagtaattgttttactgagccttctgactatgccttgttctcttttgagatatatattttcacagtc

SEQ ID NO: 111675 - DNA, 5258 bp, Homo sapiens
  Payload ID: 1872
  Gene Symbol: BLM
  Gene Name: Bloom syndrome, RecQ helicase-like
  Uniprot ID: P54132
  ENST ID: ENST00000355112
  CDS Start-End: 119-4372
aatcggaataggcaagcttccggcgggaagtgagccagggcttggcgcggcggccgtggttgcggcgcgggaagtttggatcctggttccgtccgctaggagtctgcgtgcgaggattatggctgctgttcctcaaaataatctacaggagcaactagaacgtcactcagccagaacacttaataataaattaagtctttcaaaaccaaaattttcaggtttcacttttaaaaagaaaacatcttcagataacaatgtatctgtaactaatgtgtcagtagcaaaaacacctgtattaagaaataaagatgttaatgttaccgaagacttttccttcagtgaacctctacccaacaccacaaatcagcaaagggtcaaggacttctttaaaaatgctccagcaggacaggaaacacagagaggtggatcaaaatcattattgccagatttcttgcagactccgaaggaagttgtatgcactacccaaaacacaccaactgtaaagaaatcccgggatactgctctcaagaaattagaatttagttcttcaccagattctttaagtaccatcaatgattgggatgatatggatgactttgatacttctgagacttcaaaatcatttgttacaccaccccaaagtcactttgtaagagtaagcactgctcagaaatcaaaaaagggtaagagaaacttttttaaagcacagctttatacaacaaacacagtaaagactgatttgcctccaccctcctctgaaagcgagcaaatagatttgactgaggaacagaaggatgactcagaatggttaagcagcgatgtgatttgcatcgatgatggccccattgctgaagtgcatataaatgaagatgctcaggaaagtgactctctgaaaactcatttggaagatgaaagagataatagcgaaaagaagaagaatttggaagaagctgaattacattcaactgagaaagttccatgtattgaatttgatgatgatgattatgatacggattttgttccaccttctccagaagaaattatttctgcttcttcttcctcttcaaaatgccttagtacgttaaaggaccttgacacctctgacagaaaagaggatgttcttagcacatcaaaagatcttttgtcaaaacctgagaaaatgagtatgcaggagctgaatccagaaaccagcacagactgtgacgctagacagataagtttacagcagcagcttattcatgtgatggagcacatctgtaaattaattgatactattcctgatgataaactgaaacttttggattgtgggaacgaactgcttcagcagcggaacataagaaggaaacttctaacggaagtagattttaataaaagtgatgccagtcttcttggctcattgtggagatacaggcctgattcacttgatggccctatggagggtgattcctgccctacagggaattctatgaaggagttaaatttttcacaccttccctcaaattctgtttctcctggggactgtttactgactaccaccctaggaaagacaggattctctgccaccaggaagaatctttttgaaaggcctttattcaatacccatttacagaagtcctttgtaagtagcaactgggctgaaacaccaagactaggaaaaaaaaatgaaagctcttatttcccaggaaatgttctcacaagcactgctgtgaaagatcagaataaacatactgcttcaataaatgacttagaaagagaaacccaaccttcctatgatattgataattttgacatagatgactttgatgatgatgatgactgggaagacataatgcataatttagcagccagcaaatcttccacagctgcctatcaacccatcaaggaaggtcggccaattaaatcagtatcagaaagactttcctcagccaagacagactgtcttccagtgtcatctactgctcaaaatataaacttctcagagtcaattcagaattatactgacaagtcagcacaaaatttagcatccagaaatctgaaacatgagcgtttccaaagtcttagttttcctcatacaaaggaaatgatgaagatttttcataaaaaatttggcctgcataattttagaactaatcagctagaggcgatcaatgctgcactgcttggtgaagactgttttatcctgatgccgactggaggtggtaagagtttgtgttaccagctccctgcctgtgtttctcctggggtcactgttgtcatttctcccttgagatcacttatcgtagatcaagtccaaaagctgacttccttggatattccagctacatatctgacaggtgataagactgactcagaagctacaaatatttacctccagttatcaaaaaaagacccaatcataaaacttctatatgtcactccagaaaagatctgtgcaagtaacagactcatttctactctggagaatctctatgagaggaagctcttggcacgttttgttattgatgaagcacattgtgtcagtcagtggggacatgattttcgtcaagattacaaaagaatgaatatgcttcgccagaagtttccttctgttccggtgatggctcttacggccacagctaatcccagggtacagaaggacatcctgactcagctgaagattctcagacctcaggtgtttagcatgagctttaacagacataatctgaaatactatgtattaccgaaaaagcctaaaaaggtggcatttgattgcctagaatggatcagaaagcaccacccatatgattcagggataatttactgcctctccaggcgagaatgtgacaccatggctgacacgttacagagagatgggctcgctgctcttgcttaccatgctggcctcagtgattctgccagagatgaagtgcagcagaagtggattaatcaggatggctgtcaggttatctgtgctacaattgcatttggaatggggattgacaaaccggacgtgcgatttgtgattcatgcatctctccctaaatctgtggagggttactaccaagaatctggcagagctggaagagatggggaaatatctcactgcctgcttttctatacctatcatgatgtgaccagactgaaaagacttataatgatggaaaaagatggaaaccatcatacaagagaaactcacttcaataatttgtatagcatggtacattactgtgaaaatataacggaatgcaggagaatacagcttttggcctactttggtgaaaatggatttaatcctgatttttgtaagaaacacccagatgtttcttgtgataattgctgtaaaacaaaggattataaaacaagagatgtgactgacgatgtgaaaagtattgtaagatttgttcaagaacatagttcatcacaaggaatgagaaatataaaacatgtaggtccttctggaagatttactatgaatatgctggtcgacattttcttggggagtaagagtgcaaaaatccagtcaggtatatttggaaaaggatctgcttattcacgacacaatgccgaaagactttttaaaaagctgatacttgacaagattttggatgaagacttatatatcaatgccaatgaccaggcgatcgcttatgtgatgctcggaaataaagcccaaactgtactaaatggcaatttaaaggtagactttatggaaacagaaaattccagcagtgtgaaaaaacaaaaagcgttagtagcaaaagtgtctcagagggaagagatggttaaaaaatgtcttggagaacttacagaagtctgcaaatctctggggaaagtttttggtgtccattacttcaatatttttaataccgtcactctcaagaagcttgcagaatctttatcttctgatcctgaggttttgcttcaaattgatggtgttactgaagacaaactggaaaaatatggtgcggaagtgatttcagtattacagaaatactctgaatggacatcgccagctgaagacagttccccagggataagcctgtccagcagcagaggccccggaagaagtgccgctgaggagctcgacgaggaaatacccgtatcttcccactactttgcaagtaaaaccagaaatgaaaggaagaggaaaaagatgccagcctcccaaaggtctaagaggagaaaaactgcttccagtggttccaaggcaaagggggggtctgccacatgtagaaagatatcttccaaaacgaaatcctccagcatcattggatccagttcagcctcacatacttctcaagcgacatcaggagccaatagcaaattggggattatggctccaccgaagcctataaatagaccgtttcttaagccttcatatgcattctcataacaaccgaatctcaatgtacatagaccctctttcttgtttgtcagcatctgaccatctgtgactataaagctgttattcttgttataccatttgaagtttttactcgtctctattaatatttaaataaatgctggggggtgatagttcttctttttaaaataaacattttcttttgaataagcatgttttgctgccgctgcaagtgttgtggccgttgtttctcagaacgtctgaggcagcagctgaatcatctcagtgcaagagcttctgagcataacacgaaacccagaagccaaaggaagagccacgcgtgggcccttgtgaaactaaagcttttcgtgtaagacaacacaaacaaaatttaaagacaaatgacggggaaaagaggagaaaatatattacaaaggattagtatccatcataccaaatacccgtgaaccagtcagaaacatcccagggggcaggtggaccaaggatgtgaacaggctagtctcagaagaagaaatacacatgctcatggcccggcactgtggctcacgcctgggatcccagcactttgggaggccgaggcaggtggatcacgaggtcaggagtttgagaccagcctgcccaacatggtgaaaccccgtctctactaaaaatacaaaaattagccaggcgtggtgtacaggcacgcctgtagtcccagctactcaggaggctgaggcaagagaatcgcttgaacccaggaggcggaggttgcagtgagccgagatcgtgccactgcactccagcctgggtgacagagcaagactccgtctcaaaaaaaaaaaaaaaaaaagaaatatacatgctctgcaaatatgtgaaaaaggtcaatctccatgaataaaaatatgataaaacc

SEQ ID NO: 111676 - DNA, 4510 bp, Homo sapiens
  Payload ID: 1872
  Gene Symbol: BLM
  Gene Name: Bloom syndrome, RecQ helicase-like
  ENST ID: ENST00000559724
  CDS Start-End: 42-1283
ggatcctggttccgtccgctaggagtctgcgtgcgaggattatggctgctgttcctcaaaataatctacaggagcaactagaacgtcactcagccagaacacttaataataaattaagtctttcaaaaccaaaattttcaggtttcacttttaaaaagaaaacatcttcagataacaatgtatctgtaactaatgtgtcagtagcaaaaacacctgtattaagaaataaagatgttaatgttaccgaagacttttccttcagtgaacctctacccaacaccacaaatcagcaaagggtcaaggacttctttaaaaatgctccagcaggacaggaaacacagagaggtggatcaaaatcattattgccagatttcttgcagactccgaaggaagttgtatgcactacccaaaacacaccaactgtaaagaaatcccgggatactgctctcaagaaattagaatttagttcttcaccagattctttaagtaccatcaatgattgggatgatatggatgactttgatacttctgagacttcaaaatcatttgttacaccaccccaaagtcactttgtaagagtaagcactgctcagaaatcaaaaaagggtaagagaaacttttttaaagcacagctttatacaacaaacacagtaaagactgatttgcctccaccctcctctgaaagcgagcaaatagatttgactgaggaacagaaggatgactcagaatggttaagcagcgatgtgatttgcatcgatgatggccccattgctgaagtgcatataaatgaagatgctcaggaaagtgactctctgaaaactcatttggaagatgaaagagataatagcgaaaagaagaagaatttggaagaagctgaattacattcaactgagaaagttccatgtattgaatttgatgatgatgattatgatacggattttgttccaccttctccagaagaaattatttctgcttcttcttcctcttcaaaatgccttagtacgttaaaggaccttgacacctctgacagaaaagaggatgttcttagcacatcaaaagatcttttgtcaaaacctgagaaaatgagtatgcaggagctgaatccagaaaccagcacagactgtgacgggtctcactgtgttgcccaggctggtcttgaactcctggacttaagcaatcctcctgccttggcctccccaaagggctgggattacagtcatgagccaccatgcctagccaagacttttttttttttccctcaaagaaaaatattaacaacataattattttatagctagacagataagtttacagcagcagcttattcatgtgatggagcacatctgtaaattaattgatactattcctgatgataaactgaaacttttggattgtgggaacgaactgcttcagcagcggaacataagaaggaaacttctaacggaagtagattttaataaaagtgatgccagtcttcttggctcattgtggagatacaggcctgattcacttgatggccctatggagggtgattcctgccctacagggaattctatgaaggagttaaatttttcacaccttccctcaaattctgtttctcctggggactgtttactgactaccaccctaggaaagacaggattctctgccaccaggaagaatctttttgaaaggcctttattcaatacccatttacagaagtcctttgtaagtagcaactgggctgaaacaccaagactaggaaaaaaaaatgaaagctcttatttcccaggaaatgttctcacaagcactgctgtgaaagatcagaataaacatactgcttcaataaatgacttagaaagagaaacccaaccttcctatgatattgataattttgacatagatgactttgatgatgatgatgactgggaagacataatgcataatttagcagccagcaaatcttccacagctgcctatcaacccatcaaggaaggtcggccaattaaatcagtatcagaaagactttcctcagccaagacagactgtcttccagtgtcatctactgctcaaaatataaacttctcagagtcaattcagaattatactgacaagtcagcacaaaatttagcatccagaaatctgaaacatgagcgtttccaaagtcttagttttcctcatacaaaggaaatgatgaagatttttcataaaaaatttggcctgcataattttagaactaatcagctagaggcgatcaatgctgcactgcttggtgaagactgttttatcctgatgccgactggaggtggtaagagtttgtgttaccagctccctgcctgtgtttctcctggggtcactgttgtcatttctcccttgagatcacttatcgtagatcaagtccaaaagctgacttccttggatattccagctacatatctgacaggtgataagactgactcagaagctacaaatatttacctccagttatcaaaaaaagacccaatcataaaacttctatatgtcactccagaaaagatctgtgcaagtaacagactcatttctactctggagaatctctatgagaggaagctcttggcacgttttgttattgatgaagcacattgtgtcagtcagtggggacatgattttcgtcaagattacaaaagaatgaatatgcttcgccagaagtttccttctgttccggtgatggctcttacggccacagctaatcccagggtacagaaggacatcctgactcagctgaagattctcagacctcaggtgtttagcatgagctttaacagacataatctgaaatactatgtattaccgaaaaagcctaaaaaggtggcatttgattgcctagaatggatcagaaagcaccacccatatgattcagggataatttactgcctctccaggcgagaatgtgacaccatggctgacacgttacagagagatgggctcgctgctcttgcttaccatgctggcctcagtgattctgccagagatgaagtgcagcagaagtggattaatcaggatggctgtcaggttatctgtgctacaattgcatttggaatggggattgacaaaccggacgtgcgatttgtgattcatgcatctctccctaaatctgtggagggttactaccaagaatctggcagagctggaagagatggggaaatatctcactgcctgcttttctatacctatcatgatgtgaccagactgaaaagacttataatgatggaaaaagatggaaaccatcatacaagagaaactcacttcaataatttgtatagcatggtacattactgtgaaaatataacggaatgcaggagaatacagcttttggcctactttggtgaaaatggatttaatcctgatttttgtaagaaacacccagatgtttcttgtgataattgctgtaaaacaaaggattataaaacaagagatgtgactgacgatgtgaaaagtattgtaagatttgttcaagaacatagttcatcacaaggaatgagaaatataaaacatgtaggtccttctggaagatttactatgaatatgctggtcgacattttcttggggagtaagagtgcaaaaatccagtcaggtatatttggaaaaggatctgcttattcacgacacaatgccgaaagactttttaaaaagctgatacttgacaagattttggatgaagacttatatatcaatgccaatgaccaggcgatcgcttatgtgatgctcggaaataaagcccaaactgtactaaatggcaatttaaaggtagactttatggaaacagaaaattccagcagtgtgaaaaaacaaaaagcgttagtagcaaaagtgtctcagagggaagagatggttaaaaaatgtcttggagaacttacagaagtctgcaaatctctggggaaagtttttggtgtccattacttcaatatttttaataccgtcactctcaagaagcttgcagaatctttatcttctgatcctgaggttttgcttcaaattgatggtgttactgaagacaaactggaaaaatatggtgcggaagtgatttcagtattacagaaatactctgaatggacatcgccagctgaagacagttccccagggataagcctgtccagcagcagaggccccggaagaagtgccgctgaggagctcgacgaggaaatacccgtatcttcccactactttgcaagtaaaaccagaaatgaaaggaagaggaaaaagatgccagcctcccaaaggtctaagaggagaaaaactgcttccagtggttccaaggcaaagggggggtctgccacatgtagaaagatatcttccaaaacgaaatcctccagcatcattggatccagttcagcctcacatacttctcaagcgacatcaggagccaatagcaaattggggattatggctccaccgaagcctataaatagaccgtttcttaagccttcatatgcattctcataacaaccgaatctcaatgtacatagaccctctttcttgtttgtcagcatct

SEQ ID NO: 111677 - DNA, 3966 bp, Homo sapiens
  Payload ID: 1872
  Gene Symbol: BLM
  Gene Name: Bloom syndrome, RecQ helicase-like
  ENST ID: ENST00000560509
  CDS Start-End: 52-3912
cgggaagtttggatcctggttccgtccgctaggagtctgcgtgcgaggattatggctgctgttcctcaaaataatctacaggagcaactagaacgtcactcagccagaacacttaataataaattaagtctttcaaaaccaaaattttcaggtttcacttttaaaaagaaaacatcttcagataacaatgtatctgtaactaatgtgtcagtagcaaaaacacctgtattaagaaataaagatgttaatgttaccgaagacttttccttcagtgaacctctacccaacaccacaaatcagcaaagggtcaaggacttctttaaaaatgctccagcaggacaggaaacacagagaggtggatcaaaatcattattgccagatttcttgcagactccgaaggaagttgtatgcactacccaaaacacaccaactgtaaagaaatcccgggatactgctctcaagaaattagaatttagttcttcaccagattctttaagtaccatcaatgattgggatgatatggatgactttgatacttctgagacttcaaaatcatttgttacaccaccccaaagtcactttgtaagagtaagcactgctcagaaatcaaaaaagggtaagagaaacttttttaaagcacagctttatacaacaaacacagtaaagactgatttgcctccaccctcctctgaaagcgagcaaatagatttgactgaggaacagaaggatgactcagaatggttaagcagcgatgtgatttgcatcgatgatggccccattgctgaagtgcatataaatgaagatgctcaggaaagtgactctctgaaaactcatttggaagatgaaagagataatagcgaaaagaagaagaatttggaagaagctgaattacattcaactgagaaagttccatgtattgaatttgatgatgatgattatgatacggattttgttccaccttctccagaagaaattatttctgcttcttcttcctcttcaaaatgccttagtacgttaaaggaccttgacacctctgacagaaaagaggatgttcttagcacatcaaaagatcttttgtcaaaacctgagaaaatgagtatgcaggagctgaatccagaaaccagcacagactgtgacgctagacagataagtttacagcagcagcttattcatgtgatggagcacatctgtaaattaattgatactattcctgatgataaactgaaacttttggattgtgggaacgaactgcttcagcagcggaacataagaaggaaacttctaacggaagtagattttaataaaagtgatgccagtcttcttggctcattgtggagatacaggcctgattcacttgatggccctatggagggtgattcctgccctacagggaattctatgaaggagttaaatttttcacaccttccctcaaattctgtttctcctggggactgtttactgactaccaccctaggaaagacaggattctctgccaccaggaagaatctttttgaaaggcctttattcaatacccatttacagaagtcctttgtaagtagcaactgggctgaaacaccaagactaggaaaaaaaaatgaaagctcttatttcccaggaaatgttctcacaagcactgctgtgaaagatcagaataaacatactgcttcaataaatgacttagaaagagaaacccaaccttcctatgatattgataattttgacatagatgactttgatgatgatgatgactgggaagacataatgcataatttagcagccagcaaatcttccacagctgcctatcaacccatcaaggaaggtcggccaattaaatcagtatcagaaagactttcctcagccaagacagactgtcttccagtgtcatctactgctcaaaatataaacttctcagagtcaattcagaattatactgacaagtcagcacaaaatttagcatccagaaatctgaaacatgagcgtttccaaagtcttagttttcctcatacaaaggaaatgatgaagatttttcataaaaaatttggcctgcataattttagaactaatcagctagaggcgatcaatgctgcactgcttggtgaagactgttttatcctgatgccgactggaggtggtaagagtttgtgttaccagctccctgcctgtgtttctcctggggtcactgttgtcatttctcccttgagatcacttatcgtagatcaagtccaaaagctgacttccttggatattccagctacatatctgacaggtgataagactgactcagaagctacaaatatttacctccagttatcaaaaaaagacccaatcataaaacttctatatgtcactccagaaaagatctgtgcaagtaacagactcatttctactctggagaatctctatgagaggaagctcttggcacgttttgttattgatgaagcacattgtgtcagtcagtggggacatgattttcgtcaagattacaaaagaatgaatatgcttcgccagaagtttccttctgttccggtgatggctcttacggccacagctaatcccagggtacagaaggacatcctgactcagctgaagattctcagacctcaggtgtttagcatgagctttaacagacataatctgaaatactatgtattaccgaaaaagcctaaaaaggtggcatttgattgcctagaatggatcagaaagcaccacccatatgattcagggataatttactgcctctccaggcgagaatgtgacaccatggctgacacgttacagagagatgggctcgctgctcttgcttaccatgctggcctcagtgattctgccagagatgaagtgcagcagaagtggattaatcaggatggctgtcaggttatctgtgctacaattgcatttggaatggggattgacaaaccggacgtgcgatttgtgattcatgcatctctccctaaatctgtggagggttactaccaagaatctggcagagctggaagagatggggaaatatctcactgcctgcttttctatacctatcatgatgtgaccagactgaaaagacttataatgatggaaaaagatggaaaccatcatacaagagaaactcacttcaataatttgtatagcatggtacattactgtgaaaatataacggaatgcaggagaatacagcttttggcctactttggtgaaaatggatttaatcctgatttttgtaagaaacacccagatgtttcttgtgataattgctgtaaaacaaaggattataaaacaagagatgtgactgacgatgtgaaaagtattgtaagatttgttcaagaacatagttcatcacaaggaatgagaaatataaaacatgtaggtccttctggaagatttactatgaatatgctggtcgacattttcttggaatctttatcttctgatcctgaggttttgcttcaaattgatggtgttactgaagacaaactggaaaaatatggtgcggaagtgatttcagtattacagaaatactctgaatggacatcgccagctgaagacagttccccagggataagcctgtccagcagcagaggccccggaagaagtgccgctgaggagctcgacgaggaaatacccgtatcttcccactactttgcaagtaaaaccagaaatgaaaggaagaggaaaaagatgccagcctcccaaaggtctaagaggagaaaaactgcttccagtggttccaaggcaaagggggggtctgccacatgtagaaagatatcttccaaaacgaaatcctccagcatcattggatccagttcagcctcacatacttctcaagcgacatcaggagccaatagcaaattggggattatggctccaccgaagcctataaatagaccgtttcttaagccttcatatgcattctcataacaaccgaatctcaatgtacatagaccctctttcttgtttgtcagcatctgacca

SEQ ID NO: 111678 - DNA, 3428 bp, Homo sapiens
  Payload ID: 1873
  Gene Symbol: BMI1
  Gene Name: BMI1 proto-oncogene, polycomb ring finger
  Uniprot ID: P35226
  ENST ID: ENST00000376663
  CDS Start-End: 506-1486
cagcaactatgaaataatcgtagtatgagaggcagagatcggggcgagacaatggggatgtgggcgcgggagccccgttccggcttagcagcacctcccagccccgcagaataaaaccgatcgcgccccctccgcgcgcgccctcccccgagtgcggagcgggaggaggcggcggcggccgaggaggaggaggaggaggccccggaggaggaggcgttggaggtcgaggcggaggcggaggaggaggaggccgaggcgccggaggaggccgaggcgccggagcaggaggaggccggccggaggcggcatgagacgagcgtggcggccgcggctgctcggggccgcgctggttgcccattgacagcggcgtctgcagctcgcttcaagatggccgcttggctcgcattcattttctgctgaacgacttttaactttcattgtcttttccgcccgcttcgatcgcctcgcgccggctgctctttccgggattttttatcaagcagaaatgcatcgaacaacgagaatcaagatcactgagctaaatccccacctgatgtgtgtgctttgtggagggtacttcattgatgccacaaccataatagaatgtctacattccttctgtaaaacgtgtattgttcgttacctggagaccagcaagtattgtcctatttgtgatgtccaagttcacaagaccagaccactactgaatataaggtcagataaaactctccaagatattgtatacaaattagttccagggcttttcaaaaatgaaatgaagagaagaagggatttttatgcagctcatccttctgctgatgctgccaatggctctaatgaagatagaggagaggttgcagatgaagataagagaattataactgatgatgagataataagcttatccattgaattctttgaccagaacagattggatcggaaagtaaacaaagacaaagagaaatctaaggaggaggtgaatgataaaagatacttacgatgcccagcagcaatgactgtgatgcacttaagaaagtttctcagaagtaaaatggacatacctaatactttccagattgatgtcatgtatgaggaggaacctttaaaggattattatacactaatggatattgcctacatttatacctggagaaggaatggtccacttccattgaaatacagagttcgacctacttgtaaaagaatgaagatcagtcaccagagagatggactgacaaatgctggagaactggaaagtgactctgggagtgacaaggccaacagcccagcaggaggtattccctccacctcttcttgtttgcctagccccagtactccagtgcagtctcctcatccacagtttcctcacatttccagtactatgaatggaaccagcaacagccccagcggtaaccaccaatcttcttttgccaatagacctcgaaaatcatcagtaaatgggtcatcagcaacttcttctggttgatacctgagactgttaaggaaaaaaattttaaacccctgatttatatagatatcttcatgccattacagctttctagatgctaatacatgtgactatcgtccaatttgctttcttttgtagtgacattaaatttggctataaaagatggactacatgtgatactcctatggacgttaattgaaaagaaagattgttgttataaagaattggtttcttggaaagcaggcaagactttttctctgtgttaggaaagatgggaaatggtttctgtaaccattgtttggatttggaagtactctgcagtggacataagcattgggccatagtttgttaatctcaactaacgcctacattacattctccttgatcgttcttgttattacgctgttttgtgaacctgtagaaaacaagtgctttttatcttgaaattcaaccaacggaaagaatatgcatagaataatgcattctatgtagccatgtcactgtgaataacgatttcttgcatatttagccattttgattcctgtttgatttatacttctctgttgctacgcaaaaccgatcaaagaaaagtgaacttcagttttacaatctgtatgcctaaaagcgggtactaccgtttattttactgacttgtttaaatgattcgcttttgtaagaatcagatggcattatgcttgttgtacaatgccatattggtatatgacataacaggaaacagtattgtatgatatatttataaatgctataaagaaatattgtgtttcatgcattcagaaatgattgttaaaattctcccaactggttcgacctttgcagatacccataacctatgttgagccttgcttaccagcaaagaatatttttaatgtggatatctaattctaaagtctgttccattagaagcaattggcacatctttctatactttatatacttttctccagtaatacatgtttactttaaagattgttgcagtgaagaaaaacctttaactgagaaatatggaaaccgtcttaattttccattggctatgatggaattaatattgtattttaaaaatgcatattgatcactataattctaaaacaattttttaaataaaccagcaggttgctaaaagaaggcattttatctaaagttattttaataggtggtatagcagtaattttaaatttaagagttgcttttacagttaacaatggaatatgccttctctgctatgtctgaaaatagaagctatttattatgagcttctacaggtatttttaaatagagcaagcatgttgaatttaaaatatgaataaccccacccaacaattttcagtttattttttgctttggtcgaacttggtgtgtgttcatcacccatcagttatttgtgagggtgtttattctatatgaatattgtttcatgtttgtatgggaaaattgtagctaaacatttcattgtccccagtctgcaaaagaagcacaattctattgctttgtcttgcttatagtcattaaatcattacttttacatatattgctgttacttctgctttctttaaaaatatagtaaaggatgttttatgaagtcacaagatacatatatttttattttgacctaaatttgtacagtcccattgtaagtgttgtttctaattatagatgtaaaatgaaatttcatttgtaattggaaaaaatccaataaaaaggatattcatttagaaaatagctaagatctttaataaaaatttgatatgaaaagcacaatgtgcagaagttatggaaaacctatagaggattacaacaggtaaacgttaaagagaatacattgctgacttatagtgatgtggctaagaagtacatgctttgttgtaaaattgcttgaaagcccattgaaagatgtatctgtttatttacagtctttgaagtaaaagttaccaatgtttgccaa

SEQ ID NO: 111679 - DNA, 552 bp, Homo sapiens
  Payload ID: 1873
  Gene Symbol: BMI1
  Gene Name: BMI1 proto-oncogene, polycomb ring finger
  ENST ID: ENST00000443519
  CDS Start-End: 1-552
tacttcattgatgccacaaccataatagaatgtctacattccttctgtaaaacgtgtattgttcgttacctggagaccagcaagtattgtcctatttgtgatgtccaagttcacaagaccagaccactactgaatataagattggatcggaaagtaaacaaagacaaagagaaatctaaggaggaggtgaatgataaaagatacttacgatgcccagcagcaatgactgtgatgcacttaagaaagtttctcagaagtaaaatggacatacctaatactttccagattgatgtcatgtatgaggaggaacctttaaaggattattatacactaatggatattgcctacatttatacctggagaaggaatggtccacttccattgaaatacagagttcgacctacttgtaaaagaatgaagatcagtcaccagagagatggactgacaaatgctggagaactggaaagtgactctgggagtgacaaggccaacagcccagcaggaggtattccctccacctcttcttgtttgcctagccccagtactccagtg

SEQ ID NO: 111680 - DNA, 536 bp, Homo sapiens
  Payload ID: 1873
  Gene Symbol: BMI1
  Gene Name: BMI1 proto-oncogene, polycomb ring finger
  ENST ID: ENST00000442508
  CDS Start-End: 85-536
ccgagaggagtactggtatttccagcctcggcggctctcccggccgcagcgccctttgttgagaggattttttatcaagcagaaatgcatcgaacaacgagaatcaagatcactgagctaaatccccacctgatgtgtgtgctttgtggagggtacttcattgatgccacaaccataatagaatgtctacattccttctgtaaaacgtgtattgttcgttacctggagaccagcaagtattgtcctatttgtgatgtccaagttcacaagaccagaccactactgaatataaggtcagataaaactctccaagatattgtatacaaattagttccagggcttttcaaaaatgaaatgaagagaagaagggatttttatgcagctcatccttctgctgatgctgccaatggctctaatgaagatagaggagaggttgcagatgaagataagagaattataactgatgatgagataataagcttatccattgaattctttgaccagaacagattggatcggaaagtaaacaaagacaa

SEQ ID NO: 111681 - DNA, 406 bp, Homo sapiens
  Payload ID: 1873
  Gene Symbol: BMI1
  Gene Name: BMI1 proto-oncogene, polycomb ring finger
  ENST ID: ENST00000416820
  CDS Start-End: 92-406
gcccgccgaggctcggggctcgggccgggctccgcgcggagttgcagcggtggccggatgccaagtgtaagtgattttttatcaagcagaaatgcatcgaacaacgagaatcaagatcactgagctaaatccccacctgatgtgtgtgctttgtggagggtacttcattgatgccacaaccataatagaatgtctacattccttctgtaaaacgtgtattgttcgttacctggagaccagcaagtattgtcctatttgtgatgtccaagttcacaagaccagaccactactgaatataaggtcagataaaactctccaagatattgtatacaaattagttccagggcttttcaaaaatgaaatgaagagaagaagggatttttatgcagctcatccttctgctgat

SEQ ID NO: 111682 - DNA, 1877 bp, Homo sapiens
  Payload ID: 1874
  Gene Symbol: BAMBI
  Gene Name: BMP and activin membrane-bound inhibitor
  Uniprot ID: Q13145
  ENST ID: ENST00000375533
  CDS Start-End: 557-1339
cgccgctcggagccgccgggcaggtcccccagcgctcgcgtctgggcccgccccccgctgcggggcggattgacaggagcccggcggccaatcggacgccgtggggcggggcgaggcggggcggtgcaggccggctcccggcgcggggcgctatttacggcgcggagccggagagacctgggctggcgcgggcgggagctgcggcggatacccttgcgtgctgtggagaccctactctcttcgctgagaacggccgctagcggggactgaaggccgggagcccactcccgacccggggctagcgtgcgtccctagagtcgagcggggcaagggagccagtggccgccgacgggggaccgggaaacttttctgggctcctgggcgcgccctgtagccgcgctccatgctccggcagcggcccgaaacccagccccgccgctgacggcgcccgccgctccgggcagggcccatgccctgcgcgctccgggggtcgtaggctgccgccgagccggggctccggaagccggcgggggcgccgcggccgtgcggggcgtcaatggatcgccactccagctacatcttcatctggctgcagctggagctctgcgccatggccgtgctgctcaccaaaggtgaaattcgatgctactgtgatgctgcccactgtgtagccactggttatatgtgtaaatctgagctcagcgcctgcttctctagacttcttgatcctcagaactcaaattccccactcacccatggctgcctggactctcttgcaagcacgacagacatctgccaagccaaacaggcccgaaaccactctggcaccaccatacccacattggaatgctgtcatgaagacatgtgcaattacagagggctgcacgatgttctctctcctcccaggggtgaggcctcaggacaaggaaacaggtatcagcatgatggtagcagaaaccttatcaccaaggtgcaggagctgacttcttccaaagagttgtggttccgggcagcggtcattgccgtgcccattgctggagggctgattttagtgttgcttattatgttggccctgaggatgcttcgaagtgaaaataagaggctgcaggatcagcggcaacagatgctctcccgtttgcactacagctttcacggacaccattccaaaaaggggcaggttgcaaagttagacttggaatgcatggtgccggtcagtgggcacgagaactgctgtctgacctgtgataaaatgagacaagcagacctcagcaacgataagatcctctcgcttgttcactggggcatgtacagtgggcacgggaagctggaattcgtatgacggagtcttatctgaactacacttactgaacagcttgaaggccttttgagttctgctggacaggagcactttatctgaagacaaactcatttaatcatctttgagagacaaaatgacctctgcaaacagaatcttggatatttcttctgaaggattatttgcacagacttaaatacagttaaatgtgttatttgcttttaaaattataaaaagcaaagagaagactttgtacacactgtcaccagggttatttgcatccaagggagctggaattgagtacctaaataaacaaaaatgtgccctatgtaagcttctacatcttgatttattgtaaagatttaaaagaaatatatatattttgtctgaaatttaatagtgtctttcataaatttaactgggaaacgtgagacagtacatgttaattatacaaatggccatttgctgttaataatttgttctcaactctaggatgtggcttggtttttttttttctcttttcttttttaaacaagaccaagatcttgcttattcttccatg

SEQ ID NO: 111683 - DNA, 5031 bp, Homo sapiens
  Payload ID: 1875
  Gene Symbol: BMPER
  Gene Name: BMP binding endothelial regulator
  Uniprot ID: Q8N8U9
  ENST ID: ENST00000297161
  CDS Start-End: 375-2432
ggacagtggagacgcgccttctcggctctggtccgcgccctggggccctggcctccctggaggggctggggaactggaagctgggccgagagagttcccgctgcagctatcgcgcagtccctcctgcgcccgggcgcccccagcgggttccgggaggcgcccggtgagcccacgtctgttgcggcggagcgagcgcgctccgggagggccgagagccggcggggctggcaggagctctcgggcgcccgcctccctccttcgcggacggtctcccgacacgccggctgagagcccttttcgactgtgagctgcggcagctgagcagaggcggcggcgcgggacctgcagtcgccagggattccctccaggtgacgatgctctggttctccggcgtcggggctctggctgagcgttactgccgccgctcgcctgggattacgtgctgcgtcttgctgctactcaattgctcgggggtccccatgtctctggcttcctccttcttgacaggttctgttgcaaaatgtgaaaatgaaggtgaagtcctccagattccatttatcacagacaacccttgcataatgtgtgtctgcttgaacaaggaagtgacatgtaagagagagaagtgccccgtgctgtcccgagactgtgccctggccatcaagcagaggggagcctgttgtgaacagtgcaaaggttgcacctatgaaggaaatacctataacagctccttcaaatggcagagcccggctgagccttgtgttctacgccagtgccaggagggcgttgtcacagagtctggggtgcgctgtgttgttcattgtaaaaaccctttggagcatctgggaatgtgctgccccacatgtccaggctgtgtgtttgagggtgtgcagtatcaagaaggggaggaatttcagccagaaggaagcaaatgtaccaagtgttcctgcactggaggcaggacacaatgtgtgagagaagtctgtcccattctctcctgtccccagcaccttagtcacatacccccaggacagtgctgccccaaatgtttgggtcagaggaaagtgtttgacctcccttttgggagctgcctctttcgaagtgatgtttatgacaatggatcctcatttctgtacgataactgcacagcttgtacctgcagggactctactgtggtttgcaagaggaagtgctcccaccctggtggctgtgaccaaggccaggagggctgttgtgaagagtgcctcctacgagtgcccccagaagacatcaaagtatgcaaatttggcaacaagattttccaggatggagagatgtggtcctctatcaattgtaccatctgtgcttgtgtgaaaggcaggacggagtgtcgcaataagcagtgcattcccatcagtagctgcccacagggcaaaattctcaacagaaaaggatgctgtcctatttgcactgaaaagcccggcgtttgcacggtgtttggagatccccactacaacacttttgacggtcggacatttaactttcaggggacgtgtcagtacgttttgacaaaagactgctcctcccctgcctcgcccttccaggtgctggtgaagaacgacgcccgccggacacgctccttctcgtggaccaagtcggtggagctggtgctgggcgagagcagggtcagcctgcagcagcacctcaccgtgcgctggaacggctcgcgcatcgcgctcccctgccgcgcgccacacttccacatcgacctggatggctacctcttgaaagtgaccaccaaagcaggtttggaaatatcttgggatggagacagttttgtagaagtcatggctgcgccgcatctcaagggcaagctctgtggtctttgtggcaactacaatggacataaacgtgatgacttaattggtggagatggaaacttcaagtttgatgtggatgactttgctgaatcttggagggtggagtccaatgagttctgcaacagacctcagagaaagccagtgcctgaactgtgtcaagggacagtcaaggtaaagctccgggcccatcgagaatgccaaaagctcaaatcctgggagtttcagacctgccactcgactgtggactacgccactttctaccggtcctgtgtgacagacatgtgtgaatgtccagtccataaaaactgttattgcgagtcatttttggcatatacccgggcctgccagagagagggcatcaaagtccactgggagcctcagcagaattgtgcagccacccagtgtaagcatggtgctgtgtacgatacctgtggtccgggatgtatcaagacgtgtgacaactggaatgaaattggtccatgcaacaagccgtgcgttgctgggtgccactgtccagcaaacttggtccttcacaagggaaggtgcatcaagccagtcctttgtccccagcggtgacctttgtttcgatccttaagactctgaaatctggtgactttgacactgaagcggaagagccaatgaaggactgcagtatttgtgtgcccgattctgtaaacacacacacacagagtatatatgtgtatatatatatagatatattcaaaaacattgcatcatttatatgaactatagggggattattatatgtatattttttgctataagacatgtattgtttctaggatcctaacctgtaagccattgaacatgttgtataaatacaccaggtgtttttaatttaataaggtggcatgcagatacattggatagtgttaacatcacatacatttgtcatttttaaggaagttttctaagagccctcaattgcctgcctgtattaattttagttttgagtcaggatttgtaatggagtgggaaatgtgtttctctggagaagggcacatttatctaggggcatttcaggtttccaaagaaaggaatgtatgcctgggaaagacagcaggagattggtgaccggccctaatggtgcatgaaaagcgagtgataggctgttagaatgtattaggtcatgggctaacattatttccaaaattgattggctggttgccaagaaatatatatttgtcactagggcataaccgaagaatcaagtgatttcttgccatccttgcgtagtcctcaagtcttctaatcatctatgtgtgtatgatggatgtgaccatttatatgtcatgtgttgaaattaaagggtgtctggatgccatgttaattttattgagcatgagaaagtatttgaagaaactgttgcacaacatatgatgaaattttgatttctctgaatctcagagtaatttaagatgggcaaatccaatgagttgatgtaacccatctacattttgtggctatttcatgtataaaatgaaaggctttagttatttctagaggagtcccatccaacactatttggcgactgttaatatgttataattattagacagtggaaaagcctttattgactaattgatttaacctcagtccaaagaacagtctctatacttgccctcatttactgataggctgctactagttaccatttgattgtcttgactttcgtcttcagttgaattggtgaaaacatcaacaaaaacaaaacccactgtgtcttaaaataaaatgttctgcattgtagtcaataaagggcttaagatgtaaaacaatgcattttctctctcaagatgtcctgtgttatactttacaattagttgtatcaacttcagattcattaaattttaacagctgtatttagttataatttttgtatcttacaacagtatatataaagactattattaatagacaaaagcaaacccacgtttttgacaagccagcatattgccaatgctcgtcaaagacatttatgtttcttttacattcatgacagctaaagtattaacttggaatttttttttttttttttgactggaaaatccctagttgtttgaattaactgaataaagtgcagggcgtaatagtgactggctgggggcactgggcctttgtgttttttttcattcctgtgtttggatactaatcaccctcgtatctgcagcctgaggtagtcaggtcattgtttcaatgctgcccttggaaagaagactttgacttaggtgctttgggatctaagtgtggtttgtgactatccccattatttaagcatttgggggtctcacttttgcttatctgtaacacaaagaggccatgtagtatagtgagcagggttgagaatcgggaaaactagacccctgccactaacaggctaggagactttgggcagtaatgggaggcactgagggtttgcaaatactttcctacttgtaatctcattgattccctgctctgccctgacaggaggggtagggaaaatcagttgacgttgcctggtggttcctaccttctgtaaaacgaacagattccttaagattagctttaaatcccttttcagttcactgttggttctcatctttgaaagagggcagcataagggaaatgatggagaagggagaattgtggatggttatttatagctcatgattcatccaaggactgagttattctccccatgaggctaaccggcctctttcccaacacttaatcatggcagccaggatgggtgaatgatgaaagctcttctgcatgagccggtttcatcatcttgggtgggttgattacaagtttgtgtggcattcctttagctggggattagcttaatctctgtacatttttctcatttctaattgaagaagaaagggagggcagagaggacagaaaattacttgggtttactaattcaaagagccatctctgatgggagagggtgaggaaatcagctgaatggttggcctgcatattcttttttaggccacaggctacagctgagcaatggcttagtctaatgattgggcacaatgaggatttaccaagtgcttcaatgagagcagtcctgtttcattcacatgggatgttttcaattggttcttcaactaagctcttgcagagtgagatgacttgaaataaaaatgttctatgaatattg

SEQ ID NO: 111684 - DNA, 844 bp, Homo sapiens
  Payload ID: 1875
  Gene Symbol: BMPER
  Gene Name: BMP binding endothelial regulator
  ENST ID: ENST00000448280
  CDS Start-End: 375-647
ggacagtggagacgcgccttctcggctctggtccgcgccctggggccctggcctccctggaggggctggggaactggaagctgggccgagagagttcccgctgcagctatcgcgcagtccctcctgcgcccgggcgcccccagcgggttccgggaggcgcccggtgagcccacgtctgttgcggcggagcgagcgcgctccgggagggccgagagccggcggggctggcaggagctctcgggcgcccgcctccctccttcgcggacggtctcccgacacgccggctgagagcccttttcgactgtgagctgcggcagctgagcagaggcggcggcgcgggacctgcagtcgccagggattccctccaggtgacgatgctctggttctccggcgtcggggctctggctgagcgttactgccgccgctcgcctgggattacgtgctgcgtcttgctgctactcaattgctcgggggtccccatgtctctggcttcctccttcttgacaggttctgttgcaaaatgtgaaaatgaaggtgaagtcctccagattccatttatcacagacaacccttgcataatgtgtgtctgcttgcatgagccaactagatggagcaatctgacacaaaacccagggttttatgactgacctagtgcgccagctgcatctggaggaaccagacgcaaacaacgcagagttgagggccaggtgaagcgggatccagctccccacttcaccccaaccccttcgactcctcaaaacctctgcaagaagctatttccttcggctggcaacttacagccagcaggtcccttcctcgtgcagaataaagccattctgggaaa

SEQ ID NO: 111685 - DNA, 565 bp, Homo sapiens
  Payload ID: 1875
  Gene Symbol: BMPER
  Gene Name: BMP binding endothelial regulator
  ENST ID: ENST00000436222
  CDS Start-End: 82-565
cttttcgactgtgagctgcggcagctgagcagaggcggcggcgcgggacctgcagtcgccagggattccctccaggtgacgatgctctggttctccggcgtcggggctctggctgagcgttactgccgccgctcgcctgggattacgtgctgcgtcttgctgctactcaattgctcgggggtccccatgtctctggcttcctccttcttgacaggttctgttgcaaaatgtgaaaatgaaggtgaagtcctccagattccatttatcacagacaacccttgcataatgtgtgtctgcttggttgcacctatgaaggaaatacctataacagctccttcaaatggcagagcccggctgagccttgtgttctacgccagtgccaggagggcgttgtcacagagtctggggtgcgctgtgttgttcattgtaaaaaccctttggagcatctgggaatgtgctgccccacatgtccaggctgtgtgtttgagggtgtgcagtatcaagaaggggaggaatttcagccagaaggaagcaaatgtaccaagtgttcctgcactggaggcag

SEQ ID NO: 111686 - DNA, 547 bp, Homo sapiens
  Payload ID: 1875
  Gene Symbol: BMPER
  Gene Name: BMP binding endothelial regulator
  ENST ID: ENST00000444773
  CDS Start-End: 76-477
gactgtgagctgcggcagctgagcagaggcggcggcgcgggacctgcagtcgccagggattccctccaggtgacgatgctctggttctccggcgtcggggctctggctgagcgttactgccgccgctcgcctgggattacgtgctgcgtcttgctgctactcaattgctcgggggtccccatgtctctggcttcctccttcttgacaggttctgttgcaaaatgtgaaaatgaaggtgaagtcctccagattccatttatcacagacaacccttgcataatgtgtgtctgcttgaacaaggaagtgacatgtaagagagagaagtgccccgtgctgtcccgagactgtgccctggccatcaagcagaggggagcctgttgtgaacagtgcaaagtgcttgtctcaagggttttaagggacacagtcctgttcactcttaaatactggagactcccagtattttggttgcacctatgaaggaaatacctataacagctccttcaaatggcagagcccggctgagccttgtgttctacgccagtgccag

SEQ ID NO: 111687 - DNA, 3804 bp, Homo sapiens
  Payload ID: 1876
  Gene Symbol: BMP2K
  Gene Name: BMP2 inducible kinase
  Uniprot ID: Q9NSY1
  ENST ID: ENST00000335016
  CDS Start-End: 167-3652
cggggcccaggctgtgcgcttggggagcgcggaatgtgaggcttggcgggccgcagcacgctcggacgggccaggggcggcgacccctcgcggacgcccggctgcgcgccgggccggggacttgcccttgcacgctccctgcgccctccagctcgccggcgggaccatgaagaagttctctcggatgcccaagtcggagggcggcagcggcggcggagcggcgggtggcggggctggcggggccggggccggggccggctgcggctccggcggctcgtccgtgggggtccgggtgttcgcggtcggccgccaccaggtcaccctggaagagtcgctggccgaaggtggattctccacagttttcctcgtgcgtactcacggtggaatccgatgtgcattgaagcgaatgtatgtcaataacatgccagacctcaatgtttgtaaaagggaaattacaattatgaaagagctatctggtcacaaaaatattgtgggctatttggactgtgctgttaattcaattagtgataatgtatgggaagtccttatcttaatggaatattgtcgagctggacaggtagtgaatcaaatgaataagaagctacagacgggttttacagaaccagaagtgttacagatattctgtgatacctgtgaagctgttgcaaggttgcatcagtgtaagactccaataattcaccgggatctgaaggtagaaaatattttgttgaatgatggtgggaactatgtactttgtgactttggcagtgccactaataaatttcttaatcctcaaaaagatggagttaatgtagtagaagaagaaattaaaaagtatacaactctgtcatacagagcccctgaaatgatcaacctttatggagggaaacccatcaccaccaaggctgatatctgggcactgggatgtctactctataaactttgtttcttcactcttccttttggtgagagtcaggttgctatctgtgatggcaacttcaccatcccagacaattctcgttactcccgtaacatacattgcttaataaggttcatgcttgaaccagatccggaacatagacctgatatatttcaagtgtcatattttgcatttaaatttgccaaaaaggattgtccagtctccaacatcaataattcttctattccttcagctcttcctgaaccgatgactgctagtgaagcagctgctaggaaaagccaaataaaagccagaataacagataccattggaccaacagaaacctcaattgcaccaagacaaagaccaaaggccaactctgctactactgccactcccagtgtgctgaccattcaaagttcagcaacacctgttaaagtccttgctcctggtgaattcggtaaccatagaccaaaaggggcactaagacctggaaatggccctgaaattttattgggtcagggacctcctcagcagccgccacagcagcatagagtactccagcaactacagcagggagattggagattacagcaactccatttacagcatcgtcatcctcaccagcagcagcagcagcagcagcagcaacagcaacagcagcagcagcaacagcaacagcagcagcagcagcagcagcagcagcaccaccaccaccaccaccaccacctacttcaagatgcttatatgcagcagtatcaacatgcaacacagcagcaacagatgcttcaacaacaatttttaatgcattcggtatatcaaccacaaccttctgcatcacagtatcctacaatgatgccgcagtatcagcaggctttctttcaacagcagatgctagctcaacatcagccgtctcaacaacaggcatcacctgaatatcttacctcccctcaagagttctcaccagccttagtttcctacacttcatcacttccagctcaggttggaaccataatggactcctcctatagtgccaataggtcagttgctgataaagaggccattgcaaatttcacaaatcagaagaacatcagcaatccacctgatatgtcagggtggaatccttttggagaggataatttctctaagttaacagaagaggaactattggacagagaatttgaccttctaagatcaaataggctcgaggagagagcatcctcagataagaatgtagactcactttctgctccacataaccatcctccagaagatccttttggttctgttcctttcatttctcattcaggttctcctgaaaagaaagctgaacattcatctataaatcaagaaaatggcactgcaaaccctatcaagaacggtaaaacaagtccagcatctaaagatcagcggactggaaagaaaacctcagtacagggtcaagtgcaaaaggggaatgatgaatctgaaagtgattttgaatcagatcccccttctcctaagagcagtgaagaggaagagcaagatgatgaagaagttcttcagggggaacaaggagattttaatgatgatgatactgaaccagaaaatctgggtcataggcctctcctcatggattctgaagatgaggaagaagaggagaaacatagctctgattctgattatgagcaggctaaagcaaagtacagtgacatgagctctgtctacagagacagatctggcagtggaccaacccaagatcttaatacaatactcctcacctcagcccaattatcctctgatgttgcagtggagactcccaaacaggagtttgatgtatttggcgctgtccccttctttgcagtgcgtgctcaacagccccagcaagaaaagaatgaaaagaacctccctcaacacaggtttcctgctgcaggactggagcaggaggaatttgatgtattcacaaaggcgccttttagcaagaaggtgaatgtacaagaatgccatgcagtggggcctgaggcacatactatccctggttatcccaaaagtgtagatgtatttggctccactccatttcagcccttcctcacatcaacaagtaaaagtgaaagcaatgaggacctttttgggcttgtgccctttgatgaaataacggggagccagcagcaaaaagtcaaacagcgcagcttacagaaactgtcctctcgccaaaggcgcacaaagcaggatatgtccaaaagtaatgggaagcggcatcatggcacgccaactagcacaaagaagactttgaagcctacctatcgcactccagagagggctcgcaggcacaaaaaagtgggccgccgagactctcaaagtagcaatgaatttttaaccatctcagactccaaggagaacattagtgttgcactgactgatgggaaagatagggggaatgtcttacaacctgaggagagcctgttggaccccttcggtgccaagcccttccattctccagacctgtcatggcaccctccacatcagggcctgagcgacatccgtgctgatcacaatactgtcctgccagggcggccaagacaaaattcactacatgggtcattccatagtgcagatgtattgaaaatggatgattttggtgccgtgccctttacagaacttgtggtgcaaagcatcactccacatcagtcccaacagtcccaaccagtcgaattagacccatttggtgctgctccatttccttctaaacagtagatacttctgatggattctcggcattaactcctgtttcaaaaaagtgtgaacagttttatgaatttgaaagaaaatttggtagctctttatagcattcattcttaaagatcagtcagaataggtgatttctaaataaaccaaatagaagaatg

SEQ ID NO: 111688 - DNA, 2741 bp, Homo sapiens
  Payload ID: 1876
  Gene Symbol: BMP2K
  Gene Name: BMP2 inducible kinase
  ENST ID: ENST00000389010
  CDS Start-End: 203-1270
agccgggcagctgcagcggagccgcggagcgggcggcggggcccaggctgtgcgcttggggagcgcggaatgtgaggcttggcgggccgcagcacgctcggacgggccaggggcggcgacccctcgcggacgcccggctgcgcgccgggccggggacttgcccttgcacgctccctgcgccctccagctcgccggcgggaccatgaagaagttctctcggatgcccaagtcggagggcggcagcggcggcggagcggcgggtggcggggctggcggggccggggccggggccggctgcggctccggcggctcgtccgtgggggtccgggtgttcgcggtcggccgccaccaggtcaccctggaagagtcgctggccgaaggtggattctccacagttttcctcgtgcgtactcacggtggaatccgatgtgcattgaagcgaatgtatgtcaataacatgccagacctcaatgtttgtaaaagggaaattacaattatgaaagagctatctggtcacaaaaatattgtgggctatttggactgtgctgttaattcaattagtgataatgtatgggaagtccttatcttaatggaatattgtcgagctggacaggtagtgaatcaaatgaataagaagctacagacgggttttacagaaccagaagtgttacagatattctgtgatacctgtgaagctgttgcaaggttgcatcagtgtaagactccaataattcaccgggatctgaaggtagaaaatattttgttgaatgatggtgggaactatgtactttgtgactttggcagtgccactaataaatttcttaatcctcaaaaagatggagttaatgtagtagaagaagaaattaaaaagtatacaactctgtcatacagagcccctgaaatgatcaacctttatggagggaaacccatcaccaccaaggctgatatctgggcactgggatgtctactctataaactttgtttcttcactcttccttttggtgagagtcaggttgctatctgtgatggcaacttcaccatcccagacaattctcgttactcccgtaacatacattgcttaataaggttcatgcttgaaccagatccggaacatagacctgatatatttcaagtgtcatattttgcatttaaatttgccaaaaaggattgtccagtctccaacatcaataagtgttgtaaacaattactgagacacggagcactgttaactgaaattcttctattccttcagctcttcctgaaccgatgactgctagtgaagcagctgctaggaaaagccaaataaaagccagaataacagataccattggaccaacagaaacctcaattgcaccaagacaaagaccaaaggccaactctgctactactgccactcccagtgtgctgaccattcaaagttcagcaacacctgttaaagtccttgctcctggtgaattcggtaaccatagaccaaaaggggcactaagacctggaaatggccctgaaattttattgggtcagggacctcctcagcagccgccacagcagcatagagtactccagcaactacagcagggagattggagattacagcaactccatttacagcatcgtcatcctcaccagcagcagcagcagcagcagcagcaacagcaacagcagcagcagcaacagcaacagcagcagcagcagcagcagcagcagcaccaccaccaccaccaccaccacctacttcaagatgcttatatgcagcagtatcaacatgcaacacagcagcaacagatgcttcaacaacaatttttaatgcattcggtatatcaaccacaaccttctgcatcacagtatcctacaatgatgccgcagtatcagcaggctttctttcaacagcagatgctagctcaacatcagccgtctcaacaacaggcatcacctgaatatcttacctcccctcaagagttctcaccagccttagtttcctacacttcatcacttccagctcaggttggaaccataatggactcctcctatagtgccaataggtcagttgctgataaagaggccattgcaaatttcacaaatcagaagaacatcagcaatccacctgatatgtcagggtggaatccttttggagaggataatttctctaagttaacagaagaggaactattggacagagaatttgaccttctaagatcaagtaagggacacttgaaggcttattttgcttcacagtaaaataacagctctattattattcagcaaggccaaagacttttgagaatgtgtatggaaaattctttttgtgcatttgagggcaaaattcaggccatcttcttatacatatactatcaaattatgttgtgtgcattagaaatcagttgcttgatagtagctattaaacccaatattgctgatagtatgctaatatcctaaaacttaaatattgcatatctatgaatgttaaattcagaatatctctaaaacatggaaaattgatgtttcaataaaaagggagacattttattattttgccttactaatgattttgcagctctgtttttctgcacactcaatagaaaatattgtgggtctgagatgccctttgaaaatgcctgaaagaaaacatgggctactacattatgttaatgttttgtaatgtccttttaatgagtggtgacataaaagggctgctttgttgtcctgatatggcaaaaattaaataaattctttttcactttaaa

SEQ ID NO: 111689 - DNA, 3195 bp, Homo sapiens
  Payload ID: 1876
  Gene Symbol: BMP2K
  Gene Name: BMP2 inducible kinase
  Uniprot ID: Q9NSY1
  ENST ID: ENST00000502871
  CDS Start-End: 167-2155
cggggcccaggctgtgcgcttggggagcgcggaatgtgaggcttggcgggccgcagcacgctcggacgggccaggggcggcgacccctcgcggacgcccggctgcgcgccgggccggggacttgcccttgcacgctccctgcgccctccagctcgccggcgggaccatgaagaagttctctcggatgcccaagtcggagggcggcagcggcggcggagcggcgggtggcggggctggcggggccggggccggggccggctgcggctccggcggctcgtccgtgggggtccgggtgttcgcggtcggccgccaccaggtcaccctggaagagtcgctggccgaaggtggattctccacagttttcctcgtgcgtactcacggtggaatccgatgtgcattgaagcgaatgtatgtcaataacatgccagacctcaatgtttgtaaaagggaaattacaattatgaaagagctatctggtcacaaaaatattgtgggctatttggactgtgctgttaattcaattagtgataatgtatgggaagtccttatcttaatggaatattgtcgagctggacaggtagtgaatcaaatgaataagaagctacagacgggttttacagaaccagaagtgttacagatattctgtgatacctgtgaagctgttgcaaggttgcatcagtgtaagactccaataattcaccgggatctgaaggtagaaaatattttgttgaatgatggtgggaactatgtactttgtgactttggcagtgccactaataaatttcttaatcctcaaaaagatggagttaatgtagtagaagaagaaattaaaaagtatacaactctgtcatacagagcccctgaaatgatcaacctttatggagggaaacccatcaccaccaaggctgatatctgggcactgggatgtctactctataaactttgtttcttcactcttccttttggtgagagtcaggttgctatctgtgatggcaacttcaccatcccagacaattctcgttactcccgtaacatacattgcttaataaggttcatgcttgaaccagatccggaacatagacctgatatatttcaagtgtcatattttgcatttaaatttgccaaaaaggattgtccagtctccaacatcaataattcttctattccttcagctcttcctgaaccgatgactgctagtgaagcagctgctaggaaaagccaaataaaagccagaataacagataccattggaccaacagaaacctcaattgcaccaagacaaagaccaaaggccaactctgctactactgccactcccagtgtgctgaccattcaaagttcagcaacacctgttaaagtccttgctcctggtgaattcggtaaccatagaccaaaaggggcactaagacctggaaatggccctgaaattttattgggtcagggacctcctcagcagccgccacagcagcatagagtactccagcaactacagcagggagattggagattacagcaactccatttacagcatcgtcatcctcaccagcagcagcagcagcagcagcagcaacagcaacagcagcagcagcaacagcaacagcagcagcagcagcagcagcagcagcaccaccaccaccaccaccaccacctacttcaagatgcttatatgcagcagtatcaacatgcaacacagcagcaacagatgcttcaacaacaatttttaatgcattcggtatatcaaccacaaccttctgcatcacagtatcctacaatgatgccgcagtatcagcaggctttctttcaacagcagatgctagctcaacatcagccgtctcaacaacaggcatcacctgaatatcttacctcccctcaagagttctcaccagccttagtttcctacacttcatcacttccagctcaggttggaaccataatggactcctcctatagtgccaataggtcagttgctgataaagaggccattgcaaatttcacaaatcagaagaacatcagcaatccacctgatatgtcagggtggaatccttttggagaggataatttctctaagttaacagaagaggaactattggacagagaatttgaccttctaagatcaagtaagggacacttgaaggcttattttgcttcacagtaaaataacagctctattattattcagcaaggccaaagacttttgagaatgtgtatggaaaattctttttgtgcatttgagggcaaaattcaggccatcttcttatacatatactatcaaattatgttgtgtgcattagaaatcagttgcttgatagtagctattaaacccaatattgctgatagtatgctaatatcctaaaacttaaatattgcatatctatgaatgttaaattcagaatatctctaaaacatggaaaattgatgtttcaataaaaagggagacattttattattttgccttactaatgattttgcagctctgtttttctgcacactcaatagaaaatattgtgggtctgagatgccctttgaaaatgcctgaaagaaaacatgggctactacattatgttaatgttttgtaatgtccttttaatgagtggtgacataaaagggctgctttgttgtcctgatatggcaaaaattaaataaattctttttcactttaaatcagatatctcaatgtttttacttggaatcattgcttttctttgaactacctaatatatgtcaagcttcgccacacatattttagaaatgtcctttttgaaagaatgatgtgagtgttttgagtaggttgccaaataggagcaaaaagctcacttctagagtatgtagataattttcaggtttctgaggctttgtgtgtgtgtgtgtgtgtgcacgcgcatgtgtgtgcaggtgtgcacacaaaacaagtgtgttttccccttttgcatgtgaaaagaaggtcttaataatccctagtttatagttcctagttcctatttcatttaggtaattggccttatgagaatgtttaatagatgaaatgctttgttctgaattggtatatattttatgtaaaattcctgtaagaatagtttgggatttaaatttgtattttatatattggttatatgattatgaaaattaaattgatgattaaatgcagatataaaaataagttctgagccgttaataaaggtttctaaataaaaccga

SEQ ID NO: 111690 - DNA, 6902 bp, Homo sapiens
  Payload ID: 1876
  Gene Symbol: BMP2K
  Gene Name: BMP2 inducible kinase
  ENST ID: ENST00000502613
  CDS Start-End: 1-2563
atttcaagtgtcatattttgcatttaaatttgccaaaaaggattgtccagtctccaacatcaataattcttctattccttcagctcttcctgaaccgatgactgctagtgaagcagctgctaggaaaagccaaataaaagccagaataacagataccattggaccaacagaaacctcaattgcaccaagacaaagaccaaaggccaactctgctactactgccactcccagtgtgctgaccattcaaagttcagcaacacctgttaaagtccttgctcctggtgaattcggtaaccatagaccaaaaggggcactaagacctggaaatggccctgaaattttattgggtcagggacctcctcagcagccgccacagcagcatagagtactccagcaactacagcagggagattggagattacagcaactccatttacagcatcgtcatcctcaccagcagcagcagcagcagcagcagcaacagcaacagcagcagcagcaacagcaacagcagcagcagcagcagcagcagcagcaccaccaccaccaccaccaccacctacttcaagatgcttatatgcagcagtatcaacatgcaacacagcagcaacagatgcttcaacaacaatttttaatgcattcggtatatcaaccacaaccttctgcatcacagtatcctacaatgatgccgcagtatcagcaggctttctttcaacagcagatgctagctcaacatcagccgtctcaacaacaggcatcacctgaatatcttacctcccctcaagagttctcaccagccttagtttcctacacttcatcacttccagctcaggttggaaccataatggactcctcctatagtgccaataggtcagttgctgataaagaggccattgcaaatttcacaaatcagaagaacatcagcaatccacctgatatgtcagggtggaatccttttggagaggataatttctctaagttaacagaagaggaactattggacagagaatttgaccttctaagatcaaataggctcgaggagagagcatcctcagataagaatgtagactcactttctgctccacataaccatcctccagaagatccttttggttctgttcctttcatttctcattcaggttctcctgaaaagaaagctgaacattcatctataaatcaagaaaatggcactgcaaaccctatcaagaacggtaaaacaagtccagcatctaaagatcagcggactggaaagaaaacctcagtacagggtcaagtgcaaaaggggaatgatgaatctgaaagtgattttgaatcagatcccccttctcctaagagcagtgaagaggaagagcaagatgatgaagaagttcttcagggggaacaaggagattttaatgatgatgatactgaaccagaaaatctgggtcataggcctctcctcatggattctgaagatgaggaagaagaggagaaacatagctctgattctgattatgagcaggctaaagcaaagtacagtgacatgagctctgtctacagagacagatctggcagtggaccaacccaagatcttaatacaatactcctcacctcagcccaattatcctctgatgttgcagtggagactcccaaacaggagtttgatgtatttggcgctgtccccttctttgcagtgcgtgctcaacagccccagcaagaaaagaatgaaaagaacctccctcaacacaggtttcctgctgcaggactggagcaggaggaatttgatgtattcacaaaggcgccttttagcaagaaggtgaatgtacaagaatgccatgcagtggggcctgaggcacatactatccctggttatcccaaaagtgtagatgtatttggctccactccatttcagcccttcctcacatcaacaagtaaaagtgaaagcaatgaggacctttttgggcttgtgccctttgatgaaataacggggagccagcagcaaaaagtcaaacagcgcagcttacagaaactgtcctctcgccaaaggcgcacaaagcaggatatgtccaaaagtaatgggaagcggcatcatggcacgccaactagcacaaagaagactttgaagcctacctatcgcactccagagagggctcgcaggcacaaaaaagtgggccgccgagactctcaaagtagcaatgaatttttaaccatctcagactccaaggagaacattagtgttgcactgactgatgggaaagatagggggaatgtcttacaacctgaggagagcctgttggaccccttcggtgccaagcccttccattctccagacctgtcatggcaccctccacatcagggcctgagcgacatccgtgctgatcacaatactgtcctgccagggcggccaagacaaaattcactacatgggtcattccatagtgcagatgtattgaaaatggatgattttggtgccgtgccctttacagaacttgtggtgcaaagcatcactccacatcagtcccaacagtcccaaccagtcgaattagacccatttggtgctgctccatttccttctaaacagtagatacttctgatggattctcggcattaactcctgtttcaaaaaagtgtgaacagttttatgaatttgaaagaaaatttggtagctctttatagcattcattcttaaagatcagtcagaataggtgatttctaaataaaccaaatagaagaatgaagtatctctacagggtagtaacttgattcctcttcaggagaaaagggagctaaattgcaagctctaactaagggtttctgctactgacatcacaacacagaaatgcaagtgtggtacttccagtgaaagcacatggcacctttctaggtgtgtagccactgagaagggacagtgaaactgttatttttgatatcagaatgtcatttttatgtgcatatccctaaaattagggttatttctacatacactagttacacttgtgaattttttttaaggtctcttttaatttccagacagttaaaaacaatctagttatcttaaagcattagaaagttattatctggagagtgcagagatttcagtccatacacctttctccacaaagcagagccagaagtaactgactattgtgcctaaaactctgtttcatttttaaaaacaagtgccattaaaatggaatatctaatgataagcatatgaaataatgtgtaattagctcaatttaactattccacaacttacatattccaaaacaatgttatacatgataaatatatataatttttgtcagttaaaacaaattaaaaaaatggactatcgtcgcacagaagcctagaacaaaaatatgaagagaaatatctgacatttgtaaagaaattataagaagaaaaaaagatacagaacagaaaacattcactactttagaaacactttatgcatggcttcttgccccaaacttttattgtgatggccctaataaagcagattattggaaaaattggaggacaagggttgtataaaaattttattttatgaagaaaatatgtagcggaaactgaattttcaagacatttacaatgtgaaatcatgttgcatttaacaatgtactttattagcaacttcaccaaatattccccaagtcataagcaacaattatttttattaggttttggggggtggagtagttttaataaagtgcacagaatggtgacacccacaaagccttatataaaggcaggattcatgcatcctgctgcaagtacctctgcactaatataccagatcctaaaatgcatataaggtggactagcatcttaattctgctagttgattgtgtctttactgaaaagaacccagctaccaatttgcctttttttacaccacaaatcctaattagaaacttgaggttttatagaaatcatttaatgatagagattacatatgtgaattaatgtgaatatagtatctgtgcttcctgtgtctatgactattttaagatataattgtgctgcgctatcagattaacatttggaagtttctagaacagttaatgctatttacagaaaggagtagaaactcatcaactggcactctctttgatttttatattttaaattaactctcttcgatctcaaagtatattttacgagtaattttattaggaatctcttatagtgccccaatgggataagctatttgcctattttcacagttctgaacttggaaagaagcaaagtatatgtaactaaaccacatatttgtctttttattgctttttcccttcttttatatgctaaatcaaatatagatttgtggatagggaagcaatatgtgaatcacaatgtagcagaggcagaccaagcattacattattatttagagctggactgcaccaattacttgtcctcgtgccaaaggcaaatatgtttgcacctttttttttttttctgattctcaggttgattaatactgctaatgcaaatgctcaagtagatgtttaaaaactttacaaaatagattcaagtgatactttcttttaaaagtgaagagttgatgattacacatagtaaattcatgaactacagtaggtttgtatcaaacaattttttttaatgaaaatctgttgaggtgtacacaatatgcttcttgattgtattagtccttggtctctgctagacctcatgagtttcatcatttagaaaaggggtagaggatgaactaatgtctccttcagatgtaaacatgaaatacctagagttttacttgcttttcaatacactgaataattttaaatgattctgacactgatgtagaccctttgacttataaattctgaggaaacaactgacagcataaaatatttacattcttataacacagcacagtgactttcttctttcaagattgtagctcagagaaaagatacaggattcaattgggggttcaataggatagaaatggagagattcctttgtgttgtagtagaggcattttcctaaggagtatagatttatactttgcattttcattcatcatcccccagaatcatggtcaaggtgtaggtcactccacacagctgatgctcaggttattcccttgtgagaattatgagaataaagctcccaagatatgtgaaagtgcttaacacagtacctggcacacagcactcaataaaagtttggctctattatgggatggttcaattctggtttaaggaaggaagaaaggttattatatatgtaccactaagcaaatatatatatatatatatatttggggttttttttccctaatattatttgggtgtcccctgtgcttctttaggatgtagttataactaaacctgttatacttgaacatcactaagagaagtaaattattatgaagctagcaaaaatcttgaggccaaagttgtttcttaacagctttaataatgcttgttgattttgaataatcctttaaaaagtggaccatttgcttattttaatatcacgtcagtaaaatgttagtattaaaaagatcagctttttatggcattgaagaatgtatctgctaagacacaaaaattgcatggtaagtataataggtggaggaggaaaggttgtaggccggatgaaaatttaactgactagaacatttattcaggagtgtaattattttcccttaccccaatccctgtgtacgtgttgggtatagttacgacattatccggatttgcaaatagacacaactttcagtcttaccctgtttattgtttaagagtgatagactgttgtcctcttgctggtggaaaatctaaggtggagcccactcttctatgctgaagttcaccaggcagagcagttttcttacaagtcagctactctgcttggtttattttaggttttggtacttcacgtaagcactgttagaaggtacaagtgtattaatatcactagttttgaggcgcttgggtacatttgtttttaatatatttagaatgtgcagtaaacttttttctcatttttttttctttttagcaaacttgttattttaggtccaattattgagttgacagtctactgtgagaatgagatgacatatctactgtgagaataccataaatgatgaatagtttatttgagaacttttatactcagtggtgttttatatattaagataaaaatatgtacacacatgcatgtcacatctctctactgtggagttaatgtgaatttttaaaaaatggaattgcaaccacaatcatatctaagagaacattcactcctagtgagggtttacaaaagctactaagagaataaggtagatgataatgcaaagggtcatgatttggggttatttttgttttattttaaaatttatactgctacttttgaaagaattgtttttatgactatgctctttttgtgattgaaaagtcatctaatagaagctgtatagaagctactttttaattgctggcaaacagctttaagtgcactttctttgattacacttccattttttgttaaacttgaattttctgaagccttttatgtaccactaagcaaataactttaacctttaaataaagcaaatttacatctttattgtatttctacttgttacaaaacatacttgctaaagtaacttcagtcctcaaatatagctgggaaacaattatgagatagactcagtctccccctcccaccccttttcccctgccatatctaattaagcactaactgattttattactttattgcctttacactgcttattctttttgactgaattctgtccctgattcactgttttgtttgaaatttaaagttattttcttactgtatttatcatacctgttttaatctgttttctttaaatgcaataaatcccaaatggattgcatattctttataatcagtga

SEQ ID NO: 111691 - DNA, 3848 bp, Homo sapiens
  Payload ID: 1876
  Gene Symbol: BMP2K
  Gene Name: BMP2 inducible kinase
  ENST ID: ENST00000628286
  CDS Start-End: 167-1234
cggggcccaggctgtgcgcttggggagcgcggaatgtgaggcttggcgggccgcagcacgctcggacgggccaggggcggcgacccctcgcggacgcccggctgcgcgccgggccggggacttgcccttgcacgctccctgcgccctccagctcgccggcgggaccatgaagaagttctctcggatgcccaagtcggagggcggcagcggcggcggagcggcgggtggcggggctggcggggccggggccggggccggctgcggctccggcggctcgtccgtgggggtccgggtgttcgcggtcggccgccaccaggtcaccctggaagagtcgctggccgaaggtggattctccacagttttcctcgtgcgtactcacggtggaatccgatgtgcattgaagcgaatgtatgtcaataacatgccagacctcaatgtttgtaaaagggaaattacaattatgaaagagctatctggtcacaaaaatattgtgggctatttggactgtgctgttaattcaattagtgataatgtatgggaagtccttatcttaatggaatattgtcgagctggacaggtagtgaatcaaatgaataagaagctacagacgggttttacagaaccagaagtgttacagatattctgtgatacctgtgaagctgttgcaaggttgcatcagtgtaagactccaataattcaccgggatctgaaggtagaaaatattttgttgaatgatggtgggaactatgtactttgtgactttggcagtgccactaataaatttcttaatcctcaaaaagatggagttaatgtagtagaagaagaaattaaaaagtatacaactctgtcatacagagcccctgaaatgatcaacctttatggagggaaacccatcaccaccaaggctgatatctgggcactgggatgtctactctataaactttgtttcttcactcttccttttggtgagagtcaggttgctatctgtgatggcaacttcaccatcccagacaattctcgttactcccgtaacatacattgcttaataaggttcatgcttgaaccagatccggaacatagacctgatatatttcaagtgtcatattttgcatttaaatttgccaaaaaggattgtccagtctccaacatcaataagtgttgtaaacaattactgagacacggagcactgttaactgaaattcttctattccttcagctcttcctgaaccgatgactgctagtgaagcagctgctaggaaaagccaaataaaagccagaataacagataccattggaccaacagaaacctcaattgcaccaagacaaagaccaaaggccaactctgctactactgccactcccagtgtgctgaccattcaaagttcagcaacacctgttaaagtccttgctcctggtgaattcggtaaccatagaccaaaaggggcactaagacctggaaatggccctgaaattttattgggtcagggacctcctcagcagccgccacagcagcatagagtactccagcaactacagcagggagattggagattacagcaactccatttacagcatcgtcatcctcaccagcagcagcagcagcagcagcagcaacagcaacagcagcagcagcaacagcaacagcagcagcagcagcagcagcagcagcaccaccaccaccaccaccaccacctacttcaagatgcttatatgcagcagtatcaacatgcaacacagcagcaacagatgcttcaacaacaatttttaatgcattcggtatatcaaccacaaccttctgcatcacagtatcctacaatgatgccgcagtatcagcaggctttctttcaacagcagatgctagctcaacatcagccgtctcaacaacaggcatcacctgaatatcttacctcccctcaagagttctcaccagccttagtttcctacacttcatcacttccagctcaggttggaaccataatggactcctcctatagtgccaataggtcagttgctgataaagaggccattgcaaatttcacaaatcagaagaacatcagcaatccacctgatatgtcagggtggaatccttttggagaggataatttctctaagttaacagaagaggaactattggacagagaatttgaccttctaagatcaaataggctcgaggagagagcatcctcagataagaatgtagactcactttctgctccacataaccatcctccagaagatccttttggttctgttcctttcatttctcattcaggttctcctgaaaagaaagctgaacattcatctataaatcaagaaaatggcactgcaaaccctatcaagaacggtaaaacaagtccagcatctaaagatcagcggactggaaagaaaacctcagtacagggtcaagtgcaaaaggggaatgatgaatctgaaagtgattttgaatcagatcccccttctcctaagagcagtgaagaggaagagcaagatgatgaagaagttcttcagggggaacaaggagattttaatgatgatgatactgaaccagaaaatctgggtcataggcctctcctcatggattctgaagatgaggaagaagaggagaaacatagctctgattctgattatgagcaggctaaagcaaagtacagtgacatgagctctgtctacagagacagatctggcagtggaccaacccaagatcttaatacaatactcctcacctcagcccaattatcctctgatgttgcagtggagactcccaaacaggagtttgatgtatttggcgctgtccccttctttgcagtgcgtgctcaacagccccagcaagaaaagaatgaaaagaacctccctcaacacaggtttcctgctgcaggactggagcaggaggaatttgatgtattcacaaaggcgccttttagcaagaaggtgaatgtacaagaatgccatgcagtggggcctgaggcacatactatccctggttatcccaaaagtgtagatgtatttggctccactccatttcagcccttcctcacatcaacaagtaaaagtgaaagcaatgaggacctttttgggcttgtgccctttgatgaaataacggggagccagcagcaaaaagtcaaacagcgcagcttacagaaactgtcctctcgccaaaggcgcacaaagcaggatatgtccaaaagtaatgggaagcggcatcatggcacgccaactagcacaaagaagactttgaagcctacctatcgcactccagagagggctcgcaggcacaaaaaagtgggccgccgagactctcaaagtagcaatgaatttttaaccatctcagactccaaggagaacattagtgttgcactgactgatgggaaagatagggggaatgtcttacaacctgaggagagcctgttggaccccttcggtgccaagcccttccattctccagacctgtcatggcaccctccacatcagggcctgagcgacatccgtgctgatcacaatactgtcctgccagggcggccaagacaaaattcactacatgggtcattccatagtgcagatgtattgaaaatggatgattttggtgccgtgccctttacagaacttgtggtgcaaagcatcactccacatcagtcccaacagtcccaaccagtcgaattagacccatttggtgctgctccatttccttctaaacagtagatacttctgatggattctcggcattaactcctgtttcaaaaaagtgtgaacagttttatgaatttgaaagaaaatttggtagctctttatagcattcattcttaaagatcagtcagaataggtgatttctaaataaaccaaatagaagaatg

SEQ ID NO: 111692 - DNA, 7753 bp, Homo sapiens
  Payload ID: 1877
  Gene Symbol: BMS1
  Gene Name: BMS1 ribosome biogenesis factor
  Uniprot ID: Q14692
  ENST ID: ENST00000374518
  CDS Start-End: 64-3912
gctgacctgaggagtcgcggctgcgagcaggttagagttacttgttattggtaaatagccactatggaggctaaggaccagaagaaacacagaaagaaaaacagtggacccaaagctgcaaagaaaaagaagcggcttctgcaggatctccagctaggagacgaagaagatgcccggaagagaaatcccaaagcttttgcagttcagtctgctgtgcggatggctcgatcctttcacaggactcaggatttgaagacaaaaaagcatcatattccagtggttgatcgaactccactagagcccccaccaatagtggtagtggtgatgggacctccaaaagttggaaagagcactttgatacaatgcctcattcggaactttacccggcagaagttgactgagatcagaggccctgtgacgattgtgtcaggtaaaaagcgcagactcaccattattgaatgtgggtgtgacattaacatgatgattgatctggctaaagtagcagatctggtactgatgcttatagatgccagctttgggtttgaaatggaaacgtttgagtttctaaacatctgtcaagtacatggctttcctaaaattatgggagttctcacccacctcgactccttcaagcataataagcaactgaagaagacaaagaagcgattaaaacacaggttctggacggaagtttacccgggtgccaagctgttctacctttctggaatggtgcatggagaatatcaaaaccaagaaatccacaatctgggccgttttattacagttatgaagtttaggcctctcacatggcaaacttctcacccttatatcctggcagacaggatggaagatttgacaaacccagaggatatccgaacaaacatcaaatgtgaccggaaggtgtcactttatggttatttaagaggagcacacttgaaaaataaaagccaaattcacatgccaggggtaggagattttgccgtgagtgacatcagtttcctcccagacccttgcgctcttcctgaacaacaaaagaagcgctgtttaaatgagaaggagaagctggtttatgcgcctctttctggagttgggggtgtgctgtatgacaaagacgctgtctatgttgaccttggtggcagccacgtttttcaggatgaagtggggcccacccatgagctggtccagagtctcatctctacccactccaccattgatgccaagatggcttcaagtcgagtgacgctgttttctgattccaagccacttgggtcagaggatatagataatcaagggctaatgatgccaaaggaggaaaaacaaatggacttgaacactggtcgaatgcgtcggaaagccattttcggagatgaagatgaatctggagatagtgatgatgaagaagatgatgaaatgtctgaagatgacgggttggaaaacggctctagtgatgaggaagcagaagaggaggaaaatgctgagatgactgatcagtatatggctgttaagggcatcaaacgacggaaacttgagttggaagaagacagtgaaatggatttgccagcatttgctgacagtgacgatgaccttgagaggagctcagcggaagaaggggaagcggaggaagctgatgaaagcagtgaagaagaggactgcactgcaggagagaagggcatttcaggatcaaaggctgctggagaaggtagtaaagcagggctgtcaccagctaattgccagagtgaccgtgtgaatctggagaagtctttgctgatgaagaaagcagctctccccactttcgattctgggcattgcacagctgaagaggtgtttgcatctgaagatgaatctgaagaaagctcctcactcagtgcagaggaagaagactcagaaaatgaagaggctattagaaaaaagctttcaaagccttctcaagtgagcagtggtcagaaactggggccacagaacttcattgatgagaccagtgatatagaaaatttactcaaagaggaagaagattacaaggaagaaaataatgattccaaagaaacgtcaggtgccctcaagtggaaggaagacctttccagaaaggcagctgaggcctttctgaggcagcagcaagcagctccaaacctccgaaagcttatttatgggacagtgacagaagataatgaagaagaagatgatgatactctagaagagcttggagggttgtttcgtgtcaaccagcctgacagagagtgtaagcacaaggctgactctttggactgctccagatttcttgtggaggccccccatgactgggatttagaggaggttatgaacagtatcagagattgcttcgtgactggaaagtgggaagatgataaagatgcagccaaggtcttagcagaagatgaggagctctacggtgactttgaagacttggaaacaggggacgtgcacaagggaaaatcaggccccaatactcagaatgaagatatagagaaagaagttaaggaagaaattgaccccgacgaagaagaaagtgccaagaaaaagcatttggataagaagagaaaattgaaggagatgtttgatgcagaatatgatgaaggagaaagcacatattttgatgatcttaaaggagaaatgcagaaacaagcacagctgaatcgcgcagaatttgaagatcaagatgatgaagccagagttcagtatgagggttttcgacctgggatgtacgtccgcattgagattgaaaatgttccctgtgaatttgtgcagaactttgacccccattaccccattatcctgggtggcttgggcaacagtgagggaaatgttggctacgtgcagatgcgtctgaagaaacatcgctggtataagaaaatcctcaagtcccgagatccaatcatattttctgtagggtggaggaggtttcagaccatcccactgtattatatcgaagaccacaatggaagacaaaggcttctaaagtataccccacagcacatgcattgcggagcagccttttggggccctatcactccacagggaactggtttcttggcaatacagtctgtcagtggcataatgcctgattttcggatagctgctacaggagttgtccttgatctggataaatccataaaaattgtgaagaaattaaagctaactggttttccatataaaattttcaagaacacttcatttattaagggaatgtttaattctgccttggaagtggccaaatttgaaggtgctgtgattcgaacagtcagtgggataagggggcagatcaagaaagcactccgagctccagaaggagctttcagggccagctttgaggataagctgctgatgagcgatattgtcttcatgcgaacttggtatcctgtttccatcccagcgttctataacccagtaacatctttgttgaaaccagtgggtgagaaagacacctggtcaggaatgcggaccacgggccaactcaggctcgcccatggcgtcagactaaaggcgaacaaggactctctgtataagccaatcctgaggcaaaagaaacattttaattcactgcacattccaaaagccttgcagaaggccctgccatttaagaacaagcccaagacccaagcaaaggcaggcaaggtgccaaaggacaggcggagaccggccgtcatacgcgagcctcatgaaagaaagatccttgcactgctggatgctctgagtacggtgcatagtcagaagatgaagaaggccaaggagcagcggcacctgcacaataaagagcacttcagagccaagcagaaggaggaggaggagaagctgaagcggcagaaggacctcaggaagaagctcttcagaattcaggggcagaaggaaagaagaaaccagaagtccagtttgaagggggctgagggccaattgcagtgagcctttggactggagggactgtccctggatctgcggaggtagacagtttcaaacatcacagtttgaatgcctgtgaatgacaagtcagtgggaaagagctcaagagatgtctctactcaaactgtgcctgcaggaggaggaacagagaagcctgggctgctgggactgggttcattctcatgacttggggctgtcgagatttaaagtgatgtaagctgtggttatgtggattctcttactttcctctgcctgcctcagtttaattattttgtcctacagaaatatcattaaaatatttttttgttacttttggcttagtagttttcattagggatgaatgcctgacaattctttgtggataattatttatactaccaccttcatgaggagtcttccagaagagaaagaaatattcacttgaactctgagctcccatggaagattttagagaatagtgtgtagtgtttttgttttgttttttgtttgagtgacacacaaacctagatggtacagcctactgtgcacccaggatctatgggctcctttgatcactggcccttgtggacattttctatcttatttcatatgttctgcacattagtatagtgacaaggtaacagtaagtacttttttaaagctttagacttaggagattattgtctcaggtgcagagaccaaggaaatcgtatgtatcagtgagataggcttcccgtattatgctcatgcgttatacctgcctagctacattgcctttttttaaattaaacattatgttgaagtaatcatactattacataggcgatgtatgtattttatgattgtatgttgatatagttatggggaatctattcctatacgatgtaatcatagattcacatatagttgtatattttgcccaatttctctcagtggtaatgtttcacacatataacaatcaggatgttgacatcaatacagcccgctgattttattcacatttccccagctttactttccccaacgtatactcctccatgtatgcatgggtgtgtagaaatatggaacgcagctgggcacagtgactcacgcctgtaatcccagcactttgggatgctaaggcaggaggatcacttgagcccaggaatttgagaccaacttgggcaacatggcaaaacctcatcgctacaaaaaataaaaaattcgccaggtgtggtgggtgcacacctgtagttccagctgcttgggaggctgaggtaggaggatcacttgagcttgggaggttgaggctgcagtgagccatgatagcaccactgcactccagcctgggcgacagggcaagaccctgtttcaaaaaaaaaaaattatacatatatgtatgtagaacacttcatgaatttgtgtgtcatctgtgcatggggcccatgctgacctctgtgttgtgccagttatagtatgtgtgctgctgatatgagtgccacattgcctttacaacatcataggggccaaagagggttggcaggattatgagcagttggcctagtctgagaggctctctaaaagcctaaagtctgtaggcaggtgctcagctttgtatctccataagaagggaagaggatgtgaggatcctgtcagggctaggtccacctgggaagtgacaattggaacactcccagacctctctgggcaactctgggtgtacattttcctctgttcctcaagagctattatgaatttcatcatccattatgctgataggcctggggactgacacatagtaagcccataacaattataatttaaaactaatttgttatatagcataattgatatattttaaaatgcaaaactataattcaactaaaatatacaaggcactcaagtcataccatgttttaagtagcttacaaggtgatcagcaagtgtcttatacaacaagcaaatttgttcaaagagaagcattgcaaataagtatttataattgtatagttttatattttagccagaagagtggaatcctttagcaatgggggaaataaaagaatgtttaattacagttgcagataattgccttttccaaagacaatgtatgtaggcagaactcatacctgttaatattaaaaatcttggtttatcatatttggagaacaagggaaataaaaagtttgcatattaagattatttaaactaaagttaaggaatctctaatgtctgaaagaaacaataaatagcatttttcatgtagaatttttattggtgaaggttccacctggccaggttagtaaaatacagtcacacatcagttaaggatggggatatattctgagaaatgtatcattaggcaattttgtcattgtgtaaacatcatagagtgacacacaaacctagatggtacagcctactgtgcacctgggctctatggtatggcctgttgctcctaggctacaaacctgggcagcatgtgactgtactgactactgtaggcagttgtaacacagtggtaaacatttgtgtatcgaaacatagaaaaggcgtagcaaaaatacagtattgtggaaccactgccatatacgtggtccatccttgactgaacatcatgcggcatgtggctgtatgtatacacatagtttttgctgtgagtttgcatccatctcataggaagacatatatcaaaataaggaccagactggagagtgtgtaaattacttttcaatactaatggcttattaatttgatattgtcagcaagtatgttgcaaaaacaaattccaccagaatgtgagttccatgagagcaggaactgggttgttcaccttgttggcacttggagtagagccactgagcttcgtgctgcataaaattgcttggaagaaagaagggagggcattccaggtaactgaagcattgctatgcaaagtaagcatttgccctctgaaatattttaacaatgtttatagaaacctttctcaattgtattaaactttgtaaattgtaaaaattattctgttataccttttctatttactaggcacaggcagccataggtgctaggtatgttttgaaaacatattgaacctacagtgtacatatcattccatgccattaaatattcttatttaatcatagatgtgttcaggtgtgtttggtttcctatttgtggatgtactagattgttttctttttttaacaaaacctgtgaacttgctttaagtattatcatttggtgacatgcccgccatttcagaaataaatgtttgagcaaagaggaaagccaccgggtctgattcagctctctggaggctccagagcttacctcgctgatgggaaaaagagcatcgatttaattgcccttggtaccgacttctagtatctagtattttgccagactcaggtatttcttaaagccattattcagagtcttcagcaaggacattgtattttacttgtgtctccttagttttacctagtttatttcatggttttaaagtattgtacatttttataatcctttaacaagacaaaaggttgagatgttggacatttaaatgccaaaggtgttttattatgagacttagcatttcatatttggggatggtaccttatcgaaaatcagataaactttggttggatgggtatttggaggaatcttttaagtcttttcttaagcaaagtttggacactctaaaataaggttgccaactggcatgtagagagaaaaggatgtgtcatacatttagaccaggtggcctgtcctgtaaatttttttgaggggaggggtgggcttgtttttttctgtgtttcggttttttccaatttttgttttgtgataaaatatgcataataaaacttattttatcaatttttaa

SEQ ID NO: 111693 - DNA, 2531 bp, Homo sapiens
  Payload ID: 1878
  Gene Symbol: BMX
  Gene Name: BMX non-receptor tyrosine kinase
  Uniprot ID: P51813
  ENST ID: ENST00000348343
  CDS Start-End: 122-2149
aggaaaatgtgaaacaatttgcttctggaaacaggacagccggggccgtgttcctgcaacagcagaccaagcaccgcggcggacccaggcaagcacggaacaagctgagacggatgataatatggatacaaaatctattctagaagaacttcttctcaaaagatcacagcaaaagaagaaaatgtcaccaaataattacaaagaacggctttttgttttgaccaaaacaaacctttcctactatgaatatgacaaaatgaaaaggggcagcagaaaaggatccattgaaattaagaaaatcagatgtgtggagaaagtaaatctcgaggagcagacgcctgtagagagacagtacccatttcagattgtctataaagatgggcttctctatgtctatgcatcaaatgaagagagccgaagtcagtggttgaaagcattacaaaaagagataaggggtaacccccacctgctggtcaagtaccatagtgggttcttcgtggacgggaagttcctgtgttgccagcagagctgtaaagcagccccaggatgtaccctctgggaagcatatgctaatctgcatactgcagtcaatgaagagaaacacagagttcccaccttcccagacagagtgctgaagatacctcgggcagttcctgttctcaaaatggatgcaccatcttcaagtaccactctagcccaatatgacaacgaatcaaagaaaaactatggctcccagccaccatcttcaagtaccagtctagcgcaatatgacagcaactcaaagaaaatctatggctcccagccaaacttcaacatgcagtatattccaagggaagacttccctgactggtggcaagtaagaaaactgaaaagtagcagcagcagtgaagatgttgcaagcagtaaccaaaaagaaagaaatgtgaatcacaccacctcaaagatttcatgggaattccctgagtcaagttcatctgaagaagaggaaaacctggatgattatgactggtttgctggtaacatctccagatcacaatctgaacagttactcagacaaaagggaaaagaaggagcatttatggttagaaattcgagccaagtgggaatgtacacagtgtccttatttagtaaggctgtgaatgataaaaaaggaactgtcaaacattaccacgtgcatacaaatgctgagaacaaattatacctggcagaaaactactgttttgattccattccaaagcttattcattatcatcaacacaattcagcaggcatgatcacacggctccgccaccctgtgtcaacaaaggccaacaaggtccccgactctgtgtccctgggaaatggaatctgggaactgaaaagagaagagattaccttgttgaaggagctgggaagtggccagtttggagtggtccagctgggcaagtggaaggggcagtatgatgttgctgttaagatgatcaaggagggctccatgtcagaagatgaattctttcaggaggcccagactatgatgaaactcagccatcccaagctggttaaattctatggagtgtgttcaaaggaataccccatatacatagtgactgaatatataagcaatggctgcttgctgaattacctgaggagtcacggaaaaggacttgaaccttcccagctcttagaaatgtgctacgatgtctgtgaaggcatggccttcttggagagtcaccaattcatacaccgggacttggctgctcgtaactgcttggtggacagagatctctgtgtgaaagtatctgactttggaatgacaaggtatgttcttgatgaccagtatgtcagttcagtcggaacaaagtttccagtcaagtggtcagctccagaggtgtttcattacttcaaatacagcagcaagtcagacgtatgggcatttgggatcctgatgtgggaggtgttcagcctggggaagcagccctatgacttgtatgacaactcccaggtggttctgaaggtctcccagggccacaggctttaccggccccacctggcatcggacaccatctaccagatcatgtacagctgctggcacgagcttccagaaaagcgtcccacatttcagcaactcctgtcttccattgaaccacttcgggaaaaagacaagcattgaagaagaaattaggagtgctgataagaatgaatatagatgctggccagcattttcattcattttaaggaaagtagcaaggcataatgtaatttagctagtttttaatagtgttctctgtattgtctattatttagaaatgaacaaggcaggaaacaaaagattcccttgaaatttagatcaaattagtaattttgtttatgctgctcctgatataacactttccagcctatagcagaagcacattttcagactgcaatatagagactgtgttcatgtgtaaagactgagcagaactgaaaaattacttattggatattcattcttttctttatattgtcattgtcacaacaattaaatatactaccaagtacagaaatgtgga

SEQ ID NO: 111694 - DNA, 2499 bp, Homo sapiens
  Payload ID: 1878
  Gene Symbol: BMX
  Gene Name: BMX non-receptor tyrosine kinase
  Uniprot ID: P51813
  ENST ID: ENST00000342014
  CDS Start-End: 102-2129
gtgatggtgcctcaaagcagtaactttttgcttagagcttgagagtcaaagttaaggacccacatgtatacttcggctctagcgagtctaaggatgataatatggatacaaaatctattctagaagaacttcttctcaaaagatcacagcaaaagaagaaaatgtcaccaaataattacaaagaacggctttttgttttgaccaaaacaaacctttcctactatgaatatgacaaaatgaaaaggggcagcagaaaaggatccattgaaattaagaaaatcagatgtgtggagaaagtaaatctcgaggagcagacgcctgtagagagacagtacccatttcagattgtctataaagatgggcttctctatgtctatgcatcaaatgaagagagccgaagtcagtggttgaaagcattacaaaaagagataaggggtaacccccacctgctggtcaagtaccatagtgggttcttcgtggacgggaagttcctgtgttgccagcagagctgtaaagcagccccaggatgtaccctctgggaagcatatgctaatctgcatactgcagtcaatgaagagaaacacagagttcccaccttcccagacagagtgctgaagatacctcgggcagttcctgttctcaaaatggatgcaccatcttcaagtaccactctagcccaatatgacaacgaatcaaagaaaaactatggctcccagccaccatcttcaagtaccagtctagcgcaatatgacagcaactcaaagaaaatctatggctcccagccaaacttcaacatgcagtatattccaagggaagacttccctgactggtggcaagtaagaaaactgaaaagtagcagcagcagtgaagatgttgcaagcagtaaccaaaaagaaagaaatgtgaatcacaccacctcaaagatttcatgggaattccctgagtcaagttcatctgaagaagaggaaaacctggatgattatgactggtttgctggtaacatctccagatcacaatctgaacagttactcagacaaaagggaaaagaaggagcatttatggttagaaattcgagccaagtgggaatgtacacagtgtccttatttagtaaggctgtgaatgataaaaaaggaactgtcaaacattaccacgtgcatacaaatgctgagaacaaattatacctggcagaaaactactgttttgattccattccaaagcttattcattatcatcaacacaattcagcaggcatgatcacacggctccgccaccctgtgtcaacaaaggccaacaaggtccccgactctgtgtccctgggaaatggaatctgggaactgaaaagagaagagattaccttgttgaaggagctgggaagtggccagtttggagtggtccagctgggcaagtggaaggggcagtatgatgttgctgttaagatgatcaaggagggctccatgtcagaagatgaattctttcaggaggcccagactatgatgaaactcagccatcccaagctggttaaattctatggagtgtgttcaaaggaataccccatatacatagtgactgaatatataagcaatggctgcttgctgaattacctgaggagtcacggaaaaggacttgaaccttcccagctcttagaaatgtgctacgatgtctgtgaaggcatggccttcttggagagtcaccaattcatacaccgggacttggctgctcgtaactgcttggtggacagagatctctgtgtgaaagtatctgactttggaatgacaaggtatgttcttgatgaccagtatgtcagttcagtcggaacaaagtttccagtcaagtggtcagctccagaggtgtttcattacttcaaatacagcagcaagtcagacgtatgggcatttgggatcctgatgtgggaggtgttcagcctggggaagcagccctatgacttgtatgacaactcccaggtggttctgaaggtctcccagggccacaggctttaccggccccacctggcatcggacaccatctaccagatcatgtacagctgctggcacgagcttccagaaaagcgtcccacatttcagcaactcctgtcttccattgaaccacttcgggaaaaagacaagcattgaagaagaaattaggagtgctgataagaatgaatatagatgctggccagcattttcattcattttaaggaaagtagcaaggcataatgtaatttagctagtttttaatagtgttctctgtattgtctattatttagaaatgaacaaggcaggaaacaaaagattcccttgaaatttagatcaaattagtaattttgtttatgctgctcctgatataacactttccagcctatagcagaagcacattttcagactgcaatatagagactgtgttcatgtgtaaagactgagcagaactgaaaaattacttattggatattcattcttttctttatattgtcattgtcacaacaattaaatatactaccaagta

SEQ ID NO: 111695 - DNA, 2598 bp, Homo sapiens
  Payload ID: 1878
  Gene Symbol: BMX
  Gene Name: BMX non-receptor tyrosine kinase
  Uniprot ID: P51813
  ENST ID: ENST00000357607
  CDS Start-End: 189-2216
atgaacatacatcacaatgtgaacagtggtcatctccagatagtagaatttcagatatgtttctttccatttttctgacagtttgaattttctgtaataattaattgacttttatacaatggaaacaacttttttgttttggaaaaaagaaagatgctgccgctaatcagtggatgaaagatgataatatggatacaaaatctattctagaagaacttcttctcaaaagatcacagcaaaagaagaaaatgtcaccaaataattacaaagaacggctttttgttttgaccaaaacaaacctttcctactatgaatatgacaaaatgaaaaggggcagcagaaaaggatccattgaaattaagaaaatcagatgtgtggagaaagtaaatctcgaggagcagacgcctgtagagagacagtacccatttcagattgtctataaagatgggcttctctatgtctatgcatcaaatgaagagagccgaagtcagtggttgaaagcattacaaaaagagataaggggtaacccccacctgctggtcaagtaccatagtgggttcttcgtggacgggaagttcctgtgttgccagcagagctgtaaagcagccccaggatgtaccctctgggaagcatatgctaatctgcatactgcagtcaatgaagagaaacacagagttcccaccttcccagacagagtgctgaagatacctcgggcagttcctgttctcaaaatggatgcaccatcttcaagtaccactctagcccaatatgacaacgaatcaaagaaaaactatggctcccagccaccatcttcaagtaccagtctagcgcaatatgacagcaactcaaagaaaatctatggctcccagccaaacttcaacatgcagtatattccaagggaagacttccctgactggtggcaagtaagaaaactgaaaagtagcagcagcagtgaagatgttgcaagcagtaaccaaaaagaaagaaatgtgaatcacaccacctcaaagatttcatgggaattccctgagtcaagttcatctgaagaagaggaaaacctggatgattatgactggtttgctggtaacatctccagatcacaatctgaacagttactcagacaaaagggaaaagaaggagcatttatggttagaaattcgagccaagtgggaatgtacacagtgtccttatttagtaaggctgtgaatgataaaaaaggaactgtcaaacattaccacgtgcatacaaatgctgagaacaaattatacctggcagaaaactactgttttgattccattccaaagcttattcattatcatcaacacaattcagcaggcatgatcacacggctccgccaccctgtgtcaacaaaggccaacaaggtccccgactctgtgtccctgggaaatggaatctgggaactgaaaagagaagagattaccttgttgaaggagctgggaagtggccagtttggagtggtccagctgggcaagtggaaggggcagtatgatgttgctgttaagatgatcaaggagggctccatgtcagaagatgaattctttcaggaggcccagactatgatgaaactcagccatcccaagctggttaaattctatggagtgtgttcaaaggaataccccatatacatagtgactgaatatataagcaatggctgcttgctgaattacctgaggagtcacggaaaaggacttgaaccttcccagctcttagaaatgtgctacgatgtctgtgaaggcatggccttcttggagagtcaccaattcatacaccgggacttggctgctcgtaactgcttggtggacagagatctctgtgtgaaagtatctgactttggaatgacaaggtatgttcttgatgaccagtatgtcagttcagtcggaacaaagtttccagtcaagtggtcagctccagaggtgtttcattacttcaaatacagcagcaagtcagacgtatgggcatttgggatcctgatgtgggaggtgttcagcctggggaagcagccctatgacttgtatgacaactcccaggtggttctgaaggtctcccagggccacaggctttaccggccccacctggcatcggacaccatctaccagatcatgtacagctgctggcacgagcttccagaaaagcgtcccacatttcagcaactcctgtcttccattgaaccacttcgggaaaaagacaagcattgaagaagaaattaggagtgctgataagaatgaatatagatgctggccagcattttcattcattttaaggaaagtagcaaggcataatgtaatttagctagtttttaatagtgttctctgtattgtctattatttagaaatgaacaaggcaggaaacaaaagattcccttgaaatttagatcaaattagtaattttgtttatgctgctcctgatataacactttccagcctatagcagaagcacattttcagactgcaatatagagactgtgttcatgtgtaaagactgagcagaactgaaaaattacttattggatattcattcttttctttatattgtcattgtcacaacaattaaatatactaccaagtacagaaatgtgga

SEQ ID NO: 111696 - DNA, 1580 bp, Homo sapiens
  Payload ID: 1879
  Gene Symbol: ABO
  Gene Name: BO blood group (transferase A, alpha 1-3-N-acetylgalactosaminyltransferase
  transferase B, alpha 1-3-galactosyltransferase)
  ENST ID: ENST00000626615
  CDS Start-End: 26-1090
ggaggccgagaccagacgcggagccatggccgaggtgttgcggacgctggccggaaaaccaaaatgccacgcacttcgacctatgatccttttcctaataatgcttgtcttggtcttgtttggttacggggtcctaagccccagaagtctaatgccaggaagcctggaacgggggttctgcatggctgttagggaacctgaccatctgcagcgcgtctcgttgccaaggatggtctacccccagccaaaggtgctgacaccgtgtaggaaggatgtcctcgtggtgaccccttggctggctcccattgtctgggagggcacattcaacatcgacatcctcaacgagcagttcaggctccagaacaccaccattgggttaactgtgtttgccatcaagaaatacgtggctttcctgaagctgttcctggagacggcggagaagcacttcatggtgggccaccgtgtccactactatgtcttcaccgaccagctggccgcggtgccccgcgtgacgctggggaccggtcggcagctgtcagtgctggaggtgcgcgcctacaagcgctggcaggacgtgtccatgcgccgcatggagatgatcagtgacttctgcgagcggcgcttcctcagcgaggtggattacctggtgtgcgtggacgtggacatggagttccgcgaccacgtgggcgtggagatcctgactccgctgttcggcaccctgcaccccggcttctacggaagcagccgggaggccttcacctacgagcgccggccccagtcccaggcctacatccccaaggacgagggcgatttctactacctgggggggttcttcggggggtcggtgcaagaggtgcagcggctcaccagggcctgccaccaggccatgatggtcgaccaggccaacggcatcgaggccgtgtggcacgacgagagccacctgaacaagtacctgctgcgccacaaacccaccaaggtgctctcccccgagtacttgtgggaccagcagctgctgggctggcccgccgtcctgaggaagctgaggttcactgcggtgcccaagaaccaccaggcggtccggaacccgtgagcggctgccaggggctctgggagggctgccggcagccccgtccccctcccgcccttggttttagcagaacgggtaaactctgtttcctttgtccgtcctgttgtgagtaactgaagcctaggccccgtccccacctcaaatcacacacaccccctccccaccacagagacaccattacatacacagacacacacagaaagacacacacagacacaaaatcacacacacaccctccccgccacagagacaccattacatacacagacacacacagaaagacacagacacaaaatcacacacacaccctccccgccacagagacacaccattacatacacagacacgcaatcgcagatacgcccttccggccacagaaacacaccattacacacacatacacagaaagacacacacagacacacaatcacacgcagcccctccccgccacagagacacaccattacatacacagacacacacagaaagacac

SEQ ID NO: 111697 - DNA, 3517 bp, Homo sapiens
  Payload ID: 1880
  Gene Symbol: BBX
  Gene Name: bobby sox homolog (Drosophila)
  Uniprot ID: Q8WY36
  ENST ID: ENST00000325805
  CDS Start-End: 288-3113
atgtggagcagtgtacagtgaagcggaggcagagcggctccgcgagcttctctccactttcccatagagaaaccctgactggccgctgagggctagctacacacacgccctcacgcccggcgagcccgcgaggtcactatcatatgacaaaggctttgccgcagttcatcttcctccctgtgtactttccatttgccttcctggaatcctgctgcatcacagaagctggaagttctgatgttccactgaaatcacaatggaaagtcttgacttgactggtcacagtaatgaaaggcagtaatagaaataaggatcattcagcagaaggagaaggggttggaaaacgaccaaaacgaaagtgtcttcagtggcatccattgctagcaaagaaacttcttgatttttcagaagaggaagaagaggaagacgaagaggaggatattgataaggttcaacttcttggggccgatggcctagagcaagatgttggtgaaactgaagatgatgaatcaccagagcagcgagcccggagaccaatgaatgcatttcttttattttgcaaacgccatcgctctcttgtacgtcaggaacaccccaggcttgataaccgaggtgctaccaagatactagctgattggtgggctgttcttgatccaaaggaaaagcagaaatacacagacatggccaaggagtataaggatgcatttatgaaagcaaatcctggctacaaatggtgtcctaccacaaacaagcctgtgaaatccccaacacccactgtcaatccacgaaagaaactttgggccttcccatctgactcttcaagagacttgccaagccccaagaaagcaaagactgaagaaatgcctcagcttaactttggaatggctgatcctactcaaatgggaggcctgagtatgctgctgttagctggagaacatgctcttggcacaccagaggtatcctctggcacatgcaggcctgatgtttcagaatctcctgaattacgtcagaagtcaccattgtttcagtttgccgagatatcttcaagtacgtcccactctgatgcttctacaaagcagtgtcaaacatctgccttgtttcagtttgcagagatttcttcaaacacttcgcagttgggtggtgctgagcctgtaaaacgctgtggaaagtctgcactctttcaactggcagagatgtgcctggcatcagaagggatgaaaatggaagaatcaaagctaataaaagcaaaagaatccgatggtggaagaattaaagaattagagaagggaaaggaagaaaaagaaattaaaatggagaaaacagatgaaactaggttacagaaggaagcagaatttgaaaaatcggctaaggaaaatttaagagattctaaggaattgagaaattttgaggcattgcaaatagatgacataatggctataaaaatggaagatcccaaagaaattagaaaggaagagttagaagaagatcacaaatgtagtcattttcctgatttttcttattctgccagtagcaagataataattagtgatgttcccagtagaaaggatcatatgtgccatcctcatggaattatgatcattgaggatcccgcagcattaaacaagccagaaaagctaaaaaagaaaaagaagaaaagcaaaatggatcgacatggaaatgataaatccacacccaagaagacttgcaaaaagaggcagtcttcggaatctgacattgagagcgtcatatataccattgaagccgtcgcaaaaggagactggggcatagagaaacttggagatacccctcgcaagaaggtccgcacatcctcaagtggcaagggaagcattttggatgccaagccaccaaagaaaaaagtgaaatcaagagagaagaaaatgtcaaaggagaaatcctcagacaccaccaaagagtcaagacctccagatttcattagtatttctgctagcaagaacatttctggtgagacaccagagggtataaaagcagaaccattgacccctatggaagatgcactaccacccagcctatcaggacaggccaagcctgaggacagtgactgtcacagaaaaatagaaacttgtggttccaggaaatccgagaggtcttgcaaaggtgctctttataaaaccctggtgtctgagggcatgctcacctctctgcgagctaatgttgacagaggaaaacgaagctcaggaaaaggaaactcctctgatcatgaagggtgttggaatgaagaaagctggacatttagtcagagtgggaccagtgggagcaagaagttcaagaagacaaagccaaaagaagactgtctccttggctccgcaaagctggatgaagaatttgaaaaaaaattcaacagcctccctcaatatagtcctgttacatttgaccggaaatgtgtacctgtcccaagaaaaaagaagaagactggaaatgtgtcctcagaaccgactaaaaccagcaaaggtcctttccagtctcagaaaaagaacttattccacaaaattgtcagcaaatataagcacaaaaaggagaagcccaatgttccggaaaaaggaagtggggataaatggtcaaacaagcaactcttcttggatgccattcaccctacagaagccatattttcagaagacagaaacaccatggagcctgttcataaggttaaaaatatcccatccattttcaacactccagagccaacaacaacgcaagaacctttggtgggcagccaaaagagaaaagcaaggaaaaccaagattacacaccttgtcaggacagcagatggccgggtatcaccagcaggaggtactttggatgacaaaccaaaggaacaactgcagaggagtctccctaaagcaactgagacagactgcaatgacaaatgctcacacaacaccgaggtcggggagacgcggagcagtactccagaaatgcctgccgtgtctgcgttctttagcctcgctgcgctggctgaagtggcagccatggaaaatgtgcacagaggtcagaggtcaactccgctcacccatgatggacagccaaaagaaatgccgcaggctcctgtacttatttcctgcgctgaccagtgaagcgccctttcattgtaaaacattgtgctttacctactaccctagccttgtctttaccgagggatgctagtgagtccaagtggtggaaaatatagactgcaaacaagtgcttgttgccccacacggcccagattcacttgaagcagaagttagcatcctgggccagtttgttctctcagaacccagaatctttgagggtaaggttatctgtctgatactgagcagaaacagaatgatcctggagctttgctttctattgaaggcttttgacggtaataggtggtaacttggtaaaaggctgcctttactgtagctcacccagcatctcttttaccaaccagagagtgtgaaactagtttcatatattacctagttattctttcaaaacaaaacaaaaaaaaaac

SEQ ID NO: 111698 - DNA, 3980 bp, Homo sapiens
  Payload ID: 1880
  Gene Symbol: BBX
  Gene Name: bobby sox homolog (Drosophila)
  ENST ID: ENST00000402543
  CDS Start-End: 420-3095
ggttgcatgtactgtatgtggagcagtgtacagtgaagcggaggcagagcggctccgcgagcttctctccactttcccatagagaaaccctgactggccgctgagggctagctacacacacgccctcacgcccggcgagcccgcgaggtcactatcatatgacaaaggctttgccgcagttcatcttcctccctgtgtactttccatttgccttcctggaatcctgctgcatcacagaagctggaagttctgatgttccactgaaatcacaatggaaagtcttgacttgactggcaccctcaggaagaccccaagcctctagcagtacctggtatcatctccagcatgttatagatgtggaggattcactgggatattgagaaataccagaggcgaattgttccactgtagtcacagtaatgaaaggcagtaatagaaataaggatcattcagcagaaggagaaggggttggaaaacgaccaaaacgaaagtgtcttcagtggcatccattgctagcaaagaaacttcttgatttttcagaagaggaagaagaggaagacgaagaggaggatattgataaggttcaacttcttggggccgatggcctagagcaagatgttggtgaaactgaagatgatgaatcaccagagcagcgagcccggagaccaatgaatgcatttcttttattttgcaaacgccatcgctctcttgtacgtcaggaacaccccaggcttgataaccgaggtgctaccaagatactagctgattggtgggctgttcttgatccaaaggaaaagcagaaatacacagacatggccaaggagtataaggatgcatttatgaaagcaaatcctggctacaaatggtgtcctaccacaaacaagcctgtgaaatccccaacacccactgtcaatccacgaaagaaactttgggccttcccatctgactcttcaagagacttgccaagccccaagaaagcaaagactgaagaaatgcctcagcttaactttggaatggctgatcctactcaaatgggaggcctgagtatgctgctgttagctggagaacatgctcttggcacaccagaggtatcctctggcacatgcaggcctgatgtttcagaatctcctgaattacgtcagaagtcaccattgtttcagtttgccgagatatcttcaagtacgtcccactctgatgcttctacaaagcagtgtcaaacatctgccttgtttcagtttgcagagatttcttcaaacacttcgcagttgggtggtgctgagcctgtaaaacgctgtggaaagtctgcactctttcaactggcagagatgtgcctggcatcagaagggatgaaaatggaagaatcaaagctaataaaagcaaaagaatccgatggtggaagaattaaagaattagagaagggaaaggaagaaaaagaaattaaaatggagaaaacagatgaaactaggttacagaaggaagcagaatttgaaaaatcggctaaggaaaatttaagagattctaaggaattgagaaattttgaggcattgcaaatagatgacataatggctataaaaatggaagatcccaaagaaattagaaaggaagagttagaagaagatcacaaatgtagtcattttcctgatttttcttattctgccagtagcaagataataattagtgatgttcccagtagaaaggatcatatgtgccatcctcatggaattatgatcattgaggatcccgcagcattaaacaagccagaaaagctaaaaaagaaaaagaagaaaagcaaaatggatcgacatggaaatgataaatccacacccaagaagacttgcaaaaagaggcagtcttcggaatctgacattgagagcgtcatatataccattgaagccgtcgcaaaaggagactggggcatagagaaacttggagatacccctcgcaagaaggtccgcacatcctcaagtggcaagggaagcattttggatgccaagccaccaaagaaaaaagtgaaatcaagagagaagaaaatgtcaaaggagaaatcctcagacaccaccaaagagtcaagacctccagatttcattagtatttctgctagcaagaacatttctggtgagacaccagagggtataaaagcagaaccattgacccctatggaagatgcactaccacccagcctatcaggacaggccaagcctgaggacagtgactgtcacagaaaaatagaaacttgtggttccaggaaatccgagaggtcttgcaaaggtgctctttataaaaccctggtgtctgagggcatgctcacctctctgcgagctaatgttgacagaggaaaacgaagctcaggaaaaggaaactcctctgatcatgaagggtgttggaatgaagaaagctggacatttagtcagagtgggaccagtgggagcaagaagttcaagaagacaaagccaaaagaagactgtctccttggctccgcaaagctggatgaagaatttgaaaaaaaattcaacagcctccctcaatatagtcctgttacatttgaccggaaatgtgtacctgtcccaagaaaaaagaagaagactggaaatgtgtcctcagaaccgactaaaaccagcaaagccatattttcagaagacagaaacaccatggagcctgttcataaggttaaaaatatcccatccattttcaacactccagagccaacaacaacgcaagaacctttggtgggcagccaaaagagaaaagcaaggaaaaccaagattacacaccttgtcaggacagcagatggccgggtatcaccagcaggaggtactttggatgacaaaccaaaggaacaactgcagaggagtctccctaaagcaactgagacagactgcaatgacaaatgctcacacaacaccgaggtcggggagacgcggagcagtactccagaaatgcctgccgtgtctgcgttctttagcctcgctgcgctggctgaagtggcagccatggaaaatgtgcacagaggtcagaggtcaactccgctcacccatgatggacagccaaaagaaatgccgcaggctcctgtacttatttcctgcgctgaccagtgaagcgccctttcattgtaaaacattgtgctttacctactaccctagccttgtctttaccgagggatgctagtgagtccaagtggtggaaaatatagactgcaaacaagtgcttgttgccccacacggcccagattcacttgaagcagaagttagcatcctgggccagtttgttctctcagaacccagaatctttgagggtaaggttatctgtctgatactgagcagaaacagaatgatcctggagctttgctttctattgaaggcttttgacggtaataggtggtaacttggtaaaaggctgcctttactgtagctcacccagcatctcttttaccaaccagagagtgtgaaactagtttcatatattacctagttattctttcaaaacaaaacaaaaaaaaaacaaaaactgacgcactgcactagttattattagatattcttagtcttttttgtacatggagatttaagtttaagatggtttatataataggttatacctacatttatattgtagaataaatattaaaaagcctgttccagagactcccaagcagcctgggcaggcagatgtaccattgttagtggtgtatgctcggcctcgtggtccatatattctgcacttttatatttgccaccagaatggtagtttgctggcaaaaaaaaaaaaaaaagagagagagaaaaaattacaactcttacaatctgaatttttttcttagccttgagtgaccaagaagaatttgcttgaggcaaattgtggcaaatattttcccagacaggggaagagtcctgcagattacagattactggtgttttcatgccttgaggattcttttatttttacataggggtctaagtgaccaatggattgttcatacaaac

SEQ ID NO: 111699 - DNA, 1586 bp, Homo sapiens
  Payload ID: 1880
  Gene Symbol: BBX
  Gene Name: bobby sox homolog (Drosophila)
  ENST ID: ENST00000402163
  CDS Start-End: 242-1586
agttcgagcaggcacgggcacggggacaccccactcgttgctcctccgttatggaaaggtgtttagcagacttttacgcccggagtgtcactatcatatgacaaaggctttgccgcagttcatcttcctccctgtgtactttccatttgccttcctggaatcctgctgcatcacagaagctggaagttctgatgttccactgaaatcacaatggaaagtcttgacttgactggtcacagtaatgaaaggcagtaatagaaataaggatcattcagcagaaggagaaggggttggaaaacgaccaaaacgaaagtgtcttcagtggcatccattgctagcaaagaaacttcttgatttttcagaagaggaagaagaggaagacgaagaggaggatattgataaggttcaacttcttggggccgatggcctagagcaagatgttggtgaaactgaagatgatgaatcaccagagcagcgagcccggagaccaatgaatgcatttcttttattttgcaaacgccatcgctctcttgtacgtcaggaacaccccaggcttgataaccgaggtgctaccaagatactagctgattggtgggctgttcttgatccaaaggaaaagcagaaatacacagacatggccaaggagtataaggatgcatttatgaaagcaaatcctggctacaaatggtgtcctaccacaaacaagcctgtgaaatccccaacacccactgtcaatccacgaaagaaactttgggccttcccatctgactcttcaagagacttgccaagccccaagaaagcaaagactgaagaaatgcctcagcttaactttggaatggctgatcctactcaaatgggaggcctgagtatgctgctgttagctggagaacatgctcttggcacaccagaggtatcctctggcacatgcaggcctgatgtttcagaatctcctgaattacgtcagaagtcaccattgtttcagtttgccgagatatcttcaagtacgtcccactctgatgcttctacaaagcagtgtcaaacatctgccttgtttcagtttgcagagatttcttcaaacacttcgcagttgggtggtgctgagcctgtaaaacgctgtggaaagtctgcactctttcaactggcagagatgtgcctggcatcagaagggatgaaaatggaagaatcaaagctaataaaagcaaaagaatccgatggtggaagaattaaagaattagagaagggaaaggaagaaaaagaaattaaaatggagaaaacagatgaaactaggttacagaaggaagcagaatttgaaaaatcggctaaggaaaatttaagagattctaaggaattgagaaattttgaggcattgcaaatagatgacataatggctataaaaatggaagatcccaaagaaattagaaaggaagagttagaagaagatcacaaatgtagtcattttcctgatttttcttattctgccagtagcaagataataattagtgatgttcccagtagaaaggatcatatgtgccatcctcatggaattatgatcattgaggatcccgcagcattaaacaagccagaaa

SEQ ID NO: 111700 - DNA, 3674 bp, Homo sapiens
  Payload ID: 1880
  Gene Symbol: BBX
  Gene Name: bobby sox homolog (Drosophila)
  Uniprot ID: Q8WY36
  ENST ID: ENST00000406780
  CDS Start-End: 538-3273
tgctcagatcagcttcctgcttctcatgaaagctgttcccctataaagctggtctgctttcactgaaagaattatattcataagtctgaggctggttttgtggaagtattgttggtttggtttcctttgggggatgaaggaggaggaaacaattttttttaaaaaaaaagtgggggcaggctgaaagagcaaaatcatcttgaattttgttgtcacatcgtgccggtgttataaccagctctgtagactgccgcactgaaaacatttctgtgagagaatcctgctgcatcacagaagctggaagttctgatgttccactgaaatcacaatggaaagtcttgacttgactggtaagagctgttgtgaaggtacatcttacttacttacctggaagcagtgaggcagtcaagaattatgtgctgtcagagctggtctcagcatgatcaaggaagtgtgatcattggatatttttttcttgtcaattttattattttttaaagtgtgacttttattgatctccattatcaagtcacagtaatgaaaggcagtaatagaaataaggatcattcagcagaaggagaaggggttggaaaacgaccaaaacgaaagtgtcttcagtggcatccattgctagcaaagaaacttcttgatttttcagaagaggaagaagaggaagacgaagaggaggatattgataaggttcaacttcttggggccgatggcctagagcaagatgttggtgaaactgaagatgatgaatcaccagagcagcgagcccggagaccaatgaatgcatttcttttattttgcaaacgccatcgctctcttgtacgtcaggaacaccccaggcttgataaccgaggtgctaccaagatactagctgattggtgggctgttcttgatccaaaggaaaagcagaaatacacagacatggccaaggagtataaggatgcatttatgaaagcaaatcctggctacaaatggtgtcctaccacaaacaagcctgtgaaatccccaacacccactgtcaatccacgaaagaaactttgggccttcccatctgactcttcaagagacttgccaagccccaagaaagcaaagactgaagaaatgcctcagcttaactttggaatggctgatcctactcaaatgggaggcctgagtatgctgctgttagctggagaacatgctcttggcacaccagaggtatcctctggcacatgcaggcctgatgtttcagaatctcctgaattacgtcagaagtcaccattgtttcagtttgccgagatatcttcaagtacgtcccactctgatgcttctacaaagcagtgtcaaacatctgccttgtttcagtttgcagagatttcttcaaacacttcgcagttgggtggtgctgagcctgtaaaacgctgtggaaagtctgcactctttcaactggcagagatgtgcctggcatcagaagggatgaaaatggaagaatcaaagctaataaaagcaaaagaatccgatggtggaagaattaaagaattagagaagggaaaggaagaaaaagaaattaaaatggagaaaacagatgaaactaggttacagaaggaagcagaatttgaaaaatcggctaaggaaaatttaagagattctaaggaattgagaaattttgaggcattgcaaatagatgacataatggctataaaaatggaagatcccaaagaaattagaaaggaagagttagaagaagatcacaaatgtagtcattttcctgatttttcttattctgccagtagcaagataataattagtgatgttcccagtagaaaggatcatatgtgccatcctcatggaattatgatcattgaggatcccgcagcattaaacaagccagaaaagctaaaaaagaaaaagaagaaaagcaaaatggatcgacatggaaatgataaatccacacccaagaagacttgcaaaaagaggcagtcttcggaatctgacattgagagcgtcatatataccattgaagccgtcgcaaaaggagactggggcatagagaaacttggagatacccctcgcaagaaggtccgcacatcctcaagtggcaagggaagcattttggatgccaagccaccaaagaaaaaagtgaaatcaagagagaagaaaatgtcaaaggagaaatcctcagacaccaccaaagagtcaagacctccagatttcattagtatttctgctagcaagaacatttctggtgagacaccagagggtataaaagcagaaccattgacccctatggaagatgcactaccacccagcctatcaggacaggccaagcctgaggacagtgactgtcacagaaaaatagaaacttgtggttccaggaaatccgagaggtcttgcaaaggtgctctttataaaaccctggtgtctgagggcatgctcacctctctgcgagctaatgttgacagaggaaaacgaagctcaggaaaaggaaactcctctgatcatgaagggtgttggaatgaagaaagctggacatttagtcagagtgggaccagtgggagcaagaagttcaagaagacaaagccaaaagaagactgtctccttggctccgcaaagctggatgaagaatttgaaaaaaaattcaacagcctccctcaatatagtcctgttacatttgaccggaaatgtgtacctgtcccaagaaaaaagaagaagactggaaatgtgtcctcagaaccgactaaaaccagcaaaggaagtggggataaatggtcaaacaagcaactcttcttggatgccattcaccctacagaagccatattttcagaagacagaaacaccatggagcctgttcataaggttaaaaatatcccatccattttcaacactccagagccaacaacaacgcaagaacctttggtgggcagccaaaagagaaaagcaaggaaaaccaagattacacaccttgtcaggacagcagatggccgggtatcaccagcaggaggtactttggatgacaaaccaaaggaacaactgcagaggagtctccctaaagcaactgagacagactgcaatgacaaatgctcacacaacaccgaggtcggggagacgcggagcagtactccagaaatgcctgccgtgtctgcgttctttagcctcgctgcgctggctgaagtggcagccatggaaaatgtgcacagaggtcagaggtcaactccgctcacccatgatggacagccaaaagaaatgccgcaggctcctgtacttatttcctgcgctgaccagtgaagcgccctttcattgtaaaacattgtgctttacctactaccctagccttgtctttaccgagggatgctagtgagtccaagtggtggaaaatatagactgcaaacaagtgcttgttgccccacacggcccagattcacttgaagcagaagttagcatcctgggccagtttgttctctcagaacccagaatctttgagggtaaggttatctgtctgatactgagcagaaacagaatgatcctggagctttgctttctattgaaggcttttgacggtaataggtggtaacttggtaaaaggctgcctttactgtagctcacccagcatctcttttaccaaccagagagtgtgaaactagtttcatatattacctagttattctttcaaaacaaaacaaaaaaaa

SEQ ID NO: 111701 - DNA, 601 bp, Homo sapiens
  Payload ID: 1880
  Gene Symbol: BBX
  Gene Name: bobby sox homolog (Drosophila)
  ENST ID: ENST00000431630
  CDS Start-End: 244-601
aataagtttaaggtggagagagcgaggctgagggtggtggtggaggggaggaggaaggccttggccgtttaaagtcttatttctgaaggtcactatcatatgacaaaggctttgccgcagttcatcttcctccctgtgtactttccatttgccttcctggaatcctgctgcatcacagaagctggaagttctgatgttccactgaaatcacaatggaaagtcttgacttgactggtcacagtaatgaaaggcagtaatagaaataaggatcattcagcagaaggagaaggggttggaaaacgaccaaaacgaaagtgtcttcagtggcatccattgctagcaaagaaacttcttgatttttcagaagaggaagaagaggaagacgaagaggaggatattgataagaccagaatagaagctcagtataagaacaggggccttgcctgtctcgtcctttcctcttgcctcagaaatgagaatggtgcctggcacatagttcaacttcttggggccgatggcctagagcaagatgttggtgaaactgaagatgatgaatcaccagagcagcgagcccggagaccaatgaatgcatttcttttat

SEQ ID NO: 111702 - DNA, 392 bp, Homo sapiens
  Payload ID: 1880
  Gene Symbol: BBX
  Gene Name: bobby sox homolog (Drosophila)
  ENST ID: ENST00000454540
  CDS Start-End: 354-392
gggctggggagtagtaggccagccggtgccaggctgcgtttgcaaccagcacctctcggcacacaggcagcgccgcctgagaggggcacgggcgccggggcgcgggctggagcggccccaggaaaacaacaacagagccctcacgccggcgggcggctcgtggccgcccggggagccccaaacttcatctcggcgaaagtcactatcatatgacaaaggctttgccgcagttcatcttcctccctgtgtactttccatttgccttcctggaatcctgctgcatcacagaagctggaagttctgatgttccactgaaatcacaatggaaagtcttgacttgactggtcacagtaatgaaaggcagtaatagaaataaggatcattcagcagaa

SEQ ID NO: 111703 - DNA, 581 bp, Homo sapiens
  Payload ID: 1880
  Gene Symbol: BBX
  Gene Name: bobby sox homolog (Drosophila)
  ENST ID: ENST00000456817
  CDS Start-End: 367-581
agactcgaggtttcttttcctcctccacctcgtctcgctcactcaccctctgaaatttattatcatattttatttattttttggtattgtatgaaacttaacataactgagaccgaacccgagtcctgtaatttacaaggaccctgaatcccagaatctggaacacgtttatgtgtgaaatagccgcgatcatttctgctaaatgaggaaggtcactatcatatgacaaaggctttgccgcagttcatcttcctccctgtgtactttccatttgccttcctggaatcctgctgcatcacagaagctggaagttctgatgttccactgaaatcacaatggaaagtcttgacttgactggtcacagtaatgaaaggcagtaatagaaataaggatcattcagcagaaggagaaggggttggaaaacgaccaaaacgaaagtgtcttcagtggcatccattgctagcaaagaaacttcttgatttttcagaagaggaagaagaggaagacgaagaggaggatattgataaggttcaacttcttggggccgatggcctagagcaagatgttggtgaaactgaaga

SEQ ID NO: 111704 - DNA, 410 bp, Homo sapiens
  Payload ID: 1880
  Gene Symbol: BBX
  Gene Name: bobby sox homolog (Drosophila)
  ENST ID: ENST00000458347
  CDS Start-End: 1-396
aacactccagagccaacaacaacgcaagaacctttggtgggcagccaaaagagaaaagcaaggaaaaccaagattacacaccttgtcaggacagcagatggccgggtatcaccagcaggagatgacaaaccaaaggaacaactgcagaggagtctccctaaagcaactgagacagactgcaatgacaaatgctcacacaacaccgaggtcggggagacgcggagcagtactccagaaatgcctgccgtgtctgcgttctttagcctcgctgcgctggctgaagtggcagccatggaaaatgtgcacagaggtcagaggtcaactccgctcacccatgatggacagccaaaagaaatgccgcaggctcctgtacttatttcctgcgctgaccagtgaagcgccctttcatt

SEQ ID NO: 111705 - DNA, 238 bp, Homo sapiens
  Payload ID: 1880
  Gene Symbol: BBX
  Gene Name: bobby sox homolog (Drosophila)
  ENST ID: ENST00000443253
  CDS Start-End: 1-238
gactaaaaccagcaaaggtcctttccagtctcagaaaaagaacttattccacaaaattgtcagcaaatataagcacaaaaaggagaagcccaatgttccggaaaaaggaagtggggataaatggtcaaacaagcaactcttcttggatgccattcaccctacagaagagccaacaacaacgcaagaacctttggtgggcagccaaaagagaaaagcaaggaaaaccaagattacacac

SEQ ID NO: 111706 - DNA, 819 bp, Homo sapiens
  Payload ID: 1880
  Gene Symbol: BBX
  Gene Name: bobby sox homolog (Drosophila)
  ENST ID: ENST00000413213
  CDS Start-End: 373-819
aatcctgctgcatcacagaagctggaagttctgatgttccactgaaatcacaatggaaagtcttgacttgactggtaagagctgttgtgaaggtacatcttacttacttacctggaagcagtgaggcagtcaagaattatgtgctgtcagagctggtctcagcatgatcaaggaagtgtgatcattggatatttttttcttgtcaattttattattttttaaagtgtgacttttattgatctccattatcaagcatatgggccactgaaaacttctgagcaatggatataaatgagatggaacagaaggaaaaaaaggtagacattggaaagactggtttagggggctttactattatcctaggtcacagtaatgaaaggcagtaatagaaataaggatcattcagcagaaggagaaggggttggaaaacgaccaaaacgaaagtgtcttcagtggcatccattgctagcaaagaaacttcttgatttttcagaagaggaagaagaggaagacgaagaggaggatattgataaggttcaacttcttggggccgatggcctagagcaagatgttggtgaaactgaagatgatgaatcaccagagcagcgagcccggagaccaatgaatgcatttcttttattttgcaaacgccatcgctctcttgtacgtcaggaacaccccaggcttgataaccgaggtgctaccaagatactagctgattggtgggctgttcttgatccaaaggaaaagcagaaatacacagacatggccaaggagtataaggatgcatttatgaaagcaaatcctggctacaaatgg

SEQ ID NO: 111707 - DNA, 2178 bp, Homo sapiens
  Payload ID: 1880
  Gene Symbol: BBX
  Gene Name: bobby sox homolog (Drosophila)
  Uniprot ID: Q8WY36
  ENST ID: ENST00000416476
  CDS Start-End: 221-2107
agaaaccctgactggccgctgagggctagctacacacacgccctcacgcccggcgagcccgcgaggtcactatcatatgacaaaggctttgccgcagttcatcttcctccctgtgtactttccatttgccttcctggaatcctgctgcatcacagaagctggaagttctgatgttccactgaaatcacaatggaaagtcttgacttgactggtcacagtaatgaaaggcagtaatagaaataaggatcattcagcagaaggagaaggggttggaaaacgaccaaaacgaaagtgtcttcagtggcatccattgctagcaaagaaacttcttgatttttcagaagaggaagaagaggaagacgaagaggaggatattgataaggttcaacttcttggggccgatggcctagagcaagatgttggtgaaactgaagatgatgaatcaccagagcagcgagcccggagaccaatgaatgcatttcttttattttgcaaacgccatcgctctcttgtacgtcaggaacaccccaggcttgataaccgaggtgctaccaagatactagctgattggtgggctgttcttgatccaaaggaaaagcagaaatacacagacatggccaaggagtataaggatgcatttatgaaagcaaatcctggctacaaatggtgtcctaccacaaacaagcctgtgaaatccccaacacccactgtcaatccacgaaagaaactttgggccttcccatctgactcttcaagagacttgccaagccccaagaaagcaaagactgaagaaatgcctcagcttaactttggaatggctgatcctactcaaatgggaggcctgagtatgctgctgttagctggagaacatgctcttggcacaccagaggtatcctctggcacatgcaggcctgatgtttcagaatctcctgaattacgtcagaagtcaccattgtttcagtttgccgagatatcttcaagtacgtcccactctgatgcttctacaaagcagtgtcaaacatctgccttgtttcagtttgcagagatttcttcaaacacttcgcagttgggtggtgctgagcctgtaaaacgctgtggaaagtctgcactctttcaactggcagaggaaaacgaagctcaggaaaaggaaactcctctgatcatgaagggtgttggaatgaagaaagctggacatttagtcagagtgggaccagtgggagcaagaagttcaagaagacaaagccaaaagaagactgtctccttggctccgcaaagctggatgaagaatttgaaaaaaaattcaacagcctccctcaatatagtcctgttacatttgaccggaaatgtgtacctgtcccaagaaaaaagaagaagactggaaatgtgtcctcagaaccgactaaaaccagcaaaggtcctttccagtctcagaaaaagaacttattccacaaaattgtcagcaaatataagcacaaaaaggagaagcccaatgttccggaaaaaggaagtggggataaatggtcaaacaagcaactcttcttggatgccattcaccctacagaagccatattttcagaagacagaaacaccatggagcctgttcataaggttaaaaatatcccatccattttcaacactccagagccaacaacaacgcaagaacctttggtgggcagccaaaagagaaaagcaaggaaaaccaagattacacaccttgtcaggacagcagatggccgggtatcaccagcaggaggtactttggatgacaaaccaaaggaacaactgcagaggagtctccctaaagcaactgagacagactgcaatgacaaatgctcacacaacaccgaggtcggggagacgcggagcagtactccagaaatgcctgccgtgtctgcgttctttagcctcgctgcgctggctgaagtggcagccatggaaaatgtgcacagaggtcagaggtcaactccgctcacccatgatggacagccaaaagaaatgccgcaggctcctgtacttatttcctgcgctgaccagtgaagcgccctttcattgtaaaacattgtgctttacctactaccctagccttgtctttaccgagggatgctagtgagtccaagtggtggaaaatatagactgcaaacaagtgcttgttgccccacacggcccagattcacttga

SEQ ID NO: 111708 - DNA, 513 bp, Homo sapiens
  Payload ID: 1880
  Gene Symbol: BBX
  Gene Name: bobby sox homolog (Drosophila)
  ENST ID: ENST00000458458
  CDS Start-End: 221-513
agactcgaggtttcttttcctcctccacctcgtctcgctcactcaccctctgaaatttattatcatattttatttattttttggtattgtatgaaacttaacataactgagaccgaacccgagtcctgtaatttacaaggaccctgaatcccagaatctggaacacgtttatgtgtgaaatagccgcgatcatttctgctaaatgaggaaggtcacagtaatgaaaggcagtaatagaaataaggatcattcagcagaaggagaaggggttggaaaacgaccaaaacgaaagtgtcttcagtggcatccattgctagcaaagaaacttcttgatttttcagaagaggaagaagaggaagacgaagaggaggatattgataaggttcaacttcttggggccgatggcctagagcaagatgttggtgaaactgaagatgatgaatcaccagagcagcgagcccggagaccaatgaatgcatttcttttattttgcaaacgccatcgctctcttgt

SEQ ID NO: 111709 - DNA, 556 bp, Homo sapiens
  Payload ID: 1880
  Gene Symbol: BBX
  Gene Name: bobby sox homolog (Drosophila)
  ENST ID: ENST00000457496
  CDS Start-End: 302-556
atgcattctgaataacataaactgaaatagtaagctgaaatataacaagtctgggtttttttttttttttttttgcattagaaatttatttttgctgttgtatttttagacggtcctagctagtagatgcatgcttttcacgtttggatatcagagttggatatggtttgaatcccagctgtactagcttttaaacgttgggcaatctacttcacaatgctgaatctcaatttccacatgtgtaaactaacaccggaaatatttacctcaaagagtcctgagtacgtgctaggtcacagtaatgaaaggcagtaatagaaataaggatcattcagcagaaggagaaggggttggaaaacgaccaaaacgaaagtgtcttcagtggcatccattgctagcaaagaaacttcttgatttttcagaagaggaagaagaggaagacgaagaggaggatattgataaggttcaacttcttggggccgatggcctagagcaagatgttggtgaaactgaagatgatgaatcaccagagcagcgagcccggagaccaatgaat

SEQ ID NO: 111710 - DNA, 552 bp, Homo sapiens
  Payload ID: 1880
  Gene Symbol: BBX
  Gene Name: bobby sox homolog (Drosophila)
  ENST ID: ENST00000449271
  CDS Start-End: 212-552
acatcttacttacttacctggaagcagtgaggcagtcaagaattatgtgctgtcagagctggtctcagcatgatcaaggaagtgtgatcattggatatttttttcttgtcaattttattattttttaaagtgtgacttttattgatctccattatcaaatgctctttgacttaaaatggggctacatcctgatacactcactgtcacagtaatgaaaggcagtaatagaaataaggatcattcagcagaaggagaaggggttggaaaacgaccaaaacgaaagtgtcttcagtggcatccattgctagcaaagaaacttcttgatttttcagaagaggaagaagaggaagacgaagaggaggatattgataaggttcaacttcttggggccgatggcctagagcaagatgttggtgaaactgaagatgatgaatcaccagagcagcgagcccggagaccaatgaatgcatttcttttattttgcaaacgccatcgctctcttgtacgtcaggaacaccccaggcttgataaccgaggtgctaccaagatact

SEQ ID NO: 111711 - DNA, 843 bp, Homo sapiens
  Payload ID: 1880
  Gene Symbol: BBX
  Gene Name: bobby sox homolog (Drosophila)
  ENST ID: ENST00000449213
  CDS Start-End: 367-843
cttacttacttacctggaagcagtgaggcagtcaagaattatgtgctgtcagagctggtctcagcatgatcaaggaagtgtgatcattggatatttttttcttgtcaattttattattttttaaagtgtgacttttattgatctccattatcaaatggggaaactgaagaacagagaggtgaaattatctgcccaaggttacgctgctaataagtggcaaagctggaattcaaactcaggctgtctggctgcagggtttgttctcctaaccacaccaccacactgcctgtagattatcctcacatgtttgggtatccttttacattcatgtgcatgaatgcactgtttatttttaacgtcacagtaatgaaaggcagtaatagaaataaggatcattcagcagaaggagaaggggttggaaaacgaccaaaacgaaagtgtcttcagtggcatccattgctagcaaagaaacttcttgatttttcagaagaggaagaagaggaagacgaagaggaggatattgataaggttcaacttcttggggccgatggcctagagcaagatgttggtgaaactgaagatgatgaatcaccagagcagcgagcccggagaccaatgaatgcatttcttttattttgcaaacgccatcgctctcttgtacgtcaggaacaccccaggcttgataaccgaggtgctaccaagatactagctgattggtgggctgttcttgatccaaaggaaaagcagaaatacacagacatggccaaggagtataaggatgcatttatgaaagcaaatcctggctacaaatggtgtcctaccacaaacaagcctgtgaaatcc

SEQ ID NO: 111712 - DNA, 675 bp, Homo sapiens
  Payload ID: 1880
  Gene Symbol: BBX
  Gene Name: bobby sox homolog (Drosophila)
  ENST ID: ENST00000449335
  CDS Start-End: 244-675
aataagtttaaggtggagagagcgaggctgagggtggtggtggaggggaggaggaaggccttggccgtttaaagtcttatttctgaaggtcactatcatatgacaaaggctttgccgcagttcatcttcctccctgtgtactttccatttgccttcctggaatcctgctgcatcacagaagctggaagttctgatgttccactgaaatcacaatggaaagtcttgacttgactggtcacagtaatgaaaggcagtaatagaaataaggatcattcagcagaaggagaaggggttggaaaacgaccaaaacgaaagtgtcttcagtggcatccattgctagcaaagaaacttcttgatttttcagaagaggaagaagaggaagacgaagaggaggatattgataaggttcaacttcttggggccgatggcctagagcaagatgttggtgaaactgaagatgatgaatcaccagagcagcgagcccggagaccaatgaatgcatttcttttattttgcaaacgccatcgctctcttgtacgtcaggaacaccccaggcttgataaccgaggtgctaccaagatactagctgattggtgggctgttcttgatccaaaggaaaagcagaaatacacagacatggccaaggagtataaggatgcatttatgaaagcaaat

SEQ ID NO: 111713 - DNA, 8930 bp, Homo sapiens
  Payload ID: 1880
  Gene Symbol: BBX
  Gene Name: bobby sox homolog (Drosophila)
  Uniprot ID: Q8WY36
  ENST ID: ENST00000415149
  CDS Start-End: 328-3063
aaaatgagtgttttcagtctctccgggttgcatgtactgtatgtggagcagtgtacagtgaagcggaggcagagcggctccgcgagcttctctccactttcccatagagaaaccctgactggccgctgagggctagctacacacacgccctcacgcccggcgagcccgcgaggtcactatcatatgacaaaggctttgccgcagttcatcttcctccctgtgtactttccatttgccttcctggaatcctgctgcatcacagaagctggaagttctgatgttccactgaaatcacaatggaaagtcttgacttgactggtcacagtaatgaaaggcagtaatagaaataaggatcattcagcagaaggagaaggggttggaaaacgaccaaaacgaaagtgtcttcagtggcatccattgctagcaaagaaacttcttgatttttcagaagaggaagaagaggaagacgaagaggaggatattgataaggttcaacttcttggggccgatggcctagagcaagatgttggtgaaactgaagatgatgaatcaccagagcagcgagcccggagaccaatgaatgcatttcttttattttgcaaacgccatcgctctcttgtacgtcaggaacaccccaggcttgataaccgaggtgctaccaagatactagctgattggtgggctgttcttgatccaaaggaaaagcagaaatacacagacatggccaaggagtataaggatgcatttatgaaagcaaatcctggctacaaatggtgtcctaccacaaacaagcctgtgaaatccccaacacccactgtcaatccacgaaagaaactttgggccttcccatctgactcttcaagagacttgccaagccccaagaaagcaaagactgaagaaatgcctcagcttaactttggaatggctgatcctactcaaatgggaggcctgagtatgctgctgttagctggagaacatgctcttggcacaccagaggtatcctctggcacatgcaggcctgatgtttcagaatctcctgaattacgtcagaagtcaccattgtttcagtttgccgagatatcttcaagtacgtcccactctgatgcttctacaaagcagtgtcaaacatctgccttgtttcagtttgcagagatttcttcaaacacttcgcagttgggtggtgctgagcctgtaaaacgctgtggaaagtctgcactctttcaactggcagagatgtgcctggcatcagaagggatgaaaatggaagaatcaaagctaataaaagcaaaagaatccgatggtggaagaattaaagaattagagaagggaaaggaagaaaaagaaattaaaatggagaaaacagatgaaactaggttacagaaggaagcagaatttgaaaaatcggctaaggaaaatttaagagattctaaggaattgagaaattttgaggcattgcaaatagatgacataatggctataaaaatggaagatcccaaagaaattagaaaggaagagttagaagaagatcacaaatgtagtcattttcctgatttttcttattctgccagtagcaagataataattagtgatgttcccagtagaaaggatcatatgtgccatcctcatggaattatgatcattgaggatcccgcagcattaaacaagccagaaaagctaaaaaagaaaaagaagaaaagcaaaatggatcgacatggaaatgataaatccacacccaagaagacttgcaaaaagaggcagtcttcggaatctgacattgagagcgtcatatataccattgaagccgtcgcaaaaggagactggggcatagagaaacttggagatacccctcgcaagaaggtccgcacatcctcaagtggcaagggaagcattttggatgccaagccaccaaagaaaaaagtgaaatcaagagagaagaaaatgtcaaaggagaaatcctcagacaccaccaaagagtcaagacctccagatttcattagtatttctgctagcaagaacatttctggtgagacaccagagggtataaaagcagaaccattgacccctatggaagatgcactaccacccagcctatcaggacaggccaagcctgaggacagtgactgtcacagaaaaatagaaacttgtggttccaggaaatccgagaggtcttgcaaaggtgctctttataaaaccctggtgtctgagggcatgctcacctctctgcgagctaatgttgacagaggaaaacgaagctcaggaaaaggaaactcctctgatcatgaagggtgttggaatgaagaaagctggacatttagtcagagtgggaccagtgggagcaagaagttcaagaagacaaagccaaaagaagactgtctccttggctccgcaaagctggatgaagaatttgaaaaaaaattcaacagcctccctcaatatagtcctgttacatttgaccggaaatgtgtacctgtcccaagaaaaaagaagaagactggaaatgtgtcctcagaaccgactaaaaccagcaaaggaagtggggataaatggtcaaacaagcaactcttcttggatgccattcaccctacagaagccatattttcagaagacagaaacaccatggagcctgttcataaggttaaaaatatcccatccattttcaacactccagagccaacaacaacgcaagaacctttggtgggcagccaaaagagaaaagcaaggaaaaccaagattacacaccttgtcaggacagcagatggccgggtatcaccagcaggaggtactttggatgacaaaccaaaggaacaactgcagaggagtctccctaaagcaactgagacagactgcaatgacaaatgctcacacaacaccgaggtcggggagacgcggagcagtactccagaaatgcctgccgtgtctgcgttctttagcctcgctgcgctggctgaagtggcagccatggaaaatgtgcacagaggtcagaggtcaactccgctcacccatgatggacagccaaaagaaatgccgcaggctcctgtacttatttcctgcgctgaccagtgaagcgccctttcattgtaaaacattgtgctttacctactaccctagccttgtctttaccgagggatgctagtgagtccaagtggtggaaaatatagactgcaaacaagtgcttgttgccccacacggcccagattcacttgaagcagaagttagcatcctgggccagtttgttctctcagaacccagaatctttgagggtaaggttatctgtctgatactgagcagaaacagaatgatcctggagctttgctttctattgaaggcttttgacggtaataggtggtaacttggtaaaaggctgcctttactgtagctcacccagcatctcttttaccaaccagagagtgtgaaactagtttcatatattacctagttattctttcaaaacaaaacaaaaaaaaaacaaaaactgacgcactgcactagttattattagatattcttagtcttttttgtacatggagatttaagtttaagatggtttatataataggttatacctacatttatattgtagaataaatattaaaaagcctgttccagagactcccaagcagcctgggcaggcagatgtaccattgttagtggtgtatgctcggcctcgtggtccatatattctgcacttttatatttgccaccagaatggtagtttgctggcaaaaaaaaaaaaaaaagagagagagaaaaaattacaactcttacaatctgaatttttttcttagccttgagtgaccaagaagaatttgcttgaggcaaattgtggcaaatattttcccagacaggggaagagtcctgcagattacagattactggtgttttcatgccttgaggattcttttatttttacataggggtctaagtgaccaatggattgttcatacaaacaaaaaaaaagacaaaaatattattcagaagtgaccttagtattacttcactattctaaacacattgaagacactcacttcatgtggacttggagctacagaccttttacatccatcacagattggctggacgggttgcaattgctatgcacagcctgattggcactgcaggtttttagagccattttgagtttgtgttgtttaggaggtactgagtcaatgatgagggaggtatgcctgaccagagtgggactctcagtcatagatccacctgcaagtctctgtttcctttttgtgttttgttgcttttgaacataaaaccaaccatacataagcagcgccaagtggattaactggcttagaacattcaacatattgacttaaccacctgacattcacagtgtcttgtttcctagcaacagatgcaaagtgataaatcaaaattagtctgaggctacagattttacagggtatttgttctatagcacaaagtatttccccactcttgcgtcacagcacaaactaccaaattttaattattggattccagcaataatttttaatggttttcaaactggcggaattttgacagtgctagttcgagtttgaagcttttgaattagatctctaaatggtgacagtttacatggttttatctagctttcttatttatacttgactgaattgtaatgattttttttctaattgtaatttgacgtaatagccatacaaaaaatgactctattcatactaggtttagcttctcatggttgtagatattacttcagttccggtgctggaaaatatgtacaacatactaacaggattgaaaaaaaaatagaggtttttcttcttgtttttttttccaaagcaggtaaagagggtagcaaagcatcggaatgatgtgctcaaaaatgcatattcctggtggggatggaggaagaaggcattagtaaaaggttaatcaaacgttacaacttaaccccattcatgtaggaataaatcaagtgagcagttccagacttttgcataatatttttactatgatgctgttttattaatattttctaaatttcaaaacaaaaagtgaatgtttgaaattgctgggtcccgatgttggtggctgttggagttttggaccactcgctagcagtgatttgaagattataattagctaaaatccaaaacaaaaaaccaacaacaaaaattgtatggtgcggaacatgcaccttgacaatggtactaacttgttattctatagaacacgttagaatagatctatttttgccagagcaccctccttcagtcctccgattacatttcactagagttccttacgagattgctgtatattcctgggaccttttttaaaaaaaaaaaaagcaaaacaaaagattactttttttctatgtgattaatatcttacttgatctgcttttcctaaacctcagtggcttttcccttaggcagggttgggggtgggagggcaacttactggagatgactgttttcagatactttaaaacaaacctttttgtagaaatgcttaatttttaagcggttaggcactgagagtagcagaaatcctgcaaagctttatagttccttagactcaccttgtcgattctctgagtaaagtcttgatttcaataattgtgcttctcatgccctgaaactgctggagaggagtgttgttattttcaggtaacaacattcgttagcacaaatatttcagaccaatattagtgctctccaccccaccttttgttatcattttcatttcatttctctcattcttttttattttggaaaatcatattgctatagtgtgtactttaatctgccagcagataccatctacactaacatttgtcccacagcatcctcaagagaaaaagttgttgcaccttatatatatctcaagcaaaccaaaatatgatgctcttctgctttgttttattctaaattgttgtatcatatctttctgaaaccattctgaatttagttgaaattatcaatatttatgcttttaaccttaatttctggattcaagcctgtatataaatcttttgaaaaaaaattgtcctagcccttctctgcgatgctggaagtagaagattgcgtctcagatggagacgcagtactgttccagttttctttagccttttatttatttagttattctgggtatttcctatgtaattttgaagtgtgtagagtatattatagtaactgaagctgcagctgtaagaagctgagtgaaagaaaaaatactgtaagacatccttaaagtttttatttgtttgggtactgtatatgagatcaggaaaaagaaaaatgtcccacagccacattggaaatacaggttcttgtccccaaattaggttagttcccagattttagatcaaaactgttaattcattaaaaccccttttaaaaggtaaattctactgttgtaattccgatagtctttttcccacaaatatcagaaatatatttatttaattctgtcagatgagctttctaccgatgccatgtcccaaagccatgttaaaataattcccacgttatcattgtgattctacttcctgccactaaaattgctggagaaacaaaataatgatggaacactatgaacaaaaaggagcatctgaactggtctggttatttagaatccaatgtgttcaaatccttttgttttcttattaagtcagatgctactgtaagtcagataaaattttgtttgcactctgcagtctttggctcaatgtatggaaatgtttgcacctatgtaaagtcacaagctaattacaaattgctacagaacaggagtaagctgaaaactgaatgccatgttttgtttataaggtggggaggggagggaaaataccaaaaaactctgttccaagtttggcatttgacattaatgtgaagcagtgggaccatgctgcctgctaaactactgtatgaatcgtaaatgttctgaagacgagcagctggaggctggaggatggcattccatacagcaaaggagaagcacccaccacttcatctgggaaaaggaaggaaattgcaggaggcctggagccatcatttgtaaaggggatgttgcggggtgtgatgctgttgaggagattcaccttcaattgcactgctccacagagccctcatataaggccaatcctaatgggctacctcggctttaaaagttaatttcagtaagtcctgtttcaaaagtttgtctttttttgcttctaccttcagtgccactattttccactgcagtgttttgacttcacaaactgcctcctccagagagaacaatgtattgctgaaaatgggcagtagaagcaaatgctgttgttacatttgacctataaagtattcagagtgactgctaggtagaaattaaaacttagctttcccaaatagctccttattttgcaccttataaaaagtatactaattgttaattagatgttgcttttgtttatacaagcattcccaaagaactagatttggattttgttttgagtttttggatttttaaaaattatcttatttagattgactaacagcatacttacaattttaaaagaagctgttgttcagttcatcttaccagatgtgtctggcgaagtattcagggtttgatggactgctttactttcgtttggaagtgatagctaagtttattatactctatattaaacaactttgttcatttcactgaggaccttatcttccttatatttcagaacaaagaagcaacaagcgtgaataaaaagacaaatgtatttgactccctcataatccccatctgtatgtgctacccttccttcaaatatataaatgtgcatcttttttttaaaaaaaaaaaaaaaaaaggttcctcttctggccaaatttgatctatggtggtatgattcatactgttaaattgagagaggaaaccttgtggttaaaaattatatggctgctgttttctttttgcagtcagtggtcaaaactgatcatgtgcttaaatcgatttttatgcacagaactagttattgtgaacattactgctccctccaaagatttcctgataacttgggccagaggtggttactgagtaacaaggatctaattcaatgcctcaaaactcttccacccacaatgcaaatcttacctcacaagctctaacctaaatcacagagacatgcatgtttcatgcattaacactgatttcgctctgtggcccaccagaggggtgggctcatgtcccctgactcctcacatgagtgcctcagctctaagagccgtggaacggggggtagggaaggtttgcgatctggagctcagcaactggctcagcaacgttttctccatttcattagcactaaacaagtctcttgctctcaggaatttgtcagaaaaaagaataaaatcacctgagactccacataccagattataaactcttctcgtaggtttgaattgcttactcacatgtcataaattaaccacagcttcatttgaccaccaggtctaaagtctgttgacagtttcagcatgactgaatcgctcattttttttttttgctttcagaaattggcttggttctctttagagttggtgtaaacatgccatgtaataaatgatttccacttaatggtacaacagaattattgctttcttagatgtatgtgtagtaaaagtcaatatacacatttatataatttctttcttcaaaatcttatacctaatttgatatttctaaaaattgcacatgtaagtcatgtgtataacatgctaaagtactttaactgtgatcttaaaactgaataaaaatatttaataaaactttgaaatattttaaagatattattcaaatatatttctttatgttcacactactggccgtagagtatgtgcctttaatgtaccattttcactaaaaacagtaggaaaaatactaataaaagtaagatatttcaacta

SEQ ID NO: 111714 - DNA, 550 bp, Homo sapiens
  Payload ID: 1880
  Gene Symbol: BBX
  Gene Name: bobby sox homolog (Drosophila)
  ENST ID: ENST00000425868
  CDS Start-End: 479-550
tcttacttacttacctggaagcagtgaggcagtcaagaattatgtgctgtcagagctggtctcagcatgatcaaggaagtgtgatcattggatatttttttcttgtcaattttattattttttaaagtgtgacttttattgatctccattatcaagcatatgggccactgaaaacttctgagcaatggatataaatgagatggaacagaaggaaaaaaaggtagacattggaaagactggtttagggggctttactattatcctagatggggaaactgaagaacagagaggtgaaattatctgcccaaggttacgctgctaataagtggcaaagctggaattcaaactcaggctgtctggctgcagggtttgttctcctaaccacaccaccacactgcctgtagattatcctcacatgtttgggtatccttttacattcatgtgcatgaatgcactgtttatttttaacgtcacagtaatgaaaggcagtaatagaaataaggatcattcagcagaaggagaaggggttggaaaacgaccaaaacgaaag

SEQ ID NO: 111715 - DNA, 871 bp, Homo sapiens
  Payload ID: 1880
  Gene Symbol: BBX
  Gene Name: bobby sox homolog (Drosophila)
  ENST ID: ENST00000456419
  CDS Start-End: 256-871
agaccgccgccagttcgagcaggcacgggcacggggacaccccactcgttgctcctccgttatggaaaggtgtttagcagacttttacgcccggagtgtggtcactatcatatgacaaaggctttgccgcagttcatcttcctccctgtgtactttccatttgccttcctggaatcctgctgcatcacagaagctggaagttctgatgttccactgaaatcacaatggaaagtcttgacttgactggtcacagtaatgaaaggcagtaatagaaataaggatcattcagcagaaggagaaggggttggaaaacgaccaaaacgaaagtgtcttcagtggcatccattgctagcaaagaaacttcttgatttttcagaagaggaagaagaggaagacgaagaggaggatattgataaggttcaacttcttggggccgatggcctagagcaagatgttggtgaaactgaagatgatgaatcaccagagcagcgagcccggagaccaatgaatgcatttcttttattttgcaaacgccatcgctctcttgtacgtcaggaacaccccaggcttgataaccgaggtgctaccaagatactagctgattggtgggctgttcttgatccaaaggaaaagcagaaatacacagacatggccaaggagtataaggatgcatttatgaaagcaaatcctggctacaaatggtgtcctaccacaaacaagcctgtgaaatccccaacacccactgtcaatccacgaaagaaactttgggccttcccatctgactcttcaagagacttgccaagccccaagaaagcaaagactgaagaaatgcctcagcttaactttggaatggctgatcctactcaaatgg

SEQ ID NO: 111716 - DNA, 959 bp, Homo sapiens
  Payload ID: 1880
  Gene Symbol: BBX
  Gene Name: bobby sox homolog (Drosophila)
  ENST ID: ENST00000427402
  CDS Start-End: 379-959
ggcagagcggctccgcgagcttctctccactttcccatagagaaaccctgactggccgctgagggctagctacacacacgccctcacgcccggcgagcccgcgaggtcactatcatatgacaaaggctttgccgcagttcatcttcctccctgtgtactttccatttgccttcctgggaatatccttggaattaatatacctggaacaattctttctgcagttaaagattggtgcctggccagaaatgcctgtgaaacagctgtggtttaagcttcaactgtaaaagacagacggaatcctgctgcatcacagaagctggaagttctgatgttccactgaaatcacaatggaaagtcttgacttgactggtcacagtaatgaaaggcagtaatagaaataaggatcattcagcagaaggagaaggggttggaaaacgaccaaaacgaaagtgtcttcagtggcatccattgctagcaaagaaacttcttgatttttcagaagaggaagaagaggaagacgaagaggaggatattgataaggttcaacttcttggggccgatggcctagagcaagatgttggtgaaactgaagatgatgaatcaccagagcagcgagcccggagaccaatgaatgcatttcttttattttgcaaacgccatcgctctcttgtacgtcaggaacaccccaggcttgataaccgaggtgctaccaagatactagctgattggtgggctgttcttgatccaaaggaaaagcagaaatacacagacatggccaaggagtataaggatgcatttatgaaagcaaatcctggctacaaatggtgtcctaccacaaacaagcctgtgaaatccccaacacccactgtcaatccacgaaagaaactttgggccttcccatctgactcttcaagagacttgccaagccccaagaaagcaaagactgaagaaatgcctca

SEQ ID NO: 111717 - DNA, 539 bp, Homo sapiens
  Payload ID: 1880
  Gene Symbol: BBX
  Gene Name: bobby sox homolog (Drosophila)
  ENST ID: ENST00000429270
  CDS Start-End: 42-539
tttgctaagaggtagtgttagggcaaggcctggtcacagtaatgaaaggcagtaatagaaataaggatcattcagcagaaggagaaggggttggaaaacgaccaaaacgaaagtgtcttcagtggcatccattgctagcaaagaaacttcttgatttttcagaagaggaagaagaggaagacgaagaggaggatattgataaggttcaacttcttggggccgatggcctagagcaagatgttggtgaaactgaagatgatgaatcaccagagcagcgagcccggagaccaatgaatgcatttcttttattttgcaaacgccatcgctctcttgtacgtcaggaacaccccaggcttgataaccgaggtgctaccaagatactagctgattggtgggctgttcttgatccaaaggaaaagcagaaatacacagacatggccaaggagtataaggatgcatttatgaaagcaaatcctggctacaaatggtgtcctaccacaaacaagcctgtgaaatccccaacacccactgtcaatcca

SEQ ID NO: 111718 - DNA, 4276 bp, Homo sapiens
  Payload ID: 1881
  Gene Symbol: BOC
  Gene Name: BOC cell adhesion associated, oncogene regulated
  Uniprot ID: Q9BWV1
  ENST ID: ENST00000273395
  CDS Start-End: 340-3687
gtttctcatagttggcgtcttctaaaggaaaaacactaaaatgaggaactcagcggaccgggagcgacgcagcttgagggaagcatccctagctgttggcgcagaggggcgaggctgaagccgagtggcccgaggtgtctgaggggctggggcaaaggtgaaagagtttcagaacaagcttcctggaacccatgacccatgaagtcttgtcgacatttataccgtctgagggtagcagctcgaaagtagaagaagtggagtgttgccagggacggcagtatctctttgtgtgaccctggcggcttatgggacgttggcttcagacctttgtgatacaccatgctgcgtgggacgatgacggcgtggagaggaatgaggcctgaggtcacactggcttgcctcctcctagccacagcaggctgctttgctgacttgaacgaggtccctcaggtcaccgtccagcctgcgtccaccgtccagaagcccggaggcactgtgatcttgggctgcgtggtggaacctccaaggatgaatgtaacctggcgcctgaatggaaaggagctgaatggctcggatgatgctctgggtgtcctcatcacccacgggaccctcgtcatcactgcccttaacaaccacactgtgggacggtaccagtgtgtggcccggatgcctgcgggggctgtggccagcgtgccagccactgtgacactagccaatctccaggacttcaagttagatgtgcagcacgtgattgaagtggatgagggaaacacagcagtcattgcctgccacctgcctgagagccaccccaaagcccaggtccggtacagcgtcaaacaagagtggctggaggcctccagaggtaactacctgatcatgccctcagggaacctccagattgtgaatgccagccaggaggacgagggcatgtacaagtgtgcagcctacaacccagtgacccaggaagtgaaaacctccggctccagcgacaggctacgtgtgcgccgctccaccgctgaggctgcccgcatcatctaccccccagaggcccaaaccatcatcgtcaccaaaggccagagtctcattctggagtgtgtggccagtggaatcccacccccacgggtcacctgggccaaggatgggtccagtgtcaccggctacaacaagacgcgcttcctgctgagcaacctcctcatcgacaccaccagcgaggaggactcaggcacctaccgctgcatggccgacaatggggttgggcagcccggggcagcggtcatcctctacaatgtccaggtgtttgaaccccctgaggtcaccatggagctatcccagctggtcatcccctggggccagagtgccaagcttacctgtgaggtgcgtgggaaccccccgccctccgtgctgtggctgaggaatgctgtgcccctcatctccagccagcgcctccggctctcccgcagggccctgcgcgtgctcagcatggggcctgaggacgaaggcgtctaccagtgcatggccgagaacgaggttgggagcgcccatgccgtagtccagctgcggacctccaggccaagcataaccccaaggctatggcaggatgctgagctggctactggcacacctcctgtatcaccctccaaactcggcaaccctgagcagatgctgagggggcaaccggcgctccccagacccccaacgtcagtggggcctgcttccccgcagtgtccaggagagaaggggcagggggctcccgccgaggctcccatcatcctcagctcgccccgcacctccaagacagactcatatgaactggtgtggcggcctcggcatgagggcagtggccgggcgccaatcctctactatgtggtgaaacaccgcaagcaggtcacaaattcctctgacgattggaccatctctggcattccagccaaccagcaccgcctgaccctcaccagacttgaccccgggagcttgtatgaagtggagatggcagcttacaactgtgcgggagagggccagacagccatggtcaccttccgaactggacggcggcccaaacccgagatcatggccagcaaagagcagcagatccagagagacgaccctggagccagtccccagagcagcagccagccagaccacggccgcctctcccccccagaagctcccgacaggcccaccatctccacggcctccgagacctcagtgtacgtgacctggattccccgtgggaatggtgggttcccaatccagtccttccgtgtggagtacaagaagctaaagaaagtgggagactggattctggccaccagcgccatccccccatcgcggctgtccgtggagatcacgggcctagagaaaggcacctcctacaagtttcgagtccgggctctgaacatgctgggggagagcgagcccagcgccccctctcggccctacgtggtgtcgggctacagcggtcgcgtgtacgagaggcccgtggcaggtccttatatcaccttcacggatgcggtcaatgagaccaccatcatgctcaagtggatgtacatcccagcaagtaacaacaacaccccaatccatggcttttatatctattatcgacccacagacagtgacaatgatagtgactacaagaaggatatggtggaaggggacaagtactggcactccatcagccacctgcagccagagacctcctacgacattaagatgcagtgcttcaatgaaggaggggagagcgagttcagcaacgtgatgatctgtgagaccaaagctcggaagtcttctggccagcctggtcgactgccacccccaactctggccccaccacagccgccccttcctgaaaccatagagcggccggtgggcactggggccatggtggctcgctccagcgacctgccctatctgattgtcggggtcgtcctgggctccatcgttctcatcatcgtcaccttcatccccttctgcttgtggagggcctggtctaagcaaaaacatacaacagacctgggttttcctcgaagtgcccttccaccctcctgcccgtatactatggtgccattgggaggactcccaggccaccaggccagtggacagccctacctcagtggcatcagtggacgggcctgtgctaatgggatccacatgaataggggctgcccctcggctgcagtgggctacccgggcatgaagccccagcagcactgcccaggcgagcttcagcagcagagtgacaccagcagcctgctgaggcagacccatcttggcaatggatatgacccccaaagtcaccagatcacgaggggtcccaagtctagcccggacgagggctctttcttatacacactgcccgacgactccactcaccagctgctgcagccccatcacgactgctgccaacgccaggagcagcctgctgctgtgggccagtcaggggtgaggagagcccccgacagtcctgtcctggaagcagtgtgggaccctccatttcactcagggcccccatgctgcttgggccttgtgccagttgaagaggtggacagtcctgactcctgccaagtgagtggaggagactggtgtccccagcaccccgtaggggcctacgtaggacaggaacctggaatgcagctctccccggggccactggtgcgtgtgtcttttgaaacaccacctctcacaatttaggcagaagctgatatcccagaaagactatatattgttttttttttaaaaaaaaaaagaagaaaaaagagacagagaaaattggtatttatttttctattatagccatatttatatatttatgcacttgtaaataaatgtatatgttttataattctggagagacataaggagtcctacccgttgaggttggagagggaaaataaagaagctgccacctaacaggagtcacccaggaaagcaccgcacaggctggcgcgggacagactcctaacctggggcctctgcagtggcaggcgaggctgcaggaggcccacagataagctggcaagaggaaggatcccaggcacatggttcatcacgagcatgagggaacagcaaggggcacggtatcacagcctggagacacccacacagatggctggatccggtgctacgggaaacattttcctaagatgcccatgagaacagaccaagatgtgtacagcactatgagcattaaaaaaccttccagaatcaataatccgtggcaacatatctctgtaaaaacaaacactgtaacttctaaataaatgtttagtcttccctgtaa

SEQ ID NO: 111719 - DNA, 4278 bp, Homo sapiens
  Payload ID: 1881
  Gene Symbol: BOC
  Gene Name: BOC cell adhesion associated, oncogene regulated
  Uniprot ID: Q9BWV1
  ENST ID: ENST00000355385
  CDS Start-End: 340-3684
gtttctcatagttggcgtcttctaaaggaaaaacactaaaatgaggaactcagcggaccgggagcgacgcagcttgagggaagcatccctagctgttggcgcagaggggcgaggctgaagccgagtggcccgaggtgtctgaggggctggggcaaaggtgaaagagtttcagaacaagcttcctggaacccatgacccatgaagtcttgtcgacatttataccgtctgagggtagcagctcgaaagtagaagaagtggagtgttgccagggacggcagtatctctttgtgtgaccctggcggcttatgggacgttggcttcagacctttgtgatacaccatgctgcgtgggacgatgacggcgtggagaggaatgaggcctgaggtcacactggcttgcctcctcctagccacagcaggctgctttgctgacttgaacgaggtccctcaggtcaccgtccagcctgcgtccaccgtccagaagcccggaggcactgtgatcttgggctgcgtggtggaacctccaaggatgaatgtaacctggcgcctgaatggaaaggagctgaatggctcggatgatgctctgggtgtcctcatcacccacgggaccctcgtcatcactgcccttaacaaccacactgtgggacggtaccagtgtgtggcccggatgcctgcgggggctgtggccagcgtgccagccactgtgacactagccaatctccaggacttcaagttagatgtgcagcacgtgattgaagtggatgagggaaacacagcagtcattgcctgccacctgcctgagagccaccccaaagcccaggtccggtacagcgtcaaacaagagtggctggaggcctccagaggtaactacctgatcatgccctcagggaacctccagattgtgaatgccagccaggaggacgagggcatgtacaagtgtgcagcctacaacccagtgacccaggaagtgaaaacctccggctccagcgacaggctacgtgtgcgccgctccaccgctgaggctgcccgcatcatctaccccccagaggcccaaaccatcatcgtcaccaaaggccagagtctcattctggagtgtgtggccagtggaatcccacccccacgggtcacctgggccaaggatgggtccagtgtcaccggctacaacaagacgcgcttcctgctgagcaacctcctcatcgacaccaccagcgaggaggactcaggcacctaccgctgcatggccgacaatggggttgggcagcccggggcagcggtcatcctctacaatgtccaggtgtttgaaccccctgaggtcaccatggagctatcccagctggtcatcccctggggccagagtgccaagcttacctgtgaggtgcgtgggaaccccccgccctccgtgctgtggctgaggaatgctgtgcccctcatctccagccagcgcctccggctctcccgcagggccctgcgcgtgctcagcatggggcctgaggacgaaggcgtctaccagtgcatggccgagaacgaggttgggagcgcccatgccgtagtccagctgcggacctccaggccaagcataaccccaaggctatggcaggatgctgagctggctactggcacacctcctgtatcaccctccaaactcggcaaccctgagcagatgctgagggggcaaccggcgctccccagacccccaacgtcagtggggcctgcttccccgcagtgtccaggagagaaggggcagggggctcccgccgaggctcccatcatcctcagctcgccccgcacctccaagacagactcatatgaactggtgtggcggcctcggcatgagggcagtggccgggcgccaatcctctactatgtggtgaaacaccgcaaggtcacaaattcctctgacgattggaccatctctggcattccagccaaccagcaccgcctgaccctcaccagacttgaccccgggagcttgtatgaagtggagatggcagcttacaactgtgcgggagagggccagacagccatggtcaccttccgaactggacggcggcccaaacccgagatcatggccagcaaagagcagcagatccagagagacgaccctggagccagtccccagagcagcagccagccagaccacggccgcctctcccccccagaagctcccgacaggcccaccatctccacggcctccgagacctcagtgtacgtgacctggattccccgtgggaatggtgggttcccaatccagtccttccgtgtggagtacaagaagctaaagaaagtgggagactggattctggccaccagcgccatccccccatcgcggctgtccgtggagatcacgggcctagagaaaggcacctcctacaagtttcgagtccgggctctgaacatgctgggggagagcgagcccagcgccccctctcggccctacgtggtgtcgggctacagcggtcgcgtgtacgagaggcccgtggcaggtccttatatcaccttcacggatgcggtcaatgagaccaccatcatgctcaagtggatgtacatcccagcaagtaacaacaacaccccaatccatggcttttatatctattatcgacccacagacagtgacaatgatagtgactacaagaaggatatggtggaaggggacaagtactggcactccatcagccacctgcagccagagacctcctacgacattaagatgcagtgcttcaatgaaggaggggagagcgagttcagcaacgtgatgatctgtgagaccaaagctcggaagtcttctggccagcctggtcgactgccacccccaactctggccccaccacagccgccccttcctgaaaccatagagcggccggtgggcactggggccatggtggctcgctccagcgacctgccctatctgattgtcggggtcgtcctgggctccatcgttctcatcatcgtcaccttcatccccttctgcttgtggagggcctggtctaagcaaaaacatacaacagacctgggttttcctcgaagtgcccttccaccctcctgcccgtatactatggtgccattgggaggactcccaggccaccaggccagtggacagccctacctcagtggcatcagtggacgggcctgtgctaatgggatccacatgaataggggctgcccctcggctgcagtgggctacccgggcatgaagccccagcagcactgcccaggcgagcttcagcagcagagtgacaccagcagcctgctgaggcagacccatcttggcaatggatatgacccccaaagtcaccagatcacgaggggtcccaagtctagcccggacgagggctctttcttatacacactgcccgacgactccactcaccagctgctgcagccccatcacgactgctgccaacgccaggagcagcctgctgctgtgggccagtcaggggtgaggagagcccccgacagtcctgtcctggaagcagtgtgggaccctccatttcactcagggcccccatgctgcttgggccttgtgccagttgaagaggtggacagtcctgactcctgccaagtgagtggaggagactggtgtccccagcaccccgtaggggcctacgtaggacaggaacctggaatgcagctctccccggggccactggtgcgtgtgtcttttgaaacaccacctctcacaatttaggcagaagctgatatcccagaaagactatatattgttttttttttaaaaaaaaaaagaagaaaaaagagacagagaaaattggtatttatttttctattatagccatatttatatatttatgcacttgtaaataaatgtatatgttttataattctggagagacataaggagtcctacccgttgaggttggagagggaaaataaagaagctgccacctaacaggagtcacccaggaaagcaccgcacaggctggcgcgggacagactcctaacctggggcctctgcagtggcaggcgaggctgcaggaggcccacagataagctggcaagaggaaggatcccaggcacatggttcatcacgagcatgagggaacagcaaggggcacggtatcacagcctggagacacccacacagatggctggatccggtgctacgggaaacattttcctaagatgcccatgagaacagaccaagatgtgtacagcactatgagcattaaaaaaccttccagaatcaataatccgtggcaacatatctctgtaaaaacaaacactgtaacttctaaataaatgtttagtcttccctgtaaccttc

SEQ ID NO: 111720 - DNA, 1286 bp, Homo sapiens
  Payload ID: 1881
  Gene Symbol: BOC
  Gene Name: BOC cell adhesion associated, oncogene regulated
  ENST ID: ENST00000484034
  CDS Start-End: 152-625
ttagagatagtttttctcatcctcaagtattgggagtccaactttgagtggaatctggactaaacttcagagtgttgccagggacggcagtatctctttgtgtgaccctggcggcttatgggacgttggcttcagacctttgtgatacaccatgctgcgtgggacgatgacggcgtggagaggaatgaggcctgaggtcacactggcttgcctcctcctagccacagcaggctgctttgctgacttgaacgaggtccctcaggtcaccgtccagcctgcgtccaccgtccagaagcccggaggcactgtgatcttgggctgcgtggtggaacctccaaggatgaatgtaacctggcgcctgaatggaaaggagctgaatggctcggatgatgctctgggtgtcctcatcacccacgggaccctcgtcatcactgcccttaacaaccacactgtgggacggtaccagtgtgtggcccggatgcctgcgggggctgtggccagcgtgccagccactgtgacactagccagtgagtctgctcctttgcctccctgccatggtgcggtccctcctcatctctcccaccctgaagcccccaccattcatgctgcctcttgttactcttagcataaaatgggccttaactgcagaaatgtcaaatcagaacagtagctgcctagtaatgcccagtgatgggggacccttgtgcccttggaaaacctcactccaagtagaggctgtatctggagtgagtgtctacagagaggggaattggtcagtgcatggcagaacttgacatggcagaactgttccgtgggccccagagcagggccgtgccgtgccttcctacttggtcatcctgtggctgtaggtgcactgtcccaactgctcacacaccttccagtcccctccctccattctcaccacagttacagtcggagcagggagagacaggacaccaagagacatgggcagggccacgtgtagtctggacagagcccacccagcccagacttggcctcctgtctctctgtgaggggcaagcatagtccgaaggcctggattataaatattagaacataatgaaaaggaaactgtgtggcaaagggataaagggatacagagaaaagaaacaaggaagagatgaggtgacagtttggaccaaggaaaatgccaagagaagacttcacactaccttttttttttctggttttgccattcttttattcatgttgttacactcagtataggatagtttattaaaatcattatgtctgtagacattcta

SEQ ID NO: 111721 - DNA, 582 bp, Homo sapiens
  Payload ID: 1881
  Gene Symbol: BOC
  Gene Name: BOC cell adhesion associated, oncogene regulated
  ENST ID: ENST00000464546
  CDS Start-End: 329-582
aaccgaccgagggggtcgggggaggctgcgttaaggcttccctgagattggtttccttatcattttctccaccgccgctgtcccattttctgatgagtttgcttttaatgatttatccaacagtttgtcttgcagaagaagaagaccattgagagtttcagaacaagcttcctggaacccatgacccatgaagtcttgtcgacatttataccgtctgagggtagcagctcgaaagtagaagaagtggagtgttgccagggacggcagtatctctttgtgtgaccctggcggcttatgggacgttggcttcagacctttgtgatacaccatgctgcgtgggacgatgacggcgtggagaggaatgaggcctgaggtcacactggcttgcctcctcctagccacagcaggctgctttgctgacttgaacgaggtccctcaggtcaccgtccagcctgcgtccaccgtccagaagcccggaggcactgtgatcttgggctgcgtggtggaacctccaaggatgaatgtaacctggcgcctgaatggaaaggagctgaatggctcggatgatgctctgggtgtcct

SEQ ID NO: 111722 - DNA, 561 bp, Homo sapiens
  Payload ID: 1881
  Gene Symbol: BOC
  Gene Name: BOC cell adhesion associated, oncogene regulated
  ENST ID: ENST00000462425
  CDS Start-End: 497-561
gagctgcggccgaggctgggcgcgccgggcgccgggcgaagaagttggggcgaggcgggcagcgggggtcccgggggctgcagccgctacggggcccaggggcgccgcatctcgttccctgccgcagcggtctggccgggcgatggtggtttcgcctcagcggttcccagaagcttctcgggtggaagaaggatccagccagcctcccaaacttccaccgaaggttgacaccagcgccccggccccatgctccaggccgtggggggaacccgaggcgtggcggcaaatgcgtagagtcactcaacacgcactcggcctctttggaggtttcagaacaagcttcctggaacccatgacccatgaagtcttgtcgacatttataccgtctgagggtagcagctcgaaagtagaagaaagtgttgccagggacggcagtatctctttgtgtgaccctggcggcttatgggacgttggcttcagacctttgtgatacaccatgctgcgtgggacgatgacggcgtggagaggaatgaggcctgaggtcacactggcttgcctcct

SEQ ID NO: 111723 - DNA, 317 bp, Homo sapiens
  Payload ID: 1881
  Gene Symbol: BOC
  Gene Name: BOC cell adhesion associated, oncogene regulated
  ENST ID: ENST00000473008
  CDS Start-End: 1-119
ttcagcagcagagtgacaccagcagcctgctgaggcagacccatcttggcaatggatatgacccccaaagtcaccagatcacgagggcccccatgctgcttgggccttgtgccagttgaagaggtggacagtcctgactcctgccaagtgagtggaggagactggtgtccccagcaccccgtaggggcctacgtaggacaggaacctggaatgcagctctccccggggccactggtgcgtgtgtcttttgaaacaccacctctcacaatttaggcagaagctgatatcccagaaagactatatattgtttttttttt

SEQ ID NO: 111724 - DNA, 544 bp, Homo sapiens
  Payload ID: 1881
  Gene Symbol: BOC
  Gene Name: BOC cell adhesion associated, oncogene regulated
  ENST ID: ENST00000494687
  CDS Start-End: 448-544
actaaaatgaggaactcagcggaccgggagcgacgcagcttgagggaagcatccctagctgttggcgcagaggggcgaggctgaagccgagtggcccgaggtgtctgaggggctggggcaaaggtgaaagagtttcagaacaagcttcctggaacccatgacccatgaagtcttgtcgacatttataccgtctgagggtagcagctcgaaagtagaagaagtgggtgaggttttctcttcagtctgatagctctggcctattaggtcagccatttgttcatgttttgtgttaccacttagagatagtttttctcatcctcaagtattgggagtccaactttgagtggaatctggactaaacttcagagtgttgccagggacggcagtatctctttgtgtgaccctggcggcttatgggacgttggcttcagacctttgtgatacaccatgctgcgtgggacgatgacggcgtggagaggaatgaggcctgaggtcacactggcttgcctcctcctagccacagcaggctgctttgctgacttga

SEQ ID NO: 111725 - DNA, 4646 bp, Homo sapiens
  Payload ID: 1881
  Gene Symbol: BOC
  Gene Name: BOC cell adhesion associated, oncogene regulated
  Uniprot ID: Q9BWV1
  ENST ID: ENST00000495514
  CDS Start-End: 705-4049
cctcctcctcctcctcgcacggtaatgggaggctcctaggcaggagaagcaaaagaaggaattgtttgcgagttcagtcatccaaaaagcttcttccatatggagggaccgggtgcgctgggcgcggcgtcccctgcgttgtcctcctgctgccgcccccgcggccgccgctttctgccgcggggaccctgagccccggcccgccggtgtcagccgccgcgcgcgcgcacagacacacacacagagacacacaaacacacacagaaaagacacacacgcgcacacacggcgcgcacaccctcacgcccgccacagccacaacacgcccgcacgcgccctccctctccggcccgcaacttctcggtcctcggctcctttgttgctccagccgcggccgctcgcccgtgttgtgtgtccccggtgtcaccgagcgtgttgtgtgtccgtgcggcgcggcgctgtgtggctccctcgcgcccaccacgctggcccccgggccccggctcgcccttcccaggcgccggctgcagcagagtttcagaacaagcttcctggaacccatgacccatgaagtcttgtcgacatttataccgtctgagggtagcagctcgaaagtagaagaaagtgttgccagggacggcagtatctctttgtgtgaccctggcggcttatgggacgttggcttcagacctttgtgatacaccatgctgcgtgggacgatgacggcgtggagaggaatgaggcctgaggtcacactggcttgcctcctcctagccacagcaggctgctttgctgacttgaacgaggtccctcaggtcaccgtccagcctgcgtccaccgtccagaagcccggaggcactgtgatcttgggctgcgtggtggaacctccaaggatgaatgtaacctggcgcctgaatggaaaggagctgaatggctcggatgatgctctgggtgtcctcatcacccacgggaccctcgtcatcactgcccttaacaaccacactgtgggacggtaccagtgtgtggcccggatgcctgcgggggctgtggccagcgtgccagccactgtgacactagccaatctccaggacttcaagttagatgtgcagcacgtgattgaagtggatgagggaaacacagcagtcattgcctgccacctgcctgagagccaccccaaagcccaggtccggtacagcgtcaaacaagagtggctggaggcctccagaggtaactacctgatcatgccctcagggaacctccagattgtgaatgccagccaggaggacgagggcatgtacaagtgtgcagcctacaacccagtgacccaggaagtgaaaacctccggctccagcgacaggctacgtgtgcgccgctccaccgctgaggctgcccgcatcatctaccccccagaggcccaaaccatcatcgtcaccaaaggccagagtctcattctggagtgtgtggccagtggaatcccacccccacgggtcacctgggccaaggatgggtccagtgtcaccggctacaacaagacgcgcttcctgctgagcaacctcctcatcgacaccaccagcgaggaggactcaggcacctaccgctgcatggccgacaatggggttgggcagcccggggcagcggtcatcctctacaatgtccaggtgtttgaaccccctgaggtcaccatggagctatcccagctggtcatcccctggggccagagtgccaagcttacctgtgaggtgcgtgggaaccccccgccctccgtgctgtggctgaggaatgctgtgcccctcatctccagccagcgcctccggctctcccgcagggccctgcgcgtgctcagcatggggcctgaggacgaaggcgtctaccagtgcatggccgagaacgaggttgggagcgcccatgccgtagtccagctgcggacctccaggccaagcataaccccaaggctatggcaggatgctgagctggctactggcacacctcctgtatcaccctccaaactcggcaaccctgagcagatgctgagggggcaaccggcgctccccagacccccaacgtcagtggggcctgcttccccgcagtgtccaggagagaaggggcagggggctcccgccgaggctcccatcatcctcagctcgccccgcacctccaagacagactcatatgaactggtgtggcggcctcggcatgagggcagtggccgggcgccaatcctctactatgtggtgaaacaccgcaaggtcacaaattcctctgacgattggaccatctctggcattccagccaaccagcaccgcctgaccctcaccagacttgaccccgggagcttgtatgaagtggagatggcagcttacaactgtgcgggagagggccagacagccatggtcaccttccgaactggacggcggcccaaacccgagatcatggccagcaaagagcagcagatccagagagacgaccctggagccagtccccagagcagcagccagccagaccacggccgcctctcccccccagaagctcccgacaggcccaccatctccacggcctccgagacctcagtgtacgtgacctggattccccgtgggaatggtgggttcccaatccagtccttccgtgtggagtacaagaagctaaagaaagtgggagactggattctggccaccagcgccatccccccatcgcggctgtccgtggagatcacgggcctagagaaaggcacctcctacaagtttcgagtccgggctctgaacatgctgggggagagcgagcccagcgccccctctcggccctacgtggtgtcgggctacagcggtcgcgtgtacgagaggcccgtggcaggtccttatatcaccttcacggatgcggtcaatgagaccaccatcatgctcaagtggatgtacatcccagcaagtaacaacaacaccccaatccatggcttttatatctattatcgacccacagacagtgacaatgatagtgactacaagaaggatatggtggaaggggacaagtactggcactccatcagccacctgcagccagagacctcctacgacattaagatgcagtgcttcaatgaaggaggggagagcgagttcagcaacgtgatgatctgtgagaccaaagctcggaagtcttctggccagcctggtcgactgccacccccaactctggccccaccacagccgccccttcctgaaaccatagagcggccggtgggcactggggccatggtggctcgctccagcgacctgccctatctgattgtcggggtcgtcctgggctccatcgttctcatcatcgtcaccttcatccccttctgcttgtggagggcctggtctaagcaaaaacatacaacagacctgggttttcctcgaagtgcccttccaccctcctgcccgtatactatggtgccattgggaggactcccaggccaccaggccagtggacagccctacctcagtggcatcagtggacgggcctgtgctaatgggatccacatgaataggggctgcccctcggctgcagtgggctacccgggcatgaagccccagcagcactgcccaggcgagcttcagcagcagagtgacaccagcagcctgctgaggcagacccatcttggcaatggatatgacccccaaagtcaccagatcacgaggggtcccaagtctagcccggacgagggctctttcttatacacactgcccgacgactccactcaccagctgctgcagccccatcacgactgctgccaacgccaggagcagcctgctgctgtgggccagtcaggggtgaggagagcccccgacagtcctgtcctggaagcagtgtgggaccctccatttcactcagggcccccatgctgcttgggccttgtgccagttgaagaggtggacagtcctgactcctgccaagtgagtggaggagactggtgtccccagcaccccgtaggggcctacgtaggacaggaacctggaatgcagctctccccggggccactggtgcgtgtgtcttttgaaacaccacctctcacaatttaggcagaagctgatatcccagaaagactatatattgttttttttttaaaaaaaaaaagaagaaaaaagagacagagaaaattggtatttatttttctattatagccatatttatatatttatgcacttgtaaataaatgtatatgttttataattctggagagacataaggagtcctacccgttgaggttggagagggaaaataaagaagctgccacctaacaggagtcacccaggaaagcaccgcacaggctggcgcgggacagactcctaacctggggcctctgcagtggcaggcgaggctgcaggaggcccacagataagctggcaagaggaaggatcccaggcacatggttcatcacgagcatgagggaacagcaaggggcacggtatcacagcctggagacacccacacagatggctggatccggtgctacgggaaacattttcctaagatgcccatgagaacagaccaagatgtgtacagcactatgagcattaaaaaaccttccagaatcaataatccgtggcaacatatctctgtaaaaacaaacactgtaacttctaaataaatgtttagtcttccctgtaaccttcaaa

SEQ ID NO: 111726 - DNA, 703 bp, Homo sapiens
  Payload ID: 1881
  Gene Symbol: BOC
  Gene Name: BOC cell adhesion associated, oncogene regulated
  ENST ID: ENST00000498710
  CDS Start-End: 509-703
aagaaggaattgtttgcgagttcagtcatccaaaaagcttcttccatatggagggaccgggtgcgctgggcgcggcgtcccctgcgttgtcctcctgctgccgcccccgcggccgccgctttctgccgcggggaccctgagccccggcccgccggtgtcagccgccgcgcgcgcgcacagacacacacacagagacacacaaacacacacagaaaagacacacacgcgcacacacggcgcgcacaccctcacgcccgccacagccacaacacgcccgcacgcgccctccctctccggcccgcaacttctcggtcctcggctcctttgttgctccagccgcggccgctcgcccgtgttgtgtgtccccggtgtcaccgagcgtgttgtgtgtccgtgcggcgcggcgctgtgtggctccctcgcgcccaccacgctggcccccgggccccggctcgcccttcccaggcgccggctgcagcagagtttcagaacaagcttcctggaacccatgacccatgaagtcttgtcgacatttataccgtctgagggtagcagctcgaaagtagaagaagtggatctccaggacttcaagttagatgtgcagcacgtgattgaagtggatgagggaaacacagcagtcattgcctgccacctgcctgagagccaccccaaagcccaggtccggtacagcgtcaaacaagag

SEQ ID NO: 111727 - DNA, 564 bp, Homo sapiens
  Payload ID: 1881
  Gene Symbol: BOC
  Gene Name: BOC cell adhesion associated, oncogene regulated
  ENST ID: ENST00000488486
  CDS Start-End: 1-253
acgggcctgtgctaatgggatccacatgaataggggctgcccctcggctgcagtgggctacccgggcatgaagccccagcagcactgcccaggcgagcttcagcagcagagtgacaccagcagcctgctgaggcagacccatcttggcaatggatatgacccccaaagtcaccagatcacgagctgctgcagccccatcacgactgctgccaacgccaggagcagcctgctgctgtgggccagtcaggggtgaggagagcccccgacagtcctgtcctggaagcagtgtgggaccctccatttcactcagggcccccatgctgcttgggccttgtgccagttgaagaggtggacagtcctgactcctgccaagtgagtggaggagactggtgtccccagcaccccgtaggggcctacgtaggacaggaacctggaatgcagctctccccggggccactggtgcgtgtgtcttttgaaacaccacctctcacaatttaggcagaagctgatatcccagaaagactatatattgttttttttttaaaaaaaaaaagaagaaaaaag

SEQ ID NO: 111728 - DNA, 2173 bp, Homo sapiens
  Payload ID: 1881
  Gene Symbol: BOC
  Gene Name: BOC cell adhesion associated, oncogene regulated
  ENST ID: ENST00000485230
  CDS Start-End: 626-1099
aaaaagcttcttccatatggagggaccgggtgcgctgggcgcggcgtcccctgcgttgtcctcctgctgccgcccccgcggccgccgctttctgccgcggggaccctgagccccggcccgccggtgtcagccgccgcgcgcgcgcacagacacacacacagagacacacaaacacacacagaaaagacacacacgcgcacacacggcgcgcacaccctcacgcccgccacagccacaacacgcccgcacgcgccctccctctccggcccgcaacttctcggtcctcggctcctttgttgctccagccgcggccgctcgcccgtgttgtgtgtccccggtgtcaccgagcgtgttgtgtgtccgtgcggcgcggcgctgtgtggctccctcgcgcccaccacgctggcccccgggccccggctcgcccttcccaggcgccggctgcagcagagtttcagaacaagcttcctggaacccatgacccatgaagtcttgtcgacatttataccgtctgagggtagcagctcgaaagtagaagaagtggagtgttgccagggacggcagtatctctttgtgtgaccctggcggcttatgggacgttggcttcagacctttgtgatacaccatgctgcgtgggacgatgacggcgtggagaggaatgaggcctgaggtcacactggcttgcctcctcctagccacagcaggctgctttgctgacttgaacgaggtccctcaggtcaccgtccagcctgcgtccaccgtccagaagcccggaggcactgtgatcttgggctgcgtggtggaacctccaaggatgaatgtaacctggcgcctgaatggaaaggagctgaatggctcggatgatgctctgggtgtcctcatcacccacgggaccctcgtcatcactgcccttaacaaccacactgtgggacggtaccagtgtgtggcccggatgcctgcgggggctgtggccagcgtgccagccactgtgacactagccagtgagtctgctcctttgcctccctgccatggtgcggtccctcctcatctctcccaccctgaagcccccaccattcatgctgcctcttgttactcttagcataaaatgggccttaactgcagaaatgtcaaatcagaacagtagctgcctagtaatgcccagtgatgggggacccttgtgcccttggaaaacctcactccaagtagaggctgtatctggagtgagtgtctacagagaggggaattggtcagtgcatggcagaacttgacatggcagaactgttccgtgggccccagagcagggccgtgccgtgccttcctacttggtcatcctgtggctgtaggtgcactgtcccaactgctcacacaccttccagtcccctccctccattctcaccacagttacagtcggagcagggagagacaggacaccaagagacatgggcagggccacgtgtagtctggacagagcccacccagcccagacttggcctcctgtctctctgtgaggggcaagcatagtccgaaggcctggattataaatattagaacataatgaaaaggaaactgtgtggcaaagggataaagggatacagagaaaagaaacaaggaagagatgaggtgacagtttggaccaaggaaaatgccaagagaagacttcacactaccttttttttttctggttttgccattcttttattcatgttgttacactcagtataggatagtttattaaaatcattatgtctgtagacattctatttgtgatatagaaattgtgttatttctgacctctattttttcctattatgtgacaaagaacataggtcctcagaccaacatgtggaaaccaagggccaaatggcttctaaggtccctcccaactgaataattctggtaaattccatttccatgtgctcactgacggatggtcctaataaccgctcttatttcttttatgcttgtgaaagtcatagtttttacaaaattacttgagggtgtattataaagattcaacagagcaaagtaaaggccaagtgacttgacatagtcatagctggaagaggagccttaccaagacaggtgtttctagttgccattatacttattctaccttatgaggacccattgtatgaggctagatggaagtgagtaaacagacgtcctacctttg

SEQ ID NO: 111729 - DNA, 811 bp, Homo sapiens
  Payload ID: 1882
  Gene Symbol: BOLA1
  Gene Name: bolA family member 1
  Uniprot ID: Q9Y3E2
  ENST ID: ENST00000369150
  CDS Start-End: 323-736
agtcctggccctgagcgggaatcgcagtggccgaggctgagcggcaggtagaaggggcgtctccggggcttcacagggaacacaggggcttcggcccaaccacaactggaggtcgaattcaccacgtcacgtagagaaaaggggcggtgtctcgggtctccccgtgtggcatcaaggcgggctccctataggagctggtgtggacgtccgggcgtggggttagggcggatgcggggatcgcggggcgggtgttgacattgtgctctcaccaggcggatcgccccgaccctcactcctggcgtctgagtctctggcgtagcccatgctgagtgggcggctggtcctgggtctggtctccatggctggccgcgtttgtttgtgccagggcagcgcgggatccggggccatcggtccggtggaggccgccattcgcacgaagttggaggaggccctgagccccgaggtgctagagcttcgcaacgagagcggtggccacgcggtcccgcctggcagtgagactcacttccgcgtggctgtggtgagctctcgtttcgagggactgagccccctacaacgacaccggctggtccacgcagcgctggccgaggagctgggaggtccggtccatgcgctggccatccaggcacggacccccgcccagtggagagagaactctcagctggacactagccccccatgcctgggtgggaacaagaaaactctaggaaccccctgaaccccaagagagggaggaccaggatccgaatgggctgggtgagcacgaattaccgaggccttccctttgatacag

SEQ ID NO: 111730 - DNA, 859 bp, Homo sapiens
  Payload ID: 1882
  Gene Symbol: BOLA1
  Gene Name: bolA family member 1
  Uniprot ID: Q9Y3E2
  ENST ID: ENST00000369152
  CDS Start-End: 127-540
aggactgcattttgctccggagcgtccagagtcctggccctgagcgggaatcgcagtggccgaggctgagcggcaggcggatcgccccgaccctcactcctggcgtctgagtctctggcgtagcccatgctgagtgggcggctggtcctgggtctggtctccatggctggccgcgtttgtttgtgccagggcagcgcgggatccggggccatcggtccggtggaggccgccattcgcacgaagttggaggaggccctgagccccgaggtgctagagcttcgcaacgagagcggtggccacgcggtcccgcctggcagtgagactcacttccgcgtggctgtggtgagctctcgtttcgagggactgagccccctacaacgacaccggctggtccacgcagcgctggccgaggagctgggaggtccggtccatgcgctggccatccaggcacggacccccgcccagtggagagagaactctcagctggacactagccccccatgcctgggtgggaacaagaaaactctaggaaccccctgaaccccaagagagggaggaccaggatccgaatgggctgggtgagcacgaattaccgaggccttccctttgatacagtccaggatttgtaagggatgaagacccctgggccccattctgttggggtccatacatactctccgaagatagcaacttgcttcaggtcaaagtgaacccgagaaaagagaagaatcactcactactgctcttgccctggactattcaggaagggcagcccggatgttccatgttaaatcgtgacagaattgcaccagacctgatgagttggaaacaatcctatacattaaaagaaattacacta

SEQ ID NO: 111731 - DNA, 1096 bp, Homo sapiens
  Payload ID: 1882
  Gene Symbol: BOLA1
  Gene Name: bolA family member 1
  Uniprot ID: Q9Y3E2
  ENST ID: ENST00000369153
  CDS Start-End: 665-1078
gcctccctgctttccgcgtcctgacattacggctaaaattgcagttacagcttcttttacaaggagaagaatgtggaaagaataaccaatttgatgtaatttataagagctaccgggaggggtgaagggaagtcgtttgattggctaaaagcggagccgtatctaacagccaatagaaaagcagaaagccgcctcttggtttgcgtcctgcactgaaaggaaatgacggattttactttctgaccaccttaccagtggggagaatccgagactacagttcccatgagccctcagggcaccacgtggtgcctgcccgtgctaccaacgcgcagcgaggactccatttcccagcgtgcctcaggaagggcgccaggactgcattttgctccggagcgtccagagtcctggccctgagcgggaatcgcagtggccgaggctgagcggcagctggaggtcgaattcaccacgtcacgtagagaaaaggggcggtgtctcgggtctccccgtgtggcatcaaggcgggctccctataggagctggtgtggacgtccgggcgtggggttagggcggatgcggggatcgcggggcgggtgttgacattgtgctctcaccaggcggatcgccccgaccctcactcctggcgtctgagtctctggcgtagcccatgctgagtgggcggctggtcctgggtctggtctccatggctggccgcgtttgtttgtgccagggcagcgcgggatccggggccatcggtccggtggaggccgccattcgcacgaagttggaggaggccctgagccccgaggtgctagagcttcgcaacgagagcggtggccacgcggtcccgcctggcagtgagactcacttccgcgtggctgtggtgagctctcgtttcgagggactgagccccctacaacgacaccggctggtccacgcagcgctggccgaggagctgggaggtccggtccatgcgctggccatccaggcacggacccccgcccagtggagagagaactctcagctggacactagccccccatgcctgggtgggaacaagaaaactctaggaaccccctgaaccccaagagagggagga

SEQ ID NO: 111732 - DNA, 1012 bp, Homo sapiens
  Payload ID: 1883
  Gene Symbol: BOLA2
  Gene Name: bolA family member 2
  Uniprot ID: Q9H3K6
  ENST ID: ENST00000330978
  CDS Start-End: 514-972
cttcctcccggcacagaaggcctccccctctcaccagggccctcgcccgctggtccgccaggccccgccttttttgcggcccccattgtgctgctggacccgacgagcagtgttgacagtgaaccccacgtagacgcggccccggtaccgggggttcaggcagtagagcaggtagacgccgaaaaagcgccctggcctcgccgcgacccccgcgggacccatcgggccttggggttcgggaaccacagcagggggttgattgccgtgacctagggtccaggggagggctggatcgctagggctgcagggtgcttgcttcggaacaagctctcggggactatccggaggcagcctgcaggaagccgtagcgccggtacgtgcccctctcctgtctggaggcgggtgtagaagtccgaccgcggaagccagactgctgtccagtcggcgagcgcgtaccattcagcatcggctccgcccgagtcccaccttcctcaggctctgattggctgacacatggcaagcgcgaaaagcctggaccgctggaaagcccggctgcttgagggcggaagtactgcgttgacgtacgccttagtaagggcggaagtgagttttccagcggaagtggctcctgtaaggcagcaaggtagcgtggccggcgcccgagctggggttgtgtccctgctgggctgccgttccagctggactgccgccatggaactcagcgccgaatacctccgcgagaagctgcagcgggacctggaggcggagcatgtggaggtggaggacacgaccctcaaccgttgctcctgtagcttccgagtcctggtggtgtcggccaagttcgaggggaaaccgctgcttcagagacacaggctggtgaacgcgtgcctagcagaagagctcccgcacatccatgcctttgaacagaaaaccctgaccccagaccagtgggcacgtgagcgacagaaatgagggactgggatctgcacagccattaaattataaatctgga

SEQ ID NO: 111733 - DNA, 1442 bp, Homo sapiens
  Payload ID: 1883
  Gene Symbol: BOLA2
  Gene Name: bolA family member 2
  ENST ID: ENST00000380596
  CDS Start-End: 112-570
gtgtagaagtccgaccgcggaagccagactgctgtccagtcggcgagcgcgtaccattcagcatcggctccgcccgagtcccaccttcctcaggctctgattggctgacacatggcaagcgcgaaaagcctggaccgctggaaagcccggctgcttgagggcggaagtactgcgttgacgtacgccttagtaagggcggaagtgagttttccagcggaagtggctcctgtaaggcagcaaggtagcgtggccggcgcccgagctggggttgtgtccctgctgggctgccgttccagctggactgccgccatggaactcagcgccgaatacctccgcgagaagctgcagcgggacctggaggcggagcatgtggaggtggaggacacgaccctcaaccgttgctcctgtagcttccgagtcctggtggtgtcggccaagttcgaggggaaaccgctgcttcagagacacaggctggtgaacgcgtgcctagcagaagagctcccgcacatccatgcctttgaacagaaaaccctgaccccagaccagtgggcacgtgagcgacagaaatgagtgttttgctcggcagcttggatcctagcatgactatacattgtgacatggtcattacatatggattagaccaactggagaattgccagacttgtggtaccgattatatcatctcagtcttgaatttactcacgctgattgttgaacagataaatacgaaactgccatcatcatttgtagaaaaactgtttataccatcatctaaactactattcttgcgttatcataaagaaaaagaggttgttgctgtagcccatgctgtttatcaagcaatgctcagcttgaagaatattcctgttttggagactgcctataagttaatattgggagaaatgacttgtgccctaaacaacctcctgcacagtctgcaacttcctgaggcctgttctgaaataaaacatgaggcttttaagaatcatgtgttcaatgtagacaatgcaaaatttgtagttaaatttgacctcagtgccctgactacaattggaaatgccaaaaactcgagtctttaattgtaatgactttgttttatccacagttaagccttttctcattacatatttatgtatttcactgtcatgtcaacatgtctgcagaatcactgtatgtaacaaacagccatatttaagacatgcctggataaataaaattggtaggaatgttttcttgccattatatttaacgtttcttctttttccttgacaaatcttgataagtttttttatattagttttattttctagaaaacgtcttatgaatttctcccatttgctctagcatgcttatagaaaatgtcagtgtttcttacagctcaaatttgtatagttgttttaaaatgcggtctctttcttcttcccctggtacttttttctttc

SEQ ID NO: 111734 - DNA, 1012 bp, Homo sapiens; identical to SEQ ID NO: 111732
  Payload ID: 1884
  Gene Symbol: BOLA2B
  Gene Name: bolA family member 2B
  Uniprot ID: Q9H3K6
  ENST ID: ENST00000305321
  CDS Start-End: 514-972

SEQ ID NO: 111735 - DNA, 335 bp, Homo sapiens
  Payload ID: 1884
  Gene Symbol: BOLA2B
  Gene Name: bolA family member 2B
  ENST ID: ENST00000569282
  CDS Start-End: 1-245
aaggtagcgtggccggcgcccgagctggggttgtgtccctgctgggctgccgttccagctggactgccgccatggaactcagcgccgaatacctccgcgagaagctgcagcgggacctggaggcggagcatgtgcttccgagtcctggtggtgtcggccaagttcgaggggaaaccgctgcttcagagacacaggctggtgaacgcgtgcctagcagaagagctcccgcacatccatgcctttgaacagaaaaccctgaccccagaccagtgggcacgtgagcgacagaaatgagggactgggatctgcacagccattaaattataaatctggac

SEQ ID NO: 111736 - DNA, 687 bp, Homo sapiens
  Payload ID: 1884
  Gene Symbol: BOLA2B
  Gene Name: bolA family member 2B
  ENST ID: ENST00000567436
  CDS Start-End: 1-267
tttccagcggaagtggctcctgtaaggcagcaaggtagcgtggccggcgcccgagctggggttgtgtccctgctgggctgccgttccagctggactgccgccatggaactcagcgccgaatacctccgcgagaagctgcagcgggacctggaggcggagcatgtggaggtggaggacacgaccctcaaccgttgctcctgtagcttccgagtcctggtggtgtcggccaagttcgaggggaaaccgctgcttcagagacacaggtaaggccctgggagcaccttgcctagctcctgtaccacaaccccagccactccccctacccctgcaacctgactcccgcactccccctggcgtggctcagggaccttgaggatcccgccttcgtgacccctgcttcgagtatttcgatgtagaccctctctccaagtacgtgttcccacggcctggggactacaaccttggggacaccagtctcttgggtcaccctagcctcggggtgtgcgatcaccgctggccttttcctaaccccatctctcgccccaggctggtgaacgcgtgcctagcagaagagctcccgcacatccatgcctttgaacagaaaaccctgaccccagaccagtgggcacgtgagcgacagaaatgagggactgggatctgcacagccattaaattataaatctggac

SEQ ID NO: 111737 - DNA, 444 bp, Homo sapiens
  Payload ID: 1885
  Gene Symbol: BOLA3
  Gene Name: bolA family member 3
  Uniprot ID: Q53S33
  ENST ID: ENST00000295326
  CDS Start-End: 32-337
gacctcgggcggcgggtcacgtcggccgggcatggctgcatggagcccggccgcggcagcgcctctcctccgcgggatccgcgggcttccacttcaccatcggatgtttgccactcagactgagggggagctcagagtgacccaaattctcaaagaaaagtttccacgagctacagctataaaagtcactgacatttcaggcactaaaagaagaaatcaaagagatgcatggattgcggatatttacctctgtccccaaacgctgaccacgccctggctgcatagatgctgctgcttaagaccttggatgaacttcactgacatcattcttccctaagcagtcaccaaaaaatttatatattttgctcatatacatttccatattataattatagaagatgtataatctatttagatgttaattaaaggaaacaaacaactgaa

SEQ ID NO: 111738 - DNA, 639 bp, Homo sapiens
  Payload ID: 1885
  Gene Symbol: BOLA3
  Gene Name: bolA family member 3
  Uniprot ID: Q53S33
  ENST ID: ENST00000327428
  CDS Start-End: 121-444
ggaggctgacggcctccgggcggcagggggcggcctctcccacggcggcggctctcggtcccccgctccgcgtctttcgggcatacagtgacctcgggcggcgggtcacgtcggccgggcatggctgcatggagcccggccgcggcagcgcctctcctccgcgggatccgcgggcttccacttcaccatcggatgtttgccactcagactgagggggagctcagagtgacccaaattctcaaagaaaagtttccacgagctacagctataaaagtcactgacatttcaggaggttgtggggcgatgtatgaaattaaaattgaatcagaagaatttaaggagaagagaactgtccagcagcaccagatggttaatcaggcactaaaagaagaaatcaaagagatgcatggattgcggatatttacctctgtccccaaacgctgaccacgccctggctgcatagatgctgctgcttaagaccttggatgaacttcactgacatcattcttccctaagcagtcaccaaaaaatttatatattttgctcatatacatttccatattataattatagaagatgtataatctatttagatgttaattaaaggaaacaaacaactgaagcttttgaagggtcatt

SEQ ID NO: 111739 - DNA, 2833 bp, Homo sapiens
  Payload ID: 1886
  Gene Symbol: BRS3
  Gene Name: bombesin-like receptor 3
  Uniprot ID: P32247
  ENST ID: ENST00000370648
  CDS Start-End: 229-1428
ctccacctcctactcttcagtgccagatgggtaagcatttagccaagcatgctgggagacacacagaactgaagcaaaggagtatctggatgtcttggattttcttcccattctgttctgttctgttctcctaataccatctcgttactagacgtaggcattggacgtgacaatcaactgcatttgaactgagaagaagaaatattaaagacacagtcttcagaagaaatggctcaaaggcagcctcactcacctaatcagactttaatttcaatcacaaatgacacagaatcatcaagctctgtggtttctaacgataacacaaataaaggatggagcggggacaactctccaggaatagaagcattgtgtgccatctatattacttatgctgtgatcatttcagtgggcatccttggaaatgctattctcatcaaagtctttttcaagaccaaatccatgcaaacagttccaaatattttcatcaccagcctggcttttggagatcttttacttctgctaacttgtgtgccagtggatgcaactcactaccttgcagaaggatggctgttcggaagaattggttgtaaggtgctctctttcatccggctcacttctgttggtgtgtcagtgttcacattaacaattctcagcgctgacagatacaaggcagttgtgaagccacttgagcgacagccctccaatgccatcctgaagacttgtgtaaaagctggctgcgtctggatcgtgtctatgatatttgctctacctgaggctatattttcaaatgtatacacttttcgagatcccaataaaaatatgacatttgaatcatgtacctcttatcctgtctctaagaagctcttgcaagaaatacattctctgctgtgcttcttagtgttctacattattccactctctattatctctgtctactattccttgattgctaggaccctttacaaaagcaccctgaacatacctactgaggaacaaagccatgcccgtaagcagattgaatcccgaaagagaattgccagaacggtattggtgttggtggctctgtttgccctctgctggttgccaaatcacctcctgtacctctaccattcattcacttctcaaacctatgtagacccctctgccatgcatttcattttcaccattttctctcgggttttggctttcagcaattcttgcgtaaacccctttgctctctactggctgagcaaaagcttccagaagcattttaaagctcagttgttctgttgcaaggcggagcggcctgagcctcctgttgctgacacctctcttaccaccctggctgtgatgggaacggtcccgggcactgggagcatacagatgtctgaaattagtgtgacctcgttcactgggtgtagtgtgaagcaggcagaggacagattctagcttttcaaggaaaaatgctgcttctcctcccagcgtgtgtatccgactctaagctgtgtgcaggtgtatggtgtccagatttttgttgtttgaaaagtgtgttgaaatcttaggagtgaaggatccctataagtaagtaaaatacaaaccattactttcttcaaagtacaaatagtaatgtcatcgggctttctaaataaaatgaagccccactaagtgcagaaagacaagtttatatatgccagtgaatcgtaagggaagtcaaatgggaaggaaggtgtaataaacaagatgaaacttaaaaatctcatttgttgtttaatcacatctgtgatgcttctaactcctcatatactgtgatttgcataaaattgtgtttgtgtttactgtgtggtgtaaatctagagatactttgtatgtgaaaaggggatcacaaaagagagaaagcatctcttaggctattttcttaaaaataaaccttcacagaatggctgtccttttccattaatctgtattccattgtagctgaatctgtgcagttgaaatgaaaatgttttggagtcagcgaatataaagcactgagtaaggatctggggcacagtgcttgccttactgggtcaacacttacaactgccatggattaataactgggctaagttatcattcacaaatattgttaggaacttgccttattcataggcagaataagtggtcatgtttatggtgtcatttgaggacctctgttgaaaaatctgcaaacctgccacagtgtctgaaattcttcctttacagaaattcgtttctttctggtaagcagtgccctctttctaaaaacatgcagaagtaccatatgaaatccctaacccctgggtgtgcaattgtgatcagatcatcttcctgcttgactttattaaacccaatgggtgcctaagtcctgtaagtgtatggcctaattaatctctgcccatggaaatcagatggaaagttctgattttctatcctgtgctcctacctgctaacatcattcacttgttaataattattgttttaaaaaaaaaaactcttgtcaatagacgtgtcagatttagacctgtggtttcagaaaaatttttggagcaaatttaaacatgtttggcactataggtaaatttgtatttaaaaaaaaaaacaatgtttgagtgtgcttttggtaatgctgagctttctttaaatggcttgtggagtcgtgaacttttgctaatgatgtggctccaaaaggtaatacatattaacattagactttaactttctgtaaaattggtttacttaaagttgggcggggggtgtgatactgtattagtattgttttaaagtggacactgtaacacgtgtggaaaaacaaataaatatgaaataaagttttaaa

SEQ ID NO: 111740 - DNA, 732 bp, Homo sapiens
  Payload ID: 1887
  Gene Symbol: BGLAP
  Gene Name: bone gamma-carboxyglutamate (gla) protein
  Uniprot ID: P02818
  ENST ID: ENST00000368272
  CDS Start-End: 271-573
gattgtggctcaccctccatcactcccaggggcccctggcccagcagccgcagctcccaaccacaatatcctttggggtttggcctacggagctggggcggatgacccccaaatagccctggcagattccccctagacccgcccgcaccatggtcaggcatgcccctcctcatcgctgggcacagcccagagggtataaacagtgctggaggctggcggggcaggccagctgagtcctgagcagcagcccagcgcagccaccgagacaccatgagagccctcacactcctcgccctattggccctggccgcactttgcatcgctggccaggcaggtgcgaagcccagcggtgcagagtccagcaaaggtgcagcctttgtgtccaagcaggagggcagcgaggtagtgaagagacccaggcgctacctgtatcaatggctgggagccccagtcccctacccggatcccctggagcccaggagggaggtgtgtgagctcaatccggactgtgacgagttggctgaccacatcggctttcaggaggcctatcggcgcttctacggcccggtctagggtgtcgctctgctggcctggccggcaaccccagttctgctcctctccaggcacccttctttcctcttccccttgcccttgccctgacctcccagccctatggatgtggggtccccatcatcccagctgctcccaaataaactccagaagaggaatctg

SEQ ID NO: 111741 - DNA, 1480 bp, Homo sapiens
  Payload ID: 1888
  Gene Symbol: BST1
  Gene Name: bone marrow stromal cell antigen 1
  Uniprot ID: Q10588
  ENST ID: ENST00000265016
  CDS Start-End: 196-1152
aaagtgctgggattacaggcatgagccgccgcgccccgccccacgctcagtcttgaaattgtctggaacgggaaacggcaaacagcgagatatccgagcgagagtcccgccctgcatcagtttgcggaaccgccttggtagaaggagagaaggggagtggaggaagcacgggactggagggaccaaagttccccgatggcggcccaggggtgcgcggcatcgcggctgctccagctgctgctgcagcttctgcttctactgttgctgctggcggcgggcggggcgcgcgcgcggtggcgcggggagggcaccagcgcacacttgcgggacatcttcctgggccgctgcgccgagtaccgcgcactgctgagtcccgagcagcggaacaagaactgcacagccatctgggaagcctttaaagtggcgctggacaaggatccctgctccgtgctgccctcagactatgacctttttattaacttgtccaggcactctattcccagagataagtccctgttctgggaaaatagccacctccttgttaacagctttgcagacaacacccgtcgttttatgcccctgagcgatgttctgtatggcagggttgcagatttcttgagctggtgtcgacagaaaaatgactctggactcgattaccaatcctgccctacatcagaagactgtgaaaataatcctgtggattccttttggaaaagggcatccatccagtattccaaggatagttctggggtgatccacgtcatgctgaatggttcagagccaacaggagcctatcccatcaaaggtttttttgcagattatgaaattccaaacctccagaaggaaaaaattacacgaatcgagatctgggttatgcatgaaattgggggacccaatgtggaatcctgcggggaaggcagcatgaaagtcctggaaaagaggctgaaggacatggggttccagtacagctgtattaatgattaccgaccagtgaagctcttacagtgcgtggaccacagcacccatcctgactgtgccttaaagtcggcagcagccgctactcaaagaaaagccccaagtctttatacagaacaaagggcgggtcttatcattcccctctttctggtgctggcttccaggactcaactgtaactggaaactgtgttgctctaaccctcctccagccctgcagcctccccttgcagtcatcattcgtgttctgtgtataccaaatgattctgttatctaaagaagctttttgctgggaaaacgatgtcctgaaaatggtatttcaatgaggcatatgttcaggatttcagaaacaagaagttagttctatttagcaggttaaaaaatgctgcattagaattaaagcaagttattttcttatttgtataatgacacaaagcattgggagtcagactgcttgtatattatcaaacattttaagagaattctaataaagctgtattttacatca

SEQ ID NO: 111742 - DNA, 1993 bp, Homo sapiens
  Payload ID: 1888
  Gene Symbol: BST1
  Gene Name: bone marrow stromal cell antigen 1
  ENST ID: ENST00000382346
  CDS Start-End: 50-1051
gagaaggggagtggaggaagcacgggactggagggaccaaagttccccgatggcggcccaggggtgcgcggcatcgcggctgctccagctgctgctgcagcttctgcttctactgttgctgctggcggcgggcggggcgcgcgcgcggtggcgcggggagggcaccagcgcacacttgcgggacatcttcctgggccgctgcgccgagtaccgcgcactgctgagtcccgagcagcggcaaataagaaacagcagagaaccacctgtgttacacaccacccagaacaagaactgcacagccatctgggaagcctttaaagtggcgctggacaaggatccctgctccgtgctgccctcagactatgacctttttattaacttgtccaggcactctattcccagagataagtccctgttctgggaaaatagccacctccttgttaacagctttgcagacaacacccgtcgttttatgcccctgagcgatgttctgtatggcagggttgcagatttcttgagctggtgtcgacagaaaaatgactctggactcgattaccaatcctgccctacatcagaagactgtgaaaataatcctgtggattccttttggaaaagggcatccatccagtattccaaggatagttctggggtgatccacgtcatgctgaatggttcagagccaacaggagcctatcccatcaaaggtttttttgcagattatgaaattccaaacctccagaaggaaaaaattacacgaatcgagatctgggttatgcatgaaattgggggacccaatgtggaatcctgcggggaaggcagcatgaaagtcctggaaaagaggctgaaggacatggggttccagtacagctgtattaatgattaccgaccagtgaagctcttacagtgcgtggaccacagcacccatcctgactgtgccttaaagtcggcagcagccgctactcaaagaaaagccccaagtctttatacagaacaaagggcgggtcttatcattcccctctttctggtgctggcttccaggactcaactgtaactggaaactgtgttgctctaaccctcctccagccctgcagcctccccttgcagtcatcattcgtgttctgtgtataccaaatgattctgttatctaaagaagctttttgctgggaaaacgatgtcctgaaaatggtatttcaatgaggcatatgttcaggatttcagaaacaagaagttagttctatttagcaggttaaaaaatgctgcattagaattaaagcaagttattttcttatttgtataatgacacaaagcattgggagtcagactgcttgtatattatcaaacattttaagagaattctaataaagctgtattttacatcatctatattttcctatatctccagcagcacggacactgcatgcttgttgattgcttaagacatatgtatactatataaatgtatgcatatatggtctgcaaagttttcatttttcatttatttggtataaagatgttcagttaatggttcctttttgttttgagagacagagtttcgctcctttgcccaggctggagtgaggtggggagatctcagctcactgcaacctctgcttccaggattcaagcgattctcctgcctcagcctcccaagtagctgggattgcaggtgcctgccaccatgtccagctaatttttgtatttttagtagagatggggtttcaccatgttggccaggctagtctcgaattcctgacctcaggtgatccacccacctcagcctcccaaagtgctaggattacaggcgtgagccaccacatccagccataatagttacttataatgagggaaaaacccaaaatatccagtaatatttacatatttactgaaactgtttggaacttgtattagtttgttcttgcattgctataaagaactgcccgagactgggtaatttacaaaaataaaaataaaaaagaggtttaattgactcaca

SEQ ID NO: 111743 - DNA, 1002 bp, Homo sapiens
  Payload ID: 1888
  Gene Symbol: BST1
  Gene Name: bone marrow stromal cell antigen 1
  ENST ID: ENST00000514445
  CDS Start-End: 1-468
ggactcgattaccaatcctgccctacatcagaagactgtgaaaataatcctgtggattccttttggaaaagggcatccatccagtattccaaggatagttctggggtgatccacgtcatgctgaatggttcagagccaacaggagcctatcccatcaaaggtttttttgcagattatgaaattccaaacctccagaaggaaaaaattacacgaatcgagatctgggttatgcatgaaattgggggacccaatgtggaatcctgcggggaaggcagcatgaaagtcctggaaaagaggctgaaggacatggggttccagtacagctgtattaatgattaccgaccagtgaagctcttacagtgcgtggaccacagcacccatcctgactgtgccttaaagtcacccaagaggctatgtgggacattaggagtgcgacccagagcagaaccatacaaccgccggttctagcctttgtacaaggaaactgtgggaaccatgatggggaagatactgactgtcagagagtccaaagatgtaaatgccttccactcccacagcaaggaagccgaaatctccagaggctctggcaagagttgagtcaattgcatgcctgcctagtccagctccgtccacatgaatgctctccacaagcttcagaggaaacaggataaaatggactcccaaatatttagggtggtgaaaatactctgcatgatactagaattgtggatacaggtgattatatatgtgtccaaacctacagaaggtacaacaccaagggtgaaccctcaggtaaactacagaggctgggtgaccatgatgtttcaatgtcggttcattagttgtgacaaatgcaccactccaccactctggtggggatgctgccagtgggggaggctatgtatgtgtggggacagagcgtatgtgggaagctctgtactttctgctcaaatttgctgtgaacctaaaactgctctaaacattaaagcctattcaaaaaaa

SEQ ID NO: 111744 - DNA, 770 bp, Homo sapiens
  Payload ID: 1888
  Gene Symbol: BST1
  Gene Name: bone marrow stromal cell antigen 1
  ENST ID: ENST00000505785
  CDS Start-End: 1-560
agtccctgttctgggaaaatagccacctccttgttaacagctttgcagacaacacccgtcgttttatgcccctgagcgatgttctgtatggcagggttgcagatttcttgagctggtgtcgacagaaaaatgactctggactcgattaccaatcctgccctacatcagaagactgtgaaaataatcctgtggattccttttggaaaagggcatccatccagtattccaaggatagttctggggtgatccacgtcatgctgaatggttcagagccaacaggagcctatcccatcaaaggtttttttgcagattatgaaattccaaacctccagaaggaaaaaattacacgaatcgagatctgggttatgcatgaaattgggggacccaatgtggaatcctgcggggaaggcagcatgaaagtcctggaaaagaggctgaaggacatggggttccagtacagctgtattaatgattaccgaccagtgaagctcttacagtgcgtggaccacagcacccatcctgactgtgccttaaagtcagacggggtttcaccgtgttagccaggatggtctcgatctcctggccttgtgatccgccttccttggcctcctaaagtgctgggattacaggcgtaagccaccacgcctggcccacaccaccttttatgtaatcctttctgagtcatgggctggcttggttgtatgttgttatagtagttgttttgctattataaacaatgctgaaatataatccttgattatatactttaa

SEQ ID NO: 111745 - DNA, 801 bp, Homo sapiens
  Payload ID: 1888
  Gene Symbol: BST1
  Gene Name: bone marrow stromal cell antigen 1
  ENST ID: ENST00000514989
  CDS Start-End: 1-293
gttcagagccaacaggagcctatcccatcaaaggtttttttgcagattatgaaattccaaacctccagaaggaaaaaattacacgaatcgagatctgggttatgcatgaaattgggggacccaatgtggaatcctgcggggaaggcagcatgaaagtcctggaaaagaggctgaaggacatggggttccagtacagctgtattaatgattaccgaccagtgaagctcttacagtgcgtggaccacagcacccatcctgactgtgccttaaagtcgaaactgtgggaaccatgatggggaagatactgactgtcagagagtccaaagatgtaaatgccttccactcccacagcaaggaagccgaaatctccagaggctctggcaagagttgagtcaattgcatgcctgcctagtccagctccgtccacatgaatgctctccacaagcttcagaggaaacaggataaaatggactcccaaatatttagggtggtgaaaatactctgcatgatactagaattgtggatacaggtgattatatatgtgtccaaacctacagaaggtacaacaccaagggtgaaccctcaggtaaactacagaggctgggtgaccatgatgtttcaatgtcggttcattagttgtgacaaatgcaccactccaccactctggtggggatgctgccagtgggggaggctatgtatgtgtggggacagagcgtatgtgggaagctctgtactttctgctcaaatttgctgtgaacctaaaactgctctaaacattaaagcctattcaaaaaaatgaaa

SEQ ID NO: 111746 - DNA, 1019 bp, Homo sapiens
  Payload ID: 1889
  Gene Symbol: BST2
  Gene Name: bone marrow stromal cell antigen 2
  Uniprot ID: Q10589
  ENST ID: ENST00000252593
  CDS Start-End: 74-616
ataaaggggtggcccgtagaagattccagcaccctcccctaactccaggccagactctaaaggggagatctggatggcatctacttcgtatgactattgcagagtgcccatggaagacggggataagcgctgtaagcttctgctggggataggaattctggtgctcctgatcatcgtgattctgggggtgcccttgattatcttcaccatcaaggccaacagcgaggcctgccgggacggccttcgggcagtgatggagtgtcgcaatgtcacccatctcctgcaacaagagctgaccgaggcccagaagggctttcaggatgtggaggcccaggccgccacctgcaaccacactgtgatggccctaatggcttccctggatgcagagaaggcccaaggacaaaagaaagtggaggagcttgagggagagatcactacattaaaccataagcttcaggacgcgtctgcagaggtggagcgactgagaagagaaaaccaggtcttaagcgtgagaatcgcggacaagaagtactaccccagctcccaggactccagctccgctgcggcgccccagctgctgattgtgctgctgggcctcagcgctctgctgcagtgagatcccaggaagctggcacatcttggaaggtccgtcctgctcggcttttcgcttgaacattcccttgatctcatcagttctgagcgggtcatggggcaacacggttagcggggagagcacggggtagccggagaagggcctctggagcaggtctggaggggccatggggaagtcctgggtgtggggacacagtcgggttgacccagggctgtctccctccagagcctccctccggacaatgagtcccccctcttgtctcccaccctgagattgggcatggggtgcggtgtggggggcatgtgctgcctgttgttatgggttttttttgcggggggggttgcttttttctggggtctttgagctccaaaaaataaacacttcctttgagggagagcacacctga

SEQ ID NO: 111747 - DNA, 4229 bp, Homo sapiens
  Payload ID: 1890
  Gene Symbol: BMP1
  Gene Name: bone morphogenetic protein 1
  Uniprot ID: P13497
  ENST ID: ENST00000306385
  CDS Start-End: 671-3631
cgagagagcgagggtccaagaaggggagatagggagacgcgggcggagagaccgacccgaggcgggggcgcggggcaggggcggcgcgaggacctgacagcgtgtcccgcggcggggcgggggctcggccgcgcgcccgcgggggaggccgccgctagagggcacttcaggagggacagccctcccggcaccccggggcccgagctccagccccggcctcgcggcccgcggcccgcggcccgggcggcccgagccccctccccgggcgcgcggctctccgccttccccgccccggctggcgcgcggcccggcccggccgagcactgtcccggccccgaggggggcagagctcgggcgaaaacccgccctccagcgagctcatttccctaaaaaggggggggggagtcggagggagggagggagggagagaaagaaagagagaaaaagaaggaaagggagagggagacggctggagcccgaggacgagcgcggagccgcggaccgagcggggggcgggagacaggaaggagggaggcgagcagagggaaggggaagaggtcggggagcgagggcgggagcggtcgcggtcgcgatcgagcaagcaagcgggcgagaggacgccctcccctggcctccagtgcgccgcttccctcgccgccgccccgccagcatgcccggcgtggcccgcctgccgctgctgctcgggctgctgctgctcccgcgtcccggccggccgctggacttggccgactacacctatgacctggcggaggaggacgactcggagcccctcaactacaaagacccctgcaaggcggctgcctttcttggggacattgccctggacgaagaggacctgagggccttccaggtacagcaggctgtggatctcagacggcacacagctcgtaagtcctccatcaaagctgcagttccaggaaacacttctacccccagctgccagagcaccaacgggcagcctcagaggggagcctgtgggagatggagaggtagatcccgtagccggcgggcggcgacgtcccgaccagagcgtgtgtggcccgatggggtcatcccctttgtcattgggggaaacttcactggtagccagagggcagtcttccggcaggccatgaggcactgggagaagcacacctgtgtcaccttcctggagcgcactgacgaggacagctatattgtgttcacctatcgaccttgcgggtgctgctcctacgtgggtcgccgcggcgggggcccccaggccatctccatcggcaagaactgtgacaagttcggcattgtggtccacgagctgggccacgtcgtcggcttctggcacgaacacactcggccagaccgggaccgccacgtttccatcgttcgtgagaacatccagccagggcaggagtataacttcctgaagatggagcctcaggaggtggagtccctgggggagacctatgacttcgacagcatcatgcattacgctcggaacacattctccaggggcatcttcctggataccattgtccccaagtatgaggtgaacggggtgaaacctcccattggccaaaggacacggctcagcaagggggacattgcccaagcccgcaagctttacaagtgcccagcctgtggagagaccctgcaagacagcacaggcaacttctcctcccctgaataccccaatggctactctgctcacatgcactgcgtgtggcgcatctctgtcacacccggggagaagatcatcctgaacttcacgtccctggacctgtaccgcagccgcctgtgctggtacgactatgtggaggtccgagatggcttctggaggaaggcgcccctccgaggccgcttctgcgggtccaaactccctgagcctatcgtctccactgacagccgcctctgggttgaattccgcagcagcagcaattgggttggaaagggcttctttgcagtctacgaagccatctgcgggggtgatgtgaaaaaggactatggccacattcaatcgcccaactacccagacgattaccggcccagcaaagtctgcatctggcggatccaggtgtctgagggcttccacgtgggcctcacattccagtcctttgagattgagcgccacgacagctgtgcctacgactatctggaggtgcgcgacgggcacagtgagagcagcaccctcatcgggcgctactgtggctatgagaagcctgatgacatcaagagcacgtccagccgcctctggctcaagttcgtctctgacgggtccattaacaaagcgggctttgccgtcaactttttcaaagaggtggacgagtgctctcggcccaaccgcgggggctgtgagcagcggtgcctcaacaccctgggcagctacaagtgcagctgtgaccccgggtacgagctggccccagacaagcgccgctgtgaggctgcttgtggcggattcctcaccaagctcaacggctccatcaccagcccgggctggcccaaggagtacccccccaacaagaactgcatctggcagctggtggcccccacccagtaccgcatctccctgcagtttgacttctttgagacagagggcaatgatgtgtgcaagtacgacttcgtggaggtgcgcagtggactcacagctgactccaagctgcatggcaagttctgtggttctgagaagcccgaggtcatcacctcccagtacaacaacatgcgcgtggagttcaagtccgacaacaccgtgtccaaaaagggcttcaaggcccacttcttctcagacaaggacgagtgctccaaggataacggcggctgccagcaggactgcgtcaacacgttcggcagttatgagtgccaatgccgcagtggcttcgtcctccatgacaacaagcacgactgcaaagaagccggctgtgaccacaaggtgacatccaccagtggtaccatcaccagccccaactggcctgacaagtatcccagcaagaaggagtgcacgtgggccatctccagcacccccgggcaccgggtcaagctgaccttcatggagatggacatcgagtcccagcctgagtgtgcctacgaccacctagaggtgttcgacgggcgagacgccaaggcccccgtcctcggccgcttctgtgggagcaagaagcccgagcccgtcctggccacaggcagccgcatgttcctgcgcttctactcagataactcggtccagcgaaagggcttccaggcctcccacgccacagagtgcgggggccaggtacgggcagacgtgaagaccaaggacctttactcccacgcccagtttggcgacaacaactaccctgggggtgtggactgtgagtgggtcattgtggccgaggaaggctacggcgtggagctcgtgttccagacctttgaggtggaggaggagaccgactgcggctatgactacatggagctcttcgacggctacgacagcacagcccccaggctggggcgctactgtggctcagggcctcctgaggaggtgtactcggcgggagattctgtcctggtgaagttccactcggatgacaccatcaccaaaaaaggtttccacctgcgatacaccagcaccaagttccaggacacactccacagcaggaagtgaccactgcctgagcaggggcggggactggagcctgctgcccttggtcgcctagactggatagtgggggtgggcggaaggcaacgcaccatccctctcccccaggccccaggacctgcagggccaatggcctggtgagactgtccataggaggtgggggaactggactccggcataagccacttccccacaaacccccaccagcaaggggctggggccagggagcagagcttccacaagacatttcgaagtcatcattcctctcttagggggccctgcctggtggcaagagggaatgtcagcaggaccccatcgccatccctgtgtctctacacgctgtattgtgtatcaccgggggcattattttcattgtaatgttcatttcccacccctgctccagcctcgatttggttttattttgagcccccattccaccaccccagtttcctggggcacaagtgtctgtgcatgtcccccaggagccaccgtggggagccgatggggaggggatggagaaacaagacagggcttctctcaggcccagtggccggtcagccacaccagggcaccgcagccaataaaccgaaagtgttacagccaa

SEQ ID NO: 111748 - DNA, 2626 bp, Homo sapiens
  Payload ID: 1890
  Gene Symbol: BMP1
  Gene Name: bone morphogenetic protein 1
  Uniprot ID: P13497
  ENST ID: ENST00000306349
  CDS Start-End: 155-2347
gagacaggaaggagggaggcgagcagagggaaggggaagaggtcggggagcgagggcgggagcggtcgcggtcgcgatcgagcaagcaagcgggcgagaggacgccctcccctggcctccagtgcgccgcttccctcgccgccgccccgccagcatgcccggcgtggcccgcctgccgctgctgctcgggctgctgctgctcccgcgtcccggccggccgctggacttggccgactacacctatgacctggcggaggaggacgactcggagcccctcaactacaaagacccctgcaaggcggctgcctttcttggggacattgccctggacgaagaggacctgagggccttccaggtacagcaggctgtggatctcagacggcacacagctcgtaagtcctccatcaaagctgcagttccaggaaacacttctacccccagctgccagagcaccaacgggcagcctcagaggggagcctgtgggagatggagaggtagatcccgtagccggcgggcggcgacgtcccgaccagagcgtgtgtggcccgatggggtcatcccctttgtcattgggggaaacttcactggtagccagagggcagtcttccggcaggccatgaggcactgggagaagcacacctgtgtcaccttcctggagcgcactgacgaggacagctatattgtgttcacctatcgaccttgcgggtgctgctcctacgtgggtcgccgcggcgggggcccccaggccatctccatcggcaagaactgtgacaagttcggcattgtggtccacgagctgggccacgtcgtcggcttctggcacgaacacactcggccagaccgggaccgccacgtttccatcgttcgtgagaacatccagccagggcaggagtataacttcctgaagatggagcctcaggaggtggagtccctgggggagacctatgacttcgacagcatcatgcattacgctcggaacacattctccaggggcatcttcctggataccattgtccccaagtatgaggtgaacggggtgaaacctcccattggccaaaggacacggctcagcaagggggacattgcccaagcccgcaagctttacaagtgcccagcctgtggagagaccctgcaagacagcacaggcaacttctcctcccctgaataccccaatggctactctgctcacatgcactgcgtgtggcgcatctctgtcacacccggggagaagatcatcctgaacttcacgtccctggacctgtaccgcagccgcctgtgctggtacgactatgtggaggtccgagatggcttctggaggaaggcgcccctccgaggccgcttctgcgggtccaaactccctgagcctatcgtctccactgacagccgcctctgggttgaattccgcagcagcagcaattgggttggaaagggcttctttgcagtctacgaagccatctgcgggggtgatgtgaaaaaggactatggccacattcaatcgcccaactacccagacgattaccggcccagcaaagtctgcatctggcggatccaggtgtctgagggcttccacgtgggcctcacattccagtcctttgagattgagcgccacgacagctgtgcctacgactatctggaggtgcgcgacgggcacagtgagagcagcaccctcatcgggcgctactgtggctatgagaagcctgatgacatcaagagcacgtccagccgcctctggctcaagttcgtctctgacgggtccattaacaaagcgggctttgccgtcaactttttcaaagaggtggacgagtgctctcggcccaaccgcgggggctgtgagcagcggtgcctcaacaccctgggcagctacaagtgcagctgtgaccccgggtacgagctggccccagacaagcgccgctgtgaggctgcttgtggcggattcctcaccaagctcaacggctccatcaccagcccgggctggcccaaggagtacccccccaacaagaactgcatctggcagctggtggcccccacccagtaccgcatctccctgcagtttgacttctttgagacagagggcaatgatgtgtgcaagtacgacttcgtggaggtgcgcagtggactcacagctgactccaagctgcatggcaagttctgtggttctgagaagcccgaggtcatcacctcccagtacaacaacatgcgcgtggagttcaagtccgacaacaccgtgtccaaaaagggcttcaaggcccacttcttctcagaaaagaggccagctctgcagccccctcggggacgcccccaccagctcaaattccgagtgcagaaaagaaaccggaccccccagtgaggcctgccaggcctcccggaccccttgttactcaggaacctcaccttggacggaatgggatgggggcttcggtgcccaccaaccccccacctccactctgccattccggcccacctccctctggccggacagaactggtgctctcttctccccactgtgcccgtccgcggaccggggacccttccccgtgccctaccccctcccattttgatggtgtctgtgacatttcctgttgtgaagtaaaagagggacccctgcgtcctgctcctttctcttgca

SEQ ID NO: 111749 - DNA, 3989 bp, Homo sapiens
  Payload ID: 1890
  Gene Symbol: BMP1
  Gene Name: bone morphogenetic protein 1
  ENST ID: ENST00000354870
  CDS Start-End: 267-1175
gtcggagggagggagggagggagagaaagaaagagagaaaaagaaggaaagggagagggagacggctggagcccgaggacgagcgcggagccgcggaccgagcggggggcgggagacaggaaggagggaggcgagcagagggaaggggaagaggtcggggagcgagggcgggagcggtcgcggtcgcgatcgagcaagcaagcgggcgagaggacgccctcccctggcctccagtgcgccgcttccctcgccgccgccccgccagcatgcccggcgtggcccgcctgccgctgctgctcgggctgctgctgctcccgcgtcccggccggccgctggacttggccgactacacctatgacctggcggaggaggacgactcggagcccctcaactacaaagacccctgcaaggcggctgcctttcttggggacattgccctggacgaagaggacctgagggccttccaggtacagcaggctgtggatctcagacggcacacagctcgtaagtcctccatcaaagctgcagttccaggaaacacttctacccccagctgccagagcaccaacgggcagcctcagaggggagcctgtgggagatggagaggtagatcccgtagccggcgggcggcgacgtcccgaccagagcgtgtgtggcccgatggggtcatcccctttgtcattgggggaaacttcactggtagccagagggcagtcttccggcaggccatgaggcactgggagaagcacacctgtgtcaccttcctggagcgcactgacgaggacagctatattgtgttcacctatcgaccttgcgggtgctgctcctacgtgggtcgccgcggcgggggcccccaggccatctccatcggcaagaactgtgacaagttcggcattgtggtccacgagctgggccacgtcgtcggcttctggcacgaacacactcggccagaccgggaccgccacgtttccatcgttcgtgagaacatccagccaggcgttctccactcttcactgctccttctcagctgtggctctagaaatggtgcttccttcccatgttcccttgagtcctccattcaccaggccctctgctggacaggactcttcctgagaccctccccattccccaggctccccttggctgctccccggaccctcagggcaggagtataacttcctgaagatggagcctcaggaggtggagtccctgggggagacctatgacttcgacagcatcatgcattacgctcggaacacattctccaggggcatcttcctggataccattgtccccaagtatgaggtgaacggggtgaaacctcccattggccaaaggacacggctcagcaagggggacattgcccaagcccgcaagctttacaagtgcccagcctgtggagagaccctgcaagacagcacaggcaacttctcctcccctgaataccccaatggctactctgctcacatgcactgcgtgtggcgcatctctgtcacacccggggagaagatcatcctgaacttcacgtccctggacctgtaccgcagccgcctgtgctggtacgactatgtggaggtccgagatggcttctggaggaaggcgcccctccgaggccgcttctgcgggtccaaactccctgagcctatcgtctccactgacagccgcctctgggttgaattccgcagcagcagcaattgggttggaaagggcttctttgcagtctacgaagccatctgcgggggtgatgtgaaaaaggactatggccacattcaatcgcccaactacccagacgattaccggcccagcaaagtctgcatctggcggatccaggtgtctgagggcttccacgtgggcctcacattccagtcctttgagattgagcgccacgacagctgtgcctacgactatctggaggtgcgcgacgggcacagtgagagcagcaccctcatcgggcgctactgtggctatgagaagcctgatgacatcaagagcacgtccagccgcctctggctcaagttcgtctctgacgggtccattaacaaagcgggctttgccgtcaactttttcaaagaggtggacgagtgctctcggcccaaccgcgggggctgtgagcagcggtgcctcaacaccctgggcagctacaagtgcagctgtgaccccgggtacgagctggccccagacaagcgccgctgtgaggctgcttgtggcggattcctcaccaagctcaacggctccatcaccagcccgggctggcccaaggagtacccccccaacaagaactgcatctggcagctggtggcccccacccagtaccgcatctccctgcagtttgacttctttgagacagagggcaatgatgtgtgcaagtacgacttcgtggaggtgcgcagtggactcacagctgactccaagctgcatggcaagttctgtggttctgagaagcccgaggtcatcacctcccagtacaacaacatgcgcgtggagttcaagtccgacaacaccgtgtccaaaaagggcttcaaggcccacttcttctcagacaaggacgagtgctccaaggataacggcggctgccagcaggactgcgtcaacacgttcggcagttatgagtgccaatgccgcagtggcttcgtcctccatgacaacaagcacgactgcaaagaagccggctgtgaccacaaggtgacatccaccagtggtaccatcaccagccccaactggcctgacaagtatcccagcaagaaggagtgcacgtgggccatctccagcacccccgggcaccgggtcaagctgaccttcatggagatggacatcgagtcccagcctgagtgtgcctacgaccacctagaggtgttcgacgggcgagacgccaaggcccccgtcctcggccgcttctgtgggagcaagaagcccgagcccgtcctggccacaggcagccgcatgttcctgcgcttctactcagataactcggtccagcgaaagggcttccaggcctcccacgccacagagtgcgggggccaggtacgggcagacgtgaagaccaaggacctttactcccacgcccagtttggcgacaacaactaccctgggggtgtggactgtgagtgggtcattgtggccgaggaaggctacggcgtggagctcgtgttccagacctttgaggtggaggaggagaccgactgcggctatgactacatggagctcttcgacggctacgacagcacagcccccaggctggggcgctactgtggctcagggcctcctgaggaggtgtactcggcgggagattctgtcctggtgaagttccactcggatgacaccatcaccaaaaaaggtttccacctgcgatacaccagcaccaagttccaggacacactccacagcaggaagtgaccactgcctgagcaggggcggggactggagcctgctgcccttggtcgcctagactggatagtgggggtgggcggaaggcaacgcaccatccctctcccccaggccccaggacctgcagggccaatggcctggtgagactgtccataggaggtgggggaactggactccggcataagccacttccccacaaacccccaccagcaaggggctggggccagggagcagagcttccacaagacatttcgaagtcatcattcctctcttagggggccctgcctggtggcaagagggaatgtcagcaggaccccatcgccatccctgtgtctctacacgctgtattgtgtatcaccgggggcattattttcattgtaatgttcatttcccacccctgctccagcctcgatttggttttattttgagcccccattccaccaccccagtttcctggggcacaagtgtctgtgcatgtcccccaggagccaccgtggggagccgatggggaggggatggagaaacaagacagggcttctctcaggcccagtggccggtcagccacaccagggcaccgcagccaataaaccgaaagtgttacagcc

SEQ ID NO: 111750 - DNA, 836 bp, Homo sapiens
  Payload ID: 1890
  Gene Symbol: BMP1
  Gene Name: bone morphogenetic protein 1
  ENST ID: ENST00000397814
  CDS Start-End: 267-836
gtcggagggagggagggagggagagaaagaaagagagaaaaagaaggaaagggagagggagacggctggagcccgaggacgagcgcggagccgcggaccgagcggggggcgggagacaggaaggagggaggcgagcagagggaaggggaagaggtcggggagcgagggcgggagcggtcgcggtcgcgatcgagcaagcaagcgggcgagaggacgccctcccctggcctccagtgcgccgcttccctcgccgccgccccgccagcatgcccggcgtggcccgcctgccgctgctgctcgggctgctgctgctcccgcgtcccggccggccgctggacttggccgactacacctatgacctggcggaggaggacgactcggagcccctcaactacaaagacccctgcaaggcggctgcctttcttggggacattgccctggacgaagaggacctgagggccttccaggtacagcaggctgtggatctcagacggcacacagctcgtaagtcctccatcaaagctgcagttccaggaaacacttctacccccagctgccagagcaccaacgggcagcctcagaggggagcctgtgggagatggagaggtagatcccgtagccggcgggcggcgacgtcccgaccagagcgtgtgtggcccgatggggtcatcccctttgtcattgggggaaacttcactggtagccagagggcagtcttccggcaggccatgaggcactgggagaagcacacctgtgtcaccttcctggagcgcactgacgaggacagctatattgtgttcacctatcgaccttgcggctcgggaccgcccccctga

SEQ ID NO: 111751 - DNA, 2663 bp, Homo sapiens
  Payload ID: 1890
  Gene Symbol: BMP1
  Gene Name: bone morphogenetic protein 1
  ENST ID: ENST00000518913
  CDS Start-End: 155-724
gagacaggaaggagggaggcgagcagagggaaggggaagaggtcggggagcgagggcgggagcggtcgcggtcgcgatcgagcaagcaagcgggcgagaggacgccctcccctggcctccagtgcgccgcttccctcgccgccgccccgccagcatgcccggcgtggcccgcctgccgctgctgctcgggctgctgctgctcccgcgtcccggccggccgctggacttggccgactacacctatgacctggcggaggaggacgactcggagcccctcaactacaaagacccctgcaaggcggctgcctttcttggggacattgccctggacgaagaggacctgagggccttccaggtacagcaggctgtggatctcagacggcacacagctcgtaagtcctccatcaaagctgcagttccaggaaacacttctacccccagctgccagagcaccaacgggcagcctcagaggggagcctgtgggagatggagaggtagatcccgtagccggcgggcggcgacgtcccgaccagagcgtgtgtggcccgatggggtcatcccctttgtcattgggggaaacttcactggtagccagagggcagtcttccggcaggccatgaggcactgggagaagcacacctgtgtcaccttcctggagcgcactgacgaggacagctatattgtgttcacctatcgaccttgcggctcgggaccgcccccctgagctggccccgccctccaggtgctgctcctacgtgggtcgccgcggcgggggcccccaggccatctccatcggcaagaactgtgacaagttcggcattgtggtccacgagctgggccacgtcgtcggcttctggcacgaacacactcggccagaccgggaccgccacgtttccatcgttcgtgagaacatccagccagggcaggagtataacttcctgaagatggagcctcaggaggtggagtccctgggggagacctatgacttcgacagcatcatgcattacgctcggaacacattctccaggggcatcttcctggataccattgtccccaagtatgaggtgaacggggtgaaacctcccattggccaaaggacacggctcagcaagggggacattgcccaagcccgcaagctttacaagtgcccagcctgtggagagaccctgcaagacagcacaggcaacttctcctcccctgaataccccaatggctactctgctcacatgcactgcgtgtggcgcatctctgtcacacccggggagaagatcatcctgaacttcacgtccctggacctgtaccgcagccgcctgtgctggtacgactatgtggaggtccgagatggcttctggaggaaggcgcccctccgaggccgcttctgcgggtccaaactccctgagcctatcgtctccactgacagccgcctctgggttgaattccgcagcagcagcaattgggttggaaagggcttctttgcagtctacgaagccatctgcgggggtgatgtgaaaaaggactatggccacattcaatcgcccaactacccagacgattaccggcccagcaaagtctgcatctggcggatccaggtgtctgagggcttccacgtgggcctcacattccagtcctttgagattgagcgccacgacagctgtgcctacgactatctggaggtgcgcgacgggcacagtgagagcagcaccctcatcgggcgctactgtggctatgagaagcctgatgacatcaagagcacgtccagccgcctctggctcaagttcgtctctgacgggtccattaacaaagcgggctttgccgtcaactttttcaaagaggtggacgagtgctctcggcccaaccgcgggggctgtgagcagcggtgcctcaacaccctgggcagctacaagtgcagctgtgaccccgggtacgagctggccccagacaagcgccgctgtgaggctgcttgtggcggattcctcaccaagctcaacggctccatcaccagcccgggctggcccaaggagtacccccccaacaagaactgcatctggcagctggtggcccccacccagtaccgcatctccctgcagtttgacttctttgagacagagggcaatgatgtgtgcaagtacgacttcgtggaggtgcgcagtggactcacagctgactccaagctgcatggcaagttctgtggttctgagaagcccgaggtcatcacctcccagtacaacaacatgcgcgtggagttcaagtccgacaacaccgtgtccaaaaagggcttcaaggcccacttcttctcagaaaagaggccagctctgcagccccctcggggacgcccccaccagctcaaattccgagtgcagaaaagaaaccggaccccccagtgaggcctgccaggcctcccggaccccttgttactcaggaacctcaccttggacggaatgggatgggggcttcggtgcccaccaaccccccacctccactctgccattccggcccacctccctctggccggacagaactggtgctctcttctccccactgtgcccgtccgcggaccggggacccttccccgtgccctaccccctcccattttgatggtgtctgtgacatttcctgttgtgaagtaaaagagggacccctgcgtcctgctcctttctcttgca

SEQ ID NO: 111752 - DNA, 2362 bp, Homo sapiens
  Payload ID: 1890
  Gene Symbol: BMP1
  Gene Name: bone morphogenetic protein 1
  ENST ID: ENST00000483364
  CDS Start-End: 7-915
gccagcatgcccggcgtggcccgcctgccgctgctgctcgggctgctgctgctcccgcgtcccggccggccgctggacttggccgactacacctatgacctggcggaggaggacgactcggagcccctcaactacaaagacccctgcaaggcggctgcctttcttggggacattgccctggacgaagaggacctgagggccttccaggtacagcaggctgtggatctcagacggcacacagctcgtaagtcctccatcaaagctgcagttccaggaaacacttctacccccagctgccagagcaccaacgggcagcctcagaggggagcctgtgggagatggagaggtagatcccgtagccggcgggcggcgacgtcccgaccagagcgtgtgtggcccgatggggtcatcccctttgtcattgggggaaacttcactggtagccagagggcagtcttccggcaggccatgaggcactgggagaagcacacctgtgtcaccttcctggagcgcactgacgaggacagctatattgtgttcacctatcgaccttgcgggtgctgctcctacgtgggtcgccgcggcgggggcccccaggccatctccatcggcaagaactgtgacaagttcggcattgtggtccacgagctgggccacgtcgtcggcttctggcacgaacacactcggccagaccgggaccgccacgtttccatcgttcgtgagaacatccagccaggcgttctccactcttcactgctccttctcagctgtggctctagaaatggtgcttccttcccatgttcccttgagtcctccattcaccaggccctctgctggacaggactcttcctgagaccctccccattccccaggctccccttggctgctccccggaccctcagggcaggagtataacttcctgaagatggagcctcaggaggtggagtccctgggggagacctatgacttcgacagcatcatgcattacgctcggaacacattctccaggggcatcttcctggataccattgtccccaagtatgaggtgaacggggtgaaacctcccattggccaaaggacacggctcagcaagggggacattgcccaagcccgcaagctttacaagtgcccagcctgtggagagaccctgcaagacagcacaggcaacttctcctcccctgaataccccaatggctactctgctcacatgcactgcgtgtggcgcatctctgtcacacccggggagaagatcatcctgaacttcacgtccctggacctgtaccgcagccgcctgtgctggtacgactatgtggaggtccgagatggcttctggaggaaggcgcccctccgaggccgcttctgcgggtccaaactccctgagcctatcgtctccactgacagccgcctctgggttgaattccgcagcagcagcaattgggttggaaagggcttctttgcagtctacgaagccatctgcgggggtgatgtgaaaaaggactatggccacattcaatcgcccaactacccagacgattaccggcccagcaaagtctgcatctggcggatccaggtgtctgagggcttccacgtgggcctcacattccagtcctttgagattgagcgccacgacagctgtgcctacgactatctggaggtgcgcgacgggcacagtgagagcagcaccctcatcgggcgctactgtggctatgagaagcctgatgacatcaagagcacgtccagccgcctctggctcaagttcgtctctgacgggtccattaacaaagcgggctttgccgtcaactttttcaaagaggtggacgagtgctctcggcccaaccgcgggggctgtgagcagcggtgcctcaacaccctgggcagctacaagtgcagctgtgaccccgggtacgagctggccccagacaagcgccgctgtgaggctgcttgtggcggattcctcaccaagctcaacggctccatcaccagcccgggctggcccaaggagtacccccccaacaagaactgcatctggcagctggtggcccccacccagtaccgcatctccctgcagtttgacttctttgagacagagggcaatgatgtgtgcaagtacgacttcgtggaggtgcgcagtggactcacagctgactccaagctgcatggcaagttctgtggttctgagaagcccgaggtcatcacctcccagtacaacaacatgcgcgtggagttcaagtccgacaacaccgtgtccaaaaagggcttcaaggcccacttcttctcagaaaagaggccagctctgcagccccctcggggacgcccccaccagctcaaattccgagtgcagaaaagaaaccggaccccccag

SEQ ID NO: 111753 - DNA, 4333 bp, Homo sapiens
  Payload ID: 1890
  Gene Symbol: BMP1
  Gene Name: bone morphogenetic protein 1
  Uniprot ID: P13497
  ENST ID: ENST00000520970
  CDS Start-End: 220-2412
aaagggagagggagacggctggagcccgaggacgagcgcggagccgcggaccgagcggggggcgggagacaggaaggagggaggcgagcagagggaaggggaagaggtcggggagcgagggcgggagcggtcgcggtcgcgatcgagcaagcaagcgggcgagaggacgccctcccctggcctccagtgcgccgcttccctcgccgccgccccgccagcatgcccggcgtggcccgcctgccgctgctgctcgggctgctgctgctcccgcgtcccggccggccgctggacttggccgactacacctatgacctggcggaggaggacgactcggagcccctcaactacaaagacccctgcaaggcggctgcctttcttggggacattgccctggacgaagaggacctgagggccttccaggtacagcaggctgtggatctcagacggcacacagctcgtaagtcctccatcaaagctgcagttccaggaaacacttctacccccagctgccagagcaccaacgggcagcctcagaggggagcctgtgggagatggagaggtagatcccgtagccggcgggcggcgacgtcccgaccagagcgtgtgtggcccgatggggtcatcccctttgtcattgggggaaacttcactggtagccagagggcagtcttccggcaggccatgaggcactgggagaagcacacctgtgtcaccttcctggagcgcactgacgaggacagctatattgtgttcacctatcgaccttgcgggtgctgctcctacgtgggtcgccgcggcgggggcccccaggccatctccatcggcaagaactgtgacaagttcggcattgtggtccacgagctgggccacgtcgtcggcttctggcacgaacacactcggccagaccgggaccgccacgtttccatcgttcgtgagaacatccagccagggcaggagtataacttcctgaagatggagcctcaggaggtggagtccctgggggagacctatgacttcgacagcatcatgcattacgctcggaacacattctccaggggcatcttcctggataccattgtccccaagtatgaggtgaacggggtgaaacctcccattggccaaaggacacggctcagcaagggggacattgcccaagcccgcaagctttacaagtgcccagcctgtggagagaccctgcaagacagcacaggcaacttctcctcccctgaataccccaatggctactctgctcacatgcactgcgtgtggcgcatctctgtcacacccggggagaagatcatcctgaacttcacgtccctggacctgtaccgcagccgcctgtgctggtacgactatgtggaggtccgagatggcttctggaggaaggcgcccctccgaggccgcttctgcgggtccaaactccctgagcctatcgtctccactgacagccgcctctgggttgaattccgcagcagcagcaattgggttggaaagggcttctttgcagtctacgaagccatctgcgggggtgatgtgaaaaaggactatggccacattcaatcgcccaactacccagacgattaccggcccagcaaagtctgcatctggcggatccaggtgtctgagggcttccacgtgggcctcacattccagtcctttgagattgagcgccacgacagctgtgcctacgactatctggaggtgcgcgacgggcacagtgagagcagcaccctcatcgggcgctactgtggctatgagaagcctgatgacatcaagagcacgtccagccgcctctggctcaagttcgtctctgacgggtccattaacaaagcgggctttgccgtcaactttttcaaagaggtggacgagtgctctcggcccaaccgcgggggctgtgagcagcggtgcctcaacaccctgggcagctacaagtgcagctgtgaccccgggtacgagctggccccagacaagcgccgctgtgaggctgcttgtggcggattcctcaccaagctcaacggctccatcaccagcccgggctggcccaaggagtacccccccaacaagaactgcatctggcagctggtggcccccacccagtaccgcatctccctgcagtttgacttctttgagacagagggcaatgatgtgtgcaagtacgacttcgtggaggtgcgcagtggactcacagctgactccaagctgcatggcaagttctgtggttctgagaagcccgaggtcatcacctcccagtacaacaacatgcgcgtggagttcaagtccgacaacaccgtgtccaaaaagggcttcaaggcccacttcttctcagaaaagaggccagctctgcagccccctcggggacgcccccaccagctcaaattccgagtgcagaaaagaaaccggaccccccagtgaggcctgccaggcctcccggaccccttgttactcaggaacctcaccttggacggaatgggatgggggcttcggtgcccaccaaccccccacctccactctgccattccggcccacctccctctggccggacagaactggtgctctcttctccccactgtgcccgtccgcggaccggggacccttccccgtgccctaccccctcccattttgatggtgtctgtgacatttcctgttgtgaagtaaaagagggacccctgcgtcctgctcctttctcttgcagtctgcttgtccatgtgtctatttttccacttgtccatctgtccagtaagcaggtaatggtgacccatgctggtccgctcggacccccatcctcctctccccacagctgggccctgctcagctggtcctgctggatgcagtgcccctttggacccccttgtcgcctggcctcccactcccggccacctggcctggccagctctgccagctgttgctctgtcccggtgggagaaagtccagccaggcctccacttcccctggggcatcccaacctcagccctgcacagacccagcgtctgcccttatttgctcccctgcagacaaggacgagtgctccaaggataacggcggctgccagcaggactgcgtcaacacgttcggcagttatgagtgccaatgccgcagtggcttcgtcctccatgacaacaagcacgactgcaaagaagaccttcatggagatggacatcgagtcccagcctgagtgtgcctacgaccacctagaggtgttcgacgggcgagacgccaaggcccccgtcctcggccgcttctgtgggagcaagaagcccgagcccgtcctggccacaggcagccgcatgttcctgcgcttctactcagataactcggtccagcgaaagggcttccaggcctcccacgccacagagtgcgggggccaggtacgggcagacgtgaagaccaaggacctttactcccacgcccagtttggcgacaacaactaccctgggggtgtggactgtgagtgggtcattgtggccgaggaaggctacggcgtggagctcgtgttccagacctttgaggtggaggaggagaccgactgcggctatgactacatggagctcttcgacggctacgacagcacagcccccaggctggggcgctactgtggctcagggcctcctgaggaggtgtactcggcgggagattctgtcctggtgaagttccactcggatgacaccatcaccaaaaaaggtttccacctgcgatacaccagcaccaagttccaggacacactccacagcaggaagtgaccactgcctgagcaggggcggggactggagcctgctgcccttggtcgcctagactggatagtgggggtgggcggaaggcaacgcaccatccctctcccccaggccccaggacctgcagggccaatggcctggtgagactgtccataggaggtgggggaactggactccggcataagccacttccccacaaacccccaccagcaaggggctggggccagggagcagagcttccacaagacatttcgaagtcatcattcctctcttagggggccctgcctggtggcaagagggaatgtcagcaggaccccatcgccatccctgtgtctctacacgctgtattgtgtatcaccgggggcattattttcattgtaatgttcatttcccacccctgctccagcctcgatttggttttattttgagcccccattccaccaccccagtttcctggggcacaagtgtctgtgcatgtcccccaggagccaccgtggggagccgatggggaggggatggagaaacaagacagggcttctctcaggcccagtggccggtcagccacaccagggcaccgcagccaataaaccgaaagtgttacagcc

SEQ ID NO: 111754 - DNA, 2695 bp, Homo sapiens
  Payload ID: 1890
  Gene Symbol: BMP1
  Gene Name: bone morphogenetic protein 1
  Uniprot ID: P13497
  ENST ID: ENST00000471755
  CDS Start-End: 7-1875
gccagcatgcccggcgtggcccgcctgccgctgctgctcgggctgctgctgctcccgcgtcccggccggccgctggacttggccgactacacctatgacctggcggaggaggacgactcggagcccctcaactacaaagacccctgcaaggcggctgcctttcttggggacattgccctggacgaagaggacctgagggccttccaggtacagcaggctgtggatctcagacggcacacagctcgtaagtcctccatcaaagctgcagttccaggaaacacttctacccccagctgccagagcaccaacgggcagcctcagaggggagcctgtgggagatggagaggtagatcccgtagccggcgggcggcgacgtcccgaccagagcgtgtgtggcccgatggggtcatcccctttgtcattgggggaaacttcactggtagccagagggcagtcttccggcaggccatgaggcactgggagaagcacacctgtgtcaccttcctggagcgcactgacgaggacagctatattgtgttcacctatcgaccttgcgggtgctgctcctacgtgggtcgccgcggcgggggcccccaggccatctccatcggcaagaactgtgacaagttcggcattgtggtccacgagctgggccacgtcgtcggcttctggcacgaacacactcggccagaccgggaccgccacgtttccatcgttcgtgagaacatccagccagggcaggagtataacttcctgaagatggagcctcaggaggtggagtccctgggggagacctatgacttcgacagcatcatgcattacgctcggaacacattctccaggggcatcttcctggataccattgtccccaagtatgaggtgaacggggtgaaacctcccattggccaaaggacacggctcagcaagggggacattgcccaagcccgcaagctttacaagtgcccagcctgtggagagaccctgcaagacagcacaggcaacttctcctcccctgaataccccaatggctactctgctcacatgcactgcgtgtggcgcatctctgtcacacccggggagaagatcatcctgaacttcacgtccctggacctgtaccgcagccgcctgtgctggtacgactatgtggaggtccgagatggcttctggaggaaggcgcccctccgaggccgcttctgcgggtccaaactccctgagcctatcgtctccactgacagccgcctctgggttgaattccgcagcagcagcaattgggttggaaagggcttctttgcagtctacgaagccatctgcgggggtgatgtgaaaaaggactatggccacattcaatcgcccaactacccagacgattaccggcccagcaaagtctgcatctggcggatccaggtgtctgagggcttccacgtgggcctcacattccagtcctttgagattgagcgccacgacagctgtgcctacgactatctggaggtgcgcgacgggcacagtgagagcagcaccctcatcgggcgctactgtggctatgagaagcctgatgacatcaagagcacgtccagccgcctctggctcaagttcgtctctgacgggtccattaacaaagcgggctttgccgtcaactttttcaaagaggtggacgagtgctctcggcccaaccgcgggggctgtgagcagcggtgcctcaacaccctgggcagctacaagtgcagctgtgaccccgggtacgagctggccccagacaagcgccgctgtgaggggtgttatgatctacaggttgggaaacccctgttgtgggacagacactgtttccgcctctccacgcatggtcccgagatgctggggacagcactccgaggctaatggctccagctcactaggccgatcctgctgtgcccccgagctgctccctttcctgcacctcccaggaccgcccctccctgaactgctttccctgagccccttattcccgctcactccctcttggaggaccttggcctgttcatttgcagagaagatagaaatggccacacttatgaccccttagctcccccactcctccctacaggcccacccctgaggacacccaggccaccctgcctcctcccgtccgccccagagggaccagacacaggtccctgagccttggggagtccacaggctccccatcttctccttactgcatcccagcccacatctcagcccttccccatggcaggggctccccgcagacgatgccaccttccttgtccccgcagctgcttgtggcggattcctcaccaagctcaacggctccatcaccagcccgggctggcccaaggagtacccccccaacaagaactgcatctggcagctggtggcccccacccagtaccgcatctccctgcagtttgacttctttgagacagagggcaatgatgtgtgcaagtacgacttcgtggaggtgcgcagtggactcacagctgactccaagctgcatggcaagttctgtggttctgagaagcccgaggtcatcacctcccagtacaacaacatgcgcgtggagttcaagtccgacaacaccgtgtccaaaaagggcttcaaggcccacttcttctcagaaaagaggccagctctgcagccccctcggggacgcccccaccagctcaaattccgagtgcagaaaagaaaccggaccccccag

SEQ ID NO: 111755 - DNA, 3244 bp, Homo sapiens
  Payload ID: 1890
  Gene Symbol: BMP1
  Gene Name: bone morphogenetic protein 1
  ENST ID: ENST00000520982
  CDS Start-End: 83-652
cgcgatcgagcaagcaagcgggcgagaggacgccctcccctggcctccagtgcgccgcttccctcgccgccgccccgccagcatgcccggcgtggcccgcctgccgctgctgctcgggctgctgctgctcccgcgtcccggccggccgctggacttggccgactacacctatgacctggcggaggaggacgactcggagcccctcaactacaaagacccctgcaaggcggctgcctttcttggggacattgccctggacgaagaggacctgagggccttccaggtacagcaggctgtggatctcagacggcacacagctcgtaagtcctccatcaaagctgcagttccaggaaacacttctacccccagctgccagagcaccaacgggcagcctcagaggggagcctgtgggagatggagaggtagatcccgtagccggcgggcggcgacgtcccgaccagagcgtgtgtggcccgatggggtcatcccctttgtcattgggggaaacttcactggtagccagagggcagtcttccggcaggccatgaggcactgggagaagcacacctgtgtcaccttcctggagcgcactgacgaggacagctatattgtgttcacctatcgaccttgcggctcgggaccgcccccctgagctggccccgccctccaggtgctgctcctacgtgggtcgccgcggcgggggcccccaggccatctccatcggcaagaactgtgacaagttcggcattgtggtccacgagctgggccacgtcgtcggcttctggcacgaacacactcggccagaccgggaccgccacgtttccatcgttcgtgagaacatccagccagggcaggagtataacttcctgaagatggagcctcaggaggtggagtccctgggggagacctatgacttcgacagcatcatgcattacgctcggaacacattctccaggggcatcttcctggataccattgtccccaagtatgaggtgaacggggtgaaacctcccattggccaaaggacacggctcagcaagggggacattgcccaagcccgcaagctttacaagtgcccagcctgtggagagaccctgcaagacagcacaggcaacttctcctcccctgaataccccaatggctactctgctcacatgcactgcgtgtggcgcatctctgtcacacccggggagaagatcatcctgaacttcacgtccctggacctgtaccgcagccgcctgtgctggtacgactatgtggaggtccgagatggcttctggaggaaggcgcccctccgaggccgcttctgcgggtccaaactccctgagcctatcgtctccactgacagccgcctctgggttgaattccgcagcagcagcaattgggttggaaagggcttctttgcagtctacgaagccatctgcgggggtgatgtgaaaaaggactatggccacattcaatcgcccaactacccagacgattaccggcccagcaaagtctgcatctggcggatccaggtgtctgagggcttccacgtgggcctcacattccagtcctttgagattgagcgccacgacagctgtgcctacgactatctggaggtgcgcgacgggcacagtgagagcagcaccctcatcgggcgctactgtggctatgagaagcctgatgacatcaagagcacgtccagccgcctctggctcaagttcgtctctgacgggtccattaacaaagcgggctttgccgtcaactttttcaaagaggtggacgagtgctctcggcccaaccgcgggggctgtgagcagcggtgcctcaacaccctgggcagctacaagtgcagctgtgaccccgggtacgagctggccccagacaagcgccgctgtgaggctgcttgtggcggattcctcaccaagctcaacggctccatcaccagcccgggctggcccaaggagtacccccccaacaagaactgcatctggcagctggtggcccccacccagtaccgcatctccctgcagtttgacttctttgagacagagggcaatgatgtgtgcaagtacgacttcgtggaggtgcgcagtggactcacagctgactccaagctgcatggcaagttctgtggttctgagaagcccgaggtcatcacctcccagtacaacaacatgcgcgtggagttcaagtccgacaacaccgtgtccaaaaagggcttcaaggcccacttcttctcagacaaggacgagtgctccaaggataacggcggctgccagcaggactgcgtcaacacgttcggcagttatgagtgccaatgccgcagtggcttcgtcctccatgacaacaagcacgactgcaaagaagccggctgtgaccacaaggtgacatccaccagtggtaccatcaccagccccaactggcctgacaagtatcccagcaagaaggagtgcacgtgggccatctccagcacccccgggcaccgggtcaagctgaccttcatggagatggacatcgagtcccagcctgagtgtgcctacgaccacctagaggtgttcgacgggcgagacgccaaggcccccgtcctcggccgcttctgtgggagcaagaagcccgagcccgtcctggccacaggcagccgcatgttcctgcgcttctactcagataactcggtccagcgaaagggcttccaggcctcccacgccacagagtgcgggggccaggtacgggcagacgtgaagaccaaggacctttactcccacgcccagtttggcgacaacaactaccctgggggtgtggactgtgagtgggtcattgtggccgaggaaggctacggcgtggagctcgtgttccagacctttgaggtggaggaggagaccgactgcggctatgactacatggagctcttcgacggctacgacagcacagcccccaggctggggcgctactgtggctcagggcctcctgaggaggtgtactcggcgggagattctgtcctggtgaagttccactcggatgacaccatcaccaaaaaaggtttccacctgcgatacaccagcaccaagttccaggacacactccacagcaggaagtgaccactgcctgagcaggggcggggactggagcctgctgcccttggtcgcctagactggatagtgggggtgggcggaaggcaacgcaccatccctctcccccaggccccaggacctgcagggccaatggcctggtgagactgtccataggaggtgggggaactgga

SEQ ID NO: 111756 - DNA, 3925 bp, Homo sapiens
  Payload ID: 1890
  Gene Symbol: BMP1
  Gene Name: bone morphogenetic protein 1
  ENST ID: ENST00000520626
  CDS Start-End: 83-268
cgcgatcgagcaagcaagcgggcgagaggacgccctcccctggcctccagtgcgccgcttccctcgccgccgccccgccagcatgcccggcgtggcccgcctgccgctgctgctcgggctgctgctgctcccgcgtcccggccggccgctggacttggccgactacacctatgacctggcggaggaggacgactcggagcccctcaactacaaagacccctgcaagctgcctttcttggggacattgccctggacgaagaggacctgagggccttccaggtacagcaggctgtggatctcagacggcacacagctcgtaagtcctccatcaaagctgcagttccaggaaacacttctacccccagctgccagagcaccaacgggcagcctcagaggggagcctgtgggagatggagaggtagatcccgtagccggcgggcggcgacgtcccgaccagagcgtgtgtggcccgatggggtcatcccctttgtcattgggggaaacttcactggtagccagagggcagtcttccggcaggccatgaggcactgggagaagcacacctgtgtcaccttcctggagcgcactgacgaggacagctatattgtgttcacctatcgaccttgcggctcgggaccgcccccctgagctggccccgccctccaggtgctgctcctacgtgggtcgccgcggcgggggcccccaggccatctccatcggcaagaactgtgacaagttcggcattgtggtccacgagctgggccacgtcgtcggcttctggcacgaacacactcggccagaccgggaccgccacgtttccatcgttcgtgagaacatccagccagggcaggagtataacttcctgaagatggagcctcaggaggtggagtccctgggggagacctatgacttcgacagcatcatgcattacgctcggaacacattctccaggggcatcttcctggataccattgtccccaagtatgaggtgaacggggtgaaacctcccattggccaaaggacacggctcagcaagggggacattgcccaagcccgcaagctttacaagtgcccagcctgtggagagaccctgcaagacagcacaggcaacttctcctcccctgaataccccaatggctactctgctcacatgcactgcgtgtggcgcatctctgtcacacccggggagaagatcatcctgaacttcacgtccctggacctgtaccgcagccgcctgtgctggtacgactatgtggaggtccgagatggcttctggaggaaggcgcccctccgaggccgcttctgcgggtccaaactccctgagcctatcgtctccactgacagccgcctctgggttgaattccgcagcagcagcaattgggttggaaagggcttctttgcagtctacgaagccatctgcgggggtgatgtgaaaaaggactatggccacattcaatcgcccaactacccagacgattaccggcccagcaaagtctgcatctggcggatccaggtgtctgagggcttccacgtgggcctcacattccagtcctttgagattgagcgccacgacagctgtgcctacgactatctggaggtgcgcgacgggcacagtgagagcagcaccctcatcgggcgctactgtggctatgagaagcctgatgacatcaagagcacgtccagccgcctctggctcaagttcgtctctgacgggtccattaacaaagcgggctttgccgtcaactttttcaaagaggtggacgagtgctctcggcccaaccgcgggggctgtgagcagcggtgcctcaacaccctgggcagctacaagtgcagctgtgaccccgggtacgagctggccccagacaagcgccgctgtgaggctgcttgtggcggattcctcaccaagctcaacggctccatcaccagcccgggctggcccaaggagtacccccccaacaagaactgcatctggcagctggtggcccccacccagtaccgcatctccctgcagtttgacttctttgagacagagggcaatgatgtgtgcaagtacgacttcgtggaggtgcgcagtggactcacagctgactccaagctgcatggcaagttctgtggttctgagaagcccgaggtcatcacctcccagtacaacaacatgcgcgtggagttcaagtccgacaacaccgtgtccaaaaagggcttcaaggcccacttcttctcagaaaagaggccagctctgcagccccctcggggacgcccccaccagctcaaattccgagtgcagaaaagaaaccggaccccccagtgaggcctgccaggcctcccggaccccttgttactcaggaacctcaccttggacggaatgggatgggggcttcggtgcccaccaaccccccacctccactctgccattccggcccacctccctctggccggacagaactggtgctctcttctccccactgtgcccgtccgcggaccggggacccttccccgtgccctaccccctcccattttgatggtgtctgtgacatttcctgttgtgaagtaaaagagggacccctgcgtcctgctcctttctcttgcagtctgcttgtccatgtgtctatttttccacttgtccatctgtccagtaagcaggtaatggtgacccatgctggtccgctcggacccccatcctcctctccccacagctgggccctgctcagctggtcctgctggatgcagtgcccctttggacccccttgtcgcctggcctcccactcccggccacctggcctggccagctctgccagctgttgctctgtcccggtgggagaaagtccagccaggcctccacttcccctggggcatcccaacctcagccctgcacagacccagcgtctgcccttatttgctcccctgcagacaaggacgagtgctccaaggataacggcggctgccagcaggactgcgtcaacacgttcggcagttatgagtgccaatgccgcagtggcttcgtcctccatgacaacaagcacgactgcaaagaagccggctgtgaccacaaggtgacatccaccagtggtaccatcaccagccccaactggcctgacaagtatcccagcaagaaggagtgcacgtgggccatctccagcacccccgggcaccgggtcaagctgaccttcatggagatggacatcgagtcccagcctgagtgtgcctacgaccacctagaggtgttcgacgggcgagacgccaaggcccccgtcctcggccgcttctgtgggagcaagaagcccgagcccgtcctggccacaggcagccgcatgttcctgcgcttctactcagataactcggtccagcgaaagggcttccaggcctcccacgccacagagtgcgggggccaggtacgggcagacgtgaagaccaaggacctttactcccacgcccagtttggcgacaacaactaccctgggggtgtggactgtgagtgggtcattgtggccgaggaaggctacggcgtggagctcgtgttccagacctttgaggtggaggaggagaccgactgcggctatgactacatggagctcttcgacggctacgacagcacagcccccaggctggggcgctactgtggctcagggcctcctgaggaggtgtactcggcgggagattctgtcctggtgaagttccactcggatgacaccatcaccaaaaaaggtttccacctgcgatacaccagcaccaagttccaggacacactccacagcaggaagtgaccactgcctgagcaggggcggggactggagcctgctgcccttggtcgcctagactggatagtgggggtgggcggaaggcaacgcaccatccctctcccccaggccccaggacctgcagggccaatggcctggtgagactgtccataggaggtgggggaactgga

SEQ ID NO: 111757 - DNA, 2320 bp, Homo sapiens
  Payload ID: 1890
  Gene Symbol: BMP1
  Gene Name: bone morphogenetic protein 1
  Uniprot ID: P13497
  ENST ID: ENST00000521385
  CDS Start-End: 7-2160
gccagcatgcccggcgtggcccgcctgccgctgctgctcgggctgctgctgctcccgcgtcccggccggccgctggacttggccgactacacctatgacctggcggaggaggacgactcggagcccctcaactacaaagacccctgcaaggcggctgcctttcttggggacattgccctggacgaagaggacctgagggccttccaggtacagcaggctgtggatctcagacggcacacagctcgtaagtcctccatcaaagctgcagttccaggaaacacttctacccccagctgccagagcaccaacgggcagcctcagaggggagcctgtgggagatggagaggtagatcccgtagccggcgggcggcgacgtcccgaccagagcgtgtgtggcccgatggggtcatcccctttgtcattgggggaaacttcactggtagccagagggcagtcttccggcaggccatgaggcactgggagaagcacacctgtgtcaccttcctggagcgcactgacgaggacagctatattgtgttcacctatcgaccttgcgggtgctgctcctacgtgggtcgccgcggcgggggcccccaggccatctccatcggcaagaactgtgacaagttcggcattgtggtccacgagctgggccacgtcgtcggcttctggcacgaacacactcggccagaccgggaccgccacgtttccatcgttcgtgagaacatccagccagggcaggagtataacttcctgaagatggagcctcaggaggtggagtccctgggggagacctatgacttcgacagcatcatgcattacgctcggaacacattctccaggggcatcttcctggataccattgtccccaagtatgaggtgaacggggtgaaacctcccattggccaaaggacacggctcagcaagggggacattgcccaagcccgcaagctttacaagtgcccagcctgtggagagaccctgcaagacagcacaggcaacttctcctcccctgaataccccaatggctactctgctcacatgcactgcgtgtggcgcatctctgtcacacccggggagaagatcatcctgaacttcacgtccctggacctgtaccgcagccgcctgtgctggtacgactatgtggaggtccgagatggcttctggaggaaggcgcccctccgaggccgcttctgcgggtccaaactccctgagcctatcgtctccactgacagccgcctctgggttgaattccgcagcagcagcaattgggttggaaagggcttctttgcagtctacgaagccatctgcgggggtgatgtgaaaaaggactatggccacattcaatcgcccaactacccagacgattaccggcccagcaaagtctgcatctggcggatccaggtgtctgagggcttccacgtgggcctcacattccagtcctttgagattgagcgccacgacagctgtgcctacgactatctggaggtgcgcgacgggcacagtgagagcagcaccctcatcgggcgctactgtggctatgagaagcctgatgacatcaagagcacgtccagccgcctctggctcaagttcgtctctgacgggtccattaacaaagcgggctttgccgtcaactttttcaaagaggtggacgagtgctctcggcccaaccgcgggggctgtgagcagcggtgcctcaacaccctgggcagctacaagtgcagctgtgaccccgggtacgagctggccccagacaagcgccgctgtgaggctgcttgtggcggattcctcaccaagctcaacggctccatcaccagcccgggctggcccaaggagtacccccccaacaagaactgcatctggcagctggtggcccccacccagtaccgcatctccctgcagtttgacttctttgagacagagggcaatgatgtgtgcaagtacgacttcgtggaggtgcgcagtggactcacagctgactccaagctgcatggcaagttctgtggttctgagaagcccgaggtcatcacctcccagtacaacaacatgcgcgtggagttcaagtccgacaacaccgtgtccaaaaagggcttcaaggcccacttcttctcaggaggggagctatttggacttttgggacacccaccgaggagaccctaagccaagaaggagaagaaagagcctgaagaccttcagtctgacccctgccaccttccggggcatttgggcactgtaggaaaagaggccagctctgcagccccctcggggacgcccccaccagctcaaattccgagtgcagaaaagaaaccggaccccccag

SEQ ID NO: 111758 - DNA, 1059 bp, Homo sapiens
  Payload ID: 1890
  Gene Symbol: BMP1
  Gene Name: bone morphogenetic protein 1
  ENST ID: ENST00000518656
  CDS Start-End: 72-641
aagcaagcgggcgagaggacgccctcccctggcctccagtgcgccgcttccctcgccgccgccccgccagcatgcccggcgtggcccgcctgccgctgctgctcgggctgctgctgctcccgcgtcccggccggccgctggacttggccgactacacctatgacctggcggaggaggacgactcggagcccctcaactacaaagacccctgcaaggcggctgcctttcttggggacattgccctggacgaagaggacctgagggccttccaggtacagcaggctgtggatctcagacggcacacagctcgtaagtcctccatcaaagctgcagttccaggaaacacttctacccccagctgccagagcaccaacgggcagcctcagaggggagcctgtgggagatggagaggtagatcccgtagccggcgggcggcgacgtcccgaccagagcgtgtgtggcccgatggggtcatcccctttgtcattgggggaaacttcactggtagccagagggcagtcttccggcaggccatgaggcactgggagaagcacacctgtgtcaccttcctggagcgcactgacgaggacagctatattgtgttcacctatcgaccttgcggctcgggaccgcccccctgagctggccccgccctccaggtgctgctcctacgtgggtcgccgcggcgggggcccccaggccatctccatcggcaagaactgtgacaagttcggcattgtggtccacgagctgggccacgtcgtcggcttctggcacgaacacactcggccagaccgggaccgccacgtttccatcgttcgtgagaacatccagccaggcgttctccactcttcactgctccttctcagctgtggctctagaaatggtgcttccttcccatgttcccttgagtcctccattcaccaggccctctgctggacaggactcttcctgagaccctccccattccccaggctccccttggctgctccccggaccctcagggcaggagtataacttcctgaagatggagcctcaggaggtggagtccctggggga

SEQ ID NO: 111759 - DNA, 1584 bp, Homo sapiens
  Payload ID: 1891
  Gene Symbol: BMP10
  Gene Name: bone morphogenetic protein 10
  Uniprot ID: O95393
  ENST ID: ENST00000295379
  CDS Start-End: 160-1434
ggggagaggaagagtggtagggggagggagagagagaggaagagtttccaaacttgtctccagtgacaggagacatttacgttccacaagataaaactgccacttagagcccagggaagctaaaccttcctggcttggcctaggagctcgagcggagtcatgggctctctggtcctgacactgtgcgctcttttctgcctggcagcttacttggtttctggcagccccatcatgaacctagagcagtctcctctggaagaagatatgtccctctttggtgatgttttctcagagcaagacggtgtcgactttaacacactgctccagagcatgaaggatgagtttcttaagacactaaacctctctgacatccccacgcaggattcagccaaggtggacccaccagagtacatgttggaactctacaacaaatttgcaacagatcggacctccatgccctctgccaacatcattaggagtttcaagaatgaagatctgttttcccagccggtcagttttaatgggctccgaaaataccccctcctcttcaatgtgtccattcctcaccatgaagaggtcatcatggctgaacttaggctatacacactggtgcaaagggatcgtatgatatacgatggagtagaccggaaaattaccatttttgaagtgctggagagcaaaggggataatgagggagaaagaaacatgctggtcttggtgtctggggagatatatggaaccaacagtgagtgggagacttttgatgtcacagatgccatcagacgttggcaaaagtcaggctcatccacccaccagctggaggtccacattgagagcaaacacgatgaagctgaggatgccagcagtggacggctagaaatagataccagtgcccagaataagcataaccctttgctcatcgtgttttctgatgaccaaagcagtgacaaggagaggaaggaggaactgaatgaaatgatttcccatgagcaacttccagagctggacaacttgggcctggatagcttttccagtggacctggggaagaggctttgttgcagatgagatcaaacatcatctatgactccactgcccgaatcagaaggaacgccaaaggaaactactgtaagaggaccccgctctacatcgacttcaaggagattgggtgggactcctggatcatcgctccgcctggatacgaagcctatgaatgccgtggtgtttgtaactaccccctggcagagcatctcacacccacaaagcatgcaattatccaggccttggtccacctcaagaattcccagaaagcttccaaagcctgctgtgtgcccacaaagctagagcccatctccatcctctatttagacaaaggcgtcgtcacctacaagtttaaatacgaaggcatggccgtctccgaatgtggctgtagatagaagaagagtcctatggcttatttaataactgtaaatgtgtatatttggtgttcctatttaatgagattatttaataagggtgtacagtaatagaggcttgctgccttcaggaaatggacaggtcagtttgttgtaggaaatgcatatttt

SEQ ID NO: 111760 - DNA, 1179 bp, Homo sapiens
  Payload ID: 1892
  Gene Symbol: BMP15
  Gene Name: bone morphogenetic protein 15
  Uniprot ID: O95972
  ENST ID: ENST00000252677
  CDS Start-End: 1-1179
atggtcctcctcagtattcttagaattctttttctttgtgaactcgtgcttttcatggaacacagggcccaaatggcagaaggagggcagtcctctattgcccttctggctgaggcccctactttgcccctgattgaggagctgctagaagaatcccctggcgaacagccaaggaagccccggctcctagggcattcactgcggtacatgctggagttgtaccggcgttcagctgactcgcatgggcaccctagagagaaccgcaccattggggccaccatggtgaggctggtgaagcccttgaccaatgtggcaaggcctcacagaggtacctggcatatacagatcctgggctttcctctcagaccaaaccgaggactataccaactagttagagccactgtggtttaccgccatcatctccaactaactcgcttcaatctctcctgccatgtggagccctgggtgcagaaaaacccaaccaaccacttcccttcctcagaaggagattcctcaaaaccttccctgatgtctaacgcttggaaagagatggatatcacacaacttgttcagcaaaggttctggaataacaagggacacaggatcctacgactccgttttatgtgtcagcagcaaaaagatagtggtggtcttgagctctggcatggcacttcatccttggacattgccttcttgttactctatttcaatgatactcataaaagcattcggaaggctaaatttcttcccaggggcatggaggagttcatggaaagggaatctcttctccggagaacccgacaagcagatggtatctcagctgaggttactgcctcttcctcaaaacatagcgggcctgaaaataaccagtgttccctccaccctttccaaatcagcttccgccagctgggttgggatcactggatcattgctccccctttctacaccccaaactactgtaaaggaacttgtctccgagtactacgcgatggtctcaattcccccaatcacgccattattcagaaccttatcaatcagttggtggaccagagtgtcccccggccctcctgtgtcccgtataagtatgttccaattagtgtccttatgattgaggcaaatgggagtattttgtacaaggagtatgagggtatgattgctgagtcttgtacatgcagatga

SEQ ID NO: 111761 - DNA, 3601 bp, Homo sapiens
  Payload ID: 1893
  Gene Symbol: BMP2
  Gene Name: bone morphogenetic protein 2
  Uniprot ID: P12643
  ENST ID: ENST00000378827
  CDS Start-End: 1220-2410
gccgcgagcgccgcgccacggcgccgccgccgccgtcgccgccgccggagtcctcgccccgccgcgctgcgcccggctcgcgctgcgctagtcgctccgcttcccacaccccgccggggactggcagccgccgccgcacatctgccgccacagcctccgccggctacccgaacgttctcggggccagcgccgagtggatcaccggggaccgcgaggcacccgcgcgccgcagaccccgcgcgggctggagcacccggcagagcgcgccacagcgccgtggcctctgctgcccgggctgcgccagagccgcggacgggcgcgcagagcgccggggactccggagccgatccctagcgccgcgatgcggagcacctactgcaggagatcgggggcctgggacgcgctggccgaggtgtgatcggaccccaggctagccacaaagggcacttggccccagggctaggagagcgaggggagagcacagccacccgcctcggcggcccgggactcggctcgactcgccggagaatgcgcccgaggacgacggggcgccagagccgcggtgctttcaactggcgagcgcgaatgggggtgcactggagtaaggcagagtgatgcgggggggcaactcgcctggcaccgagatcgccgccgtgcccttccctggacccggcgtcgcccaggatggctgccccgagccatgggccgcggcggagctagcgcggagcgcccgaccctcgacccccgagtcccggagccggccccgcgcggggccacgcgtccctcgggcgctggttcctaaggaggacgacagcaccagcttctcctttctcccttcccttccctgccccgcactcctccccctgctcgctgttgttgtgtgtcagcacttggctggggacttcttgaacttgcagggagaataacttgcgcaccccactttgcgccggtgcctttgccccagcggagcctgcttcgccatctccgagccccaccgcccctccactcctcggccttgcccgacactgagacgctgttcccagcgtgaaaagagagactgcgcggccggcacccgggagaaggaggaggcaaagaaaaggaacggacattcggtccttgcgccaggtcctttgaccagagtttttccatgtggacgctctttcaatggacgtgtccccgcgtgcttcttagacggactgcggtctcctaaaggtcgaccatggtggccgggacccgctgtcttctagcgttgctgcttccccaggtcctcctgggcggcgcggctggcctcgttccggagctgggccgcaggaagttcgcggcggcgtcgtcgggccgcccctcatcccagccctctgacgaggtcctgagcgagttcgagttgcggctgctcagcatgttcggcctgaaacagagacccacccccagcagggacgccgtggtgcccccctacatgctagacctgtatcgcaggcactcaggtcagccgggctcacccgccccagaccaccggttggagagggcagccagccgagccaacactgtgcgcagcttccaccatgaagaatctttggaagaactaccagaaacgagtgggaaaacaacccggagattcttctttaatttaagttctatccccacggaggagtttatcacctcagcagagcttcaggttttccgagaacagatgcaagatgctttaggaaacaatagcagtttccatcaccgaattaatatttatgaaatcataaaacctgcaacagccaactcgaaattccccgtgaccagacttttggacaccaggttggtgaatcagaatgcaagcaggtgggaaagttttgatgtcacccccgctgtgatgcggtggactgcacagggacacgccaaccatggattcgtggtggaagtggcccacttggaggagaaacaaggtgtctccaagagacatgttaggataagcaggtctttgcaccaagatgaacacagctggtcacagataaggccattgctagtaacttttggccatgatggaaaagggcatcctctccacaaaagagaaaaacgtcaagccaaacacaaacagcggaaacgccttaagtccagctgtaagagacaccctttgtacgtggacttcagtgacgtggggtggaatgactggattgtggctcccccggggtatcacgccttttactgccacggagaatgcccttttcctctggctgatcatctgaactccactaatcatgccattgttcagacgttggtcaactctgttaactctaagattcctaaggcatgctgtgtcccgacagaactcagtgctatctcgatgctgtaccttgacgagaatgaaaaggttgtattaaagaactatcaggacatggttgtggagggttgtgggtgtcgctagtacagcaaaattaaatacataaatatatatatatatatatattttagaaaaaagaaaaaaacaaacaaacaaaaaaaccccaccccagttgacactttaatatttcccaatgaagactttatttatggaatggaatggaaaaaaaaacagctattttgaaaatatatttatatctacgaaaagaagttgggaaaacaaatattttaatcagagaattattccttaaagatttaaaatgtatttagttgtacattttatatgggttcaaccccagcacatgaagtataatggtcagatttattttgtatttatttactattataaccactttttaggaaaaaaatagctaatttgtatttatatgtaatcaaaagaagtatcgggtttgtacataattttccaaaaattgtagttgttttcagttgtgtgtatttaagatgaaaagtctacatggaaggttactctggcaaagtgcttagcacgtttgcttttttgcagtgctactgttgagttcacaagttcaagtccagaaaaaaaaagtggataatccactctgctgactttcaagattattatattattcaattctcaggaatgttgcagagtgattgtccaatccatgagaatttacatccttattaggtggaatatttggataagaaccagacattgctgatctattatagaaactctcctcctgccccttaatttacagaaagaataaagcaggatccatagaaataattaggaaaacgatgaacctgcaggaaagtgaatgatggtttgttgttcttctttcctaaattagtgatcccttcaaaggggctgatctggccaaagtattcaataaaacgtaagatttcttcattattgatattgtggtcatatatatttaaaattgatatctcgtggccctcatcaagggttggaaatttatttgtgttttacctttacctcatctgagagctctttattctccaaagaacccagttttctaactttttgcccaacacgcagcaaaattatgcacatcgtgttttctgcccaccctctgttctctgacctatcagcttgcttttctttccaaggttgtgtgtttgaacacatttctccaaatgttaaacctatttcagataataaatatcaaatctctggcatttcattctataaagtccaacctgtaagagaaaa

SEQ ID NO: 111762 - DNA, 5734 bp, Homo sapiens
  Payload ID: 1894
  Gene Symbol: BMP3
  Gene Name: bone morphogenetic protein 3
  Uniprot ID: P12645
  ENST ID: ENST00000282701
  CDS Start-End: 321-1739
agatcttgaaaacacccgggccacacacgccgcgacctacagctctttctcagcgttggagtggagacggcgcccgcagcgccctgcgcgggtgaggtccgcgcagctgctggggaagagcccacctgtcaggctgcgctgggtcagcgcagcaagtggggctggccgctatctcgctgcacccggccgcgtcccgggctccgtgcgccctcgccccagctggtttggagttcaaccctcggctccgccgccggctccttgcgccttcggagtgtcccgcagcgacgccgggagccgacgcgccgcgcgggtacctagccatggctggggcgagcaggctgctctttctgtggctgggctgcttctgcgtgagcctggcgcagggagagagaccgaagccacctttcccggagctccgcaaagctgtgccaggtgaccgcacggcaggtggtggcccggactccgagctgcagccgcaagacaaggtctctgaacacatgctgcggctctatgacaggtacagcacggtccaggcggcccggacaccgggctccctggagggaggctcgcagccctggcgccctcggctcctgcgcgaaggcaacacggttcgcagctttcgggcggcagcagcagaaactcttgaaagaaaaggactgtatatcttcaatctgacatcgctaaccaagtctgaaaacattttgtctgccacactgtatttctgtattggagagctaggaaacatcagcctgagttgtccagtgtctggaggatgctcccatcatgctcagaggaaacacattcagattgatctttctgcatggaccctcaaattcagcagaaaccaaagtcaactccttggccatctgtcagtggatatggccaaatctcatcgagatattatgtcctggctgtctaaagatatcactcaactcttgaggaaggccaaagaaaatgaagagttcctcataggatttaacattacgtccaagggacgccagctgccaaagaggaggttaccttttccagagccttatatcttggtatatgccaatgatgccgccatttctgagccagaaagtgtggtatcaagcttacagggacaccggaattttcccactggaactgttcccaaatgggatagccacatcagagctgccctttccattgagcggaggaagaagcgctctactggggtcttgctgcctctgcagaacaacgagcttcctggggcagaataccagtataaaaaggatgaggtgtgggaggagagaaagccttacaagacccttcaggctcaggcccctgaaaagagtaagaataaaaagaaacagagaaaggggcctcatcggaagagccagacgctccaatttgatgagcagaccctgaaaaaggcaaggagaaagcagtggattgaacctcggaattgcgccaggagatacctcaaggtagactttgcagatattggctggagtgaatggattatctcccccaagtcctttgatgcctattattgctctggagcatgccagttccccatgccaaagtctttgaagccatcaaatcatgctaccatccagagtatagtgagagctgtgggggtcgttcctgggattcctgagccttgctgtgtaccagaaaagatgtcctcactcagtattttattctttgatgaaaataagaatgtagtgcttaaagtataccctaacatgacagtagagtcttgcgcttgcagataacctggcaaagaactcatttgaatgcttaattcaatcattagtttatttttatggacttcttcctgttttttttttttttttttttgcactgccaatgcattttgtttcaaaagattatttctatagtcagaggggaatgagcaaatagactgaagattgccaccaaggaaaagaactgtatttgtttctgaatgtaacttaaagcaagatttttagtaaatatggacatctatttctctttttgtaatcaaacacaacaacttatcaaactgtttttagaactgttagagaacacactggtttatttttgtaatgttctttgaaaacagaatggagaagcagcaatagcttgtcatttatctcatttaatgactaatgggaaatagagaacaatttcgcgttttgaattaggcttattgccttagaatcctgagaaagtgctaaataatcaactctgatgtttttcttaagttcttgagactcttgtttatccttgtttttcctccacaagtcattgtctaagtgtaatggaaagtttatgctgagcgttagtgtgtatgtatgtgcgtacatgcgccaggtgcctgtgccctctgtaggatggtttgcttaatatggttttataattcagtttacacaggattctttattttttttaattttgtattttggcaaacaccattcagttataagaactttgccaaatatgatagaataattcaagagcatatacagagagttaccacttgacccagctatttaattgcaaatacagttgttttcatttcatttcctaccagaaaaaggaatcagaaacctagtttttgaaaacacaagtgtaattcctcttttgtacttctttttcacaaatgcttttatttattctaaattgaatttaaaaatccttcctaaagccattaactctttaattctcctgatatgcctttacttcctatgaagttattggtagatgttgaggcccaaaaactggtagaatattgaagatcttcttaaatgaccaatttaaccataaccaaatattgaatatcattcttcagtcacatctaagtcaggcactttttcacatagatcagggcttttggctcagtcacgaaatctacaagttagcaaagcttacaaaacattattcgtcaggtatgggaatcaaatatagacacttgtttgtctttgctttccatttctatgtgtcacatacatatatgtgtcctcttataactttagtcttcaaaattatttcaatatccttcttctcactatatttatttgtgtgatggaaatgctttcaggccgtagatcattgttggtgttaatctgtggttaatcctcattttagttccgtcttatctgatacttagaaatatctcagccattttggaggctgtgcagtatcagaagacgtggagtttgttctgtctctgcctgtagctaattatggtggttcagtcatttaataaatatgttttgagcatctattttgtgaaaggcactgtgttacctgtgtgtctttagtgtcctcactggtaaaatgaagaggctggccatgagctggaagggttaagtttataattccagctatttcacacccgtcttccttgaaggaatgatagtgatagatataaaaacactgtaagtccctcttttaataaactaaatgaaagaacatcctatacttcgctgtttgtaaattagtatggcattcgctttggtttaagtggtattttattgcaaacccattaaaagaataactcatgaaaagaagctctttgacaccttggggtacacaaatgttggtgtgggtgtgtgttaattctgtgagtgagacacaccagttctaaaaaaaatgagtgaagttctggtgcctgagttaccatgctttcttctagttcttacagtagcataaaattaaagattcaaagtgagatggaggataaaattactttttaatacatgttctcaaacatttgaaaataaaagtatatgatagaagggggccagagtgtggccaccatcctgatcgtactgtttttcaataaagaaaactttttcattggtagatttggtgaaattctaaatttaggtttttttctagagctgtatcaaccaaaacttctggcaattcccagtatcacttcttagccttcttatatccaaatgcctgtttattacctttcttaatttgaatcaatgcctagttattacagattgcaccccacaatggccaaaaacccactacataataaaatttacaggtactaactagttaagattatattttaagtagcaattgatataaaattacaacacaatgaaagaacttgggtaatctcttagcaatggaaataggttttaaccagcagtttttctgggtgctttgtaactatcattttactaatgaattgaggatgtattatggtttaaattggaagagttttattcccaaagaataaagcaagattatctttcagtagtagagattgaagtaaatgtattaatattttaattaatacagatttactaagagtagttagaaaatttagtaagtgcctgttttacaaattgttaggtactagtttctgtataattcctacacagaagctttagaaatctcctgatattaaattattaaattggcattcatgaaaagagaagctacaattataaactccatttgctaaatcatgcataatactctctctctctcttcccccacaagtaatctctctaccccatgcagtgtgcacacacacacacacacagtcagttactgaaaaaaataattctttttctttttttttttaaatggagtttcactcttgtcgcccaggctggagtgcagtggcgtgatctcggcccactgcaacctccacctcccaggttcaagcagttctcctgcctcagcctcctgagtagctgggattacaggtgtccgccaccatgcctggctaatttttttatttgataaaaagaattctttttctcaataactgttctcttgaattcaaattaagggactgccaaagtcaattagaatattttaaaaatactttgttgtaacctgtgtaaataatatacaatttacaggatttgggattgtagaacttaaactggaagactggattcctcagatctcaggactataacattccagataaatttttacattccctttgctgtatattaactgatgatcatttatatgttaagattttttaccttaatatttctgaataaaactcttattgcccatttaatattttcataggcaatcaaatgtgagtaatactgctaagagtctgatttattaaaaatatttgtataattcattcagtttagtttttcagtttagtctttctgctttcacttttctctgtgctaacaagtaactaatgtctgggcattgacttcttattgaatcaaagttgggttaggcatagctatgcacacctgatgtgtaagattaaagaagagattaaataagaaatcttgggtaagttggacttttctgtatagctcttttttcctctgagttgtattttaatgtagtttataagtgataaaatgatccttgttttctaaaagccagtccttcccttcagctttccacagtttctgtaaatgtttaatacttgtacagtcaatggcaattttaaatatatatatatatataatatatgtatatggaaaaggttcaaagatgcttttaatttatttaatgactattgccttcctataataataattttcatccttaattatgataatacttttagcaagaaaaattcctttttactacagtttttagatgcaaaatgcagtttggttctttagtcaaatccacttagagggtatattgcagtgaaactgtgaaggatacttcactaccaatgtataagctttgttgaatttgtatcattttctttcagtaatgaaaagctattcattatacagtatggaaataaaaattgcttcattga

SEQ ID NO: 111763 - DNA, 1917 bp, Homo sapiens
  Payload ID: 1895
  Gene Symbol: BMP4
  Gene Name: bone morphogenetic protein 4
  Uniprot ID: P12644
  ENST ID: ENST00000245451
  CDS Start-End: 395-1621
ggcagaggaggagggagggagggaaggagcgcggagcccggcccggaagctaggtgagtgtggcatccgagctgagggacgcgagcctgagacgccgctgctgctccggctgagtatctagcttgtctccccgatgggattcccgtccaagctatctcgagcctgcagcgccacagtccccggccctcgcccaggttcactgcaaccgttcagaggtccccaggagctgctgctggcgagcccgctactgcagggacctatggagccattccgtagtgccatcccgagcaacgcactgctgcagcttccctgagcctttccagcaagtttgttcaagattggctgtcaagaatcatggactgttattatatgccttgttttctgtcaagacaccatgattcctggtaaccgaatgctgatggtcgttttattatgccaagtcctgctaggaggcgcgagccatgctagtttgatacctgagacggggaagaaaaaagtcgccgagattcagggccacgcgggaggacgccgctcagggcagagccatgagctcctgcgggacttcgaggcgacacttctgcagatgtttgggctgcgccgccgcccgcagcctagcaagagtgccgtcattccggactacatgcgggatctttaccggcttcagtctggggaggaggaggaagagcagatccacagcactggtcttgagtatcctgagcgcccggccagccgggccaacaccgtgaggagcttccaccacgaagaacatctggagaacatcccagggaccagtgaaaactctgcttttcgtttcctctttaacctcagcagcatccctgagaacgaggtgatctcctctgcagagcttcggctcttccgggagcaggtggaccagggccctgattgggaaaggggcttccaccgtataaacatttatgaggttatgaagcccccagcagaagtggtgcctgggcacctcatcacacgactactggacacgagactggtccaccacaatgtgacacggtgggaaacttttgatgtgagccctgcggtccttcgctggacccgggagaagcagccaaactatgggctagccattgaggtgactcacctccatcagactcggacccaccagggccagcatgtcaggattagccgatcgttacctcaagggagtgggaattgggcccagctccggcccctcctggtcacctttggccatgatggccggggccatgccttgacccgacgccggagggccaagcgtagccctaagcatcactcacagcgggccaggaagaagaataagaactgccggcgccactcgctctatgtggacttcagcgatgtgggctggaatgactggattgtggccccaccaggctaccaggccttctactgccatggggactgcccctttccactggctgaccacctcaactcaaccaaccatgccattgtgcagaccctggtcaattctgtcaattccagtatccccaaagcctgttgtgtgcccactgaactgagtgccatctccatgctgtacctggatgagtatgataaggtggtactgaaaaattatcaggagatggtagtagagggatgtgggtgccgctgagatcaggcagtccttgaggatagacagatatacacaccacacacacacaccacatacaccacacacacacgttcccatccactcacccacacactacacagactgcttccttatagctggacttttatttaaaaaaaaaaaaaaaaaaggaaaaaatccctaaacattcaccttgaccttatttatgactttacgtgcaaatgttttgaccatattgatcatatattttgacaaaatatatttataactacgtattaaaagaaaaaaataaaatgagtcattattttaaaggtaaa

SEQ ID NO: 111764 - DNA, 1784 bp, Homo sapiens
  Payload ID: 1895
  Gene Symbol: BMP4
  Gene Name: bone morphogenetic protein 4
  Uniprot ID: P12644
  ENST ID: ENST00000417573
  CDS Start-End: 265-1491
gaaggaagtggcgggggaaggagtgtggtggtggtttaaaaaataagggaagccgaggcgagagagacgcagacgcagaggtcgagcgcaggccgaaagctgttcaccgttttctcgactccggggaacatggagccattccgtagtgccatcccgagcaacgcactgctgcagcttccctgagcctttccagcaagtttgttcaagattggctgtcaagaatcatggactgttattatatgccttgttttctgtcaagacaccatgattcctggtaaccgaatgctgatggtcgttttattatgccaagtcctgctaggaggcgcgagccatgctagtttgatacctgagacggggaagaaaaaagtcgccgagattcagggccacgcgggaggacgccgctcagggcagagccatgagctcctgcgggacttcgaggcgacacttctgcagatgtttgggctgcgccgccgcccgcagcctagcaagagtgccgtcattccggactacatgcgggatctttaccggcttcagtctggggaggaggaggaagagcagatccacagcactggtcttgagtatcctgagcgcccggccagccgggccaacaccgtgaggagcttccaccacgaagaacatctggagaacatcccagggaccagtgaaaactctgcttttcgtttcctctttaacctcagcagcatccctgagaacgaggtgatctcctctgcagagcttcggctcttccgggagcaggtggaccagggccctgattgggaaaggggcttccaccgtataaacatttatgaggttatgaagcccccagcagaagtggtgcctgggcacctcatcacacgactactggacacgagactggtccaccacaatgtgacacggtgggaaacttttgatgtgagccctgcggtccttcgctggacccgggagaagcagccaaactatgggctagccattgaggtgactcacctccatcagactcggacccaccagggccagcatgtcaggattagccgatcgttacctcaagggagtgggaattgggcccagctccggcccctcctggtcacctttggccatgatggccggggccatgccttgacccgacgccggagggccaagcgtagccctaagcatcactcacagcgggccaggaagaagaataagaactgccggcgccactcgctctatgtggacttcagcgatgtgggctggaatgactggattgtggccccaccaggctaccaggccttctactgccatggggactgcccctttccactggctgaccacctcaactcaaccaaccatgccattgtgcagaccctggtcaattctgtcaattccagtatccccaaagcctgttgtgtgcccactgaactgagtgccatctccatgctgtacctggatgagtatgataaggtggtactgaaaaattatcaggagatggtagtagagggatgtgggtgccgctgagatcaggcagtccttgaggatagacagatatacacaccacacacacacaccacatacaccacacacacacgttcccatccactcacccacacactacacagactgcttccttatagctggacttttatttaaaaaaaaaaaaaaaaaaggaaaaaatccctaaacattcaccttgaccttatttatgactttacgtgcaaatgttttgaccatattgatcatatattttgacaaaatatatttataactacgtattaaaagaaaaaaataaaatgagtcattattttaaaggt

SEQ ID NO: 111765 - DNA, 1112 bp, Homo sapiens
  Payload ID: 1895
  Gene Symbol: BMP4
  Gene Name: bone morphogenetic protein 4
  ENST ID: ENST00000559501
  CDS Start-End: 298-1112
gtctcattatattcaaatattccttttaggagccattccgtagtgccatcccgagcaacgcactgctgcagcttccctgagcctttccagcaagtttgttcaagattggctgtcaagaatcatggactgttattatatgccttgttttctgtcatcctgctaggaggcgcgagccatgctagtttgatacctgagacggggaagaaaaaagtcgccgagattcagggccacgcgggaggacgccgctcagggcagagccatgagctcctgcgggacttcgaggcgacacttctgcagatgtttgggctgcgccgccgcccgcagcctagcaagagtgccgtcattccggactacatgcgggatctttaccggcttcagtctggggaggaggaggaagagcagatccacagcactggtcttgagtatcctgagcgcccggccagccgggccaacaccgtgaggagcttccaccacgaagaacatctggagaacatcccagggaccagtgaaaactctgcttttcgtttcctctttaacctcagcagcatccctgagaacgaggtgatctcctctgcagagcttcggctcttccgggagcaggtggaccagggccctgattgggaaaggggcttccaccgtataaacatttatgaggttatgaagcccccagcagaagtggtgcctgggcacctcatcacacgactactggacacgagactggtccaccacaatgtgacacggtgggaaacttttgatgtgagccctgcggtccttcgctggacccgggagaagcagccaaactatgggctagccattgaggtgactcacctccatcagactcggacccaccagggccagcatgtcaggattagccgatcgttacctcaagggagtgggaattgggcccagctccggcccctcctggtcacctttggccatgatggccggggccatgccttgacccgacgccggagggccaagcgtagccctaagcatcactcacagcgggccaggaagaagaataagaactgccggcgccactcgctctatgtggacttcagcgatgtgggctggaatgactggattgtggccccaccaggctaccaggcctt

SEQ ID NO: 111766 - DNA, 505 bp, Homo sapiens
  Payload ID: 1895
  Gene Symbol: BMP4
  Gene Name: bone morphogenetic protein 4
  ENST ID: ENST00000559642
  CDS Start-End: 175-505
gctaaaggagcacaatgcctgatgctgcaggagaaacattaggagccattccgtagtgccatcccgagcaacgcactgctgcagcttccctgagcctttccagcaagtttgttcaagattggctgtcaagaatcatggactgttattatatgccttgttttctgtcaagacaccatgattcctggtaaccgaatgctgatggtcgttttattatgccaagtcctgctaggaggcgcgagccatgctagtttgatacctgagacggggaagaaaaaagtcgccgagattcagggccacgcgggaggacgccgctcagggcagagccatgagctcctgcgggacttcgaggcgacacttctgcagatgtttgggctgcgccgccgcccgcagcctagcaagagtgccgtcattccggactacatgcgggatctttaccggcttcagtctggggaggaggaggaagagcagatccacagcactggtcttgagtatcctgagcgcccgg

SEQ ID NO: 111767 - DNA, 1708 bp, Homo sapiens
  Payload ID: 1895
  Gene Symbol: BMP4
  Gene Name: bone morphogenetic protein 4
  Uniprot ID: P12644
  ENST ID: ENST00000559087
  CDS Start-End: 186-1412
ggcagaggaggagggagggagggaaggagcgcggagcccggcccggaagctaggagccattccgtagtgccatcccgagcaacgcactgctgcagcttccctgagcctttccagcaagtttgttcaagattggctgtcaagaatcatggactgttattatatgccttgttttctgtcaagacaccatgattcctggtaaccgaatgctgatggtcgttttattatgccaagtcctgctaggaggcgcgagccatgctagtttgatacctgagacggggaagaaaaaagtcgccgagattcagggccacgcgggaggacgccgctcagggcagagccatgagctcctgcgggacttcgaggcgacacttctgcagatgtttgggctgcgccgccgcccgcagcctagcaagagtgccgtcattccggactacatgcgggatctttaccggcttcagtctggggaggaggaggaagagcagatccacagcactggtcttgagtatcctgagcgcccggccagccgggccaacaccgtgaggagcttccaccacgaagaacatctggagaacatcccagggaccagtgaaaactctgcttttcgtttcctctttaacctcagcagcatccctgagaacgaggtgatctcctctgcagagcttcggctcttccgggagcaggtggaccagggccctgattgggaaaggggcttccaccgtataaacatttatgaggttatgaagcccccagcagaagtggtgcctgggcacctcatcacacgactactggacacgagactggtccaccacaatgtgacacggtgggaaacttttgatgtgagccctgcggtccttcgctggacccgggagaagcagccaaactatgggctagccattgaggtgactcacctccatcagactcggacccaccagggccagcatgtcaggattagccgatcgttacctcaagggagtgggaattgggcccagctccggcccctcctggtcacctttggccatgatggccggggccatgccttgacccgacgccggagggccaagcgtagccctaagcatcactcacagcgggccaggaagaagaataagaactgccggcgccactcgctctatgtggacttcagcgatgtgggctggaatgactggattgtggccccaccaggctaccaggccttctactgccatggggactgcccctttccactggctgaccacctcaactcaaccaaccatgccattgtgcagaccctggtcaattctgtcaattccagtatccccaaagcctgttgtgtgcccactgaactgagtgccatctccatgctgtacctggatgagtatgataaggtggtactgaaaaattatcaggagatggtagtagagggatgtgggtgccgctgagatcaggcagtccttgaggatagacagatatacacaccacacacacacaccacatacaccacacacacacgttcccatccactcacccacacactacacagactgcttccttatagctggacttttatttaaaaaaaaaaaaaaaaaaggaaaaaatccctaaacattcaccttgaccttatttatgactttacgtgcaaatgttttgaccatattgatcatatattttgacaaaatatatttataactacgtattaaaagaaaaaaataaaatgagtcattattttaaaggtaaa

SEQ ID NO: 111768 - DNA, 495 bp, Homo sapiens
  Payload ID: 1895
  Gene Symbol: BMP4
  Gene Name: bone morphogenetic protein 4
  ENST ID: ENST00000558961
  CDS Start-End: 1-315
ttgatacctgagacggggaagaaaaaagtcgccgagattcagggccacgcgggaggacgccgctcagggcagagccatgagctcctgcgggacttcgaggcgacacttctgcagatgtttgggctgcgccgccgcccgcagcctagcaagagtgccgtcattccggactacatgcgggatctttaccggcttcagtctggggaggaggaggaagagcagatccacagcactggtcttgagtatcctgagcgcccggccagccgggccaacaccgtgaggagcttccaccacgaagcatccctgagaacgaggtgatctcctctgcagagcttcggctcttccgggagcaggtggaccagggccctgattgggaaaggggcttccaccgtataaacatttatgaggttatgaagcccccagcagaagtggtgcctgggcacctcatcacacgactactggacacgagactggtccaccacaatgtgacacggtggg

SEQ ID NO: 111769 - DNA, 1705 bp, Homo sapiens
  Payload ID: 1895
  Gene Symbol: BMP4
  Gene Name: bone morphogenetic protein 4
  Uniprot ID: P12644
  ENST ID: ENST00000558984
  CDS Start-End: 188-1414
gaaaaacagagcctgtctgcggtggagtctcattatattcaaatattccttttaggagccattccgtagtgccatcccgagcaacgcactgctgcagcttccctgagcctttccagcaagtttgttcaagattggctgtcaagaatcatggactgttattatatgccttgttttctgtcaagacaccatgattcctggtaaccgaatgctgatggtcgttttattatgccaagtcctgctaggaggcgcgagccatgctagtttgatacctgagacggggaagaaaaaagtcgccgagattcagggccacgcgggaggacgccgctcagggcagagccatgagctcctgcgggacttcgaggcgacacttctgcagatgtttgggctgcgccgccgcccgcagcctagcaagagtgccgtcattccggactacatgcgggatctttaccggcttcagtctggggaggaggaggaagagcagatccacagcactggtcttgagtatcctgagcgcccggccagccgggccaacaccgtgaggagcttccaccacgaagaacatctggagaacatcccagggaccagtgaaaactctgcttttcgtttcctctttaacctcagcagcatccctgagaacgaggtgatctcctctgcagagcttcggctcttccgggagcaggtggaccagggccctgattgggaaaggggcttccaccgtataaacatttatgaggttatgaagcccccagcagaagtggtgcctgggcacctcatcacacgactactggacacgagactggtccaccacaatgtgacacggtgggaaacttttgatgtgagccctgcggtccttcgctggacccgggagaagcagccaaactatgggctagccattgaggtgactcacctccatcagactcggacccaccagggccagcatgtcaggattagccgatcgttacctcaagggagtgggaattgggcccagctccggcccctcctggtcacctttggccatgatggccggggccatgccttgacccgacgccggagggccaagcgtagccctaagcatcactcacagcgggccaggaagaagaataagaactgccggcgccactcgctctatgtggacttcagcgatgtgggctggaatgactggattgtggccccaccaggctaccaggccttctactgccatggggactgcccctttccactggctgaccacctcaactcaaccaaccatgccattgtgcagaccctggtcaattctgtcaattccagtatccccaaagcctgttgtgtgcccactgaactgagtgccatctccatgctgtacctggatgagtatgataaggtggtactgaaaaattatcaggagatggtagtagagggatgtgggtgccgctgagatcaggcagtccttgaggatagacagatatacacaccacacacacacaccacatacaccacacacacacgttcccatccactcacccacacactacacagactgcttccttatagctggacttttatttaaaaaaaaaaaaaaaaaaggaaaaaatccctaaacattcaccttgaccttatttatgactttacgtgcaaatgttttgaccatattgatcatatattttgacaaaatatatttataactacgtattaaaagaaaaaaataaaatgagtcattattttaaag

SEQ ID NO: 111770 - DNA, 458 bp, Homo sapiens
  Payload ID: 1895
  Gene Symbol: BMP4
  Gene Name: bone morphogenetic protein 4
  ENST ID: ENST00000609748
  CDS Start-End: 1-90
aacaccgtgaggagcttccaccacgaaggtcagtctcttcccccagtctgcgtgggggagggctggtgggactggctagaggggcagtgaaagccctggggaagaagagttcgggttacatcaaagccccagtccaggaggctgaggaacagagctgcttacctccaagaatttgcagagctgccgccgaacttattttttggagacagagggggaggtgttcaggggaaggggaatgacagcactcagacgtgggctagccccagcggtgtgtttttgctatatcaaagccttttctgctaggttttctgcccgtttttttcaaagcacctactgaatttaatattacagctgtgtgtttgtcgggtttattcaataggggccttgtaatccgatctgaatgtttcctagcggatgtttcttttccaaagtaaatctgagttattaatccaccagca

SEQ ID NO: 111771 - DNA, 3952 bp, Homo sapiens
  Payload ID: 1896
  Gene Symbol: BMP5
  Gene Name: bone morphogenetic protein 5
  Uniprot ID: P22003
  ENST ID: ENST00000370830
  CDS Start-End: 700-2064
ctggtatatttgtgcctgctggaggtggaattaacagtaagaaggagaaagggattgaatggacttacaggaaggatttcaagtaaattcagggaaacacatttacttgaatagtacaacctagagtattattttacactaagacgacacaaaagatgttaaagttatcaccaagctgccggacagatatatattccaacaccaaggtgcagatcagcatagatctgtgattcagaaatcaggatttgttttggaaagagctcaagggttgagaagaactcaaaagcaagtgaagattactttgggaactacagtttatcagaagatcaacttttgctaattcaaataccaaaggcctgattatcataaattcatataggaatgcataggtcatctgatcaaataatattagccgtcttctgctacatcaatgcagcaaaaactcttaacaactgtggataattggaaatctgagtttcagctttcttagaaataactactcttgacatattccaaaatatttaaaataggacaggaaaatcggtgaggatgttgtgctcagaaatgtcactgtcatgaaaaataggtaaatttgttttttcagctactgggaaactgtacctcctagaaccttaggttttttttttttttaagaggacaagaaggactaaaaatatcaacttttgcttttggacaaaaatgcatctgactgtatttttacttaagggtattgtgggtttcctctggagctgctgggttctagtgggttatgcaaaaggaggtttgggagacaatcatgttcactccagttttatttatagaagactacggaaccacgaaagacgggaaatacaaagggaaattctctctatcttgggtttgcctcacagacccagaccattttcacctggaaaacaagcgtcctctgcacctctctttatgctggatctctacaatgccatgaccaatgaagaaaatcctgaagagtcggagtactcagtaagggcatccttggcagaagagaccagaggggcaagaaagggatacccagcctctcccaatgggtatcctcgtcgcatacagttatctcggacgactcctctgaccacccagagtcctcctctagccagcctccatgataccaactttctgaatgatgctgacatggtcatgagctttgtcaacttagttgaaagagacaaggatttttctcaccagcgaaggcattacaaagaatttcgatttgatcttacccaaattcctcatggagaggcagtgacagcagctgaattccggatatacaaggaccggagcaacaaccgatttgaaaatgaaacaattaagattagcatatatcaaatcatcaaggaatacacaaatagggatgcagatctgttcttgttagacacaagaaaggcccaagctttagatgtgggttggcttgtctttgatatcactgtgaccagcaatcattgggtgattaatccccagaataatttgggcttacagctctgtgcagaaacaggggatggacgcagtatcaacgtaaaatctgctggtcttgtgggaagacagggacctcagtcaaaacaaccattcatggtggccttcttcaaggcgagtgaggtacttcttcgatccgtgagagcagccaacaaacgaaaaaatcaaaaccgcaataaatccagctctcatcaggactcctccagaatgtccagtgttggagattataacacaagtgagcaaaaacaagcctgtaagaagcacgaactctatgtgagcttccgggatctgggatggcaggactggattatagcaccagaaggatacgctgcattttattgtgatggagaatgttcttttccacttaacgcccatatgaatgccaccaaccacgctatagttcagactctggttcatctgatgtttcctgaccacgtaccaaagccttgttgtgctccaaccaaattaaatgccatctctgttctgtactttgatgacagctccaatgtcattttgaaaaaatatagaaatatggtagtacgctcatgtggctgccactaatattaaataatattgataataacaaaaagatctgtattaaggtttatggctgcaataaaaagcatactttcagacaaacggggaatttcctaaaattagtctggctcattttgactcttttcctatgtacaatatcatgtatatagtcatttttatttatttaaacgtatatattctcttctgtggaggctttatcaataaaatctatttcataggccactacattatacaatagatcatctagtataattttcaatgggttatgctgagtccattcaattccatttcaacatttttttctaatacaattttacataattttctgagattagacagaactcctttgactgtttaatattgtggaaggaaattgaataatttagttatattgtgccaatgaaaaccatgatagaatatttatttagaaataagacttaaaaaaataacaacccaaacaaaaattcttggataaacacaatttctcttttagagttcctgcttcattagataaagtgaaatgttgaactggatttgaataaataaacggtaggcagaacatagaagctgaaagattgcacagaattgttttaactgtttgctttaacagaagtggtgtaactgtaggagcatgttcctttttggcttgtggattgtagattttgcaaagagctcaaagcttcaggagacaggcttgagcctgtgtccatagctttccaagttaacactaattgtagtacaaccttcttacctcaaataaatcatgtctgcctattatctagaacactactgctgcagaatttttttttcagatttaaaaacctagtccaaaataaagaaacatttacatgtgctccactttcctccccacaggcaagagtcactgcatgcgtaaaatgtacaagagcagaagatgccgaaagaaccattttctttagctctcctttataactgagtttgctgattgatgtgatgcaagggattttatttagaagtaaaagcactgaaactaaactggaggaaattaccaaaagtcccagaatggctttgacagaattgccatttctaaagaacagctgaaattcatttttcatatctttgagagtgagctcaatgaaaaccttattttgtaaaggcattttgtaaaccttcttccaagcacaaataattccaaacaggaaggttctgttgtgtgtgtgtgtgtgtgtgtgtctgtgtgtgcatgtgtgttcttccctctaaaattaatttattttctctatctattagaatgccctctaaggcctttctttaacacacactgactttttgaagaatgatctttagattgataacttgctatttatggtgactctgtggttaggcttatttaccgttaatctaaagtattcataaagcaccatttattaatcatccttttggatctttcaaaccaaacgtataccaaaaatgtcttcaaaaatgttatggctttgtttgtaattcgggtatattaaaatgttgttttgaaatacagtttatcttaaagaaaatttgacagtaactatattaaggggtacattaagtaatatatttttaattaatggtgtaccattgagagaataagaaatggaagtctattgttttattctttaaatgtgctgtttaaatatatttccatattttaaaatatattaaacagatgctaatttctgctgttcttgatttggttctttatttaaaaggaatacaaaatgtaagtatatcataaattgagacaataagaatatttatcaaatgtaaactgtttgtggatcacatgattctttatgttgttcttaattgccaaaattgttttttgtgttgttaataattatctcactattaaatgtgcaaagcaacaatccatgaa

SEQ ID NO: 111772 - DNA, 2780 bp, Homo sapiens
  Payload ID: 1897
  Gene Symbol: BMP6
  Gene Name: bone morphogenetic protein 6
  Uniprot ID: P22004
  ENST ID: ENST00000283147
  CDS Start-End: 160-1701
cgaccatgagagataaggactgagggccaggaaggggaagcgagcccgccgagaggtggcggggactgctcacgccaagggccacagcggccgcgctccggcctcgctccgccgctccacgcctcgcgggatccgcgggggcagcccggccgggcggggatgccggggctggggcggagggcgcagtggctgtgctggtggtgggggctgctgtgcagctgctgcgggcccccgccgctgcggccgcccttgcccgctgccgcggccgccgccgccggggggcagctgctgggggacggcgggagccccggccgcacggagcagccgccgccgtcgccgcagtcctcctcgggcttcctgtaccggcggctcaagacgcaggagaagcgggagatgcagaaggagatcttgtcggtgctggggctcccgcaccggccccggcccctgcacggcctccaacagccgcagcccccggcgctccggcagcaggaggagcagcagcagcagcagcagctgcctcgcggagagccccctcccgggcgactgaagtccgcgcccctcttcatgctggatctgtacaacgccctgtccgccgacaacgacgaggacggggcgtcggagggggagaggcagcagtcctggccccacgaagcagccagctcgtcccagcgtcggcagccgcccccgggcgccgcgcacccgctcaaccgcaagagccttctggcccccggatctggcagcggcggcgcgtccccactgaccagcgcgcaggacagcgccttcctcaacgacgcggacatggtcatgagctttgtgaacctggtggagtacgacaaggagttctcccctcgtcagcgacaccacaaagagttcaagttcaacttatcccagattcctgagggtgaggtggtgacggctgcagaattccgcatctacaaggactgtgttatggggagttttaaaaaccaaacttttcttatcagcatttatcaagtcttacaggagcatcagcacagagactctgacctgtttttgttggacacccgtgtagtatgggcctcagaagaaggctggctggaatttgacatcacggccactagcaatctgtgggttgtgactccacagcataacatggggcttcagctgagcgtggtgacaagggatggagtccacgtccacccccgagccgcaggcctggtgggcagagacggcccttacgacaagcagcccttcatggtggctttcttcaaagtgagtgaggtgcacgtgcgcaccaccaggtcagcctccagccggcgccgacaacagagtcgtaatcgctctacccagtcccaggacgtggcgcgggtctccagtgcttcagattacaacagcagtgaattgaaaacagcctgcaggaagcatgagctgtatgtgagtttccaagacctgggatggcaggactggatcattgcacccaagggctatgctgccaattactgtgatggagaatgctccttcccactcaacgcacacatgaatgcaaccaaccacgcgattgtgcagaccttggttcaccttatgaaccccgagtatgtccccaaaccgtgctgtgcgccaactaagctaaatgccatctcggttctttactttgatgacaactccaatgtcattctgaaaaaatacaggaatatggttgtaagagcttgtggatgccactaactcgaaaccagatgctggggacacacattctgccttggattcctagattacatctgccttaaaaaaacacggaagcacagttggaggtgggacgatgagactttgaaactatctcatgccagtgccttattacccaggaagattttaaaggacctcattaataatttgctcacttggtaaatgacgtgagtagttgttggtctgtagcaagctgagtttggatgtctgtagcataaggtctggtaactgcagaaacataaccgtgaagctcttcctaccctcctcccccaaaaacccaccaaaattagttttagctgtagatcaagctatttggggtgtttgttagtaaatagggaaaataatctcaaaggagttaaatgtattcttggctaaaggatcagctggttcagtactgtctatcaaaggtagattttacagagaacagaaatcggggaagtggggggaacgcctctgttcagttcattcccagaagtccacaggacgcacagcccaggccacagccagggctccacggggcgcccttgtctcagtcattgctgttgtatgttcgtgctggagttttgttggtgtgaaaatacacttatttcagccaaaacataccatttctacacctcaatcctccatttgctgtactctttgctagtaccaaaagtagactgattacactgaggtgaggctacaaggggtgtgtaaccgtgtaacacgtgaaggcaatgctcacctcttctttaccagaacggttctttgaccagcacattaacttctggactgccggctctagtaccttttcagtaaagtggttctctgcctttttactatacagcataccacgccacagggttagaaccaacgaagaaaataaaatgagggtgcccagcttataagaatggtgttagggggatgagcatgctgtttatgaacggaaatcatgatttcccttgtagaaagtgaggctcagattaaattttagaatattttctaaatgtctttttcacaatcatgtactgggaaggcaatttcatactaaactgattaaataatacatttataatctacaa

SEQ ID NO: 111773 - DNA, 4013 bp, Homo sapiens
  Payload ID: 1898
  Gene Symbol: BMP7
  Gene Name: bone morphogenetic protein 7
  Uniprot ID: P18075
  ENST ID: ENST00000395863
  CDS Start-End: 507-1802
cgaggcggcctcttgtgcgatccagggcgcacaaggctgggagagcgccccggggcccctgctatccgcgccggaggttggaagagggtgggttgccgccgcccgagggcgagagcgccagaggagcgggaagaaggagcgctcgcccgcccgcctgcctcctcgctgcctccccggcgttggctctctggactcctaggcttgctggctgctcctcccacccgcgcccgcctcctcactcgccttttcgttcgccggggctgctttccaagccctgcggtgcgcccgggcgagtgcggggcgaggggcccggggccagcaccgagcagggggcgggggtccgggcagagcgcggccggccggggaggggccatgtctggcgcgggcgcagcggggcccgtctgcagcaagtgaccgagcggcgcggacggccgcctgccccctctgccacctggggcggtgcgggcccggagcccggagcccgggtagcgcgtagagccggcgcgatgcacgtgcgctcactgcgagctgcggcgccgcacagcttcgtggcgctctgggcacccctgttcctgctgcgctccgccctggccgacttcagcctggacaacgaggtgcactcgagcttcatccaccggcgcctccgcagccaggagcggcgggagatgcagcgcgagatcctctccattttgggcttgccccaccgcccgcgcccgcacctccagggcaagcacaactcggcacccatgttcatgctggacctgtacaacgccatggcggtggaggagggcggcgggcccggcggccagggcttctcctacccctacaaggccgtcttcagtacccagggcccccctctggccagcctgcaagatagccatttcctcaccgacgccgacatggtcatgagcttcgtcaacctcgtggaacatgacaaggaattcttccacccacgctaccaccatcgagagttccggtttgatctttccaagatcccagaaggggaagctgtcacggcagccgaattccggatctacaaggactacatccgggaacgcttcgacaatgagacgttccggatcagcgtttatcaggtgctccaggagcacttgggcagggaatcggatctcttcctgctcgacagccgtaccctctgggcctcggaggagggctggctggtgtttgacatcacagccaccagcaaccactgggtggtcaatccgcggcacaacctgggcctgcagctctcggtggagacgctggatgggcagagcatcaaccccaagttggcgggcctgattgggcggcacgggccccagaacaagcagcccttcatggtggctttcttcaaggccacggaggtccacttccgcagcatccggtccacggggagcaaacagcgcagccagaaccgctccaagacgcccaagaaccaggaagccctgcggatggccaacgtggcagagaacagcagcagcgaccagaggcaggcctgtaagaagcacgagctgtatgtcagcttccgagacctgggctggcaggactggatcatcgcgcctgaaggctacgccgcctactactgtgagggggagtgtgccttccctctgaactcctacatgaacgccaccaaccacgccatcgtgcagacgctggtccacttcatcaacccggaaacggtgcccaagccctgctgtgcgcccacgcagctcaatgccatctccgtcctctacttcgatgacagctccaacgtcatcctgaagaaatacagaaacatggtggtccgggcctgtggctgccactagctcctccgagaattcagaccctttggggccaagtttttctggatcctccattgctcgccttggccaggaaccagcagaccaactgccttttgtgagaccttcccctccctatccccaactttaaaggtgtgagagtattaggaaacatgagcagcatatggcttttgatcagtttttcagtggcagcatccaatgaacaagatcctacaagctgtgcaggcaaaacctagcaggaaaaaaaaacaacgcataaagaaaaatggccgggccaggtcattggctgggaagtctcagccatgcacggactcgtttccagaggtaattatgagcgcctaccagccaggccacccagccgtgggaggaagggggcgtggcaaggggtgggcacattggtgtctgtgcgaaaggaaaattgacccggaagttcctgtaataaatgtcacaataaaacgaatgaatgaaaatggttaggacgttacagatatattttcctaaacaatttatccccatttctcggtttatcctgatgcgtaaacagaagctgtgtcaagtggagggcggggaggtccctctccattccctacagttttcatcctgaggcttgcagaggcccagtgtttaccgaggtttgcccaaatccaagatctagtgggaggggaaagagcaaatgtctgctccgaggagggcggtgtgttgatctttggaggaaaaatatgttctgttgttcagctggatttgccgtggcagaaatgaaactaggtgtgtgaaatacccgcagacatttgggattggcttttcacctcgccccagtggtagtaaatccatgtgaaattgcagaggggacaaggacagcaagtaggatggaacttgcaactcaaccctgttgttaagaagcaccaatgggccgggcacagtagctcccacctgtaatcccagcactttgggaggctgaggtgggcggatcatttgaggtcaggagttcgagaccagcctggccaacatggtgaaaccccatctctactaaaaatacaaaaattagccgggcatggtggcacgcacctgtaatcccagctactctggaggctgaggcaggagaattgcttgaaccccagaggtggaggttgcagtgagccaagatcgtcccactgcactccagcttgggtgacaaaacaagactccatctcaaaagaaaaaaaaaacagcaccaatgaagcctagttctccacgggagtggggtgagcaggagcactgcacatcgccccagtggaccctctggtctttgtctgcagtggcattccaaggctgggccctggcaagggcacccgtggctgtctcttcatttgcagaccctgatcagaagtctctgcaaacaaatttgctccttgaattaagggggagatggcataataggaggtctgatgggtgcaggatgtgctggacttacattgcaaatagaagccttgttgagggtgacatcctaaccaagtgtcccgatttggaggtggcatttctgacgtggctcttggtgtaagcctgccttgccttggctggtgagtcccataaatagtatgcactcagcctccggccacaaacacaaggcctaggggagggctagactgtctgcaaacgttttctgcatctgtaaagaaaacaaggtgatcgaaaactgtggccatgtggaacccggtcttgtgggggactgtttctccatcttgactcagacagttcctggaaacaccggggctctgtttttattttctttgatgtttttcttctttagtagcttgggctgcagcctccactctctagtcactggggaggagtattttttgttatgtttggtttcatttgctggcagagctggggctttttgtgtgatccctcttggtgtgagttttctgacccaaccagcctctggttagcatcatttgtacatttaaacctgtaaatagttgttacaaagcaaagagattatttatttccatccaaagctcttttgaacacccccccccctttaatccctcgttcaggacgatgagcttgctttccttcaacctgtttgttttcttatttaagactatttattaatggttggaccaatgtactcacagctgttgcgtcgagcagtccttagtgaaaattctgtataaatagacaaaatgaaaagggtttgaccttgcaataaaaggagacgtttggttctggctcttt

SEQ ID NO: 111774 - DNA, 1746 bp, Homo sapiens
  Payload ID: 1898
  Gene Symbol: BMP7
  Gene Name: bone morphogenetic protein 7
  ENST ID: ENST00000395864
  CDS Start-End: 221-1318
cgggcgagtgcggggcgaggggcccggggccagcaccgagcagggggcgggggtccgggcagagcgcggccggccggggaggggccatgtctggcgcgggcgcagcggggcccgtctgcagcaagtgaccgagcggcgcggacggccgcctgccccctctgccacctggggcggtgcgggcccggagcccggagcccgggtagcgcgtagagccggcgcgatgcacgtgcgctcactgcgagctgcggcgccgcacagcttcgtggcgctctgggcacccctgttcctgctgcgctccgccctggccgacttcagcctggacaacgaggtgcactcgagcttcatccaccggcgcctccgcagccaggagcggcgggagatgcagcgcgagatcctctccattttgggcttgccccaccgcccgcgcccgcacctccagggcaagcacaactcggcacccatgttcatgctggacctgtacaacgccatggcggtggaggagggcggcgggcccggcggccagggcttctcctacccctacaaggccgtcttcagtacccagggcccccctctggccagcctgcaagatagccatttcctcaccgacgccgacatggtcatgagcttcgtcaacctcgtggaacatgacaaggaattcttccacccacgctaccaccatcgagagttccggtttgatctttccaagatcccagaaggggaagctgtcacggcagccgaattccggatctacaaggactacatccgggaacgcttcgacaatgagacgttccggatcagcgtttatcaggtgctccaggagcacttgggcagggaatcggatctcttcctgctcgacagccgtaccctctgggcctcggaggagggctggctggtgtttgacatcacagccaccagcaaccactgggtggtcaatccgcggcacaacctgggcctgcagctctcggtggagacgctggatgagaacagcagcagcgaccagaggcaggcctgtaagaagcacgagctgtatgtcagcttccgagacctgggctggcaggactggatcatcgcgcctgaaggctacgccgcctactactgtgagggggagtgtgccttccctctgaactcctacatgaacgccaccaaccacgccatcgtgcagacgctggtccacttcatcaacccggaaacggtgcccaagccctgctgtgcgcccacgcagctcaatgccatctccgtcctctacttcgatgacagctccaacgtcatcctgaagaaatacagaaacatggtggtccgggcctgtggctgccactagctcctccgagaattcagaccctttggggccaagtttttctggatcctccattgctcgccttggccaggaaccagcagaccaactgccttttgtgagaccttcccctccctatccccaactttaaaggtgtgagagtattaggaaacatgagcagcatatggcttttgatcagtttttcagtggcagcatccaatgaacaagatcctacaagctgtgcaggcaaaacctagcaggaaaaaaaaacaacgcataaagaaaaatggccgggccaggtcattggctgggaagtctcagccatgcacggactcgtttccagaggtaattatgagcgcctaccagccaggccacccagccgtgggaggaagggggcgtggcaaggggtgggcacattggtgtctgtgcgaaaggaaaattgacccggaagttcc

SEQ ID NO: 111775 - DNA, 890 bp, Homo sapiens
  Payload ID: 1898
  Gene Symbol: BMP7
  Gene Name: bone morphogenetic protein 7
  ENST ID: ENST00000433911
  CDS Start-End: 1-890
cccccctctggccagcctgcaagatagccatttcctcaccgacgccgacatggtcatgagcttcgtcaacctcgtggaacatgacaaggaattcttccacccacgctaccaccatcgagagttccggtttgatctttccaagatcccagaaggggaagctgtcacggcagccgaattccggatctacaaggactacatccgggaacgcttcgacaatgagacgttccggatcagcgtttatcaggtgctccaggagcacttgggcagcacaggtacctgctgcatgccatgcctgagggcatcgaccagaacgaaccagacacgagtccctgccctctggaagctcacgttccagcagaggagaggacatggcagggaatcggatctcttcctgctcgacagccgtaccctctgggcctcggaggagggctggctggtgtttgacatcacagccaccagcaaccactgggtggtcaatccgcggcacaacctgggcctgcagctctcggtggagacgctggatgggcagagcatcaaccccaagttggcgggcctgattgggcggcacgggccccagaacaagcagcccttcatggtggctttcttcaaggccacggaggtccacttccgcagcatccggtccacggggagcaaacagcgcagccagaaccgctccaagacgcccaagaaccaggaagccctgcggatggccaacgtggcagagaacagcagcagcgaccagaggcaggcctgtaagaagcacgagctgtatgtcagcttccgagacctgggctggcaggactggatcatcgcgcctgaaggctacgccgcctactactgtgagggggagtgtgccttccctctgaactcctacatgaacgccaccaacc

SEQ ID NO: 111776 - DNA, 1857 bp, Homo sapiens
  Payload ID: 1898
  Gene Symbol: BMP7
  Gene Name: bone morphogenetic protein 7
  ENST ID: ENST00000450594
  CDS Start-End: 508-1746
ccgaggcggcctcttgtgcgatccagggcgcacaaggctgggagagcgccccggggcccctgctatccgcgccggaggttggaagagggtgggttgccgccgcccgagggcgagagcgccagaggagcgggaagaaggagcgctcgcccgcccgcctgcctcctcgctgcctccccggcgttggctctctggactcctaggcttgctggctgctcctcccacccgcgcccgcctcctcactcgccttttcgttcgccggggctgctttccaagccctgcggtgcgcccgggcgagtgcggggcgaggggcccggggccagcaccgagcagggggcgggggtccgggcagagcgcggccggccggggaggggccatgtctggcgcgggcgcagcggggcccgtctgcagcaagtgaccgagcggcgcggacggccgcctgccccctctgccacctggggcggtgcgggcccggagcccggagcccgggtagcgcgtagagccggcgcgatgcacgtgcgctcactgcgagctgcggcgccgcacagcttcgtggcgctctgggcacccctgttcctgctgcgctccgccctggccgacttcagcctggacaacgaggtgcactcgagcttcatccaccggcgcctccgcagccaggagcggcgggagatgcagcgcgagatcctctccattttgggcttgccccaccgcccgcgcccgcacctccagggcaagcacaactcggcacccatgttcatgctggacctgtacaacgccatggcggtggaggagggcggcgggcccggcggccagggcttctcctacccctacaaggccgtcttcagtacccagggcccccctctggccagcctgcaagatagccatttcctcaccgacgccgacatggtcatgagcttcgtcaacctcgtggaacatgacaaggaattcttccacccacgctaccaccatcgagagttccggtttgatctttccaagatcccagaaggggaagctgtcacggcagccgaattccggatctacaaggactacatccgggaacgcttcgacaatgagacgttccggatcagcgtttatcaggtgctccaggagcacttgggcagggaatcggatctcttcctgctcgacagccgtaccctctgggcctcggaggagggctggctggtgtttgacatcacagccaccagcaaccactgggtggtcaatccgcggcacaacctgggcctgcagctctcggtggagacgctggatgggcagagcatcaaccccaagttggcgggcctgattgggcggcacgggccccagaacaagcagcccttcatggtggctttcttcaaggccacggaggtccacttccgcagcatccggtccacggggagcaaacagcgcagccagaaccgctccaagacgcccaagaaccaggaagccctgcggatggccaacgtggcagagaacagcagcagcgaccagaggcaggcctgtaagaagcacgagctgtatgtcagcttccgagacctgggctggcaggactggatcatcgcgcctgaaggctacgccgcctactactgtgagggggagtgtgccttccctctgaactcctacatgaacgccaccaaccacgccatcgtgcagacgctggtgggtgtcacgccatcttggggtgtggtcacctgggccgggcaggctgcggggccaccagatcctgctgcctccaagctggggcctgagtagatgtcagcccattgccatgtcatgacttttgggggccccttgcgccgttaaaaaaaaatcaaaaattgtactttatgactggtttggtataaagaggagtataatcttcga

SEQ ID NO: 111777 - DNA, 1692 bp, Homo sapiens
  Payload ID: 1899
  Gene Symbol: BMP8A
  Gene Name: bone morphogenetic protein 8a
  Uniprot ID: Q7Z5Y6
  ENST ID: ENST00000331593
  CDS Start-End: 347-1555
ggtcgctgccggagctcgccggtcgcccctgcgctgcgcggaccgcagccacagccggactggtgggaacggcggcgacagacggattggctgacagtcccagccctcagaacagccccggcctcgaagcgttggcgtctgcgtccgcgtcagcgtccgcttgtcccggagccggggcaggtgcgcgcggggggcgctccagggaccgcgctgaggccgcagacgccgcccgccgagccccgccccctgctcgccgaactcagctccccgttcgccgtcggggcgtccccgggcccaggggcggcggcggagctgatgtgcgcccgctgagcgcccccggcccgccatggccgcgcgccccggaccgctctggcttctgggcctgacgttgtgcgcgctgggcgggggcggccccggcctgcgacccccgcccggctgtccccagcgacgtctgggcgcgcgcgagcgccgggacgtgcagcgcgagatcctggcggtgctcgggctacccgggcggccccggccccgcgcgccacccgccgcctcccggctgcccgcgtccgcgccgctcttcatgctggacctgtaccacgccatggctggcgacgacgacgaggacggcgcgcccgcggagcagcgcctgggccgcgccgacctggtcatgagcttcgtcaacatggtggagcgagaccgtgccctgggccaccaggagccccattggaaggagttccgctttgacctgacccagatcccggctggggaggcggtcacagctgcggagttccggatttacaaggtgcccagcatccacctgctcaacaggaccctccacgtcagcatgttccaggtggtccaggagcagtccaacagggagtctgacttgttctttttggatcttcagacgctccgagctggagacgagggctggctggtgctggatgtcacagcagccagtgactgctggttgctgaagcgtcacaaggacctgggactccgcctctatgtggagactgaggacgggcacagcgtggatcctggcctggccggcctgctgggtcaacgggccccacgctcccaacagcctttcgtggtcactttcttcagggccagtccgagtcccatccgcacccctcgggcagtgaggccactgaggaggaggcaaccgaagaaaagcaacgagctgccgcaggccaaccgactcccagggatctttgatgacgtccgcggctcccacggccggcaggtctgccgtcggcacgagctctacgtcagcttccaggaccttggctggctggactgggtcatcgccccccaaggctactcagcctattactgtgagggggagtgctccttcccgctggactcctgcatgaacgccaccaaccacgccatcctgcagtccctggtgcacctgatgaagccaaacgcagtccccaaggcgtgctgtgcacccaccaagctgagcgccacctctgtgctctactatgacagcagcaacaacgtcatcctgcgcaagcaccgcaacatggtggtcaaggcctgcggctgccactgagtcagcccgcccagccctactgcagccacccttctcatctggatcgggccctgcagaggcagaaaacccttaaatgctgtcacagctcaagcaggagtgtcaggggccctcactctcggtgcctacttcctgtcagg

SEQ ID NO: 111778 - DNA, 4822 bp, Homo sapiens
  Payload ID: 1900
  Gene Symbol: BMP8B
  Gene Name: bone morphogenetic protein 8b
  Uniprot ID: P34820
  ENST ID: ENST00000372827
  CDS Start-End: 377-1585
actcgcgggaaccgcaccaagcgggtggctgcaggagctcgcccatcgcccctgcgctgctcggaccgcggccacagccggactggcgggtacggcggcgacagacggattggccgagagtcccagtccgcagagtagccccggcctcgaggcggtggcgtccgcgtcctctcgtccaggagccaggacaggtgtcgcgcggcgggcgctccagggaccgcgctgaggccgcggtcgccgcccgtcccgccccgccccgccgcccgccgcccgccgagcccagcctccttgccgtcggggcgtccccaggccctgggtcggccgcggagccgatgcgcgcccgctgagcgccccagctgagcgcccccggcctgccatgaccgcgctccccggcccgctctggctcctgggcctggcgctatgcgcgctgggcgggggcggccccggcctgcgacccccgcccggctgtccccagcgacgtctgggcgcgcgcgagcgccgggacgtgcagcgcgagatcctggcggtgctcgggctgcctgggcggccccggccccgcgcgccacccgccgcctcccggctgcccgcgtccgcgccgctcttcatgctggacctgtaccacgccatggccggcgacgacgacgaggacggcgcgcccgcggagcggcgcctgggccgcgccgacctggtcatgagcttcgttaacatggtggagcgagaccgtgccctgggccaccaggagccccattggaaggagttccgctttgacctgacccagatcccggctggggaggcggtcacagctgcggagttccggatttacaaggtgcccagcatccacctgctcaacaggaccctccacgtcagcatgttccaggtggtccaggagcagtccaacagggagtctgacttgttctttttggatcttcagacgctccgagctggagacgagggctggctggtgctggatgtcacagcagccagtgactgctggttgctgaagcgtcacaaggacctgggactccgcctctatgtggagactgaggacgggcacagcgtggatcctggcctggccggcctgctgggtcaacgggccccacgctcccaacagcctttcgtggtcactttcttcagggccagtccgagtcccatccgcacccctcgggcagtgaggccactgaggaggaggcagccgaagaaaagcaacgagctgccgcaggccaaccgactcccagggatctttgatgacgtccacggctcccacggccggcaggtctgccgtcggcacgagctctacgtcagcttccaggacctcggctggctggactgggtcatcgctccccaaggctactcggcctattactgtgagggggagtgctccttcccactggactcctgcatgaatgccaccaaccacgccatcctgcagtccctggtgcacctgatgatgccagacgcagtccccaaggcgtgctgtgcacccaccaagctgagcgccacctctgtgctctactatgacagcagcaacaatgtcatcctgcgcaagcaccgcaacatggtggtcaaggcctgcggctgccactgagtccacccgcccggcccagctgcagccacccttctcatctggatcgggcccctcagaagcaggaaaccctcaaacccagccagaccccaggccggggcattgccagggaggaccctcacaaccacgtacatgaccctttctccttcatgccaggctcctatgctccccttgccctgccaggcatttgtgtgactgtcctgtttccagcccaggtggtctcaatcatcaggcagtgttctacccaaatgcaaacgcctctcccggaggcatgtcctggctggttctttggggttggcacagaagtcctgtctgaggtcctatccatgccccttactggctcaggtcgtgagatagatgtggaatgacctgagaggcacctggagcccactgttggccaccttgagctcttcaccatccatcacagggtgtggtgtgtgtagtcagggtctggttggctccccattgcctgcccgaggtgcaaggtggggtataaaactggataacccctgaagtattgtatattcatggatctgaagcactgatccactggtcacaggtagacatgtggagtcaactcaagaaaaagctgagtgaacagcatgatttagggctaaagccaatggcatttatcttcccttgtcttcctgctttgcatttgcctctgccatctaggaaagacatgtaagagcatggacattttactttggagaaacagaaaaatcttggggcttccaattgacccatctatctgccaccatgttgccccaccaggagctcagctctgtggagttttccctttgctgagcaagcatgtggttgcattgggtggcccaggatgacaatgcacagcacagatgccatcatttccctttcccctctgaatggcagacatcagtaatcaatctggaatgtttttcttccaaatctgagtggaattttcaaatgatcagcacagccactgccaacagatatgatgtaaagtgaaacctggttgccatcttctgccatgctgaggagcagtccatccctgcccgagcatgtatcggcaacatgggcagcctgtgaccgggtctggggcgaggccaggggccatcaaaaacaggctgatcaccaaagtcagtgtcaccctggatgcccagcagccctgtcctgtgtcttgggcctgtgagtcaaagaaaaggtccttttcagggagtgacaagtagtaattaggctgagttgggtggagaggtttgtctcagcctctgctgttctcggaaactgctgttctccttggagcagccactgggagttggagtgtttatttgatttctgacttgctaagcctgtaatttacctgctggaatagacagagtccagctgcccaaaccgtgtcattaaaagcagatcctgcgcccgccccatccacaggcacagcccggcagagtggttccacctccccatgggcccaaggatgcgcctctctggagttcacgtgctgcacccccagggaggggcctggggaaagctggtccagcagcaggggtggaggctggggccacactgcgggacagcagcccctccacctggaccagggagggcctccatgtgcaagcgcagaggaagagaccctcccatgtacgcaaagggcagccccaggctgtctggaagttggagaattccctatcagcacagggatctcagctctggcctggaggtgaagagacctgccttgtaggtggcttccttatctgcgcctccattttctatctgcactttttgatctccaaacaaccttcagccaaagaatctgtctaccaactcctcatagtgagccagaagcagcctcataaccctgaatgtggggctctggtggctgtcacgaagcagagttggcacataacatggaacctggccaggcatggtggctcacacctataaccccagcactttgggaggccaaggcaggcagatcacctgaagtcaggagttcaagaccatcctggccaacacagtgaaaccccatctgtactaaaaatacaagattacctgggcatggtggtgcatgcctataatcccagctactcaggaggctgaggcagaattgcttgaacctgggaggtggaggttgcagtgagcagagatcacaacattgcacttcagcctggtgacatgagcaaaactgttgtctcaacaaaatgaaattatggaacctgtttgccatcctagtatttacttaattgttccttcttaacatcaaagatggtcttctaggcaattgtaaattttaaattagccagttattttgacaattaattttttactccacctgtatctttagtgcccagccaatgatctggcatagttaggggtgcaccaagaatgtctgtaaactacctgaaggtttgtagatatggagtacaccttacccattaatcaagctgtgcatagcaggaaccaatacgagccgtgatcctcctggttcatacagaacaatggaaaaacataaggctttgtctacctagttggccatcagactttcagcaacttttatcatccagatagtcaccaaatgaaataaaatagaaaaatcccttgagcaatgaaacaattgtgaatgaacacaaagtccatgaatttaatccttatccgtttgctgagccaagcatgtgcatctgcagtgggtggcccaggctggcagcacagataccaccatttcccttttctttgctcagggcatggcctgtttatctcgttgcaccagatgagggttggaaggatgatggtggtggttgtttcagatctactgacagcaatgagaaatcaatgacagttgacaggaagagaggacgcatacaacaggcaaaagaggaatgcccagcagtcttggtccttgcggtgcaatactggccttgaggccaagtcagcaggggattcgtagtcactaacttctaactgaggcagggaagtaacatgttctggaaaaggtccaaagaaacaggaatagaggcagtgtagcaagaggcagatttttggtgccaaatagatttgaatcctggttctgcttcttcctttgtagagtatgatattggttctttcctcccaaagctattataaagactaaatatgtacacaaatctttgggatgtctgacatataaatgcttaacaataggtatttgctggtattattacaaatgaatttgcttatttttgagccacttctatgtctgtccattaaaccaaaatgtgttctgca

SEQ ID NO: 111779 - DNA, 1548 bp, Homo sapiens
  Payload ID: 1900
  Gene Symbol: BMP8B
  Gene Name: bone morphogenetic protein 8b
  Uniprot ID: P34820
  ENST ID: ENST00000397360
  CDS Start-End: 365-1414
cgcaccaagcgggtggctgcaggagctcgcccatcgcccctgcgctgctcggaccgcggccacagccggactggcgggtacggcggcgacagacggattggccgagagtcccagtccgcagagtagccccggcctcgaggcggtggcgtccgcgtcctctcgtccaggagccaggacaggtgtcgcgcggcgggcgctccagggaccgcgctgaggccgcggtcgccgcccgtcccgccccgccccgccgcccgccgcccgccgagcccagcctccttgccgtcggggcgtccccaggccctgggtcggccgcggagccgatgcgcgcccgctgagcgccccagctgagcgcccccggcctgccatgaccgcgctccccggcccgctctggctcctgggcctggcgctatgcgcgctgggcgggggcggccccggcctgcgacccccgcccggctgtccccagcgacgtctgggcgcgcgcgagcgccgggacgtgcagcgcgagatcctggcggtgctcgggctgcctgggcggccccggccccgcgcgccacccgccgcctcccggctgcccgcgtccgcgccgctcttcatgctggacctgtaccacgccatggccggcgacgacgacgaggacggcgcgcccgcggagcggcgcctgggccgcgccgacctggtcatgagcttcgttaacatggtggagcgagaccgtgccctgggccaccaggagccccattggaaggagttccgctttgacctgacccagatcccggctggggaggcggtcacagctgcggagttccggatttacaaggtgcccagcatccacctgctcaacaggaccctccacgtcagcatgttccaggtggtccaggagcagtccaacagggagtctgacttgttctttttggatcttcagacgctccgagctggagacgagggctggctggtgctggatgtcacagcagccagtgactgctggttgctgaagcgtcacaaggacctgggactccgcctctatgtggagactgaggacggagagacgtggactggctggggctggaccaaggactccaggcttcagatgtggaaactgaggctcagcaggaccccttgggtcctcagcctccacgctcctggacctgcccaggccccggcagagagaccgctgctgtgtctgctgcagggccactgcccggccagtccgagtcccatccgcacccctcgggcagtgaggccactgaggaggaggcagccgaagaaaagcaacgagctgccgcaggccaaccgactcccagggatctttgatgacgtccacggctcccacggccggcaggtctgccgtcggcacgagctctacgtcagcttccaggacctcggctggctggtaattgctgactcttcttgtttctgaaatgacaatcaccacctgtagatcagaagtgaatctgcagggaggacatagaatcatggtgacttcaattttcttatgtatttttttcttctgtgttttccaagttttctaaagtgagaatatggtgagaaagg

SEQ ID NO: 111780 - DNA, 11255 bp, Homo sapiens
  Payload ID: 1901
  Gene Symbol: BMPR1A
  Gene Name: bone morphogenetic protein receptor, type IA
  Uniprot ID: P36894
  ENST ID: ENST00000372037
  CDS Start-End: 538-2136
agagattggaatccgcctgccgggcttggcgaaggagaagggaggaggcaggagcgaggagggaggagggccaagggcgggcaggaaggcttaggctcggcgcgtccgtccgcgcgcggcgaagatcgcacggcccgatcgaggggcgaccgggtcggggccgctgcacgccaagggcgaaggccgattcgggccccacttcgccccggcggctcgccgcgcccacccgctccgcgccgagggctggaggatgcgttccctggggtccggacttatgaaaatatgcatcagtttaatactgtcttggaattcatgagatggaagcataggtcaaagctgtttggagaaaatcagaagtacagttttatctagccacatcttggaggagtcgtaagaaagcagtgggagttgaagtcattgtcaagtgcttgcgatcttttacaagaaaatctcactgaatgatagtcatttaaattggtgaagtagcaagaccaattattaaaggtgacagtacacaggaaacattacaattgaacaatgcctcagctatacatttacatcagattattgggagcctatttgttcatcatttctcgtgttcaaggacagaatctggatagtatgcttcatggcactgggatgaaatcagactccgaccagaaaaagtcagaaaatggagtaaccttagcaccagaggataccttgccttttttaaagtgctattgctcagggcactgtccagatgatgctattaataacacatgcataactaatggacattgctttgccatcatagaagaagatgaccagggagaaaccacattagcttcagggtgtatgaaatatgaaggatctgattttcagtgcaaagattctccaaaagcccagctacgccggacaatagaatgttgtcggaccaatttatgtaaccagtatttgcaacccacactgccccctgttgtcataggtccgttttttgatggcagcattcgatggctggttttgctcatttctatggctgtctgcataattgctatgatcatcttctccagctgcttttgttacaaacattattgcaagagcatctcaagcagacgtcgttacaatcgtgatttggaacaggatgaagcatttattccagttggagaatcactaaaagaccttattgaccagtcacaaagttctggtagtgggtctggactacctttattggttcagcgaactattgccaaacagattcagatggtccggcaagttggtaaaggccgatatggagaagtatggatgggcaaatggcgtggcgaaaaagtggcggtgaaagtattctttaccactgaagaagccagctggtttcgagaaacagaaatctaccaaactgtgctaatgcgccatgaaaacatacttggtttcatagcggcagacattaaaggtacaggttcctggactcagctctatttgattactgattaccatgaaaatggatctctctatgacttcctgaaatgtgctacactggacaccagagccctgcttaaattggcttattcagctgcctgtggtctgtgccacctgcacacagaaatttatggcacccaaggaaagcccgcaattgctcatcgagacctaaagagcaaaaacatcctcatcaagaaaaatgggagttgctgcattgctgacctgggccttgctgttaaattcaacagtgacacaaatgaagttgatgtgcccttgaataccagggtgggcaccaaacgctacatggctcccgaagtgctggacgaaagcctgaacaaaaaccacttccagccctacatcatggctgacatctacagcttcggcctaatcatttgggagatggctcgtcgttgtatcacaggagggatcgtggaagaataccaattgccatattacaacatggtaccgagtgatccgtcatacgaagatatgcgtgaggttgtgtgtgtcaaacgtttgcggccaattgtgtctaatcggtggaacagtgatgaatgtctacgagcagttttgaagctaatgtcagaatgctgggcccacaatccagcctccagactcacagcattgagaattaagaagacgcttgccaagatggttgaatcccaagatgtaaaaatctgatggttaaaccatcggaggagaaactctagactgcaagaactgtttttacccatggcatgggtggaattagagtggaataaggatgttaacttggttctcagactctttcttcactacgtgttcacaggctgctaatattaaacctttcagtactcttattaggatacaagctgggaacttctaaacacttcattctttatatatggacagctttattttaaatgtggtttttgatgcctttttttaagtgggtttttatgaactgcatcaagacttcaatcctgattagtgtctccagtcaagctctgggtactgaattgcctgttcataaaacggtgctttctgtgaaagccttaagaagataaatgagcgcagcagagatggagaaatagactttgccttttacctgagactttcagttcgtttgtattctacctttgtaaaacagcctatagatgatgatgtgtttgggatactgcttattttatgatagtttgtcctgtgtccttagtgatgtgtgtgtgtctccatgcacatgcacgccgggattcctctgctgccatttgaattagaagaaaataatttatatgcatgcacaggaagatattggtggccggtggttttgtgctttaaaaatgcaatatctgaccaagattcgccaatctcatacaagccatttactttgcaagtgagatagcttccccaccagctttattttttaacatgaaagctgatgccaaggccaaaagaagtttaaagcatctgtaaatttggactgttttccttcaaccaccattttttttgtggttattatttttgtcacggaaagcatcctctccaaagttggagcttctattgccatgaaccatgcttacaaagaaagcacttcttattgaagtgaattcctgcatttgatagcaatgtaagtgcctataaccatgttctatattctttattctcagtaacttttaaaagggaagttatttatattttgtgtataatgtgctttatttgcaaatcacccactcctttacaaccatactttatatatgtacatacattcatactgtagaaaccagctcatgtgtacctcatatcccatccttaagagaagaaatgttataaagtagaactaaatataaattttcagaattaatgcattcaaagtaatatatcaaatccaggactttgttaacttcaggtaaaaacttcattagggtaatatcatctcaattttttcaaatgaaaggattctctaattagaaatttatatgtcagagctgttataaatttatcaactgtcaaatatgttctggacagctaaatcatttgagatttttggttttttgatttctattccctaacttgtgaagacaatgaaaaatcaggcagaaatatttagtatctagtcagtatctgtagctacactgtataactgttcttcaataaaatggttcatattttatagatgccttgttatctcaagaaatctgatttacataaacttatacttctttaatgctttttaaatatttattctgagcaaacaattcatgagtacatcaagtgagatagttttatttgattataacataaaataaatgtgattatatcacatcatcatcaaaaaggtttaaattaaatgggaggaaatcagcatatgtccacccattaccaaaatttgactatcatttaaggttaaaacttacaaatttgtctgcacatcaaatttcacaaatttgaaaattgccttaaccattttgattaataagtttcatctgccataattaaagtctgaagtgttcatcaagataagtaaatttgcatatggataatacccaataacttgttttttcagaatttttcaccatatgtatactgagaaatacaaatattttaatctgcgttgccgtatgatatgattgcacttagaacacccaatttacttaaatcttggtttacttttgacttgataccataatctttaaaatcatttgtcatctttttttttttttttttgagacggagtctcgctctgtcgcccaggctggactgcggactgcagtggcgcaatctcggctcactgcaagctccgcttcccgggttcacgccattctcctgcctcagcctcccgagtagctgggactacaggcgcccgccaccgcgcccggctaattttttgtatttttagtagagacggggtttcaccttgttagccaggatggtctcaatctcctgacctcatgatccacctgcctcggcctcccaaagttcatttgtcatcttaataaaaatataaagacaggcaaagtttattggaaatgttcaaatggtgtgtggaagcaaaaaattacagccagtatatgagaccactattatggttttttaaaattaacttggtctagtaaaagtgatatcaagagttaatcttagaaacttgctcagtaaaaacattttctagtataacatgttctttaaaaagcaaatgctgccgtctttggaatcttaatctaaaaatgtggccgggcgcggtggctcacgcctgtaatcccaacactttgggaggctgaggcgggtggatcacaaggtcaggagttcaagaccagcctggccaacatggtgaaaccccatctctactaaaaataaaaaactcagccaggcgtggtggcgggtgcctgtaatcccagctactcgggaggctgaagcaggagaattgcttaaaatcagaaggtggaggttgcagtgagctgagatcgtgtcactgcactccagcctgggcaaaagagcgaaactccatctcaaataaacaaacaaataaataacaaaaaacaaaaatgttgcattaaacttagttcttgtctctcctttccactcttattcttaaatctgaagctcatcgactaagtgaaatatttaaagaatatgataggccagcaagaagaagtattatgtagtaccatagttagtaaattcgtaaaaccttggaagccattatttggtcccacttgcaatttagtgtttttgaagtgtgtagcttcattcagatagctctttaaataattaaaatataaaagcaaacaacccaaactacctgactataaacaggaaaagttaaccctcaaagagagttcttgtgaattctctttatgctggcaaatagctctaggattaaaggcacattagggtttccttcagtttgtttattctaagcttttactgtgctttttactgaacaagtttctgatgtataaaacttgcatctgatttctttggaaatattttcacaaaagttattttaatcagtatttttacattgcctttccagtgtccagaagtgtttctaaacttagaaagtgacctatagttttttaaaattatgttttcctagaacgtgccaaattttgatttactctaacaatcagtacttttcttcagatgctttgttctgtttagaacaaaaatgcactatagtttttaaagaatcatgcatctttgggttggcccaggatcaaatttgatattgaataatttattccagggcagctttcataaacatacttcatagatgttgttttgaaatgtttctaaatatctaaaatcatttcaacagcagaaatgatttttattttaacaaaagattatgatagcccttgtagtgtttaaaagtggtcatatttattactgactttgagtcaggtgttaaaatagcagtgccacagctcgtctcttgccttagtgtgctgctgtgagagtcacagtggaaactgcagggaggaggtgtgttcctaagaaccaaaatccagcacagcatcctgtgaagccacgtgtaatgatggtcccataaggaaagtatgtgaatatggctcttgtaaaggattaactattgtaattttagcttatgctctgtattctgttttctatggaattatttaagcccttttagtgacctttgtcctggcccatttaaaaactaaaatgtagtatatattgtataaaatggaaatatcattattgcttcattaggggaaactgtacataggcattgaaagaagggtaaaagcaagcagttttatcaggcagttgtaaaacaccaaaaatatagattcgtctttgacgtgtaacacactaaatgtattttgtacagcatctggtttaaaaggtgccttaagagtttaccattacttgctttgttctatatacagattatgtccaatgtatcattttgaagtaaataaccttattttagtatactttagtgatgtgttttgtgatgctacactcagacggtattgtgcatcagaagtcatctgttgagatttttgtaatgattaagttagtgtatatacatatgttcctgagatgtacacttcaactaccagaaacccagtatggagcacaggtaggtacacgcttgccctgtggagatagagaacttctaaacctatcacggtgcaggggtttttcctttaaaaaacaagacaaaacattgttttctttttcctttttttttttttttttttgagacggagttttgctcttgttgcccaggctggagtgcaatggcacgatctcagctcactgcaacctttgcctcctgggttcaagcaattctcctgcctcagcctcccgaatagctggaactacaggtgtttgccaccatgcctggctaattttttgtatttttaatagagacagggtttcaccatgttggccaggctggtctcgaactcctgacctcaggtggcccacttgccttggcctcccaaagtgctgagcttacaggcatgagccaccatgcctggccaaaacattgttttctgattatggaaatgtactcatggcagaaaatttgggaaacaacagcaaataataaagcaaataaaaatcactcaaaattctattgccagacattatcactatatacatttgagtgtttcttttcaatctttttttttgagagagtcttgctctgtcactcagggtggagtgcagtagcgcgatctcggctcagtgcaacctctgccccctgggttcaagtgattctcctgcctcagcctcccaagtagccgggattacaggtgtgcaccaccacgcccggctaatttttgtattttagtagagatgcggtttcaccatgttggcccaggctggtctcgaactcctgacctcaagtgatctgcctacctcagcctcccaaagtgctgggattacaggagtgagccactgcacccggccttattcttttttatgttgcattttttgtaatattaggatcctagtatgccattaaatagccattgagaactttttttttaatgactgcacaatatttgactaagaagatggagtaatttctgtgctcaatcccctattgaatatttggattattttcattgttttgaaaaatagatattaagcatccttatacataaatctttattttcttatattacatttctgaaaatgagactagtggatatgaacttttaaaagatcctttaagatggaaaaactaaggttcttggaaaacattgccatattgctactcacaaagcttttcattttcattcctgctagcagttcatgagcttagagcgatgggatgcatttacctggccttaagatgctcctgctgcaatgggaagtgaagccttggatagctttcctcctcctgtgcaatactttcttgtcattttcccacctgcactgagtcccaccgccagtcagggctgttttcaggtgtatgtgaattcatcccagcagtgtgccttctgctgccttttcctagggaactgaacatgttaaatcacagacgcgatgtggcactgattattgttcctcaaaagaaatgcgtgtctgaagatagcctcttacagattcctcacgggagtctctgttcagtgtcattgtaagtttctcagaataatcgcaggcgctctgatgcagcctggtaaagaagactcagtgatttctgggaactgcaaatgcttgccagctttccttctgtctgtggaaacactgaataaatgtattcatttctcctttccagcaatctgttagtctcactgctccattccaaggtttctttaatattattaacagagcagacattaagaaacagaattgtctaatccttgttcttccaaaataggtttaatccttgtagatagtttcaagcagacagtaagtcagttactaagttttcacttggagaaacatttgctgatagtagtagcatattgaccatttctgacatgtcatccttatatcaagttaggtgcacgctcctacacagccttggctcagcgcttggagcatacagtcttgactgggtggacataaaccgctgaaagtggccagcagtgagcagaggccacctactatcagcggcactgctgcaggcatggagacttaaatgtgtgagtgctggtataagcagaagtgggagagtcacctcgatgctgggatccagatggcggcttatttcaagtgcagtggcacatacaaaaaatatttttggaagggagcaaggactagggctgaaaggttcattcataatctttttttctttttttttttaggtggagtctcgctctgtcacccaggctggagcgcaatggggtgatcccagctcactgcaacctccacctcccgggttaaagcaattctcctgcctcagccacctgagaagttgggattacaggcgtgcaccaccacactcagctaattttgtatttttagtagagacggggtttaccatgtgggccaggctggtctcgaactcccaacctcaggtgatctgcccaccttggccttccagagtgctgggattataggcgtgagccactgcgcccagcccataatctccttttgacataggaattgttaattcacatattccatcaacctattgctcctctgaatcttagcagcttcttggtctttgttcaaatgaaatctaagtcaattccatatctctcaatgtcgctacatccacctcagtgcttatatcctaattttgtcttttttagagacagtcttgcactgtcacccaggctagtgtgcagtggctgttcacaggcataatcataacgcactgtagcctcaaactcctgatctcaagccatcctcccacctcagcctcctgagtagctgggaccatgccaccatgcctggctcacattctaaacattatgcaggaagctcaaagtgaaaatcaatatggaatgtttatattgaaaatatttttggctgggtgcagtggctaatgcctctaatcccagcactctgggaggctgaggcgggcagaccacctgaggtcaggagcagcctggccaacatatagtgaaaccctgtctctaaggtacaaaaattagctgggtgtggtggtactcgcctgtagtcccagctccttgggaagctgaggcaggagaatcacttgaacccaggaggcggaggttgcagtgagctgagatcgcaccactgcattccaggctgggcaacagagcaagactccgtctctcaaaaaaaaaaaaagaaaaaaaaatatatatatatatatacacacacacacacacacatatatatatatatattcaagcaatgtgaagaaaatattgggcccccttgtttttctttaatggaagagccatttttaaaagccagtttagaatccagatgatgacatctgttgctctactgtatgactgaaatgcaggtcagtgttgaaaaacataaaaaattggaagtctccactgaaagacctacactgctgtgggagggattttaatcaagacatttcaaaagcaatttttattacttgatcctgtcctcatacttggctaggagttcagctggagatagaatctaactctgaagatgatactccatgatcttctagcatcccttgtcaccagtgagaagtctgatgtggatctaataagtgacatgttatacaggttaacttattttcaagaaatagaattttctttttattattgatgttggaagttgaaactggccatatctaaatatattcattctgtttcttagtactaatgggatcttttcttagacctgggaaattttctcccattatttcttttgtttcttcccttttttctttcttttccttttctctttctagaactttctagaacaaatctcaggtcccctagatgtttcttccataattgttactatgcttctcatatgtttcatcctaccttctacttttgtcagcccatctgagtttatttcaacagccaaatgttttattttgaaatgattccaggcttccattaaagtttcatcaatagtataaggactgccatttacccttcacccagattcataaactgctaacattgcacaattgctttgtcattctgtgtgtgtgtgtacaggaatcacagagactcatcttgtaatgtttgtaatgtccatgtatcgtgtatgcacacatttttttctgacctattagaagcaaattacagagctaatacccctttatccctaaatacttcagggatgttctattacttaaccaattatgtacaattatcagaaccaggaaagttcacattgatacaatagcaatgaccaacaataccataatctatagaccttactgaagttttgctaattgttattttggtgtggttgggttttttgtttgtttgagatagggtctcactctgtcacccaggctggagtacagtggcacagtcatagctcacttcaacctcaaactttgggcctcaagcgatcctcccgcctcagcctcccaaagggctatgattacaggcatgagccaccatgctggcctcatttcccctttccttctcaaaaggattctggctttccctactgcattcatccacgtccactacccgctccaagagagctgagtaattgtcaagccaggtttggggagctttcttgatggaggggatggaaggagggtggtgctcaggctacagcagggagagcttttctgtttttgagctaaagacataacagggtgcagaggctgagaaaaggagagttctaagcaacatgtcacgagctatgtagcctcttcacactgcttctgaaataaaatctaacagtaggagtga

SEQ ID NO: 111781 - DNA, 421 bp, Homo sapiens
  Payload ID: 1901
  Gene Symbol: BMPR1A
  Gene Name: bone morphogenetic protein receptor, type IA
  ENST ID: ENST00000480152
  CDS Start-End: 299-421
agaaaatcagaagtacagttttatctagccacatcttggaggatattacttttttggtccctattaaactatgtggcagcaagtcacaaaggaggaatcagaaagtaacctgctccccacccttggtgtgtagtccagttagcaaggagtcgtaagaaagcagtgggagttgaagtcattgtcaagtgcttgcgatcttttacaagaaaatctcactgaatgatagtcatttaaattggtgaagtagcaagaccaattattaaaggtgacagtacacaggaaacattacaattgaacaatgcctcagctatacatttacatcagattattgggagcctatttgttcatcatttctcgtgttcaaggacagaatctggatagtatgcttcatggcactgggatgaaatcagactccgaccag

SEQ ID NO: 111782 - DNA, 1807 bp, Homo sapiens
  Payload ID: 1902
  Gene Symbol: BMPR1B
  Gene Name: bone morphogenetic protein receptor, type IB
  Uniprot ID: O00238
  ENST ID: ENST00000264568
  CDS Start-End: 155-1663
atatcacaggtgcaggattagtgctgcctacggtgctgggctttttagtggaaacccctagcaattctgtgcctcctcctcatgtctctcatcctagggagcctggcaaccatatatcaagcgtacagaaatcaaaacaaacttccttgataacatgcttttgcgaagtgcaggaaaattaaatgtgggcaccaagaaagaggatggtgagagtacagcccccaccccccgtccaaaggtcttgcgttgtaaatgccaccaccattgtccagaagactcagtcaacaatatttgcagcacagacggatattgtttcacgatgatagaagaggatgactctgggttgcctgtggtcacttctggttgcctaggactagaaggctcagattttcagtgtcgggacactcccattcctcatcaaagaagatcaattgaatgctgcacagaaaggaacgaatgtaataaagacctacaccctacactgcctccattgaaaaacagagattttgttgatggacctatacaccacagggctttacttatatctgtgactgtctgtagtttgctcttggtccttatcatattattttgttacttccggtataaaagacaagaaaccagacctcgatacagcattgggttagaacaggatgaaacttacattcctcctggagaatccctgagagacttaattgagcagtctcagagctcaggaagtggatcaggcctccctctgctggtccaaaggactatagctaagcagattcagatggtgaaacagattggaaaaggtcgctatggggaagtttggatgggaaagtggcgtggcgaaaaggtagctgtgaaagtgttcttcaccacagaggaagccagctggttcagagagacagaaatatatcagacagtgttgatgaggcatgaaaacattttgggtttcattgctgcagatatcaaagggacagggtcctggacccagttgtacctaatcacagactatcatgaaaatggttccctttatgattatctgaagtccaccaccctagacgctaaatcaatgctgaagttagcctactcttctgtcagtggcttatgtcatttacacacagaaatctttagtactcaaggcaaaccagcaattgcccatcgagatctgaaaagtaaaaacattctggtgaagaaaaatggaacttgctgtattgctgacctgggcctggctgttaaatttattagtgatacaaatgaagttgacataccacctaacactcgagttggcaccaaacgctatatgcctccagaagtgttggacgagagcttgaacagaaatcacttccagtcttacatcatggctgacatgtatagttttggcctcatcctttgggaggttgctaggagatgtgtatcaggaggtatagtggaagaataccagcttccttatcatgacctagtgcccagtgacccctcttatgaggacatgagggagattgtgtgcatcaagaagttacgcccctcattcccaaaccggtggagcagtgatgagtgtctaaggcagatgggaaaactcatgacagaatgctgggctcacaatcctgcatcaaggctgacagccctgcgggttaagaaaacacttgccaaaatgtcagagtcccaggacattaaactctgataggagaggaaaagtaagcatctctgcagaaagccaacaggtactcttctgtttgtgggcagagcaaaagacatcaaataagcatccacagtacaagccttgaacatcgtcctgcttcccagtgggttcagacctcacctctca

SEQ ID NO: 111783 - DNA, 1922 bp, Homo sapiens
  Payload ID: 1902
  Gene Symbol: BMPR1B
  Gene Name: bone morphogenetic protein receptor, type IB
  Uniprot ID: O00238
  ENST ID: ENST00000394931
  CDS Start-End: 71-1579
gactggggtagtctaccccacagatgcctaactctcactatttcttctttcagcaaacttccttgataacatgcttttgcgaagtgcaggaaaattaaatgtgggcaccaagaaagaggatggtgagagtacagcccccaccccccgtccaaaggtcttgcgttgtaaatgccaccaccattgtccagaagactcagtcaacaatatttgcagcacagacggatattgtttcacgatgatagaagaggatgactctgggttgcctgtggtcacttctggttgcctaggactagaaggctcagattttcagtgtcgggacactcccattcctcatcaaagaagatcaattgaatgctgcacagaaaggaacgaatgtaataaagacctacaccctacactgcctccattgaaaaacagagattttgttgatggacctatacaccacagggctttacttatatctgtgactgtctgtagtttgctcttggtccttatcatattattttgttacttccggtataaaagacaagaaaccagacctcgatacagcattgggttagaacaggatgaaacttacattcctcctggagaatccctgagagacttaattgagcagtctcagagctcaggaagtggatcaggcctccctctgctggtccaaaggactatagctaagcagattcagatggtgaaacagattggaaaaggtcgctatggggaagtttggatgggaaagtggcgtggcgaaaaggtagctgtgaaagtgttcttcaccacagaggaagccagctggttcagagagacagaaatatatcagacagtgttgatgaggcatgaaaacattttgggtttcattgctgcagatatcaaagggacagggtcctggacccagttgtacctaatcacagactatcatgaaaatggttccctttatgattatctgaagtccaccaccctagacgctaaatcaatgctgaagttagcctactcttctgtcagtggcttatgtcatttacacacagaaatctttagtactcaaggcaaaccagcaattgcccatcgagatctgaaaagtaaaaacattctggtgaagaaaaatggaacttgctgtattgctgacctgggcctggctgttaaatttattagtgatacaaatgaagttgacataccacctaacactcgagttggcaccaaacgctatatgcctccagaagtgttggacgagagcttgaacagaaatcacttccagtcttacatcatggctgacatgtatagttttggcctcatcctttgggaggttgctaggagatgtgtatcaggaggtatagtggaagaataccagcttccttatcatgacctagtgcccagtgacccctcttatgaggacatgagggagattgtgtgcatcaagaagttacgcccctcattcccaaaccggtggagcagtgatgagtgtctaaggcagatgggaaaactcatgacagaatgctgggctcacaatcctgcatcaaggctgacagccctgcgggttaagaaaacacttgccaaaatgtcagagtcccaggacattaaactctgataggagaggaaaagtaagcatctctgcagaaagccaacaggtactcttctgtttgtgggcagagcaaaagacatcaaataagcatccacagtacaagccttgaacatcgtcctgcttcccagtgggttcagacctcacctctcagggagcgacctgggcaaagacagagaagctcccagaaggagagattgatccatgtctgtttgtaggacggagaaaccgcttgggtaacttgttcaagatatgatgcatgttgctttctaagaaagccctgtattttgtgattgcctttttttttttttaagatgctttcattttgccaaaataaaacagataatgtgga

SEQ ID NO: 111784 - DNA, 5388 bp, Homo sapiens
  Payload ID: 1902
  Gene Symbol: BMPR1B
  Gene Name: bone morphogenetic protein receptor, type IB
  Uniprot ID: O00238
  ENST ID: ENST00000440890
  CDS Start-End: 22-1620
attgactgctctgctgctgcaatgggttggctggaagaactaaactggcagcttcacattttcttgctcattcttctctctatgcacacaagggcaaacttccttgataacatgcttttgcgaagtgcaggaaaattaaatgtgggcaccaagaaagaggatggtgagagtacagcccccaccccccgtccaaaggtcttgcgttgtaaatgccaccaccattgtccagaagactcagtcaacaatatttgcagcacagacggatattgtttcacgatgatagaagaggatgactctgggttgcctgtggtcacttctggttgcctaggactagaaggctcagattttcagtgtcgggacactcccattcctcatcaaagaagatcaattgaatgctgcacagaaaggaacgaatgtaataaagacctacaccctacactgcctccattgaaaaacagagattttgttgatggacctatacaccacagggctttacttatatctgtgactgtctgtagtttgctcttggtccttatcatattattttgttacttccggtataaaagacaagaaaccagacctcgatacagcattgggttagaacaggatgaaacttacattcctcctggagaatccctgagagacttaattgagcagtctcagagctcaggaagtggatcaggcctccctctgctggtccaaaggactatagctaagcagattcagatggtgaaacagattggaaaaggtcgctatggggaagtttggatgggaaagtggcgtggcgaaaaggtagctgtgaaagtgttcttcaccacagaggaagccagctggttcagagagacagaaatatatcagacagtgttgatgaggcatgaaaacattttgggtttcattgctgcagatatcaaagggacagggtcctggacccagttgtacctaatcacagactatcatgaaaatggttccctttatgattatctgaagtccaccaccctagacgctaaatcaatgctgaagttagcctactcttctgtcagtggcttatgtcatttacacacagaaatctttagtactcaaggcaaaccagcaattgcccatcgagatctgaaaagtaaaaacattctggtgaagaaaaatggaacttgctgtattgctgacctgggcctggctgttaaatttattagtgatacaaatgaagttgacataccacctaacactcgagttggcaccaaacgctatatgcctccagaagtgttggacgagagcttgaacagaaatcacttccagtcttacatcatggctgacatgtatagttttggcctcatcctttgggaggttgctaggagatgtgtatcaggaggtatagtggaagaataccagcttccttatcatgacctagtgcccagtgacccctcttatgaggacatgagggagattgtgtgcatcaagaagttacgcccctcattcccaaaccggtggagcagtgatgagtgtctaaggcagatgggaaaactcatgacagaatgctgggctcacaatcctgcatcaaggctgacagccctgcgggttaagaaaacacttgccaaaatgtcagagtcccaggacattaaactctgataggagaggaaaagtaagcatctctgcagaaagccaacaggtactcttctgtttgtgggcagagcaaaagacatcaaataagcatccacagtacaagccttgaacatcgtcctgcttcccagtgggttcagacctcacctctcagggagcgacctgggcaaagacagagaagctcccagaaggagagattgatccatgtctgtttgtaggacggagaaaccgcttgggtaacttgttcaagatatgatgcatgttgctttctaagaaagccctgtattttgtgattgcctttttttttttttaagatgctttcattttgccaaaataaaacagataatgtggatggtttaagggttatagtattatagtttaaataataacaacaaaattcttcccaggaactctgctggaaggtaaattaaaatacttgtttttccattggtaaaatattgttgcactctgtgaaccaaaagacagtctaagttggaggacatagaacggaactcatcttaaacatactccccaccccgtcttggcctcctcagaccactttggccatccctgcatttggggccgctatggtaatgtgaatgcactgggtacaaacaccgcctgtctaggaccacatttggaattcctgcaggtggccttttgcagcttcaggcaatatggaacaaatgaaggtttatgtgactctaatagaagtaattgttgataggtgttcttcagatccacttctgtttctgattgagttaggcatctctttcatggtaaaacccttttcattaaacacaaagaaagcttttttttttttttttttttttttttttttttaatgtgcagaggattgacctgtgcatgcttttgatctctcattcaaaggatcaatattaaataaaattgtcatgagctgtgttgaagacagggtgctttcaaatagaggtaatttgctcttgtgttgtaagaggaacatgtcaacaaagataggaaatgagggtgatcgtgcagatggcttgtatcttatatatgcaaaggagccaatctcagaagcacaaagaaaaaagtgtgcataccttattttgtacagataaagatgatgtctttttgttattgtctgtctgttttgtatgtgtctgagataagggatagagaggaaacatccgtcaggctaatttaactacattttattttaaaaatagagaaacataacctctagatgggacagcagaggacagttagtagaggccacaaactgttatgggctgctgtgttttgttctaaaatcaatatggttggagcatgtatatcttaggtgatcatttcacatcttaggaatgcctactcattttattttattctagtgatgctcaattcactatttaatttattatattttctcttctgtggcacttatacaaaatatctcttcacctacttagttctacagggttttaactttggagcaacatgaataaaatcatcgagaaggccaatattgtttagcaacatgaatacaatacagtttaaagttgtacacatcctgctcaactttattcatatacatttcctttctgtggttttcttttgcttcttagaaattctgttagtggttagtaaagaatttgaaagtactttctccttgctgtttttttttttttttaagacattcctcccagaatactccagggggcagtgttttataacacattttccccactgggtgattgaaggatggaggatttttgaaaatttgacagctacatgaaacatgagaaaacattttcctcacttctgaagtcggtttgcagctggtaacttgttcatccagaaaacattctaaagcaatgagactttgtgagctgtgcttacagtttgggagaatcatgaagattctttctatattttgcatttacttcccagtgcttcatagctgcattttgtttgtaactaagacagaagaatttcgtaatccttgaaattgaaaaaaaaaaaattgtgtttttaaagagtgaaaacagttagaaaacaagtagaactgtaatcagaacgctgcttcaattgatattaaaaataacctcaataataatgtaaaggttcctttctcttgtgtcagttatattcttagggatagcctagaaggaatatatggttagaactaagtgtgactaatcatctgagccttgaagagaaacttcagtgcctctaaacagatcatctacaaaacaacaggtaaacatttatgccagttaagtgggtcatgtttttgtttcttgggtttttcctaaatttaagtgaggttgggcttaccttgtagataaaattatgttttctttttggtaaatacttgaacgtggataacgtcaaatcagaatattttgtgaggaggtgatgatttgaaattaagctagatttctagggaggtgttggttccaatgaaggatgggaagaaattaaaatagtcttcaaacttcttccttattatatttggttgctttggaaaagattggtcctatcctcaatctaatttattcactattaatattttaaaaacattcctgagatacttaaaaagacccacttagcgattatagttgctcaatgaaacaagaatttatttatgcatagatttttctctgtatcttaccaaaatccactttacttagataacactaaattgttcttaaagactactcatttcccaataatcctttatgatttcaaaatttctagtggctcagaagtgaattttattttatttgtctttcacttgaataaatgagaacccagaaattaataatgttgtttattgcttactgtcaggactatttcaaagactaagaagagtttcttctaacccctccctctcaaaggaatcctaaattattagttgttagataagttttgtatgctaagatattcaggtttatagtttatgtatgtgtgtatatatataaatatatatgtatatataaatattatgttcagtttggagtctggcacaactccattatgtggattagagagtaagatattatggatgataaagtactaaatgaaacataatatttatttataaaagtgtgtagattgttaaatcacaaaaagagtgctatgaccattatgtatgaggaaacaggcctttgacctcctggaaagcactgctcaaaagtcattagtgcccatttttgaattccccaaacagaaagcttcttagaaaacatgctgagattttatttacagggaattctttgacacatttcaattggtgtgtagtcaagtatagcaagtacttaataatgactgaatttcatgttcctacagtcatacatattcattagaagttttatgttgttggtctgatctgattcttctttgtttgtgggtggaacggcactgagagaagtatagttttttaaacttgaacatgttcagtagttacattgccttagaaaacccagacacatagcagtggaaatgaaagaaatggcatcagaagtgacttaatttagcaattgtgattcctcttgtaaaacaaaacaaaaaaacaatgccatattttttggagaaaagttggcaatataggggtttcgttgtctgtttcacaagaagactcatttgttcttttgggggaaccagtgccttacagattttgtatatactgtaattattcaggactagggaacaaacaattgtattgtatttgttacagattgtatatggctttgttttaacattcccctaaataaaatggcttcattctccccttgg

SEQ ID NO: 111785 - DNA, 731 bp, Homo sapiens
  Payload ID: 1902
  Gene Symbol: BMPR1B
  Gene Name: bone morphogenetic protein receptor, type IB
  ENST ID: ENST00000506363
  CDS Start-End: 357-731
gtctgagcagctgagaactttgccggagtattaccacggtgttcagtaacacagacctgtgccatgagcaagtaaagcactgagcaagtgtcagggtcaatatttatagaccactacgtagctgccttgcatagagagaaaacgggagagtaacatgcacacagagggcaaggaaagaaagactgcagtggagggaatgttaatttccaattttttctgaaaatgtattctttctaactgtcaggttcagacttctgctgattcataaccatttggctctgagctatgacaagagaggaaacaaaaagttaaacaagcaagcctgccataagtgagaagcaaacttccttgataacatgcttttgcgaagtgcaggaaaattaaatgtgggcaccaagaaagaggatggtgagagtacagcccccaccccccgtccaaaggtcttgcgttgtaaatgccaccaccattgtccagaagactcagtcaacaatatttgcagcacagacggatattgtttcacgatgatagaagaggatgactctgggttgcctgtggtcacttctggttgcctaggactagaaggctcagattttcagtgtcgggacactcccattcctcatcaaagaagatcaattgaatgctgcacagaaaggaacgaatgtaataaagacctacaccctacactgcctccattgaaaaacagagattttgttgatggacctatacaccac

SEQ ID NO: 111786 - DNA, 1764 bp, Homo sapiens
  Payload ID: 1902
  Gene Symbol: BMPR1B
  Gene Name: bone morphogenetic protein receptor, type IB
  Uniprot ID: O00238
  ENST ID: ENST00000509540
  CDS Start-End: 112-1620
attgactgctctgctgctgcaatgggttggctggaagaactaaactggcagcttcacattttcttgctcattcttctctctatgcacacaagggcaaacttccttgataacatgcttttgcgaagtgcaggaaaattaaatgtgggcaccaagaaagaggatggtgagagtacagcccccaccccccgtccaaaggtcttgcgttgtaaatgccaccaccattgtccagaagactcagtcaacaatatttgcagcacagacggatattgtttcacgatgatagaagaggatgactctgggttgcctgtggtcacttctggttgcctaggactagaaggctcagattttcagtgtcgggacactcccattcctcatcaaagaagatcaattgaatgctgcacagaaaggaacgaatgtaataaagacctacaccctacactgcctccattgaaaaacagagattttgttgatggacctatacaccacagggctttacttatatctgtgactgtctgtagtttgctcttggtccttatcatattattttgttacttccggtataaaagacaagaaaccagacctcgatacagcattgggttagaacaggatgaaacttacattcctcctggagaatccctgagagacttaattgagcagtctcagagctcaggaagtggatcaggcctccctctgctggtccaaaggactatagctaagcagattcagatggtgaaacagattggaaaaggtcgctatggggaagtttggatgggaaagtggcgtggcgaaaaggtagctgtgaaagtgttcttcaccacagaggaagccagctggttcagagagacagaaatatatcagacagtgttgatgaggcatgaaaacattttgggtttcattgctgcagatatcaaagggacagggtcctggacccagttgtacctaatcacagactatcatgaaaatggttccctttatgattatctgaagtccaccaccctagacgctaaatcaatgctgaagttagcctactcttctgtcagtggcttatgtcatttacacacagaaatctttagtactcaaggcaaaccagcaattgcccatcgagatctgaaaagtaaaaacattctggtgaagaaaaatggaacttgctgtattgctgacctgggcctggctgttaaatttattagtgatacaaatgaagttgacataccacctaacactcgagttggcaccaaacgctatatgcctccagaagtgttggacgagagcttgaacagaaatcacttccagtcttacatcatggctgacatgtatagttttggcctcatcctttgggaggttgctaggagatgtgtatcaggaggtatagtggaagaataccagcttccttatcatgacctagtgcccagtgacccctcttatgaggacatgagggagattgtgtgcatcaagaagttacgcccctcattcccaaaccggtggagcagtgatgagtgtctaaggcagatgggaaaactcatgacagaatgctgggctcacaatcctgcatcaaggctgacagccctgcgggttaagaaaacacttgccaaaatgtcagagtcccaggacattaaactctgataggagaggaaaagtaagcatctctgcagaaagccaacaggtactcttctgtttgtgggcagagcaaaagacatcaaataagcatccacagtacaagccttgaacatcgtcctgcttcccagtgggttcagacctcacctctca

SEQ ID NO: 111787 - DNA, 567 bp, Homo sapiens
  Payload ID: 1902
  Gene Symbol: BMPR1B
  Gene Name: bone morphogenetic protein receptor, type IB
  ENST ID: ENST00000502683
  CDS Start-End: 212-556
agctgagctgtattaggcaaccacagtctgggctgcatttcttaactgctgaataacatatcacaggtgcaggattagtgctgcctacggtgctgggctttttagtggaaacccctagcaattctgtgcctcctcctcatgtctctcatcctagggagcctggcaaccatatatcaagcgtacagaaatcaaaacaaacttccttgataacatgcttttgcgaagtgcaggaaaattaaatgtgggcaccaagaaagaggatggtgagagtacagcccccaccccccgtccaaaggtcttgcgttgtaaatgccaccaccattgtccagaagactcagtcaacaatatttgcagcacagacggatattgtttcacgatgatagaagaggatgactctgggttgcctgtggtcacttctggttgcctaggactagaaggctcagattttcagtgtcgggtaaggacactcccattcctcatcaaagaagatcaattgaatgctgcacagaaaggaacgaatgtaataaagacctacaccctacactgcctccattgaaaaacagaggt

SEQ ID NO: 111788 - DNA, 1679 bp, Homo sapiens
  Payload ID: 1902
  Gene Symbol: BMPR1B
  Gene Name: bone morphogenetic protein receptor, type IB
  Uniprot ID: O00238
  ENST ID: ENST00000512312
  CDS Start-End: 171-1679
gctaatgaggagggctgcctgctgggtaagaatgttgttggtggcagagccgttttgtgtactgctgttgagaatgccgggtacattcacaagacgtttcctgcgtgtggtaggaacagctctcaagcaccaatttcatattgtgtcctatcacaaacttccttgataacatgcttttgcgaagtgcaggaaaattaaatgtgggcaccaagaaagaggatggtgagagtacagcccccaccccccgtccaaaggtcttgcgttgtaaatgccaccaccattgtccagaagactcagtcaacaatatttgcagcacagacggatattgtttcacgatgatagaagaggatgactctgggttgcctgtggtcacttctggttgcctaggactagaaggctcagattttcagtgtcgggacactcccattcctcatcaaagaagatcaattgaatgctgcacagaaaggaacgaatgtaataaagacctacaccctacactgcctccattgaaaaacagagattttgttgatggacctatacaccacagggctttacttatatctgtgactgtctgtagtttgctcttggtccttatcatattattttgttacttccggtataaaagacaagaaaccagacctcgatacagcattgggttagaacaggatgaaacttacattcctcctggagaatccctgagagacttaattgagcagtctcagagctcaggaagtggatcaggcctccctctgctggtccaaaggactatagctaagcagattcagatggtgaaacagattggaaaaggtcgctatggggaagtttggatgggaaagtggcgtggcgaaaaggtagctgtgaaagtgttcttcaccacagaggaagccagctggttcagagagacagaaatatatcagacagtgttgatgaggcatgaaaacattttgggtttcattgctgcagatatcaaagggacagggtcctggacccagttgtacctaatcacagactatcatgaaaatggttccctttatgattatctgaagtccaccaccctagacgctaaatcaatgctgaagttagcctactcttctgtcagtggcttatgtcatttacacacagaaatctttagtactcaaggcaaaccagcaattgcccatcgagatctgaaaagtaaaaacattctggtgaagaaaaatggaacttgctgtattgctgacctgggcctggctgttaaatttattagtgatacaaatgaagttgacataccacctaacactcgagttggcaccaaacgctatatgcctccagaagtgttggacgagagcttgaacagaaatcacttccagtcttacatcatggctgacatgtatagttttggcctcatcctttgggaggttgctaggagatgtgtatcaggaggtatagtggaagaataccagcttccttatcatgacctagtgcccagtgacccctcttatgaggacatgagggagattgtgtgcatcaagaagttacgcccctcattcccaaaccggtggagcagtgatgagtgtctaaggcagatgggaaaactcatgacagaatgctgggctcacaatcctgcatcaaggctgacagccctgcgggttaagaaaacacttgccaaaatgtcagagtcccaggacattaaactctga

SEQ ID NO: 111789 - DNA, 5567 bp, Homo sapiens
  Payload ID: 1902
  Gene Symbol: BMPR1B
  Gene Name: bone morphogenetic protein receptor, type IB
  Uniprot ID: O00238
  ENST ID: ENST00000515059
  CDS Start-End: 284-1792
gcagccgggcgcggggcgcggagtcggcggggcctcgcgggacgccgggcagtgcggagaccgcggcgctgaggacgcgggagccgggagcgcagccgcggggtggagttcagcctactctttcttagatgtgaaaggaaaggaagatcatttcatgccttgttgataaaggttcagacttctgctgattcataaccatttggctctgagctatgacaagagaggaaacaaaaagttaaacaagcaagcctgccataagtgagaagcaaacttccttgataacatgcttttgcgaagtgcaggaaaattaaatgtgggcaccaagaaagaggatggtgagagtacagcccccaccccccgtccaaaggtcttgcgttgtaaatgccaccaccattgtccagaagactcagtcaacaatatttgcagcacagacggatattgtttcacgatgatagaagaggatgactctgggttgcctgtggtcacttctggttgcctaggactagaaggctcagattttcagtgtcgggacactcccattcctcatcaaagaagatcaattgaatgctgcacagaaaggaacgaatgtaataaagacctacaccctacactgcctccattgaaaaacagagattttgttgatggacctatacaccacagggctttacttatatctgtgactgtctgtagtttgctcttggtccttatcatattattttgttacttccggtataaaagacaagaaaccagacctcgatacagcattgggttagaacaggatgaaacttacattcctcctggagaatccctgagagacttaattgagcagtctcagagctcaggaagtggatcaggcctccctctgctggtccaaaggactatagctaagcagattcagatggtgaaacagattggaaaaggtcgctatggggaagtttggatgggaaagtggcgtggcgaaaaggtagctgtgaaagtgttcttcaccacagaggaagccagctggttcagagagacagaaatatatcagacagtgttgatgaggcatgaaaacattttgggtttcattgctgcagatatcaaagggacagggtcctggacccagttgtacctaatcacagactatcatgaaaatggttccctttatgattatctgaagtccaccaccctagacgctaaatcaatgctgaagttagcctactcttctgtcagtggcttatgtcatttacacacagaaatctttagtactcaaggcaaaccagcaattgcccatcgagatctgaaaagtaaaaacattctggtgaagaaaaatggaacttgctgtattgctgacctgggcctggctgttaaatttattagtgatacaaatgaagttgacataccacctaacactcgagttggcaccaaacgctatatgcctccagaagtgttggacgagagcttgaacagaaatcacttccagtcttacatcatggctgacatgtatagttttggcctcatcctttgggaggttgctaggagatgtgtatcaggaggtatagtggaagaataccagcttccttatcatgacctagtgcccagtgacccctcttatgaggacatgagggagattgtgtgcatcaagaagttacgcccctcattcccaaaccggtggagcagtgatgagtgtctaaggcagatgggaaaactcatgacagaatgctgggctcacaatcctgcatcaaggctgacagccctgcgggttaagaaaacacttgccaaaatgtcagagtcccaggacattaaactctgataggagaggaaaagtaagcatctctgcagaaagccaacaggtactcttctgtttgtgggcagagcaaaagacatcaaataagcatccacagtacaagccttgaacatcgtcctgcttcccagtgggttcagacctcacctctcagggagcgacctgggcaaagacagagaagctcccagaaggagagattgatccatgtctgtttgtaggacggagaaaccgcttgggtaacttgttcaagatatgatgcatgttgctttctaagaaagccctgtattttgtgattgcctttttttttttttaagatgctttcattttgccaaaataaaacagataatgtggatggtttaagggttatagtattatagtttaaataataacaacaaaattcttcccaggaactctgctggaaggtaaattaaaatacttgtttttccattggtaaaatattgttgcactctgtgaaccaaaagacagtctaagttggaggacatagaacggaactcatcttaaacatactccccaccccgtcttggcctcctcagaccactttggccatccctgcatttggggccgctatggtaatgtgaatgcactgggtacaaacaccgcctgtctaggaccacatttggaattcctgcaggtggccttttgcagcttcaggcaatatggaacaaatgaaggtttatgtgactctaatagaagtaattgttgataggtgttcttcagatccacttctgtttctgattgagttaggcatctctttcatggtaaaacccttttcattaaacacaaagaaagcttttttttttttttttttttttttttttttttaatgtgcagaggattgacctgtgcatgcttttgatctctcattcaaaggatcaatattaaataaaattgtcatgagctgtgttgaagacagggtgctttcaaatagaggtaatttgctcttgtgttgtaagaggaacatgtcaacaaagataggaaatgagggtgatcgtgcagatggcttgtatcttatatatgcaaaggagccaatctcagaagcacaaagaaaaaagtgtgcataccttattttgtacagataaagatgatgtctttttgttattgtctgtctgttttgtatgtgtctgagataagggatagagaggaaacatccgtcaggctaatttaactacattttattttaaaaatagagaaacataacctctagatgggacagcagaggacagttagtagaggccacaaactgttatgggctgctgtgttttgttctaaaatcaatatggttggagcatgtatatcttaggtgatcatttcacatcttaggaatgcctactcattttattttattctagtgatgctcaattcactatttaatttattatattttctcttctgtggcacttatacaaaatatctcttcacctacttagttctacagggttttaactttggagcaacatgaataaaatcatcgagaaggccaatattgtttagcaacatgaatacaatacagtttaaagttgtacacatcctgctcaactttattcatatacatttcctttctgtggttttcttttgcttcttagaaattctgttagtggttagtaaagaatttgaaagtactttctccttgctgtttttttttttttttaagacattcctcccagaatactccagggggcagtgttttataacacattttccccactgggtgattgaaggatggaggatttttgaaaatttgacagctacatgaaacatgagaaaacattttcctcacttctgaagtcggtttgcagctggtaacttgttcatccagaaaacattctaaagcaatgagactttgtgagctgtgcttacagtttgggagaatcatgaagattctttctatattttgcatttacttcccagtgcttcatagctgcattttgtttgtaactaagacagaagaatttcgtaatccttgaaattgaaaaaaaaaaaattgtgtttttaaagagtgaaaacagttagaaaacaagtagaactgtaatcagaacgctgcttcaattgatattaaaaataacctcaataataatgtaaaggttcctttctcttgtgtcagttatattcttagggatagcctagaaggaatatatggttagaactaagtgtgactaatcatctgagccttgaagagaaacttcagtgcctctaaacagatcatctacaaaacaacaggtaaacatttatgccagttaagtgggtcatgtttttgtttcttgggtttttcctaaatttaagtgaggttgggcttaccttgtagataaaattatgttttctttttggtaaatacttgaacgtggataacgtcaaatcagaatattttgtgaggaggtgatgatttgaaattaagctagatttctagggaggtgttggttccaatgaaggatgggaagaaattaaaatagtcttcaaacttcttccttattatatttggttgctttggaaaagattggtcctatcctcaatctaatttattcactattaatattttaaaaacattcctgagatacttaaaaagacccacttagcgattatagttgctcaatgaaacaagaatttatttatgcatagatttttctctgtatcttaccaaaatccactttacttagataacactaaattgttcttaaagactactcatttcccaataatcctttatgatttcaaaatttctagtggctcagaagtgaattttattttatttgtctttcacttgaataaatgagaacccagaaattaataatgttgtttattgcttactgtcaggactatttcaaagactaagaagagtttcttctaacccctccctctcaaaggaatcctaaattattagttgttagataagttttgtatgctaagatattcaggtttatagtttatgtatgtgtgtatatatataaatatatatgtatatataaatattatgttcagtttggagtctggcacaactccattatgtggattagagagtaagatattatggatgataaagtactaaatgaaacataatatttatttataaaagtgtgtagattgttaaatcacaaaaagagtgctatgaccattatgtatgaggaaacaggcctttgacctcctggaaagcactgctcaaaagtcattagtgcccatttttgaattccccaaacagaaagcttcttagaaaacatgctgagattttatttacagggaattctttgacacatttcaattggtgtgtagtcaagtatagcaagtacttaataatgactgaatttcatgttcctacagtcatacatattcattagaagttttatgttgttggtctgatctgattcttctttgtttgtgggtggaacggcactgagagaagtatagttttttaaacttgaacatgttcagtagttacattgccttagaaaacccagacacatagcagtggaaatgaaagaaatggcatcagaagtgacttaatttagcaattgtgattcctcttgtaaaacaaaacaaaaaaacaatgccatattttttggagaaaagttggcaatataggggtttcgttgtctgtttcacaagaagactcatttgttcttttgggggaaccagtgccttacagattttgtatatactgtaattattcaggactagggaacaaacaattgtattgtatttgttacagattgtatatggctttgttttaacattcccctaaataaaatggcttcattctccccttggaaaaaaa

SEQ ID NO: 111790 - DNA, 9683 bp, Homo sapiens
  Payload ID: 1903
  Gene Symbol: BMPR2
  Gene Name: bone morphogenetic protein receptor, type II (serine/threonine kinase)
  Uniprot ID: Q13873
  ENST ID: ENST00000374574
  CDS Start-End: 42-1634
atttcttttctttgccctcctgattcttggctggcccagggatgacttcctcgctgcagcggccctggcgggtgccctggctaccatggaccatcctgctggtcagcactgcggctgcttcgcagaatcaagaacggctatgtgcgtttaaagatccgtatcagcaagaccttgggataggtgagagtagaatctctcatgaaaatgggacaatattatgctcgaaaggtagcacctgctatggcctttgggagaaatcaaaaggggacataaatcttgtaaaacaaggatgttggtctcacattggagatccccaagagtgtcactatgaagaatgtgtagtaactaccactcctccctcaattcagaatggaacataccgtttctgctgttgtagcacagatttatgtaatgtcaactttactgagaattttccacctcctgacacaacaccactcagtccacctcattcatttaaccgagatgagacaataatcattgctttggcatcagtctctgtattagctgttttgatagttgccttatgctttggatacagaatgttgacaggagaccgtaaacaaggtcttcacagtatgaacatgatggaggcagcagcatccgaaccctctcttgatctagataatctgaaactgttggagctgattggccgaggtcgatatggagcagtatataaaggctccttggatgagcgtccagttgctgtaaaagtgttttcctttgcaaaccgtcagaattttatcaacgaaaagaacatttacagagtgcctttgatggaacatgacaacattgcccgctttatagttggagatgagagagtcactgcagatggacgcatggaatatttgcttgtgatggagtactatcccaatggatctttatgcaagtatttaagtctccacacaagtgactgggtaagctcttgccgtcttgctcattctgttactagaggactggcttatcttcacacagaattaccacgaggagatcattataaacctgcaatttcccatcgagatttaaacagcagaaatgtcctagtgaaaaatgatggaacctgtgttattagtgactttggactgtccatgaggctgactggaaatagactggtgcgcccaggggaggaagataatgcagccataagcgaggttggcactatcagatatatggcaccagaagtgctagaaggagctgtgaacttgagggactgtgaatcagctttgaaacaagtagacatgtatgctcttggactaatctattgggagatatttatgagatgtacagacctcttcccaggggaatccgtaccagagtaccagatggcttttcagacagaggttggaaaccatcccacttttgaggatatgcaggttctcgtgtctagggaaaaacagagacccaagttcccagaagcctggaaagaaaatagcctggcagtgaggtcactcaaggagacaatcgaagactgttgggaccaggatgcagaggctcggcttactgcacagtgtgctgaggaaaggatggctgaacttatgatgatttgggaaagaaacaaatctgtgagcccaacagtcaatccaatgtctactgctatgcagaatgaacgtaggtgagtcaacacaagatggcaaatcaggatcaggtgaaaagatcaagaaacgtgtgaaaactccctattctcttaagcggtggcgcccctccacctgggtcatctccactgaatcgctggactgtgaagtcaacaataatggcagtaacagggcagttcattccaaatccagcactgctgtttaccttgcagaaggaggcactgctacaaccatggtgtctaaagatataggaatgaactgtctgtgaaatgttttcaagcctatggagtgaaattattttttgcatcatttaaacatgcagaagatgtttaaaaataaaaaaaaaactgctttatcctcctgtcagcaccccctcccacccctgcaacaaagacttgctttaaatagatttcagctatgcagaaaaatttagcttatgcttccatatttttaaattttgttttttaagttttgcacttttgtttagtctcgctaaagttatatttgtctgttatgaccacagagttatatgtgtgtgtatcaaaagtggtctcaaaatatttttttaagaaaaaaagcaaaaacaatgtattgctgataatcagtttggaccagtttcttaaggtcattaaaacagaagcaaattaagacaggtttgactgcagtggtgtctggtatccatgttttatttctgggcacaagctagtttttatgttgatacgttcctgaacatattatcttgttggacatcttttctcttgtgttttgtttgaatgtgcaatagtttataggccacaaataagctttcttgtaagctctcttcctaacagggcacatattcttccataatataaacacttttctgccccatctcccatacttttgaaggtcagttctatgacagtgaattttgcacaggagaagcagctacctgatttcttactttctctctccttatcatggagaatacagaaacattgtctgaaagggctctaaagaaggaactaccaaaacctgacttgaaatgccatttcttttaaccttccaaatcctaaatgtttccttcaaggcatcttaataaacttatttgcttctggttttgggagttcataagagagaatagaacaaaatacaggacatcaaatattagccatttcccattttattttatttttctatgtaggttcatgttccatgttcatttatttaagaaatacatttttattggtaagcttatagagctacacttatggaatttttaagtaggtaaataaatggttaagacaaaatagtgttatagccttcattctctgaataggccatctttgactcataaaattacccttactgtttattataacttcagaagtaatttatagttctgaacctatagtatcttttaccctgttcccaagcaaagactggtgactttatctgaaaatgattcctcttcccatgacctaaaacactgtgaggaaaaatcattcaagtggcatgccaagtccctatgaaggaagggctgctatcaaacctaccttttttgagcaaactgagactaaacttctctcttttcaaaattgtgttatcttccttaatcctattttcataatttttccttttgccagtttttcacattatctttgatatgtgagcaacatttattatttacattagagtataccttttagtaataaaatgacttgaaatcatattatttttaaaagccctttgcttctttcattacttataatctcctctaaaacaacctctgcatgttttttttaaataaagcactttctgtcaaataatggacttttttctaaacagaaattattttctattaatttgcaaactgatgatttcacttttttttacttttttttcgattatcagagtacttagtaaatgttatatagtttagttctaagatagttccagggattaaaaggttaagaggaaaacacaaatcaccaaatttctgatttatgtttttatctcctgaacaatattttctcactcatattcctctatcttatcacttagctaaagacagcctaaatttcccaattttctgtccaaaatatttgtgatttacttgtatataagccttctcatttgccatgtgctgtgatcttacaagttagatgttactatacctaccatttattcagctggattgctgaacacagttctggattcatagaattaagaatatcttgttagtgcccaggatttccacgttttgtgttttattggcccttttctttattcagccccttaatctattttcagtcttctggcacgtaatttttttcacagttattattcttctattaacaaattatttttatctttcctagtacattttcacttagttctcttgcccttaaatatctttcacatgcattttaggatattcttttcaaatatttgtaggacaactttgaatcaaaataaattatgttccttctccaatttgaagcattgaggataaatgaccatttgaggtctaactgatcttttcctgccagaagagttatcttacgttctgctatatttgtatttgggccagttgattgtaggttgtccaacattttttaatattgggaaaattatgataaaatgctttaaaaattaatatgccagattaaaataactgaatagtttactatttcattcaagcatgtttaaaacaaataatttcctttcaccagtttttcttagtaaactcctgaaaaagtaggaaaggtggaaagtatatatcatttttataaattttaaattgtacatcagacttttaaaatctgtaatatacaagcaagcaaaattattttaaatgacttaattgtatgctaatactcatctgataataaatgcttcttaaagttgacatttaactgctatcacaaagttttatatgtagaaaagtggggtccttttgaataaaagatcattcaactaaaaatattaaaatttatttcactggatggtaatgtaaccttaaaagcatcataataggtaaagtctaatattagttcccttaacaaaatcctaactgtataccagaattaggtcactgaaagaacttgatttgaattacgtttagacaaaaatgatttaattgtaaattcttaaaactttctaaatgcataattggcaaaaaaaaaaacccactgttaccagtgtaggaagttacaagaaggcacatactgaatgctgaagtatacatatgctatttctcttaaacctcagagcaaccatatgagcattgtaattaatattcccattttacagatgaggaaactgaagctaagagaagctaagtaatatgcccaaggtccacatctagtaacagacaaagctgggatttcagtctatgtctgcctctctccacatctctttcatccataccacactgcctacatgccatatgacaggatgtgtaatgggctaacgtttatttaaaaagttcaggccaggtgcagtggcttatgcctataatccccgcactttgggaggccgagccgggtggatcatgaggtcagacgttcaacaccagcctggccaagatggtgaaaccccgtctctattaaaaatattttttaaaaattaactgagcgtggtggtgggcgcctgtagtcccagctactcaggaggctaaggcaggagaatctcttgaacccgagaggtggaggttgcagtgagctgagatcgcgccactgcactgcagcctaggcgacagagcaagactgcctcaaaaaaaaaacataaaaattcagtcactatactctggcacaattttcatttgtatatgagccaaaccacataccttaatgatttgggaagttaggcaaatatgagatatgtagacatatctatgctgattgttgcttgagaaataattactaattctagacaaaactcaatcctgtatcttccatcatgaatcttaaaatcatttcacttcactcctaacatttcttacattgcagaactaatggtaaagtaaattttacggaaaaagttaagatagctttgggaacagagacctttccctaaattgattccatagcagatttgggggaattaacaaagaatttcagtctcatcaatcctttgaatccatcttcaaaacttctgcttttaataactttagaaaatttactaatctatagaactaattgagtaggatataggaaggatacaaggatataatgtcctttttataaaagtttagtatagcttctttacatgtatccacttgttccagaaaatgtgcattggttctgaatgtgaaaatatttaaagagagaaaggaacactcaagtaagtgtgggcttcagtgggaattatcacaaaacattggcaagtatttttatttaaattattttcaaatttgacttctacagccaagtggaattggtaggctgtagctgttacactgaaatttctagtctttgtaagtgcctcctgaaagtcatttaaaatggaaaaatatttcaatgagcttttccttttttcatatttatggacatgaatattttattggagatcattaactcctagaatttgagattatatttccatacaacattttataaagttatgttgaacttactacctgttatgtgcaggttattatgtaactattcacagattgcttcatatattgctttatcttcccatctaacttcttaaagttaaaatccggacacacatgttgattatctagaccagtcattctggaaattgtaacactcccacataaaccccaggagactttttcagaatgcaatgtttctaaatgtactgttactggcagtttactctccagcatataaggttgcattttaacttttagattatgaactgtgcaaactttacccaaaactatcttgcatgattccctcctaaatatattccttgattaagtaaatctggcaaatcactgtttgagctagttacataaaatttgttatcaagagaaggcttttctacaagtttccagattaacataaagaaaagagggaatcacagggcatttaagtgcaccttcccattactttccttaaatcacctcatagttaggctgggcgcggtggctcacgcctgtaatcccagcactttgggaggccgagacggtggatcacgaggtcaggggactgagatcatcctggctaacacgatgaaacctcatctctactaaaaatacaaataattagccaggcatggtggcacgcgcctgtagtcccagctactcgggaggcagagacaggagaatcgtttgcacccgggaggcggaggttgttgcagtgagccgagatcgcgccaatgcactccagcctgggctacagagtgagactccatctcaaaaaaaaacaaaaaaaatcacctcatagtttatgtctgacttactccaaacctcagttatctgatttgtagtctgtgtcaggaaagttttcttcatatctattctgtctccctcctctttgattttaaatttttttcttttacccagtaggacaaaaaagagcagttggtcatcatccccaatattcttagtcttcagtatgcttcaggcctctcaatgaacacttaagtctcaattcttcagacaaaattgcttaagctcttctcctcagtcctattttaatgactttatatttaagaatatagaattatattttcttttatattcaaattcattactccagttaagtaatagtttgatagtttgatagaatcgagagttaagatgtttctatttgaaagtggattcaaccatcagaccaccagcaaatcggcacttaatttttgtgttatctaacattttctattgtggaattttatgattttatattctcattagttataactaaaaagccatgcacacagaattgtatatcattttgccattaaaattttttaacatattgcagcaagcttagttttatgattgagccacaaccttttacatattttttgtatgaaatattaaacactaaatgcaagattaactttcaaaagcaaaccctacattaatcaggtattatctatggacatttttgtagaccacttttgaaatacttattattttgcaacatagactggactatacaactttcatttaacttttaggtgactgatttaagttgagtgtgcatatagagaaaaacctagaaatttatctcatggcagatacatttgaaagtacttcagaagaatttatgctgtatattaaaactaggctcaaaataaatctatcgtatctttaaaagtccaattctgttattactgtgatgtttgtagtgttactattaaacattgtgaacatacacatttttaaaacaacttgaaacccattttaaaatctgggtaagagagaaggaatcttcagaacaaaatcacatcattagggtgtccagtttatgattgaatttttaagcaaattactgtatttgaaactacaacttgatttggttttcagttttaaaaggcaacatgtgggttttatccattttatttatacctttagatttcagaaacatcttcatgttttagatgcattctacagacatcatgttacttaaaaactcagggcccctttcatccctttgtacactgaaaaagttcaattgttagcaagtaagcaattagatccagttgaatatttaaagtgtttgttgcacagttcatttaatgtttcatcttatttgactttttcacatagatataatatcagatttcattaattataaaaagttgcccagttctgtaattactgaacagagggaatgactcaactaattggctacatgttgcaacaaatttaggcctttagagttgaagcactgacttaaaacgacttacatttctgttctttggtcaaatgaccatacatgatatgggacaaattgtttcattttgtttgttttttaataagggaacttggtaaagtagttcctgtcagataggattttctcaagagacaatttaacgttataaagccttctaaaagtgaactaaatattttataactttagtaatagcttggatggttttgagaaaataacctgtatttatcacattgtcaaacagaatttttctttgaatcagacaagttcaagctctaaattgatgtgctatatacttaaaatcctaggaagttatctgtaaccagtctcttgtctcaggctcttcaccttgttaccaatcctcgtaagtatgtaaaggaaacatatttttaaagaagcttaacagtaagaaaaaattactaaaagatgcaattcaaagataggtcccagtttaacactgaattgcttgacttctgtggcttttctttttctggccacatttatttatttaagcaatttttgtatgccttgttatttcatttccatagagattatattgtatcagtgtttatgtaagctggaatcatcctcagttttttgctgataatttttcaaataaagatacatggataattgtaaaatacactaactcttagggtgttgtagtagctgaaacatggagatgcgtagctgtcatgctttttctgaatggacaggagaaacataagctacggagtattcacttctgaggatgcttttccggaaaaagaaaggctagaaaatactcgcacttcctcagaaccctctttcttgttaacgggtatcttttgttggtgtgttttgctcttacattacagatagactatcatatatgactttatgaataatttcagttattttgcttttgtataagctgtctgaagccttgctatgctgtataagttgtgtttgatggatcagtgtgagtataaaataaagcaaatcacttttcttttgtattatctatggatgccactatgaaagctgacattaagccactaaagagttttctatgaataagtgtaagtaaatgctttgatatatataaacctaaataaaaagattgtattgatacagagacattggagaaggagattttaaggcagttctttaggtttaaaaaggcttgctgtaaaatggtgcgttattccgtttattaaagatcatattaatgacaata

SEQ ID NO: 111791 - DNA, 11461 bp, Homo sapiens
  Payload ID: 1903
  Gene Symbol: BMPR2
  Gene Name: bone morphogenetic protein receptor, type II (serine/threonine kinase)
  Uniprot ID: Q13873
  ENST ID: ENST00000374580
  CDS Start-End: 540-3656
ggaagcaccgaagcgaaacttaaggaatcctgccttcccggagccgcgggcgatgcgactagggctgccgggcgccgccgccgcccgtccggcttcgtccttcccggcagtcgggaactagttctgaccctcgccccccgaccccggatcgaatccccgccctccgcaccctggatatgttttctcccagacctggatatttttttgatatcgtgaaactacgagggaaataatttgggggatttcttcttggctccctgctttccccacagacatgccttccgtttggagggccgcggcaccccgtccgaggcgaaggaacccccccagccgcgagggagagaaatgaagggaatttctgcagcggcatgaaagctctgcagctaggtcctctcatcagccatttgtcctttcaaactgtattgtgatacgggcaggatcagtccacgggagagaagacgagcctcccggctgtttctccgccggtctacttcccatatttcttttctttgccctcctgattcttggctggcccagggatgacttcctcgctgcagcggccctggcgggtgccctggctaccatggaccatcctgctggtcagcactgcggctgcttcgcagaatcaagaacggctatgtgcgtttaaagatccgtatcagcaagaccttgggataggtgagagtagaatctctcatgaaaatgggacaatattatgctcgaaaggtagcacctgctatggcctttgggagaaatcaaaaggggacataaatcttgtaaaacaaggatgttggtctcacattggagatccccaagagtgtcactatgaagaatgtgtagtaactaccactcctccctcaattcagaatggaacataccgtttctgctgttgtagcacagatttatgtaatgtcaactttactgagaattttccacctcctgacacaacaccactcagtccacctcattcatttaaccgagatgagacaataatcattgctttggcatcagtctctgtattagctgttttgatagttgccttatgctttggatacagaatgttgacaggagaccgtaaacaaggtcttcacagtatgaacatgatggaggcagcagcatccgaaccctctcttgatctagataatctgaaactgttggagctgattggccgaggtcgatatggagcagtatataaaggctccttggatgagcgtccagttgctgtaaaagtgttttcctttgcaaaccgtcagaattttatcaacgaaaagaacatttacagagtgcctttgatggaacatgacaacattgcccgctttatagttggagatgagagagtcactgcagatggacgcatggaatatttgcttgtgatggagtactatcccaatggatctttatgcaagtatttaagtctccacacaagtgactgggtaagctcttgccgtcttgctcattctgttactagaggactggcttatcttcacacagaattaccacgaggagatcattataaacctgcaatttcccatcgagatttaaacagcagaaatgtcctagtgaaaaatgatggaacctgtgttattagtgactttggactgtccatgaggctgactggaaatagactggtgcgcccaggggaggaagataatgcagccataagcgaggttggcactatcagatatatggcaccagaagtgctagaaggagctgtgaacttgagggactgtgaatcagctttgaaacaagtagacatgtatgctcttggactaatctattgggagatatttatgagatgtacagacctcttcccaggggaatccgtaccagagtaccagatggcttttcagacagaggttggaaaccatcccacttttgaggatatgcaggttctcgtgtctagggaaaaacagagacccaagttcccagaagcctggaaagaaaatagcctggcagtgaggtcactcaaggagacaatcgaagactgttgggaccaggatgcagaggctcggcttactgcacagtgtgctgaggaaaggatggctgaacttatgatgatttgggaaagaaacaaatctgtgagcccaacagtcaatccaatgtctactgctatgcagaatgaacgcaacctgtcacataataggcgtgtgccaaaaattggtccttatccagattattcttcctcctcatacattgaagactctatccatcatactgacagcatcgtgaagaatatttcctctgagcattctatgtccagcacacctttgactataggggaaaaaaaccgaaattcaattaactatgaacgacagcaagcacaagctcgaatccccagccctgaaacaagtgtcaccagcctctccaccaacacaacaaccacaaacaccacaggactcacgccaagtactggcatgactactatatctgagatgccatacccagatgaaacaaatctgcataccacaaatgttgcacagtcaattgggccaacccctgtctgcttacagctgacagaagaagacttggaaaccaacaagctagacccaaaagaagttgataagaacctcaaggaaagctctgatgagaatctcatggagcactctcttaaacagttcagtggcccagacccactgagcagtactagttctagcttgctttacccactcataaaacttgcagtagaagcaactggacagcaggacttcacacagactgcaaatggccaagcatgtttgattcctgatgttctgcctactcagatctatcctctccccaagcagcagaaccttcccaagagacctactagtttgcctttgaacaccaaaaattcaacaaaagagccccggctaaaatttggcagcaagcacaaatcaaacttgaaacaagtcgaaactggagttgccaagatgaatacaatcaatgcagcagaacctcatgtggtgacagtcaccatgaatggtgtggcaggtagaaaccacagtgttaactcccatgctgccacaacccaatatgccaatgggacagtactatctggccaaacaaccaacatagtgacacatagggcccaagaaatgttgcagaatcagtttattggtgaggacacccggctgaatattaattccagtcctgatgagcatgagcctttactgagacgagagcaacaagctggccatgatgaaggtgttctggatcgtcttgtggacaggagggaacggccactagaaggtggccgaactaattccaataacaacaacagcaatccatgttcagaacaagatgttcttgcacagggtgttccaagcacagcagcagatcctgggccatcaaagcccagaagagcacagaggcctaattctctggatctttcagccacaaatgtcctggatggcagcagtatacagataggtgagtcaacacaagatggcaaatcaggatcaggtgaaaagatcaagaaacgtgtgaaaactccctattctcttaagcggtggcgcccctccacctgggtcatctccactgaatcgctggactgtgaagtcaacaataatggcagtaacagggcagttcattccaaatccagcactgctgtttaccttgcagaaggaggcactgctacaaccatggtgtctaaagatataggaatgaactgtctgtgaaatgttttcaagcctatggagtgaaattattttttgcatcatttaaacatgcagaagatgtttaaaaataaaaaaaaaactgctttatcctcctgtcagcaccccctcccacccctgcaacaaagacttgctttaaatagatttcagctatgcagaaaaatttagcttatgcttccatatttttaaattttgttttttaagttttgcacttttgtttagtctcgctaaagttatatttgtctgttatgaccacagagttatatgtgtgtgtatcaaaagtggtctcaaaatatttttttaagaaaaaaagcaaaaacaatgtattgctgataatcagtttggaccagtttcttaaggtcattaaaacagaagcaaattaagacaggtttgactgcagtggtgtctggtatccatgttttatttctgggcacaagctagtttttatgttgatacgttcctgaacatattatcttgttggacatcttttctcttgtgttttgtttgaatgtgcaatagtttataggccacaaataagctttcttgtaagctctcttcctaacagggcacatattcttccataatataaacacttttctgccccatctcccatacttttgaaggtcagttctatgacagtgaattttgcacaggagaagcagctacctgatttcttactttctctctccttatcatggagaatacagaaacattgtctgaaagggctctaaagaaggaactaccaaaacctgacttgaaatgccatttcttttaaccttccaaatcctaaatgtttccttcaaggcatcttaataaacttatttgcttctggttttgggagttcataagagagaatagaacaaaatacaggacatcaaatattagccatttcccattttattttatttttctatgtaggttcatgttccatgttcatttatttaagaaatacatttttattggtaagcttatagagctacacttatggaatttttaagtaggtaaataaatggttaagacaaaatagtgttatagccttcattctctgaataggccatctttgactcataaaattacccttactgtttattataacttcagaagtaatttatagttctgaacctatagtatcttttaccctgttcccaagcaaagactggtgactttatctgaaaatgattcctcttcccatgacctaaaacactgtgaggaaaaatcattcaagtggcatgccaagtccctatgaaggaagggctgctatcaaacctaccttttttgagcaaactgagactaaacttctctcttttcaaaattgtgttatcttccttaatcctattttcataatttttccttttgccagtttttcacattatctttgatatgtgagcaacatttattatttacattagagtataccttttagtaataaaatgacttgaaatcatattatttttaaaagccctttgcttctttcattacttataatctcctctaaaacaacctctgcatgttttttttaaataaagcactttctgtcaaataatggacttttttctaaacagaaattattttctattaatttgcaaactgatgatttcacttttttttacttttttttcgattatcagagtacttagtaaatgttatatagtttagttctaagatagttccagggattaaaaggttaagaggaaaacacaaatcaccaaatttctgatttatgtttttatctcctgaacaatattttctcactcatattcctctatcttatcacttagctaaagacagcctaaatttcccaattttctgtccaaaatatttgtgatttacttgtatataagccttctcatttgccatgtgctgtgatcttacaagttagatgttactatacctaccatttattcagctggattgctgaacacagttctggattcatagaattaagaatatcttgttagtgcccaggatttccacgttttgtgttttattggcccttttctttattcagccccttaatctattttcagtcttctggcacgtaatttttttcacagttattattcttctattaacaaattatttttatctttcctagtacattttcacttagttctcttgcccttaaatatctttcacatgcattttaggatattcttttcaaatatttgtaggacaactttgaatcaaaataaattatgttccttctccaatttgaagcattgaggataaatgaccatttgaggtctaactgatcttttcctgccagaagagttatcttacgttctgctatatttgtatttgggccagttgattgtaggttgtccaacattttttaatattgggaaaattatgataaaatgctttaaaaattaatatgccagattaaaataactgaatagtttactatttcattcaagcatgtttaaaacaaataatttcctttcaccagtttttcttagtaaactcctgaaaaagtaggaaaggtggaaagtatatatcatttttataaattttaaattgtacatcagacttttaaaatctgtaatatacaagcaagcaaaattattttaaatgacttaattgtatgctaatactcatctgataataaatgcttcttaaagttgacatttaactgctatcacaaagttttatatgtagaaaagtggggtccttttgaataaaagatcattcaactaaaaatattaaaatttatttcactggatggtaatgtaaccttaaaagcatcataataggtaaagtctaatattagttcccttaacaaaatcctaactgtataccagaattaggtcactgaaagaacttgatttgaattacgtttagacaaaaatgatttaattgtaaattcttaaaactttctaaatgcataattggcaaaaaaaaaaacccactgttaccagtgtaggaagttacaagaaggcacatactgaatgctgaagtatacatatgctatttctcttaaacctcagagcaaccatatgagcattgtaattaatattcccattttacagatgaggaaactgaagctaagagaagctaagtaatatgcccaaggtccacatctagtaacagacaaagctgggatttcagtctatgtctgcctctctccacatctctttcatccataccacactgcctacatgccatatgacaggatgtgtaatgggctaacgtttatttaaaaagttcaggccaggtgcagtggcttatgcctataatccccgcactttgggaggccgagccgggtggatcatgaggtcagacgttcaacaccagcctggccaagatggtgaaaccccgtctctattaaaaatattttttaaaaattaactgagcgtggtggtgggcgcctgtagtcccagctactcaggaggctaaggcaggagaatctcttgaacccgagaggtggaggttgcagtgagctgagatcgcgccactgcactgcagcctaggcgacagagcaagactgcctcaaaaaaaaaacataaaaattcagtcactatactctggcacaattttcatttgtatatgagccaaaccacataccttaatgatttgggaagttaggcaaatatgagatatgtagacatatctatgctgattgttgcttgagaaataattactaattctagacaaaactcaatcctgtatcttccatcatgaatcttaaaatcatttcacttcactcctaacatttcttacattgcagaactaatggtaaagtaaattttacggaaaaagttaagatagctttgggaacagagacctttccctaaattgattccatagcagatttgggggaattaacaaagaatttcagtctcatcaatcctttgaatccatcttcaaaacttctgcttttaataactttagaaaatttactaatctatagaactaattgagtaggatataggaaggatacaaggatataatgtcctttttataaaagtttagtatagcttctttacatgtatccacttgttccagaaaatgtgcattggttctgaatgtgaaaatatttaaagagagaaaggaacactcaagtaagtgtgggcttcagtgggaattatcacaaaacattggcaagtatttttatttaaattattttcaaatttgacttctacagccaagtggaattggtaggctgtagctgttacactgaaatttctagtctttgtaagtgcctcctgaaagtcatttaaaatggaaaaatatttcaatgagcttttccttttttcatatttatggacatgaatattttattggagatcattaactcctagaatttgagattatatttccatacaacattttataaagttatgttgaacttactacctgttatgtgcaggttattatgtaactattcacagattgcttcatatattgctttatcttcccatctaacttcttaaagttaaaatccggacacacatgttgattatctagaccagtcattctggaaattgtaacactcccacataaaccccaggagactttttcagaatgcaatgtttctaaatgtactgttactggcagtttactctccagcatataaggttgcattttaacttttagattatgaactgtgcaaactttacccaaaactatcttgcatgattccctcctaaatatattccttgattaagtaaatctggcaaatcactgtttgagctagttacataaaatttgttatcaagagaaggcttttctacaagtttccagattaacataaagaaaagagggaatcacagggcatttaagtgcaccttcccattactttccttaaatcacctcatagttaggctgggcgcggtggctcacgcctgtaatcccagcactttgggaggccgagacggtggatcacgaggtcaggggactgagatcatcctggctaacacgatgaaacctcatctctactaaaaatacaaataattagccaggcatggtggcacgcgcctgtagtcccagctactcgggaggcagagacaggagaatcgtttgcacccgggaggcggaggttgttgcagtgagccgagatcgcgccaatgcactccagcctgggctacagagtgagactccatctcaaaaaaaaacaaaaaaaatcacctcatagtttatgtctgacttactccaaacctcagttatctgatttgtagtctgtgtcaggaaagttttcttcatatctattctgtctccctcctctttgattttaaatttttttcttttacccagtaggacaaaaaagagcagttggtcatcatccccaatattcttagtcttcagtatgcttcaggcctctcaatgaacacttaagtctcaattcttcagacaaaattgcttaagctcttctcctcagtcctattttaatgactttatatttaagaatatagaattatattttcttttatattcaaattcattactccagttaagtaatagtttgatagtttgatagaatcgagagttaagatgtttctatttgaaagtggattcaaccatcagaccaccagcaaatcggcacttaatttttgtgttatctaacattttctattgtggaattttatgattttatattctcattagttataactaaaaagccatgcacacagaattgtatatcattttgccattaaaattttttaacatattgcagcaagcttagttttatgattgagccacaaccttttacatattttttgtatgaaatattaaacactaaatgcaagattaactttcaaaagcaaaccctacattaatcaggtattatctatggacatttttgtagaccacttttgaaatacttattattttgcaacatagactggactatacaactttcatttaacttttaggtgactgatttaagttgagtgtgcatatagagaaaaacctagaaatttatctcatggcagatacatttgaaagtacttcagaagaatttatgctgtatattaaaactaggctcaaaataaatctatcgtatctttaaaagtccaattctgttattactgtgatgtttgtagtgttactattaaacattgtgaacatacacatttttaaaacaacttgaaacccattttaaaatctgggtaagagagaaggaatcttcagaacaaaatcacatcattagggtgtccagtttatgattgaatttttaagcaaattactgtatttgaaactacaacttgatttggttttcagttttaaaaggcaacatgtgggttttatccattttatttatacctttagatttcagaaacatcttcatgttttagatgcattctacagacatcatgttacttaaaaactcagggcccctttcatccctttgtacactgaaaaagttcaattgttagcaagtaagcaattagatccagttgaatatttaaagtgtttgttgcacagttcatttaatgtttcatcttatttgactttttcacatagatataatatcagatttcattaattataaaaagttgcccagttctgtaattactgaacagagggaatgactcaactaattggctacatgttgcaacaaatttaggcctttagagttgaagcactgacttaaaacgacttacatttctgttctttggtcaaatgaccatacatgatatgggacaaattgtttcattttgtttgttttttaataagggaacttggtaaagtagttcctgtcagataggattttctcaagagacaatttaacgttataaagccttctaaaagtgaactaaatattttataactttagtaatagcttggatggttttgagaaaataacctgtatttatcacattgtcaaacagaatttttctttgaatcagacaagttcaagctctaaattgatgtgctatatacttaaaatcctaggaagttatctgtaaccagtctcttgtctcaggctcttcaccttgttaccaatcctcgtaagtatgtaaaggaaacatatttttaaagaagcttaacagtaagaaaaaattactaaaagatgcaattcaaagataggtcccagtttaacactgaattgcttgacttctgtggcttttctttttctggccacatttatttatttaagcaatttttgtatgccttgttatttcatttccatagagattatattgtatcagtgtttatgtaagctggaatcatcctcagttttttgctgataatttttcaaataaagatacatggataattgtaaaatacactaactcttagggtgttgtagtagctgaaacatggagatgcgtagctgtcatgctttttctgaatggacaggagaaacataagctacggagtattcacttctgaggatgcttttccggaaaaagaaaggctagaaaatactcgcacttcctcagaaccctctttcttgttaacgggtatcttttgttggtgtgttttgctcttacattacagatagactatcatatatgactttatgaataatttcagttattttgcttttgtataagctgtctgaagccttgctatgctgtataagttgtgtttgatggatcagtgtgagtataaaataaagcaaatcacttttcttttgtattatctatggatgccactatgaaagctgacattaagccactaaagagttttctatgaataagtgtaagtaaatgctttgatatatataaacctaaataaaaagattgtattgatacagagacattggagaaggagattttaaggcagttctttaggtttaaaaaggcttgctgtaaaatggtgcgttattccgtttattaaagatcatattaatgacaata

SEQ ID NO: 111792 - DNA, 3202 bp, Homo sapiens
  Payload ID: 1904
  Gene Symbol: BRINP1
  Gene Name: bone morphogenetic protein/retinoic acid inducible neural-specific 1
  Uniprot ID: O60477
  ENST ID: ENST00000265922
  CDS Start-End: 463-2748
ggagaccgcggcgcacttggacttccctctccattcgccagccgcctcgctcccggaccccacggctgcaaactgatctggcgcgcggggaggaggagagcgcaggcgagcgaacccgcgagagagggagagagcgagcgagcaacagcgagagcgagagcgagagagccgggaggcagagggagtagtgaccgccttccggagccgggattcatgcctgtcctcgggaccagcgaaggggactttacggctgagtatgagccaggctgctaggagccaggtacccccacgcctgcagtccccgcgccgtgcccggaatgcgagctgcacgcagggctctcccaagttcccaccgagccgaataaaaagcgtcctcccgcagctctccgccaaagacggacattgactccaggactccacagaatggagcaagaatgagaggaaaaaggccggcagaaaagcatgaactggaggtttgttgagctcctctacttcctgtttatatggggccgtatctcagtgcagccctcccaccaggaaccagctgggacagaccaacatgtctccaaggaatttgattggctcatttcagacagggggcctttccaccactccaggagctacctatcctttgtggaaagacaccgtcaaggatttacaaccagatataaaatatacagggagtttgcccgttggaaggtgaggaacacagccatcgagaggagagatctggtccgccatccagtgcccctcatgccggagtttcaaaggagcatccgcctgcttggcaggagacctaccactcagcagttcatcgataccatcatcaaaaagtacggcacccacctgctcatctcagccacattgggaggggaggaggctttgaccatgtatatggacaaaagtcgcctcgacaggaagtcagggaatgccactcaaagtgttgaagctctgcaccagctcgcatcatcctactttgttgaccgtgatggtaccatgaggaggcttcatgagatccagatatcaactggagcaatcaaggtcacagagacacgcactgggcctctgggctgtaacagctatgacaatctggactctgtgagttccgtccttctgcaaagcacggagagcaaactgcaccttcaaggtcttcagataatctttcctcagtatctgcaagagaagtttgtccagtcggccttgagctatatcatgtgcaatggggagggggagtacctgtgccagaacagccagtgtcgctgccaatgtgccgaggagtttccgcagtgcaactgccccatcacggacatccagatcatggagtacacgctggccaacatggccaagtcttgggccgaagcttataaggacctggagaattcagatgagtttaaatcatttatgaagcgcctccccagcaaccacttcctgaccatcggaagcatccatcagcactggggcaatgactgggacctgcagaaccgctacaagctcctgcagagtgccacggaggcacagagacaaaagatccaacgcactgcccgcaagcttttcggcctcagtgtacgctgtcgccacaatcccaaccaccagctgcctagagagaggacaattcagcagtggcttgcaagggtccagtcactcctctactgtaatgagaatgggttttggggaaccttcctggagagccagcggagctgcgtgtgccacggcagcaccacgctgtgccagcgccccatcccctgcgtgataggcgggaacaacagctgcgccatgtgcagcctggccaacatctccctctgcggctcctgcaacaagggctacaagctgtatcgaggccgctgtgaaccacagaacgtggactcggagcggagcgagcagttcatcagctttgagactgacctggacttccaggacctggagctgaagtacctgctgcagaagatggactcacgcctctacgtccacaccaccttcatcagcaacgagatccgcctcgacaccttctttgaccctcggtggcgcaagcgcatgtccctcactctcaagagcaacaagaaccgcatggacttcatccacatggtgatcggcatgtccatgcgcatctgccagatgcgcaacagcagcctggaccccatgttctttgtctatgtcaacccctttagcgggagccattcggagggctggaacatgcccttcggggaatttggctacccacgctgggagaagatccgtctccaaaacagccagtgctacaactggactcttttgctgggcaatcggtggaaaacatttttcgagacggtccacatctacctacgtagtcggactcggctacctaccctactgcgaaatgagactggccagggccccgtggacctgtcggatccctccaagaggcagttctacatcaagatctcagacgtgcaggtgtttgggtatagcctgaggttcaacgccgacctcctgcgcagtgcagtgcagcaggtcaaccagtcctacacacagggcggccagttctattcctcttcgtcagtgatgctcctcttgttggatattcgggaccgaattaatcgcctggcccctcctgtggccccggggaaaccccagctggacttgttctcctgtatgctgaaacaccgcctgaaactgaccaacagcgagatcatcagggtgaaccacgccttggacctgtacaacacggagatcctcaaacagtcggaccagatgacagccaaactctgctaacccgggactccttgccatggacttttcctgttgttgtacacacacaacagaacaaaatgaagcaaaacaaaacaaaaaaacccacaaaaatttgtaaaatgtaattaatattcaaagaaaaggaggaaaatcttcatttgttggaaatgaaaacgttctagcaactgtataaaagcgttgggcatgtttgttatttctatactcactctgtcatgaagaagggtctcagccttttgtggagcattgagggagttgcttcttaggcctcaggtgctgtattgggggagaagggagaaagcatatgcaatgaattgtaaagatctctgctgtgcaggtgctaagattaaacactaaaaagaaagagagatatatgtaatgtacaactgacactgccatttttcctttttggaggaaatggacatagataaagaagatatttcttcggttaagattt

SEQ ID NO: 111793 - DNA, 1641 bp, Homo sapiens
  Payload ID: 1904
  Gene Symbol: BRINP1
  Gene Name: bone morphogenetic protein/retinoic acid inducible neural-specific 1
  Uniprot ID: O60477
  ENST ID: ENST00000373964
  CDS Start-End: 421-1383
cgcctcgctcccggaccccacggctgcaaactgatctggcgcgcggggaggaggagagcgcaggcgagcgaacccgcgagagagggagagagcgagcgagcaacagcgagagcgagagcgagagagccgggaggcagagggagtagtgaccgccttccggagccgggattcatgcctgtcctcgggaccagcgaaggggactttacggctgagtatgagccaggctgctaggagccaggtacccccacgcctgcagtccccgcgccgtgcccggaatgcgagctgcacgcagggctctcccaagttcccaccgagccgaataaaaagcgtcctcccgcagctctccgccaaagacggacattgactccaggactccacagaatggagcaagaatgagaggaaaaaggccggcagaaaagcatgaactggaggtttgttgagctcctctacttcctgtttatatggggccgtatctcagtgcagccctcccaccaggaaccagctgggacagaccaacatgtctccaaggaatttgattggctcatttcagacagggggcctttccaccactccaggagctacctatcctttgtggaaagacaccgtcaaggatttacaaccagatataaaatatacagggagtttgcccgttggaaggtgaggaacacagccatcgagaggagagatctggtccgccatccagtgcccctcatgccggagtttcaaaggagcatccgcctgcttggcaggagacctaccactcagcagttcatcgataccatcatcaaaaagtacggcacccacctgctcatctcagccacattgggaggggaggaggctttgaccatgtatatggacaaaagtcgcctcgacaggaagtcagggaatgccactcaaagtgttgaagctctgcaccagctcgcatcatcctactttgttgaccgtgatggtaccatgaggaggcttcatgagatccagatatcaactggagcaatcaaggtcacagagacacgcactgggcctctgggctgtaacagctatgacaatctggactctgtgagttccgtccttctgcaaagcacggagagcaaactgcaccttcaaggtcttcagataatctttcctcagtatctgcaagagaagtttgtccagtcggccttgagctatatcatgtgcaatggggagggggagtacctgtgccagaacagccagtgtcgctgccaatgtgccgaggagtttccgcagtgcaactgccccatcacggacatccagatcatggagtacacgctggccaacatggccaagtcttgggccgaagcttataaggacctggagaattcaggtagagagtctcactcagtgccactgcatgagtggccttgagccaagtctgaaagggagctaatctaactggaattaggactgctgcaagggaaagttcagtgaccctgaccctttcactttggagtgtccagatgcaagtataatagctgtcacagagcaggcactcaataaatctcaactgaataaaattaatgaatagcataatccagtttgtggtcatatgatgtattgtttctgtcgtacccagaagacagaaagaataaatctgcataggaagcctctggagagggaagagtc

SEQ ID NO: 111794 - DNA, 3558 bp, Homo sapiens
  Payload ID: 1905
  Gene Symbol: BRINP2
  Gene Name: bone morphogenetic protein/retinoic acid inducible neural-specific 2
  Uniprot ID: Q9C0B6
  ENST ID: ENST00000361539
  CDS Start-End: 313-2664
agcggggagcaagagaatttgaaaagagacatccgctccctctcacacgctgagggggaggcattcgcgtttccccaaatgagaaagaaccacaagaaatcatgaagtaaaaactttggaaagctgccactggagatgttgcacaaaaacctggaatcttttaggagtctcctcccagtcgttgaaggtttggggagcagctgatacagcaaggagggctcttgcaaggattcaagctccgagccctggaggagcagcacggagcgggagagcgtggcgagagaatgaagaaaccaatcgcccgggagaagcatgaggtggcagtgtggcactcggtttagagggcttcggccggcggtggccccatggacagccctgctggcactgggcctgcctggctgggtgttggctgtctcagccacggcggctgctgtggtccccgagcagcatgcctccgtagctggccagcatcccctggactggctgctcacagaccggggccccttccaccgcgctcaggagtatgctgacttcatggagcggtaccgccagggtttcaccaccaggtacaggatttatagggagtttgcccgttggaaggtgaacaacttggctctggaaaggaaggacttcttcagtttgccattgcctcttgccccagagtttatccggaacattcgcctccttggaaggagacccaatctgcaacaggttacagaaaatctgattaaaaagtacggcactcatttcttactttctgccacccttggaggagaagagtccctgaccatttttgtggacaagcagaaactgggaagaaagacagagacaacaggaggtgcctctataatcgggggcagtgggaacagcacagctgtgtccctggagaccctgcaccagctggccgcctcctacttcatcgacagagagagcacgctgcgacggctgcaccatatccagatagccacgggggccatcaaggtcaccgagaccaggaccggtcctctgggctgcagcaactatgacaatctggactcagtcagttctgtcttggtacagagtccagagaacaaagtacagttacttggccttcaggtgctgctgcctgagtatctgcgtgagcgctttgtagctgcagcactcagctacatcacatgcagctctgagggtgagctcgtctgcaaggagaatgactgctggtgcaagtgcagccccaccttccctgaatgcaactgccctgatgctgacatccaggccatggaggacagcctgctgcagatccaggactcctgggccactcacaaccggcagtttgaagagtcagaagagttccaggccctgctgaaaaggctgcccgatgaccggttcctgaactccacagctatctcccagttctgggccatggacaccagccttcagcaccgctaccagcagctgggagctggcttgaaagtgctgttcaaaaagacccatcggatcctacgccggctcttcaacctctgcaagcgctgccatcgccagcctcgcttccgcctgcccaaggagaggtccttgtcctactggtggaaccgaatccagtccctcctctactgtggggaaagcacctttcctggcactttcctggaacagagccacagctgcacctgcccctatgaccaatcttcctgccagggccccatcccatgtgccttgggcgaagggcccgcgtgtgcccactgtgctccagacaatagcacacgctgtgggagctgcaacccgggctatgtgctggcccaggggctgtgccggccagaggtggccgagtccctggaaaactttcttgggctggagacagacttgcaggacctggagctaaagtacctgctgcagaagcaggatagccgcattgaggtacactccatcttcatcagcaatgacatgcggctgggcagctggtttgacccttcctggaggaagcgcatgctgctcaccctgaagagcaacaagtacaagcctgggctggtgcacgtgatgttggccttgtccttgcagatctgtctcaccaagaacagcaccctggagcctgtcatggccatctacgtcaacccctttgggggcagccactctgagagctggttcatgcctgtgaatgagggcagctttcctgactgggaaaggactaacgtggatgcagctgcccagtgccaaaactggactatcaccttggggaataggtggaagactttctttgagacagttcatgtttacctacggagccgaatcaagtccctggatgacagctccaatgagacaatctactatgagcccctggagatgactgatccctctaagaatttgggttacatgaaaattaacaccttgcaggtctttggctacagcctgccctttgacccagatgctatccgggacttaattctccagttggactacccatatactcaaggttcccaggactctgcactcttgcagctcattgagctcagggaccgggtgaaccagctttctccacctggcaaagtccgacttgaccttttctcctgcttgctccggcatcggcttaagctggccaacaatgaggtgggcaggatccagtcctccctgagggctttcaattctaagctgccaaaccctgtggaatatgagaccggcaaactctgtagctaatgggcggcccacttcagcactgggcaaggaggggatccatgaatctggggtacaaagataatctaagccctcaccttagtgccaacagggtgtgctcccacgagactttcagcatccagtagatgggacctcgaggctcgagctgaagcaggcgagagagaaacagctactgcgtgcgtgcgcgcacgcatacacacacacacacacacactggcacagggaggctacaactaagcagcctcagatctgtaaagttgattggtgctttctaaaatgaatgcaattgaaagaaaggagccaaggaagagattaagaaaaagaaccagctgaaccatgaaacaaacaaaaatcctaaaagtgattcttgtcattcaagaaagcaagaggggacaacaatgggaggggtcggagctcttccttcccctctgtggagtcacttttgtattctttttaaccagatttcttaaaatgttgttgttttgtgaatcctgacattggttcttacttttgtatgctgcctcctctgtgccctcccagacgctgactgggaaacacaagaagtacaaccaacaggaaccagcgccaagggcaggcagcggcctccttgctcccctcccttactcctccctctgctgcctcctccccccaccaagtttcagggccctggattgttcccagttcccattgtggtcccttcagagctcctttccaacagcatctctctgtcgaagaaagaagctctgtcaagttagagagagacaatgtgtaggaaatgttcttttttaaaaaaaaataacaaaaacaaaacaaaactatttattttgtgattgttttccttgttaatctgctccaaccacctgaacatctaagtaaacatttatctggtttaatata

SEQ ID NO: 111795 - DNA, 3142 bp, Homo sapiens
  Payload ID: 1906
  Gene Symbol: BRINP3
  Gene Name: bone morphogenetic protein/retinoic acid inducible neural-specific 3
  Uniprot ID: Q76B58
  ENST ID: ENST00000367462
  CDS Start-End: 486-2786
atgactacagccttgctcactagttctctctttatctcgttgtcttcaacacatccttttacttctctttgcagatttatctgtattccacctcctgttctctggggttacacagcttctgcctttccccactgtatggggatgtgcagcctgtaaattttcactttgcttaaggatcaccacgaatcaccccccaccattccccacccccccatataaagcattttcacattctgctttcttgccttgggggttcgtggctctctgtgtaactggtttttacttggttacatgccaccaggaactgctgattattttaaagtcctactaccctgcagctcactactttaccttgatttggaagatcatggaatatctatttgaatcctggatgtatttttctcacagtcttcttgcttcctgaaatttcctctggtgttgagggaaagctgagagaatgaaggctctaaatccccagtggaagcatgatatggcgaagcagagctggtgctgaattgttctctctgatggctctatgggagtggatagcactgagtcttcattgctgggttttagcggttgctgctgtttcggatcagcatgccacaagccccttcgactggctcctctctgataagggacccttccatcgctcacaggaatacacagattttgtggacagaagccggcagggatttagcacaagatacaagatatacagggagtttggccgctggaaagtaaataaccttgcagttgagagaagaaatttccttggctctcctctgcctcttgcccctgaattcttccgcaacataagacttttgggacgtcgacctacccttcagcaaatcacagaaaaccttatcaagaaatatgggacacatttcttgctatctgctactctgggaggagaggagtcactcacaatttttgtggacaagcggaagttgagcaaacgagctgaaggaagtgattccaccaccaatagctcttcggtcactctggagacgctacatcagctagccgcttcttatttcattgacagggacagcacccttcggagacttcaccacattcaaattgcatccactgccataaaggtaacagaaacacggactggtcctcttggctgcagtaactatgacaacctagattctgtcagttctgttctggttcagagtcctgagaataagattcagttgcaagggcttcaagtacttctcccagactatcttcaggaacgttttgtacaagcagctttgagctacattgcttgcaattcagagggagagtttatctgcaaggaaaatgactgctggtgtcactgtggtcccaaatttccagaatgcaactgcccctccatggacattcaagccatggaagagaatcttcttcgaataactgaaacctggaaagcttacaacagtgactttgaggaatcagatgaattcaagttatttatgaaaaggctacctatgaattatttcctcaacacatctactataatgcatttgtggacaatggattctaattttcagcgccgttatgaacaactggagaacagcatgaaacaacttttcctaaaggcgcagaaaattgtacacaagctttttagccttagcaagaggtgtcataaacaacccctcatcagcctgccaagacaaagaacctcaacctactggcttactcgcatccagtcttttctctactgcaatgagaacggcctcctaggcagcttttcagaagagacgcactcgtgcacgtgtccgaatgaccaggtggtctgcaccgcgttcctgccctgcacagtgggagacgcctctgcctgcctgacatgcgcaccagacaaccgcacccgctgcggcacctgcaacaccggctacatgctcagccaggggctctgcaagcctgaagtcgccgagtccaccgatcactatattggctttgaaactgacctgcaagatctcgagatgaaatatctgctgcagaaaacggacagacgaatagaagtccatgccatttttatcagcaatgacatgcgcctcaatagctggtttgatccctcctggcgtaagcggatgctcctcaccttgaagagcaataagtacaagtcaagtctggtccatatgattttgggtctctctttacagatttgcttaactaaaaacagcaccttggagccagtgttggctgtttatgtcaatcccttcggaggcagccactctgagagctggtttatgcctgtgaatgaaaacagctttccagactgggagcggactaagttggacctacccctgcagtgttataactggacattaactctggggaacaaatggaagacattttttgagacagtacacatctacctgagaagtcgcatcaagtccaatggtcccaatggtaatgagagcatttactatgaacctctggagtttattgacccttcccggaacctgggctatatgaaaatcaataacattcaagtgtttggctacagcatgcactttgaccctgaagcaattcgggacctgattttgcagctggactacccctatactcagggatcccaggattcagcacttttgcaactactagagatcagagaccgtgtaaataaactctccccacctggtcagcgtcgtctagatcttttctcttgcttgcttcgtcatagactcaagctgtctactagtgaggtggtgaggatccaatctgctctgcaggcgtttaatgccaaattgccaaacacaatggattatgacacgaccaaattatgtagttaaccataaatgtcaagcacaacccaaaatcttgaaggagtttttacagtgcttttgtggaacagtttatgtttggaagagtaaatttaaattgtcttttcaatatctgtcttatatcagtcaataacattggatggcaatttacacacatgaacttgctgacaatgaatatattatacagcagttttggtttatgaatgacataaatactgacaccagtctagaagacattctactttttacaataaatttcatttgtaattttatatgttccgtggcaatgcttttgtgcattacatcctctagagggaacataaaaagataccaataaaattttgtagctgaacagttattaaaaa

SEQ ID NO: 111796 - DNA, 528 bp, Homo sapiens
  Payload ID: 1906
  Gene Symbol: BRINP3
  Gene Name: bone morphogenetic protein/retinoic acid inducible neural-specific 3
  ENST ID: ENST00000445957
  CDS Start-End: 445-528
ctgatggctgttctcctagtccccaagagttgaaccggagaggcttttactttgcaccaggtcgagaacgtgatcagccctttagagaaggaacctccttgtaacaggaattctgctgggaaacgccgtgtaggcactacctccgaagataagatgcatgtttggagctgtgtaaaatgcccactggctgtttgaaagaaggaaaaggtgactagggttgcaaattaaccttagtatcacttaaaaatattctatctagtcaaatgtacgtaagcaaagaagagagcaccaggatataaaactgccacagcagcttggaagacagatgattcagattttggggactttcttttgcgtgttacatagatttgtttgtcatcatgcagttaagcaggtgttgagggaaagctgagagaatgaaggctctaaatccccagtggaagcatgatatggcgaagcagagctggtgctgaattgttctctctgatggctctatgggagtggatagcactgagtcttcattgctgg

SEQ ID NO: 111797 - DNA, 729 bp, Homo sapiens
  Payload ID: 1906
  Gene Symbol: BRINP3
  Gene Name: bone morphogenetic protein/retinoic acid inducible neural-specific 3
  ENST ID: ENST00000631494
  CDS Start-End: 256-729
ccggtcgtcctgcctgacaagccagtgccatcagagtccgtgacttcatttgaagaaaggagggcttcatataattcaattcaaacattctctttggaggactgctgttgttgcgcaagggtggagggaggaaaaaaaaaagaaaaagaaaaaaaaaactttcagtacagtcagatccagtaaggaacagacagtcagtatttaggtgttgagggaaagctgagagaatgaaggctctaaatccccagtggaagcatgatatggcgaagcagagctggtgctgaattgttctctctgatggctctatgggagtggatagcactgagtcttcattgctgggttttagcggttgctgctgtttcggatcagcatgccacaagccccttcgactggctcctctctgataagggacccttccatcgctcacaggaatacacagattttgtggacagaagccggcagggatttagcacaagatacaagatatacagggagtttggccgctggaaagtaaataaccttgcagttgagagaagaaatttccttggctctcctctgcctcttgcccctgaattcttccgcaacataagacttttgggacgtcgacctacccttcagcaaatcacagaaaaccttatcaagaaatatgggacacatttcttgctatctgctactctgggaggagaggagtcactcacaatttttgtggacaagcggaagttgagcaaa

SEQ ID NO: 111798 - DNA, 642 bp, Homo sapiens
  Payload ID: 1907
  Gene Symbol: BORA
  Gene Name: bora, aurora kinase A activator
  ENST ID: ENST00000377814
  CDS Start-End: 1-642
aaagagtctatgcctgtcgtggaagctggcctggcccccggagctccctggagtcggtactgggggcttcgttttgtacgcaccgactccagggaaatttagatggtctattgatcaactagctgtaataaatcctgtagaaatagacccagaagatattcatcgtcaagctttatacttaagtcattctcgaatagataaagatgtggaagacaaaagacaaaaagccattgaagagtttttcactaaagatgtcatcgtaccctctccttggactgatcatgaagggaaacagctttcacaatgtcattccagtaaatgcactaacataaatagtgactctccagttggaaaaaagctgaccattcattctgagaaaagcgatgctgcttgtcagacattgctgtctcttcctgtggattttaatttagaaaatatattaggtgactattttagagctgatgaatttgcagatcaatctcctggaaacctcagttcttcatccctcagaagaaagctgtttttagatgggaacggaagcatctccgactccttaccttcggcttctcccggaagtcctcacagtggtgttcaaacatcactagagatgttttattcaatagatttgtctcctgtaaagtg

SEQ ID NO: 111799 - DNA, 1673 bp, Homo sapiens
  Payload ID: 1907
  Gene Symbol: BORA
  Gene Name: bora, aurora kinase A activator
  Uniprot ID: Q6PGQ7
  ENST ID: ENST00000377815
  CDS Start-End: 204-1673
aaagagtctatgcctgtcgtggaagctggcctggcccccggagctccctggagtcggtactgggggcttcgttttgtacgcaccgttttctctctgtgctatgggagatgtcaaggaatcaaagatgcaaataacaccagaaactccaggaaggatccctgttttaaatccttttgaaagtcctagtgattattctaatctccatgaacaaactctcgccagtccttctgtttttaaatcaacaaaattaccaaatagataaagatgtggaagacaaaagacaaaaagccattgaagagtttttcactaaagatgtcatcgtaccctctccttggactgatcatgaagggaaacagctttcacaatgtcattccagtaaatgcactaacataaatagtgactctccagttggaaaaaagctgaccattcattctgagaaaagcgatgctgcttgtcagacattgctgtctcttcctgtggattttaatttagaaaatatattaggtgactattttagagctgatgaatttgcagatcaatctcctggaaacctcagttcttcatccctcagaagaaagctgtttttagatgggaacggaagcatctccgactccttaccttcggcttctcccggaagtcctcacagtggtgttcaaacatcactagagatgttttattcaatagatttgtctcctgtaaagtgtaggagccccttgcagacaccaagttcggggcagttttcttctagccctattcaggctagtgcaaaaaaatacagcttgggaagcataactagtccttcgcctatttcttcacccactttctcaccaattgaatttcagataggagagactccactctcagaacaaaggaagtttactgttcattctcctgatgcttcatctggaacaaattctaatgggataactaatccgtgtatcagaagtccttatatagatggctgctcgccaattaaaaattggtctcctatgagacttcagatgtatagtggtggtactcagtatcggacctcagtgattcagataccttttactcttgagactcaaggtgaagatgaggaagataaagagaatattccttccacagatgtctcatcacccgccatggatgctgctggaatacacctacggcagtttagtaatgaggcttctacccatggtacacatttggttgtgactgccatgtctgttacacaaaatcagtccagtgcttctgagaaagaattagcactgttgcaggatgttgaaagggagaaagacaataacactgtggatatggttgatcctatagagatagcagatgagaccacttggattaaggagccggttgataatggcagtttacccatgactgattttgtaagtggcattgccttcagtattgaaaactctcatatgtgcatgtcacctcttgctgaaagcagtgtcattccttgtgaaagcagtaacattcagatggatagtggctataatacgcagaattgtggaagcaatattatggatacagttggggcagaaagttactgcaaagaaagtgatgcacaaacatgtgaagttgagagtaaatctcaagcatttaatatgaagcaagaccacacaacacagaggtgttggatgaaaacagcaagcccttttcaatgcagcagtccatag

SEQ ID NO: 111800 - DNA, 2936 bp, Homo sapiens
  Payload ID: 1907
  Gene Symbol: BORA
  Gene Name: bora, aurora kinase A activator
  ENST ID: ENST00000390667
  CDS Start-End: 95-1954
gaatttggagccacgttcctctgcgcggaacgtggagcgaggagttgccattcgaatttcctacgcggcctccgtgcgattggctggttcgcggatggcgggacgacacgattggctagtcgctcacaagccccgtgccctggttggcccaagacagcgcggaagcggggagttaaagagtctatgcctgtcgtggaagctggcctggcccccggagctccctggagtcggtactgggggcttcgttttgtacgcaccgttttctctctgtgctatgggagatgtcaaggaatcaaagatgcaaataacaccagaaactccaggaaggatccctgttttaaatccttttgaaagtcctagtgattattctaatctccatgaacaaactctcgccagtccttctgtttttaaatcaacaaaattaccaactccagggaaatttagatggtctattgatcaactagctgtaataaatcctgtagaaatagacccagaagatattcatcgtcaagctttatacttaagtcattctcgaatagataaagatgtggaagacaaaagacaaaaagccattgaagagtttttcactaaagatgtcatcgtaccctctccttggactgatcatgaagggaaacagctttcacaatgtcattccagtaaatgcactaacataaatagtgactctccagttggaaaaaagctgaccattcattctgagaaaagcgatgctgcttgtcagacattgctgtctcttcctgtggattttaatttagaaaatatattaggtgactattttagagctgatgaatttgcagatcaatctcctggaaacctcagttcttcatccctcagaagaaagctgtttttagatgggaacggaagcatctccgactccttaccttcggcttctcccggaagtcctcacagtggtgttcaaacatcactagagatgttttattcaatagatttgtctcctgtaaagtgtaggagccccttgcagacaccaagttcggggcagttttcttctagccctattcaggctagtgcaaaaaaatacagcttgggaagcataactagtccttcgcctatttcttcacccactttctcaccaattgaatttcagataggagagactccactctcagaacaaaggaagtttactgttcattctcctgatgcttcatctggaacaaattctaatgggataactaatccgtgtatcagaagtccttatatagatggctgctcgccaattaaaaattggtctcctatgagacttcagatgtatagtggtggtactcagtatcggacctcagtgattcagataccttttactcttgagactcaaggtgaagatgaggaagataaagagaatattccttccacagatgtctcatcacccgccatggatgctgctggaatacacctacggcagtttagtaatgaggcttctacccatggtacacatttggttgtgactgccatgtctgttacacaaaatcagtccagtgcttctgagaaagaattagcactgttgcaggatgttgaaagggagaaagacaataacactgtggatatggttgatcctatagagatagcagatgagaccacttggattaaggagccggttgataatggcagtttacccatgactgattttgtaagtggcattgccttcagtattgaaaactctcatatgtgcatgtcacctcttgctgaaagcagtgtcattccttgtgaaagcagtaacattcagatggatagtggctataatacgcagaattgtggaagcaatattatggatacagttggggcagaaagttactgcaaagaaagtgatgcacaaacatgtgaagttgagagtaaatctcaagcatttaatatgaagcaagaccacacaacacagaggtgttggatgaaaacagcaagcccttttcaatgcagcagtccatagaatgcctctgtcagaatcaaagactaagcttaagagttcctcgcatatatcgttgtgcacaggatcaacatgatggtgactgggaaaaaattacttcaagtaacatgcttagctttccctccttaatgtgaaaaatcaagggcttactgacataggaacaacagaaatgctcctggaacttcaagttgctgaattataagtttattttttatcaataaatatttttatacttacattgagtgatgtgtttaacaacaaattgtgacagagctgagtgctcctatcttacagggtcaatgaactacttattaagccttactggtagcactgaatttagcagttctgagaacatgtgaaactatgttaaaactgaaggcactatatatttttacataaaagcttgaacatacagatgaattataacctatgtgaagaaatcttagatataaaactaacttttcaaagatacaaaagaaattaaacaggtttcctgaaattttagttcttggtctgttcacctctgtggggaaaattcttagttccagtgataactgttctagttactacttttaagtatgtaaatactagaaaggtagtactagtgacatcatcacgtgtattgttatctatggggcaaatgtgtggtgcccagaataaaatatacctcatgcctagggtagggacatcctttccagctcaaacgtgggtagggatgtgggagaataagaatgtgggagaaccaagagaaaaagtggggctgggagagtggagttcccgtagggcataggcctgtgaagtaacactggggcagatatgtatgttatatacaactatttttttaaaaaacttatatccatgttgggagtagatgggtatataacagtttggaaatactatctttggagaatgtatttttgtatttataaatcaacttttaaaaactgtctcattcaaaagggaataaagacctgtgttatcaatg

SEQ ID NO: 111801 - DNA, 3034 bp, Homo sapiens
  Payload ID: 1907
  Gene Symbol: BORA
  Gene Name: bora, aurora kinase A activator
  ENST ID: ENST00000613797
  CDS Start-End: 148-2052
agcgcggaagcggggagttaaagagtctatgcctgtcgtggaagctggcctggcccccggagctccctggagtcggtactgggggcttcgttttgtacgcaccggtaggtacgctctttgtggtccctggcctttcctcctgtctgaatggagaggtttcttttcccagctcctgacttgcctgcccgctcgcccctggtgaatgggagcagtcagggagtaggtgtggaagagaggggcaccagaaagagtggccacgtagggttgggggcgacgcctccttcgcactccatccagggaagccggctgcatctcaaccttccagaagtagactcttttccaccccaccccgccaagttttctctctgtgctatgggagatgtcaaggaatcaaagatgcaaataacaccagaaactccaggaaggatccctgttttaaatccttttgaaagtcctagtgattattctaatctccatgaacaaactctcgccagtccttctgtttttaaatcaacaaaattaccaactccagggaaatttagatggtctattgatcaactagctgtaataaatcctgtagaaatagacccagaagatattcatcgtcaagctttatacttaagtcattctcgaatagataaagatgtggaagacaaaagacaaaaagccattgaagagtttttcactaaagatgtcatcgtaccctctccttggactgatcatgaagggaaacagctttcacaatgtcattccagtaaatgcactaacataaatagtgactctccagttggaaaaaagctgaccattcattctgagaaaagcgatgctgcttgtcagacattgctgtctcttcctgtggattttaatttagaaaatatattaggtgactattttagagctgatgaatttgcagatcaatctcctggaaacctcagttcttcatccctcagaagaaagctgtttttagatgggaacggaagcatctccgactccttaccttcggcttctcccggaagtcctcacagtggtgttcaaacatcactagagatgttttattcaatagatttgtctcctgtaaagtgtaggagccccttgcagacaccaagttcggggcagttttcttctagccctattcaggctagtgcaaaaaaatacagcttgggaagcataactagtccttcgcctatttcttcacccactttctcaccaattgaatttcagataggagagactccactctcagaacaaaggaagtttactgttcattctcctgatgcttcatctggaacaaattctaatgggataactaatccgtgtatcagaagtccttatatagatggctgctcgccaattaaaaattggtctcctatgagacttcagatgtatagtggtggtactcagtatcggacctcagtgattcagataccttttactcttgagactcaaggtgaagatgaggaagataaagagaatattccttccacagatgtctcatcacccgccatggatgctgctggaatacacctacggcagtttagtaatgaggcttctacccatggtacacatttggttgtgactgccatgtctgttacacaaaatcagtccagtgcttctgagaaagaattagcactgttgcaggatgttgaaagggagaaagacaataacactgtggatatggttgatcctatagagatagcagatgagaccacttggattaaggagccggttgataatggcagtttacccatgactgattttgtaagtggcattgccttcagtattgaaaactctcatatgtgcatgtcacctcttgctgaaagcagtgtcattccttgtgaaagcagtaacattcagatggatagtggctataatacgcagaattgtggaagcaatattatggatacagttggggcagaaagttactgcaaagaaagtgatgcacaaacatgtgaagttgagagtaaatctcaagcatttaatatgaagcaagaccacacaacacagaggtgttggatgaaaacagcaagcccttttcaatgcagcagtccatagaatgcctctgtcagaatcaaagactaagcttaagagttcctcgcatatatcgttgtgcacaggatcaacatgatggtgactgggaaaaaattacttcaagtaacatgcttagctttccctccttaatgtgaaaaatcaagggcttactgacataggaacaacagaaatgctcctggaacttcaagttgctgaattataagtttattttttatcaataaatatttttatacttacattgagtgatgtgtttaacaacaaattgtgacagagctgagtgctcctatcttacagggtcaatgaactacttattaagccttactggtagcactgaatttagcagttctgagaacatgtgaaactatgttaaaactgaaggcactatatatttttacataaaagcttgaacatacagatgaattataacctatgtgaagaaatcttagatataaaactaacttttcaaagatacaaaagaaattaaacaggtttcctgaaattttagttcttggtctgttcacctctgtggggaaaattcttagttccagtgataactgttctagttactacttttaagtatgtaaatactagaaaggtagtactagtgacatcatcacgtgtattgttatctatggggcaaatgtgtggtgcccagaataaaatatacctcatgcctagggtagggacatcctttccagctcaaacgtgggtagggatgtgggagaataagaatgtgggagaaccaagagaaaaagtggggctgggagagtggagttcccgtagggcataggcctgtgaagtaacactggggcagatatgtatgttatatacaactatttttttaaaaaacttatatccatgttgggagtagatgggtatataacagtttggaaatactatctttggagaatgtatttttgtatttataaatcaacttttaaaaactgtctcattcaaaagggaataaagacctgtgttatcaatg

SEQ ID NO: 111802 - DNA, 533 bp, Homo sapiens
  Payload ID: 1907
  Gene Symbol: BORA
  Gene Name: bora, aurora kinase A activator
  ENST ID: ENST00000618209
  CDS Start-End: 92-436
tttggagccacgttcctctgcgcggaacgtggagcgaggagttgccattcgaatttcctacgcggcctccgtgcgattggctggttcgcggatggcgggacgacacgattggctagtcgctcacaagccccgtgccctggttggcccaagacagcgcggaagcggggagttaaagagtctatgcctgtcgtggaagctggcctggcccccggagctccctggagtcggtactgggggcttcgttttgtacgcaccgttttctctctgtgctatgggagatgtcaaggaatcaaagatgcaaataacaccagaaactccaggaaggatccctgttttaaatccttttgaaagtcctagtgattattctaatctccatgaacaaactctcgccagtccttctgtttttaaatcaacaaaattaccagcactaacataaatagtgactctccagttggaaaaaagctgaccattcattctgagaaaagcgatgctgcttgtcagacattgctgtctcttcctgtggattttaattt

SEQ ID NO: 111803 - DNA, 2670 bp, Homo sapiens
  Payload ID: 1908
  Gene Symbol: BORCS7-ASMT
  Gene Name: BORCS7-ASMT readthrough (NMD candidate)
  ENST ID: ENST00000299353
  CDS Start-End: 16-336
cgttcgctaactgaaatgatggcgactggaacgccagagtctcaagcgcggttcggtcagtccgtgaaggggcttctcacggagaaggtgaccacctgtggtactgacgtaatcgcgctcaccaagcaggtgctgaaaggctcccggagctccgagctgctaggtcaggcagctcgaaacatggtactccaggaagatgccatcttgcactcagaagatagtttaaggaagatggcaataataacaacacatcttcaataccagcaagaagctattcagaagaatgttgaacagtcatcggatctacaggaccagttgaatcatctgttgaaatagaatgacattggctgcacttcgtgacgctgagatacagaaggacgtgcagacctactacgggcaggtgctgaagagatcggcagacctccagaccaacggctgtgtcaccacagccaggccggtccccaagcacatccgggaagccttgcaaaatgtacacgaagaagtagccctaagatattatggctgtggtctggtgatccctgagcatctagaaaactgctggattttggatctgggtagtggaagtggcagagattgctatgtacttagccagctggttggtgaaaaaggacacgtgactggaatagacatgaccaaaggccaggtggaagtggctgaaaagtatcttgactatcacatggaaaaatatggcttccaggcatctaatgtgacttttattcatggctacattgagaagttgggagaggctggaatcaagaatgagagccatgatattgttgtatcaaactgtgttattaaccttgtgcctgataaacaacaagtgcttcaggaggcatatcgggtgctgaagcatggtggggagttatatttcagtgacgtctatacgagccttgaactgccagaagaaatcaggacacacaaagttttatggggtgagtgtctgggtggtgctttatactggaaggaacttgctgtccttgctcaaaaaattgggttctgccctccacgtttggtcactgccaatctcattacaattcaaaacaaggaactggaaagagttatcggtgactgtcgttttgtttctgcaacatttcgcctcttcaaacactctaagacaggaccaaccaagagatgccaagttatttacaatggaggaattacaggacatgaaaaagaactaatgtttgatgccaattttacatttaaggaaggtgaaattgttgaagtggatgaagaaacagcagctatcttgaagaattcaagatttgctcaagattttctgatcagaccaattggagagaagttgccaacatctggaggctgttctgctttggagttaaaggatataatcacagatccatttaagcttgcagaagagtctgacagtatgaagtccagatgtgtccctgatgctgctggaggctgctgtggcacaaagaaaagctgctaaatctatagccaaccaggggaccacagtagtgggcaagagtgatctgcatgttttttaacctgcttttccccatagcacagaccataagaaacaacaaatggggccgggcacagtggctcatgcctataatcccagcactttgggaggccgaggcaggcagatcacctgaggtcaggagtttgataccagcctggccaacatggtgaaatcctgtctctaccaaaaatacaaaaaaaattagctgggcatggtggtgcacacctatagtctcagctactcgggaggctgaggcaggagaattgcttgaacccaggaagtagaggctgcagtgagtaagcatcacgccactgtactccagcctgggcaacagagcaagactctgtctcaaaagcaaaaaaaaaaaaaaaaaaagaaagaaagaaaaagaaaacaacaaatggcagagagccaccatattccaaatcactgaaaaaaataaatgaattatttttatttatttatttatttttttgagatggagtctcggtctgttgcccaggctgaagtgcagtggccccatctcaactcactgcaagctccacctcctgggttcacgccattctcctgcctcagactcccaagtagctgggactacaggcacctaccaccatgcccagctaattttttgtatttttagtagagacggggtttcaccatgttagccaggatggtcttgatctcctgacctcgtgatccgcccgcctcggcctcccaaagtgctgggattacaagcatgagccactgcgcccggccataaatgaattatttttaagaggcattgattaaagattcacagcaaatcactagttaagcagattttttttctatttcctacttcaaagttctggtgccacatagtggtcagaaatggaacagagaagctgtcttaagccttgttcaagaagcaggaaaggcatcagaagaagtaacagttggcagagggtctcaggaaaaacatcttccttctgatcttttgcatagcaccttttggaattttcatcatgtttgcttattaaacaaagctcctactgccatcatactaatcatgcaaaaagattgccaaatcatgtttggtaggaggacttttgaggtagcttttgaacaaatgtttttttcttttttctttttttttgcaataaagaaaacaaattaatcataaa

SEQ ID NO: 111804 - DNA, 1492 bp, Homo sapiens
  Payload ID: 1909
  Gene Symbol: BORCS8-MEF2B
  Gene Name: BORCS8-MEF2B readthrough
  ENST ID: ENST00000444486
  CDS Start-End: 268-1365
cggccgcggtcgctatggaggagccggagatgcagctcaaggggaagaaagcgccgtgaagaacctggtggacagcagcgtctacttccgcagcgtggagggtctgctcaaacaggccatcagcatccgggaccatatgaatgccagtgcccagggccacagcccggaggaaccacccccgccctcctcagcctgatcctggaagagactcggggccccccagcctccgccaacccagacaaagatcattccactcagcctgggacgatggggaggaaaaaaatccagatctcccgcatcctggaccaaaggaatcggcaggtgacgttcaccaagcggaagttcgggctgatgaagaaggcctatgagctgagcgtgctctgtgactgtgagatagccctcatcatcttcaacagcgccaaccgcctcttccagtatgccagcacggacatggaccgtgtgctgctgaagtacacagagtacagcgagccccacgagagccgcaccaacactgacatcctcgagacgctgaagcggaggggcattggcctcgatgggccagagctggagccggatgaagggcctgaggagccaggagagaagtttcggaggctggcaggcgaagggggtgatccggccttgccccgaccccggctgtatcctgcagctcctgctatgcccagcccagatgtggtatacggggccttaccgccaccaggctgtgaccccagtgggcttggggaagcactgcccgcccagagccgcccatctcccttccgaccagcagcccccaaagccgggcccccaggcctggtgcaccctctcttctcaccaagccacctcaccagcaagacaccacccccactgtacctgccgacggaagggcggaggtcagacctgcctggtggcctggctgggccccgagggggactaaacacctccagaagcctctacagtggcctgcagaacccctgctccactgcaactcccggacccccactggggagcttccccttcctccccggaggccccccagtgggggccgaagcctgggcgaggagggtcccccaacccgcggcgcctccccgccgacccccccagtcagcatcaagtctgagcgcctctctccggcccccgggggccccggcgactttcctaagaccttcccctatcccttgctcctcgcccggtccctggcagagcctctgcggcctgggcccgccctgcgccggctgcccttggccgacggctggccccggtaggagatcacccggtggcaccagcccagagcgctcgccaggtacggcgagggcacgtggggaccccacctccctccaggcctcttcagagaagacccaacagtgacgcccccctccgcggtgggggcttggaggtgggcggctggactcaatccaccctggggggctcctttccttcttcctatttgtgtgtatatccacaaataaaacgcgcgtggcgtccgtggaccaga

SEQ ID NO: 111805 - DNA, 1406 bp, Homo sapiens
  Payload ID: 1909
  Gene Symbol: BORCS8-MEF2B
  Gene Name: BORCS8-MEF2B readthrough
  ENST ID: ENST00000514819
  CDS Start-End: 148-1296
gttcgctcggccgcggtcgctatggaggagccggagatgcagctcaaggggaagaaagcgccgtgaagaacctggtggacagcagcgtctacttccgcagcgtggagggtctgctcaaacaggccatcagcatccgggaccatatgaatgccagtgcccagggccacagacaaagatcattccactcagcctgggacgatggggaggaaaaaaatccagatctcccgcatcctggaccaaaggaatcggcaggtgacgttcaccaagcggaagttcgggctgatgaagaaggcctatgagctgagcgtgctctgtgactgtgagatagccctcatcatcttcaacagcgccaaccgcctcttccagtatgccagcacggacatggaccgtgtgctgctgaagtacacagagtacagcgagccccacgagagccgcaccaacactgacatcctcgagacgctgaagcggaggggcattggcctcgatgggccagagctggagccggatgaagggcctgaggagccaggagagaagtttcggaggctggcaggcgaagggggtgatccggccttgccccgaccccggctgtatcctgcagctcctgctatgcccagcccagatgtggtatacggggccttaccgccaccaggctgtgaccccagtgggcttggggaagcactgcccgcccagagccgcccatctcccttccgaccagcagcccccaaagccgggcccccaggcctggtgcaccctctcttctcaccaagccacctcaccagcaagacaccacccccactgtacctgccgacggaagggcggaggtcagacctgcctggtggcctggctgggccccgagggggactaaacacctccagaagcctctacagtggcctgcagaacccctgctccactgcaactcccggacccccactggggagcttccccttcctccccggaggccccccagtgggggccgaagcctgggcgaggagggtcccccaacccgcggcgcctccccgccgacccccccagtcagcatcaagtctgagcgcctctctccggcccccgggggccccggcgactttcctaagaccttcccctatcccttgctcctcgcccggtccctggcagagcctctgcggcctgggcccgccctgcgccggctgcccttggccgacggctggccccggtaggagatcacccggtggcaccagcccagagcgctcgccaggtacggcgagggcacgtggggaccccacctccctccaggcctcttcagagaagacccaacagtgacgcccccctccgcggtgggggcttggaggtgggcggctggactcaatccaccctggggggctcctttccttcttcctatttgtgtgtatatccacaaataaaacgcgcgt

SEQ ID NO: 111806 - DNA, 1695 bp, Homo sapiens
  Payload ID: 1909
  Gene Symbol: BORCS8-MEF2B
  Gene Name: BORCS8-MEF2B readthrough
  ENST ID: ENST00000354191
  CDS Start-End: 42-401
gcttccggtgccgtttcccggttcgctcggccgcggtcgctatggaggagccggagatgcagctcaaggggaagaaagtcacggacaagttcactgagagcgtctacgtcctggccaacgagccatccgtggccctgtaccggctgcaggagcatgtgcgtcgctccctccccgagctggcccagcacaaggcagacatgcagcgttgggaggagcagagccagggagccatctacactgtggagtacgcctgcagcgccgtgaagaacctggtggacagcagcgtctacttccgcagcgtggagggtctgctcaaacaggccatcagcatccgggaccatatgaatgccagtgcccagggccacagcccggaggaaccacccccgccctcctcagcctgatcctggaagagactcggggccccccagcctccgccaacccagacaaagatcattccactcagcctgggacgatggggaggaaaaaaatccagatctcccgcatcctggaccaaaggaatcggcaggtgacgttcaccaagcggaagttcgggctgatgaagaaggcctatgagctgagcgtgctctgtgactgtgagatagccctcatcatcttcaacagcgccaaccgcctcttccagtatgccagcacggacatggaccgtgtgctgctgaagtacacagagtacagcgagccccacgagagccgcaccaacactgacatcctcgagacgctgaagcggaggggcattggcctcgatgggccagagctggagccggatgaagggcctgaggagccaggagagaagtttcggaggctggcaggcgaagggggtgatccggccttgccccgaccccggctgtatcctgcagctcctgctatgcccagcccagatgtggtatacggggccttaccgccaccaggctgtgaccccagtgggcttggggaagcactgcccgcccagagccgcccatctcccttccgaccagcagcccccaaagccgggcccccaggcctggtgcaccctctcttctcaccaagccacctcaccagcaagacaccacccccactgtacctgccgacggaagggcggaggtcagacctgcctggtggcctggctgggccccgagggggactaaacacctccagaagcctctacagtggcctgcagaacccctgctccactgcaactcccggacccccactggggagcttccccttcctccccggaggccccccagtgggggccgaagcctgggcgaggagggtcccccaacccgcggcgcctccccgccgacccccccagtcagcatcaagtctgagcgcctctctccggcccccgggggccccggcgactttcctaagaccttcccctatcccttgctcctcgcccggtccctggcagagcctctgcggcctgggcccgccctgcgccggctgcccttggccgacggctggccccggtaggagatcacccggtggcaccagcccagagcgctcgccaggtacggcgagggcacgtggggaccccacctccctccaggcctcttcagagaagacccaacagtgacgcccccctccgcggtgggggcttggaggtgggcggctggactcaatccaccctggggggctcctttccttcttcctatttgtgtgtatatccacaaataaaacgcgcgtggcgtccgtggacca

SEQ ID NO: 111807 - DNA, 554 bp, Homo sapiens
  Payload ID: 1909
  Gene Symbol: BORCS8-MEF2B
  Gene Name: BORCS8-MEF2B readthrough
  ENST ID: ENST00000602689
  CDS Start-End: 6-365
tcgctatggaggagccggagatgcagctcaaggggaagaaagtcacggacaagttcactgagagcgtctacgtcctggccaacgagccatccgtggccctgtaccggctgcaggagcatgtgcgtcgctccctccccgagctggcccagcacaaggcagacatgcagcgttgggaggagcagagccagggagccatctacactgtggagtacgcctgcagcgccgtgaagaacctggtggacagcagcgtctacttccgcagcgtggagggtctgctcaaacaggccatcagcatccgggaccatatgaatgccagtgcccagggccacagcccggaggaaccacccccgccctcctcagcctgatcctggaagagactcggggccccccagcctccgccaacccaggtgtaacttggacccatttctcttgcgtgaatattgaacatcgaggagcggaattcctgggtcacaggacaaagatcattccactcagcctgggacgatggggaggaaaaaaatccagatctcccgcatcctggaccaaaggaatcg

SEQ ID NO: 111808 - DNA, 1804 bp, Homo sapiens
  Payload ID: 1909
  Gene Symbol: BORCS8-MEF2B
  Gene Name: BORCS8-MEF2B readthrough
  ENST ID: ENST00000602804
  CDS Start-End: 42-401
gcttccggtgccgtttcccggttcgctcggccgcggtcgctatggaggagccggagatgcagctcaaggggaagaaagtcacggacaagttcactgagagcgtctacgtcctggccaacgagccatccgtggccctgtaccggctgcaggagcatgtgcgtcgctccctccccgagctggcccagcacaaggcagacatgcagcgttgggaggagcagagccagggagccatctacactgtggagtacgcctgcagcgccgtgaagaacctggtggacagcagcgtctacttccgcagcgtggagggtctgctcaaacaggccatcagcatccgggaccatatgaatgccagtgcccagggccacagcccggaggaaccacccccgccctcctcagcctgatcctggaagagactcggggccccccagcctccgccaacccagacaaagatcattccactcagcctgggacgatggggaggaaaaaaatccagatctcccgcatcctggaccaaaggaatcggcaggtgacgttcaccaagcggaagttcgggctgatgaagaaggcctatgagctgagcgtgctctgtgactgtgagatagccctcatcatcttcaacagcgccaaccgcctcttccagtatgccagcacggacatggaccgtgtgctgctgaagtacacagagtacagcgagccccacgagagccgcaccaacactgacatcctcgagacgctgaagcggaggggcattggcctcgatgggccagagctggagccggatgaagggcctgaggagccaggagagaagtttcggaggctggcaggcgaagggggtgatccggccttgccccgaccccggctgtatcctgcagctcctgctatgcccagcccagatgtggtatacggggccttaccgccaccaggctgtgaccccagtgggcttggggaagcactgcccgcccagagccgcccatctcccttccgaccagcagcccccaaagccgggcccccaggcctggtgcaccctctcttctcaccaagccacctcaccagcaagacaccacccccactgtacctgccgacggaagggcggaggtcagacctgcctggtggcctggctgggccccgagggggactaaacacctccagaagcctctacagtggcctgcagaacccctgctccactgcaactcccggacccccactggggagcttccccttcctccccggaggccccccagaatatggcctgggagaccctccaccgccccctggcttgttgcagccccccaccctggccccctggcagccctcgaggggtgatgggccccccgccgtgtcctcccagcccagtgggggccgaagcctgggcgaggagggtcccccaacccgcggcgcctccccgccgacccccccagtcagcatcaagtctgagcgcctctctccggcccccgggggccccggcgactttcctaagaccttcccctatcccttgctcctcgcccggtccctggcagagcctctgcggcctgggcccgccctgcgccggctgcccttggccgacggctggccccggtaggagatcacccggtggcaccagcccagagcgctcgccaggtacggcgagggcacgtggggaccccacctccctccaggcctcttcagagaagacccaacagtgacgcccccctccgcggtgggggcttggaggtgggcggctggactcaatccaccctggggggctcctttccttcttcctatttgtgtgtatatccacaaataaaacgcgcgtggcgtccgtgga

SEQ ID NO: 111809 - DNA, 1664 bp, Homo sapiens
  Payload ID: 1909
  Gene Symbol: BORCS8-MEF2B
  Gene Name: BORCS8-MEF2B readthrough
  ENST ID: ENST00000630940
  CDS Start-End: 12-371
ccgcggtcgctatggaggagccggagatgcagctcaaggggaagaaagtcacggacaagttcactgagagcgtctacgtcctggccaacgagccatccgtggccctgtaccggctgcaggagcatgtgcgtcgctccctccccgagctggcccagcacaaggcagacatgcagcgttgggaggagcagagccagggagccatctacactgtggagtacgcctgcagcgccgtgaagaacctggtggacagcagcgtctacttccgcagcgtggagggtctgctcaaacaggccatcagcatccgggaccatatgaatgccagtgcccagggccacagcccggaggaaccacccccgccctcctcagcctgatcctggaagagactcggggccccccagcctccgccaacccagacaaagatcattccactcagcctgggacgatggggaggaaaaaaatccagatctcccgcatcctggaccaaaggaatcggcaggtgacgttcaccaagcggaagttcgggctgatgaagaaggcctatgagctgagcgtgctctgtgactgtgagatagccctcatcatcttcaacagcgccaaccgcctcttccagtatgccagcacggacatggaccgtgtgctgctgaagtacacagagtacagcgagccccacgagagccgcaccaacactgacatcctcgagacgctgaagcggaggggcattggcctcgatgggccagagctggagccggatgaagggcctgaggagccaggagagaagtttcggaggctggcaggcgaagggggtgatccggccttgccccgaccccggctgtatcctgcagctcctgctatgcccagcccagatgtggtatacggggccttaccgccaccaggctgtgaccccagtgggcttggggaagcactgcccgcccagagccgcccatctcccttccgaccagcagcccccaaagccgggcccccaggcctggtgcaccctctcttctcaccaagccacctcaccagcaagacaccacccccactgtacctgccgacggaagggcggaggtcagacctgcctggtggcctggctgggccccgagggggactaaacacctccagaagcctctacagtggcctgcagaacccctgctccactgcaactcccggacccccactggggagcttccccttcctccccggaggccccccagtgggggccgaagcctgggcgaggagggtcccccaacccgcggcgcctccccgccgacccccccagtcagcatcaagtctgagcgcctctctccggcccccgggggccccggcgactttcctaagaccttcccctatcccttgctcctcgcccggtccctggcagagcctctgcggcctgggcccgccctgcgccggctgcccttggccgacggctggccccggtaggagatcacccggtggcaccagcccagagcgctcgccaggtacggcgagggcacgtggggaccccacctccctccaggcctcttcagagaagacccaacagtgacgcccccctccgcggtgggggcttggaggtgggcggctggactcaatccaccctggggggctcctttccttcttcctatttgtgtgtatatccacaaataaaacgcgcgtggcgtccgtggacc

SEQ ID NO: 111810 - DNA, 2742 bp, Homo sapiens
  Payload ID: 1910
  Gene Symbol: BOLL
  Gene Name: boule-like RNA-binding protein
  Uniprot ID: Q8N9W6
  ENST ID: ENST00000282278
  CDS Start-End: 542-1066
agacgccccggctcggagtcccagggccacagccgaaactcgccctcccgcgcccctctccggcttgcagcgcccgcccgcaccgccacctgccacccgaggcgacgcagtccgcttctccccacccgccaggtggcaggttcagggccggggtccgagcctgcttccctgcagctgccacagccaccctcgccgccagggggcgagagtcccaggcaggacaagcagcgctgctgccttggcgtgaaggtggtttcaaactttaggcttcttttccctaccccgcgtctctgaagagcagagaggaagatggaaaccgagtccgggccgcaaacatcaaaccagatgcaaacagattcattatctccatcccctaatcctgtgtcacctgtgcctttgaataacccaacaagtgccccaagatatggaacagtgatccctaatcgcatctttgtaggaggaattgattttaagacaaacgaaagtgatttaagaaaatttttttcccagtatgggtctgtgaaagaagtgaagattgtaaatgacagagctggagtatccaaagggttctagtataatgccagcagctggaacaatgtatctaacaacttcaactggatatccttatacttaccataatggtgttgcttattttcatactccagaggtaacttcggtcccaccgccttggccttcacgttctgtatgtagctcccctgtgatggtagctcagcccatttatcagcaacctgcatatcactaccaggccaccacacagtatttaccaggacagtggcagtggagtgttcctcagccttctgcctcttctgctccattcttatacctgcaaccttctgaggttatttatcaaccagtggaaattgcacaggatggtggatgtgttcctcctccactgtctctgatggaaacttcagttccagagccttattctgatcatggagttcaagcaacatatcaccaggtttatgctccaagtgccatcactatgcctgcgcctgtgatgcagcctgagccaattaaaacagtgtggagcattcattattaagacaattgggcagctctattccagctcaactgatttcttgtccaatgatccttgcgtggccgagatccagcttcaacgaaccagctagaagctgcccgttgtgaaacttagtgttagttaatacctcaccatactcagttattccactataagctgtctaaatttgatgaaatttgctttttcagctgttctacaaaattatttaggtagatgtggcatgttggttttttatgtgctaacctaactgtaatgaccttttctacaacatgttttatccattccataaataataaccacattgggaatagtgaggtgtcttttattttctctgctttgtgttattttttcttatcaaacaattagatgttatgtttcatattatttgatatttattttcatatttaggataagaatcatttttaattataatacttttaatactttcatatattttacaacagtatactatttaatattaatgacaattctatttttgctttgctgttttgtcatttaatatgcttttgtctaatttttaattcatttattactgttactccttatttaattttgcgtctgccatggttttcagaatctgaatagtatttatacttcttttttataacattttccaaatattagaaataccatcaacatgatcagtattcttgccttttcatgtaatttgactatattaaattttttctccagtgtttgagacaatattgaaatcttcctataacataatttatttggtatcaaattttataaaatatggatccacctttggaattttgataaaagggttcatctctgacatgatcccataacactgactgaaattccaccaaattactgttctttgaatgctttaatccttaaaccttttcttctgatatgcaaccaatatattcaattatatatgtgattaatttttaaaaggacaattgttttcataaaatgcaaaactattttttacaccaaaggaaaattttagattctgattctaaatccgatttttactataaaattggaaaatagatgggaggggtgtcattcattgttcaaaaggtacagaacaaatcataggggtttttaatctctaaaatttctacagtagtacaggaaatattcctctttacattcatttgcagttctttcactgacctcctaattttaggtggagggggcagggggagccataaaagttggtattaccctaataaatctatctctttcctcccctgtttcaaccccacatgtattccatgctcagcagcagcagcagaaatagtaggatatagatcacaaaggtttttctggtgagtcaaatagggtgttttcttttgaaactgtaatgaatatgtttgccagtcaaatggcttcatgagaacagtagaaccttatgaatgtatactagcatacaaggatctcaaatacattaattattctcagttttaggaatgtaaatagattaagtcccacaatgaaatttcagaagtttttgttctgtaagtaaaaaattactaaccactgatgttcaagattttcttttaatagcactatccttgagaaccaaaaagtttatgttttgattttcaaatgttaaacaagatgctaaacaaatcctggactgttaataaaaattaattatgtattattggataaggaatttt

SEQ ID NO: 111811 - DNA, 3135 bp, Homo sapiens
  Payload ID: 1910
  Gene Symbol: BOLL
  Gene Name: boule-like RNA-binding protein
  Uniprot ID: Q8N9W6
  ENST ID: ENST00000321801
  CDS Start-End: 572-1459
acaccagtcttcggaagtcgcccgtcaaccggcttcttctacctcagtaaagccttaaggtcacctcaacctctcgaaacccaccagtcccagaggccgactcttctcaagtggaggagaggggaaggcgtgcatggagctttgcctgaccgctcgctctctcctccccagccgtctgagagaaggcgagaggggtcccagaaccgagccctcgctccgcacgccccacgcccgccccgctgtgccgtgcgctctgcccctgagacgccccggctcggagtcccagggccacagccgaaactcgccctcccgcgcccctctccggcttgcagcgcccgcccgcaccgccacctgccacccgaggcgacgcagtccgcttctccccacccgccaggtggcaggttcagggccggggtccgagcctgcttccctgcagctgccacagccaccctcgccgccagggggcgagagtcccaggcaggacaagcagcgctgctgccttggcgtgaaggtggtttcaaactttaggcttcttttccctaccccgcgtctctgaagagcagagaggaagatggaaaccgagtccgggccgcaaacatcaaaccagatgcaaacagattcattatctccatcccctaatcctgtgtcacctgtgcctttgaataacccaacaagtgccccaagatatggaacagtgatccctaatcgcatctttgtaggaggaattgattttaagacaaacgaaagtgatttaagaaaatttttttcccagtatgggtctgtgaaagaagtgaagattgtaaatgacagagctggagtatccaaagggtatggtttcgtcacttttgaaacacaagaagatgcacaaaaaattttacaagaggctgaaaaacttaattataaggataagaagctgaacattggtccagcaataagaaaacaacaagtagggatccctcgttctagtataatgccagcagctggaacaatgtatctaacaacttcaactggatatccttatacttaccataatggtgttgcttattttcatactccagaggtaacttcggtcccaccgccttggccttcacgttctgtatgtagctcccctgtgatggtagctcagcccatttatcagcaacctgcatatcactaccaggccaccacacagtatttaccaggacagtggcagtggagtgttcctcagccttctgcctcttctgctccattcttatacctgcaaccttctgaggttatttatcaaccagtggaaattgcacaggatggtggatgtgttcctcctccactgtctctgatggaaacttcagttccagagccttattctgatcatggagttcaagcaacatatcaccaggtttatgctccaagtgccatcactatgcctgcgcctgtgatgcagcctgagccaattaaaacagtgtggagcattcattattaagacaattgggcagctctattccagctcaactgatttcttgtccaatgatccttgcgtggccgagatccagcttcaacgaaccagctagaagctgcccgttgtgaaacttagtgttagttaatacctcaccatactcagttattccactataagctgtctaaatttgatgaaatttgctttttcagctgttctacaaaattatttaggtagatgtggcatgttggttttttatgtgctaacctaactgtaatgaccttttctacaacatgttttatccattccataaataataaccacattgggaatagtgaggtgtcttttattttctctgctttgtgttattttttcttatcaaacaattagatgttatgtttcatattatttgatatttattttcatatttaggataagaatcatttttaattataatacttttaatactttcatatattttacaacagtatactatttaatattaatgacaattctatttttgctttgctgttttgtcatttaatatgcttttgtctaatttttaattcatttattactgttactccttatttaattttgcgtctgccatggttttcagaatctgaatagtatttatacttcttttttataacattttccaaatattagaaataccatcaacatgatcagtattcttgccttttcatgtaatttgactatattaaattttttctccagtgtttgagacaatattgaaatcttcctataacataatttatttggtatcaaattttataaaatatggatccacctttggaattttgataaaagggttcatctctgacatgatcccataacactgactgaaattccaccaaattactgttctttgaatgctttaatccttaaaccttttcttctgatatgcaaccaatatattcaattatatatgtgattaatttttaaaaggacaattgttttcataaaatgcaaaactattttttacaccaaaggaaaattttagattctgattctaaatccgatttttactataaaattggaaaatagatgggaggggtgtcattcattgttcaaaaggtacagaacaaatcataggggtttttaatctctaaaatttctacagtagtacaggaaatattcctctttacattcatttgcagttctttcactgacctcctaattttaggtggagggggcagggggagccataaaagttggtattaccctaataaatctatctctttcctcccctgtttcaaccccacatgtattccatgctcagcagcagcagcagaaatagtaggatatagatcacaaaggtttttctggtgagtcaaatagggtgttttcttttgaaactgtaatgaatatgtttgccagtcaaatggcttcatgagaacagtagaaccttatgaatgtatactagcatacaaggatctcaaatacattaattattctcagttttaggaatgtaaatagattaagtcccacaatgaaatttcagaagtttttgttctgtaagtaaaaaattactaaccactgatgttcaagattttcttttaatagcactatccttgagaaccaaaaagtttatgttttgattttcaaatgttaaacaagatgctaaacaaatcctggactgttaataaaaattaattatgtattattggataaggaatttt

SEQ ID NO: 111812 - DNA, 2838 bp, Homo sapiens
  Payload ID: 1910
  Gene Symbol: BOLL
  Gene Name: boule-like RNA-binding protein
  Uniprot ID: Q8N9W6
  ENST ID: ENST00000392296
  CDS Start-End: 311-1162
aatcagggagcgccgcgcgagggtggggaccagctgcgcacgaggccagcggcggggtcgctgccgttgaggcttcccgccactgctgctggcggatttgtggggcaaaatttctcgctggctagccttcttttccctcccgcactttggtggggagggggtggatcctcgtttcggtgcccaagttcacgatgacccgagagaactcgaggaagttgtcgccgcggccatttcccccagtgccgcaacttgctggccttggagggggaggagcgccgaggcagtgactgcgacgcaaacatcaaaccagatgcaaacagattcattatctccatcccctaatcctgtgtcacctgtgcctttgaataacccaacaagtgccccaagatatggaacagtgatccctaatcgcatctttgtaggaggaattgattttaagacaaacgaaagtgatttaagaaaatttttttcccagtatgggtctgtgaaagaagtgaagattgtaaatgacagagctggagtatccaaagggtatggtttcgtcacttttgaaacacaagaagatgcacaaaaaattttacaagaggctgaaaaacttaattataaggataagaagctgaacattggtccagcaataagaaaacaacaagtagggatccctcgttctagtataatgccagcagctggaacaatgtatctaacaacttcaactggatatccttatacttaccataatggtgttgcttattttcatactccagaggtaacttcggtcccaccgccttggccttcacgttctgtatgtagctcccctgtgatggtagctcagcccatttatcagcaacctgcatatcactaccaggccaccacacagtatttaccaggacagtggcagtggagtgttcctcagccttctgcctcttctgctccattcttatacctgcaaccttctgaggttatttatcaaccagtggaaattgcacaggatggtggatgtgttcctcctccactgtctctgatggaaacttcagttccagagccttattctgatcatggagttcaagcaacatatcaccaggtttatgctccaagtgccatcactatgcctgcgcctgtgatgcagcctgagccaattaaaacagtgtggagcattcattattaagacaattgggcagctctattccagctcaactgatttcttgtccaatgatccttgcgtggccgagatccagcttcaacgaaccagctagaagctgcccgttgtgaaacttagtgttagttaatacctcaccatactcagttattccactataagctgtctaaatttgatgaaatttgctttttcagctgttctacaaaattatttaggtagatgtggcatgttggttttttatgtgctaacctaactgtaatgaccttttctacaacatgttttatccattccataaataataaccacattgggaatagtgaggtgtcttttattttctctgctttgtgttattttttcttatcaaacaattagatgttatgtttcatattatttgatatttattttcatatttaggataagaatcatttttaattataatacttttaatactttcatatattttacaacagtatactatttaatattaatgacaattctatttttgctttgctgttttgtcatttaatatgcttttgtctaatttttaattcatttattactgttactccttatttaattttgcgtctgccatggttttcagaatctgaatagtatttatacttcttttttataacattttccaaatattagaaataccatcaacatgatcagtattcttgccttttcatgtaatttgactatattaaattttttctccagtgtttgagacaatattgaaatcttcctataacataatttatttggtatcaaattttataaaatatggatccacctttggaattttgataaaagggttcatctctgacatgatcccataacactgactgaaattccaccaaattactgttctttgaatgctttaatccttaaaccttttcttctgatatgcaaccaatatattcaattatatatgtgattaatttttaaaaggacaattgttttcataaaatgcaaaactattttttacaccaaaggaaaattttagattctgattctaaatccgatttttactataaaattggaaaatagatgggaggggtgtcattcattgttcaaaaggtacagaacaaatcataggggtttttaatctctaaaatttctacagtagtacaggaaatattcctctttacattcatttgcagttctttcactgacctcctaattttaggtggagggggcagggggagccataaaagttggtattaccctaataaatctatctctttcctcccctgtttcaaccccacatgtattccatgctcagcagcagcagcagaaatagtaggatatagatcacaaaggtttttctggtgagtcaaatagggtgttttcttttgaaactgtaatgaatatgtttgccagtcaaatggcttcatgagaacagtagaaccttatgaatgtatactagcatacaaggatctcaaatacattaattattctcagttttaggaatgtaaatagattaagtcccacaatgaaatttcagaagtttttgttctgtaagtaaaaaattactaaccactgatgttcaagattttcttttaatagcactatccttgagaaccaaaaagtttatgttttgattttcaaatgttaaacaagatgctaaacaaatcctggactgttaataaaaattaattatgtattattggataaggaatttt

SEQ ID NO: 111813 - DNA, 1270 bp, Homo sapiens
  Payload ID: 1910
  Gene Symbol: BOLL
  Gene Name: boule-like RNA-binding protein
  Uniprot ID: Q8N9W6
  ENST ID: ENST00000433157
  CDS Start-End: 398-1249
agatctcgaggttgattctcaaggggaggggccagtgagggcacattgctttggaggagtagtttaataaactctctagtgctggaagttttagcaaacggaggagccttcaaacccggcaacagtccccatctaggtgtttccgtaacacatgcggaattattgctagtggaatttcaggctttctttgttgtttaactcaatgcatcgctaattgtttataatgaacttagatgttgcctccacctgagccttgctattgctaacattaaaatattttgtaggcctggcgcgatggctcccgcctgtaatcccagcactttgggaggccaaggtgggcggatcacgaggtcaggagatcgagaccatcctggccaaaatgcaaacatcaaaccagatgcaaacagattcattatctccatcccctaatcctgtgtcacctgtgcctttgaataacccaacaagtgccccaagatatggaacagtgatccctaatcgcatctttgtaggaggaattgattttaagacaaacgaaagtgatttaagaaaatttttttcccagtatgggtctgtgaaagaagtgaagattgtaaatgacagagctggagtatccaaagggtatggtttcgtcacttttgaaacacaagaagatgcacaaaaaattttacaagaggctgaaaaacttaattataaggataagaagctgaacattggtccagcaataagaaaacaacaagtagggatccctcgttctagtataatgccagcagctggaacaatgtatctaacaacttcaactggatatccttatacttaccataatggtgttgcttattttcatactccagaggtaacttcggtcccaccgccttggccttcacgttctgtatgtagctcccctgtgatggtagctcagcccatttatcagcaacctgcatatcactaccaggccaccacacagtatttaccaggacagtggcagtggagtgttcctcagccttctgcctcttctgctccattcttatacctgcaaccttctgaggttatttatcaaccagtggaaattgcacaggatggtggatgtgttcctcctccactgtctctgatggaaacttcagttccagagccttattctgatcatggagttcaagcaacatatcaccaggtttatgctccaagtgccatcactatgcctgcgcctgtgatgcagcctgagccaattaaaacagtgtggagcattcattattaagacaattgggcagctctattc

SEQ ID NO: 111814 - DNA, 2987 bp, Homo sapiens
  Payload ID: 1910
  Gene Symbol: BOLL
  Gene Name: boule-like RNA-binding protein
  ENST ID: ENST00000430004
  CDS Start-End: 398-1399
agatctcgaggttgattctcaaggggaggggccagtgagggcacattgctttggaggagtagtttaataaactctctagtgctggaagttttagcaaacggaggagccttcaaacccggcaacagtccccatctaggtgtttccgtaacacatgcggaattattgctagtggaatttcaggctttctttgttgtttaactcaatgcatcgctaattgtttataatgaacttagatgttgcctccacctgagccttgctattgctaacattaaaatattttgtaggcctggcgcgatggctcccgcctgtaatcccagcactttgggaggccaaggtgggcggatcacgaggtcaggagatcgagaccatcctggccaaaatgcaaacatcaaaccagatgcaaacagattcattatctccatcccctaatcctgtgtcacctgtgcctttgaataacccaacaagtgccccaagatatggaacagtgatccctaatcgcatctttgtaggaggaattgattttaagacaaacgaaagtgatttaagaaaatttttttcccagtatgggtctgtgaaagaagtgaagattgtaaatgacagagctggagtatccaaagggtatggtttcgtcacttttgaaacacaagaagatgcacaaaaaattttacaagaggctgaaaaacttaattataaggataagaagctgaacattggtccagcaataagaaaacaacaagtagggatccctcgttctagtataatgccagcagctggaacaatgtatctaacaacttcaactggatatccttatacttaccataatggtgttgcttattttcatactccagaggtaacttcggtcccaccgccttggccttcacgttctgtatgtagctcccctgtgatggtagctcagcccatttatcagcaacctgcatatcactaccagggaattaaacaatgtcatacaagaagatggatggactctttgcttccttttaccaaatgtgatgaggccaccacacagtatttaccaggacagtggcagtggagtgttcctcagccttctgcctcttctgctccattcttatacctgcaaccttctgaggttatttatcaaccagtggaaattgcacaggatggtggatgtgttcctcctccactgtctctgatggaaacttcagttccagagccttattctgatcatggagttcaagcaacatatcaccaggtttatgctccaagtgccatcactatgcctgcgcctgtgatgcagcctgagccaattaaatgtggagcattcattattaagacaattgggcagctctattccagctcaactgatttcttgtccaatgatccttgcgtggccgagatccagcttcaacgaaccagctagaagctgcccgttgtgaaacttagtgttagttaatacctcaccatactcagttattccactataagctgtctaaatttgatgaaatttgctttttcagctgttctacaaaattatttaggtagatgtggcatgttggttttttatgtgctaacctaactgtaatgaccttttctacaacatgttttatccattccataaataataaccacattgggaatagtgaggtgtcttttattttctctgctttgtgttattttttcttatcaaacaattagatgttatgtttcatattatttgatatttattttcatatttaggataagaatcatttttaattataatacttttaatactttcatatattttacaacagtatactatttaatattaatgacaattctatttttgctttgctgttttgtcatttaatatgcttttgtctaatttttaattcatttattactgttactccttatttaattttgcgtctgccatggttttcagaatctgaatagtatttatacttcttttttataacattttccaaatattagaaataccatcaacatgatcagtattcttgccttttcatgtaatttgactatattaaattttttctccagtgtttgagacaatattgaaatcttcctataacataatttatttggtatcaaattttataaaatatggatccacctttggaattttgataaaagggttcatctctgacatgatcccataacactgactgaaattccaccaaattactgttctttgaatgctttaatccttaaaccttttcttctgatatgcaaccaatatattcaattatatatgtgattaatttttaaaaggacaattgttttcataaaatgcaaaactattttttacaccaaaggaaaattttagattctgattctaaatccgatttttactataaaattggaaaatagatgggaggggtgtcattcattgttcaaaaggtacagaacaaatcataggggtttttaatctctaaaatttctacagtagtacaggaaatattcctctttacattcatttgcagttctttcactgacctcctaattttaggtggagggggcagggggagccataaaagttggtattaccctaataaatctatctctttcctcccctgtttcaaccccacatgtattccatgctcagcagcagcagcagaaatagtaggatatagatcacaaaggtttttctggtgagtcaaatagggtgttttcttttgaaactgtaatgaatatgtttgccagtcaaatggcttcatgagaacagtagaaccttatgaatgtatactagcatacaaggatctcaaatacattaattattctcagttttaggaatgtaaatagattaagtcccacaatgaaatttcagaagtttttgttctgtaagtaaaaaattactaaccactgatgttcaagattttcttttaatagcactatccttgagaaccaaaaagtttatgttttgattttcaaatgttaaacaagatgctaaacaaatcctggactgttaataaaaattaattatgtattattggataaggaatttt

SEQ ID NO: 111815 - DNA, 1372 bp, Homo sapiens
  Payload ID: 1910
  Gene Symbol: BOLL
  Gene Name: boule-like RNA-binding protein
  ENST ID: ENST00000434976
  CDS Start-End: 310-573
agacgccccggctcggagtcccagggccacagccgaaactcgccctcccgcgcccctctccggcttgcagcgcccgcccgcaccgccacctgccacccgaggcgacgcagtccgcttctccccacccgccaggtggcaggttcagggccggggtccgagcctgcttccctgcagctgccacagccaccctcgccgccagggggcgagagtcccaggcaggacaagcagcgctgctgccttggcgtgaaggtggtttcaaactttaggcttcttttccctaccccgcgtctctgaagagcagagaggaagatggaaaccgagtccgggccgcaaacatcaaaccagatgcaaacagattcattatctccatcccctaatcctgtgtcacctgtgcctttgaataacccaacaagtgccccaagatatggaacagtgatccctaatcgcatctttgtaggaggaattgattttaagacaaacgaaagtgatttaagaaaatttttttcccagtatgggtctgtgaaagaagtgaagattgtaaatgacagagctggagtatccaaagggttctagtataatgccagcagctggaacaatgtatctaacaacttcaactggatatccttatacttaccataatggtgttgcttattttcatactccagaggtaacttcggtcccaccgccttggccttcacgttctgtatgtagctcccctgtgatggtagctcagcccatttatcagcaacctgcatatcactaccaggccaccacacagtatttaccaggacagtggcagtggagtgttcctcagccttctgcctcttctgctccattcttatacctgcaaccttctgaggttatttatcaaccagtggaaattgcacaggatggtggatgtgttcctcctccactgtctctgatggaaacttcagttccagagccttattctgatcatggagttcaagcaacatatcaccaggtttatgctccaagtgccatcactatgcctgcgcctgtgatgcagcctgagccaattaaaacagtgtggagcattcattattaagacaattgggcagctctattccagctcaactgatttcttgtccaatgatccttgcgtggccgagatccagcttcaacgaaccagctagaagctgcccgttgtgaaacttagtgttagttaatacctcaccatactcagttattccactataagctgtctaaatttgatgaaatttgctttttcagctgttctacaaaattatttaggtagatgtggcatgttggttttttatgtgctaacctaactgtaatgaccttttctacaacatgttttatccattccataaataataaccacattgggaat

SEQ ID NO: 111816 - DNA, 1079 bp, Homo sapiens
  Payload ID: 1911
  Gene Symbol: BPIFA1
  Gene Name: BPI fold containing family A, member 1
  Uniprot ID: Q9NP55
  ENST ID: ENST00000354297
  CDS Start-End: 72-842
tgagtgggggagagagaggagaccaggacagctgctgagacctctaagaagtccagatactaagagcaaagatgtttcaaactgggggcctcattgtcttctacgggctgttagcccagaccatggcccagtttggaggcctgcccgtgcccctggaccagaccctgcccttgaatgtgaatccagccctgcccttgagtcccacaggtcttgcaggaagcttgacaaatgccctcagcaatggcctgctgtctgggggcctgttgggcattctggaaaaccttccgctcctggacatcctgaagcctggaggaggtacttctggtggcctccttgggggactgcttggaaaagtgacgtcagtgattcctggcctgaacaacatcattgacataaaggtcactgacccccagctgctggaacttggccttgtgcagagccctgatggccaccgtctctatgtcaccatccctctcggcataaagctccaagtgaatacgcccctggtcggtgcaagtctgttgaggctggctgtgaagctggacatcactgcagaaatcttagctgtgagagataagcaggagaggatccacctggtccttggtgactgcacccattcccctggaagcctgcaaatttctctgcttgatggacttggccccctccccattcaaggtcttctggacagcctcacagggatcttgaataaagtcctgcctgagttggttcagggcaacgtgtgccctctggtcaatgaggttctcagaggcttggacatcaccctggtgcatgacattgttaacatgctgatccacggactacagtttgtcatcaaggtctaagccttccaggaaggggctggcctctgctgagctgggtcttcccccaacagaactatttcttgctgctcaatccatttcctctggcccagcttcccagtgctcacagatggctggcccatgtgctggaagatgacacagttgccttctctccgaggaacctgccccctctcctttcccaccaggcgtgtgtaacatcccatgtgcctcacctaataaaatggctcttcttctgcatca

SEQ ID NO: 111817 - DNA, 1026 bp, Homo sapiens
  Payload ID: 1911
  Gene Symbol: BPIFA1
  Gene Name: BPI fold containing family A, member 1
  Uniprot ID: Q9NP55
  ENST ID: ENST00000375413
  CDS Start-End: 72-842
tgagtgggggagagagaggagaccaggacagctgctgagacctctaagaagtccagatactaagagcaaagatgtttcaaactgggggcctcattgtcttctacgggctgttagcccagaccatggcccagtttggaggcctgcccgtgcccctggaccagaccctgcccttgaatgtgaatccagccctgcccttgagtcccacaggtcttgcaggaagcttgacaaatgccctcagcaatggcctgctgtctgggggcctgttgggcattctggaaaaccttccgctcctggacatcctgaagcctggaggaggtacttctggtggcctccttgggggactgcttggaaaagtgacgtcagtgattcctggcctgaacaacatcattgacataaaggtcactgacccccagctgctggaacttggccttgtgcagagccctgatggccaccgtctctatgtcaccatccctctcggcataaagctccaagtgaatacgcccctggtcggtgcaagtctgttgaggctggctgtgaagctggacatcactgcagaaatcttagctgtgagagataagcaggagaggatccacctggtccttggtgactgcacccattcccctggaagcctgcaaatttctctgcttgatggacttggccccctccccattcaaggtcttctggacagcctcacagggatcttgaataaagtcctgcctgagttggttcagggcaacgtgtgccctctggtcaatgaggttctcagaggcttggacatcaccctggtgcatgacattgttaacatgctgatccacggactacagtttgtcatcaaggtctaagccttccaggaaggggctggcctctgctgagctgcttcccagtgctcacagatggctggcccatgtgctggaagatgacacagttgccttctctccgaggaacctgccccctctcctttcccaccaggcgtgtgtaacatcccatgtgcctcacctaataaaatggctcttcttctgcatcagg

SEQ ID NO: 111818 - DNA, 1063 bp, Homo sapiens
  Payload ID: 1911
  Gene Symbol: BPIFA1
  Gene Name: BPI fold containing family A, member 1
  Uniprot ID: Q9NP55
  ENST ID: ENST00000375422
  CDS Start-End: 72-842
tgagtgggggagagagaggagaccaggacagctgctgagacctctaagaagtccagatactaagagcaaagatgtttcaaactgggggcctcattgtcttctacgggctgttagcccagaccatggcccagtttggaggcctgcccgtgcccctggaccagaccctgcccttgaatgtgaatccagccctgcccttgagtcccacaggtcttgcaggaagcttgacaaatgccctcagcaatggcctgctgtctgggggcctgttgggcattctggaaaaccttccgctcctggacatcctgaagcctggaggaggtacttctggtggcctccttgggggactgcttggaaaagtgacgtcagtgattcctggcctgaacaacatcattgacataaaggtcactgacccccagctgctggaacttggccttgtgcagagccctgatggccaccgtctctatgtcaccatccctctcggcataaagctccaagtgaatacgcccctggtcggtgcaagtctgttgaggctggctgtgaagctggacatcactgcagaaatcttagctgtgagagataagcaggagaggatccacctggtccttggtgactgcacccattcccctggaagcctgcaaatttctctgcttgatggacttggccccctccccattcaaggtcttctggacagcctcacagggatcttgaataaagtcctgcctgagttggttcagggcaacgtgtgccctctggtcaatgaggttctcagaggcttggacatcaccctggtgcatgacattgttaacatgctgatccacggactacagtttgtcatcaaggtctaagccttccaggaaggggctggcctctgctgagctgaactatttcttgctgctcaatccatttcctctggcccagcttcccagtgctcacagatggctggcccatgtgctggaagatgacacagttgccttctctccgaggaacctgccccctctcctttcccaccaggcgtgtgtaacatcccatgtgcctcacctaataaaatggctcttcttctgcatca

SEQ ID NO: 111819 - DNA, 907 bp, Homo sapiens
  Payload ID: 1911
  Gene Symbol: BPIFA1
  Gene Name: BPI fold containing family A, member 1
  Uniprot ID: Q9NP55
  ENST ID: ENST00000618484
  CDS Start-End: 1-729
atgtttcaaactgggggcctcattgtcttctacgggctgttagcccagaccctgcccttgaatgtgaatccagccctgcccttgagtcccacaggtcttgcaggaagcttgacaaatgccctcagcaatggcctgctgtctgggggcctgttgggcattctggaaaaccttccgctcctggacatcctgaagcctggaggaggtacttctggtggcctccttgggggactgcttggaaaagtgacgtcagtgattcctggcctgaacaacatcattgacataaaggtcactgacccccagctgctggaacttggccttgtgcagagccctgatggccaccgtctctatgtcaccatccctctcggcataaagctccaagtgaatacgcccctggtcggtgcaagtctgttgaggctggctgtgaagctggacatcactgcagaaatcttagctgtgagagataagcaggagaggatccacctggtccttggtgactgcacccattcccctggaagcctgcaaatttctctgcttgatggacttggccccctccccattcaaggtcttctggacagcctcacagggatcttgaataaagtcctgcctgagttggttcagggcaacgtgtgccctctggtcaatgaggttctcagaggcttggacatcaccctggtgcatgacattgttaacatgctgatccacggactacagtttgtcatcaaggtctaagccttccaggaaggggctggcctctgctgagctgcttcccagtgctcacagatggctggcccatgtgctggaagatgacacagttgccttctctccgaggaacctgccccctctcctttcccaccaggcgtgtgtaacatcccatgtgcctcacctaataaaatggctcttcttctgc

SEQ ID NO: 111820 - DNA, 1122 bp, Homo sapiens
  Payload ID: 1912
  Gene Symbol: BPIFA2
  Gene Name: BPI fold containing family A, member 2
  Uniprot ID: Q96DR5
  ENST ID: ENST00000253362
  CDS Start-End: 147-896
ggagaatttgcaggggggtgacatcctcagacctggcccttggcactgggaagagttgatgcaaagaaattctgcgaggccagagaggaggctttgggaattgtccagcagaaacagagaagtctgaggtggtgtcaagacaaaagatgcttcagctttggaaacttgttctcctgtgcggcgtgctcactgggacctcagagtctcttcttgacaatcttggcaatgacctaagcaatgtcgtggataagctggaacctgttcttcacgagggacttgagacagttgacaatactcttaaaggcatccttgagaaactgaaggtcgacctaggagtgcttcagaaatccagtgcttggcaactggccaagcagaaggcccaggaagctgagaaattgctgaacaatgtcatttctaagctgcttccaactaacacggacatttttgggttgaaaatcagcaactccctcatcctggatgtcaaagctgaaccgatcgatgatggcaaaggccttaacctgagcttccctgtcaccgcgaatgtcactgtggccgggcccatcattggccagattatcaacctgaaagcctccttggacctcctgaccgcagtcacaattgaaactgatccccagacacaccagcctgttgccgtcctgggagaatgcgccagtgacccaaccagcatctcactttccttgctggacaaacacagccaaatcatcaacaagttcgtgaatagcgtgatcaacacgctgaaaagcactgtatcctccctgctgcagaaggagatatgtccactgatccgcatcttcatccactccctggatgtgaatgtcattcagcaggtcgtcgataatcctcagcacaaaacccagctgcaaaccctcatctgaagaggacgaatgaggaggaccactgtggtgcatgctgattggttcccagtggcttgccccacccccttatagcatctccctccaggaagctgctgccaccacctaaccagcgtgaaagcctgagtcccaccagaaggaccttcccagataccccttctcctcacagtcagaacagcagcctctacacatgttgtcctgcccctggcaataaaggcccatttctgca

SEQ ID NO: 111821 - DNA, 1047 bp, Homo sapiens
  Payload ID: 1912
  Gene Symbol: BPIFA2
  Gene Name: BPI fold containing family A, member 2
  Uniprot ID: Q96DR5
  ENST ID: ENST00000354932
  CDS Start-End: 72-821
atcccagcagactgtgcagtggggcaaggatttcatgagcatcctcctctaaacgcgtgtcaagacaaaagatgcttcagctttggaaacttgttctcctgtgcggcgtgctcactgggacctcagagtctcttcttgacaatcttggcaatgacctaagcaatgtcgtggataagctggaacctgttcttcacgagggacttgagacagttgacaatactcttaaaggcatccttgagaaactgaaggtcgacctaggagtgcttcagaaatccagtgcttggcaactggccaagcagaaggcccaggaagctgagaaattgctgaacaatgtcatttctaagctgcttccaactaacacggacatttttgggttgaaaatcagcaactccctcatcctggatgtcaaagctgaaccgatcgatgatggcaaaggccttaacctgagcttccctgtcaccgcgaatgtcactgtggccgggcccatcattggccagattatcaacctgaaagcctccttggacctcctgaccgcagtcacaattgaaactgatccccagacacaccagcctgttgccgtcctgggagaatgcgccagtgacccaaccagcatctcactttccttgctggacaaacacagccaaatcatcaacaagttcgtgaatagcgtgatcaacacgctgaaaagcactgtatcctccctgctgcagaaggagatatgtccactgatccgcatcttcatccactccctggatgtgaatgtcattcagcaggtcgtcgataatcctcagcacaaaacccagctgcaaaccctcatctgaagaggacgaatgaggaggaccactgtggtgcatgctgattggttcccagtggcttgccccacccccttatagcatctccctccaggaagctgctgccaccacctaaccagcgtgaaagcctgagtcccaccagaaggaccttcccagataccccttctcctcacagtcagaacagcagcctctacacatgttgtcctgcccctggcaataaaggcccatttctgca

SEQ ID NO: 111822 - DNA, 983 bp, Homo sapiens
  Payload ID: 1913
  Gene Symbol: BPIFA3
  Gene Name: BPI fold containing family A, member 3
  Uniprot ID: Q9BQP9
  ENST ID: ENST00000375452
  CDS Start-End: 186-842
aatgtgagcaagccctggtggcagcgccagggtccagtgcagcccctccccacagcatgctgggggctaattctgatgtcatctttctgcagaaaaccattagaccatccctccagactgccaccctcaaagccgtctgcccaggccccatctgacactcttgacatctgcaggtcccagaccctatgatgtgtccactctggaggctcctcatcttcctcgggttgctggccttgcccttggcaccacacaagcagccttggcctggcctggcccaagcccacagagacaacaaatccaccctggcaagaattattgctcagggcctcataaagcacaacgcagaaagccgaattcagaacatccactttggggacagactgaatgcctcagcacaagtggccccagggctggtgggctggctaatcagcggcaggaaacaccagcagcagcaagagagcaggtccttcgataacaacatcgtaaagatgtgtgcacatatgagcatcgttgtggagttctggctggagaaagacgagtttggccggagggatctggtgataggcaaatgcgatgcagagcccagcagtgtccatgtggccatcctcactgaggctatcccaccaaagatgaatcagtttctctacaacctcaaagagaatctgcaaaaagttctcccacacatggtagaaagtcaggtatgtcctctgatcggtgaaatcctcgggcagctggatgtgaaactgttgaaaagcctcatagaacaggaggctgctcatgaaccaacccaccatgaaaccagccaaccctctgcatgccaggctggagagtcccccagctgacttctgctgatcagaaggaaagtccacatcttgcaaccttaagtctcccttagagtggggcttctgctaccctaaaaactttaccccaggctctgtggacataccatcctctcctacaataaactctagctctgaagggtg

SEQ ID NO: 111823 - DNA, 1116 bp, Homo sapiens
  Payload ID: 1913
  Gene Symbol: BPIFA3
  Gene Name: BPI fold containing family A, member 3
  Uniprot ID: Q9BQP9
  ENST ID: ENST00000375454
  CDS Start-End: 211-975
ccagggttccacatgttgctctcccaatgtgagcaagccctggtggcagcgccagggtccagtgcagcccctccccacagcatgctgggggctaattctgatgtcatctttctgcagaaaaccattagaccatccctccagactgccaccctcaaagccgtctgcccaggccccatctgacactcttgacatctgcaggtcccagaccctatgatgtgtccactctggaggctcctcatcttcctcgggttgctggccttgcccttggcaccacacaagcagccttggcctggcctggcccaagcccacagagacaacaaatccaccctggcaagaattattgctcagggcctcataaagcacaacgcagaaagccgaattcagaacatccactttggggacagactgaatgcctcagcacaagtggccccagggctggtgggctggctaatcagcggcaggaaacaccagcagcagcaagagagcagcatcaacatcaccaacattcagctggactgtggtgggatccagatatcattccataaggagtggttctcggcaaatatctcacttgaatttgaccttgaattgagaccgtccttcgataacaacatcgtaaagatgtgtgcacatatgagcatcgttgtggagttctggctggagaaagacgagtttggccggagggatctggtgataggcaaatgcgatgcagagcccagcagtgtccatgtggccatcctcactgaggctatcccaccaaagatgaatcagtttctctacaacctcaaagagaatctgcaaaaagttctcccacacatggtagaaagtcaggtatgtcctctgatcggtgaaatcctcgggcagctggatgtgaaactgttgaaaagcctcatagaacaggaggctgctcatgaaccaacccaccatgaaaccagccaaccctctgcatgccaggctggagagtcccccagctgacttctgctgatcagaaggaaagtccacatcttgcaaccttaagtctcccttagagtggggcttctgctaccctaaaaactttaccccaggctctgtggacataccatcctctcctacaataaactctagctctgaagggtg

SEQ ID NO: 111824 - DNA, 1727 bp, Homo sapiens
  Payload ID: 1914
  Gene Symbol: BPIFB1
  Gene Name: BPI fold containing family B, member 1
  Uniprot ID: Q8TDL5
  ENST ID: ENST00000253354
  CDS Start-End: 162-1616
ggtctgaggcctctgcctaaagacaaagcctgtgctggggtgtgcaggatataaggttggacttccagacccactgcccgggagaggagaggagcgggccgaggactccagcgtgcccaggtctggcatcctgcacttgctgccctctgacacctgggaagatggccggcccgtggaccttcacccttctctgtggtttgctggcagccaccttgatccaagccaccctcagtcccactgcagttctcatcctcggcccaaaagtcatcaaagaaaagctgacacaggagctgaaggaccacaacgccaccagcatcctgcagcagctgccgctgctcagtgccatgcgggaaaagccagccggaggcatccctgtgctgggcagcctggtgaacaccgtcctgaagcacatcatctggctgaaggtcatcacagctaacatcctccagctgcaggtgaagccctcggccaatgaccaggagctgctagtcaagatccccctggacatggtggctggattcaacacgcccctggtcaagaccatcgtggagttccacatgacgactgaggcccaagccaccatccgcatggacaccagtgcaagtggccccacccgcctggtcctcagtgactgtgccaccagccatgggagcctgcgcatccaactgctgcataagctctccttcctggtgaacgccttagctaagcaggtcatgaacctcctagtgccatccctgcccaatctagtgaaaaaccagctgtgtcccgtgatcgaggcttccttcaatggcatgtatgcagacctcctgcagctggtgaaggtgcccatttccctcagcattgaccgtctggagtttgaccttctgtatcctgccatcaagggtgacaccattcagctctacctgggggccaagttgttggactcacagggaaaggtgaccaagtggttcaataactctgcagcttccctgacaatgcccaccctggacaacatcccgttcagcctcatcgtgagtcaggacgtggtgaaagctgcagtggctgctgtgctctctccagaagaattcatggtcctgttggactctgtgcttcctgagagtgcccatcggctgaagtcaagcatcgggctgatcaatgaaaaggctgcagataagctgggatctacccagatcgtgaagatcctaactcaggacactcccgagttttttatagaccaaggccatgccaaggtggcccaactgatcgtgctggaagtgtttccctccagtgaagccctccgccctttgttcaccctgggcatcgaagccagctcggaagctcagttttacaccaaaggtgaccaacttatactcaacttgaataacatcagctctgatcggatccagctgatgaactctgggattggctggttccaacctgatgttctgaaaaacatcatcactgagatcatccactccatcctgctgccgaaccagaatggcaaattaagatctggggtcccagtgtcattggtgaaggccttgggattcgaggcagctgagtcctcactgaccaaggatgcccttgtgcttactccagcctccttgtggaaacccagctctcctgtctcccagtgaagacttggatggcagccatcagggaaggctgggtcccagctgggagtatgggtgtgagctctatagaccatccctctctgcaatcaataaacacttgcctgtgatgcctgc

SEQ ID NO: 111825 - DNA, 658 bp, Homo sapiens
  Payload ID: 1914
  Gene Symbol: BPIFB1
  Gene Name: BPI fold containing family B, member 1
  ENST ID: ENST00000423645
  CDS Start-End: 217-658
acaacttcaagggaggtgccctgtggttgccccatgcttccctcctggccaccaggaatcaggacaagcaaagaacacgacattcacagtccagggaggtcacacagtccggaaaggtacaaagggtttggagaactcacttcatttggtttgggagcctccgcaggtggacacggtctggcatcctgcacttgctgccctctgacacctgggaagatggccggcccgtggaccttcacccttctctgtggtttgctggcagccaccttgatccaagccaccctcagtcccactgcagttctcatcctcggcccaaaagtcatcaaagaaaagctgacacaggagctgaaggaccacaacgccaccagcatcctgcagcagctgccgctgctcagtgccatgcgggaaaagccagccggaggcatccctgtgctgggcagcctggtgaacaccgtcctgaagcacatcatctggctgaaggtcatcacagctaacatcctccagctgcaggtgaagccctcggccaatgaccaggagctgctagtcaagatccccctggacatggtggctggattcaacacgcccctggtcaagaccatcgtggagttccacatgacgactgaggcccaagccaccatccgcatggacaccagtgcaa

SEQ ID NO: 111826 - DNA, 1898 bp, Homo sapiens
  Payload ID: 1915
  Gene Symbol: BPIFB2
  Gene Name: BPI fold containing family B, member 2
  Uniprot ID: Q8N4F0
  ENST ID: ENST00000170150
  CDS Start-End: 196-1572
aaaacacttgcaaccacaagcaaactcgccgctccctgggtcccttcccagtggactctgcacattgggagccttataaagtagcctctgcatctgcctgcctcgggcagaggagggctaccctggggctgagagttcacctgtctcaggaaccacctgagcccacagatcctgtgggcagcggccagggcagccatggcttgggcaagtaggctgggcctgctgctggcactgctgctgcccgtggtcggtgcctccacgccaggcaccgtggtccgactcaacaaggcagcattgagctacgtgtctgaaattgggaaagcccctctccagcgggccctgcaggtcactgtccctcatttcctggactggagtggagaggcgcttcagcccaccaggatccggattctgaatgtccatgtgccccgcctccacctgaaattcattgctggtttcggagtgcgcctgctggcagcagctaattttactttcaaggtctttcgcgccccagagcccctggagctgacgctgcctgtggaactgctggctgacacccgcgtgacccagagctccatcaggacccctgtggtcagcatctctgcctgctctttattctcgggccacgccaacgagtttgatggcagtaacagcacctcccacgcgctgctggtcctggtgcagaagcacattaaagctgtcttgagtaacaagctgtgcctgagcatctccaacctggtgcagggtgtcaatgtccacctgggcaccttaattggcctcaaccccgtgggtcctgagtcccagatccgctattccatggtcagtgtgcccactgtcaccagtgactacatttccctggaagtcaatgctgttctcttcctgctgggcaagcccatcatcctgcccacggatgccaccccttttgtgttgccaaggcatgtgggtaccgagggctccatggccaccgtgggcctctcccagcagctgtttgactctgcgctcctgctgctgcagaaggccggtgccctcaacctggacatcacagggcagctgaggtcggatgacaacctgctgaacacctctgctctgggccggctcatcccggaggtggcccgccagtttcccgagcccatgcctgtggtgctcaaggtgcggctgggtgccacacctgtggccatgctccacacaaacaacgccaccctgcggctgcagcccttcgtggaggtcctggccacagcctccaactcggctttccagtccctcttctccctggatgtggtagtgaacttgagactccagctctctgtgtccaaggtgaagcttcaggggaccacgtctgtgctgggggatgtccagctcacggtggcctcctccaacgtgggcttcattgatacagatcaggtgcgcacactgatgggcaccgtttttgagaagcccctgctggaccatctcaatgctctcttggccatgggaattgccctccctggtgtggtcaacctccactatgtcgcccctgagatctttgtctatgagggctacgtggtgatatccagtggactcttctaccagagctgaggcaagaccactgggaggcctgagagtgggccagctcgctgctcaggcgaatttctcatttcaagccactggggaaactgaggcaaaaccatacttagtcatcaccaacaagctggactgcttagctgggctgttttatcttccctgagtgcctgggtctccctccctcacttctgccctttcccttcctcctcctcttctcctccctcttccctcatctcccccctccttcctctgccccaccccagcggggagcagactgctcctccaggctgtatagacctgccctcttgcattaaacaacttctcttgagctgcaactttca

SEQ ID NO: 111827 - DNA, 1454 bp, Homo sapiens
  Payload ID: 1916
  Gene Symbol: BPIFB3
  Gene Name: BPI fold containing family B, member 3
  Uniprot ID: P59826
  ENST ID: ENST00000375494
  CDS Start-End: 1-1431
atgcagccagtcatgctggccctgtggtccctgcttctgctctggggcctggcgactccatgccaggagctgctagagacggtgggcacgctcgctcggattgacaaggatgaactcggcaaagccatccagaactcactggttggggagcccattctgcagaatgtgctgggatcggtcacagctgtgaaccggggcctcttgggctcaggagggctgcttggaggaggcggcttgctgggccacggaggggtttttggcgttgtcgaggagctctctggtctgaagattgaggagctcacgctgccaaaggtgttgctgaagctgctgccgggatttggggtgcagctgagcctgcacaccaaagtgggcatgcattgctctggcccccttggtggccttctgcagctggctgcggaggtgaacgtgacatcgcgggtggcgctggccgtgagctcaaggggcacacccatccttatcctcaagcgctgcagcacgctcctgggccacatcagcctgttctcagggctgctgcccacaccactctttggggtcgtggaacagatgctcttcaaggtgcttccgggactgctgtgccccgtggtggacagtgtgctgggtgtggtgaatgagctcctgggggctgtgctgggcctggtgtcccttggggctcttgggtccgtggaattctctctggccacattgcctctcatctccaaccagtacatagaactggacatcaaccctatcgtgaagagtgtagctggtgatatcattgacttccccaagtcccgtgccccagccaaggtgccccccaagaaggaccacacatcccaggtgatggtgccactgtacctcttcaacaccacgtttggactcctgcagaccaacggcgccctcgacatggacatcacccctgagctggttcccagcgatgtcccactgacaactacagacctggcagctttgctccctgaggccctggggaagctgcccctgcaccagcaactcctactgttcctgcgggtgagggaagctcccacggtcacactccacaacaagaaggccttggtctccctcccagccaacatccatgtgctgttctatgtccctaaggggacccctgaatccctctttgagctgaactccgtcatgactgtgcgtgcccagctggctccctcggctaccaagctgcacatctccctgtccctggaacggctcagtgtcaaggtggcctcctcctttacccatgcctttgacggatcgcgtttagaagaatggctcagccatgtggtcggggcagtgtatgcaccaaagcttaacgtggccctggatgttggaattcccctgcctaaggttcttaatatcaatttttccaattcagttctggagatcgtagagaatgctgttgtgctgaccgtggcatcctgaggctgagacatggccaccagcct

SEQ ID NO: 111828 - DNA, 2159 bp, Homo sapiens
  Payload ID: 1917
  Gene Symbol: BPIFB4
  Gene Name: BPI fold containing family B, member 4
  Uniprot ID: P59827
  ENST ID: ENST00000375483
  CDS Start-End: 1-1845
atgtggatggcctggtgtgtggctgcgctgtctgtggtggctgtgtgtggcaccagccacgagacaaacacggtcctcagggtgacgaaagatgtgttgagcaatgccatttcaggcatgctgcagcaaagtgatgctctccactcggccctgagagaggtgcccttgggtgttggtgatattccctacaatgacttccatgtccgaggaccccccccagtatataccaacggcaaaaaacttgatggtatttaccagtatggtcacattgagaccaacgacaacactgctcagctggggggcaaataccgatatggtgagatccttgagtccgagggaagcatcagggacctccgaaacagtggctatcgcagtgccgagaatgcatatggaggccacaggggcctcgggcgatacagggcagcacctgtgggcaggcttcaccggcgagagctgcagcctggagaaatcccacctggagttgccactggggcggtgggcccaggtggtttgctgggcactggaggcatgctggcagctgatggcatcctcgcaggccaaggtggcctgctcggcggaggtggtctccttggtgatggaggacttcttggaggagggggtgtcctgggcgtgctcggcgagggtggcatcctcagcactgtgcaaggcatcacggggctgcgtatcgtggagctgaccctccctcgggtgtccgtgcggctcctgcccggcgtgggtgtctacctgagcttgtacacccgtgtggccatcaacgggaagagtcttattggcttcctggacatcgcagtagaagtgaacatcacagccaaggtccggctgaccatggaccgcacgggttatcctcggctggtcattgagcgatgtgacaccctcctagggggcatcaaagtcaagctgctgcgagggcttctccccaatctcgtggacaatttagtgaaccgagtcctggccgacgtcctccctgacttgctctgccccatcgtggatgtggtgctgggtcttgtcaatgaccagctgggcctcgtggattctctgattcctctggggatattgggaagtgtccagtacaccttctccagcctcccgcttgtgaccggggaattcctggagctggacctcaacacgctggttggggaggctggaggaggactcatcgactacccattggggtggccagctgtgtctcccaagccgatgccagagctgcctcccatgggtgacaacaccaagtcccagctggccatgtctgccaacttcctgggctcagtgctgactctactgcagaagcagcatgctctagacctggatatcaccaatggcatgtttgaagagcttcctccacttaccacagccacactgggagccctgatccccaaggtgttccagcagtaccccgagtcctgcccacttatcatcaggatccaggtgctgaacccaccatctgtgatgctgcagaaggacaaagcgctggtgaaggtgttggccactgccgaggtcatggtctcccagcccaaagacctggagactaccatctgcctcattgacgtggacacagaattcttggcctcattttccacagaaggagataagctcatgattgatgccaagctggagaagaccagcctcaacctcagaacctcaaacgtgggcaactttgatattggcctcatggaggtgctggtggagaagatttttgacctggcattcatgcccgcaatgaacgctgtgctgggttctggcgtccctctccccaaaatcctcaacatcgactttagcaatgcagacattgacgtgttggaggaccttttggtgctgagcgcatgagtgacagaggcagagatgctgctgcaactggaagaagctggaaccagtcccagagaggctcggcctggaaacagtcccctgcccagagtcccctcagcctccatgacaggtccctccctggccccccaaccctcttcctcccttgccccaaccctgagaaagggtccagccactaccctgttggcaaacattcccttccatggtcagcctgccaggaggaggggagtcaccttggggctggaggcctctcagaccccatcctgacagcaggttgagtattcccactttcaataaaagactccactttcccggca

SEQ ID NO: 111829 - DNA, 554 bp, Homo sapiens
  Payload ID: 1917
  Gene Symbol: BPIFB4
  Gene Name: BPI fold containing family B, member 4
  ENST ID: ENST00000445356
  CDS Start-End: 184-318
aaaagcagaggggctggggaacaggacttctcaagactcagcggcagggacctcctaggggggtctgaaataacagtcccaaagtaataacaatagctgctctttattgagtgtctactatgtatgagatacaacttgtttgtgatttgggagcagaagttcaaaaagggaagcagtgccagcatgtggatggcctggtgtgtggctgcgctgtctgtggtggctgtgtgtggcaccagccacgagacaaacacggtcctcagggtgacgaaagatgtgttgagcaatggcttctccccaatctcgtggacaatttagtgaaccgagtcctggccgacgtcctccctgacttgctctgccccatcgtggatgtggtgctgggtcttgtcaatgaccagctgggcctcgtggattctctgattcctctggggatattgggaagtgtccagtacaccttctccagcctcccgcttgtgaccggggaattcctggagctggacctcaacacgctggttggggaggctggaggaggactcatcgactacccattgggg

SEQ ID NO: 111830 - DNA, 1362 bp, Homo sapiens
  Payload ID: 1918
  Gene Symbol: BPIFB6
  Gene Name: BPI fold containing family B, member 6
  Uniprot ID: Q8NFQ5
  ENST ID: ENST00000349552
  CDS Start-End: 1-1362
atgctgcggatcctgtgcctggcactctgcagcctgctgactggcacgcgagctgaccctggggcactgctgcggttgggcatggacatcatgaaccaggtccagagcgccatggatgagagtcatatcctggagaagatggcagccgaggcaggcaagaaacagccagggatgaaacctatcaagggcatcaccaatttgaaggtgaaggatgtccagctgcccgtcatcacactgaactttgtacctggagtgggcatcttccaatgtgtgtccacaggcatgaccgtcactggcaagagcttcatgggagggaacatggagatcatcgtggccctgaacatcacagccaccaaccggcttctgcgggatgaggagacaggcctccccgtgttcaagagtgagggctgtgaggtcatcctggtcaatgtgaagactaacctgcctagcaacatgctccccaagatggtcaacaagttcctggacagcaccctgcacaaagtcctccctgggctgatgtgtcccgccatcgatgcagtcctggtgtatgtgaacaggaagtggaccaacctcagtgaccccatgcctgtgggccagatgggcaccgtcaaatatgttctgatgtccgcaccagccaccacagccagctacatccaactggacttcagtcctgtggtgcagcagcaaaagggcaaaaccatcaagcttgctgatgccggggaggccctcacgttccctgagggttatgccaaaggctcgtcgcagctgctgctcccagccaccttcctctctgcagagcttgcccttctgcagaagtcctttcatgtgaatatccaggatacaatgattggtgagctgcccccacaaaccaccaagaccctggctcgcttcattcctgaagtggctgtagcttatcccaagtcaaagcccttgacgacccagatcaagataaagaagcctcccaaggtcactatgaagacaggcaagagcctgctgcacctccacagcaccctggagatgttcgcagctcggtggcggagcaaggctccaatgtccctctttctcctagaagtgcacttcaatctgaaggtccagtactcagtgcatgagaaccagctgcagatggccacttctttggacagattactgagcttgtcccggaagtcctcatcgattggcaacttcaatgagagggaattaactggcttcatcaccagctatctcgaagaagcctacatcccagttgtcaatgatgtgcttcaagtggggctcccactcccggactttctggccatgaattacaacctggctgagctggacatagtagagaatgccctgatgctggacttgaagctgggctga

SEQ ID NO: 111831 - DNA, 1670 bp, Homo sapiens
  Payload ID: 1918
  Gene Symbol: BPIFB6
  Gene Name: BPI fold containing family B, member 6
  ENST ID: ENST00000542375
  CDS Start-End: 1-267
atgctgcggatcctgtgcctggcactctgcagcctgctgactggcacgcgagctgaccctggggcactgctgcggttgggcatggacatcatgaaccgtgaggtccagagcgccatggatgagagtcatatcctggagaagatggcagccgaggcaggcaagaaacagccagggatgaaacctatcaagggcatcaccaatgagcagggtcattttgaggaggaaatgaggttggaaagtcaaatttcaactctgcatgcaacatgaactcattgaatgtacgtgaaattaaatgaaaacatcctcaaatggtagagctggaaaggcatcaacaatcatctaatgacaagaggaaactggttcctctgccagtgccacatgagattgatcagtaggggctgcctgaaacgatgcacttgggagggctctgaggcactgtctgcactcggcaggaactaggactgtgatcaactagcaatgtctgccaagagctcaggatgggcaagtggggtttgaaggtgaaggatgtccagctgcccgtcatcacactgaactttgtacctggagtgggcatcttccaatgtgtgtccacaggcatgaccgtcactggcaagagcttcatgggagggaacatggagatcatcgtggccctgaacatcacagccaccaaccggcttctgcgggatgaggagacaggcctccccgtgttcaagagtgagggctgtgaggtcatcctggtcaatgtgaagactaacctgcctagcaacatgctccccaagatggtcaacaagttcctggacagcaccctgcacaaagtcctccctgggctgatgtgtcccgccatcgatgcagtcctggtgtatgtgaacaggaagtggaccaacctcagtgaccccatgcctgtgggccagatgggcaccgtcaaatatgttctgatgtccgcaccagccaccacagccagctacatccaactggacttcagtcctgtggtgcagcagcaaaagggcaaaaccatcaagcttgctgatgccggggaggccctcacgttccctgagggttatgccaaaggctcgtcgcagctgctgctcccagccaccttcctctctgcagagcttgcccttctgcagaagtcctttcatgtgaatatccaggatacaatgattggtgagctgcccccacaaaccaccaagaccctggctcgcttcattcctgaagtggctgtagcttatcccaagtcaaagcccttgacgacccagatcaagataaagaagcctcccaaggtcactatgaagacaggcaagagcctgctgcacctccacagcaccctggagatgttcgcagctcggtggcggagcaaggctccaatgtccctctttctcctagaagtgcacttcaatctgaaggtccagtactcagtgcatgagaaccagctgcagatggccacttctttggacagattactgagcttgtcccggaagtcctcatcgattggcaacttcaatgagagggaattaactggcttcatcaccagctatctcgaagaagcctacatcccagttgtcaatgatgtgcttcaagtggggctcccactcccggactttctggccatgaattacaacctggctgagctggacatagtagagaatgccctgatgctggacttgaagctg

SEQ ID NO: 111832 - DNA, 1980 bp, Homo sapiens
  Payload ID: 1919
  Gene Symbol: BPIFC
  Gene Name: BPI fold containing family C
  Uniprot ID: Q8NFQ6
  ENST ID: ENST00000300399
  CDS Start-End: 1-1524
atgtgtacaaagacaatcccagtcctctggggatgtttcctcctgtggaatctctatgtctcatcctctcagaccatttaccctggaatcaaggcaaggattactcagagggcacttgactatggtgttcaagctggaatgaagatgattgagcaaatgctaaaagaaaagaaactcccagatttaagcggttctgagtctcttgaatttctaaaagttgattatgtaaactacaatttttcaaatataaaaatcagtgccttttcatttccaaatacctcattggcttttgtgcctggagtgggaatcaaagcgctaaccaaccatggcactgccaacatcagcacagactgggggttcgagtctccacttttccaagacacaggaggggctgatctgtttctctccggagtctactttaccggtatcattatcctaacccgaaatgactttggtcatcctaccctgaagctccaagattgctacgcccaactgagccatgcccacgtctcattttccggagaactcagtgttctgtataactcctttgctgagcccatggagaaacccattttaaagaacttaaatgaaatgctctgtcccattattgcaagtgaagtcaaagcgctaaatgccaacctcagcacactggaggttttaaccaagattgacaactacactctgctggattactccctaatcagttctccagaaattactgagaactaccttgacctgaacttgaagggtgtattctacccactggaaaacctcaccgacccccccttctcaccagttccttttgtgctcccagaacgcagcaactccatgctctacattggaatcgccgagtatttctttaaatctgcgtcctttgctcatttcacagctggggttttcaatgtcactctctccaccgaagagatttccaaccattttgttcaaaactctcaaggccttggcaacgtgctctcccggattgcagagatctacatcttgtcccagcccttcatggtgaggatcatggccacagagcctcccataatcaatctacaaccaggcaatttcaccctggacatccctgcctccatcatgatgctcacccaacccaagaactccacagttgaaaccatcgtttccatggacttcgttgctagtaccagtgttggcctggttattttgggacaaagactggtctgctccttgtctctgaacagattccgccttgctttgccagagtccaatcgcagcaacattgaggtcttgaggtttgaaaatattctatcgtccattcttcactttggagtcctcccactggccaatgcaaaattgcagcaaggatttcctctgtccaatccacacaaattcttattcgtcaattcagatattgaagttcttgagggtttccttttgatttccaccgacctgaagtatgaaacatcctcaaagcagcagccaagtttccacgtatgggaaggtctgaacctgataagcagacagtggagggggaagtcagccccttgattgccggtttgcaattcaccccaggaagtaaatggtccttaatcctacaactactgtaaacccagaagggaaagacagtacacactggaattgtaaagcccttgtgaattgcttaggcagaaagttttctttcttaagccttcaggaacccagaataaggcagactctgttaaagggataaatagaggtgtctgaatgtgagtgtatgcatgctgcgtgtgtctgtgtttatgtttgtttgtttgtttggggcaagaaagattctaggacaagagctaggcatgtacttctgaccaggtgggtaagcaactctaagtctgtatttgtattggtcattctcagtggaaatcccttaggccctctagtggttttcccctacctgcatattggttttcatgttttatattcactgttactatcttctgtgtttaattaaaattgttttctatcaacttc

SEQ ID NO: 111833 - DNA, 458 bp, Homo sapiens
  Payload ID: 1919
  Gene Symbol: BPIFC
  Gene Name: BPI fold containing family C
  ENST ID: ENST00000397450
  CDS Start-End: 165-413
ggtggagaacacatcagcttcaaaggcagagagaatcgaaggtgctctccagctttggacacttcctctgcttgaggacaccttgactaacctccaagggcaactaaaggatcaagaaaggcccagcacagcagaagatcagctggatctagctcctgcaggagatgtgtacaaagacaatcccagtcctctggggatgtttcctcctgtggaatctctatgtctcatcctctcagaccatttaccctggaatcaaggcaaggattactcagagggcacttgactatggtgttcaagctggaatgaagatgattgagcaaatgctaaaagaaaagaaactcccagatttaagcggttctgagtctcttgaatttctaaaagttgattatgtaaactacaatttttcaaagtaagtaaaaagaagagcattttgcctcttataagaagctcaaaggaaa

SEQ ID NO: 111834 - DNA, 2091 bp, Homo sapiens
  Payload ID: 1919
  Gene Symbol: BPIFC
  Gene Name: BPI fold containing family C
  Uniprot ID: Q8NFQ6
  ENST ID: ENST00000397452
  CDS Start-End: 112-1635
atcttggctttttagcagctgagtttaaggcgcaaggtggagaacacatcagcttcaaaggcagagagaatcgaaggtgctctccagctttggacacttcctctgcttgagatgtgtacaaagacaatcccagtcctctggggatgtttcctcctgtggaatctctatgtctcatcctctcagaccatttaccctggaatcaaggcaaggattactcagagggcacttgactatggtgttcaagctggaatgaagatgattgagcaaatgctaaaagaaaagaaactcccagatttaagcggttctgagtctcttgaatttctaaaagttgattatgtaaactacaatttttcaaatataaaaatcagtgccttttcatttccaaatacctcattggcttttgtgcctggagtgggaatcaaagcgctaaccaaccatggcactgccaacatcagcacagactgggggttcgagtctccacttttccaagacacaggaggggctgatctgtttctctccggagtctactttaccggtatcattatcctaacccgaaatgactttggtcatcctaccctgaagctccaagattgctacgcccaactgagccatgcccacgtctcattttccggagaactcagtgttctgtataactcctttgctgagcccatggagaaacccattttaaagaacttaaatgaaatgctctgtcccattattgcaagtgaagtcaaagcgctaaatgccaacctcagcacactggaggttttaaccaagattgacaactacactctgctggattactccctaatcagttctccagaaattactgagaactaccttgacctgaacttgaagggtgtattctacccactggaaaacctcaccgacccccccttctcaccagttccttttgtgctcccagaacgcagcaactccatgctctacattggaatcgccgagtatttctttaaatctgcgtcctttgctcatttcacagctggggttttcaatgtcactctctccaccgaagagatttccaaccattttgttcaaaactctcaaggccttggcaacgtgctctcccggattgcagagatctacatcttgtcccagcccttcatggtgaggatcatggccacagagcctcccataatcaatctacaaccaggcaatttcaccctggacatccctgcctccatcatgatgctcacccaacccaagaactccacagttgaaaccatcgtttccatggacttcgttgctagtaccagtgttggcctggttattttgggacaaagactggtctgctccttgtctctgaacagattccgccttgctttgccagagtccaatcgcagcaacattgaggtcttgaggtttgaaaatattctatcgtccattcttcactttggagtcctcccactggccaatgcaaaattgcagcaaggatttcctctgtccaatccacacaaattcttattcgtcaattcagatattgaagttcttgagggtttccttttgatttccaccgacctgaagtatgaaacatcctcaaagcagcagccaagtttccacgtatgggaaggtctgaacctgataagcagacagtggagggggaagtcagccccttgattgccggtttgcaattcaccccaggaagtaaatggtccttaatcctacaactactgtaaacccagaagggaaagacagtacacactggaattgtaaagcccttgtgaattgcttaggcagaaagttttctttcttaagccttcaggaacccagaataaggcagactctgttaaagggataaatagaggtgtctgaatgtgagtgtatgcatgctgcgtgtgtctgtgtttatgtttgtttgtttgtttggggcaagaaagattctaggacaagagctaggcatgtacttctgaccaggtgggtaagcaactctaagtctgtatttgtattggtcattctcagtggaaatcccttaggccctctagtggttttcccctacctgcatattggttttcatgttttatattcactgttactatcttctgtgtttaattaaaattgttttctatcaacttc

SEQ ID NO: 111835 - DNA, 1809 bp, Homo sapiens
  Payload ID: 1919
  Gene Symbol: BPIFC
  Gene Name: BPI fold containing family C
  Uniprot ID: Q8NFQ6
  ENST ID: ENST00000534972
  CDS Start-End: 559-1353
atgtgtacaaagacaatcccagtcctctggggatgtttcctcctgtggaatctctatgtctcatcctctcagaccatttaccctggaatcaaggcaaggattactcagagggcacttgactatggtgttcaagctggaatgaagatgattgagcaaatgctaaaagaaaagaaactcccagatttaagcggttctgagtctcttgaatttctaaaagttgattatgtaaactacaatttttcaaatataaaaatcagtgccttttcatttccaaatacctcattggcttttgtgcctggagtgggaatcaaagcgctaaccaaccatggcactgccaacatcagcacagactgggggttcgagtctccacttttccaagacacaggaggggctgatctgtttctctccggagtctactttaccggtatcattatcctaacccgaaatgactttggtcatcctaccctgaagctccaagattgctacgcccaactgagccatgcccacgtctcattttccggagaactcagtgttctgtataactcctttgctgagcccatggagaaacccattttaaagaacttaaatgaaatgctctgtcccattattgcaagtgaagtcaaagcgctaaatgccaacctcagcacactggaggttttaaccaagattgacaactacactctgctggattactccctaatcagttctccagaaattactgagaactaccttgacctgaacttgaagggtgtattctacccactggaaaacctcaccgacccccccttctcaccagttccttttgtgctcccagaacgcagcaactccatgctctacattggaatcgccgagtatttctttaaatctgcgtcctttgctcatttcacagctggggttttcaatgtcactctctccaccgaagagatttccaaccattttgttcaaaactctcaaggccttggcaacgtgctctcccgggttgctagtaccagtgttggcctggttattttgggacaaagactggtctgctccttgtctctgaacagattccgccttgctttgccagagtccaatcgcagcaacattgaggtcttgaggtttgaaaatattctatcgtccattcttcactttggagtcctcccactggccaatgcaaaattgcagcaaggatttcctctgtccaatccacacaaattcttattcgtcaattcagatattgaagttcttgagggtttccttttgatttccaccgacctgaagtatgaaacatcctcaaagcagcagccaagtttccacgtatgggaaggtctgaacctgataagcagacagtggagggggaagtcagccccttgattgccggtttgcaattcaccccaggaagtaaatggtccttaatcctacaactactgtaaacccagaagggaaagacagtacacactggaattgtaaagcccttgtgaattgcttaggcagaaagttttctttcttaagccttcaggaacccagaataaggcagactctgttaaagggataaatagaggtgtctgaatgtgagtgtatgcatgctgcgtgtgtctgtgtttatgtttgtttgtttgtttggggcaagaaagattctaggacaagagctaggcatgtacttctgaccaggtgggtaagcaactctaagtctgtatttgtattggtcattctcagtggaaatcccttaggccctctagtggttttcccctacctgcatattggttttcatgttttatattcactgttactatcttctgtgtttaattaaaattgttttctatcaacttc

SEQ ID NO: 111836 - DNA, 3079 bp, Homo sapiens
  Payload ID: 1920
  Gene Symbol: BRSK1
  Gene Name: BR serine/threonine kinase 1
  Uniprot ID: Q8TDC3
  ENST ID: ENST00000309383
  CDS Start-End: 278-2614
gggggccggccagaaacgggctggggagggggggccccgcagcccccctgggccatgctgactcccggggcctgacccccccgggccagccccccctcccccagctccgcggcccgccgactggggggggccagcccagccccctggggacccccggagaggtggggggcagccgggggggccgggacggagcggtcgccggcccccaccggagagacggggcgacggccgcagggggggcggccgggggaccggtcgggccgggaccaagggcaccatgtcgtccggggccaaggagggaggtgggggctctcccgcctaccacctcccccacccccacccccacccaccccagcacgcccaatatgtgggcccctatcggctggagaagacgctgggcaaaggacagacagggctggttaaactcggggtccactgcatcacgggtcagaaggtcgccatcaagatcgtgaaccgggagaagctgtcggagtcggtgctgatgaaggtggagcgggagatcgccatcctgaagctcatcgaacacccacatgtcctcaagctccacgacgtctacgagaacaagaaatatttgtacctggttctggagcacgtctcggggggtgagctattcgactacctggtaaagaaggggagactgacgcccaaggaggcccgaaagttcttccgccagattgtgtctgcgctggacttctgccacagctactccatctgccacagagacctaaagcccgagaacctgcttttggatgagaaaaacaacatccgcattgcagacttcggcatggcgtccctgcaggtgggggacagcctcctggagaccagctgcgggtccccccattatgcgtgtccagaggtgattaagggggaaaaatatgatggccgccgggcagacatgtggagctgtggagtcatcctcttcgccctgctcgtgggggctctgccctttgatgacgacaacctccgccagctgctggagaaggtgaaacggggcgtcttccacatgccccacttcattcctccagattgccagagcctcctgaggggaatgatcgaagtggagcccgaaaaaaggctcagtctggagcaaattcagaaacatccttggtacctaggcgggaaacacgagccagacccgtgcctggagccagcccctggccgccgggtagccatgcggagcctgccatccaacggagagctggaccccgacgtcctagagagcatggcatcactgggctgcttcagggaccgcgagaggctgcatcgcgagctgcgcagtgaggaggagaaccaagaaaagatgatatattatctgcttttggatcggaaggagcggtatcccagctgtgaggaccaggacctgcctccccggaatgatgttgaccccccccggaagcgtgtggattctcccatgctgagccgtcacgggaagcggcgaccagagcggaagtccatggaagtcctgagcatcaccgatgccgggggtggtggctcccctgtacccacccgacgggccttggagatggcccagcacagccagagatcccgtagcgtcagtggagcctccacgggtctgtcctccagccctctaagcagcccaaggagtccggtcttttccttttcaccggagccgggggctggagatgaggctcgaggcgggggctccccgacttccaaaacgcagacgctgccttctcggggccccaggggtgggggcgccggggagcagcccccgccccccagtgcccgctccacacccctgcccggccccccaggctccccgcgctcctctggcgggacccccttgcactcgcctctgcacacgccccgggccagtcccaccgggaccccggggacaacaccaccccccagccccggcggtggcgtcgggggagccgcctggaggagtcgtctcaactccatccgcaacagcttcctgggctcccctcgctttcaccggcgcaagatgcaggtccctaccgctgaggagatgtccagcttgacgccagagtcctccccggagctggcaaaacgctcctggttcgggaacttcatctccttggacaaagaagaacaaatattcctcgtgctaaaggacaaacctctcagcagcatcaaagcagacatcgtccatgcctttctgtcgatccccagcctgagtcacagtgtgctgtcacagaccagcttcagggccgagtacaaggccagtggcggcccctccgtcttccaaaagcccgtccgcttccaggtggacatcagctcctctgagggtccagagccctccccgcgacgggacggcagcggaggtggtggcatctactccgtcaccttcactctcatctcgggtcccagccgtcggttcaagcgagtggtggagaccatccaggcacagctcctgagcactcatgaccagccctccgtgcaggccctggcagacgagaagaacggggcccagacccggcctgctggtgccccaccccgaagcctgcagcccccacccggccgcccagacccagagctgagcagctctccccgccgaggcccccccaaggacaagaagctcctggccaccaacgggacccctctgccctgaccccacggggccggggagggaggggacccccctccaccccccttccgtgccccccaactgtgaatctgtaaataaggcccaaggaacatgtcgggaggggggtggacacaaaaaccggccttgccctgcagggatggggctccacaggccgtgcccaactgggggtggttctaggggaacagggggcgggggagctgtttctattttatttattgattaatttattattttatttattgatcaatctctctgcggggtggggtgggggagggacgggagctggttggggtggcttagcagatccggacagggccctctgtccctgtgtcgtccccaaccccctcttcccgggcccctcctcccctggtcctccccccacgaccttctgtacggatttgctctccggaaggaattctggtttcgcgtgatcctgcctgcgtccgtgtctctgattccgccggcggc

SEQ ID NO: 111837 - DNA, 2095 bp, Homo sapiens
  Payload ID: 1920
  Gene Symbol: BRSK1
  Gene Name: BR serine/threonine kinase 1
  ENST ID: ENST00000326848
  CDS Start-End: 209-1630
agcggctgggaggggtgggatgccagggttcctgagaggcaacgggctagggactcggacttatgggtcctgggggaagaggacacagctagagaaggagtctaggggtcagaggcaggaggggctaagctaggagtccaggactcccagaggcgggaaacacgagccagacccgtgcctggagccagcccctggccgccgggtagccatgcggagcctgccatccaacggagagctggaccccgacgtcctagagagcatggcatcactgggctgcttcagggaccgcgagaggctgcatcgcgagctgcgcagtgaggaggagaaccaagaaaagatgatatattatctgcttttggatcggaaggagcggtatcccagctgtgaggaccaggacctgcctccccggaatgatgttgaccccccccggaagcgtgtggattctcccatgctgagccgtcacgggaagcggcgaccagagcggaagtccatggaagtcctgagcatcaccgatgccgggggtggtggctcccctgtacccacccgacgggccttggagatggcccagcacagccagagatcccgtagcgtcagtggagcctccacgggtctgtcctccagccctctaagcagcccaaggagtccggtcttttccttttcaccggagccgggggctggagatgaggctcgaggcgggggctccccgacttccaaaacgcagacgctgccttctcggggccccaggggtgggggcgccggggagcagcccccgccccccagtgcccgctccacacccctgcccggccccccaggctccccgcgctcctctggcgggacccccttgcactcgcctctgcacacgccccgggccagtcccaccgggaccccggggacaacaccaccccccagccccggcggtggcgtcgggggagccgcctggaggagtcgtctcaactccatccgcaacagcttcctgggctcccctcgctttcaccggcgcaagatgcaggtccctaccgctgaggagatgtccagcttgacgccagagtcctccccggagctggcaaaacgctcctggttcgggaacttcatctccttggacaaagaagaacaaatattcctcgtgctaaaggacaaacctctcagcagcatcaaagcagacatcgtccatgcctttctgtcgatccccagcctgagtcacagtgtgctgtcacagaccagcttcagggccgagtacaaggccagtggcggcccctccgtcttccaaaagcccgtccgcttccaggtggacatcagctcctctgagggtccagagccctccccgcgacgggacggcagcggaggtggtggcatctactccgtcaccttcactctcatctcgggtcccagccgtcggttcaagcgagtggtggagaccatccaggcacagctcctgagcactcatgaccagccctccgtgcaggccctggcagacgagaagaacggggcccagacccggcctgctggtgccccaccccgaagcctgcagcccccacccggccgcccagacccagagctgagcagctctccccgccgaggcccccccaaggacaagaagctcctggccaccaacgggacccctctgccctgaccccacggggccggggagggaggggacccccctccaccccccttccgtgccccccaactgtgaatctgtaaataaggcccaaggaacatgtcgggaggggggtggacacaaaaaccggccttgccctgcagggatggggctccacaggccgtgcccaactgggggtggttctaggggaacagggggcgggggagctgtttctattttatttattgattaatttattattttatttattgatcaatctctctgcggggtggggtgggggagggacgggagctggttggggtggcttagcagatccggacagggccctctgtccctgtgtcgtccccaaccccctcttcccgggcccctcctcccctggtcctccccccacgaccttctgtacggatttgctctccggaaggaattctggtttcgcgtgatcctgcctgcgtccgtgtctctgattccgccggcggc

SEQ ID NO: 111838 - DNA, 556 bp, Homo sapiens
  Payload ID: 1920
  Gene Symbol: BRSK1
  Gene Name: BR serine/threonine kinase 1
  ENST ID: ENST00000591774
  CDS Start-End: 162-556
agtctttcattgcgcgcctacatgtgcctacgacctcacttctgcttctctacgactcaccaccctcacagctggagcaaattcagaaacatccttggtacctaggcgggaaacacgagccagacccgtgcctggagccagcccctggccgccgggtagccatgcggagcctgccatccaacggagagctggaccccgacgtcctagagagcatggcatcactgggctgcttcagggaccgcgagaggctgcatcgcgagctgcgcagtgaggaggagaaccaagaaaagatgatatattatctgcttttggatcggaaggagcggtatcccagctgtgaggaccaggacctgcctccccggaatgatgttgaccccccccggaagcgtgtggattctcccatgctgagccgtcacgggaagcggcgaccagagcggaagtccatggaagtcctgagcatcaccgatgccgggggtggtggctcccctgtacccacccgacgggccttggagatggcccagcacagccagagatcccgtagcgtcagtggagcctc

SEQ ID NO: 111839 - DNA, 545 bp, Homo sapiens
  Payload ID: 1920
  Gene Symbol: BRSK1
  Gene Name: BR serine/threonine kinase 1
  ENST ID: ENST00000592539
  CDS Start-End: 1-190
ggcggggctggttaaactcggggtccactgcatcacgggtcagaaggtcgccatcaagatcgtgaaccgggagaagctgtcggagtcggtgctgatgaaggtggagcgggagatcgccatcctgaagctcatcgaacacccacatgtcctcaagctccacgacgtctacgagaacaagaaatatttgtaggtttcaccacacgggaagctgtctgcccggcgctcatgggacctgctctcaggctttcccaggtacctggttctggagcacgtctcggggggtgagctattcgactacctggtaaagaaggggagactgacgcccaaggaggcccgaaagttcttccgccagattgtgtctgcgctggacttctgccacagctactccatctgccacagagacctaaagcccgagaacctgcttttggatgagaaaaacaacatccgcattgcagacttcggcatggcgtccctgcaggtgggggacagcctcctggagaccagctgcgggtccccccattatgcgtgtccagaggtgattaagg

SEQ ID NO: 111840 - DNA, 1104 bp, Homo sapiens
  Payload ID: 1920
  Gene Symbol: BRSK1
  Gene Name: BR serine/threonine kinase 1
  Uniprot ID: Q8TDC3
  ENST ID: ENST00000585418
  CDS Start-End: 23-1054
tcgggccgggaccaagggcaccatgtcgtccggggccaaggagggaggtgggggctctcccgcctaccacctcccccacccccacccccacccaccccagcacgcccaatatgtgggcccctatcggctggagaagacgctgggcaaaggacagacagggctggttaaactcggggtccactgcatcacgggtcagaaggtcgccatcaagatcgtgaaccgggagaagctgtcggagtcggtgctgatgaaggtggagcgggagatcgccatcctgaagctcatcgaacacccacatgtcctcaagctccacgacgtctacgagaacaagaaatatttgtacctggttctggagcacgtctcggggggtgagctattcgactacctggtaaagaaggggagactgacgcccaaggaggcccgaaagttcttccgccagattgtgtctgcgctggacttctgccacagctactccatctgccacagagacctaaagcccgagaacctgcttttggatgagaaaaacaacatccgcattgcagacttcggcatggcgtccctgcaggtgggggacagcctcctggagaccagctgcgggtccccccattatgcgtgtccagaggtgattaagggggaaaaatatgatggccgccgggcagacatgtggagctgtggagtcatcctcttcgccctgctcgtgggggctctgccctttgatgacgacaacctccgccagctgctggagaaggtgaaacggggcgtcttccacatgccccacttcattcctccagattgccagagcctcctgaggggaatgatcgaagtggagcccgaaaaaaggctcagtctggagcaaattcagaaacatccttggtacctaggcgggaaacacgagccagacccgtgcctggagccagcccctggccgccgggtagccatgcggagcctgccatccaacggagagctggaccccgacgtcctagagagcatggcatcactgggctgcttcagggaccgcgagaggctgcatcgcgagctgcgcagtgaggagtaagaccccaagacccctgcacccgtgtacccacgtggggcgagctgcagcag

SEQ ID NO: 111841 - DNA, 2977 bp, Homo sapiens
  Payload ID: 1920
  Gene Symbol: BRSK1
  Gene Name: BR serine/threonine kinase 1
  Uniprot ID: Q8TDC3
  ENST ID: ENST00000590333
  CDS Start-End: 128-2512
gctcacgcctgtaatcccagcactttgggaagctgaggtgggcaaatcacaaggtcaggagtttgagaccagcctgaccaacatggtgaaaccccatctctactaaaaatacaaaaattagccaggcatggtggcggggttaactttggggaagggcccggagtccccggatggtgatgtcagcgtgccggagagaaaggacgaggtggcggggggaggcggagaggaggaggaggcggaggagagagggcgccacgcccaatatgtgggcccctatcggctggagaagacgctgggcaaaggacagacagggctggttaaactcggggtccactgcatcacgggtcagaaggtcgccatcaagatcgtgaaccgggagaagctgtcggagtcggtgctgatgaaggtggagcgggagatcgccatcctgaagctcatcgaacacccacatgtcctcaagctccacgacgtctacgagaacaagaaatatttgtacctggttctggagcacgtctcggggggtgagctattcgactacctggtaaagaaggggagactgacgcccaaggaggcccgaaagttcttccgccagattgtgtctgcgctggacttctgccacagctactccatctgccacagagacctaaagcccgagaacctgcttttggatgagaaaaacaacatccgcattgcagacttcggcatggcgtccctgcaggtgggggacagcctcctggagaccagctgcgggtccccccattatgcgtgtccagaggtgattaagggggaaaaatatgatggccgccgggcagacatgtggagctgtggagtcatcctcttcgccctgctcgtgggggctctgccctttgatgacgacaacctccgccagctgctggagaaggtgaaacggggcgtcttccacatgccccacttcattcctccagattgccagagcctcctgaggggaatgatcgaagtggagcccgaaaaaaggctcagtctggagcaaattcagaaacatccttggtacctaggcgggaaacacgagccagacccgtgcctggagccagcccctggccgccgggtagccatgcggagcctgccatccaacggagagctggaccccgacgtcctagagagcatggcatcactgggctgcttcagggaccgcgagaggctgcatcgcgagctgcgcagtgaggaggagaaccaagaaaagatgatatattatctgcttttggatcggaaggagcggtatcccagctgtgaggaccaggacctgcctccccggaatgatgttgaccccccccggaagcgtgtggattctcccatgctgagccgtcacgggaagcggcgaccagagcggaagtccatggaagtcctgagcatcaccgatgccgggggtggtggctcccctgtacccacccgacgggccttggagatggcccagcacagccagagatcccgtagcgtcagtggagcctccacgggtctgtcctccagccctctaagcagcccaaggagtccggtcttttccttttcaccggagccgggggctggagatgaggctcgaggcgggggctccccgacttccaaaacgcagacgctgccttctcggggccccaggggtgggggcgccggggagcagcccccgccccccagtgcccgctccacacccctgcccggccccccaggctccccgcgctcctctggcgggacccccttgcactcgcctctgcacacgccccgggccagtcccaccgggaccccggggacaacaccaccccccagccccggcggtggcgtcgggggagccgcctggaggagtcgtctcaactccatccgcaacagcttcctgggctcccctcgctttcaccggcgcaagatgcaggtccctaccgctgaggagatgtccagcttgacgccagagtcctccccggagctggcaaaacgctcctggttcgggaacttcatctccttggacaaagaagaacaaatattcctcgtgctaaaggacaaacctctcagcagcatcaaagcagacatcgtccatgcctttctgtcgatccccagcctgagtcacagtgtgctgtcacagaccagcttcagggccgagtacaaggccagtggcggcccctccgtcttccaaaagcccgtccgcttccaggtggacatcagctcctctgagggtccagagccctccccgcgacgggacggcagcggaggtggtggcatctactccgtcaccttcactctcatctcgggtcccagccgtcggttcaagcgagtggtggagaccatccaggcacagctcctgagcactcatgaccagccctccgtgcaggccctggcagacgagaagaacggggcccagacccggcctgctggtgccccaccccgaagcctgcagcccccacccggccgcccagacccagagctgagcagctctccccgccgaggcccccccaaggacaagaagctcctggccaccaacgggacccctctgccctgaccccacggggccggggagggaggggacccccctccaccccccttccgtgccccccaactgtgaatctgtaaataaggcccaaggaacatgtcgggaggggggtggacacaaaaaccggccttgccctgcagggatggggctccacaggccgtgcccaactgggggtggttctaggggaacagggggcgggggagctgtttctattttatttattgattaatttattattttatttattgatcaatctctctgcggggtggggtgggggagggacgggagctggttggggtggcttagcagatccggacagggccctctgtccctgtgtcgtccccaaccccctcttcccgggcccctcctcccctggtcctccccccacgaccttctgtacggatttgctctccggaaggaattctggtttcgcgtgatcctgcctgcgtccgtgtctctgattccgccggcggc

SEQ ID NO: 111842 - DNA, 4089 bp, Homo sapiens
  Payload ID: 1921
  Gene Symbol: BRSK2
  Gene Name: BR serine/threonine kinase 2
  Uniprot ID: Q8IWQ3
  ENST ID: ENST00000308219
  CDS Start-End: 387-2393
gctgttcggctcagctgcacggctcggctcggctcggctcggctcggctgcgcggccgctgacgggcgtgcgctgggggcgcggggcgcggggcgcgggcctcggcggcggcggcggcggcggcggcggaagccaggtgcccccgcccgccctgtcctctcgacgaggcggaggcgtcgccgcgggccaggcctcggactgccgcgtcggagtggacgcggggggcggcggcgcgggcggacgcgggcggcgcgaagcagcggggcccgcgggggcgccccggccgggtcggcgcggacggcactcggcggacgcgggcggacgctgggcggcccctccctgcccgcgcgcccgggcgcccctggccggcgccgggccccagagcgatgacatcgacggggaaggacggcggcgcgcagcacgcgcagtatgttgggccctaccggctggagaagacgctgggcaaggggcagacaggtctggtgaagctgggggttcactgcgtcacctgccagaaggtggccatcaagatcgtcaaccgtgagaagctcagcgagtcggtgctgatgaaggtggagcgggagatcgcgatcctgaagctcattgagcacccccacgtcctaaagctgcacgacgtttatgaaaacaaaaaatatttgtacctggtgctagaacacgtgtcaggtggtgagctcttcgactacctggtgaagaaggggaggctgacgcctaaggaggctcggaagttcttccggcagatcatctctgcgctggacttctgccacagccactccatatgccacagggatctgaaacctgaaaacctcctgctggacgagaagaacaacatccgcatcgcagactttggcatggcgtccctgcaggttggcgacagcctgttggagaccagctgtgggtccccccactacgcctgccccgaggtgatccggggggagaagtatgacggccggaaggcggacgtgtggagctgcggcgtcatcctgttcgccttgctggtgggggctctgcccttcgacgatgacaacttgcgacagctgctggagaaggtgaagcggggcgtgttccacatgccgcactttatcccgcccgactgccagagtctgctacggggcatgatcgaggtggacgccgcacgccgcctcacgctagagcacattcagaaacacatatggtatatagggggcaagaatgagcccgaaccagagcagcccattcctcgcaaggtgcagatccgctcgctgcccagcctggaggacatcgaccccgacgtgctggacagcatgcactcactgggctgcttccgagaccgcaacaagctgctgcaggacctgctgtccgaggaggagaaccaggagaagatgatttacttcctcctcctggaccggaaagaaaggtacccgagccaggaggatgaggacctgcccccccggaacgagatagaccctccccggaagcgtgtggactccccgatgctgaaccggcacggcaagcggcggccagaacgcaaatccatggaggtgctcagcgtgacggacggcggctccccggtgcctgcgcggcgggccattgagatggcccagcacggccagaggtctcggtccatcagcggtgcctcctcaggcctttccaccagcccactcagcagcccccgggtgacccctcacccctcaccaaggggcagtcccctccccacccccaaggggacacctgtccacacgccaaaggagagcccggctggcacgcccaaccccacgcccccgtccagccccagcgtcggaggggtgccctggagggcgcggctcaactccatcaagaacagctttctgggctcaccccgcttccaccgccggaaactgcaagttccgacgccggaggagatgtccaacctgacaccagagtcgtccccagagctggcgaagaagtcctggtttgggaacttcatcagcctggagaaggaggagcagatcttcgtggtcatcaaagacaaacctctgagctccatcaaggctgacatcgtgcacgccttcctgtcgattcccagtctcagccacagcgtcatctcccaaacgagcttccgggccgagtacaaggccacgggggggccagccgtgttccagaagccggtcaagttccaggttgatatcacctacacggagggtggggaggcgcagaaggagaacggcatctactccgtcaccttcaccctgctctcaggccccagccgtcgcttcaagagggtggtggagaccatccaggcccagctgctgagcacacacgacccgcctgcggcccagcacttgtcagacaccactaactgtatggaaatgatgacggggcggctttccaaatgtggaattatcccgaaaagttaacatgtcacctccacgaggccatcctctgtgaccgaaggcagctgctgcggacccgccctccctccgctcctgctgttgctgccgggcagtgaggcccagcccagcgccccgtccaccccgcggcagctcctcgcctcagctccgcacggcccgtgggaggaaggccaggctcgggggagcctcctccagcccggccgacccggactcccggtcacctgacccctcagcaagaacagcctgcctggtggccttctggggccaggacccctggtgggcaacgtagccacaggaacaggccccgtccaccgcctccacgccgcacctggaggcctcctcgcaggcccgtgccccgcctccctggctgcgccgcctccgtgtagtcttggcctcctcaggctgcctcccgtcctctcgtctcacccgcgcctcccttgcctcatctggggcggctgtgggctctggcgctcctctctggctgaggtggaaacagagacaccctgcggcaccagagccttcccagcaggccaggccgctgggctgggatcagtgttatttatttgccgttttaatttatggattctccgcacctctgttcagggaagggcggcggccacatcccctgccgtctgcgtgtctcaggcagtgggggggctggggccagggcgccctctgaggacagagctggtggggcgcgggggggctggcgagctactgtaaactttaaagaattcctgcaagatatttttataaacttttttttcttggtggtttttggaaaagggtgtgggggtgggggcgccgctggggcagggccaggttttgtgttttagtcccttgctcctgcttctttctacacacacatctaaagacggtgcggctcgctctgtcatgggttccgtctctctgtggagaagcagctccacctctgggggggctcggggcagaggggcggtgtcttgtagcgggcggcagcgccagcgcccctctgtcaggctggggcaatcttggttttgtgtccaaaggtgaaggggtaggaggagggccctcagctggccctccccacacacaggacggcaggggcactgtgaggcttttcttattaaaatgaaaaaattgaaaaaaaaggacaaagagtcggtggcgctcctctgcagggcgttctgtgcagagcgaggcccagggcgcagccctcagagggctgcaggcccaccctgcccagtgcccgccgccgtgcttcaccccagctccagcttctgtgttcccttccgcccatgtgcccagccctcccaggcgggcacagcccgggtgcggcggccgtgggggacggcgggtctgatgcatgcctctgccatggagtcgtctgtctgcttcggtgcctgcccctgcctcccacccacctcgtgtatagattttaacgcttctgttaacattagacctctgccacaggctgggatttctatacataagaacaaaagcaaacacctaggacagcaaacgccaggcggtacaggcgggaaggggctctccacggagatcgaggacacgaagcaaactgcctcttgcttgccttccccttttgtgcttcggacacacgcggactccagcaggcgccacggaaatgggcaagcccctgcagtgtacccctgtcataactgtgagcagctgcagctccggaacaataaatcccttccgcaaa

SEQ ID NO: 111843 - DNA, 3576 bp, Homo sapiens
  Payload ID: 1921
  Gene Symbol: BRSK2
  Gene Name: BR serine/threonine kinase 2
  Uniprot ID: Q8IWQ3
  ENST ID: ENST00000382179
  CDS Start-End: 254-2554
agtctcaggctggctagttcctccttcctggtcactgagccagccttgctgaggggagagcgggttctggacgtgctctgagcttccttcctcacagccttgctcctgggccagatcagcaggaaagcagccagtgccccgccatggcctgcccgggtggggtcctgaagctggggccggagcagggggcacagttctgccccatctggccctagtttggggagggagcctggtagggcaccagcctcaccccatgagccctgagggccaccccagccgatgggcacgtccccgccggccctgcatctgtccttcctccctctgctccccaagagagcccaggtctggcccagcggtgggcaggggaggggccgcacatcacagagtgccagctggccacactcccggcccacagctgctccagccgcacctccaccttcctcaaggccagacctggctctgcctgcagcccagcccagcaggtctggtgaagctgggggttcactgcgtcacctgccagaaggtggccatcaagatcgtcaaccgtgagaagctcagcgagtcggtgctgatgaaggtggagcgggagatcgcgatcctgaagctcattgagcacccccacgtcctaaagctgcacgacgtttatgaaaacaaaaaatatttgtacctggtgctagaacacgtgtcaggtggtgagctcttcgactacctggtgaagaaggggaggctgacgcctaaggaggctcggaagttcttccggcagatcatctctgcgctggacttctgccacagccactccatatgccacagggatctgaaacctgaaaacctcctgctggacgagaagaacaacatccgcatcgcagactttggcatggcgtccctgcaggttggcgacagcctgttggagaccagctgtgggtccccccactacgcctgccccgaggtgatccggggggagaagtatgacggccggaaggcggacgtgtggagctgcggcgtcatcctgttcgccttgctggtgggggctctgcccttcgacgatgacaacttgcgacagctgctggagaaggtgaagcggggcgtgttccacatgccgcactttatcccgcccgactgccagagtctgctacggggcatgatcgaggtggacgccgcacgccgcctcacgctagagcacattcagaaacacatatggtatatagggggcaagaatgagcccgaaccagagcagcccattcctcgcaaggtgcagatccgctcgctgcccagcctggaggacatcgaccccgacgtgctggacagcatgcactcactgggctgcttccgagaccgcaacaagctgctgcaggacctgctgtccgaggaggagaaccaggagaagatgatttacttcctcctcctggaccggaaagaaaggtacccgagccaggaggatgaggacctgcccccccggaacgagatagaccctccccggaagcgtgtggactccccgatgctgaaccggcacggcaagcggcggccagaacgcaaatccatggaggtgctcagcgtgacggacggcggctccccggtgcctgcgcggcgggccattgagatggcccagcacggccagaggtctcggtccatcagcggtgcctcctcaggcctttccaccagcccactcagcagcccccgggtgacccctcacccctcaccaaggggcagtcccctccccacccccaaggggacacctgtccacacgccaaaggagagcccggctggcacgcccaaccccacgcccccgtccagccccagcgtcggaggggtgccctggagggcgcggctcaactccatcaagaacagctttctgggctcaccccgcttccaccgccggaaactgcaagttccgacgccggaggagatgtccaacctgacaccagagtcgtccccagagctggcgaagaagtcctggtttgggaacttcatcagcctggagaaggaggagcagatcttcgtggtcatcaaagacaaacctctgagctccatcaaggctgacatcgtgcacgccttcctgtcgattcccagtctcagccacagcgtcatctcccaaacgagcttccgggccgagtacaaggccacgggggggccagccgtgttccagaagccggtcaagttccaggttgatatcacctacacggagggtggggaggcgcagaaggagaacggcatctactccgtcaccttcaccctgctctcaggccccagccgtcgcttcaagagggtggtggagaccatccaggcccagctgctgagcacacacgacccgcctgcggcccagcacttgtcagacaccactaactgtatggaaatgatgacggggcggctttccaaatgtgacgagaagaacgggcaggcggcccaggcccccagcacgcccgccaagcggagtgcccacggcccactcggtgactccgcggccgctggccctggccccggaggggacgccgagtacccaacgggcaaggacacggccaagatgggcccgcccaccgcccgccgcgagcagccttagacacactagcccccccccccagcacagcactgacagcggctgcctcgccgcccgccgcccgccctgccccgagtggacccgcggccgcgccgcccgtccgtccagactgttctcagagcctgggaggaaaggaaaggggcgttggggccggcctgtgggctgcgccacccgcgcccgctctcttttctctctgtctctgcctctgcctgtctctgacagcatcgcttgtttccactctgataccaggaattatcccgaaaagttaacatgtcacctccacgaggccatcctctgtgaccgaaggcagctgctgcggacccgccctccctccgctcctgctgttgctgccgggcagtgaggcccagcccagcgccccgtccaccccgcggcagctcctcgcctcagctccgcacggcccgtgggaggaaggccaggctcgggggagcctcctccagcccggccgacccggactcccggtcacctgacccctcagcaagaacagcctgcctggtggccttctggggccaggacccctggtgggcaacgtagccacaggaacaggccccgtccaccgcctccacgccgcacctggaggcctcctcgcaggcccgtgccccgcctccctggctgcgccgcctccgtgtagtcttggcctcctcaggctgcctcccgtcctctcgtctcacccgcgcctcccttgcctcatctggggcggctgtgggctctggcgctcctctctggctgaggtggaaacagagacaccctgcggcaccagagccttcccagcaggccaggccgctgggctgggatcagtgttatttatttgccgttttaatttatggattctccgcacctctgttcagggaagggcggcggccacatcccctgccgtctgcgtgtctcaggcagtgggggggctggggccagggcgccctctgaggacagagctggtggggcgcgggggggctggcgagctactgtaaactttaaagaattcctgcaagatatttttataaactttt

SEQ ID NO: 111844 - DNA, 3163 bp, Homo sapiens
  Payload ID: 1921
  Gene Symbol: BRSK2
  Gene Name: BR serine/threonine kinase 2
  Uniprot ID: Q8IWQ3
  ENST ID: ENST00000531197
  CDS Start-End: 385-2409
tgttcggctcagctgcacggctcggctcggctcggctcggctcggctgcgcggccgctgacgggcgtgcgctgggggcgcggggcgcggggcgcgggcctcggcggcggcggcggcggcggcggcggaagccaggtgcccccgcccgccctgtcctctcgacgaggcggaggcgtcgccgcgggccaggcctcggactgccgcgtcggagtggacgcggggggcggcggcgcgggcggacgcgggcggcgcgaagcagcggggcccgcgggggcgccccggccgggtcggcgcggacggcactcggcggacgcgggcggacgctgggcggcccctccctgcccgcgcgcccgggcgcccctggccggcgccgggccccagagcgatgacatcgacggggaaggacggcggcgcgcagcacgcgcagtatgttgggccctaccggctggagaagacgctgggcaaggggcagacaggtctggtgaagctgggggttcactgcgtcacctgccagaaggtggccatcaagatcgtcaaccgtgagaagctcagcgagtcggtgctgatgaaggtggagcgggagatcgcgatcctgaagctcattgagcacccccacgtcctaaagctgcacgacgtttatgaaaacaaaaaatatttgtacctggtgctagaacacgtgtcaggtggtgagctcttcgactacctggtgaagaaggggaggctgacgcctaaggaggctcggaagttcttccggcagatcatctctgcgctggacttctgccacagccactccatatgccacagggatctgaaacctgaaaacctcctgctggacgagaagaacaacatccgcatcgcagactttggcatggcgtccctgcaggttggcgacagcctgttggagaccagctgtgggtccccccactacgcctgccccgaggtgatccggggggagaagtatgacggccggaaggcggacgtgtggagctgcggcgtcatcctgttcgccttgctggtgggggctctgcccttcgacgatgacaacttgcgacagctgctggagaaggtgaagcggggcgtgttccacatgccgcactttatcccgcccgactgccagagtctgctacggggcatgatcgaggtggacgccgcacgccgcctcacgctagagcacattcagaaacacatatggtatatagggggcaagaatgagcccgaaccagagcagcccattcctcgcaaggtgcagatccgctcgctgcccagcctggaggacatcgaccccgacgtgctggacagcatgcactcactgggctgcttccgagaccgcaacaagctgctgcaggacctgctgtccgaggaggagaaccaggagaagatgatttacttcctcctcctggaccggaaagaaaggtacccgagccaggaggatgaggacctgcccccccggaacgagatagaccctccccggaagcgtgtggactccccgatgctgaaccggcacggcaagcggcggccagaacgcaaatccatggaggtgctcagcgtgacggacggcggctccccggtgcctgcgcggcgggccattgagatggcccagcacggccagaggtctcggtccatcagcggtgcctcctcaggcctttccaccagcccactcagcagcccccgggtgacccctcacccctcaccaaggggcagtcccctccccacccccaaggggacacctgtccacacgccaaaggagagcccggctggcacgcccaaccccacgcccccgtccagccccagcgtcggaggggtgccctggagggcgcggctcaactccatcaagaacagctttctgggctcaccccgcttccaccgccggaaactgcaagttccgacgccggaggagatgtccaacctgacaccagagtcgtccccagagctggcgaagaagtcctggtttgggaacttcatcagcctggagaaggaggagcagatcttcgtggtcatcaaagacaaacctctgagctccatcaaggctgacatcgtgcacgccttcctgtcgattcccagtctcagccacagcgtcatctcccaaacgagcttccgggccgagtacaaggccacgggggggccagccgtgttccagaagccggtcaagttccaggttgatatcacctacacggagggtggggaggcgcagaaggagaacggcatctactccgtcaccttcaccctgctctcaggccccagccgtcgcttcaagagggtggtggagaccatccaggcccagctgctgagcacacacgacccgcctgcggcccagcacttgtcagaaccccccccaccagcgccaggactaagctggggtgctgggcttaagggccagaaggtggccaccagctacgagagtagcctctgacgctggcaggaattatcccgaaaagttaacatgtcacctccacgaggccatcctctgtgaccgaaggcagctgctgcggacccgccctccctccgctcctgctgttgctgccgggcagtgaggcccagcccagcgccccgtccaccccgcggcagctcctcgcctcagctccgcacggcccgtgggaggaaggccaggctcgggggagcctcctccagcccggccgacccggactcccggtcacctgacccctcagcaagaacagcctgcctggtggccttctggggccaggacccctggtgggcaacgtagccacaggaacaggccccgtccaccgcctccacgccgcacctggaggcctcctcgcaggcccgtgccccgcctccctggctgcgccgcctccgtgtagtcttggcctcctcaggctgcctcccgtcctctcgtctcacccgcgcctcccttgcctcatctggggcggctgtgggctctggcgctcctctctggctgaggtggaaacagagacaccctgcggcaccagagccttcccagcaggccaggccgctgggctgggatcagtgttatttatttgccgttttaatttatggattctccgcacctctgttcagggaagggcggcggccacatcccctgccgtctgcgtgtctcaggcagtgggggggctggggccagggcgccctctgaggacagagctggtggggcgcgggggggctggcgagctactgtaaactttaaa

SEQ ID NO: 111845 - DNA, 3586 bp, Homo sapiens
  Payload ID: 1921
  Gene Symbol: BRSK2
  Gene Name: BR serine/threonine kinase 2
  Uniprot ID: Q8IWQ3
  ENST ID: ENST00000528841
  CDS Start-End: 385-2595
tgttcggctcagctgcacggctcggctcggctcggctcggctcggctgcgcggccgctgacgggcgtgcgctgggggcgcggggcgcggggcgcgggcctcggcggcggcggcggcggcggcggcggaagccaggtgcccccgcccgccctgtcctctcgacgaggcggaggcgtcgccgcgggccaggcctcggactgccgcgtcggagtggacgcggggggcggcggcgcgggcggacgcgggcggcgcgaagcagcggggcccgcgggggcgccccggccgggtcggcgcggacggcactcggcggacgcgggcggacgctgggcggcccctccctgcccgcgcgcccgggcgcccctggccggcgccgggccccagagcgatgacatcgacggggaaggacggcggcgcgcagcacgcgcagtatgttgggccctaccggctggagaagacgctgggcaaggggcagacaggtctggtgaagctgggggttcactgcgtcacctgccagaaggtggccatcaagatcgtcaaccgtgagaagctcagcgagtcggtgctgatgaaggtggagcgggagatcgcgatcctgaagctcattgagcacccccacgtcctaaagctgcacgacgtttatgaaaacaaaaaatatttgtacctggtgctagaacacgtgtcaggtggtgagctcttcgactacctggtgaagaaggggaggctgacgcctaaggaggctcggaagttcttccggcagatcatctctgcgctggacttctgccacagccactccatatgccacagggatctgaaacctgaaaacctcctgctggacgagaagaacaacatccgcatcgcagactttggcatggcgtccctgcaggttggcgacagcctgttggagaccagctgtgggtccccccactacgcctgccccgaggtgatccggggggagaagtatgacggccggaaggcggacgtgtggagctgcggcgtcatcctgttcgccttgctggtgggggctctgcccttcgacgatgacaacttgcgacagctgctggagaaggtgaagcggggcgtgttccacatgccgcactttatcccgcccgactgccagagtctgctacggggcatgatcgaggtggacgccgcacgccgcctcacgctagagcacattcagaaacacatatggtatatagggggcaagaatgagcccgaaccagagcagcccattcctcgcaaggtgcagatccgctcgctgcccagcctggaggacatcgaccccgacgtgctggacagcatgcactcactgggctgcttccgagaccgcaacaagctgctgcaggacctgctgtccgaggaggagaaccaggagaagatgatttacttcctcctcctggaccggaaagaaaggtacccgagccaggaggatgaggacctgcccccccggaacgagatagaccctccccggaagcgtgtggactccccgatgctgaaccggcacggcaagcggcggccagaacgcaaatccatggaggtgctcagcgtgacggacggcggctccccggtgcctgcgcggcgggccattgagatggcccagcacggccagaggtctcggtccatcagcggtgcctcctcaggcctttccaccagcccactcagcagcccccgggtgacccctcacccctcaccaaggggcagtcccctccccacccccaaggggacacctgtccacacgccaaaggagagcccggctggcacgcccaaccccacgcccccgtccagccccagcgtcggaggggtgccctggagggcgcggctcaactccatcaagaacagctttctgggctcaccccgcttccaccgccggaaactgcaagttccgacgccggaggagatgtccaacctgacaccagagtcgtccccagagctggcgaagaagtcctggtttgggaacttcatcagcctggagaaggaggagcagatcttcgtggtcatcaaagacaaacctctgagctccatcaaggctgacatcgtgcacgccttcctgtcgattcccagtctcagccacagcgtcatctcccaaacgagcttccgggccgagtacaaggccacgggggggccagccgtgttccagaagccggtcaagttccaggttgatatcacctacacggagggtggggaggcgcagaaggagaacggcatctactccgtcaccttcaccctgctctcaggccccagccgtcgcttcaagagggtggtggagaccatccaggcccagctgctgagcacacacgacccgcctgcggcccagcacttgtcagacaccactaactgtatggaaatgatgacggggcggctttccaaatgtggcagcccattgagtaacttctttgacgtaattaaacaacttttttcagacgagaagaacgggcaggcggcccaggcccccagcacgcccgccaagcggagtgcccacggcccactcggtgactccgcggccgctggccctggccccggaggggacgccgagtacccaacgggcaaggacacggccaagatgggcccgcccaccgcccgccgcgagcagccttagacacactagcccccccccccagcacagcactgacagcggctgcctcgccgcccgccgcccgccctgccccgagtggacccgcggccgcgccgcccgtccgtccagactgttctcagagcctgggaggaaaggaaaggggcgttggggccggcctgtgggctgcgccacccgcgcccgctctcttttctctctgtctctgcctctgcctgtctctgacagcatcgcttgtttccactctgataccaggaattatcccgaaaagttaacatgtcacctccacgaggccatcctctgtgaccgaaggcagctgctgcggacccgccctccctccgctcctgctgttgctgccgggcagtgaggcccagcccagcgccccgtccaccccgcggcagctcctcgcctcagctccgcacggcccgtgggaggaaggccaggctcgggggagcctcctccagcccggccgacccggactcccggtcacctgacccctcagcaagaacagcctgcctggtggccttctggggccaggacccctggtgggcaacgtagccacaggaacaggccccgtccaccgcctccacgccgcacctggaggcctcctcgcaggcccgtgccccgcctccctggctgcgccgcctccgtgtagtcttggcctcctcaggctgcctcccgtcctctcgtctcacccgcgcctcccttgcctcatctggggcggctgtgggctctggcgctcctctctggctgaggtggaaacagagacaccctgcggcaccagagccttcccagcaggccaggccgctgggctgggatcagtgttatttatttgccgttttaatttatggattctccgcacctctgttcagggaagggcggcggccacatcccctgccgtctgcgtgtctcaggcagtgggggggctggggccagggcgccctctgaggacagagctggtggggcgcgggggggctggcgagctactgtaaactttaaa

SEQ ID NO: 111846 - DNA, 1934 bp, Homo sapiens
  Payload ID: 1921
  Gene Symbol: BRSK2
  Gene Name: BR serine/threonine kinase 2
  ENST ID: ENST00000529951
  CDS Start-End: 1-512
tagaacacgtgtcaggtggtgagctcttcgactacctggtgaagaaggggaggctgacgcctaaggaggctcggaagttcttccggcagatcatctctgcgctggacttctgccacagccactccatatgccacagggatctgaaacctgaaaacctcctgctggacgagaagaacaacatccgcatcgcagactttggcatggcgtccctgcaggttggcgacagcctgttggagaccagctgtgggtccccccactacgcctgccccgaggtgatccggggggagaagtatgacggccggaaggcggacgtgtggagctgcggcgtcatcctgttcgccttgctggtgggggctctgcccttcgacgatgacaacttgcgacagctgctggagaaggtgaagcggggcgtgttccacatgccgcactttatcccgcccgactgccagagtctgctacggggcatgatcgaggtggacgccgcacgccgcctcacgagggggcaagaatgagcccgaaccagagcagcccattcctcgcaaggtgcagatccgctcgctgcccagcctggaggacatcgaccccgacgtgctggacagcatgcactcactgggctgcttccgagaccgcaacaagctgctgcaggacctgctgtccgaggaggagaaccaggagaagatgatttacttcctcctcctggaccggaaagaaaggtacccgagccaggaggatgaggacctgcccccccggaacgagatagaccctccccggaagcgtgtggactccccgatgctgaaccggcacggcaagcggcggccagaacgcaaatccatggaggtgctcagcgtgacggacggcggctccccggtgcctgcgcggcgggccattgagatggcccagcacggccagaggtctcggtccatcagcggtgcctcctcaggcctttccaccagcccactcagcagcccccgggtgacccctcacccctcaccaaggggcagtcccctccccacccccaaggggacacctgtccacacgccaaaggagagcccggctggcacgcccaaccccacgcccccgtccagccccagcgtcggaggggtgccctggagggcgcggctcaactccatcaagaacagctttctgggctcaccccgcttccaccgccggaaactgcaagttccgacgccggaggagatgtccaacctgacaccagagtcgtccccagagctggcgaagaagtcctggtttgggaacttcatcagcctggagaaggaggagcagatcttcgtggtcatcaaagacaaacctctgagctccatcaaggctgacatcgtgcacgccttcctgtcgattcccagtctcagccacagcgtcatctcccaaacgagcttccgggccgagtacaaggccacgggggggccagccgtgttccagaagccggtcaagttccaggttgatatcacctacacggagggtggggaggcgcagaaggagaacggcatctactccgtcaccttcaccctgctctcaggccccagccgtcgcttcaagagggtggtggagaccatccaggcccagctgctgagcacacacgacccgcctgcggcccagcacttgtcagaaccccccccaccagcgccaggactaagctggggtgctgggcttaagggccagaaggtggccaccagctacgagagtagcctctgacgctggcagacaccactaactgtatggaaatgatgacggggcggctttccaaatgtggaattatcccgaaaagttaacatgtcacctccacgaggccatcctctgtgaccgaaggcagctgctgcggacccgccctccctccgctcctgctgttgctgccgggcagtgaggcccagcccagcgccccgtccaccccgcggcagctcctcgcctcagctccgcac

SEQ ID NO: 111847 - DNA, 580 bp, Homo sapiens
  Payload ID: 1921
  Gene Symbol: BRSK2
  Gene Name: BR serine/threonine kinase 2
  ENST ID: ENST00000524702
  CDS Start-End: 191-580
acagagcttcaggaaccaccgagatggggagcctgccggagacacaggttttctgagcgcaccagcggctccaaaagcagagggaagagccctgcgtgcaggtctggtgaagctgggggttcactgcgtcacctgccagaaggtggccatcaagatcgtcaaccgtgagaagctcagcgagtcggtgctgatgaaggtggagcgggagatcgcgatcctgaagctcattgagcacccccacgtcctaaagctgcacgacgtttatgaaaacaaaaaatatttgtacctggtgctagaacacgtgtcaggtggtgagctcttcgactacctggtgaagaaggggaggctgacgcctaaggaggctcggaagttcttccggcagatcatctctgcgctggacttctgccacagccactccatatgccacagggatctgaaacctgaaaacctcctgctggacgagaagaacaacatccgcatcgcagactttggcatggcgtccctgcaggttggcgacagcctgttggagaccagctgtgggtccccccactacgcctgccccgaggtgatccggggggag

SEQ ID NO: 111848 - DNA, 3528 bp, Homo sapiens
  Payload ID: 1921
  Gene Symbol: BRSK2
  Gene Name: BR serine/threonine kinase 2
  Uniprot ID: Q8IWQ3
  ENST ID: ENST00000528710
  CDS Start-End: 554-2398
tttgggggcgccgtgaaagcacccagcgtagtcatgctgctgtgtgcgatgggtgctgggcccgcagacttcggtgcttcaaaggcctcactgctgagcacgagacgccgcttttgatgtcgtcaggctctctggtccccgggagtggactcgggggctccgagtgcagggctcacactgtgtctttgagggctggtcacccacccaggcacacctgtggccctgagtcagcactgcctgacgcccaccctcaggagcccccgcctgcctagggtgggaccatgggggaggctggtcctccattctcaggggctgggggacaccccttctggttgagaaggccacaggtggcccccccgccacccggcaggcacagcagggcaccaccgagaccactgtggcctgaggaggagcttcagcagccacttggtaggagggccttcgacggcccttttgtgcagaaggtctggtgaagctgggggttcactgcgtcacctgccagaaggtggccatcaagatcgtcaaccgtgagaagctcagcgagtcggtgctgatgaaggtggagcgggagatcgcgatcctgaagctcattgagcacccccacgtcctaaagctgcacgacgtttatgaaaacaaaaaatatttgtacctggtgctagaacacgtgtcaggtggtgagctcttcgactacctggtgaagaaggggaggctgacgcctaaggaggctcggaagttcttccggcagatcatctctgcgctggacttctgccacagccactccatatgccacagggatctgaaacctgaaaacctcctgctggacgagaagaacaacatccgcatcgcagactttggcatggcgtccctgcaggttggcgacagcctgttggagaccagctgtgggtccccccactacgcctgccccgaggtgatccggggggagaagtatgacggccggaaggcggacgtgtggagctgcggcgtcatcctgttcgccttgctggtgggggctctgcccttcgacgatgacaacttgcgacagctgctggagaaggtgaagcggggcgtgttccacatgccgcactttatcccgcccgactgccagagtctgctacggggcatgatcgaggtggacgccgcacgccgcctcacgctagagcacattcagaaacacatatggtatatagggggcaagaatgagcccgaaccagagcagcccattcctcgcaaggtgcagatccgctcgctgcccagcctggaggacatcgaccccgacgtgctggacagcatgcactcactgggctgcttccgagaccgcaacaagctgctgcaggacctgctgtccgaggaggagaaccaggagaagatgatttacttcctcctcctggaccggaaagaaaggtacccgagccaggaggatgaggacctgcccccccggaacgagatagaccctccccggaagcgtgtggactccccgatgctgaaccggcacggcaagcggcggccagaacgcaaatccatggaggtgctcagcgtgacggacggcggctccccggtgcctgcgcggcgggccattgagatggcccagcacggccagaggtctcggtccatcagcggtgcctcctcaggcctttccaccagcccactcagcagcccccgggtgacccctcacccctcaccaaggggcagtcccctccccacccccaaggggacacctgtccacacgccaaaggagagcccggctggcacgcccaaccccacgcccccgtccagccccagcgtcggaggggtgccctggagggcgcggctcaactccatcaagaacagctttctgggctcaccccgcttccaccgccggaaactgcaagttccgacgccggaggagatgtccaacctgacaccagagtcgtccccagagctggcgaagaagtcctggtttgggaacttcatcagcctggagaaggaggagcagatcttcgtggtcatcaaagacaaacctctgagctccatcaaggctgacatcgtgcacgccttcctgtcgattcccagtctcagccacagcgtcatctcccaaacgagcttccgggccgagtacaaggccacgggggggccagccgtgttccagaagccggtcaagttccaggttgatatcacctacacggagggtggggaggcgcagaaggagaacggcatctactccgtcaccttcaccctgctctcaggccccagccgtcgcttcaagagggtggtggagaccatccaggcccagctgctgagcacacacgacccgcctgcggcccagcacttgtcagaaccccccccaccagcgccaggactaagctggggtgctgggcttaagggccagaaggtggccaccagctacgagagtagcctctgacgctggcaggaattatcccgaaaagttaacatgtcacctccacgaggccatcctctgtgaccgaaggcagctgctgcggacccgccctccctccgctcctgctgttgctgccgggcagtgaggcccagcccagcgccccgtccaccccgcggcagctcctcgcctcagctccgcacggcccgtgggaggaaggccaggctcgggggagcctcctccagcccggccgacccggactcccggtcacctgacccctcagcaagaacagcctgcctggtggccttctggggccaggacccctggtgggcaacgtagccacaggaacaggccccgtccaccgcctccacgccgcacctggaggcctcctcgcaggcccgtgccccgcctccctggctgcgccgcctccgtgtagtcttggcctcctcaggctgcctcccgtcctctcgtctcacccgcgcctcccttgcctcatctggggcggctgtgggctctggcgctcctctctggctgaggtggaaacagagacaccctgcggcaccagagccttcccagcaggccaggccgctgggctgggatcagtgttatttatttgccgttttaatttatggattctccgcacctctgttcagggaagggcggcggccacatcccctgccgtctgcgtgtctcaggcagtgggggggctggggccagggcgccctctgaggacagagctggtggggcgcgggggggctggcgagctactgtaaactttaaagaattcctgcaagatatttttataaacttttttttcttggtggtttttggaaaagggtgtgggggtgggggcgccgctggggcagggccaggttttgtgttttagtcccttgctcctgcttctttctacacacacatctaaagacggtgcggctcgctctgtcatgggttccgtctctctgtggagaagcagctccacctctgggggggctcggggcagaggggcggtgtcttgtagcgggcggcagcgccagcgcccctctgtcaggctggggcaatcttggttttgtgtccaaaggtgaaggggtaggaggagggccctcagctggccctccccacacacaggacggcaggggcactgtgaggcttttcttatt

SEQ ID NO: 111849 - DNA, 2091 bp, Homo sapiens
  Payload ID: 1921
  Gene Symbol: BRSK2
  Gene Name: BR serine/threonine kinase 2
  Uniprot ID: Q8IWQ3
  ENST ID: ENST00000526678
  CDS Start-End: 1-2091
atgacatcgacggggaaggacggcggcgcgcagcacgcgcagtatgttgggccctaccggctggagaagacgctgggcaaggggcagacaggtctggtgaagctgggggttcactgcgtcacctgccagaaggtggccatcaagatcgtcaaccgtgagaagctcagcgagtcggtgctgatgaaggtggagcgggagatcgcgatcctgaagctcattgagcacccccacgtcctaaagctgcacgacgtttatgaaaacaaaaaatatttgtacctggtgctagaacacgtgtcaggtggtgagctcttcgactacctggtgaagaaggggaggctgacgcctaaggaggctcggaagttcttccggcagatcatctctgcgctggacttctgccacagccactccatatgccacagggatctgaaacctgaaaacctcctgctggacgagaagaacaacatccgcatcgcagactttggcatggcgtccctgcaggttggcgacagcctgttggagaccagctgtgggtccccccactacgcctgccccgaggtgatccggggggagaagtatgacggccggaaggcggacgtgtggagctgcggcgtcatcctgttcgccttgctggtgggggctctgcccttcgacgatgacaacttgcgacagctgctggagaaggtgaagcggggcgtgttccacatgccgcactttatcccgcccgactgccagagtctgctacggggcatgatcgaggtggacgccgcacgccgcctcacgctagagcacattcagaaacacatatggtatatagggggcaagaatgagcccgaaccagagcagcccattcctcgcaaggtgcagatccgctcgctgcccagcctggaggacatcgaccccgacgtgctggacagcatgcactcactgggctgcttccgagaccgcaacaagctgctgcaggacctgctgtccgaggaggagaaccaggagaagatgatttacttcctcctcctggaccggaaagaaaggtacccgagccaggaggatgaggacctgcccccccggaacgagatagaccctccccggaagcgtgtggactccccgatgctgaaccggcacggcaagcggcggccagaacgcaaatccatggaggtgctcagcgtgacggacggcggctccccggtgcctgcgcggcgggccattgagatggcccagcacggccagagtaaagcaatgttcagtaaaagcctggatatcgctgaggcccatccccaattcagcaaagaagacaggtctcggtccatcagcggtgcctcctcaggcctttccaccagcccactcagcagcccccgggtgacccctcacccctcaccaaggggcagtcccctccccacccccaaggggacacctgtccacacgccaaaggagagcccggctggcacgcccaaccccacgcccccgtccagccccagcgtcggaggggtgccctggagggcgcggctcaactccatcaagaacagctttctgggctcaccccgcttccaccgccggaaactgcaagttccgacgccggaggagatgtccaacctgacaccagagtcgtccccagagctggcgaagaagtcctggtttgggaacttcatcagcctggagaaggaggagcagatcttcgtggtcatcaaagacaaacctctgagctccatcaaggctgacatcgtgcacgccttcctgtcgattcccagtctcagccacagcgtcatctcccaaacgagcttccgggccgagtacaaggccacgggggggccagccgtgttccagaagccggtcaagttccaggttgatatcacctacacggagggtggggaggcgcagaaggagaacggcatctactccgtcaccttcaccctgctctcaggccccagccgtcgcttcaagagggtggtggagaccatccaggcccagctgctgagcacacacgacccgcctgcggcccagcacttgtcagaaccccccccaccagcgccaggactaagctggggtgctgggcttaagggccagaaggtggccaccagctacgagagtagcctctga

SEQ ID NO: 111850 - DNA, 3211 bp, Homo sapiens
  Payload ID: 1921
  Gene Symbol: BRSK2
  Gene Name: BR serine/threonine kinase 2
  Uniprot ID: Q8IWQ3
  ENST ID: ENST00000529433
  CDS Start-End: 385-2409
tgttcggctcagctgcacggctcggctcggctcggctcggctcggctgcgcggccgctgacgggcgtgcgctgggggcgcggggcgcggggcgcgggcctcggcggcggcggcggcggcggcggcggaagccaggtgcccccgcccgccctgtcctctcgacgaggcggaggcgtcgccgcgggccaggcctcggactgccgcgtcggagtggacgcggggggcggcggcgcgggcggacgcgggcggcgcgaagcagcggggcccgcgggggcgccccggccgggtcggcgcggacggcactcggcggacgcgggcggacgctgggcggcccctccctgcccgcgcgcccgggcgcccctggccggcgccgggccccagagcgatgacatcgacggggaaggacggcggcgcgcagcacgcgcagtatgttgggccctaccggctggagaagacgctgggcaaggggcagacaggtctggtgaagctgggggttcactgcgtcacctgccagaaggtggccatcaagatcgtcaaccgtgagaagctcagcgagtcggtgctgatgaaggtggagcgggagatcgcgatcctgaagctcattgagcacccccacgtcctaaagctgcacgacgtttatgaaaacaaaaaatatttgtacctggtgctagaacacgtgtcaggtggtgagctcttcgactacctggtgaagaaggggaggctgacgcctaaggaggctcggaagttcttccggcagatcatctctgcgctggacttctgccacagccactccatatgccacagggatctgaaacctgaaaacctcctgctggacgagaagaacaacatccgcatcgcagactttggcatggcgtccctgcaggttggcgacagcctgttggagaccagctgtgggtccccccactacgcctgccccgaggtgatccggggggagaagtatgacggccggaaggcggacgtgtggagctgcggcgtcatcctgttcgccttgctggtgggggctctgcccttcgacgatgacaacttgcgacagctgctggagaaggtgaagcggggcgtgttccacatgccgcactttatcccgcccgactgccagagtctgctacggggcatgatcgaggtggacgccgcacgccgcctcacgctagagcacattcagaaacacatatggtatatagggggcaagaatgagcccgaaccagagcagcccattcctcgcaaggtgcagatccgctcgctgcccagcctggaggacatcgaccccgacgtgctggacagcatgcactcactgggctgcttccgagaccgcaacaagctgctgcaggacctgctgtccgaggaggagaaccaggagaagatgatttacttcctcctcctggaccggaaagaaaggtacccgagccaggaggatgaggacctgcccccccggaacgagatagaccctccccggaagcgtgtggactccccgatgctgaaccggcacggcaagcggcggccagaacgcaaatccatggaggtgctcagcgtgacggacggcggctccccggtgcctgcgcggcgggccattgagatggcccagcacggccagaggtctcggtccatcagcggtgcctcctcaggcctttccaccagcccactcagcagcccccgggtgacccctcacccctcaccaaggggcagtcccctccccacccccaaggggacacctgtccacacgccaaaggagagcccggctggcacgcccaaccccacgcccccgtccagccccagcgtcggaggggtgccctggagggcgcggctcaactccatcaagaacagctttctgggctcaccccgcttccaccgccggaaactgcaagttccgacgccggaggagatgtccaacctgacaccagagtcgtccccagagctggcgaagaagtcctggtttgggaacttcatcagcctggagaaggaggagcagatcttcgtggtcatcaaagacaaacctctgagctccatcaaggctgacatcgtgcacgccttcctgtcgattcccagtctcagccacagcgtcatctcccaaacgagcttccgggccgagtacaaggccacgggggggccagccgtgttccagaagccggtcaagttccaggttgatatcacctacacggagggtggggaggcgcagaaggagaacggcatctactccgtcaccttcaccctgctctcaggccccagccgtcgcttcaagagggtggtggagaccatccaggcccagctgctgagcacacacgacccgcctgcggcccagcacttgtcagaaccccccccaccagcgccaggactaagctggggtgctgggcttaagggccagaaggtggccaccagctacgagagtagcctctgacgctggcagacaccactaactgtatggaaatgatgacggggcggctttccaaatgtggaattatcccgaaaagttaacatgtcacctccacgaggccatcctctgtgaccgaaggcagctgctgcggacccgccctccctccgctcctgctgttgctgccgggcagtgaggcccagcccagcgccccgtccaccccgcggcagctcctcgcctcagctccgcacggcccgtgggaggaaggccaggctcgggggagcctcctccagcccggccgacccggactcccggtcacctgacccctcagcaagaacagcctgcctggtggccttctggggccaggacccctggtgggcaacgtagccacaggaacaggccccgtccaccgcctccacgccgcacctggaggcctcctcgcaggcccgtgccccgcctccctggctgcgccgcctccgtgtagtcttggcctcctcaggctgcctcccgtcctctcgtctcacccgcgcctcccttgcctcatctggggcggctgtgggctctggcgctcctctctggctgaggtggaaacagagacaccctgcggcaccagagccttcccagcaggccaggccgctgggctgggatcagtgttatttatttgccgttttaatttatggattctccgcacctctgttcagggaagggcggcggccacatcccctgccgtctgcgtgtctcaggcagtgggggggctggggccagggcgccctctgaggacagagctggtggggcgcgggggggctggcgagctactgtaaactttaaa

SEQ ID NO: 111851 - DNA, 581 bp, Homo sapiens
  Payload ID: 1921
  Gene Symbol: BRSK2
  Gene Name: BR serine/threonine kinase 2
  ENST ID: ENST00000528596
  CDS Start-End: 322-581
agttggagtgttggtggttttgtaacgaactggtcagagcaccttccgtgagaagggccttttcccccagttcaccggggctcccctgctcagggtgtgccgggggctttgagtcacttctgtgtctccttggaggctgtgtggcgtccgcggaagttggtgtctgtgcggtgtggttctgtttatgggtgttgtagagaaggcgccgtccagagacagagccactgctgaggtctggtgaagctgggggttcactgcgtcacctgccagaaggtggccatcaagatcgtcaaccgtgagaagctcagcgagtcggtgctgatgaaggtggagcgggagatcgcgatcctgaagctcattgagcacccccacgtcctaaagctgcacgacgtttatgaaaacaaaaaatatttgtacctggtgctagaacacgtgtcaggtggtgagctcttcgactacctggtgaagaaggggaggctgacgcctaaggaggctcggaagttcttccggcagatcatctctgcgctggacttctgccacagccactccatatgccacagggatctgaaacctgaaaacct

SEQ ID NO: 111852 - DNA, 2319 bp, Homo sapiens
  Payload ID: 1921
  Gene Symbol: BRSK2
  Gene Name: BR serine/threonine kinase 2
  ENST ID: ENST00000533606
  CDS Start-End: 1-601
cacgcccccgtccagccccagcgtcggaggggtgccctggagggcgcggctcaactccatcaagaacagctttctgggctcaccccgcttccaccgccggaaactgcaagttccgacgccggaggagatgtccaacctgacaccagagtcgtccccagagctggcgaagaagtcctggtttgggaacttcatcagcctggagaaggaggagcagatcttcgtggtcatcaaagacaaacctctgagctccatcaaggctgacatcgtgcacgccttcctgtcgattcccagtctcagccacagcgtcatctcccaaacgagcttccgggccgagtacaaggccacgggggggccagccgtgttccagaagccggtcaagttccaggttgatatcacctacacggagggtggggaggcgcagaaggagaacggcatctactccgtcaccttcaccctgctctcaggccccagccgtcgcttcaagagggtggtggagaccatccaggcccagctgctgagcacacacgacccgcctgcggcccagcacttgtcagacaccactaactgtatggaaatgatgacggggcggctttccaaatgaattatcccgaaaagttaacatgtcacctccacgaggccatcctctgtgaccgaaggcagctgctgcggacccgccctccctccgctcctgctgttgctgccgggcagtgaggcccagcccagcgccccgtccaccccgcggcagctcctcgcctcagctccgcacggcccgtgggaggaaggccaggctcgggggagcctcctccagcccggccgacccggactcccggtcacctgacccctcagcaagaacagcctgcctggtggccttctggggccaggacccctggtgggcaacgtagccacaggaacaggccccgtccaccgcctccacgccgcacctggaggcctcctcgcaggcccgtgccccgcctccctggctgcgccgcctccgtgtagtcttggcctcctcaggctgcctcccgtcctctcgtctcacccgcgcctcccttgcctcatctggggcggctgtgggctctggcgctcctctctggctgaggtggaaacagagacaccctgcggcaccagagccttcccagcaggccaggccgctgggctgggatcagtgttatttatttgccgttttaatttatggattctccgcacctctgttcagggaagggcggcggccacatcccctgccgtctgcgtgtctcaggcagtgggggggctggggccagggcgccctctgaggacagagctggtggggcgcgggggggctggcgagctactgtaaactttaaagaattcctgcaagatatttttataaacttttttttcttggtggtttttggaaaagggtgtgggggtgggggcgccgctggggcagggccaggttttgtgttttagtcccttgctcctgcttctttctacacacacatctaaagacggtgcggctcgctctgtcatgggttccgtctctctgtggagaagcagctccacctctgggggggctcggggcagaggggcggtgtcttgtagcgggcggcagcgccagcgcccctctgtcaggctggggcaatcttggttttgtgtccaaaggtgaaggggtaggaggagggccctcagctggccctccccacacacaggacggcaggggcactgtgaggcttttcttattaaaatgaaaaaattgaaaaaaaaggacaaagagtcggtggcgctcctctgcagggcgttctgtgcagagcgaggcccagggcgcagccctcagagggctgcaggcccaccctgcccagtgcccgccgccgtgcttcaccccagctccagcttctgtgttcccttccgcccatgtgcccagccctcccaggcgggcacagcccgggtgcggcggccgtgggggacggcgggtctgatgcatgcctctgccatggagtcgtctgtctgcttcggtgcctgcccctgcctcccacccacctcgtgtatagattttaacgcttctgttaacattagacctctgccacaggctgggatttctatacataagaacaaaagcaaacacctaggacagcaaacgccaggcggtacaggcgggaaggggctctccacggagatcgaggacacgaagcaaactgcctcttgcttgccttccccttttgtgcttcggacacacgcggactccagcaggcgccacggaaatgggcaagcccctgcagtgtacccctgtcataactgtgagcagctgcagctccggaacaataaatcccttccgcaaagaca

SEQ ID NO: 111853 - DNA, 1842 bp, Homo sapiens
  Payload ID: 1921
  Gene Symbol: BRSK2
  Gene Name: BR serine/threonine kinase 2
  ENST ID: ENST00000544817
  CDS Start-End: 155-667
ggagagcccggctggcacgcccaaccccacgcccccgtccagccccagcgtcggaggggtgccctggagggcgcggctcaactccatcaagaacagctttctgggctcaccccgcttccaccgccggaaactgcaagttccgacgccggaggagatgtccaacctgacaccagagtcgtccccagagctggcgaagaagtcctggtttgggaacttcatcagcctggagaaggaggagcagatcttcgtggtcatcaaagacaaacctctgagctccatcaaggctgacatcgtgcacgccttcctgtcgattcccagtctcagccacagcgtcatctcccaaacgagcttccgggccgagtacaaggccacgggggggccagccgtgttccagaagccggtcaagttccaggttgatatcacctacacggagggtggggaggcgcagaaggagaacggcatctactccgtcaccttcaccctgctctcaggccccagccgtcgcttcaagagggtggtggagaccatccaggcccagctgctgagcacacacgacccgcctgcggcccagcacttgtcagaaccccccccaccagcgccaggactaagctggggtgctgggcttaagggccagaaggtggccaccagctacgagagtagcctctgacgctggcagacaccactaactgtatggaaatgatgacggggcggctttccaaatgtggaattatcccgaaaagttaacatgtcacctccacgaggccatcctctgtgaccgaaggcagctgctgcggacccgccctccctccgctcctgctgttgctgccgggcagtgaggcccagcccagcgccccgtccaccccgcggcagctcctcgcctcagctccgcacggcccgtgggaggaaggccaggctcgggggagcctcctccagcccggccgacccggactcccggtcacctgacccctcagcaagaacagcctgcctggtggccttctggggccaggacccctggtgggcaacgtagccacaggaacaggccccgtccaccgcctccacgccgcacctggaggcctcctcgcaggcccgtgccccgcctccctggctgcgccgcctccgtgtagtcttggcctcctcaggctgcctcccgtcctctcgtctcacccgcgcctcccttgcctcatctggggcggctgtgggctctggcgctcctctctggctgaggtggaaacagagacaccctgcggcaccagagccttcccagcaggccaggccgctgggctgggatcagtgttatttatttgccgttttaatttatggattctccgcacctctgttcagggaagggcggcggccacatcccctgccgtctgcgtgtctcaggcagtgggggggctggggccagggcgccctctgaggacagagctggtggggcgcgggggggctggcgagctactgtaaactttaaagaattcctgcaagatatttttataaacttttttttcttggtggtttttggaaaagggtgtgggggtgggggcgccgctggggcagggccaggttttgtgttttagtcccttgctcctgcttctttctacacacacatctaaagacggtgcggctcgctctgtcatgggttccgtctctctgtggagaagcagctccacctctgggggggctcggggcagaggggcggtgtcttgtagcgggcggcagcgccagcgcccctctgtcaggctggggcaatcttggttttgtgtccaaaggtgaaggggtaggaggagggccctcagctggccctccccacacacaggacggcaggggcactgtgaggcttttctt

SEQ ID NO: 111854 - DNA, 1687 bp, Homo sapiens
  Payload ID: 1922
  Gene Symbol: BDKRB1
  Gene Name: bradykinin receptor B1
  Uniprot ID: P46663
  ENST ID: ENST00000216629
  CDS Start-End: 607-1668
attcgaagtggctcccacaaaagctgctgcagagccccagacattcagaagccaatagtgaaggggccaaaagccatccctcaatgttcactgacactttgcgagccttggggcaagttggcgatgtcaaaacatgtttttagggcgtgtttgccaacatacaggtcttgggcaggattgcagacctctgcagatggtaccaaagtaaagggggagatggtagctgaataatctcttatcatccctaaagtgcaaagtgaaatgagagtggatttttccttccaaatccacttggagtgagtcccgaaagactcacttttgcggcaatccccacaatgacatcactggagcggaggttatataatttaaagcaaccacatctccacagcacttcccagaagagaaaactcctccaaaagcagctctcactatcagaaaacccaactacagttgtgaacgccttcattttctgcctgaggtctcagtccgtcggcccagactgaagtgcagtggcacaatcatagctcgctgcagcctcgaccttccaggcttaaacgattctcccacctcagcctctcgagttgctgggaccacaggtcactgtgcatggcatcatcctggccccctctagagctccaatcctccaaccagagccagctcttccctcaaaatgctacggcctgtgacaatgctccagaagcctgggacctgctgcacagagtgctgccaacatttatcatctccatctgtttcttcggcctcctagggaacctttttgtcctgttggtcttcctcctgccccggcggcaactgaacgtggcagaaatctacctggccaacctggcagcctctgatctggtgtttgtcttgggcttgcccttctgggcagagaatatctggaaccagtttaactggcctttcggagccctcctctgccgtgtcatcaacggggtcatcaaggccaatttgttcatcagcatcttcctggtggtggccatcagccaggaccgctaccgcgtgctggtgcaccctatggccagccggaggcagcagcggcggaggcaggcccgggtcacctgcgtgctcatctgggttgtggggggcctcttgagcatccccacattcctgctgcgatccatccaagccgtcccagatctgaacatcaccgcctgcatcctgctcctcccccatgaggcctggcactttgcaaggattgtggagttaaatattctgggtttcctcctaccactggctgcgatcgtcttcttcaactaccacatcctggcctccctgcgaacgcgggaggaggtcagcaggacaaggtgcgggggccgcaaggatagcaagaccacagcgctgatcctcacgctcgtggttgccttcctggtctgctgggccccttaccacttctttgccttcctggaattcttattccaggtgcaagcagtccgaggctgcttttgggaggacttcattgacctgggcctgcaattggccaacttctttgccttcactaacagctccctgaatccagtaatttatgtctttgtgggccggctcttcaggaccaaggtctgggaactttataaacaatgcacccctaaaagtcttgctccaatatcttcatcccataggaaagaaatcttccaacttttctggcggaattaaaacagcattgaaccaagaa

SEQ ID NO: 111855 - DNA, 1526 bp, Homo sapiens
  Payload ID: 1922
  Gene Symbol: BDKRB1
  Gene Name: bradykinin receptor B1
  ENST ID: ENST00000553356
  CDS Start-End: 221-1075
agcacttcccagaagagaaaactcctccaaaagcagctctcactatcagaaaacccaactacagttgtgaacgccttcattttctgcctgaggtctcagtccgtcggcccagactgaagtgcagtggcacaatcatagctcgctgcagcctcgaccttccaggcttaaacgattctcccacctcagcctctcgagttgctgggaccacaggtcactgtgcatggcatcatcctggccccctctagagctccaatcctccaaccagagccagctcttccctcaaaatgctacggcctgtgacaatgctccagaagcctgggacctgctgcacagagtgctgccaacatttatcatctccatctgtttcttcggcctcctagggaacctttttgtcctgttggtcttcctcctgccccggcggcaactgaacgtggcagaaatctacctggccaacctggcagcctctgatctggtgtttgtcttgggcttgcccttctgggcagagaatatctggaaccagtttaactggcctttcggagccctcctctgccgtgtcatcaacggggtcatcaaggccaatttgttcatcagcatcttcctggtggtggccatcagccaggaccgctaccgcgtgctggtgcaccctatggccagccggaggcagcagcggcggaggcaggcccgggtcacctgcgtgctcatctgggttgtggggggcctcttgagcatccccacattcctgctgcgatccatccaagccgtcccagatctgaacatcaccgcctgcatcctgctcctcccccatgaggcctggcactttgcaaggattgtggagttaaatattctgggtttcctcctaccactggctgcgatcgtcttcttcaactaccacatcctggcctccctgcgaacgcgggaggaggtcagcaggacaagctccctgaatccagtaatttatgtctttgtgggccggctcttcaggaccaagccggccttaagcaggtggcttatcaaaatcctttcgaggtcttgcaaaaaccaatcccacactcgagaagaacgtgctggccggtgaaatcggacaacattgctcacgggatgtaattcaatggtagactgcagccacagcctgagaactcagacacctgatttatgagacgcacataagtaacgtttaccgaagcccagcaaatggccccacagtgggagagaaactggcaaacccgtacagtagaattctgttgcccttctgtggggaaggccagttattcatttacagagggagaaatttctgccttgactaaaaggatcgatgctgtgggaaaaggtaatatatctgagttcccatggatctggttgataggttcacctggcgtgttccatatggggccaggcccaggccacacctgtggtgctaacacctggggtggagggaggaattagcaaatagtcttccagcatccccagctccagcacccatgtgggcttccactctctccctgagaagggccaagtagaaagagaga

SEQ ID NO: 111856 - DNA, 1085 bp, Homo sapiens
  Payload ID: 1922
  Gene Symbol: BDKRB1
  Gene Name: bradykinin receptor B1
  Uniprot ID: P46663
  ENST ID: ENST00000611804
  CDS Start-End: 14-1075
caggtcactgtgcatggcatcatcctggccccctctagagctccaatcctccaaccagagccagctcttccctcaaaatgctacggcctgtgacaatgctccagaagcctgggacctgctgcacagagtgctgccaacatttatcatctccatctgtttcttcggcctcctagggaacctttttgtcctgttggtcttcctcctgccccggcggcaactgaacgtggcagaaatctacctggccaacctggcagcctctgatctggtgtttgtcttgggcttgcccttctgggcagagaatatctggaaccagtttaactggcctttcggagccctcctctgccgtgtcatcaacggggtcatcaaggccaatttgttcatcagcatcttcctggtggtggccatcagccaggaccgctaccgcgtgctggtgcaccctatggccagccggaggcagcagcggcggaggcaggcccgggtcacctgcgtgctcatctgggttgtggggggcctcttgagcatccccacattcctgctgcgatccatccaagccgtcccagatctgaacatcaccgcctgcatcctgctcctcccccatgaggcctggcactttgcaaggattgtggagttaaatattctgggtttcctcctaccactggctgcgatcgtcttcttcaactaccacatcctggcctccctgcgaacgcgggaggaggtcagcaggacaaggtgcgggggccgcaaggatagcaagaccacagcgctgatcctcacgctcgtggttgccttcctggtctgctgggccccttaccacttctttgccttcctggaattcttattccaggtgcaagcagtccgaggctgcttttgggaggacttcattgacctgggcctgcaattggccaacttctttgccttcactaacagctccctgaatccagtaatttatgtctttgtgggccggctcttcaggaccaaggtctgggaactttataaacaatgcacccctaaaagtcttgctccaatatcttcatcccataggaaagaaatcttccaacttttctggcggaattaaaacagcattg

SEQ ID NO: 111857 - DNA, 1600 bp, Homo sapiens
  Payload ID: 1923
  Gene Symbol: BDKRB2
  Gene Name: bradykinin receptor B2
  Uniprot ID: P30411
  ENST ID: ENST00000539359
  CDS Start-End: 403-1497
actccagctctggcttctgggctccgaggaggggtggggacggtggggacggtggggacatcaggctgccccgcagtaccagggagcgactgaagtgcccatgccgcttgctccggagaaggtgtggcctcactcacatcccactctgagtccaaatgttctctccctggaagatatcaatgtttctgtctgttcgtgaggactccgtgcccaccacggcctctttcaggtgaggtcattgtggttcaaggacgttaagtaacttccccagcgtcacacggcttataagtaaggcagccaggatgtgaacccagtaggactatctggctgcaaagtccccaccctccctcgccatctgtatcctccaatcatcttcagtgctttgctgatagaagcgccgacatgctcaatgtcaccttgcaagggcccactcttaacgggacctttgcccagagcaaatgcccccaagtggagtggctgggctggctcaacaccatccagccccccttcctctgggtgctgttcgtgctggccaccctagagaacatctttgtcctcagcgtcttctgcctgcacaagagcagctgcacggtggcagagatctacctggggaacctggccgcagcagacctgatcctggcctgcgggctgcccttctgggccatcaccatctccaacaacttcgactggctctttggggagacgctctgccgcgtggtgaatgccattatctccatgaacctgtacagcagcatctgtttcctgatgctggtgagcatcgaccgctacctggccctggtgaaaaccatgtccatgggccggatgcgcggcgtgcgctgggccaagctctacagcttggtgatctgggggtgtacgctgctcctgagctcacccatgctggtgttccggaccatgaaggagtacagcgatgagggccacaacgtcaccgcttgtgtcatcagctacccatccctcatctgggaagtgttcaccaacatgctcctgaatgtcgtgggcttcctgctgcccctgagtgtcatcaccttctgcacgatgcagatcatgcaggtgctgcggaacaacgagatgcagaagttcaaggagatccagacagagaggagggccacggtgctagtcctggttgtgctgctgctattcatcatctgctggctgcccttccagatcagcaccttcctggatacgctgcatcgcctcggcatcctctccagctgccaggacgagcgcatcatcgatgtaatcacacagatcgcctccttcatggcctacagcaacagctgcctcaacccactggtgtacgtgatcgtgggcaagcgcttccgaaagaagtcttgggaggtgtaccagggagtgtgccagaaagggggctgcaggtcagaacccattcagatggagaactccatgggcacactgcggacctccatctccgtggaacgccagattcacaaactgcaggactgggcagggagcagacagtgagcaaacgccagcagggctgctgtgaatttgtgtaaggattgagggacagttgcttttcagcatgggcccaggaatgccaaggagacatctatgcacgaccttg

SEQ ID NO: 111858 - DNA, 6845 bp, Homo sapiens
  Payload ID: 1923
  Gene Symbol: BDKRB2
  Gene Name: bradykinin receptor B2
  Uniprot ID: P30411
  ENST ID: ENST00000542454
  CDS Start-End: 3089-4183
agagcggagagcgaaggtggccgcagccttcccggccccacagccagcctggctccagctgggcaggagtgcagagctcagctggaggcggagggggaagtgcccaggaggctgatgacatcactacccagcccttgaaagatgagctgttcccgccgccactccagctctggcttctgggctccgaggaggggtggggacggtggggacggtggggacatcaggctgccccgcagtaccagggagcgactgaagtgcccatgccgcttgctccggagaagcccaggtgtggcctcactcacatcccactctgagtccaaatgttctctccctggaagatatcaatgtttctgtctgttcgtgaggactccgtgcccaccacggcctctttcaggtgctgcctatgatgaagatgagcagatggccatctcagctggggccacagtgcactggacctatagtttccaattccgcactcagcaggcatctttctgatgatccgatggcttctcagagccagggatgggccaggatccatccccttggctactgtcttgctgagaaattaataagcagcatctggtgctatactttggtctctagtgagttagctcatgaaagatgacagactctccaagccaggggtatgcaggaaatgggttttctgtagctacagaaatggggttgagggttggaccaaggggactacccaggggaagtcttaccttcagaggactctggaaaggaggctgcaagttttcatgggtcaagaattcagagcccagtagagacagcttatctctgttccaagatgtctggggccttggttggaagattcaaaggctaggaaaccaggagccaccaaaagcgtaactggggccagaggatccactttcaaggtggcaagttggttccccccatgtggctgcttgagtatcctcacatggcggctcacatccttccaagtaagcaatgcaaaaggccaagaaagatgctgcaaagcatgttatgacctagcctcagaaatcacacaccatccctgccaccattagtaagaagtccagcccacgtccaggagaagaggaagcagattcctccttttgaaatgaagaatatcaagtaattcggggggcatatgaaagccaccacacaccacagggatctttttagagcatacttcttataccatcactgtagttccttaagactcaggggcaaagcctcacttccttagcacccagtgaagaccacgcttactccctcactcaacctcttgctacttcccacctctcctgtccaacatctagtgtcactttccagaacataccaacagcttccccagttctgtgcctctgctcaggctgttccccctgcctggtccacttgtcctccttcttgtcccgtcaaaatgcttcttatccttcaagacccagctctagagtcacctccaaccccttacccaccagccccctctccaagtctgtgtcccacaacccccctgctccctccagggcaccctccaccctctgggccacagttgtcaggagtcaggcagggcaggggccgggtggtgtcttctttgtgttcttgcactcagggcagagctcagcacagagcagacgctcaaaaaacatttaaaggatagaagcattgatttgtgggtcccccagtctggctccaggatgccagccagctgctcctagaagcaaacggacttttcctgggaaatcccagaggtgatgatcagtatctctcccgtgactcgtagttcagctcttcctccatgagcctgactatcagtggaccttccagaaagagccccttttccttctctcacccacagcacagggcactgggaaaatgcccaatgagtcctgccctctgggttgtgctttggacttttcagtgtgtcttcgcatccactcttcagcttgaatgttgcaacagccatgaaaaaagaaatgcaaagcgattcaggatgagagcaataccctactccaaagaaggcaaaatagaagctcagagaggtcaagcattttgcccaagaccacacagctaggagtggaactcatggctgtccaagccccacgcctctgctgaaggtagagatgaattacagcaacaagtctagaaaggtgcctgccctatggtctgtgagtcttgcctaagaatgaaagaggagccagtgggttaaagatgaggtcaccaacaaacggtggtgttggagtttaccactggttattttaatgggtttgcaagaattgttaattactaatgtttattgagcctagtgcagtgcttggggcattttgcacattgtctctgatccctatcacaaccctgagaggtagtttttttaactcccattttacaggtgaggtcattgtggttcaaggacgttaagtaacttccccagcgtcacacggcttataagtaaggcagccaggatgtgaacccagtaggactatctggctgcaaagtccccaccctccctcgccatctgtatcctccaatcatcttcagtgctttgctgatagaaggtacggaaatacgatgccacagactgtccaggaagacagaaactaggcagatgggctggccatggtctccaagccagactggaatctccaggtctggaatgatatcatttttctcttttaataaattaactcacccaccacacggctttgagaggctcaaaggtgaccaactcccttgggagggccccggttgataaggaaggaatgtgaatcctcccatcacggaagcttcaaggaggtcaagggtccaacacttgagattgttagtgctgttggtggatactggccaaggaaatatcccagtggagcctcgagatgaagaacatgaggcccccgtttagatccaaggatcagagggggctctgtaagacccaggggagtcaggtgcactggagcgcgggctgcagaaaacagcctgagctccacctcggcttctccttgccctggctggttgtccttaacccctgtctccttctggaccagtttttgtccttcccttgtgaccctgaggggtaacagcctcttttccactttctttcagcgccgacatgctcaatgtcaccttgcaagggcccactcttaacgggacctttgcccagagcaaatgcccccaagtggagtggctgggctggctcaacaccatccagccccccttcctctgggtgctgttcgtgctggccaccctagagaacatctttgtcctcagcgtcttctgcctgcacaagagcagctgcacggtggcagagatctacctggggaacctggccgcagcagacctgatcctggcctgcgggctgcccttctgggccatcaccatctccaacaacttcgactggctctttggggagacgctctgccgcgtggtgaatgccattatctccatgaacctgtacagcagcatctgtttcctgatgctggtgagcatcgaccgctacctggccctggtgaaaaccatgtccatgggccggatgcgcggcgtgcgctgggccaagctctacagcttggtgatctgggggtgtacgctgctcctgagctcacccatgctggtgttccggaccatgaaggagtacagcgatgagggccacaacgtcaccgcttgtgtcatcagctacccatccctcatctgggaagtgttcaccaacatgctcctgaatgtcgtgggcttcctgctgcccctgagtgtcatcaccttctgcacgatgcagatcatgcaggtgctgcggaacaacgagatgcagaagttcaaggagatccagacagagaggagggccacggtgctagtcctggttgtgctgctgctattcatcatctgctggctgcccttccagatcagcaccttcctggatacgctgcatcgcctcggcatcctctccagctgccaggacgagcgcatcatcgatgtaatcacacagatcgcctccttcatggcctacagcaacagctgcctcaacccactggtgtacgtgatcgtgggcaagcgcttccgaaagaagtcttgggaggtgtaccagggagtgtgccagaaagggggctgcaggtcagaacccattcagatggagaactccatgggcacactgcggacctccatctccgtggaacgccagattcacaaactgcaggactgggcagggagcagacagtgagcaaacgccagcagggctgctgtgaatttgtgtaaggattgagggacagttgcttttcagcatgggcccaggaatgccaaggagacatctatgcacgaccttgggaaatgagttgatgtctccggtaaaacaccggagactaattcctgccctgcccaattttgcagggagcatggctgtgaggatggggtgaactcacgcacagccaaggactccaaaatcacaacagcattactgttcttatttgctgccacacctgagccagcctgctccttcccaggagtggaggaggcctgggggcagggagaggagtgactgagcttccctcccgtgtgttctccgtccctgccccagcaagacaacttagatctccaggagaactgccatccagctttggtgcaatggctgagtgcacaagtgagttgttgccctgggtttctttaatctattcagctagaactttgaaggacaatttcttgcattaataaaggttaagccctgaggggtccctgataacaacctggagaccaggattttatggctcccctcactgatggacaaggaggtctgtgccaaagaagaatccaataagcacatattgagcacttgctgtatatgcagtattgagcactgtaggcaagagggaagaaagagaaggagccatctccatcttgaaggaactcaaagactcaagtgggaacgactgggcactgccaccaccagaaagctgttcgacgagacggtcgagcagggtgctgtgggtgatatggacagcagaagggggagaccaaggttccagctcaaccaataactattgcacaaccatctgtccctgcctcagttccctcttctgtaacatgaagtcgttgtgagggttaaaggcagtaacaggtataaagtacttagaaaagcaaagggtgctacgtacatgtgaggcatcattacgcagacgtaactgggatatgtttactataaggaaaagacactgaggtctagaaatagctccgtggagcagaatcagtattgggagccggtggcggtgtgaagcaccagtgtctggcacacagtaggtgctcattggctcccttccacctgtcattcccaccaccctgaggccccaaccgccacacacacaggagcatttggagagaaggccatgtcttcaaagtctgatttgtgatgaggcagaggaagatatttctaatcggtcttgcccagaggatcacagtgctgagaccccccaccaccagccggtacctgggaagggggagagtgcaggcctgctcagggactgttcctgtctcagcaaccaagggattgttcctgtcaatcaatggtttattggaaggtggcccagtatgagccctagaagagtgtgaaaaggaatggcaatggtgttcaccatcggcagtgccagggcagcactcattcacttgataaatgaatatttattagctggttggagagctagaacctggagagctagaacctggagaactagaacctggagggctagaactggagaggctagaaccaagaagggctagaacctggaggggctagaacctagagaagctaaaacctgagctagaagctggaggactagaacctggagggctggaatctggagagctagaacctggagggctagaacctggagggctagaatctggagagctagaacctggagggctagaatctggagagctagaacctggagggctagaacctggagagctagaacctagaagggctagaacctggagggctggaatctggagagctagaacctggagggctagaacctggagggctagaacctagaagggctagaacctggagggctggaatctggagagctagaacctggagggctagaacctggagggctagaacctagaagggctagaacctggagggctagaacctggcaggttagaacctagaagggctagaacctggagagccagaacctggagggctagaacctggaagggctagaacctgtagagctagaacatggagagctagaacccggcaggctagaacctggcaagctagaacctggagggaatgaacctggagggctagaacctggagaatgagaaaaatttacatggcaaagagcccataaatcctgaccaatccaactctgaattttaaagcaaaagcgtcaaaaaaaagattccctccttacccccaacccactcttttttcccaccacccactctcctctgcctcagtaagtatctggaggaagaaaacaggtgaaagaagaagtaaaaaccatttagtattagtattagaatgaagtcaaactgtgccacacatggtgaatgaaaaaaaaaaaaagaggctgtgttttgtcacacagggcagtcattcagcaccagagcacgtgatggtctgagactctcttaggagcagagctctgccgcaatggccatgtggggatccacacctggtctgaggggcaactgagtctgcgggagaagagcggccctatgcatggtgtagatgccctgataaagaacatctgtcctgtgaaagactcaatgagctgttatgttgtaaacaggaagcatttcacatccaaacgagaaaatcatgtaaacatgtgtcttttctgtagagcataataaatggatgaggtttttgcata

SEQ ID NO: 111859 - DNA, 4040 bp, Homo sapiens
  Payload ID: 1923
  Gene Symbol: BDKRB2
  Gene Name: bradykinin receptor B2
  Uniprot ID: P30411
  ENST ID: ENST00000554311
  CDS Start-End: 205-1380
gacatcactacccagcccttgaaagatgagctgttcccgccgccactccagctctggcttctgggctccgaggaggggtggggacggtggggacggtggggacatcaggctgccccgcagtaccagggagcgactgaagtgcccatgccgcttgctccggagaagcccaggtgtggcctcactcacatcccactctgagtccaaatgttctctccctggaagatatcaatgtttctgtctgttcgtgaggactccgtgcccaccacggcctctttcagcgccgacatgctcaatgtcaccttgcaagggcccactcttaacgggacctttgcccagagcaaatgcccccaagtggagtggctgggctggctcaacaccatccagccccccttcctctgggtgctgttcgtgctggccaccctagagaacatctttgtcctcagcgtcttctgcctgcacaagagcagctgcacggtggcagagatctacctggggaacctggccgcagcagacctgatcctggcctgcgggctgcccttctgggccatcaccatctccaacaacttcgactggctctttggggagacgctctgccgcgtggtgaatgccattatctccatgaacctgtacagcagcatctgtttcctgatgctggtgagcatcgaccgctacctggccctggtgaaaaccatgtccatgggccggatgcgcggcgtgcgctgggccaagctctacagcttggtgatctgggggtgtacgctgctcctgagctcacccatgctggtgttccggaccatgaaggagtacagcgatgagggccacaacgtcaccgcttgtgtcatcagctacccatccctcatctgggaagtgttcaccaacatgctcctgaatgtcgtgggcttcctgctgcccctgagtgtcatcaccttctgcacgatgcagatcatgcaggtgctgcggaacaacgagatgcagaagttcaaggagatccagacagagaggagggccacggtgctagtcctggttgtgctgctgctattcatcatctgctggctgcccttccagatcagcaccttcctggatacgctgcatcgcctcggcatcctctccagctgccaggacgagcgcatcatcgatgtaatcacacagatcgcctccttcatggcctacagcaacagctgcctcaacccactggtgtacgtgatcgtgggcaagcgcttccgaaagaagtcttgggaggtgtaccagggagtgtgccagaaagggggctgcaggtcagaacccattcagatggagaactccatgggcacactgcggacctccatctccgtggaacgccagattcacaaactgcaggactgggcagggagcagacagtgagcaaacgccagcagggctgctgtgaatttgtgtaaggattgagggacagttgcttttcagcatgggcccaggaatgccaaggagacatctatgcacgaccttgggaaatgagttgatgtctccggtaaaacaccggagactaattcctgccctgcccaattttgcagggagcatggctgtgaggatggggtgaactcacgcacagccaaggactccaaaatcacaacagcattactgttcttatttgctgccacacctgagccagcctgctccttcccaggagtggaggaggcctgggggcagggagaggagtgactgagcttccctcccgtgtgttctccgtccctgccccagcaagacaacttagatctccaggagaactgccatccagctttggtgcaatggctgagtgcacaagtgagttgttgccctgggtttctttaatctattcagctagaactttgaaggacaatttcttgcattaataaaggttaagccctgaggggtccctgataacaacctggagaccaggattttatggctcccctcactgatggacaaggaggtctgtgccaaagaagaatccaataagcacatattgagcacttgctgtatatgcagtattgagcactgtaggcaagagggaagaaagagaaggagccatctccatcttgaaggaactcaaagactcaagtgggaacgactgggcactgccaccaccagaaagctgttcgacgagacggtcgagcagggtgctgtgggtgatatggacagcagaagggggagaccaaggttccagctcaaccaataactattgcacaaccatctgtccctgcctcagttccctcttctgtaacatgaagtcgttgtgagggttaaaggcagtaacaggtataaagtacttagaaaagcaaagggtgctacgtacatgtgaggcatcattacgcagacgtaactgggatatgtttactataaggaaaagacactgaggtctagaaatagctccgtggagcagaatcagtattgggagccggtggcggtgtgaagcaccagtgtctggcacacagtaggtgctcattggctcccttccacctgtcattcccaccaccctgaggccccaaccgccacacacacaggagcatttggagagaaggccatgtcttcaaagtctgatttgtgatgaggcagaggaagatatttctaatcggtcttgcccagaggatcacagtgctgagaccccccaccaccagccggtacctgggaagggggagagtgcaggcctgctcagggactgttcctgtctcagcaaccaagggattgttcctgtcaatcaatggtttattggaaggtggcccagtatgagccctagaagagtgtgaaaaggaatggcaatggtgttcaccatcggcagtgccagggcagcactcattcacttgataaatgaatatttattagctggttggagagctagaacctggagagctagaacctggagaactagaacctggagggctagaactggagaggctagaaccaagaagggctagaacctggaggggctagaacctagagaagctaaaacctgagctagaagctggaggactagaacctggagggctggaatctggagagctagaacctggagggctagaacctggagggctagaatctggagagctagaacctggagggctagaatctggagagctagaacctggagggctagaacctggagagctagaacctagaagggctagaacctggagggctggaatctggagagctagaacctggagggctagaacctggagggctagaacctagaagggctagaacctggagggctggaatctggagagctagaacctggagggctagaacctggagggctagaacctagaagggctagaacctggagggctagaacctggcaggttagaacctagaagggctagaacctggagagccagaacctggagggctagaacctggaagggctagaacctgtagagctagaacatggagagctagaacccggcaggctagaacctggcaagctagaacctggagggaatgaacctggagggctagaacctggagaatgagaaaaatttacatggcaaagagcccataaatcctgaccaatccaactctgaattttaaagcaaaagcgtcaaaaaaaagattccctccttacccccaacccactcttttttcccaccacccactctcctctgcctcagtaagtatctggaggaagaaaacaggtgaaagaagaagtaaaaaccatttagtattagtattagaatgaagtcaaactgtgccacacatggtgaatgaaaaaaaaaaaaagaggctgtgttttgtcacacagggcagtcattcagcaccagagcacgtgatggtctgagactctcttaggagcagagctctgccgcaatggccatgtggggatccacacctggtctgaggggcaactgagtctgcgggagaagagcggccctatgcatggtgtagatgccctgataaagaacatctgtcctgtgaaagactcaatgagctgttatgttgtaaacaggaagcatttcacatccaaacgagaaaatcatgtaaacatgtgtcttttctgtagagcataataaatggatgaggtttttgca

SEQ ID NO: 111860 - DNA, 2480 bp, Homo sapiens
  Payload ID: 1924
  Gene Symbol: BRAF
  Gene Name: B-Raf proto-oncogene, serine/threonine kinase
  Uniprot ID: P15056
  ENST ID: ENST00000288602
  CDS Start-End: 62-2362
cgcctcccttccccctccccgcccgacagcggccgctcgggccccggctctcggttataagatggcggcgctgagcggtggcggtggtggcggcgcggagccgggccaggctctgttcaacggggacatggagcccgaggccggcgccggcgccggcgccgcggcctcttcggctgcggaccctgccattccggaggaggtgtggaatatcaaacaaatgattaagttgacacaggaacatatagaggccctattggacaaatttggtggggagcataatccaccatcaatatatctggaggcctatgaagaatacaccagcaagctagatgcactccaacaaagagaacaacagttattggaatctctggggaacggaactgatttttctgtttctagctctgcatcaatggataccgttacatcttcttcctcttctagcctttcagtgctaccttcatctctttcagtttttcaaaatcccacagatgtggcacggagcaaccccaagtcaccacaaaaacctatcgttagagtcttcctgcccaacaaacagaggacagtggtacctgcaaggtgtggagttacagtccgagacagtctaaagaaagcactgatgatgagaggtctaatcccagagtgctgtgctgtttacagaattcaggatggagagaagaaaccaattggttgggacactgatatttcctggcttactggagaagaattgcatgtggaagtgttggagaatgttccacttacaacacacaactttgtacgaaaaacgtttttcaccttagcattttgtgacttttgtcgaaagctgcttttccagggtttccgctgtcaaacatgtggttataaatttcaccagcgttgtagtacagaagttccactgatgtgtgttaattatgaccaacttgatttgctgtttgtctccaagttctttgaacaccacccaataccacaggaagaggcgtccttagcagagactgccctaacatctggatcatccccttccgcacccgcctcggactctattgggccccaaattctcaccagtccgtctccttcaaaatccattccaattccacagcccttccgaccagcagatgaagatcatcgaaatcaatttgggcaacgagaccgatcctcatcagctcccaatgtgcatataaacacaatagaacctgtcaatattgatgacttgattagagaccaaggatttcgtggtgatggaggatcaaccacaggtttgtctgctaccccccctgcctcattacctggctcactaactaacgtgaaagccttacagaaatctccaggacctcagcgagaaaggaagtcatcttcatcctcagaagacaggaatcgaatgaaaacacttggtagacgggactcgagtgatgattgggagattcctgatgggcagattacagtgggacaaagaattggatctggatcatttggaacagtctacaagggaaagtggcatggtgatgtggcagtgaaaatgttgaatgtgacagcacctacacctcagcagttacaagccttcaaaaatgaagtaggagtactcaggaaaacacgacatgtgaatatcctactcttcatgggctattccacaaagccacaactggctattgttacccagtggtgtgagggctccagcttgtatcaccatctccatatcattgagaccaaatttgagatgatcaaacttatagatattgcacgacagactgcacagggcatggattacttacacgccaagtcaatcatccacagagacctcaagagtaataatatatttcttcatgaagacctcacagtaaaaataggtgattttggtctagctacagtgaaatctcgatggagtgggtcccatcagtttgaacagttgtctggatccattttgtggatggcaccagaagtcatcagaatgcaagataaaaatccatacagctttcagtcagatgtatatgcatttggaattgttctgtatgaattgatgactggacagttaccttattcaaacatcaacaacagggaccagataatttttatggtgggacgaggatacctgtctccagatctcagtaaggtacggagtaactgtccaaaagccatgaagagattaatggcagagtgcctcaaaaagaaaagagatgagagaccactctttccccaaattctcgcctctattgagctgctggcccgctcattgccaaaaattcaccgcagtgcatcagaaccctccttgaatcgggctggtttccaaacagaggattttagtctatatgcttgtgcttctccaaaaacacccatccaggcagggggatatggtgcgtttcctgtccactgaaacaaatgagtgagagagttcaggagagtagcaacaaaaggaaaataaatgaacatatgtttgcttatatgttaaattgaataaaatactctctttttttttaaggtgaaccaaagaa

SEQ ID NO: 111861 - DNA, 743 bp, Homo sapiens
  Payload ID: 1924
  Gene Symbol: BRAF
  Gene Name: B-Raf proto-oncogene, serine/threonine kinase
  ENST ID: ENST00000479537
  CDS Start-End: 1-309
atccacagagacctcaagagtaataatatatttcttcatgaagacctcacagtaaaaataggtgattttggtctagctacagtgaaatctcgatggagtgggtcccatcagtttgaacagttgtctggatccattttgtggatggcaccagaagtcatcagaatgcaagataaaaatccatacagctttcagtcagatgtatatgcatttggaattgttctgtatgaattgatgactggacagttaccttattcaaacatcaacaacagggaccaggtgctttgtcctccatgggagtataataaatgatgtggcaagggcttactctccatgagaggaatgtgtgaccaacagaaggataatttttatggtgggacgaggatacctgtctccagatctcagtaaggtacggagtaactgtccaaaagccatgaagagattaatggcagagtgcctcaaaaagaaaagagatgagagaccactctttccccaaattctcgcctctattgagctgctggcccgctcattgccaaaaattcaccgcagtgcatcagaaccctccttgaatcgggctggtttccaaacagaggattttagtctatatgcttgtgcttctccaaaaacacccatccaggcagggggatatggtgcgtttcctgtccactgaaacaaatgagtgagagagttcaggagagtagcaacaaaaggaaaataaatgaacatatgtttgcttatatgttaaa

SEQ ID NO: 111862 - DNA, 8294 bp, Homo sapiens
  Payload ID: 1924
  Gene Symbol: BRAF
  Gene Name: B-Raf proto-oncogene, serine/threonine kinase
  ENST ID: ENST00000496384
  CDS Start-End: 1-1127
gatcaaccacaggtttgtctgctaccccccctgcctcattacctggctcactaactaacgtgaaagccttacagaaatctccaggacctcagcgagaaaggaagtcatcttcatcctcagaagacaggaatcgaatgaaaacacttggtagacgggactcgagtgatgattgggagattcctgatgggcagattacagtgggacaaagaattggatctggatcatttggaacagtctacaagggaaagtggcatggtgatgtggcagtgaaaatgttgaatgtgacagcacctacacctcagcagttacaagccttcaaaaatgaagtaggagtactcaggaaaacacgacatgtgaatatcctactcttcatgggctattccacaaagccacaactggctattgttacccagtggtgtgagggctccagcttgtatcaccatctccatatcattgagaccaaatttgagatgatcaaacttatagatattgcacgacagactgcacagggcatggattacttacacgccaagtcaatcatccacagagacctcaagagtaataatatatttcttcatgaagacctcacagtaaaaataggtgattttggtctagctacagtgaaatctcgatggagtgggtcccatcagtttgaacagttgtctggatccattttgtggatggcaccagaagtcatcagaatgcaagataaaaatccatacagctttcagtcagatgtatatgcatttggaattgttctgtatgaattgatgactggacagttaccttattcaaacatcaacaacagggaccagataatttttatggtgggacgaggatacctgtctccagatctcagtaaggtacggagtaactgtccaaaagccatgaagagattaatggcagagtgcctcaaaaagaaaagagatgagagaccactctttccccaaattctcgcctctattgagctgctggcccgctcattgccaaaaattcaccgcagtgcatcagaaccctccttgaatcgggctggtttccaaacagaggattttagtctatatgcttgtgcttctccaaaaacacccatccaggcagggggatatggagaatttgcagccttcaagtagccaccatcatggcagcatctgctcttatttcttaagtcttgtgttcgtacaatttgttaacatcaaaacacagttctgttcctcaaatctttttttaaagatacaaaatttccaatgcataagctgatgtggaacagaatggaatttcccatccaacaaaagaggaaagaatgttttaggaaccagaattctctgctgccagtgtttcttcaacaaaaataccacgagcatacaagtctgcccagtcccaggaagaaagaggagagaccctgaattctgaccttttgatggtcaggcatgatggaaagaaactgctgctacagcttgggagatttgctatggaaagtctgccagtcaactttgcccttctaaccaccagatcaatttgtggctgatcatctgatggggcagtttcaatcaccaagcatcgttctctttcctgttctggaattttgttttggagctctttcccctagtgaccaccagttagtttctgagggatggaacaaaaatgcagcttgccctttctatgtggtgcgtgttcaggccttgacagattttatcaaaaggaaactattttatttaaatggaggctgagtggtgagtagatgtgtcttggtatggaggaaaagggcatgctgcatcttcttcctgacctccggggtctctggccttttgtttccttgctcactgaggggtctgtctaaccaagcaggctagatagtgctggcacacattgccttctttctcattgggtccagcaatgaagataagtgtttgggttttttttttttcctccacaatgtagcaaattctcaggaaatacagtttatatcttcctcctatgctcttccagtcaccaactacttatgcggctactttgtccagggcacaaaatgccgtggcagtatctaactaaacccccacaaaactgcttaataacagttttgaatgtgagaaatttagataatttaaatataaggtacaggttttaatttctgagtttcttcttttctatttttattaaaaagaaaataattttcagatttaattgaattggaaaaaaacaatacttcccaccagaattatatatcctgaaaattgtatttttgttatataaacaacttttaagaaagatcattatccttttctctacctaaatatgaggagtcttagcataatgacaaatatttataatttttcaattaatggtacttgctggatccacactaacatctttgctaataatctcattgtttcttccaactgattcctaacactatatcccacatcttctttctagtcttttatctagaatatgcaacctaaaataaaaatggtggcgtctccattcattctccttcttccttttttcccaagcctggtcttcaaaaggttgggcaatttggcagctgaattcccagacagagaatagagcaattttagggatattaggactgagggagggtgtgggaaagctgtcatcagttgtttttatagaaagaactggcattcattaagaacctaaatcttatctttgcacaaatggaaaatataacctagttatagcttcctttggcctttattaaagggtaatatcaatcacagtcatagcaaagaaagcggatgtattaatggcaaattaatggaaaacctcccttatcaggaatctagactcagaatttaggaacacaaatcaaatcagaccaaccaagctatagccaaggacttgaaagaaattaaacaagacccagaataaatcaaggaattagaaattgttatttaaaaatttcagattgtaactccaggccctgctgtctatattgcagccactaaaagctcactaccattagatttttgctaacatacatgtattcagaagaaagcctattgaaattttcattgtcttgtaaaaggttgtcctagtaaaatggaaaagatccttaagttattaatcagtttgaaaagcaaatttgtttttaagttttacatcagcagggcagtgtcttacaaaattcagaaattgcaaaggtggaaataattcacgctgatttgaagaacatcttctgtgcaataatactgcctctcttgaaaagcattggctgttttttctttttaaatatatctctagatgcttttaaatgtggctgtgttccctttaccaagattggcttcaagtttccgcaggtagagagacctgggcttgaacaagaggatgtgtttcatgtcctgctgaggaggtagaacatgtgcagcctgggtccgggactgcctccgtggggcaggggcaggggcggtaccattagggaggaagcttagcatttcagtttcttaaacaatattcagggtgatacactttttcttcccttgcattttagaataggctggtatctcatttgaacgggggagcagacttgatctcaaatgaagctgtgcccaggagccaggcttagcatattgagatttttatagataccttaaaaaataaaatatttaaacctctcttttcttcctttttctatgaaataggttttttctctagtttacaaatgacatgaaaataggttttatttgtgttttatctgctttattttttgatgcttagacaacagttagacttactgagctcctaaaaaaacgaggaagaagtccttatttgtgaaaagcactttatgagtaattgtatagacagtatgtggctgcgtcactgatcatcttgtaagggtgtaacagtcttgtctgtaaagtggctgcagtgccttctgtagtgtgttttatttttggtagggagaggtgaagccttctgaaaaatttgagagcaactacagaggattgtttgtaactgtgtagtattcctgatggacttttttcatcgttagagtcaaggacctagacttttgccactgaaataatattgaccaaaaaaatagtttataaaagggatttgtgaatagaaaattcagtgtgatcatttgttgttaatgtgcaccttaaaagaagattctgtctagctgtcaaattctggttcccgaatatctcacccctgattgtatttgagatctagtagggcatactggggcattttagaagataaaatcccatacaaatgatatatgctatatttatgttggtgttggagaagaaagagcagtatataaagaaataattcaagactgcagcactgtcaacctgaaactttgtaaatatttcctagcttctggtttggtgcggtgacagcactttcatcacaggatgttaccttgtattcaccaggcggagtgcgagctgctgcacatcctcctcagatctcacctgtccccactgtacatccacccgccagctgcttgcaaacctcatctctagctttagttcgaaaccacattgcagggttcaggtgacctctacaaaaaactacctcttcagaatgaggtaatgaatagttatttattttaaaatatgaaaagtcaggagctctagaacatgacgatgatttaagattttaacttttttgtgtacttgtatttgagcactctcattttgtcctaaagggcattatacatttaagcagtaatactgtaaaaaaatgtgttgctcggaatatctgaatgttgttgaaagtggtgccagaaccggtttaggggtacgtttcagaatcttaaccttgagtcaattgcatgaaattaaatagctgtggtatcacttcactaacagtgatgtaattttaattttcagtaggcttggcatgacagtacatcctcataatgagtttgctgcagctttgtcacatgcacaggcattcatagaaagaccacccagctaagagggtagaatgattactctttttgcaagattctcttctttgtccaagttggcattgttagtgctaggaataccagcaccttgagacgagcagattccaaccattaggctataaacaccatagccagagatggaaggtttactgtgagtatgaacagcaaatagcttacaggtcatgagttgaaatggtgtaggtgaggctctagaaaaataccttgacaatttgccaaatgatcttactgtgccttcatgatgcaataaaaaagctaacattttagcagaaatcagtgatttgtgaagagagcagccactctggtttaactcagctgtgttaataatttttagagtgcaatttagactgcataggtaaatgcactaaagagtttatagccaaaatcacatttaacaatgagaaaacacacaggtaaattttcagtgaacaaaattatttttttaaagcacataatccctagtatagtcagatatatttatcacatagagcaactaggttgcaaatatagttcagtgacatttctagagaaactttttctactcccataggctcttcaaagcatggaacttttatacaacagaaatgttgacagaaattgctgtagtttagggttgaagtactgtatgatgggcagcaatcatgtattaacttagaaggggaaattgaaatataggaccgaatttggttttatcagtttccagagtactgctgccaacctagacactgatttttcagagtttgaaatgtaaatttcttcccgggacttgattgcacatgaagctggactgcgttagtcatcctgtcccaaagcgctgtgggggccagggtggaggtctcaaggcatcctttatgacctggccattggatgtaaaagaaaacatattccatgctgtggttcttgtatcttgtttcattcctcaccattgaaagagaaagtccatgtattgtctccagcacatccttgaaatgttatactgggatggattactgatgcccatcggtagttgagccccagaagagggtagtagcatctctgcctcaggtgatgatttgtagcttggccagaggagagcggagtcaccagtatatctgtggtccatgttgctagctctggtaaaattaaaaatactggtaagatgtttgttttattagtacactagacagtaagctctgttttgttgttttcaaataacctattttcacttttgtttgggcaaagacatttaaattgaaattcaattctaatttttgttaattgtggaaagggtaattaacagttcctatcaggtatttttaatgtggaaaaggacagaaacccaactcctaaaatcttaaattaaggtaacagtgctttaaaaaaaaaaaatgcatggggcaattagtcggcaactcaatgagtgactaaagtacttttatttaacatccacaacttcaactgttaagttttattaattactaaatcagctttattaaaatgttgacatttatttagctattttgaataattatagtgacttgacgagtgtgtatgaggacacagccaatgtaagccagtgtatccattttttagaggtgcatttttttttaaagaattctgtagatagaagtgctctgaaaacaactaaaatatgtttattcatggtagtatcaaaaaatgtttgtacaaaccatctgcttctcccggccagccgagttcattctccagcaccgtgaccgctggttctcatgtacagcacatatgcgggagagttggcagaaaatttgtgaagagatgccgcaaaggaagggtctgttgacgggtgggattgggggttttgatgaagttgcttagtcctggttttgttttgaaaattactgcgttgcatttttgtgttaagtttttgaacccacgtgtgttttggtggagtatgagttggaagtcactgcaaactagcataaacaacaaagctcacagagtaggcacagatgtagagaacagagaccaaaatggggtgaggtggcagtaaatctaggatagggaaaaattaatgtgagggtgggaaataaactgtaattacctgaaatcaaatgtaagagtgcaataagtatgctttttattctaagctgtgaacggtttttttaagaatcattccttcctaatacatttgtgtatgttccatagctgattaaaaccagctatatcaacatataatgcctttttattcatgttaatgaccaacgtaagtggctagcctttatgtcttatttatcttcatgttatgttagtttacatacaggggtgtatgtctctgtgctgtccccttctcctgccttcattttaaaatgcatccatgggtcctccgtgtttcctttggccatgccacatatatagactcagtttggccttcatgatatcgcctgatttttgaggactgtatcacagtgatatgtatttgtggtaatctcatttgttggttgtacatctgatcctttcctcaacatggcaattgctgcctttcctaagataggatcatacaactgatcaggggattgaatttgatcattcatcaacatgtgtctctgaattttattcagtagttgtcattgctctttggtttagaccaagaaaaaggaaatccccccttttcatgtattccttggtttgaggacatgactcctgtaagggagaggaaagggagatgcttcctgtttgaactgcagtgaattcacggttcctgtttcaccactccaaaccttatggcgactcacacacacattcctcttttctgttactgccaaaggttcgggtttagtacacttcagttccactcaagcattgaaaaggttctcgtggagtctggggcgtgcccagtgaaaagatggggactttttaattgtccacagacctctctatacctgctttgcaaaaattacaatggagtaactatttttaaagcttatttttcaattcataaaaaagacatttattttcagtcaaatggatgatgtctccctcttttcccctattctcaatgtttgcttgaatcttttattattttttttaattctcccccatacccacttcctgatactttggttctctttcctgctcaggtcccttcatttgtactttggagtttttctcatgtaaatttgtataacagaaaatattgttcagtttggatagaaagcatggagaataaaaaaagatagctgaaattcagattgaagaaatttatttctgtgtaaagttatttaaaaactgtattatataaaaggcaaaaaaagttctatgtacttgatgtgaatatgcgaatactgctataataaagattgactgcatggagaagtcttca

SEQ ID NO: 111863 - DNA, 2336 bp, Homo sapiens
  Payload ID: 1924
  Gene Symbol: BRAF
  Gene Name: B-Raf proto-oncogene, serine/threonine kinase
  ENST ID: ENST00000497784
  CDS Start-End: 1-585
caggctctgttcaacggggacatggagcccgaggccggcgccggcgccggcgccgcggcctcttcggctgcggaccctgccattccggaggaggtgtggaatatcaaacaaatgattaagttgacacaggaacatatagaggccctattggacaaatttggtggggagcataatccaccatcaatatatctggaggcctatgaagaatacaccagcaagctagatgcactccaacaaagagaacaacagttattggaatctctggggaacggaactgatttttctgtttctagctctgcatcaatggataccgttacatcttcttcctcttctagcctttcagtgctaccttcatctctttcagtttttcaaaatcccacagatgtggcacggagcaaccccaagtcaccacaaaaacctatcgttagagtcttcctgcccaacaaacagaggacagtggtacctgcaaggtgtggagttacagtccgagacagtctaaagaaagcactgatgatgagaggtctaatcccagagtgctgtgctgtttacagaattcaggatgggtcttttctggagctgacttgaagaaaagagtacatctctttaccctgctgtttgtccaagagtgatacatttatttgggagagaagaaaccaattggttgggacactgatatttcctggcttactggagaagaattgcatgtggaagtgttggagaatgttccacttacaacacacaactttgtacgaaaaacgtttttcaccttagcattttgtgacttttgtcgaaagctgcttttccagggtttccgctgtcaaacatgtggttataaatttcaccagcgttgtagtacagaagttccactgatgtgtgttaattatgaccaacttgatttgctgtttgtctccaagttctttgaacaccacccaataccacaggaagaggcgtccttagcagagactgccctaacatctggatcatccccttccgcacccgcctcggactctattgggccccaaattctcaccagtccgtctccttcaaaatccattccaattccacagcccttccgaccagcagatgaagatcatcgaaatcaatttgggcaacgagaccgatcctcatcagctcccaatgtgcatataaacacaatagaacctgtcaatattgatgacttgattagagaccaaggatttcgtggtgatggaggatcaaccacaggtttgtctgctaccccccctgcctcattacctggctcactaactaacgtgaaagccttacagaaatctccaggacctcagcgagaaaggaagtcatcttcatcctcagaagacaggaatcgaatgaaaacacttggtagacgggactcgagtgatgattgggagattcctgatgggcagattacagtgggacaaagaattggatctggatcatttggaacagtctacaagggaaagtggcatggtgatgtggcagtgaaaatgttgaatgtgacagcacctacacctcagcagttacaagccttcaaaaatgaagtaggagtactcaggaaaacacgacatgtgaatatcctactcttcatgggctattccacaaagccacaactggctattgttacccagtggtgtgagggctccagcttgtatcaccatctccatatcattgagaccaaatttgagatgatcaaacttatagatattgcacgacagactgcacagggcatggattacttacacgccaagtcaatcatccacagagacctcaagagtaataatatatttcttcatgaagacctcacagtaaaaataggtgattttggtctagctacagtgaaatctcgatggagtgggtcccatcagtttgaacagttgtctggatccattttgtggatggcaccagaagtcatcagaatgcaagataaaaatccatacagctttcagtcagatgtatatgcatttggaattgttctgtatgaattgatgactggacagttaccttattcaaacatcaacaacagggaccagataatttttatggtgggacgaggatacctgtctccagatctcagtaaggtacggagtaactgtccaaaagccatgaagagattaatggcagagtgcctcaaaaagaaaagagatgagagaccactctttccccaaattctcgcctctattgagctgctggcccgctcattgccaaaaattcaccgcagtgcatcagaaccctccttgaatcgggctggtttccaaacagaggattttagtctatatgcttgtgcttctccaaaaacacccatccaggcagggggatatggtgcgtttcctgtccactga

SEQ ID NO: 111864 - DNA, 1878 bp, Homo sapiens
  Payload ID: 1925
  Gene Symbol: BASP1
  Gene Name: brain abundant, membrane attached signal protein 1
  Uniprot ID: P80723
  ENST ID: ENST00000322611
  CDS Start-End: 261-944
gggcactgggcaggaaggggagggggagcgagcgcgagaaatgcagaggctgcagcggcggcggcggcggcagtagcggcagcggcgacgacggcggcggcagcgctccaactggctcctcgctccgggctccgccgtcgagccgggagagagcctccgccagcggccaggcaccagccagacgacgccagcgaccccggcctctcggcggcaccgcgctaactcaggggctgcataggcacccagagccgaactccaagatgggaggcaagctcagcaagaagaagaagggctacaatgtgaacgacgagaaagccaaggagaaagacaagaaggccgagggcgcggcgacggaagaggaggggaccccgaaggagagtgagccccaggcggccgcagagcccgccgaggccaaggagggcaaggagaagcccgaccaggacgccgagggcaaggccgaggagaaggagggcgagaaggacgcggcggctgccaaggaggaggccccgaaggcggagcccgagaagacggagggcgcggcagaggccaaggctgagcccccgaaggcgcccgagcaggagcaggcggcccccggccccgctgcgggcggcgaggcccccaaagctgctgaggccgccgcggccccggccgagagcgcggcccctgccgccggggaggagcccagcaaggaggaaggggaacccaaaaagactgaggcgcccgcagctcctgccgcccaggagaccaaaagtgacggggccccagcttcagactcaaaacccggcagctcggaggctgccccctcttccaaggagacccccgcagccacggaagcgcctagttccacacccaaggcccagggccccgcagcctctgcagaagagcccaagccggtggaggccccggcagctaattccgaccaaaccgtaaccgtgaaagagtgacaaggacagcctataggaaaaacaataccacttaaaacaatctcctctctctctctctctctctctctctatctctctctctatctcctctctctctctcctctcctatctctcctctctctctctcctatactaacttgtttcaaattggaagtaatgatatgtattgcccaaggaaaaatacaggatgttgtcccatcaagggagggagggggtgggagaatccaaatagtatttttgtggggaaatatctaatataccttcagtcaactttaccaagaagtcctggatttccaagatccgcgtctgaaagtgcagtacatcgtttgtacctgaaactgccgccacatgcactcctccaccgctgagagttgaatagcttttcttctgcaatgggagttgggagtgatgcgtttgattctgcccacagggcctgtgccaaggcaatcagatctttatgagagcagtattttctgtgttttctttttaatttacagcctttcttattttgatatttttttaatgttgtggatgaatgccagctttcagacagagcccacttagcttgtccacatggatctcaatgccaatcctccattcttcctctccagatatttttgggagtgacaaacattctctcatcctacttagcctacctagatttctcatgacgagttaatgcatgtccgtggttgggtgcacctgtagttctgtttattggtcagtggaaatgaaaaaaaaaaaaaaaaaaagtctgcgttcattgcagttccagtttctcttccattctgtgtcacagacaccaacacaccactcattggaaaatggaaaaaaaaaacaaaaaaaaaacaaaaaaatgtacaatggatgcattgaaattatatgtaattgtataaatggtgcaacagtaataaagttaaacaattaaaaagaa

SEQ ID NO: 111865 - DNA, 401 bp, Homo sapiens
  Payload ID: 1925
  Gene Symbol: BASP1
  Gene Name: brain abundant, membrane attached signal protein 1
  ENST ID: ENST00000606445
  CDS Start-End: 265-401
tgtttggcatcccactgaccccacatctgtttcgctgctaatgctctgctgccagaactatccaagctgcctccctctgggcccagggactattgctgaagagatgacatctctgtatgttacccaggctggactggaactctgggctcaagccatcctcctgcctcacctcctgaagtgttgggattacaggaaagggtcccaatccagaccccaagggaggattcttggatctcatgcaagaaagaattcaggaactccaagatgggaggcaagctcagcaagaagaagaagggctacaatgtgaacgacgagaaagccaaggagaaagacaagaaggccgagggcgcggcgacggaagaggaggggaccccgaaggagagtgagccccaggcggccgc

SEQ ID NO: 111866 - DNA, 1711 bp, Homo sapiens
  Payload ID: 1925
  Gene Symbol: BASP1
  Gene Name: brain abundant, membrane attached signal protein 1
  Uniprot ID: P80723
  ENST ID: ENST00000616743
  CDS Start-End: 85-768
gcgcaactcgtttgcagcggcgcagcccagacgcgcctgcagctggggctcaccccaacctcgctgccagccgagaactccaagatgggaggcaagctcagcaagaagaagaagggctacaatgtgaacgacgagaaagccaaggagaaagacaagaaggccgagggcgcggcgacggaagaggaggggaccccgaaggagagtgagccccaggcggccgcagagcccgccgaggccaaggagggcaaggagaagcccgaccaggacgccgagggcaaggccgaggagaaggagggcgagaaggacgcggcggctgccaaggaggaggccccgaaggcggagcccgagaagacggagggcgcggcagaggccaaggctgagcccccgaaggcgcccgagcaggagcaggcggcccccggccccgctgcgggcggcgaggcccccaaagctgctgaggccgccgcggccccggccgagagcgcggcccctgccgccggggaggagcccagcaaggaggaaggggaacccaaaaagactgaggcgcccgcagctcctgccgcccaggagaccaaaagtgacggggccccagcttcagactcaaaacccggcagctcggaggctgccccctcttccaaggagacccccgcagccacggaagcgcctagttccacacccaaggcccagggccccgcagcctctgcagaagagcccaagccggtggaggccccggcagctaattccgaccaaaccgtaaccgtgaaagagtgacaaggacagcctataggaaaaacaataccacttaaaacaatctcctctctctctctctctctctctctctatctctctctctatctcctctctctctctcctctcctatctctcctctctctctctcctatactaacttgtttcaaattggaagtaatgatatgtattgcccaaggaaaaatacaggatgttgtcccatcaagggagggagggggtgggagaatccaaatagtatttttgtggggaaatatctaatataccttcagtcaactttaccaagaagtcctggatttccaagatccgcgtctgaaagtgcagtacatcgtttgtacctgaaactgccgccacatgcactcctccaccgctgagagttgaatagcttttcttctgcaatgggagttgggagtgatgcgtttgattctgcccacagggcctgtgccaaggcaatcagatctttatgagagcagtattttctgtgttttctttttaatttacagcctttcttattttgatatttttttaatgttgtggatgaatgccagctttcagacagagcccacttagcttgtccacatggatctcaatgccaatcctccattcttcctctccagatatttttgggagtgacaaacattctctcatcctacttagcctacctagatttctcatgacgagttaatgcatgtccgtggttgggtgcacctgtagttctgtttattggtcagtggaaatgaaaaaaaaaaaaaaaaaaagtctgcgttcattgcagttccagtttctcttccattctgtgtcacagacaccaacacaccactcattggaaaatggaaaaaaaaaacaaaaaaaaaacaaaaaaatgtacaatggatgcattgaaattatatgtaattgtataaatggtgcaacagtaataaagttaaacaattaaaaagaagtaataaag

SEQ ID NO: 111867 - DNA, 801 bp, Homo sapiens
  Payload ID: 1926
  Gene Symbol: BAALC
  Gene Name: brain and acute leukemia, cytoplasmic
  Uniprot ID: Q8WXS3
  ENST ID: ENST00000297574
  CDS Start-End: 140-682
gcggctgcagcgcgggcgggagcggggacgcgatgtcgccgccgccgcctccttgcgggccggggctgcgcctccggggctgagccgccgccagagccgacagccgagcagccgctgggcgctcccgcggcgcaggaggatgggctgcggcgggagccgggcggatgccatcgagccccgctactacgagagctggacccgggagacagaatccacctggctcacctacaccgactcggacgcgccgcccagcgccgccgccccggacagcggccccgaagcgggcggcctgcactcggttctggaggctgagaagtccaagatcaaggcaccaacagattcagtgtctgatgaaggcttgttctctgcttcaaagatggcacctcttgctgtgttctcacatggcatgctggaagatggactgccctccaatggtgtgccccgatctacagccccaggtggaatacccaacccagagaagaagacgaactgtgagacccagtgcccaaatccccagagcctcagctcaggccctctgacccagaaacagaatggccttcagaccacagaggctaaaagagatgctaagagaatgcctgcaaaagaagtcaccattaatgtaacagatagcatccaacagatggacagaagtcgaagaatcacaaagaactgtgtcaactagcagagagtccaagcagaagggcagatggacttcttcagtgtccttcacggcactggatcccatcaaagaaccttgaagaagtggctgccccttgctggacctgaattctactgagtccc

SEQ ID NO: 111868 - DNA, 243 bp, Homo sapiens
  Payload ID: 1926
  Gene Symbol: BAALC
  Gene Name: brain and acute leukemia, cytoplasmic
  Uniprot ID: Q8WXS3
  ENST ID: ENST00000306391
  CDS Start-End: 1-243
atgggctgcggcgggagccgggcggatgccatcgagccccgctactacgagagctggacccgggagacagaatccacctggctcacctacaccgactcggacgcgccgcccagcgccgccgccccggacagcggccccgaagcgggcggcctgcactcggcccattaccctcttgcctttgcacttgcctggagagacaacagtttaggggctctgctggttcaagaaggactgtgcaggtag

SEQ ID NO: 111869 - DNA, 2831 bp, Homo sapiens
  Payload ID: 1926
  Gene Symbol: BAALC
  Gene Name: brain and acute leukemia, cytoplasmic
  Uniprot ID: Q8WXS3
  ENST ID: ENST00000309982
  CDS Start-End: 189-626
gctgggagagggcccggactaggggcggcgggcaccgcaggagctccgcgcggctgcagcgcgggcgggagcggggacgcgatgtcgccgccgccgcctccttgcgggccggggctgcgcctccggggctgagccgccgccagagccgacagccgagcagccgctgggcgctcccgcggcgcaggaggatgggctgcggcgggagccgggcggatgccatcgagccccgctactacgagagctggacccgggagacagaatccacctggctcacctacaccgactcggacgcgccgcccagcgccgccgccccggacagcggccccgaagcgggcggcctgcactcgggcatgctggaagatggactgccctccaatggtgtgccccgatctacagccccaggtggaatacccaacccagagaagaagacgaactgtgagacccagtgcccaaatccccagagcctcagctcaggccctctgacccagaaacagaatggccttcagaccacagaggctaaaagagatgctaagagaatgcctgcaaaagaagtcaccattaatgtaacagatagcatccaacagatggacagaagtcgaagaatcacaaagaactgtgtcaactagcagagagtccaagcagaagggcagatggacttcttcagtgtccttcacggcactggatcccatcaaagaaccttgaagaagtggctgccccttgctggacctgaattctactgagtccctggcaagactgtcttacctggcagcaaactgctgcctgatttgttgggaccttctgagccttctacttatcatgtaaatgtattggcacagtgcttacatatgttaataaactgcaaatgtgcagttcagtttgtctctttgcaactcctgtaatacggtctggtgtaaaagtagtgagttaaagctacaggtcagtttatgaaacagaaaagtaggaatgcattttctgggtgaaagagtcacaccttagtgctataactctcctgcccatgatagtgtattctgtttcaggcaagcttattctttccttctttcattttaaatattgtcattacaaatcttaccaggttcacttaaaagctggctttcatccaactctaaacccacatattgaaaaaatcaaggtacaggaaaactccttgttatccttgtttccttagcttggtatgagacagatcggatccagtttcccatgcaccaacccactgcccatggcatgtctttgggaggtgtctgtgaagcagtcatacctgctcctcatctgcctggaaagtcctcctattccagtgtccatgttggcctccagtccttaatgtcaccatgcttgtggccaatgcatccaaataaggatacccctcagggctcagctagacattgcaattttgcatagctttccagttccctttgcttgtcttcttgactgtcttccctctctatcggggtcacttgcaattgttaatcaaagattgaacactgcgtaggagagggagatgatccagagacatgtggcagcaggcatggcttccccttggcctctctgtacactgccccaggactgtcattttggcatctgcaaaggaatcactttagaaagccagcacctggttgatgtgtattcatactgacattagattgatgtgcactgcattagaaatgaggtagctgacacagaaaaaggatgttttgataggaataattttctagtatgtcttgaaacatgttcatctggaagtattttcctccaaagtaatgtagcatgatttttcaaggattgttaacatgcctgggattgggaaagataggactaaagttgtgccaaactatatcaataaattccatgtttagcagaaataggcagcctattggtgttatgtttatgtaacatagtccagagaactgacatgcaggtcaaaagtcagatacgcaacctccttatctgctaactctgttattcttcaaacacaagtgggtagtgtcatttttccttccttccttccattggcagattgtatatttattcacaaaacattaaatgtccatcctgtgccaggtactatgcagatgttgagggatttggggtctggttagtcgtgactatctatcctgaatctaacagtgacttcataactaggagactgaattagacccttaaggtatagtgtgtgttgcaaatcactctgcaatggaaacttttatattcagggtaggtttgtgtcttaaactaggtgttctaatcaatgtacaagactttaccatacacgcaactatagtttttctaaaccttcatcattttgtgattctttgagaaagggcttttaggaactttatgttctaaaaaatgtttttaacaataataagataaaagaaaaacctgtgattcatatgtccccactggcattactcagcaggagcccccagctgccaaaggttggcagtgatcctgcaagttcaagggctctttctccctggggatgtgctttgtggcttctctttacagctttgtttctgcatcagttcactgctgcatgttgtttggaatttatcaccttaagaaagtgtctctgttttatatagaaacactttctcacttacaggggagaaggaaatgcagggcacatgatctggccctccccagaacaatctggatttcacggagacagcaaccagaagttaaaccatgtgactaaaaatgcatctggctactttttcatgtatgtatgagacagaaactaatccttactatcctattaggataccacttttcattgcaaagtttgtgtcaataaagtcattaattttaaacat

SEQ ID NO: 111870 - DNA, 222 bp, Homo sapiens
  Payload ID: 1926
  Gene Symbol: BAALC
  Gene Name: brain and acute leukemia, cytoplasmic
  Uniprot ID: Q8WXS3
  ENST ID: ENST00000330955
  CDS Start-End: 1-222
atgggctgcggcgggagccgggcggatgccatcgagccccgctactacgagagctggacccgggagacagaatccacctggctcacctacaccgactcggacgcgccgcccagcgccgccgccccggacagcggccccgaagcgggcggcctgcactcggggtgccttgaggaacattaccatctgactgccctacagaaagttgggcatcccaaccattga

SEQ ID NO: 111871 - DNA, 2662 bp, Homo sapiens
  Payload ID: 1926
  Gene Symbol: BAALC
  Gene Name: brain and acute leukemia, cytoplasmic
  Uniprot ID: Q8WXS3
  ENST ID: ENST00000438105
  CDS Start-End: 186-350
gggagagggcccggactaggggcggcgggcaccgcaggagctccgcgcggctgcagcgcgggcgggagcggggacgcgatgtcgccgccgccgcctccttgcgggccggggctgcgcctccggggctgagccgccgccagagccgacagccgagcagccgctgggcgctcccgcggcgcaggaggatgggctgcggcgggagccgggcggatgccatcgagccccgctactacgagagctggacccgggagacagaatccacctggctcacctacaccgactcggacgcgccgcccagcgccgccgccccggacagcggccccgaagcgggcggcctgcactcgggctaaaagagatgctaagagaatgcctgcaaaagaagtcaccattaatgtaacagatagcatccaacagatggacagaagtcgaagaatcacaaagaactgtgtcaactagcagagagtccaagcagaagggcagatggacttcttcagtgtccttcacggcactggatcccatcaaagaaccttgaagaagtggctgccccttgctggacctgaattctactgagtccctggcaagactgtcttacctggcagcaaactgctgcctgatttgttgggaccttctgagccttctacttatcatgtaaatgtattggcacagtgcttacatatgttaataaactgcaaatgtgcagttcagtttgtctctttgcaactcctgtaatacggtctggtgtaaaagtagtgagttaaagctacaggtcagtttatgaaacagaaaagtaggaatgcattttctgggtgaaagagtcacaccttagtgctataactctcctgcccatgatagtgtattctgtttcaggcaagcttattctttccttctttcattttaaatattgtcattacaaatcttaccaggttcacttaaaagctggctttcatccaactctaaacccacatattgaaaaaatcaaggtacaggaaaactccttgttatccttgtttccttagcttggtatgagacagatcggatccagtttcccatgcaccaacccactgcccatggcatgtctttgggaggtgtctgtgaagcagtcatacctgctcctcatctgcctggaaagtcctcctattccagtgtccatgttggcctccagtccttaatgtcaccatgcttgtggccaatgcatccaaataaggatacccctcagggctcagctagacattgcaattttgcatagctttccagttccctttgcttgtcttcttgactgtcttccctctctatcggggtcacttgcaattgttaatcaaagattgaacactgcgtaggagagggagatgatccagagacatgtggcagcaggcatggcttccccttggcctctctgtacactgccccaggactgtcattttggcatctgcaaaggaatcactttagaaagccagcacctggttgatgtgtattcatactgacattagattgatgtgcactgcattagaaatgaggtagctgacacagaaaaaggatgttttgataggaataattttctagtatgtcttgaaacatgttcatctggaagtattttcctccaaagtaatgtagcatgatttttcaaggattgttaacatgcctgggattgggaaagataggactaaagttgtgccaaactatatcaataaattccatgtttagcagaaataggcagcctattggtgttatgtttatgtaacatagtccagagaactgacatgcaggtcaaaagtcagatacgcaacctccttatctgctaactctgttattcttcaaacacaagtgggtagtgtcatttttccttccttccttccattggcagattgtatatttattcacaaaacattaaatgtccatcctgtgccaggtactatgcagatgttgagggatttggggtctggttagtcgtgactatctatcctgaatctaacagtgacttcataactaggagactgaattagacccttaaggtatagtgtgtgttgcaaatcactctgcaatggaaacttttatattcagggtaggtttgtgtcttaaactaggtgttctaatcaatgtacaagactttaccatacacgcaactatagtttttctaaaccttcatcattttgtgattctttgagaaagggcttttaggaactttatgttctaaaaaatgtttttaacaataataagataaaagaaaaacctgtgattcatatgtccccactggcattactcagcaggagcccccagctgccaaaggttggcagtgatcctgcaagttcaagggctctttctccctggggatgtgctttgtggcttctctttacagctttgtttctgcatcagttcactgctgcatgttgtttggaatttatcaccttaagaaagtgtctctgttttatatagaaacactttctcacttacaggggagaaggaaatgcagggcacatgatctggccctccccagaacaatctggatttcacggagacagcaaccagaagttaaaccatgtgactaaaaatgcatctggctactttttcatgtatgtatgagacagaaactaatccttactatcctattaggataccacttttcattgcaaagtttgtgtcaataaagtcattaattttaaacata

SEQ ID NO: 111872 - DNA, 1681 bp, Homo sapiens
  Payload ID: 1927
  Gene Symbol: BRE
  Gene Name: brain and reproductive organ-expressed (TNFRSF1A modulator)
  Uniprot ID: Q9NXR7
  ENST ID: ENST00000342045
  CDS Start-End: 142-1293
gggtacctgtaccccacgtagtcgccggttaccgatcggactaagttccagaagcaagagataaagtaataatgggtactgtggggaaaaacacagaagaacaattcggtaatatagtggtgatttacaagtcaagttaaaatgtccccagaagtggccttgaaccgaatatctccaatgctctcccctttcatatctagcgtggtccggaatggaaaagtgggactggatgctacaaactgtttgaggataactgacttaaaatctggctgcacatcattgactcctgggcccaactgtgaccgatttaaactgcacataccatatgctggagagacattaaagtgggatatcattttcaatgcccaatacccagaactgcctcccgattttatctttggagaagatgctgaattcctgccagacccctcagctttgcagaatcttgcctcctggaatccttcaaatcctgaatgtctcttacttgtggtgaaggaacttgtgcaacaatatcaccaattccaatgtagccgcctccgggagagctcccgcctcatgtttgaataccagacattactggaggagccacagtatggagagaacatggaaatttatgctgggaaaaaaaacaactggactggtgaattttcagctcgtttccttttgaagctgcccgtagatttcagcaatatccccacataccttctcaaggatgtaaatgaagaccctggagaagatgtggccctcctctctgttagttttgaggacactgaagccacccaggtgtaccccaagctgtacttgtcacctcgaattgagcatgcacttggaggctcctcagctcttcatatcccagcttttccaggaggaggatgtctcattgattacgttcctcaagtatgccacctgctcaccaacaaggtgcagtacgtgattcaagggtatcacaaaagaagagagtatattgctgcttttctcagtcactttggcacaggtgtcgtggaatatgatgcagaaggctttacaaaactcactctgctgctgatgtggaaagatttttgttttcttgtacacattgacctgcctctgtttttccctcgagaccagccaactctcacatttcagtccgtttatcactttaccaacagtggacagctttactcccaggcccaaaaaaattatccgtacagccccagatgggatggaaatgaaatggccaaaagagcaaaggcttatttcaaaacctttgtccctcagttccaggaggcagcatttgccaatggaaagctctaggaaacaccagtcttgagaggtggccagccagactgcctgtccacatgcgtgtcagcacatacagccgcttcctggaagccgcctggaatgtcttcacggcagcgttttgctcacacagcagcttttgcacgccccaggcagccccgactgctgaaatccaacttgagctggctggtggtccctggatcctagagcccttcacttcgggttactccctctttcttgcctctatttcttagttggaagaaataaactcacaaattatggtgcagtaattttccggggaaagtaaagcctcaggaatgcccacgcctttcttccaaagcctttgtctctgagacctcttaagttctaagattaaatgcccctcgctgttcttcctctgaaa

SEQ ID NO: 111873 - DNA, 1852 bp, Homo sapiens
  Payload ID: 1927
  Gene Symbol: BRE
  Gene Name: brain and reproductive organ-expressed (TNFRSF1A modulator)
  Uniprot ID: Q9NXR7
  ENST ID: ENST00000344773
  CDS Start-End: 139-1386
gagtgcgcacgcatcctgcccgcggcgcgcgcgcaggtcggtgcgtctgtcgggggcgcgctcgggtacctgtaccccacgtagtcgccggttaccgatcggactaagttccagtggtgatttacaagtcaagttaaaatgtccccagaagtggccttgaaccgaatatctccaatgctctcccctttcatatctagcgtggtccggaatggaaaagtgggactggatgctacaaactgtttgaggataactgacttaaaatctggctgcacatcattgactcctgggcccaactgtgaccgatttaaactgcacataccatatgctggagagacattaaagtgggatatcattttcaatgcccaatacccagaactgcctcccgattttatctttggagaagatgctgaattcctgccagacccctcagctttgcagaatcttgcctcctggaatccttcaaatcctgaatgtctcttacttgtggtgaaggaacttgtgcaacaatatcaccaattccaatgtagccgcctccgggagagctcccgcctcatgtttgaataccagacattactggaggagccacagtatggagagaacatggaaatttatgctgggaaaaaaaacaactggactggtgaattttcagctcgtttccttttgaagctgcccgtagatttcagcaatatccccacataccttctcaaggatgtaaatgaagaccctggagaagatgtggccctcctctctgttagttttgaggacactgaagccacccaggtgtaccccaagctgtacttgtcacctcgaattgagcatgcacttggaggctcctcagctcttcatatcccagcttttccaggaggaggatgtctcattgattacgttcctcaagtatgccacctgctcaccaacaaggtgcagtacgtgattcaagggtatcacaaaagaagagagtatattgctgcttttctcagtcactttggcacaggtgtcgtggaatatgatgcagaaggctttacaaaactcactctgctgctgatgtggaaagatttttgttttcttgtacacattgacctgcctctgtttttccctcgagaccagccaactctcacatttcagtccgtttatcactttaccaacagtggacagctttactcccaggcccaaaaaaattatccgtacagccccagatgggatggaaatgaaatggccaaaagagcaaagggatgccaagggagcagagatgcctgcagcccgtgggagcaagtcctggcctttgcagttgcaaaaactggctgcaagctgctccagccccagaggaactggccaagctccagagggcctccttggagggcctcagagggagagagaactgctcagtaattttgatcactttgggcttatttcaaaacctttgtccctcagttccaggaggcagcatttgccaatggaaagctctaggaaacaccagtcttgagaggtggccagccagactgcctgtccacatgcgtgtcagcacatacagccgcttcctggaagccgcctggaatgtcttcacggcagcgttttgctcacacagcagcttttgcacgccccaggcagccccgactgctgaaatccaacttgagctggctggtggtccctggatcctagagcccttcacttcgggttactccctctttcttgcctctatttcttagttggaagaaataaactcacaaattatggtgcagtaattttccggggaaagtaaagcctcaggaatgcccacgcctttcttccaaagcctttgtctctgagacctcttaagttctaagattaaatgcccctcgctgttcttcctctgaaa

SEQ ID NO: 111874 - DNA, 1686 bp, Homo sapiens
  Payload ID: 1927
  Gene Symbol: BRE
  Gene Name: brain and reproductive organ-expressed (TNFRSF1A modulator)
  Uniprot ID: Q9NXR7
  ENST ID: ENST00000361704
  CDS Start-End: 75-1205
ggtacctgtaccccacgtagtcgccggttaccgatcggactaagttccagtggtgatttacaagtcaagttaaaatgtccccagaagtggccttgaaccgaatatctccaatgctctcccctttcatatctagcgtggtccggaatggaaaagtgggactggatgctacaaactgtttgaggataactgacttaaaatctggctgcacatcattgactcctgggcccaactgtgaccgatttaaactgcacataccatatgctggagagacattaaagtgggatatcattttcaatgcccaatacccagaactgcctcccgattttatctttggagaagatgctgaattcctgccagacccctcagctttgcagaatcttgcctcctggaatccttcaaatcctgaatgtctcttacttgtggtgaaggaacttgtgcaacaatatcaccaattccaatgtagccgcctccgggagagctcccgcctcatgtttgaataccagacattactggaggagccacagtatggagagaacatggaaatttatgctgggaaaaaaaacaactggactggtgaattttcagctcgtttccttttgaagctgcccgtagatttcagcaatatccccacataccttctcaaggatgtaaatgaagaccctggagaagatgtggccctcctctctgttagttttgaggacactgaagccacccaggtgtaccccaagctgtacttgtcacctcgaattgagcatgcacttggaggctcctcagctcttcatatcccagcttttccaggaggaggatgtctcattgattacgttcctcaagtatgccacctgctcaccaacaaggtgcagtacgtgattcaagggtatcacaaaagaagagagtatattgctgcttttctcagtcactttggcacaggtgtcgtggaatatgatgcagaaggctttacaaaactcactctgctgctgatgtggaaagatttttgttttcttgtacacattgacctgcctctgtttttccctcgagaccagccaactctcacatttcagtccgtttatcactttaccaacagtggacagctttactcccaggcccaaaaaaattatccgtacagccccagatgggatggaaatgaaatggccaaaagagcaaaaagagagagcaacagagatggggaggaatccagctctgcctgacatccaggcatcctctccaaattgcatagggcttatttcaaaacctttgtccctcagttccaggaggcagcatttgccaatggaaagctctaggaaacaccagtcttgagaggtggccagccagactgcctgtccacatgcgtgtcagcacatacagccgcttcctggaagccgcctggaatgtcttcacggcagcgttttgctcacacagcagcttttgcacgccccaggcagccccgactgctgaaatccaacttgagctggctggtggtccctggatcctagagcccttcacttcgggttactccctctttcttgcctctatttcttagttggaagaaataaactcacaaattatggtgcagtaattttccggggaaagtaaagcctcaggaatgcccacgcctttcttccaaagcctttgtctctgagacctcttaagttctaagattaaatgcccctcgctgttcttcctctgaaa

SEQ ID NO: 111875 - DNA, 1657 bp, Homo sapiens
  Payload ID: 1927
  Gene Symbol: BRE
  Gene Name: brain and reproductive organ-expressed (TNFRSF1A modulator)
  Uniprot ID: Q9NXR7
  ENST ID: ENST00000379624
  CDS Start-End: 118-1269
gcggcgcgcgcgcaggtcggtgcgtctgtcgggggcgcgctcgggtacctgtaccccacgtagtcgccggttaccgatcggactaagttccagtggtgatttacaagtcaagttaaaatgtccccagaagtggccttgaaccgaatatctccaatgctctcccctttcatatctagcgtggtccggaatggaaaagtgggactggatgctacaaactgtttgaggataactgacttaaaatctggctgcacatcattgactcctgggcccaactgtgaccgatttaaactgcacataccatatgctggagagacattaaagtgggatatcattttcaatgcccaatacccagaactgcctcccgattttatctttggagaagatgctgaattcctgccagacccctcagctttgcagaatcttgcctcctggaatccttcaaatcctgaatgtctcttacttgtggtgaaggaacttgtgcaacaatatcaccaattccaatgtagccgcctccgggagagctcccgcctcatgtttgaataccagacattactggaggagccacagtatggagagaacatggaaatttatgctgggaaaaaaaacaactggactggtgaattttcagctcgtttccttttgaagctgcccgtagatttcagcaatatccccacataccttctcaaggatgtaaatgaagaccctggagaagatgtggccctcctctctgttagttttgaggacactgaagccacccaggtgtaccccaagctgtacttgtcacctcgaattgagcatgcacttggaggctcctcagctcttcatatcccagcttttccaggaggaggatgtctcattgattacgttcctcaagtatgccacctgctcaccaacaaggtgcagtacgtgattcaagggtatcacaaaagaagagagtatattgctgcttttctcagtcactttggcacaggtgtcgtggaatatgatgcagaaggctttacaaaactcactctgctgctgatgtggaaagatttttgttttcttgtacacattgacctgcctctgtttttccctcgagaccagccaactctcacatttcagtccgtttatcactttaccaacagtggacagctttactcccaggcccaaaaaaattatccgtacagccccagatgggatggaaatgaaatggccaaaagagcaaaggcttatttcaaaacctttgtccctcagttccaggaggcagcatttgccaatggaaagctctaggaaacaccagtcttgagaggtggccagccagactgcctgtccacatgcgtgtcagcacatacagccgcttcctggaagccgcctggaatgtcttcacggcagcgttttgctcacacagcagcttttgcacgccccaggcagccccgactgctgaaatccaacttgagctggctggtggtccctggatcctagagcccttcacttcgggttactccctctttcttgcctctatttcttagttggaagaaataaactcacaaattatggtgcagtaattttccggggaaagtaaagcctcaggaatgcccacgcctttcttccaaagcctttgtctctgagacctcttaagttctaagattaaatgcccctcgctgttcttcctctgaaa

SEQ ID NO: 111876 - DNA, 865 bp, Homo sapiens
  Payload ID: 1927
  Gene Symbol: BRE
  Gene Name: brain and reproductive organ-expressed (TNFRSF1A modulator)
  ENST ID: ENST00000379629
  CDS Start-End: 13-865
agtcaagttaaaatgtccccagaagtggccttgaaccgaatatctccaatgctctcccctttcatatctagcgtggtccggaatggaaaagtgggactggatgctacaaactgtttgaggataactgacttaaaatctggctgcacatcattgactcctgggcccaactgtgaccgatttaaactgcacataccatatgctggagagacattaaagtgggatatcattttcaatgcccaatacccagaactgcctcccgattttatctttggagaagatgctgaattcctgccagacccctcagctttgcagaatcttgcctcctggaatccttcaaatcctgaatgtctcttacttgtggtgaaggaacttgtgcaacaatatcaccaattccaatgtagccgcctccgggagagctcccgcctcatgtttgaataccagacattactggaggagccacagtatggagagaacatggaaatttatgctgggaaaaaaaacaactggactggtgaattttcagctcgtttccttttgaagctgcccgtagatttcagcaatatccccacataccttctcaaggatgtaaatgaagaccctggagaagatgtggccctcctctctgttagttttgaggacactgaagccacccaggtgtaccccaagctgtacttgtcacctcgaattgagcagttaagcctgagcccttgccacacggatttccttctcacccgcttcctccccgcaccactctggggatcagaagtatcagtgccaagtggtccctttcatctcctcataattcttccccagccacttagtgggttagtcaggccctgccttctcttcagccagccctgcagtc

SEQ ID NO: 111877 - DNA, 1752 bp, Homo sapiens
  Payload ID: 1927
  Gene Symbol: BRE
  Gene Name: brain and reproductive organ-expressed (TNFRSF1A modulator)
  Uniprot ID: Q9NXR7
  ENST ID: ENST00000379632
  CDS Start-End: 141-1271
ggtacctgtaccccacgtagtcgccggttaccgatcggactaagttccagaagcaagagataaagtaataatgggtactgtggggaaaaacacagaagaacaattcggtaatatagtggtgatttacaagtcaagttaaaatgtccccagaagtggccttgaaccgaatatctccaatgctctcccctttcatatctagcgtggtccggaatggaaaagtgggactggatgctacaaactgtttgaggataactgacttaaaatctggctgcacatcattgactcctgggcccaactgtgaccgatttaaactgcacataccatatgctggagagacattaaagtgggatatcattttcaatgcccaatacccagaactgcctcccgattttatctttggagaagatgctgaattcctgccagacccctcagctttgcagaatcttgcctcctggaatccttcaaatcctgaatgtctcttacttgtggtgaaggaacttgtgcaacaatatcaccaattccaatgtagccgcctccgggagagctcccgcctcatgtttgaataccagacattactggaggagccacagtatggagagaacatggaaatttatgctgggaaaaaaaacaactggactggtgaattttcagctcgtttccttttgaagctgcccgtagatttcagcaatatccccacataccttctcaaggatgtaaatgaagaccctggagaagatgtggccctcctctctgttagttttgaggacactgaagccacccaggtgtaccccaagctgtacttgtcacctcgaattgagcatgcacttggaggctcctcagctcttcatatcccagcttttccaggaggaggatgtctcattgattacgttcctcaagtatgccacctgctcaccaacaaggtgcagtacgtgattcaagggtatcacaaaagaagagagtatattgctgcttttctcagtcactttggcacaggtgtcgtggaatatgatgcagaaggctttacaaaactcactctgctgctgatgtggaaagatttttgttttcttgtacacattgacctgcctctgtttttccctcgagaccagccaactctcacatttcagtccgtttatcactttaccaacagtggacagctttactcccaggcccaaaaaaattatccgtacagccccagatgggatggaaatgaaatggccaaaagagcaaaaagagagagcaacagagatggggaggaatccagctctgcctgacatccaggcatcctctccaaattgcatagggcttatttcaaaacctttgtccctcagttccaggaggcagcatttgccaatggaaagctctaggaaacaccagtcttgagaggtggccagccagactgcctgtccacatgcgtgtcagcacatacagccgcttcctggaagccgcctggaatgtcttcacggcagcgttttgctcacacagcagcttttgcacgccccaggcagccccgactgctgaaatccaacttgagctggctggtggtccctggatcctagagcccttcacttcgggttactccctctttcttgcctctatttcttagttggaagaaataaactcacaaattatggtgcagtaattttccggggaaagtaaagcctcaggaatgcccacgcctttcttccaaagcctttgtctctgagacctcttaagttctaagattaaatgcccctcgctgttcttcctctgaaa

SEQ ID NO: 111878 - DNA, 874 bp, Homo sapiens
  Payload ID: 1927
  Gene Symbol: BRE
  Gene Name: brain and reproductive organ-expressed (TNFRSF1A modulator)
  ENST ID: ENST00000436924
  CDS Start-End: 415-874
ctcagcagccgggccaagaaaggtctttgggggcgcaagtctttggagggcaggtctttggggagcgctttgagtaatattagagctttcactaaaccctggcctattacgtcccctcccctgagatttacctttatatactcaagttctttcatgccaggaaggtaggctgaaggcttcgaaaacctgcagctcatacccaaagctagcactgtctatccctggagacccagcgcccaaaagctccactgggcgcatagcgcacggcacgcctcctcccccgagccgcagactgagtaactggccccggactaacctgaccagaagcaagagataaagtaataatgggtactgtggggaaaaacacagaagaacaattcggtaatatagtggtgatttacaagtcaagttaaaatgtccccagaagtggccttgaaccgaatatctccaatgctctcccctttcatatctagcgtggtccggaatggaaaagtgggactggatgctacaaactgtttgaggataactgacttaaaatctggctgcacatcattgactcctgggcccaactgtgaccgatttaaactgcacataccatatgctggagagacattaaagtgggatatcattttcaatgcccaatacccagaactgcctcccgattttatctttggagaagatgctgaattcctgccagacccctcagctttgcagaatcttgcctcctggaatccttcaaatcctgaatgtctcttacttgtggtgaaggaacttgtgcaacaatatcaccaattccaatgtagccgcctccgggagagctcccgcctcatgtttgaataccagacattactggaggagccacagtatggagaga

SEQ ID NO: 111879 - DNA, 500 bp, Homo sapiens
  Payload ID: 1927
  Gene Symbol: BRE
  Gene Name: brain and reproductive organ-expressed (TNFRSF1A modulator)
  ENST ID: ENST00000604932
  CDS Start-End: 1-500
gtccggaatggaaaagtgggactggatgctacaaactgtttgaggataactgacttaaaatctggctgcacatcattgactcctgggcccaactgtgaccgatttaaactgcacataccatatgctggagagacattaaagtgggatatcattttcaatgcccaatacccagaactgcctcccgattttatctttggagaagatgctgaattcctgccagacccctcagctttgcagaatcttgcctcctggaatccttcaaatcctgaatgtctcttacttgtggtgaaggaacttgtgcaacaatatcaccaattccaatgtagccgcctccgggagagctcccgcctcatgtttgaataccagacattactggaggagccacagtatggagagaacatggaaatttatgctgggaaaaaaaacaactgggtaaggatttttgagaatggaaaaaaagatgacttcatccataataaaataatcaattcatatgtcca

SEQ ID NO: 111880 - DNA, 668 bp, Homo sapiens
  Payload ID: 1928
  Gene Symbol: BEX2
  Gene Name: brain expressed X-linked 2
  Uniprot ID: Q9BXY8
  ENST ID: ENST00000372674
  CDS Start-End: 194-580
cgtgatcggccaacactgagtcttacctcgttgtggcgtcagaaccgccgtcgctcgctcccttctcggcagtggtacctgttcccggtgtccctgaggacgtgcgggccaggtttgcggggccaagtgttgcggcgacgcacctcacgtcgagaatcgggaggaggagactgcaaggataggcccaggagtaatggagtccaaagaggaacgagcgttaaacaatctcatcgtggaaaatgtcaaccaggaaaatgatgaaaaagatgaaaaggagcaagttgctaataaaggggagcccttggccctacctttgaatgttagtgaatactgtgtgcctagaggaaaccgtaggcggttccgcgttaggcagcccatcctgcagtatagatgggacataatgcataggcttggagagccacaggcaaggatgagagaggagaatatggaaaggattggggaggaggtgagacagctgatggaaaagctgagggaaaagcagttgagtcatagtttgcgggcagtcagcactgatccccctcaccatgaccatcacgatgagttttgccttatgccctgaatcctgatggtttccctgaagttaatagggagacccctgcttcctaaacttacacatttgtggtgtacctttgtcgtaaacgttttga

SEQ ID NO: 111881 - DNA, 899 bp, Homo sapiens
  Payload ID: 1928
  Gene Symbol: BEX2
  Gene Name: brain expressed X-linked 2
  Uniprot ID: Q9BXY8
  ENST ID: ENST00000372677
  CDS Start-End: 269-655
gggacgggggcggagcctctggcgatgacaacagccacacgtgatcggccaacactgagtcttacctcgttgtggcgtcagaaccgccgtcgctcgctcccttctcggcagtggtacctgttcccggtgtccctgaggacgtgcgggccaggtacggccccgaaagtaggaagcggagggggagcaggtttgcggggccaagtgttgcggcgacgcacctcacgtcgagaatcgggaggaggagactgcaaggataggcccaggagtaatggagtccaaagaggaacgagcgttaaacaatctcatcgtggaaaatgtcaaccaggaaaatgatgaaaaagatgaaaaggagcaagttgctaataaaggggagcccttggccctacctttgaatgttagtgaatactgtgtgcctagaggaaaccgtaggcggttccgcgttaggcagcccatcctgcagtatagatgggacataatgcataggcttggagagccacaggcaaggatgagagaggagaatatggaaaggattggggaggaggtgagacagctgatggaaaagctgagggaaaagcagttgagtcatagtttgcgggcagtcagcactgatccccctcaccatgaccatcacgatgagttttgccttatgccctgaatcctgatggtttccctgaagttaatagggagacccctgcttcctaaacttacacatttgtggtgtacctttgtcgtaaacgttttgatgttacctatttcttgtgggtctcctattaccagcttctaaatgaatgttgtttttgacccagtttgtaagtttctgtcagcaggagagttttacctattgcatggaaagatgctcattatatattgtgaagttaataaaacagttttaaaaagca

SEQ ID NO: 111882 - DNA, 736 bp, Homo sapiens
  Payload ID: 1928
  Gene Symbol: BEX2
  Gene Name: brain expressed X-linked 2
  ENST ID: ENST00000449185
  CDS Start-End: 432-736
tggtacctgttcccggtgtccctgaggacgtgcgggccaggtacggccccgaaagtaggaagcggagggggagcaggtaagggacccggagggggtccctggggttggtgtgggggagcagccccggcctgcggatgccccatccccgggcagcagcgcggagacgcagccggtccacgatgcagccccggggccccgccgcgggaccgcgagccttgtgtgagcggaggggtgcccggccccgcgggagccggcgatcctgaggctacgacctttcggaagcacctgcctccgtcaccagcgcaagcttttccaacacccctgctccgcccttcttgatgcagaaaatggtttgcggggccaagtgttgcggcgacgcacctcacgtcgagaatcgggaggaggagactgcaaggataggcccaggagtaatggagtccaaagaggaacgagcgttaaacaatctcatcgtggaaaatgtcaaccaggaaaatgatgaaaaagatgaaaaggagcaagttgctaataaaggggagcccttggccctacctttgaatgttagtgaatactgtgtgcctagaggaaaccgtaggcggttccgcgttaggcagcccatcctgcagtatagatgggacataatgcataggcttggagagccacaggcaaggatgagagaggagaatatggaaaggattggggaggaggtgagacagctgatggaaaagctgagggaaaa

SEQ ID NO: 111883 - DNA, 1077 bp, Homo sapiens
  Payload ID: 1928
  Gene Symbol: BEX2
  Gene Name: brain expressed X-linked 2
  Uniprot ID: Q9BXY8
  ENST ID: ENST00000536889
  CDS Start-End: 359-841
gctcgctcccttctcggcagtggtacctgttcccggtgtccctgaggacgtgcgggccaggtacggccccgaaagtaggaagcggagggggagcaggtaagggacccggagggggtccctggggttggtgtgggggagcagccccggcctgcggatgccccatccccgggcagcagcgcggagacgcagccggtccacgatgcagccccggggccccgccgcgggaccgcgagccttgtgtgagcggaggggtgcccggccccgcgggagccggcgatcctgaggctacgacctttcggaagcacctgcctccgtcaccagcgcaagcttttccaacacccctgctccgcccttcttgatgcagaaaatggtggtttgcggggccaagtgttgcggcgacgcacctcacgtcgagaatcgggaggaggagactgcaaggataggcccaggagtaatggagtccaaagaggaacgagcgttaaacaatctcatcgtggaaaatgtcaaccaggaaaatgatgaaaaagatgaaaaggagcaagttgctaataaaggggagcccttggccctacctttgaatgttagtgaatactgtgtgcctagaggaaaccgtaggcggttccgcgttaggcagcccatcctgcagtatagatgggacataatgcataggcttggagagccacaggcaaggatgagagaggagaatatggaaaggattggggaggaggtgagacagctgatggaaaagctgagggaaaagcagttgagtcatagtttgcgggcagtcagcactgatccccctcaccatgaccatcacgatgagttttgccttatgccctgaatcctgatggtttccctgaagttaatagggagacccctgcttcctaaacttacacatttgtggtgtacctttgtcgtaaacgttttgatgttacctatttcttgtgggtctcctattaccagcttctaaatgaatgttgtttttgacccagtttgtaagtttctgtcagcaggagagttttacctattgcatggaaagatgctcattatatattgtgaagttaataaaacagtttt

SEQ ID NO: 111884 - DNA, 2160 bp, Homo sapiens
  Payload ID: 1929
  Gene Symbol: BEAN1
  Gene Name: brain expressed, associated with NEDD4, 1
  Uniprot ID: Q3B7T3
  ENST ID: ENST00000299694
  CDS Start-End: 364-816
ctggagccgaagctggagccggcactgcggcgcacggagcggagcgctgcagccaagccgatagcacgatacaaccgcaccagctacttctaccccacattctcagagagctcggagcacagccatctgctcgtgtcccccgtgctggtggcgagtgccgtcataggtgtggtcatcatcctctcctgcatcaccatcattgtgggcagcatccgcagggacaggcaggcccggcttcagcggcaccgccaccgccaccaccgccaccaccaccaccatcatcaccaccgccggcgtcgacaccgagagtacgagcacggctacgtgtcggacgagcacacatacagccgctcaagccgcaggatgcgctatgcctgcagctcctcagaggactggcccccacccttggacatcagctctgacggggacgtggatgccacggtgctcagggagctgtacccagattctccaccaggctacgaggagtgtgtggggccaggggccactcagctgtatgtccccacggacgcaccaccaccctactcgctgactgattcctgccccacgctggatggcacctccgactcaggcagcggccacagccctggccgacaccagcaggagcagaggaccccggcccaaggtggccttcacacggtctccatggacacccttcccccctacgaggctgtgtgcggggctggccccccatcaggcctgctgccactgccgggcccagacccagggccaaggggctcccagggctcacccaccccaacccgggccccagcctctggcccagagaggattgtgtgagggacccagccagccgggtcctgctggtccctacaggctgaaccacattctttaggcacacaaaggcgtgcacacacacacagagatgcacacgtgactcataacacacacatagaccaaacttgtatacacacagacatctacactgacataccccatgtacacacacagatctagacgtgctccacatatgtgtgaatatgcgcacatacaggcctaccacaaacacaaaacccacctgcaaaggtttcacggaacgtggagctctcctggcctcccgtccctcctcccggcctgtttgttgtgcctctgtagagagcgcttcggagagagaggcgaagtaggaagtgggattttctcttccctctcctgggcccgtttgcccctaccctcgcccagcaagctgcgcccaaattctattctgcctctggaaactgctggaccatccaaggtcagctgcctgccctgacccctaccccagggccagcttgtcctcctgggaggcgggacaggccccagtgaggttccgttgtgcgctgtgcctatctctcgattccagggcagatgagccacaacatcaccaccctgccacttacaaggtgggggacctgggtctggggtctcaggcgcaaactggaggccctcacagcccactaggccccctcccaaccccagtaccctcagtccctcagtcaggtggtgctagtagagctatctctgacgctgcaggccccaggtagatgggcagggccctccgtgggtgtgcagcggcggttccctcatcagtccagccactgcccaggactaagggtcttcaaggaagatgaggccattgcccttctccaggtggcttcaccacagtgctgcctgggcacctctctgaggcagagaagtggcccctccctcagtccctgcctggccgaccactgtggcctgcacgcgaatgggtcagagccagaccccggagctggtgctgtccttctaggtggctgctcatagctggggatggtgagtggctgtgttctggccttgcccacgtgggtgtttgcagagacaaaatgaaggggatatgctccccataaataccaccttgccaccacaagaggaccagaaggctactcagccttgctgccacagaaggggatttgtagggtcagcctggctgcagaaaggctggctcagatcttgaccaagaaaccccagcgatttccatcaaagaccacgcaggtaacagaggtgattcctgaagacccagcccacagagggtggcagccaagcatctctgagcagtgtccctgctagcatcgccagcggccatcactctgcctccctcccacctcttgt

SEQ ID NO: 111885 - DNA, 1988 bp, Homo sapiens
  Payload ID: 1929
  Gene Symbol: BEAN1
  Gene Name: brain expressed, associated with NEDD4, 1
  Uniprot ID: Q3B7T3
  ENST ID: ENST00000536005
  CDS Start-End: 218-997
gacgcccgagcccgagcgcagtggcctccgagcgggaaccggactgggagccggagccggggcgggaaccggagctggagccgaagctggagccggcactgcggcgcacggagcggagcgctgcagccaagccgagtgagtggaggggccttccctgcgagaagtcagagctgtgcccgtgggcaggctggctccgctgttctgctccaaggattacatgtccttcaaacgtccctgccccttagcacgatacaaccgcaccagctacttctaccccacattctcagagagctcggagcacagccatctgctcgtgtcccccgtgctggtggcgagtgccgtcataggtgtggtcatcatcctctcctgcatcaccatcattgtgggcagcatccgcagggacaggcaggcccggcttcagcggcaccgccaccgccaccaccgccaccaccaccaccatcatcaccaccgccggcgtcgacaccgagagtacgagcacggctacgtgtcggacgagcacacatacagccgctcaagccgcaggatgcgctatgcctgcagctcctcagaggactggcccccacccttggacatcagctctgacggggacgtggatgccacggtgctcagggagctgtacccagattctccaccaggctacgaggagtgtgtggggccaggggccactcagctgtatgtccccacggacgcaccaccaccctactcgctgactgattcctgccccacgctggatggcacctccgactcaggcagcggccacagccctggccgacaccagcaggagcagaggaccccggcccaaggtggccttcacacggtctccatggacacccttcccccctacgaggctgtgtgcggggctggccccccatcaggcctgctgccactgccgggcccagacccagggccaaggggctcccagggctcacccaccccaacccgggccccagcctctggcccagagaggattgtgtgagggacccagccagccgggtcctgctggtccctacaggctgaaccacattctttaggcacacaaaggcgtgcacacacacacagagatgcacacgtgactcataacacacacatagaccaaacttgtatacacacagacatctacactgacataccccatgtacacacacagatctagacgtgctccacatatgtgtgaatatgcgcacatacaggcctaccacaaacacaaaacccacctgcaaaggtttcacggaacgtggagctctcctggcctcccgtccctcctcccggcctgtttgttgtgcctctgtagagagcgcttcggagagagaggcgaagtaggaagtgggattttctcttccctctcctgggcccgtttgcccctaccctcgcccagcaagctgcgcccaaattctattctgcctctggaaactgctggaccatccaaggtcagctgcctgccctgacccctaccccagggccagcttgtcctcctgggaggcgggacaggccccagtgaggttccgttgtgcgctgtgcctatctctcgattccagggcagatgagccacaacatcaccaccctgccacttacaaggtgggggacctgggtctggggtctcaggcgcaaactggaggccctcacagcccactaggccccctcccaaccccagtaccctcagtccctcagtcaggtggtgctagtagagctatctctgacgctgcaggccccaggtagatgggcagggccctccgtgggtgtgcagcggcggttccctcatcagtccagccactgcccaggactaagggtcttcaaggaagatgaggccattgcccttctccaggtggcttcaccacagtgctgcctgggcacctctctgaggcagagaagtggcccctccctcagtccctgcctggccgaccactgtggcctgcacgcgaatgggtcagagccagaccccggagctggtgctgtccttctaggtggct

SEQ ID NO: 111886 - DNA, 1078 bp, Homo sapiens
  Payload ID: 1929
  Gene Symbol: BEAN1
  Gene Name: brain expressed, associated with NEDD4, 1
  Uniprot ID: Q3B7T3
  ENST ID: ENST00000561796
  CDS Start-End: 364-990
ctggagccgaagctggagccggcactgcggcgcacggagcggagcgctgcagccaagccgatagcacgatacaaccgcaccagctacttctaccccacattctcagagagctcggagcacagccatctgctcgtgtcccccgtgctggtggcgagtgccgtcataggtgtggtcatcatcctctcctgcatcaccatcattgtgggcagcatccgcagggacaggcaggcccggcttcagcggcaccgccaccgccaccaccgccaccaccaccaccatcatcaccaccgccggcgtcgacaccgagagtacgagcacggctacgtgtcggacgagcacacatacagccgctcaagccgcaggatgcgctatgcctgcagctcctcagaggactggcccccacccttggacatcagctctgacggggacgtggatgccacggtgctcagggagctgtacccagattctccaccaggggtctcactcagtcgcctacgctggagtgcaatgatgtacactgggagctttacctactgggtgcgatctatgctttccagacacaaactggacgccatcctgggcaggctgggctacacggccaccttggagtctgagttctcactggtccaggccatcagcaaagagaatgtcaagcagatggtgttcaagatcttcctggtgagggtctcatgtgaagccgttctcagaaccgcgggcacacggatgcttgagccgggcacagagaaactcgctaggacccacagcaggcacagctcagagaaaaggctggtgaagccctgcagctgcctcgagggggttcagccaggcccaggttccgggggaccacagcaaggtccctcagaaggggtggggtccgagacggccctggcagagggcactgctggccagagatctctgcccatggctctgagcccatctgaggtctcaacagcccccaacagcctccccagtggctctccagtcctctagggcccccagtgccatggcagcacatgcctggacagtgaggaggtcctgccttgcttcagtgaccctgtcttacactggatgccctggt

SEQ ID NO: 111887 - DNA, 2929 bp, Homo sapiens
  Payload ID: 1929
  Gene Symbol: BEAN1
  Gene Name: brain expressed, associated with NEDD4, 1
  ENST ID: ENST00000564819
  CDS Start-End: 191-409
catcatcctctcctgcatcaccatcattgtgggcagcatccgcagggacaggcaggcccggcttcagcggcaccgccaccgccaccaccgccaccaccaccaccatcatcaccaccgccggcgtcgacaccgagagtacgagcacggctacgtgtcggacgagcacacatacagccgctcaagccgcaggatgcgctatgcctgcagctcctcagaggactggcccccacccttggacatcagctctgacggggacgtggatgccacggtgctcagggagctgtacccagattctccaccaggacagggtctcactcagtcgcctacgctggagtgcaatggtatgaacatagctcactgtagccttgaactcctgggctcaagtgatcctcccacctcagcctcctaagcagctgggactacaggcatgcaccaccatacccagctaatttttgattttgaatttttgtaaacacagggtctcactatgttgcccaggctagttgaaactcctggtctcaagcgatcctctcacctcagcctcccgagtagggtttataccttctgaaacttgtaagaaaaggaaacactaaatagcaacaaaatgaaaatacacctccggctagcaatctctacccattcattacctctcaagattaagcaccattgaagccttgtcattttcctgttgatgtggatatttggatagtcagtgccttacaggagttgcttttttttttttaacctcactgaaacttggcatcatttctctgagacatggctggtgtaacgtcatgaggatgggccatcaacttcaggacctgactctaggaacttcagagactacacgttttactctaacaggagttggcttgtagcaccctgatggcttgtaccaccaggaaagagaggaaagtggcaatgaaactgaaatgagctgttgtctcaccctctgcaggaattcccctcttcctttccatgccctccacaacaccatggcttgggctattgatctcttagcggacagagcctgggccccttcctctgtcacatttccctcccaccagaactccaatagagcccactaacatagtcctagatgcccccaagtgccttgaaagtggggtgcaatccaaaattcgaatagtccattaatatagtcttagaccccaagtgccttgaaagtggggtgcaatcctgaaggagggtgcagcggggggaaagaccacgagataggctcatccttctggttctccagcccacgtccctgctggacaggccaaggctggctctgctgcgcctatcacccccaccctgagcccacactgccacctgccggctcgctgctgccactgctcaaagtgaacaagtcaggccctgaagaatgaggaagcccctcctctcaccttgaaacacaatacccaccagcactcataattgcagacaaaacccgtcattttaaccctgggcttttcttccacccttgagatgttctatgaggttgaacccattcaagtattccatttttggggctcacccccgccccgccagcatcactctctggacaaagcctgacacttatgtccccctctctgtaagcaaaataatcattttgcatgccctctgttctgaacatcactaggcatggctctggtgccacctcagtgctctggggctccacctcctgggaatgaatgcagaaacttccacagtgatggtgtccagccatgtgctgcccccaaccgaaaccaccccacaccgacacccagctcccaccacaaagacttaggatcccacaggcctttgggactgtcacgctcttggcttttcctgctcctccatccacgacatgccctatgctgtggtgtgtcacatatggcaccacattcaaggtcctttgcacattcctaaggagatgccgcctgtctgtgccaggggccaaggagaacaccccaggtacctgggctcatcagaggcccaaggagatggaaggtgaagctgcatcacaggacgatggagacaggggccccagggccagaccctgggatgaggatgtgggtgagagtttggttagggaagtgttcccaggagtaccagatggagtgaggcaggaaacaagaaaggcaaggaagccagtgagggggtcaccaagcaggtcaccactgcaggccactgagcgcagtcccactggtgactctgagacacagagtagaacgcacctcaaagtgacgcccgccctcaggtgggagagacgggttgtttgtaccctgatgctcagcagacatttttggaggctgccctttggagaatgttcattcctgccccttgtggaggccaaatgggctcctctggccagaaaaaagtcttcaggggagtcaccgtgctggcgatgacgccatcgtgatagtccacaagagccatcattgggtccccgtgtatgggtgtggtgaggtcccaggtctctgcaaagggctccagcagctgctgccacacacaagcaacaggcatcgcccagaagagggcggaaggagggttgatacagagtaaggctgttcacagccaccacgaggaacatccattgtcacactggccaagcccacatgcacatacacacactggggcccctcccaagttcctagagatacccctggcacacactcacatgtagcatccctcagctccacctcctgtggtttcgtggacatttgctcagacagctttggtgcacacacactagtgcccttctcacttagagcttgtgcacgtacacacttggtgttgcatactccagtgccactgacactcccactcagctgttcctatccatgcccacctgcatgtccaggctcttggcatgagcggtggagagacagtaagcttcatcgtctgaggaagtgaatcttctgtcctggtctctgctttgcttcac

SEQ ID NO: 111888 - DNA, 2469 bp, Homo sapiens
  Payload ID: 1929
  Gene Symbol: BEAN1
  Gene Name: brain expressed, associated with NEDD4, 1
  Uniprot ID: Q3B7T3
  ENST ID: ENST00000562849
  CDS Start-End: 398-850
ggactgggagccggagccggggcgggaaccggagctggagccgaagctggagccggcactgcggcgcacggagcggagcgctgcagccaagccgatagcacgatacaaccgcaccagctacttctaccccacattctcagagagctcggagcacagccatctgctcgtgtcccccgtgctggtggcgagtgccgtcataggtgtggtcatcatcctctcctgcatcaccatcattgtgggcagcatccgcagggacaggcaggcccggcttcagcggcaccgccaccgccaccaccgccaccaccaccaccatcatcaccaccgccggcgtcgacaccgagagtacgagcacggctacgtgtcggacgagcacacatacagccgctcaagccgcaggatgcgctatgcctgcagctcctcagaggactggcccccacccttggacatcagctctgacggggacgtggatgccacggtgctcagggagctgtacccagattctccaccaggctacgaggagtgtgtggggccaggggccactcagctgtatgtccccacggacgcaccaccaccctactcgctgactgattcctgccccacgctggatggcacctccgactcaggcagcggccacagccctggccgacaccagcaggagcagaggaccccggcccaaggtggccttcacacggtctccatggacacccttcccccctacgaggctgtgtgcggggctggccccccatcaggcctgctgccactgccgggcccagacccagggccaaggggctcccagggctcacccaccccaacccgggccccagcctctggcccagagaggattgtgtgagggacccagccagccgggtcctgctggtccctacaggctgaaccacattctttaggcacacaaaggcgtgcacacacacacagagatgcacacgtgactcataacacacacatagaccaaacttgtatacacacagacatctacactgacataccccatgtacacacacagatctagacgtgctccacatatgtgtgaatatgcgcacatacaggccccagtgaggttccgttgtgcgctgtgcctatctctcgattccagggcagatgagccacaacatcaccaccctgccacttacaaggtgggggacctgggtctggggtctcaggcgcaaactggaggccctcacagcccactaggccccctcccaaccccagtaccctcagtccctcagtcaggtggtgctagtagagctatctctgacgctgcaggccccaggtagatgggcagggccctccgtgggtgtgcagcggcggttccctcatcagtccagccactgcccaggactaagggtcttcaaggaagatgaggccattgcccttctccaggtggcttcaccacagtgctgcctgggcacctctctgaggcagagaagtggcccctccctcagtccctgcctggccgaccactgtggcctgcacgcgaatgggtcagagccagaccccggagctggtgctgtccttctaggtggctgctcatagctggggatggtgagtggctgtgttctggccttgcccacgtgggtgtttgcagagacaaaatgaaggggatatgctccccataaataccaccttgccaccacaagaggaccagaaggctactcagccttgctgccacagaaggggatttgtagggtcagcctggctgcagaaaggctggctcagatcttgaccaagaaaccccagcgatttccatcaaagaccacgcaggtaacagaggtgattcctgaagacccagcccacagagggtggcagccaagcatctctgagcagtgtccctgctagcatcgccagcggccatcactctgcctccctcccacctcttgtccctcgtcgttaaaaaacagcaccctatcctgcttccccacatttctgttcctccaatgaagggctaagactatttagtaatctctttcttaagcagaggagtggcaaggatggcaatcttgaattttattttctgtagagatagcatttcttctggtgcggagctgaaaggaatccacccagaagttctgtagcatcctgcgtgcagcctcctggagccccagactccatctgggggagggacttgtttacaagcagttctgaccaccttagtggtgtactgttttctaggcaaaaaatatctgtctgttgtactgtatagcctttaaaatgcagtccaggaatgagactcttttaagaaacacatcctgcttctgcaattccagagagtgctgggggaaaaaaagggataaaaattcctacctactcatcagtgtttgaaagatggagctgaatagcttttcttgttcctggactaggcaatgaataagcaacaatgtatcttttctgtgttcaaaataaatacataatatcaataaaatgtagcaagaagtaacactttcagagagtgca

SEQ ID NO: 111889 - DNA, 644 bp, Homo sapiens
  Payload ID: 1929
  Gene Symbol: BEAN1
  Gene Name: brain expressed, associated with NEDD4, 1
  ENST ID: ENST00000562146
  CDS Start-End: 1-248
cacccttggacatcagctctgacggggacgtggatgccacggtgctcagggagctgtacccagattctccaccaggatgtacactgggagctttacctactgggtgcgatctatgctttccagacacaaactggacgccatcctgggcaggctgggctacacggccaccttggagtctgagttctcactggtccaggccatcagcaaagagaatgtcaagcagatggtgttcaagatcttcctggtgagggtctcatgtgaagccgttctcagaaccgcgggcacacggatgcttgagccgggcacagagaaactcgctaggacccacagcaggcacagctcagagaaaaggctggtgaagccctgcagctgcctcgagggggttcagccaggcccaggttccgggggaccacagcaaggtccctcagaaggggtggggtccgagacggccctggcagagggcactgctggccagagatctctgcccatggctctgagcccatctgaggtctcaacagcccccaacagcctccccagtggctctccagtcctctagggcccccagtgccatggcagcacatgcctggacagtgaggaggtcctgccttgcttcagtgaccctgtcttacactggatgccctggt

SEQ ID NO: 111890 - DNA, 437 bp, Homo sapiens
  Payload ID: 1929
  Gene Symbol: BEAN1
  Gene Name: brain expressed, associated with NEDD4, 1
  ENST ID: ENST00000618932
  CDS Start-End: 97-437
gaggctggagagcggtgagtggaggggccttccctgcgagaagtcagagctgtgcccgtgggcaggctggctccgctgttctgctccaaggattacatgtccttcaaacgtccctgcccctgtaagtttcctccccacatccttccaccacttggggccaggcaagggcagagcttggagtcgagctgcagagaacggcttgaggtgtttggccaaagaactgcaggggtccaaccagaggctaatgtggcatgctgggtggggagagggcaacacggaagacccctgacgtctgcaagatgctccctgagaactgaaaatcgcactttggcccattcttctgtatcagcccttcccgaagtgtggatcggagttcctctgagggatgttaatgggatgacacacacccacacacaaataaaagactacatggccaa

SEQ ID NO: 111891 - DNA, 1171 bp, Homo sapiens
  Payload ID: 1929
  Gene Symbol: BEAN1
  Gene Name: brain expressed, associated with NEDD4, 1
  Uniprot ID: Q3B7T3
  ENST ID: ENST00000622872
  CDS Start-End: 545-1171
gacgcccgagcccgagcgcagtggcctccgagcgggaaccggactgggagccggagccggggcgggaaccggagctggagccgaagctggagccggcactgcggcgcacggagcggagcgctgcagccaagccgagtgagtggaggggccttccctgcgagaagtcagagctgtgcccgtgggcaggctggctccgctgttctgctccaaggattacatgtccttcaaacgtccctgccccttagcacgatacaaccgcaccagctacttctaccccacattctcagagagctcggagcacagccatctgctcgtgtcccccgtgctggtggcgagtgccgtcataggtgtggtcatcatcctctcctgcatcaccatcattgtgggcagcatccgcagggacaggcaggcccggcttcagcggcaccgccaccgccaccaccgccaccaccaccaccatcatcaccaccgccggcgtcgacaccgagagtacgagcacggctacgtgtcggacgagcacacatacagccgctcaagccgcaggatgcgctatgcctgcagctcctcagaggactggcccccacccttggacatcagctctgacggggacgtggatgccacggtgctcagggagctgtacccagattctccaccaggggtctcactcagtcgcctacgctggagtgcaatgatgtacactgggagctttacctactgggtgcgatctatgctttccagacacaaactggacgccatcctgggcaggctgggctacacggccaccttggagtctgagttctcactggtccaggccatcagcaaagagaatgtcaagcagatggtgttcaagatcttcctggtgagggtctcatgtgaagccgttctcagaaccgcgggcacacggatgcttgagccgggcacagagaaactcgctaggacccacagcaggcacagctcagagaaaaggctggtgaagccctgcagctgcctcgagggggttcagccaggcccaggttccgggggaccacagcaaggtccctcagaaggggtggggtccgagacggccctggcagagggcactgctggccagagatctctgcccatggctctgagcccatctgaggtctcaacagcccccaacagcctccccagtggctctccagtcctctag

SEQ ID NO: 111892 - DNA, 864 bp, Homo sapiens
  Payload ID: 1930
  Gene Symbol: BEX1
  Gene Name: brain expressed, X-linked 1
  Uniprot ID: Q9HBH7
  ENST ID: ENST00000372728
  CDS Start-End: 241-618
cttggcggtgacgcacggccctcacgtgaccgggagctgcagagctacgcagccttcggtgcagtcgtcactcgtgtctcgctaccagctccccgctgccctgcgctcggcgggctggcatccggcccgggggaaagcggaccagcccttctgcaggtctgcggggccaagtgtcccggcggcgcacctcgtggcgagaatcgggagaaggaggagactacaaggataggcccaggagtaatggagtccaaagagaaacgagcagtaaacagtctcagcatggaaaatgccaaccaagaaaatgaagaaaaggagcaagttgctaataaaggggagcccttggccctccctttggatgctggtgaatactgtgtgcctagaggaaatcgtaggcggttccgcgttaggcagcccatcctgcagtatagatgggatatgatgcataggcttggagaaccacaggcaaggatgagagaagagaatatggaaaggattggggaggaggtgagacagctgatggaaaagctgagggaaaagcagttgagtcatagtctgcgggcagtcagcactgacccccctcaccatgaccatcatgatgagttttgccttatgccctgaatcctgatggtttccctaaagttattacggaaacagacccctgctttcgaatttacatgttcatgatgtgcccttgttgtaaacctttacctgtcacttgtttacgtgggtctcctattaccagcttctaattgaatattgtgtttttgaaccagtctgtaagatttttgttagcagaagaattttacctattgcatggaaagatgctcattatagtgaagttaataaagcacctttaaaaagcaa

SEQ ID NO: 111893 - DNA, 1066 bp, Homo sapiens
  Payload ID: 1931
  Gene Symbol: BEX4
  Gene Name: brain expressed, X-linked 4
  Uniprot ID: Q9NWD9
  ENST ID: ENST00000372691
  CDS Start-End: 121-483
tggcgtcagagccgtcgtggctcgttccattctcggcggtggtacctgctcccggtggccctgaggacgtgtgggccaggggcggccccgaaattaggaagcggagggggagcaggagtaatggagtccaaagaggaactagcggcaaacaatctcaacggggaaaatgcccaacaagaaaacgaaggaggggagcaggcccccacgcagaatgaagaagaatcccgccatttgggagggggtgaaggccagaagcctggaggaaatatcaggcgggggcgagttaggcgacttgtccctaattttcgatgggccatacctaataggcatattgagcacaatgaagcgagagatgatgtagaaaggtttgtagggcagatgatggaaatcaagagaaagactagggaacagcagatgaggcactatatgcgcttccaaactcctgaacctgacaaccattatgacttttgcctcataccttgaatcctaaaagttttcgctgaggttaatgtgaacactgctttacaagcttgtatttttgtgatttactttttctgtaagccttttggggtttacacttaccagtttctaatggaaattagaattctaattgaatattgttttgtctcagcctaaaagttacggtcagcatggcaattcacctattttaggaaaaatactcttttcataatatgaaatgcataaagcagttcaaaaagcagtctgtattccatcatcttcctttttcattccagtccttatttttgtaagtattacttttcctcctccggctacctggactcaaaatctcagttgtctttgacagtttttttcttgtccctgaccaaaaaagaatgatcatacccagaattcaatgtttgatattttaagaatgtatgttctagtgtttttcagagtgagtctaccatctgtataaaaacaccttgggggcaggcaggggcatttaaaaatgtaggacctatcgtccagactcacagagtggggctccagaatctccatttttaacaaactctcttaagtaattctgatgtgtaccaaaatcagt

SEQ ID NO: 111894 - DNA, 1328 bp, Homo sapiens
  Payload ID: 1931
  Gene Symbol: BEX4
  Gene Name: brain expressed, X-linked 4
  Uniprot ID: Q9NWD9
  ENST ID: ENST00000372695
  CDS Start-End: 236-598
gtgaccggccaacactgagtgttgtctcgctctggcgtcagagccgtcgtggctcgttccattctcggcggtggtacctgctcccggtggccctgaggacgtgtgggccaggggcggccccgaaattaggaagcggagggggagcagtctgcaggtctgcggggctaagtgtcgcggcggcgcacctcgcgtcaagaatccggaggaggagactgcaaggataggcccaggagtaatggagtccaaagaggaactagcggcaaacaatctcaacggggaaaatgcccaacaagaaaacgaaggaggggagcaggcccccacgcagaatgaagaagaatcccgccatttgggagggggtgaaggccagaagcctggaggaaatatcaggcgggggcgagttaggcgacttgtccctaattttcgatgggccatacctaataggcatattgagcacaatgaagcgagagatgatgtagaaaggtttgtagggcagatgatggaaatcaagagaaagactagggaacagcagatgaggcactatatgcgcttccaaactcctgaacctgacaaccattatgacttttgcctcataccttgaatcctaaaagttttcgctgaggttaatgtgaacactgctttacaagcttgtatttttgtgatttactttttctgtaagccttttggggtttacacttaccagtttctaatggaaattagaattctaattgaatattgttttgtctcagcctaaaagttacggtcagcatggcaattcacctattttaggaaaaatactcttttcataatatgaaatgcataaagcagttcaaaaagcagtctgtattccatcatcttcctttttcattccagtccttatttttgtaagtattacttttcctcctccggctacctggactcaaaatctcagttgtctttgacagtttttttcttgtccctgaccaaaaaagaatgatcatacccagaattcaatgtttgatattttaagaatgtatgttctagtgtttttcagagtgagtctaccatctgtataaaaacaccttgggggcaggcaggggcatttaaaaatgtaggacctatcgtccagactcacagagtggggctccagaatctccatttttaacaaactctcttaagtaattctgatgtgtaccaaaatcagtgccattggtgtgtgtgtacgtaactatatacatatgtgtgtgtgtgtatatatataatgtgtcataaccgtaaacaataaacaatatcaagataaatctgactttgatgggcaagtaattaaaaaagaaaagtatgagaccttaaaa

SEQ ID NO: 111895 - DNA, 857 bp, Homo sapiens
  Payload ID: 1932
  Gene Symbol: BEX5
  Gene Name: brain expressed, X-linked 5
  Uniprot ID: Q5H9J7
  ENST ID: ENST00000333643
  CDS Start-End: 304-639
atggtaattggaaatctgagctcacagtgacgtgacccttaggagacccagagccaatgcgtggattagtccctcctcctagttgcagtctggtagttgtcgctggccgtgtgacggctcgctgttgccctgaaggcaggcgagccagctgcccaggaaaggtggaaagtggtagaagctgacccctgagccctggcaggtctttaagtgcgtttgtgcagccgatttcaaggctaagagagaaagactgcctctgatccctgaaggaagaaaaaaaaaaaaaaaacaggaaaaaaactcaacatggaaaatgtccccaaggaaaacaaagttgtggagaaggccccagtgcagaatgaagcccccgctttaggaggtggtgaataccaggagcctggaggaaatgttaaaggggtttgggctccacctgccccgggttttggagaggatgtgcccaataggcttgtcgataacattgatatgatagatggagatggagatgatatggaacggttcatggaggagatgagagagctaaggaggaaaattagggaacttcagttgaggtacagtctgcgcattcttataggggaccctcctcaccatgatcatcatgatgagttttgccttatgccttgaatcttgaggttaataatcataaaatccctgctttctaaattcgcatttttcctggtgtacctttaatgtgaaccttttggcattcttctgcaattttctgattggagattgcattttgacctagtctgtaagtttttctgtcagaagaggactttcatcaactttcatggaaagatgtttattgcatactgtaaagttaataaagcaatttaaaagca

SEQ ID NO: 111896 - DNA, 860 bp, Homo sapiens
  Payload ID: 1932
  Gene Symbol: BEX5
  Gene Name: brain expressed, X-linked 5
  Uniprot ID: Q5H9J7
  ENST ID: ENST00000543160
  CDS Start-End: 303-638
caccctttccagatacacacccgtttagtgcgagaaatggagcggttggggagaggatctcccgagggggctggattgagaatgggtaccatttgagatctcctaggaggccggccatcgggcaatgtctgatggagtccagccggtggaggagactgaaaggaaacagcctgcttcctgcaggtccgcgggagggaggtctttaagtgcgtttgtgcagccgatttcaaggctaagagagaaagactgcctctgatccctgaaggaagaaaaaaaaaaaaaaaacaggaaaaaaactcaacatggaaaatgtccccaaggaaaacaaagttgtggagaaggccccagtgcagaatgaagcccccgctttaggaggtggtgaataccaggagcctggaggaaatgttaaaggggtttgggctccacctgccccgggttttggagaggatgtgcccaataggcttgtcgataacattgatatgatagatggagatggagatgatatggaacggttcatggaggagatgagagagctaaggaggaaaattagggaacttcagttgaggtacagtctgcgcattcttataggggaccctcctcaccatgatcatcatgatgagttttgccttatgccttgaatcttgaggttaataatcataaaatccctgctttctaaattcgcatttttcctggtgtacctttaatgtgaaccttttggcattcttctgcaattttctgattggagattgcattttgacctagtctgtaagtttttctgtcagaagaggactttcatcaactttcatggaaagatgtttattgcatactgtaaagttaataaagcaatttaaaagcagtct

SEQ ID NO: 111897 - DNA, 780 bp, Homo sapiens
  Payload ID: 1933
  Gene Symbol: BRI3
  Gene Name: brain protein I3
  Uniprot ID: O95415
  ENST ID: ENST00000297290
  CDS Start-End: 122-499
gcgtctgcctcagaggggcccgagccacccggtccgccgcgtccccgccgccgccgccgcgtcccccgccggggccgaccgagccgagccgggccggagcggcgggcgcggccgggccgccatggaccacaagccgctgctgcaggagcggccgcccgcctacaacctggaggccggccagggcgactacgcgtgcggcccgcacggctacggcgccatccccgccgcgcccccgccgccgccctacccctacctcgtcacagggatacccacccaccatcccagggtctacaacatccacagccggaccgtcacccgctatcctgccaactctatcgtggtcgtaggaggctgtcctgtctgcagggttggggtgctggaggactgcttcaccttcctgggcatcttcctggccatcatcctcttcccctttgggttcatttgctgttttgccttgaggaagcgacgatgccccaactgtggagccaccttcgcttaaagggaacaccaggcccggctttcctacacccagctctctttttctaatgtaaatgttgtgtacaataattttatttgattaagcttcaggactgttttgtaaagcgaggtgggaccgatgtggcacacgccagctgcggtttcccggagcgtggagaggcagtgctgctgctcccgcccgaggctcatgacaactcaataaagcactgcttttattttttgcagtcttcaatttgagaaaggtgagaaataatgttttcaataaatgagattcataccatt

SEQ ID NO: 111898 - DNA, 699 bp, Homo sapiens
  Payload ID: 1933
  Gene Symbol: BRI3
  Gene Name: brain protein I3
  ENST ID: ENST00000539286
  CDS Start-End: 130-426
cccgccccgcgtctgcctcagaggggcccgagccacccggtccgccgcgtccccgccgccgccgccgcgtcccccgccggggccgaccgagccgagccgggccggagcggcgggcgcggccgggccgccatggaccacaagccgctgctgcaggagcggccgcccgcctacaacctggaggccggccagggcgactacgcgtgcggcccgcacggctacggcgccatccccgccgcgcccccgccgccgccctacccctacctcgtcacagggatacccacccaccatcccagggtctacaacatccacagccggaccgtcacccgctatcctgccaactctatcgtggtcgtaggaggctgtcctgtctgcaggcaccagaggtcatcctggctttacacgtatcctttgagagtctgtacctgattcaaacacggagaaaccaggaccccgagcagtttgagtgtactggtaatggatgcagctttggccaactagctgagtgagaacacaaggagccgtgactccgacgcccaggcctgtgtcctggatgggccgtgtgcagcgaatccgttggcgactcctaactaccaagaaaaggagctctcggaggagatttcgtcgagtgctacgtgtggctgtgataagggcaggcaaagcgtcttagcactctacagctctggcgtggttggagggagg

SEQ ID NO: 111899 - DNA, 567 bp, Homo sapiens
  Payload ID: 1933
  Gene Symbol: BRI3
  Gene Name: brain protein I3
  ENST ID: ENST00000491463
  CDS Start-End: 1-144
atccacagccggaccgtcacccgctatcctgccaactctatcgtggtcgtaggaggctgtcctgtctgcagcaacttcgtgtacgacgacgggaaccaacccctcctaccggcaaagagggagaaaagaccctatcagcagtagacatgtggacggcaacctccctgaacaacctggtgagagctcagggcagacaggtccactgctccagaaacgcccatgtgtggaggaaatgaaattaaggcttttaatagagtcttgctctgtcacccaaggctggagtgcaatggcgagatctcggctcactgcaacctgcgcctcccaggttcaatcctgcctcagcctcccgagtagctgggattacaggcgcctgccaccacgcctggctaatttttgtatttttcgtagagatggggtttcaccatgttggccaggctggtctggaactcctaacctcaggtgatctgcccgccttagcctcccaaagtgctgggattacaagcatgagccactgcactggccaaatgctaaattttttttaaaaacaaaagaatgtttaaactactt

SEQ ID NO: 111900 - DNA, 4340 bp, Homo sapiens
  Payload ID: 1934
  Gene Symbol: BDNF
  Gene Name: brain-derived neurotrophic factor
  Uniprot ID: P23560
  ENST ID: ENST00000314915
  CDS Start-End: 645-1412
attattaaagcggtagtctgccggcgctgataagcaacaagttccccagcggtcttcccgccctagcctgacaaggcgaaggttttcttacctggcgacagggaaatctcccgagccgaattcagcttcgccggagccccaggtgtgacctgcgtagtgggcaagggagcggtgtgcaggctgagtttttttttttacaggggtaccctgaaactcctcactttctctgggaactttcagtgccaggacccagtaacgggcggttagaaggcagccctaggaaacacctgctacatagcagggcagttgggcaatcattggtaacctcgctcattcattagaatcacgtaagaactcaaaaggaaacgtgtctctcggagtgagggcgtttgcgtaaatctataggtttttcgacatcgatgccagttgctttgtcttctgtagtcgccaaggtggttgagagtttaagcttgcggatattgcaaagggttattagattcataagtcacaccaagtggtgggcgatccactgagcaaagccgaacttctcacatgatgacttcaaacaagacacattaccttccagcatctgttggggagacgagattttaagacacttgagtctccaggacagcaaaggcacaatgttccaccaggtgagaagagtgatgaccatccttttccttactatggttatttcatactttggttgcatgaaggctgcccccatgaaagaagcaaacatccgaggacaaggtggcttggcctacccaggtgtgcggacccatgggactctggagagcgtgaatgggcccaaggcaggttcaagaggcttgacatcattggctgacactttcgaacacgtgatagaagagctgttggatgaggaccagaaagttcggcccaatgaagaaaacaataaggacgcagacttgtacacgtccagggtgatgctcagtagtcaagtgcctttggagcctcctcttctctttctgctggaggaatacaaaaattacctagatgctgcaaacatgtccatgagggtccggcgccactctgaccctgcccgccgaggggagctgagcgtgtgtgacagtattagtgagtgggtaacggcggcagacaaaaagactgcagtggacatgtcgggcgggacggtcacagtccttgaaaaggtccctgtatcaaaaggccaactgaagcaatacttctacgagaccaagtgcaatcccatgggttacacaaaagaaggctgcaggggcatagacaaaaggcattggaactcccagtgccgaactacccagtcgtacgtgcgggcccttaccatggatagcaaaaagagaattggctggcgattcataaggatagacacttcttgtgtatgtacattgaccattaaaaggggaagatagtggatttatgttgtatagattagattatattgagacaaaaattatctatttgtatatatacataacagggtaaattattcagttaagaaaaaaataattttatgaactgcatgtataaatgaagtttatacagtacagtggttctacaatctatttattggacatgtccatgaccagaagggaaacagtcatttgcgcacaacttaaaaagtctgcattacattccttgataatgttgtggtttgttgccgttgccaagaactgaaaacataaaaagttaaaaaaaataataaattgcatgctgctttaattgtgaattgataataaactgtcctctttcagaaaacagaaaaaaaacacacacacacacaacaaaaatttgaaccaaaacattccgtttacattttagacagtaagtatcttcgttcttgttagtactatatctgttttactgcttttaacttctgatagcgttggaattaaaacaatgtcaaggtgctgttgtcattgctttactggcttaggggatgggggatggggggtatatttttgtttgttttgtgtttttttttcgtttgtttgttttgttttttagttcccacagggagtagagatggggaaagaattcctacaatatatattctggctgataaaagatacatttgtatgttgtgaagatgtttgcaatatcgatcagatgactagaaagtgaataaaaattaaggcaactgaacaaaaaaatgctcacactccacatcccgtgatgcacctcccaggccccgctcattctttgggcgttggtcagagtaagctgcttttgacggaaggacctatgtttgctcagaacacattctttccccccctccccctctggtctcctctttgttttgttttaaggaagaaaaatcagttgcgcgttctgaaatattttaccactgctgtgaacaagtgaacacattgtgtcacatcatgacactcgtataagcatggagaacagtgatttttttttagaacagaaaacaacaaaaaataaccccaaaatgaagattattttttatgaggagtgaacatttgggtaaatcatggctaagcttaaaaaaaactcatggtgaggcttaacaatgtcttgtaagcaaaaggtagagccctgtatcaacccagaaacacctagatcagaacaggaatccacattgccagtgacatgagactgaacagccaaatggaggctatgtggagttggcattgcatttaccggcagtgcgggaggaatttctgagtggccatcccaaggtctaggtggaggtggggcatggtatttgagacattccaaaacgaaggcctctgaaggacccttcagaggtggctctggaatgacatgtgtcaagctgcttggacctcgtgctttaagtgcctacattatctaactgtgctcaagaggttctcgactggaggaccacactcaagccgacttatgcccaccatcccacctctggataattttgcataaaattggattagcctggagcaggttgggagccaaatgtggcatttgtgatcatgagattgatgcaatgagatagaagatgtttgctacctgaacacttattgctttgaaactagacttgaggaaaccagggtttatcttttgagaacttttggtaagggaaaagggaacaggaaaagaaaccccaaactcaggccgaatgatcaaggggacccataggaaatcttgtccagagacaagacttcgggaaggtgtctggacattcagaacaccaagacttgaaggtgccttgctcaatggaagaggccaggacagagctgacaaaattttgctccccagtgaaggccacagcaaccttctgcccatcctgtctgttcatggagagggtccctgcctcacctctgccattttgggttaggagaagtcaagttgggagcctgaaatagtggttcttggaaaaatggatccccagtgaaaactagagctctaagcccattcagcccatttcacacctgaaaatgttagtgatcaccacttggaccagcatccttaagtatcagaaagccccaagcaattgctgcatcttagtagggtgagggataagcaaaagaggatgttcaccataacccaggaatgaagataccatcagcaaagaatttcaatttgttcagtctttcatttagagctagtctttcacagtaccatctgaatacctctttgaaagaaggaagactttacgtagtgtagatttgttttgtgttgtttgaaaatattatctttgtaattatttttaatatgtaaggaatgcttggaatatctgctgtatgtcaactttatgcagcttccttttgagggacaaatttaaaacaaacaaccccccatcacaaacttaaaggattgcaagggccagatctgttaagtggtttcataggagacacatccagcaattgtgtggtcagtggctcttttacccaataagatacatcacagtcacatgcttgatggtttatgttgacctaagatttattttgttaaaatctctctctgttgtgttcgttcttgttctgttttgttttgttttttaaagtcttgctgtggtctctttgtggcagaagtgtttcatgcatggcagcaggcctgttgcttttttatggcgattcccattgaaaatgtaagtaaatgtctgtggccttgttctctctatggtaaagatattattcaccatgtaaaacaaaaaacaatatttattgtattttagtatatttatataattatgttattgaaaaaaattggcattaaaacttaaccgcatcagaagcctattgtaaatacaagttctatttaagtgtactaattaacatataatatatgttttaaatatagaatttttaatgtttttaaatatattttcaaagtacataaaa

SEQ ID NO: 111901 - DNA, 4018 bp, Homo sapiens
  Payload ID: 1934
  Gene Symbol: BDNF
  Gene Name: brain-derived neurotrophic factor
  Uniprot ID: P23560
  ENST ID: ENST00000356660
  CDS Start-End: 347-1090
agagctaaataatgtctgacccgggcgcaaggcgcagcctggagctccgggtccccgacgctgccgccgccgcgcccgggcgcacccgcccgctcgctgtcccgcgcaccccgtagcgcctcgggctcccgggccggacagaggagccagcccggtgcgcccctccacctcctgctcggggggctttaatgagacacccaccgctgctgtggggccggcggggagcagcaccgcgacggggaccggggctgggcgctggagccagaatcggaaccacgatgtgactccgccgccggggacccgtgaggtttgtgtggaccccgagttccaccaggtgagaagagtgatgaccatccttttccttactatggttatttcatactttggttgcatgaaggctgcccccatgaaagaagcaaacatccgaggacaaggtggcttggcctacccaggtgtgcggacccatgggactctggagagcgtgaatgggcccaaggcaggttcaagaggcttgacatcattggctgacactttcgaacacgtgatagaagagctgttggatgaggaccagaaagttcggcccaatgaagaaaacaataaggacgcagacttgtacacgtccagggtgatgctcagtagtcaagtgcctttggagcctcctcttctctttctgctggaggaatacaaaaattacctagatgctgcaaacatgtccatgagggtccggcgccactctgaccctgcccgccgaggggagctgagcgtgtgtgacagtattagtgagtgggtaacggcggcagacaaaaagactgcagtggacatgtcgggcgggacggtcacagtccttgaaaaggtccctgtatcaaaaggccaactgaagcaatacttctacgagaccaagtgcaatcccatgggttacacaaaagaaggctgcaggggcatagacaaaaggcattggaactcccagtgccgaactacccagtcgtacgtgcgggcccttaccatggatagcaaaaagagaattggctggcgattcataaggatagacacttcttgtgtatgtacattgaccattaaaaggggaagatagtggatttatgttgtatagattagattatattgagacaaaaattatctatttgtatatatacataacagggtaaattattcagttaagaaaaaaataattttatgaactgcatgtataaatgaagtttatacagtacagtggttctacaatctatttattggacatgtccatgaccagaagggaaacagtcatttgcgcacaacttaaaaagtctgcattacattccttgataatgttgtggtttgttgccgttgccaagaactgaaaacataaaaagttaaaaaaaataataaattgcatgctgctttaattgtgaattgataataaactgtcctctttcagaaaacagaaaaaaaacacacacacacacaacaaaaatttgaaccaaaacattccgtttacattttagacagtaagtatcttcgttcttgttagtactatatctgttttactgcttttaacttctgatagcgttggaattaaaacaatgtcaaggtgctgttgtcattgctttactggcttaggggatgggggatggggggtatatttttgtttgttttgtgtttttttttcgtttgtttgttttgttttttagttcccacagggagtagagatggggaaagaattcctacaatatatattctggctgataaaagatacatttgtatgttgtgaagatgtttgcaatatcgatcagatgactagaaagtgaataaaaattaaggcaactgaacaaaaaaatgctcacactccacatcccgtgatgcacctcccaggccccgctcattctttgggcgttggtcagagtaagctgcttttgacggaaggacctatgtttgctcagaacacattctttccccccctccccctctggtctcctctttgttttgttttaaggaagaaaaatcagttgcgcgttctgaaatattttaccactgctgtgaacaagtgaacacattgtgtcacatcatgacactcgtataagcatggagaacagtgatttttttttagaacagaaaacaacaaaaaataaccccaaaatgaagattattttttatgaggagtgaacatttgggtaaatcatggctaagcttaaaaaaaactcatggtgaggcttaacaatgtcttgtaagcaaaaggtagagccctgtatcaacccagaaacacctagatcagaacaggaatccacattgccagtgacatgagactgaacagccaaatggaggctatgtggagttggcattgcatttaccggcagtgcgggaggaatttctgagtggccatcccaaggtctaggtggaggtggggcatggtatttgagacattccaaaacgaaggcctctgaaggacccttcagaggtggctctggaatgacatgtgtcaagctgcttggacctcgtgctttaagtgcctacattatctaactgtgctcaagaggttctcgactggaggaccacactcaagccgacttatgcccaccatcccacctctggataattttgcataaaattggattagcctggagcaggttgggagccaaatgtggcatttgtgatcatgagattgatgcaatgagatagaagatgtttgctacctgaacacttattgctttgaaactagacttgaggaaaccagggtttatcttttgagaacttttggtaagggaaaagggaacaggaaaagaaaccccaaactcaggccgaatgatcaaggggacccataggaaatcttgtccagagacaagacttcgggaaggtgtctggacattcagaacaccaagacttgaaggtgccttgctcaatggaagaggccaggacagagctgacaaaattttgctccccagtgaaggccacagcaaccttctgcccatcctgtctgttcatggagagggtccctgcctcacctctgccattttgggttaggagaagtcaagttgggagcctgaaatagtggttcttggaaaaatggatccccagtgaaaactagagctctaagcccattcagcccatttcacacctgaaaatgttagtgatcaccacttggaccagcatccttaagtatcagaaagccccaagcaattgctgcatcttagtagggtgagggataagcaaaagaggatgttcaccataacccaggaatgaagataccatcagcaaagaatttcaatttgttcagtctttcatttagagctagtctttcacagtaccatctgaatacctctttgaaagaaggaagactttacgtagtgtagatttgttttgtgttgtttgaaaatattatctttgtaattatttttaatatgtaaggaatgcttggaatatctgctgtatgtcaactttatgcagcttccttttgagggacaaatttaaaacaaacaaccccccatcacaaacttaaaggattgcaagggccagatctgttaagtggtttcataggagacacatccagcaattgtgtggtcagtggctcttttacccaataagatacatcacagtcacatgcttgatggtttatgttgacctaagatttattttgttaaaatctctctctgttgtgttcgttcttgttctgttttgttttgttttttaaagtcttgctgtggtctctttgtggcagaagtgtttcatgcatggcagcaggcctgttgcttttttatggcgattcccattgaaaatgtaagtaaatgtctgtggccttgttctctctatggtaaagatattattcaccatgtaaaacaaaaaacaatatttattgtattttagtatatttatataattatgttattgaaaaaaattggcattaaaacttaaccgcatcagaagcctattgtaaatacaagttctatttaagtgtactaattaacatataatatatgttttaaatatagaatttttaatgtttttaaatatattttcaaagtacataaaa

SEQ ID NO: 111902 - DNA, 3988 bp, Homo sapiens
  Payload ID: 1934
  Gene Symbol: BDNF
  Gene Name: brain-derived neurotrophic factor
  Uniprot ID: P23560
  ENST ID: ENST00000395978
  CDS Start-End: 317-1060
gtgtgtaatccgggcgataggagtccattcagcaccttggacagagccaacggatttgtccgaggtggcggtacccccaggtagtcttcttggccccgctgtaaagccaaccctgtgtcgcccttaaaaagcgtcttttctgaggttcggctcacactgagatcggggctggagagagagtcagattttggagcggagcgtttggaaagcgagccccagtttggtcccctcattgagctcgctgaagttggcttcctagcggtgtaggctggaatagactcttggcaagctccggttccaccaggtgagaagagtgatgaccatccttttccttactatggttatttcatactttggttgcatgaaggctgcccccatgaaagaagcaaacatccgaggacaaggtggcttggcctacccaggtgtgcggacccatgggactctggagagcgtgaatgggcccaaggcaggttcaagaggcttgacatcattggctgacactttcgaacacgtgatagaagagctgttggatgaggaccagaaagttcggcccaatgaagaaaacaataaggacgcagacttgtacacgtccagggtgatgctcagtagtcaagtgcctttggagcctcctcttctctttctgctggaggaatacaaaaattacctagatgctgcaaacatgtccatgagggtccggcgccactctgaccctgcccgccgaggggagctgagcgtgtgtgacagtattagtgagtgggtaacggcggcagacaaaaagactgcagtggacatgtcgggcgggacggtcacagtccttgaaaaggtccctgtatcaaaaggccaactgaagcaatacttctacgagaccaagtgcaatcccatgggttacacaaaagaaggctgcaggggcatagacaaaaggcattggaactcccagtgccgaactacccagtcgtacgtgcgggcccttaccatggatagcaaaaagagaattggctggcgattcataaggatagacacttcttgtgtatgtacattgaccattaaaaggggaagatagtggatttatgttgtatagattagattatattgagacaaaaattatctatttgtatatatacataacagggtaaattattcagttaagaaaaaaataattttatgaactgcatgtataaatgaagtttatacagtacagtggttctacaatctatttattggacatgtccatgaccagaagggaaacagtcatttgcgcacaacttaaaaagtctgcattacattccttgataatgttgtggtttgttgccgttgccaagaactgaaaacataaaaagttaaaaaaaataataaattgcatgctgctttaattgtgaattgataataaactgtcctctttcagaaaacagaaaaaaaacacacacacacacaacaaaaatttgaaccaaaacattccgtttacattttagacagtaagtatcttcgttcttgttagtactatatctgttttactgcttttaacttctgatagcgttggaattaaaacaatgtcaaggtgctgttgtcattgctttactggcttaggggatgggggatggggggtatatttttgtttgttttgtgtttttttttcgtttgtttgttttgttttttagttcccacagggagtagagatggggaaagaattcctacaatatatattctggctgataaaagatacatttgtatgttgtgaagatgtttgcaatatcgatcagatgactagaaagtgaataaaaattaaggcaactgaacaaaaaaatgctcacactccacatcccgtgatgcacctcccaggccccgctcattctttgggcgttggtcagagtaagctgcttttgacggaaggacctatgtttgctcagaacacattctttccccccctccccctctggtctcctctttgttttgttttaaggaagaaaaatcagttgcgcgttctgaaatattttaccactgctgtgaacaagtgaacacattgtgtcacatcatgacactcgtataagcatggagaacagtgatttttttttagaacagaaaacaacaaaaaataaccccaaaatgaagattattttttatgaggagtgaacatttgggtaaatcatggctaagcttaaaaaaaactcatggtgaggcttaacaatgtcttgtaagcaaaaggtagagccctgtatcaacccagaaacacctagatcagaacaggaatccacattgccagtgacatgagactgaacagccaaatggaggctatgtggagttggcattgcatttaccggcagtgcgggaggaatttctgagtggccatcccaaggtctaggtggaggtggggcatggtatttgagacattccaaaacgaaggcctctgaaggacccttcagaggtggctctggaatgacatgtgtcaagctgcttggacctcgtgctttaagtgcctacattatctaactgtgctcaagaggttctcgactggaggaccacactcaagccgacttatgcccaccatcccacctctggataattttgcataaaattggattagcctggagcaggttgggagccaaatgtggcatttgtgatcatgagattgatgcaatgagatagaagatgtttgctacctgaacacttattgctttgaaactagacttgaggaaaccagggtttatcttttgagaacttttggtaagggaaaagggaacaggaaaagaaaccccaaactcaggccgaatgatcaaggggacccataggaaatcttgtccagagacaagacttcgggaaggtgtctggacattcagaacaccaagacttgaaggtgccttgctcaatggaagaggccaggacagagctgacaaaattttgctccccagtgaaggccacagcaaccttctgcccatcctgtctgttcatggagagggtccctgcctcacctctgccattttgggttaggagaagtcaagttgggagcctgaaatagtggttcttggaaaaatggatccccagtgaaaactagagctctaagcccattcagcccatttcacacctgaaaatgttagtgatcaccacttggaccagcatccttaagtatcagaaagccccaagcaattgctgcatcttagtagggtgagggataagcaaaagaggatgttcaccataacccaggaatgaagataccatcagcaaagaatttcaatttgttcagtctttcatttagagctagtctttcacagtaccatctgaatacctctttgaaagaaggaagactttacgtagtgtagatttgttttgtgttgtttgaaaatattatctttgtaattatttttaatatgtaaggaatgcttggaatatctgctgtatgtcaactttatgcagcttccttttgagggacaaatttaaaacaaacaaccccccatcacaaacttaaaggattgcaagggccagatctgttaagtggtttcataggagacacatccagcaattgtgtggtcagtggctcttttacccaataagatacatcacagtcacatgcttgatggtttatgttgacctaagatttattttgttaaaatctctctctgttgtgttcgttcttgttctgttttgttttgttttttaaagtcttgctgtggtctctttgtggcagaagtgtttcatgcatggcagcaggcctgttgcttttttatggcgattcccattgaaaatgtaagtaaatgtctgtggccttgttctctctatggtaaagatattattcaccatgtaaaacaaaaaacaatatttattgtattttagtatatttatataattatgttattgaaaaaaattggcattaaaacttaaccgcatcagaagcctattgtaaatacaagttctatttaagtgtactaattaacatataatatatgttttaaatatagaatttttaatgtttttaaatatattttcaaagtacataaaa

SEQ ID NO: 111903 - DNA, 4030 bp, Homo sapiens
  Payload ID: 1934
  Gene Symbol: BDNF
  Gene Name: brain-derived neurotrophic factor
  Uniprot ID: P23560
  ENST ID: ENST00000395980
  CDS Start-End: 359-1102
acccactttcccattcaccgcggagagggctgctctcgctgccgctccccccggcgaactagcatgaaatctccctgcctctgccgagatcaaatggagcttctcgctgatggggtgcgagtattacctccgccatgcaatttccactatcaataatttaacttctttgctgcagaacagaaggagtacataccgggcaccaaagactcgcgccccctcccccctttaattaagcgaagggaacgtgaaaaaataatagagtgtgggagttttggggccgaagtctttcccggagcagctgccttgatggttactttgacaagtagtgactgaaaagttccaccaggtgagaagagtgatgaccatccttttccttactatggttatttcatactttggttgcatgaaggctgcccccatgaaagaagcaaacatccgaggacaaggtggcttggcctacccaggtgtgcggacccatgggactctggagagcgtgaatgggcccaaggcaggttcaagaggcttgacatcattggctgacactttcgaacacgtgatagaagagctgttggatgaggaccagaaagttcggcccaatgaagaaaacaataaggacgcagacttgtacacgtccagggtgatgctcagtagtcaagtgcctttggagcctcctcttctctttctgctggaggaatacaaaaattacctagatgctgcaaacatgtccatgagggtccggcgccactctgaccctgcccgccgaggggagctgagcgtgtgtgacagtattagtgagtgggtaacggcggcagacaaaaagactgcagtggacatgtcgggcgggacggtcacagtccttgaaaaggtccctgtatcaaaaggccaactgaagcaatacttctacgagaccaagtgcaatcccatgggttacacaaaagaaggctgcaggggcatagacaaaaggcattggaactcccagtgccgaactacccagtcgtacgtgcgggcccttaccatggatagcaaaaagagaattggctggcgattcataaggatagacacttcttgtgtatgtacattgaccattaaaaggggaagatagtggatttatgttgtatagattagattatattgagacaaaaattatctatttgtatatatacataacagggtaaattattcagttaagaaaaaaataattttatgaactgcatgtataaatgaagtttatacagtacagtggttctacaatctatttattggacatgtccatgaccagaagggaaacagtcatttgcgcacaacttaaaaagtctgcattacattccttgataatgttgtggtttgttgccgttgccaagaactgaaaacataaaaagttaaaaaaaataataaattgcatgctgctttaattgtgaattgataataaactgtcctctttcagaaaacagaaaaaaaacacacacacacacaacaaaaatttgaaccaaaacattccgtttacattttagacagtaagtatcttcgttcttgttagtactatatctgttttactgcttttaacttctgatagcgttggaattaaaacaatgtcaaggtgctgttgtcattgctttactggcttaggggatgggggatggggggtatatttttgtttgttttgtgtttttttttcgtttgtttgttttgttttttagttcccacagggagtagagatggggaaagaattcctacaatatatattctggctgataaaagatacatttgtatgttgtgaagatgtttgcaatatcgatcagatgactagaaagtgaataaaaattaaggcaactgaacaaaaaaatgctcacactccacatcccgtgatgcacctcccaggccccgctcattctttgggcgttggtcagagtaagctgcttttgacggaaggacctatgtttgctcagaacacattctttccccccctccccctctggtctcctctttgttttgttttaaggaagaaaaatcagttgcgcgttctgaaatattttaccactgctgtgaacaagtgaacacattgtgtcacatcatgacactcgtataagcatggagaacagtgatttttttttagaacagaaaacaacaaaaaataaccccaaaatgaagattattttttatgaggagtgaacatttgggtaaatcatggctaagcttaaaaaaaactcatggtgaggcttaacaatgtcttgtaagcaaaaggtagagccctgtatcaacccagaaacacctagatcagaacaggaatccacattgccagtgacatgagactgaacagccaaatggaggctatgtggagttggcattgcatttaccggcagtgcgggaggaatttctgagtggccatcccaaggtctaggtggaggtggggcatggtatttgagacattccaaaacgaaggcctctgaaggacccttcagaggtggctctggaatgacatgtgtcaagctgcttggacctcgtgctttaagtgcctacattatctaactgtgctcaagaggttctcgactggaggaccacactcaagccgacttatgcccaccatcccacctctggataattttgcataaaattggattagcctggagcaggttgggagccaaatgtggcatttgtgatcatgagattgatgcaatgagatagaagatgtttgctacctgaacacttattgctttgaaactagacttgaggaaaccagggtttatcttttgagaacttttggtaagggaaaagggaacaggaaaagaaaccccaaactcaggccgaatgatcaaggggacccataggaaatcttgtccagagacaagacttcgggaaggtgtctggacattcagaacaccaagacttgaaggtgccttgctcaatggaagaggccaggacagagctgacaaaattttgctccccagtgaaggccacagcaaccttctgcccatcctgtctgttcatggagagggtccctgcctcacctctgccattttgggttaggagaagtcaagttgggagcctgaaatagtggttcttggaaaaatggatccccagtgaaaactagagctctaagcccattcagcccatttcacacctgaaaatgttagtgatcaccacttggaccagcatccttaagtatcagaaagccccaagcaattgctgcatcttagtagggtgagggataagcaaaagaggatgttcaccataacccaggaatgaagataccatcagcaaagaatttcaatttgttcagtctttcatttagagctagtctttcacagtaccatctgaatacctctttgaaagaaggaagactttacgtagtgtagatttgttttgtgttgtttgaaaatattatctttgtaattatttttaatatgtaaggaatgcttggaatatctgctgtatgtcaactttatgcagcttccttttgagggacaaatttaaaacaaacaaccccccatcacaaacttaaaggattgcaagggccagatctgttaagtggtttcataggagacacatccagcaattgtgtggtcagtggctcttttacccaataagatacatcacagtcacatgcttgatggtttatgttgacctaagatttattttgttaaaatctctctctgttgtgttcgttcttgttctgttttgttttgttttttaaagtcttgctgtggtctctttgtggcagaagtgtttcatgcatggcagcaggcctgttgcttttttatggcgattcccattgaaaatgtaagtaaatgtctgtggccttgttctctctatggtaaagatattattcaccatgtaaaacaaaaaacaatatttattgtattttagtatatttatataattatgttattgaaaaaaattggcattaaaacttaaccgcatcagaagcctattgtaaatacaagttctatttaagtgtactaattaacatataatatatgttttaaatatagaatttttaatgtttttaaatatattttcaaagtacataaaa

SEQ ID NO: 111904 - DNA, 4071 bp, Homo sapiens
  Payload ID: 1934
  Gene Symbol: BDNF
  Gene Name: brain-derived neurotrophic factor
  Uniprot ID: P23560
  ENST ID: ENST00000395981
  CDS Start-End: 400-1143
gtgtgtaatccgggcgataggagtccattcagcaccttggacagagccaacggatttgtccgaggtggcggtacccccaggtagtcttcttggccccgctgtaaagccaaccctgtgtcgcccttaaaaagcgtcttttctgaggttcggctcacactgagatcggggctggagagagagtcagattttggagcggagcgtttggaaagcgagccccagtttggtcccctcattgagctcgctgaagttggcttcctagcggtgtaggctggaatagactcttggcaagctccgggttggtatactgggttaactttgggaaatgcaagtgtttatctccaggatctagccaccggggtggtgtaagccgcaaagaagttccaccaggtgagaagagtgatgaccatccttttccttactatggttatttcatactttggttgcatgaaggctgcccccatgaaagaagcaaacatccgaggacaaggtggcttggcctacccaggtgtgcggacccatgggactctggagagcgtgaatgggcccaaggcaggttcaagaggcttgacatcattggctgacactttcgaacacgtgatagaagagctgttggatgaggaccagaaagttcggcccaatgaagaaaacaataaggacgcagacttgtacacgtccagggtgatgctcagtagtcaagtgcctttggagcctcctcttctctttctgctggaggaatacaaaaattacctagatgctgcaaacatgtccatgagggtccggcgccactctgaccctgcccgccgaggggagctgagcgtgtgtgacagtattagtgagtgggtaacggcggcagacaaaaagactgcagtggacatgtcgggcgggacggtcacagtccttgaaaaggtccctgtatcaaaaggccaactgaagcaatacttctacgagaccaagtgcaatcccatgggttacacaaaagaaggctgcaggggcatagacaaaaggcattggaactcccagtgccgaactacccagtcgtacgtgcgggcccttaccatggatagcaaaaagagaattggctggcgattcataaggatagacacttcttgtgtatgtacattgaccattaaaaggggaagatagtggatttatgttgtatagattagattatattgagacaaaaattatctatttgtatatatacataacagggtaaattattcagttaagaaaaaaataattttatgaactgcatgtataaatgaagtttatacagtacagtggttctacaatctatttattggacatgtccatgaccagaagggaaacagtcatttgcgcacaacttaaaaagtctgcattacattccttgataatgttgtggtttgttgccgttgccaagaactgaaaacataaaaagttaaaaaaaataataaattgcatgctgctttaattgtgaattgataataaactgtcctctttcagaaaacagaaaaaaaacacacacacacacaacaaaaatttgaaccaaaacattccgtttacattttagacagtaagtatcttcgttcttgttagtactatatctgttttactgcttttaacttctgatagcgttggaattaaaacaatgtcaaggtgctgttgtcattgctttactggcttaggggatgggggatggggggtatatttttgtttgttttgtgtttttttttcgtttgtttgttttgttttttagttcccacagggagtagagatggggaaagaattcctacaatatatattctggctgataaaagatacatttgtatgttgtgaagatgtttgcaatatcgatcagatgactagaaagtgaataaaaattaaggcaactgaacaaaaaaatgctcacactccacatcccgtgatgcacctcccaggccccgctcattctttgggcgttggtcagagtaagctgcttttgacggaaggacctatgtttgctcagaacacattctttccccccctccccctctggtctcctctttgttttgttttaaggaagaaaaatcagttgcgcgttctgaaatattttaccactgctgtgaacaagtgaacacattgtgtcacatcatgacactcgtataagcatggagaacagtgatttttttttagaacagaaaacaacaaaaaataaccccaaaatgaagattattttttatgaggagtgaacatttgggtaaatcatggctaagcttaaaaaaaactcatggtgaggcttaacaatgtcttgtaagcaaaaggtagagccctgtatcaacccagaaacacctagatcagaacaggaatccacattgccagtgacatgagactgaacagccaaatggaggctatgtggagttggcattgcatttaccggcagtgcgggaggaatttctgagtggccatcccaaggtctaggtggaggtggggcatggtatttgagacattccaaaacgaaggcctctgaaggacccttcagaggtggctctggaatgacatgtgtcaagctgcttggacctcgtgctttaagtgcctacattatctaactgtgctcaagaggttctcgactggaggaccacactcaagccgacttatgcccaccatcccacctctggataattttgcataaaattggattagcctggagcaggttgggagccaaatgtggcatttgtgatcatgagattgatgcaatgagatagaagatgtttgctacctgaacacttattgctttgaaactagacttgaggaaaccagggtttatcttttgagaacttttggtaagggaaaagggaacaggaaaagaaaccccaaactcaggccgaatgatcaaggggacccataggaaatcttgtccagagacaagacttcgggaaggtgtctggacattcagaacaccaagacttgaaggtgccttgctcaatggaagaggccaggacagagctgacaaaattttgctccccagtgaaggccacagcaaccttctgcccatcctgtctgttcatggagagggtccctgcctcacctctgccattttgggttaggagaagtcaagttgggagcctgaaatagtggttcttggaaaaatggatccccagtgaaaactagagctctaagcccattcagcccatttcacacctgaaaatgttagtgatcaccacttggaccagcatccttaagtatcagaaagccccaagcaattgctgcatcttagtagggtgagggataagcaaaagaggatgttcaccataacccaggaatgaagataccatcagcaaagaatttcaatttgttcagtctttcatttagagctagtctttcacagtaccatctgaatacctctttgaaagaaggaagactttacgtagtgtagatttgttttgtgttgtttgaaaatattatctttgtaattatttttaatatgtaaggaatgcttggaatatctgctgtatgtcaactttatgcagcttccttttgagggacaaatttaaaacaaacaaccccccatcacaaacttaaaggattgcaagggccagatctgttaagtggtttcataggagacacatccagcaattgtgtggtcagtggctcttttacccaataagatacatcacagtcacatgcttgatggtttatgttgacctaagatttattttgttaaaatctctctctgttgtgttcgttcttgttctgttttgttttgttttttaaagtcttgctgtggtctctttgtggcagaagtgtttcatgcatggcagcaggcctgttgcttttttatggcgattcccattgaaaatgtaagtaaatgtctgtggccttgttctctctatggtaaagatattattcaccatgtaaaacaaaaaacaatatttattgtattttagtatatttatataattatgttattgaaaaaaattggcattaaaacttaaccgcatcagaagcctattgtaaatacaagttctatttaagtgtactaattaacatataatatatgttttaaatatagaatttttaatgtttttaaatatattttcaaagtacataaaa

SEQ ID NO: 111905 - DNA, 3776 bp, Homo sapiens
  Payload ID: 1934
  Gene Symbol: BDNF
  Gene Name: brain-derived neurotrophic factor
  Uniprot ID: P23560
  ENST ID: ENST00000395983
  CDS Start-End: 105-848
gtaaaccaatagcccccatgctctgtgcgatttcattgtgtgctcgcgttcgcaagctccgtagtgcaggaaggtgcgggaagttccaccaggtgagaagagtgatgaccatccttttccttactatggttatttcatactttggttgcatgaaggctgcccccatgaaagaagcaaacatccgaggacaaggtggcttggcctacccaggtgtgcggacccatgggactctggagagcgtgaatgggcccaaggcaggttcaagaggcttgacatcattggctgacactttcgaacacgtgatagaagagctgttggatgaggaccagaaagttcggcccaatgaagaaaacaataaggacgcagacttgtacacgtccagggtgatgctcagtagtcaagtgcctttggagcctcctcttctctttctgctggaggaatacaaaaattacctagatgctgcaaacatgtccatgagggtccggcgccactctgaccctgcccgccgaggggagctgagcgtgtgtgacagtattagtgagtgggtaacggcggcagacaaaaagactgcagtggacatgtcgggcgggacggtcacagtccttgaaaaggtccctgtatcaaaaggccaactgaagcaatacttctacgagaccaagtgcaatcccatgggttacacaaaagaaggctgcaggggcatagacaaaaggcattggaactcccagtgccgaactacccagtcgtacgtgcgggcccttaccatggatagcaaaaagagaattggctggcgattcataaggatagacacttcttgtgtatgtacattgaccattaaaaggggaagatagtggatttatgttgtatagattagattatattgagacaaaaattatctatttgtatatatacataacagggtaaattattcagttaagaaaaaaataattttatgaactgcatgtataaatgaagtttatacagtacagtggttctacaatctatttattggacatgtccatgaccagaagggaaacagtcatttgcgcacaacttaaaaagtctgcattacattccttgataatgttgtggtttgttgccgttgccaagaactgaaaacataaaaagttaaaaaaaataataaattgcatgctgctttaattgtgaattgataataaactgtcctctttcagaaaacagaaaaaaaacacacacacacacaacaaaaatttgaaccaaaacattccgtttacattttagacagtaagtatcttcgttcttgttagtactatatctgttttactgcttttaacttctgatagcgttggaattaaaacaatgtcaaggtgctgttgtcattgctttactggcttaggggatgggggatggggggtatatttttgtttgttttgtgtttttttttcgtttgtttgttttgttttttagttcccacagggagtagagatggggaaagaattcctacaatatatattctggctgataaaagatacatttgtatgttgtgaagatgtttgcaatatcgatcagatgactagaaagtgaataaaaattaaggcaactgaacaaaaaaatgctcacactccacatcccgtgatgcacctcccaggccccgctcattctttgggcgttggtcagagtaagctgcttttgacggaaggacctatgtttgctcagaacacattctttccccccctccccctctggtctcctctttgttttgttttaaggaagaaaaatcagttgcgcgttctgaaatattttaccactgctgtgaacaagtgaacacattgtgtcacatcatgacactcgtataagcatggagaacagtgatttttttttagaacagaaaacaacaaaaaataaccccaaaatgaagattattttttatgaggagtgaacatttgggtaaatcatggctaagcttaaaaaaaactcatggtgaggcttaacaatgtcttgtaagcaaaaggtagagccctgtatcaacccagaaacacctagatcagaacaggaatccacattgccagtgacatgagactgaacagccaaatggaggctatgtggagttggcattgcatttaccggcagtgcgggaggaatttctgagtggccatcccaaggtctaggtggaggtggggcatggtatttgagacattccaaaacgaaggcctctgaaggacccttcagaggtggctctggaatgacatgtgtcaagctgcttggacctcgtgctttaagtgcctacattatctaactgtgctcaagaggttctcgactggaggaccacactcaagccgacttatgcccaccatcccacctctggataattttgcataaaattggattagcctggagcaggttgggagccaaatgtggcatttgtgatcatgagattgatgcaatgagatagaagatgtttgctacctgaacacttattgctttgaaactagacttgaggaaaccagggtttatcttttgagaacttttggtaagggaaaagggaacaggaaaagaaaccccaaactcaggccgaatgatcaaggggacccataggaaatcttgtccagagacaagacttcgggaaggtgtctggacattcagaacaccaagacttgaaggtgccttgctcaatggaagaggccaggacagagctgacaaaattttgctccccagtgaaggccacagcaaccttctgcccatcctgtctgttcatggagagggtccctgcctcacctctgccattttgggttaggagaagtcaagttgggagcctgaaatagtggttcttggaaaaatggatccccagtgaaaactagagctctaagcccattcagcccatttcacacctgaaaatgttagtgatcaccacttggaccagcatccttaagtatcagaaagccccaagcaattgctgcatcttagtagggtgagggataagcaaaagaggatgttcaccataacccaggaatgaagataccatcagcaaagaatttcaatttgttcagtctttcatttagagctagtctttcacagtaccatctgaatacctctttgaaagaaggaagactttacgtagtgtagatttgttttgtgttgtttgaaaatattatctttgtaattatttttaatatgtaaggaatgcttggaatatctgctgtatgtcaactttatgcagcttccttttgagggacaaatttaaaacaaacaaccccccatcacaaacttaaaggattgcaagggccagatctgttaagtggtttcataggagacacatccagcaattgtgtggtcagtggctcttttacccaataagatacatcacagtcacatgcttgatggtttatgttgacctaagatttattttgttaaaatctctctctgttgtgttcgttcttgttctgttttgttttgttttttaaagtcttgctgtggtctctttgtggcagaagtgtttcatgcatggcagcaggcctgttgcttttttatggcgattcccattgaaaatgtaagtaaatgtctgtggccttgttctctctatggtaaagatattattcaccatgtaaaacaaaaaacaatatttattgtattttagtatatttatataattatgttattgaaaaaaattggcattaaaacttaaccgcatcagaagcctattgtaaatacaagttctatttaagtgtactaattaacatataatatatgttttaaatatagaatttttaatgtttttaaatatattttcaaagtacataaaa

SEQ ID NO: 111906 - DNA, 3979 bp, Homo sapiens
  Payload ID: 1934
  Gene Symbol: BDNF
  Gene Name: brain-derived neurotrophic factor
  Uniprot ID: P23560
  ENST ID: ENST00000395986
  CDS Start-End: 263-1051
acacggctacctgctccccaggaattgagactgaagtggacttacaagtccgaagccaatgtagcttggaaaacttgggaggcggaattcctaccgctgggaactgaaagggtctgcgacactctcgggcaggccgaacccacatctctacccatcctgcgcccctcttctgaagcgccctccagggaagttaagagttttgactttcggggagtggttgggatgtacgtgggggattcttgactcgggttagtctctggggatgcagagccgggaagaggaatggttccaccaggtgagaagagtgatgaccatccttttccttactatggttatttcatactttggttgcatgaaggctgcccccatgaaagaagcaaacatccgaggacaaggtggcttggcctacccaggtgtgcggacccatgggactctggagagcgtgaatgggcccaaggcaggttcaagaggcttgacatcattggctgacactttcgaacacgtgatagaagagctgttggatgaggaccagaaagttcggcccaatgaagaaaacaataaggacgcagacttgtacacgtccagggtgatgctcagtagtcaagtgcctttggagcctcctcttctctttctgctggaggaatacaaaaattacctagatgctgcaaacatgtccatgagggtccggcgccactctgaccctgcccgccgaggggagctgagcgtgtgtgacagtattagtgagtgggtaacggcggcagacaaaaagactgcagtggacatgtcgggcgggacggtcacagtccttgaaaaggtccctgtatcaaaaggccaactgaagcaatacttctacgagaccaagtgcaatcccatgggttacacaaaagaaggctgcaggggcatagacaaaaggcattggaactcccagtgccgaactacccagtcgtacgtgcgggcccttaccatggatagcaaaaagagaattggctggcgattcataaggatagacacttcttgtgtatgtacattgaccattaaaaggggaagatagtggatttatgttgtatagattagattatattgagacaaaaattatctatttgtatatatacataacagggtaaattattcagttaagaaaaaaataattttatgaactgcatgtataaatgaagtttatacagtacagtggttctacaatctatttattggacatgtccatgaccagaagggaaacagtcatttgcgcacaacttaaaaagtctgcattacattccttgataatgttgtggtttgttgccgttgccaagaactgaaaacataaaaagttaaaaaaaataataaattgcatgctgctttaattgtgaattgataataaactgtcctctttcagaaaacagaaaaaaaacacacacacacacaacaaaaatttgaaccaaaacattccgtttacattttagacagtaagtatcttcgttcttgttagtactatatctgttttactgcttttaacttctgatagcgttggaattaaaacaatgtcaaggtgctgttgtcattgctttactggcttaggggatgggggatggggggtatatttttgtttgttttgtgtttttttttcgtttgtttgttttgttttttagttcccacagggagtagagatggggaaagaattcctacaatatatattctggctgataaaagatacatttgtatgttgtgaagatgtttgcaatatcgatcagatgactagaaagtgaataaaaattaaggcaactgaacaaaaaaatgctcacactccacatcccgtgatgcacctcccaggccccgctcattctttgggcgttggtcagagtaagctgcttttgacggaaggacctatgtttgctcagaacacattctttccccccctccccctctggtctcctctttgttttgttttaaggaagaaaaatcagttgcgcgttctgaaatattttaccactgctgtgaacaagtgaacacattgtgtcacatcatgacactcgtataagcatggagaacagtgatttttttttagaacagaaaacaacaaaaaataaccccaaaatgaagattattttttatgaggagtgaacatttgggtaaatcatggctaagcttaaaaaaaactcatggtgaggcttaacaatgtcttgtaagcaaaaggtagagccctgtatcaacccagaaacacctagatcagaacaggaatccacattgccagtgacatgagactgaacagccaaatggaggctatgtggagttggcattgcatttaccggcagtgcgggaggaatttctgagtggccatcccaaggtctaggtggaggtggggcatggtatttgagacattccaaaacgaaggcctctgaaggacccttcagaggtggctctggaatgacatgtgtcaagctgcttggacctcgtgctttaagtgcctacattatctaactgtgctcaagaggttctcgactggaggaccacactcaagccgacttatgcccaccatcccacctctggataattttgcataaaattggattagcctggagcaggttgggagccaaatgtggcatttgtgatcatgagattgatgcaatgagatagaagatgtttgctacctgaacacttattgctttgaaactagacttgaggaaaccagggtttatcttttgagaacttttggtaagggaaaagggaacaggaaaagaaaccccaaactcaggccgaatgatcaaggggacccataggaaatcttgtccagagacaagacttcgggaaggtgtctggacattcagaacaccaagacttgaaggtgccttgctcaatggaagaggccaggacagagctgacaaaattttgctccccagtgaaggccacagcaaccttctgcccatcctgtctgttcatggagagggtccctgcctcacctctgccattttgggttaggagaagtcaagttgggagcctgaaatagtggttcttggaaaaatggatccccagtgaaaactagagctctaagcccattcagcccatttcacacctgaaaatgttagtgatcaccacttggaccagcatccttaagtatcagaaagccccaagcaattgctgcatcttagtagggtgagggataagcaaaagaggatgttcaccataacccaggaatgaagataccatcagcaaagaatttcaatttgttcagtctttcatttagagctagtctttcacagtaccatctgaatacctctttgaaagaaggaagactttacgtagtgtagatttgttttgtgttgtttgaaaatattatctttgtaattatttttaatatgtaaggaatgcttggaatatctgctgtatgtcaactttatgcagcttccttttgagggacaaatttaaaacaaacaaccccccatcacaaacttaaaggattgcaagggccagatctgttaagtggtttcataggagacacatccagcaattgtgtggtcagtggctcttttacccaataagatacatcacagtcacatgcttgatggtttatgttgacctaagatttattttgttaaaatctctctctgttgtgttcgttcttgttctgttttgttttgttttttaaagtcttgctgtggtctctttgtggcagaagtgtttcatgcatggcagcaggcctgttgcttttttatggcgattcccattgaaaatgtaagtaaatgtctgtggccttgttctctctatggtaaagatattattcaccatgtaaaacaaaaaacaatatttattgtattttagtatatttatataattatgttattgaaaaaaattggcattaaaacttaaccgcatcagaagcctattgtaaatacaagttctatttaagtgtactaattaacatataatatatgttttaaatatagaatttttaatgtttttaaatatattttcaaagtacataaaa

SEQ ID NO: 111907 - DNA, 4532 bp, Homo sapiens
  Payload ID: 1934
  Gene Symbol: BDNF
  Gene Name: brain-derived neurotrophic factor
  Uniprot ID: P23560
  ENST ID: ENST00000439476
  CDS Start-End: 861-1604
gcgcgcgcgcacacacacacacacacacagagagaacatctctagtaaaaagaaaagttgagctttcttagctagatgtgtgtattagccagaaaaagccaaggagtgaagggttttagagaactggaggagataaagtggagtctgcatatgggaggcatttgaaatggacttaaatgtctttttaatgctgactttttcagttttctccttaccagacacattgttttcatgacattagccccaggcatagacacatcattaaaatgaacatgtcaaaaaatgatttctgtttagaaataagcaaaacattttcagttgtgaccacccaggtgtagaataaagaacagtggaattgggagccctgagttctaacataaactttcttcatgacataaggcaagtcttctatggcctttggtttccttacctgtaaaacaggatggctcaatgaaattatctttcttctttgctataatagagtatctctgtgggaagaggaaaaaaaaagtcaatttaaaggctccttatagttccccaactgctgttttattgtgctattcatgcctagacatcacatagctagaaaggcccatcagacccctcaggccactgctgttcctgtcacacattcctgcaaaggaccatgttgctaacttgaaaaaaattactattaattacacttgcagttgttgcttagtaacatttatgattttgtgtttctcgtgacagcatgagcagagatcattaaaaattaaacttacaaagctgctaaagtgggaagaaggagaacttgaagccacaatttttgcacttgcttagaagccatctaatctcagttccaccaggtgagaagagtgatgaccatccttttccttactatggttatttcatactttggttgcatgaaggctgcccccatgaaagaagcaaacatccgaggacaaggtggcttggcctacccaggtgtgcggacccatgggactctggagagcgtgaatgggcccaaggcaggttcaagaggcttgacatcattggctgacactttcgaacacgtgatagaagagctgttggatgaggaccagaaagttcggcccaatgaagaaaacaataaggacgcagacttgtacacgtccagggtgatgctcagtagtcaagtgcctttggagcctcctcttctctttctgctggaggaatacaaaaattacctagatgctgcaaacatgtccatgagggtccggcgccactctgaccctgcccgccgaggggagctgagcgtgtgtgacagtattagtgagtgggtaacggcggcagacaaaaagactgcagtggacatgtcgggcgggacggtcacagtccttgaaaaggtccctgtatcaaaaggccaactgaagcaatacttctacgagaccaagtgcaatcccatgggttacacaaaagaaggctgcaggggcatagacaaaaggcattggaactcccagtgccgaactacccagtcgtacgtgcgggcccttaccatggatagcaaaaagagaattggctggcgattcataaggatagacacttcttgtgtatgtacattgaccattaaaaggggaagatagtggatttatgttgtatagattagattatattgagacaaaaattatctatttgtatatatacataacagggtaaattattcagttaagaaaaaaataattttatgaactgcatgtataaatgaagtttatacagtacagtggttctacaatctatttattggacatgtccatgaccagaagggaaacagtcatttgcgcacaacttaaaaagtctgcattacattccttgataatgttgtggtttgttgccgttgccaagaactgaaaacataaaaagttaaaaaaaataataaattgcatgctgctttaattgtgaattgataataaactgtcctctttcagaaaacagaaaaaaaacacacacacacacaacaaaaatttgaaccaaaacattccgtttacattttagacagtaagtatcttcgttcttgttagtactatatctgttttactgcttttaacttctgatagcgttggaattaaaacaatgtcaaggtgctgttgtcattgctttactggcttaggggatgggggatggggggtatatttttgtttgttttgtgtttttttttcgtttgtttgttttgttttttagttcccacagggagtagagatggggaaagaattcctacaatatatattctggctgataaaagatacatttgtatgttgtgaagatgtttgcaatatcgatcagatgactagaaagtgaataaaaattaaggcaactgaacaaaaaaatgctcacactccacatcccgtgatgcacctcccaggccccgctcattctttgggcgttggtcagagtaagctgcttttgacggaaggacctatgtttgctcagaacacattctttccccccctccccctctggtctcctctttgttttgttttaaggaagaaaaatcagttgcgcgttctgaaatattttaccactgctgtgaacaagtgaacacattgtgtcacatcatgacactcgtataagcatggagaacagtgatttttttttagaacagaaaacaacaaaaaataaccccaaaatgaagattattttttatgaggagtgaacatttgggtaaatcatggctaagcttaaaaaaaactcatggtgaggcttaacaatgtcttgtaagcaaaaggtagagccctgtatcaacccagaaacacctagatcagaacaggaatccacattgccagtgacatgagactgaacagccaaatggaggctatgtggagttggcattgcatttaccggcagtgcgggaggaatttctgagtggccatcccaaggtctaggtggaggtggggcatggtatttgagacattccaaaacgaaggcctctgaaggacccttcagaggtggctctggaatgacatgtgtcaagctgcttggacctcgtgctttaagtgcctacattatctaactgtgctcaagaggttctcgactggaggaccacactcaagccgacttatgcccaccatcccacctctggataattttgcataaaattggattagcctggagcaggttgggagccaaatgtggcatttgtgatcatgagattgatgcaatgagatagaagatgtttgctacctgaacacttattgctttgaaactagacttgaggaaaccagggtttatcttttgagaacttttggtaagggaaaagggaacaggaaaagaaaccccaaactcaggccgaatgatcaaggggacccataggaaatcttgtccagagacaagacttcgggaaggtgtctggacattcagaacaccaagacttgaaggtgccttgctcaatggaagaggccaggacagagctgacaaaattttgctccccagtgaaggccacagcaaccttctgcccatcctgtctgttcatggagagggtccctgcctcacctctgccattttgggttaggagaagtcaagttgggagcctgaaatagtggttcttggaaaaatggatccccagtgaaaactagagctctaagcccattcagcccatttcacacctgaaaatgttagtgatcaccacttggaccagcatccttaagtatcagaaagccccaagcaattgctgcatcttagtagggtgagggataagcaaaagaggatgttcaccataacccaggaatgaagataccatcagcaaagaatttcaatttgttcagtctttcatttagagctagtctttcacagtaccatctgaatacctctttgaaagaaggaagactttacgtagtgtagatttgttttgtgttgtttgaaaatattatctttgtaattatttttaatatgtaaggaatgcttggaatatctgctgtatgtcaactttatgcagcttccttttgagggacaaatttaaaacaaacaaccccccatcacaaacttaaaggattgcaagggccagatctgttaagtggtttcataggagacacatccagcaattgtgtggtcagtggctcttttacccaataagatacatcacagtcacatgcttgatggtttatgttgacctaagatttattttgttaaaatctctctctgttgtgttcgttcttgttctgttttgttttgttttttaaagtcttgctgtggtctctttgtggcagaagtgtttcatgcatggcagcaggcctgttgcttttttatggcgattcccattgaaaatgtaagtaaatgtctgtggccttgttctctctatggtaaagatattattcaccatgtaaaacaaaaaacaatatttattgtattttagtatatttatataattatgttattgaaaaaaattggcattaaaacttaaccgcatcagaagcctattgtaaatacaagttctatttaagtgtactaattaacatataatatatgttttaaatatagaatttttaatgtttttaaatatattttcaaagtacataaaa

SEQ ID NO: 111908 - DNA, 4176 bp, Homo sapiens
  Payload ID: 1934
  Gene Symbol: BDNF
  Gene Name: brain-derived neurotrophic factor
  Uniprot ID: P23560
  ENST ID: ENST00000420794
  CDS Start-End: 505-1248
gtaaaccaatagcccccatgctctgtgcgatttcattgtgtgctcgcgttcgcaagctccgtagtgcaggaaggtgcgggaagttaagtaattaaaagaaattatagagtgggatgcaaaaataacccgaaggacaactggatgtgtggagccaccagttttctccatgagtgcacaaggttaatccttgttactactcagaatgctgagtttctacagaaagggttgcaggtccacacatgttttggcgtctacccacacgcttctgtatggcatgactgtgcatcccagaagaagggctgtgctgtgtacctccacgtttcagtggaatttaacaaactgatccctgaaaatggtttcataaagggatggtaataaagtctcttagtggttgaaaatgttatttcttacaaaagtggagaacatttgcttttcaataccagagttttcagccatttctgcattctgacctattgactggagttccaccaggtgagaagagtgatgaccatccttttccttactatggttatttcatactttggttgcatgaaggctgcccccatgaaagaagcaaacatccgaggacaaggtggcttggcctacccaggtgtgcggacccatgggactctggagagcgtgaatgggcccaaggcaggttcaagaggcttgacatcattggctgacactttcgaacacgtgatagaagagctgttggatgaggaccagaaagttcggcccaatgaagaaaacaataaggacgcagacttgtacacgtccagggtgatgctcagtagtcaagtgcctttggagcctcctcttctctttctgctggaggaatacaaaaattacctagatgctgcaaacatgtccatgagggtccggcgccactctgaccctgcccgccgaggggagctgagcgtgtgtgacagtattagtgagtgggtaacggcggcagacaaaaagactgcagtggacatgtcgggcgggacggtcacagtccttgaaaaggtccctgtatcaaaaggccaactgaagcaatacttctacgagaccaagtgcaatcccatgggttacacaaaagaaggctgcaggggcatagacaaaaggcattggaactcccagtgccgaactacccagtcgtacgtgcgggcccttaccatggatagcaaaaagagaattggctggcgattcataaggatagacacttcttgtgtatgtacattgaccattaaaaggggaagatagtggatttatgttgtatagattagattatattgagacaaaaattatctatttgtatatatacataacagggtaaattattcagttaagaaaaaaataattttatgaactgcatgtataaatgaagtttatacagtacagtggttctacaatctatttattggacatgtccatgaccagaagggaaacagtcatttgcgcacaacttaaaaagtctgcattacattccttgataatgttgtggtttgttgccgttgccaagaactgaaaacataaaaagttaaaaaaaataataaattgcatgctgctttaattgtgaattgataataaactgtcctctttcagaaaacagaaaaaaaacacacacacacacaacaaaaatttgaaccaaaacattccgtttacattttagacagtaagtatcttcgttcttgttagtactatatctgttttactgcttttaacttctgatagcgttggaattaaaacaatgtcaaggtgctgttgtcattgctttactggcttaggggatgggggatggggggtatatttttgtttgttttgtgtttttttttcgtttgtttgttttgttttttagttcccacagggagtagagatggggaaagaattcctacaatatatattctggctgataaaagatacatttgtatgttgtgaagatgtttgcaatatcgatcagatgactagaaagtgaataaaaattaaggcaactgaacaaaaaaatgctcacactccacatcccgtgatgcacctcccaggccccgctcattctttgggcgttggtcagagtaagctgcttttgacggaaggacctatgtttgctcagaacacattctttccccccctccccctctggtctcctctttgttttgttttaaggaagaaaaatcagttgcgcgttctgaaatattttaccactgctgtgaacaagtgaacacattgtgtcacatcatgacactcgtataagcatggagaacagtgatttttttttagaacagaaaacaacaaaaaataaccccaaaatgaagattattttttatgaggagtgaacatttgggtaaatcatggctaagcttaaaaaaaactcatggtgaggcttaacaatgtcttgtaagcaaaaggtagagccctgtatcaacccagaaacacctagatcagaacaggaatccacattgccagtgacatgagactgaacagccaaatggaggctatgtggagttggcattgcatttaccggcagtgcgggaggaatttctgagtggccatcccaaggtctaggtggaggtggggcatggtatttgagacattccaaaacgaaggcctctgaaggacccttcagaggtggctctggaatgacatgtgtcaagctgcttggacctcgtgctttaagtgcctacattatctaactgtgctcaagaggttctcgactggaggaccacactcaagccgacttatgcccaccatcccacctctggataattttgcataaaattggattagcctggagcaggttgggagccaaatgtggcatttgtgatcatgagattgatgcaatgagatagaagatgtttgctacctgaacacttattgctttgaaactagacttgaggaaaccagggtttatcttttgagaacttttggtaagggaaaagggaacaggaaaagaaaccccaaactcaggccgaatgatcaaggggacccataggaaatcttgtccagagacaagacttcgggaaggtgtctggacattcagaacaccaagacttgaaggtgccttgctcaatggaagaggccaggacagagctgacaaaattttgctccccagtgaaggccacagcaaccttctgcccatcctgtctgttcatggagagggtccctgcctcacctctgccattttgggttaggagaagtcaagttgggagcctgaaatagtggttcttggaaaaatggatccccagtgaaaactagagctctaagcccattcagcccatttcacacctgaaaatgttagtgatcaccacttggaccagcatccttaagtatcagaaagccccaagcaattgctgcatcttagtagggtgagggataagcaaaagaggatgttcaccataacccaggaatgaagataccatcagcaaagaatttcaatttgttcagtctttcatttagagctagtctttcacagtaccatctgaatacctctttgaaagaaggaagactttacgtagtgtagatttgttttgtgttgtttgaaaatattatctttgtaattatttttaatatgtaaggaatgcttggaatatctgctgtatgtcaactttatgcagcttccttttgagggacaaatttaaaacaaacaaccccccatcacaaacttaaaggattgcaagggccagatctgttaagtggtttcataggagacacatccagcaattgtgtggtcagtggctcttttacccaataagatacatcacagtcacatgcttgatggtttatgttgacctaagatttattttgttaaaatctctctctgttgtgttcgttcttgttctgttttgttttgttttttaaagtcttgctgtggtctctttgtggcagaagtgtttcatgcatggcagcaggcctgttgcttttttatggcgattcccattgaaaatgtaagtaaatgtctgtggccttgttctctctatggtaaagatattattcaccatgtaaaacaaaaaacaatatttattgtattttagtatatttatataattatgttattgaaaaaaattggcattaaaacttaaccgcatcagaagcctattgtaaatacaagttctatttaagtgtactaattaacatataatatatgttttaaatatagaatttttaatgtttttaaatatattttcaaagtacataaaa

SEQ ID NO: 111909 - DNA, 4125 bp, Homo sapiens
  Payload ID: 1934
  Gene Symbol: BDNF
  Gene Name: brain-derived neurotrophic factor
  Uniprot ID: P23560
  ENST ID: ENST00000418212
  CDS Start-End: 454-1197
agagctaaataatgtctgacccgggcgcaaggcgcagcctggagctccgggtccccgacgctgccgccgccgcgcccgggcgcacccgcccgctcgctgtcccgcgcaccccgtagcgcctcgggctcccgggccggacagaggagccagcccggtgcgcccctccacctcctgctcggggggctttaatgagacacccaccgctgctgtggggccggcggggagcagcaccgcgacggggaccggggctgggcgctggagccagaatcggaaccacgatgtgactccgccgccggggacccgtgaggtttgtgtggaccccgagcatgagcagagatcattaaaaattaaacttacaaagctgctaaagtgggaagaaggagaacttgaagccacaatttttgcacttgcttagaagccatctaatctcagttccaccaggtgagaagagtgatgaccatccttttccttactatggttatttcatactttggttgcatgaaggctgcccccatgaaagaagcaaacatccgaggacaaggtggcttggcctacccaggtgtgcggacccatgggactctggagagcgtgaatgggcccaaggcaggttcaagaggcttgacatcattggctgacactttcgaacacgtgatagaagagctgttggatgaggaccagaaagttcggcccaatgaagaaaacaataaggacgcagacttgtacacgtccagggtgatgctcagtagtcaagtgcctttggagcctcctcttctctttctgctggaggaatacaaaaattacctagatgctgcaaacatgtccatgagggtccggcgccactctgaccctgcccgccgaggggagctgagcgtgtgtgacagtattagtgagtgggtaacggcggcagacaaaaagactgcagtggacatgtcgggcgggacggtcacagtccttgaaaaggtccctgtatcaaaaggccaactgaagcaatacttctacgagaccaagtgcaatcccatgggttacacaaaagaaggctgcaggggcatagacaaaaggcattggaactcccagtgccgaactacccagtcgtacgtgcgggcccttaccatggatagcaaaaagagaattggctggcgattcataaggatagacacttcttgtgtatgtacattgaccattaaaaggggaagatagtggatttatgttgtatagattagattatattgagacaaaaattatctatttgtatatatacataacagggtaaattattcagttaagaaaaaaataattttatgaactgcatgtataaatgaagtttatacagtacagtggttctacaatctatttattggacatgtccatgaccagaagggaaacagtcatttgcgcacaacttaaaaagtctgcattacattccttgataatgttgtggtttgttgccgttgccaagaactgaaaacataaaaagttaaaaaaaataataaattgcatgctgctttaattgtgaattgataataaactgtcctctttcagaaaacagaaaaaaaacacacacacacacaacaaaaatttgaaccaaaacattccgtttacattttagacagtaagtatcttcgttcttgttagtactatatctgttttactgcttttaacttctgatagcgttggaattaaaacaatgtcaaggtgctgttgtcattgctttactggcttaggggatgggggatggggggtatatttttgtttgttttgtgtttttttttcgtttgtttgttttgttttttagttcccacagggagtagagatggggaaagaattcctacaatatatattctggctgataaaagatacatttgtatgttgtgaagatgtttgcaatatcgatcagatgactagaaagtgaataaaaattaaggcaactgaacaaaaaaatgctcacactccacatcccgtgatgcacctcccaggccccgctcattctttgggcgttggtcagagtaagctgcttttgacggaaggacctatgtttgctcagaacacattctttccccccctccccctctggtctcctctttgttttgttttaaggaagaaaaatcagttgcgcgttctgaaatattttaccactgctgtgaacaagtgaacacattgtgtcacatcatgacactcgtataagcatggagaacagtgatttttttttagaacagaaaacaacaaaaaataaccccaaaatgaagattattttttatgaggagtgaacatttgggtaaatcatggctaagcttaaaaaaaactcatggtgaggcttaacaatgtcttgtaagcaaaaggtagagccctgtatcaacccagaaacacctagatcagaacaggaatccacattgccagtgacatgagactgaacagccaaatggaggctatgtggagttggcattgcatttaccggcagtgcgggaggaatttctgagtggccatcccaaggtctaggtggaggtggggcatggtatttgagacattccaaaacgaaggcctctgaaggacccttcagaggtggctctggaatgacatgtgtcaagctgcttggacctcgtgctttaagtgcctacattatctaactgtgctcaagaggttctcgactggaggaccacactcaagccgacttatgcccaccatcccacctctggataattttgcataaaattggattagcctggagcaggttgggagccaaatgtggcatttgtgatcatgagattgatgcaatgagatagaagatgtttgctacctgaacacttattgctttgaaactagacttgaggaaaccagggtttatcttttgagaacttttggtaagggaaaagggaacaggaaaagaaaccccaaactcaggccgaatgatcaaggggacccataggaaatcttgtccagagacaagacttcgggaaggtgtctggacattcagaacaccaagacttgaaggtgccttgctcaatggaagaggccaggacagagctgacaaaattttgctccccagtgaaggccacagcaaccttctgcccatcctgtctgttcatggagagggtccctgcctcacctctgccattttgggttaggagaagtcaagttgggagcctgaaatagtggttcttggaaaaatggatccccagtgaaaactagagctctaagcccattcagcccatttcacacctgaaaatgttagtgatcaccacttggaccagcatccttaagtatcagaaagccccaagcaattgctgcatcttagtagggtgagggataagcaaaagaggatgttcaccataacccaggaatgaagataccatcagcaaagaatttcaatttgttcagtctttcatttagagctagtctttcacagtaccatctgaatacctctttgaaagaaggaagactttacgtagtgtagatttgttttgtgttgtttgaaaatattatctttgtaattatttttaatatgtaaggaatgcttggaatatctgctgtatgtcaactttatgcagcttccttttgagggacaaatttaaaacaaacaaccccccatcacaaacttaaaggattgcaagggccagatctgttaagtggtttcataggagacacatccagcaattgtgtggtcagtggctcttttacccaataagatacatcacagtcacatgcttgatggtttatgttgacctaagatttattttgttaaaatctctctctgttgtgttcgttcttgttctgttttgttttgttttttaaagtcttgctgtggtctctttgtggcagaagtgtttcatgcatggcagcaggcctgttgcttttttatggcgattcccattgaaaatgtaagtaaatgtctgtggccttgttctctctatggtaaagatattattcaccatgtaaaacaaaaaacaatatttattgtattttagtatatttatataattatgttattgaaaaaaattggcattaaaacttaaccgcatcagaagcctattgtaaatacaagttctatttaagtgtactaattaacatataatatatgttttaaatatagaatttttaatgtttttaaatatattttcaaagtacataaaa

SEQ ID NO: 111910 - DNA, 4059 bp, Homo sapiens
  Payload ID: 1934
  Gene Symbol: BDNF
  Gene Name: brain-derived neurotrophic factor
  Uniprot ID: P23560
  ENST ID: ENST00000438929
  CDS Start-End: 142-1131
gtaaaccaatagcccccatgctctgtgcgatttcattgtgtgctcgcgttcgcaagctccgtagtgcaggaaggtgcgggaagttaagtaattaaaagaaattatagagtgggatgcaaaaataacccgaaggacaactggatgtgtggagccaccagttttctccatgagtgcacaaggttaatccttgttactactcagaatgctgagtttctacagaaagggttgcaggtccacacatgttttggcgtctacccacacgcttctgtatggcatgactgtgcatcccagaagaagggctgtgctgtgtacctccacgtttcagtggaatttaacaaactgatccctgaaaatggtttcataaagttccaccaggtgagaagagtgatgaccatccttttccttactatggttatttcatactttggttgcatgaaggctgcccccatgaaagaagcaaacatccgaggacaaggtggcttggcctacccaggtgtgcggacccatgggactctggagagcgtgaatgggcccaaggcaggttcaagaggcttgacatcattggctgacactttcgaacacgtgatagaagagctgttggatgaggaccagaaagttcggcccaatgaagaaaacaataaggacgcagacttgtacacgtccagggtgatgctcagtagtcaagtgcctttggagcctcctcttctctttctgctggaggaatacaaaaattacctagatgctgcaaacatgtccatgagggtccggcgccactctgaccctgcccgccgaggggagctgagcgtgtgtgacagtattagtgagtgggtaacggcggcagacaaaaagactgcagtggacatgtcgggcgggacggtcacagtccttgaaaaggtccctgtatcaaaaggccaactgaagcaatacttctacgagaccaagtgcaatcccatgggttacacaaaagaaggctgcaggggcatagacaaaaggcattggaactcccagtgccgaactacccagtcgtacgtgcgggcccttaccatggatagcaaaaagagaattggctggcgattcataaggatagacacttcttgtgtatgtacattgaccattaaaaggggaagatagtggatttatgttgtatagattagattatattgagacaaaaattatctatttgtatatatacataacagggtaaattattcagttaagaaaaaaataattttatgaactgcatgtataaatgaagtttatacagtacagtggttctacaatctatttattggacatgtccatgaccagaagggaaacagtcatttgcgcacaacttaaaaagtctgcattacattccttgataatgttgtggtttgttgccgttgccaagaactgaaaacataaaaagttaaaaaaaataataaattgcatgctgctttaattgtgaattgataataaactgtcctctttcagaaaacagaaaaaaaacacacacacacacaacaaaaatttgaaccaaaacattccgtttacattttagacagtaagtatcttcgttcttgttagtactatatctgttttactgcttttaacttctgatagcgttggaattaaaacaatgtcaaggtgctgttgtcattgctttactggcttaggggatgggggatggggggtatatttttgtttgttttgtgtttttttttcgtttgtttgttttgttttttagttcccacagggagtagagatggggaaagaattcctacaatatatattctggctgataaaagatacatttgtatgttgtgaagatgtttgcaatatcgatcagatgactagaaagtgaataaaaattaaggcaactgaacaaaaaaatgctcacactccacatcccgtgatgcacctcccaggccccgctcattctttgggcgttggtcagagtaagctgcttttgacggaaggacctatgtttgctcagaacacattctttccccccctccccctctggtctcctctttgttttgttttaaggaagaaaaatcagttgcgcgttctgaaatattttaccactgctgtgaacaagtgaacacattgtgtcacatcatgacactcgtataagcatggagaacagtgatttttttttagaacagaaaacaacaaaaaataaccccaaaatgaagattattttttatgaggagtgaacatttgggtaaatcatggctaagcttaaaaaaaactcatggtgaggcttaacaatgtcttgtaagcaaaaggtagagccctgtatcaacccagaaacacctagatcagaacaggaatccacattgccagtgacatgagactgaacagccaaatggaggctatgtggagttggcattgcatttaccggcagtgcgggaggaatttctgagtggccatcccaaggtctaggtggaggtggggcatggtatttgagacattccaaaacgaaggcctctgaaggacccttcagaggtggctctggaatgacatgtgtcaagctgcttggacctcgtgctttaagtgcctacattatctaactgtgctcaagaggttctcgactggaggaccacactcaagccgacttatgcccaccatcccacctctggataattttgcataaaattggattagcctggagcaggttgggagccaaatgtggcatttgtgatcatgagattgatgcaatgagatagaagatgtttgctacctgaacacttattgctttgaaactagacttgaggaaaccagggtttatcttttgagaacttttggtaagggaaaagggaacaggaaaagaaaccccaaactcaggccgaatgatcaaggggacccataggaaatcttgtccagagacaagacttcgggaaggtgtctggacattcagaacaccaagacttgaaggtgccttgctcaatggaagaggccaggacagagctgacaaaattttgctccccagtgaaggccacagcaaccttctgcccatcctgtctgttcatggagagggtccctgcctcacctctgccattttgggttaggagaagtcaagttgggagcctgaaatagtggttcttggaaaaatggatccccagtgaaaactagagctctaagcccattcagcccatttcacacctgaaaatgttagtgatcaccacttggaccagcatccttaagtatcagaaagccccaagcaattgctgcatcttagtagggtgagggataagcaaaagaggatgttcaccataacccaggaatgaagataccatcagcaaagaatttcaatttgttcagtctttcatttagagctagtctttcacagtaccatctgaatacctctttgaaagaaggaagactttacgtagtgtagatttgttttgtgttgtttgaaaatattatctttgtaattatttttaatatgtaaggaatgcttggaatatctgctgtatgtcaactttatgcagcttccttttgagggacaaatttaaaacaaacaaccccccatcacaaacttaaaggattgcaagggccagatctgttaagtggtttcataggagacacatccagcaattgtgtggtcagtggctcttttacccaataagatacatcacagtcacatgcttgatggtttatgttgacctaagatttattttgttaaaatctctctctgttgtgttcgttcttgttctgttttgttttgttttttaaagtcttgctgtggtctctttgtggcagaagtgtttcatgcatggcagcaggcctgttgcttttttatggcgattcccattgaaaatgtaagtaaatgtctgtggccttgttctctctatggtaaagatattattcaccatgtaaaacaaaaaacaatatttattgtattttagtatatttatataattatgttattgaaaaaaattggcattaaaacttaaccgcatcagaagcctattgtaaatacaagttctatttaagtgtactaattaacatataatatatgttttaaatatagaatttttaatgtttttaaatatattttcaaagtacataaaa

SEQ ID NO: 111911 - DNA, 3829 bp, Homo sapiens
  Payload ID: 1934
  Gene Symbol: BDNF
  Gene Name: brain-derived neurotrophic factor
  Uniprot ID: P23560
  ENST ID: ENST00000525950
  CDS Start-End: 158-901
aatatcaagtatcacttaattagagatttttaagccttttcctcctgctgtgccgggtgtgtaatccgggcgataggagtccattcagcaccttggacagagccaacggatttgtccgaggtggcggtacccccagttccaccaggtgagaagagtgatgaccatccttttccttactatggttatttcatactttggttgcatgaaggctgcccccatgaaagaagcaaacatccgaggacaaggtggcttggcctacccaggtgtgcggacccatgggactctggagagcgtgaatgggcccaaggcaggttcaagaggcttgacatcattggctgacactttcgaacacgtgatagaagagctgttggatgaggaccagaaagttcggcccaatgaagaaaacaataaggacgcagacttgtacacgtccagggtgatgctcagtagtcaagtgcctttggagcctcctcttctctttctgctggaggaatacaaaaattacctagatgctgcaaacatgtccatgagggtccggcgccactctgaccctgcccgccgaggggagctgagcgtgtgtgacagtattagtgagtgggtaacggcggcagacaaaaagactgcagtggacatgtcgggcgggacggtcacagtccttgaaaaggtccctgtatcaaaaggccaactgaagcaatacttctacgagaccaagtgcaatcccatgggttacacaaaagaaggctgcaggggcatagacaaaaggcattggaactcccagtgccgaactacccagtcgtacgtgcgggcccttaccatggatagcaaaaagagaattggctggcgattcataaggatagacacttcttgtgtatgtacattgaccattaaaaggggaagatagtggatttatgttgtatagattagattatattgagacaaaaattatctatttgtatatatacataacagggtaaattattcagttaagaaaaaaataattttatgaactgcatgtataaatgaagtttatacagtacagtggttctacaatctatttattggacatgtccatgaccagaagggaaacagtcatttgcgcacaacttaaaaagtctgcattacattccttgataatgttgtggtttgttgccgttgccaagaactgaaaacataaaaagttaaaaaaaataataaattgcatgctgctttaattgtgaattgataataaactgtcctctttcagaaaacagaaaaaaaacacacacacacacaacaaaaatttgaaccaaaacattccgtttacattttagacagtaagtatcttcgttcttgttagtactatatctgttttactgcttttaacttctgatagcgttggaattaaaacaatgtcaaggtgctgttgtcattgctttactggcttaggggatgggggatggggggtatatttttgtttgttttgtgtttttttttcgtttgtttgttttgttttttagttcccacagggagtagagatggggaaagaattcctacaatatatattctggctgataaaagatacatttgtatgttgtgaagatgtttgcaatatcgatcagatgactagaaagtgaataaaaattaaggcaactgaacaaaaaaatgctcacactccacatcccgtgatgcacctcccaggccccgctcattctttgggcgttggtcagagtaagctgcttttgacggaaggacctatgtttgctcagaacacattctttccccccctccccctctggtctcctctttgttttgttttaaggaagaaaaatcagttgcgcgttctgaaatattttaccactgctgtgaacaagtgaacacattgtgtcacatcatgacactcgtataagcatggagaacagtgatttttttttagaacagaaaacaacaaaaaataaccccaaaatgaagattattttttatgaggagtgaacatttgggtaaatcatggctaagcttaaaaaaaactcatggtgaggcttaacaatgtcttgtaagcaaaaggtagagccctgtatcaacccagaaacacctagatcagaacaggaatccacattgccagtgacatgagactgaacagccaaatggaggctatgtggagttggcattgcatttaccggcagtgcgggaggaatttctgagtggccatcccaaggtctaggtggaggtggggcatggtatttgagacattccaaaacgaaggcctctgaaggacccttcagaggtggctctggaatgacatgtgtcaagctgcttggacctcgtgctttaagtgcctacattatctaactgtgctcaagaggttctcgactggaggaccacactcaagccgacttatgcccaccatcccacctctggataattttgcataaaattggattagcctggagcaggttgggagccaaatgtggcatttgtgatcatgagattgatgcaatgagatagaagatgtttgctacctgaacacttattgctttgaaactagacttgaggaaaccagggtttatcttttgagaacttttggtaagggaaaagggaacaggaaaagaaaccccaaactcaggccgaatgatcaaggggacccataggaaatcttgtccagagacaagacttcgggaaggtgtctggacattcagaacaccaagacttgaaggtgccttgctcaatggaagaggccaggacagagctgacaaaattttgctccccagtgaaggccacagcaaccttctgcccatcctgtctgttcatggagagggtccctgcctcacctctgccattttgggttaggagaagtcaagttgggagcctgaaatagtggttcttggaaaaatggatccccagtgaaaactagagctctaagcccattcagcccatttcacacctgaaaatgttagtgatcaccacttggaccagcatccttaagtatcagaaagccccaagcaattgctgcatcttagtagggtgagggataagcaaaagaggatgttcaccataacccaggaatgaagataccatcagcaaagaatttcaatttgttcagtctttcatttagagctagtctttcacagtaccatctgaatacctctttgaaagaaggaagactttacgtagtgtagatttgttttgtgttgtttgaaaatattatctttgtaattatttttaatatgtaaggaatgcttggaatatctgctgtatgtcaactttatgcagcttccttttgagggacaaatttaaaacaaacaaccccccatcacaaacttaaaggattgcaagggccagatctgttaagtggtttcataggagacacatccagcaattgtgtggtcagtggctcttttacccaataagatacatcacagtcacatgcttgatggtttatgttgacctaagatttattttgttaaaatctctctctgttgtgttcgttcttgttctgttttgttttgttttttaaagtcttgctgtggtctctttgtggcagaagtgtttcatgcatggcagcaggcctgttgcttttttatggcgattcccattgaaaatgtaagtaaatgtctgtggccttgttctctctatggtaaagatattattcaccatgtaaaacaaaaaacaatatttattgtattttagtatatttatataattatgttattgaaaaaaattggcattaaaacttaaccgcatcagaagcctattgtaaatacaagttctatttaagtgtactaattaacatataatatatgttttaaatatagaatttttaatgtttttaaatatattttcaaagtacataaaa

SEQ ID NO: 111912 - DNA, 4000 bp, Homo sapiens
  Payload ID: 1934
  Gene Symbol: BDNF
  Gene Name: brain-derived neurotrophic factor
  Uniprot ID: P23560
  ENST ID: ENST00000533246
  CDS Start-End: 329-1072
agagctaaataatgtctgacccgggcgcaaggcgcagcctggagctccgggtccccgacgctgccgccgccgcgcccgggcgcacccgcccgctcgctgtcccgcgcaccccgtagcgcctcgggctcccgggccggacagaggagccagcccggtgcgcccctccacctcctgctcggggggctttaatgagacacccaccgctgctgtggggccggcggggagcagcaccgcgacggggaccggggctgggcgctggagccagaatcggaaccacgatgtgactccgccgccggggacccgtgagttccaccaggtgagaagagtgatgaccatccttttccttactatggttatttcatactttggttgcatgaaggctgcccccatgaaagaagcaaacatccgaggacaaggtggcttggcctacccaggtgtgcggacccatgggactctggagagcgtgaatgggcccaaggcaggttcaagaggcttgacatcattggctgacactttcgaacacgtgatagaagagctgttggatgaggaccagaaagttcggcccaatgaagaaaacaataaggacgcagacttgtacacgtccagggtgatgctcagtagtcaagtgcctttggagcctcctcttctctttctgctggaggaatacaaaaattacctagatgctgcaaacatgtccatgagggtccggcgccactctgaccctgcccgccgaggggagctgagcgtgtgtgacagtattagtgagtgggtaacggcggcagacaaaaagactgcagtggacatgtcgggcgggacggtcacagtccttgaaaaggtccctgtatcaaaaggccaactgaagcaatacttctacgagaccaagtgcaatcccatgggttacacaaaagaaggctgcaggggcatagacaaaaggcattggaactcccagtgccgaactacccagtcgtacgtgcgggcccttaccatggatagcaaaaagagaattggctggcgattcataaggatagacacttcttgtgtatgtacattgaccattaaaaggggaagatagtggatttatgttgtatagattagattatattgagacaaaaattatctatttgtatatatacataacagggtaaattattcagttaagaaaaaaataattttatgaactgcatgtataaatgaagtttatacagtacagtggttctacaatctatttattggacatgtccatgaccagaagggaaacagtcatttgcgcacaacttaaaaagtctgcattacattccttgataatgttgtggtttgttgccgttgccaagaactgaaaacataaaaagttaaaaaaaataataaattgcatgctgctttaattgtgaattgataataaactgtcctctttcagaaaacagaaaaaaaacacacacacacacaacaaaaatttgaaccaaaacattccgtttacattttagacagtaagtatcttcgttcttgttagtactatatctgttttactgcttttaacttctgatagcgttggaattaaaacaatgtcaaggtgctgttgtcattgctttactggcttaggggatgggggatggggggtatatttttgtttgttttgtgtttttttttcgtttgtttgttttgttttttagttcccacagggagtagagatggggaaagaattcctacaatatatattctggctgataaaagatacatttgtatgttgtgaagatgtttgcaatatcgatcagatgactagaaagtgaataaaaattaaggcaactgaacaaaaaaatgctcacactccacatcccgtgatgcacctcccaggccccgctcattctttgggcgttggtcagagtaagctgcttttgacggaaggacctatgtttgctcagaacacattctttccccccctccccctctggtctcctctttgttttgttttaaggaagaaaaatcagttgcgcgttctgaaatattttaccactgctgtgaacaagtgaacacattgtgtcacatcatgacactcgtataagcatggagaacagtgatttttttttagaacagaaaacaacaaaaaataaccccaaaatgaagattattttttatgaggagtgaacatttgggtaaatcatggctaagcttaaaaaaaactcatggtgaggcttaacaatgtcttgtaagcaaaaggtagagccctgtatcaacccagaaacacctagatcagaacaggaatccacattgccagtgacatgagactgaacagccaaatggaggctatgtggagttggcattgcatttaccggcagtgcgggaggaatttctgagtggccatcccaaggtctaggtggaggtggggcatggtatttgagacattccaaaacgaaggcctctgaaggacccttcagaggtggctctggaatgacatgtgtcaagctgcttggacctcgtgctttaagtgcctacattatctaactgtgctcaagaggttctcgactggaggaccacactcaagccgacttatgcccaccatcccacctctggataattttgcataaaattggattagcctggagcaggttgggagccaaatgtggcatttgtgatcatgagattgatgcaatgagatagaagatgtttgctacctgaacacttattgctttgaaactagacttgaggaaaccagggtttatcttttgagaacttttggtaagggaaaagggaacaggaaaagaaaccccaaactcaggccgaatgatcaaggggacccataggaaatcttgtccagagacaagacttcgggaaggtgtctggacattcagaacaccaagacttgaaggtgccttgctcaatggaagaggccaggacagagctgacaaaattttgctccccagtgaaggccacagcaaccttctgcccatcctgtctgttcatggagagggtccctgcctcacctctgccattttgggttaggagaagtcaagttgggagcctgaaatagtggttcttggaaaaatggatccccagtgaaaactagagctctaagcccattcagcccatttcacacctgaaaatgttagtgatcaccacttggaccagcatccttaagtatcagaaagccccaagcaattgctgcatcttagtagggtgagggataagcaaaagaggatgttcaccataacccaggaatgaagataccatcagcaaagaatttcaatttgttcagtctttcatttagagctagtctttcacagtaccatctgaatacctctttgaaagaaggaagactttacgtagtgtagatttgttttgtgttgtttgaaaatattatctttgtaattatttttaatatgtaaggaatgcttggaatatctgctgtatgtcaactttatgcagcttccttttgagggacaaatttaaaacaaacaaccccccatcacaaacttaaaggattgcaagggccagatctgttaagtggtttcataggagacacatccagcaattgtgtggtcagtggctcttttacccaataagatacatcacagtcacatgcttgatggtttatgttgacctaagatttattttgttaaaatctctctctgttgtgttcgttcttgttctgttttgttttgttttttaaagtcttgctgtggtctctttgtggcagaagtgtttcatgcatggcagcaggcctgttgcttttttatggcgattcccattgaaaatgtaagtaaatgtctgtggccttgttctctctatggtaaagatattattcaccatgtaaaacaaaaaacaatatttattgtattttagtatatttatataattatgttattgaaaaaaattggcattaaaacttaaccgcatcagaagcctattgtaaatacaagttctatttaagtgtactaattaacatataatatatgttttaaatatagaatttttaatgtttttaaatatattttcaaagtacataaaa

SEQ ID NO: 111913 - DNA, 3878 bp, Homo sapiens
  Payload ID: 1934
  Gene Symbol: BDNF
  Gene Name: brain-derived neurotrophic factor
  Uniprot ID: P23560
  ENST ID: ENST00000533131
  CDS Start-End: 207-950
acacggctacctgctccccaggaattgagactgaagtggacttacaagtccgaagccaatgtagcttggaaaacttgggaggcggaattcctaccgctgggaactgaaagggtctgcgacactctcgggcaggccgaacccacatctctacccatcctgcgcccctcttctgaagcgccctccagttccaccaggtgagaagagtgatgaccatccttttccttactatggttatttcatactttggttgcatgaaggctgcccccatgaaagaagcaaacatccgaggacaaggtggcttggcctacccaggtgtgcggacccatgggactctggagagcgtgaatgggcccaaggcaggttcaagaggcttgacatcattggctgacactttcgaacacgtgatagaagagctgttggatgaggaccagaaagttcggcccaatgaagaaaacaataaggacgcagacttgtacacgtccagggtgatgctcagtagtcaagtgcctttggagcctcctcttctctttctgctggaggaatacaaaaattacctagatgctgcaaacatgtccatgagggtccggcgccactctgaccctgcccgccgaggggagctgagcgtgtgtgacagtattagtgagtgggtaacggcggcagacaaaaagactgcagtggacatgtcgggcgggacggtcacagtccttgaaaaggtccctgtatcaaaaggccaactgaagcaatacttctacgagaccaagtgcaatcccatgggttacacaaaagaaggctgcaggggcatagacaaaaggcattggaactcccagtgccgaactacccagtcgtacgtgcgggcccttaccatggatagcaaaaagagaattggctggcgattcataaggatagacacttcttgtgtatgtacattgaccattaaaaggggaagatagtggatttatgttgtatagattagattatattgagacaaaaattatctatttgtatatatacataacagggtaaattattcagttaagaaaaaaataattttatgaactgcatgtataaatgaagtttatacagtacagtggttctacaatctatttattggacatgtccatgaccagaagggaaacagtcatttgcgcacaacttaaaaagtctgcattacattccttgataatgttgtggtttgttgccgttgccaagaactgaaaacataaaaagttaaaaaaaataataaattgcatgctgctttaattgtgaattgataataaactgtcctctttcagaaaacagaaaaaaaacacacacacacacaacaaaaatttgaaccaaaacattccgtttacattttagacagtaagtatcttcgttcttgttagtactatatctgttttactgcttttaacttctgatagcgttggaattaaaacaatgtcaaggtgctgttgtcattgctttactggcttaggggatgggggatggggggtatatttttgtttgttttgtgtttttttttcgtttgtttgttttgttttttagttcccacagggagtagagatggggaaagaattcctacaatatatattctggctgataaaagatacatttgtatgttgtgaagatgtttgcaatatcgatcagatgactagaaagtgaataaaaattaaggcaactgaacaaaaaaatgctcacactccacatcccgtgatgcacctcccaggccccgctcattctttgggcgttggtcagagtaagctgcttttgacggaaggacctatgtttgctcagaacacattctttccccccctccccctctggtctcctctttgttttgttttaaggaagaaaaatcagttgcgcgttctgaaatattttaccactgctgtgaacaagtgaacacattgtgtcacatcatgacactcgtataagcatggagaacagtgatttttttttagaacagaaaacaacaaaaaataaccccaaaatgaagattattttttatgaggagtgaacatttgggtaaatcatggctaagcttaaaaaaaactcatggtgaggcttaacaatgtcttgtaagcaaaaggtagagccctgtatcaacccagaaacacctagatcagaacaggaatccacattgccagtgacatgagactgaacagccaaatggaggctatgtggagttggcattgcatttaccggcagtgcgggaggaatttctgagtggccatcccaaggtctaggtggaggtggggcatggtatttgagacattccaaaacgaaggcctctgaaggacccttcagaggtggctctggaatgacatgtgtcaagctgcttggacctcgtgctttaagtgcctacattatctaactgtgctcaagaggttctcgactggaggaccacactcaagccgacttatgcccaccatcccacctctggataattttgcataaaattggattagcctggagcaggttgggagccaaatgtggcatttgtgatcatgagattgatgcaatgagatagaagatgtttgctacctgaacacttattgctttgaaactagacttgaggaaaccagggtttatcttttgagaacttttggtaagggaaaagggaacaggaaaagaaaccccaaactcaggccgaatgatcaaggggacccataggaaatcttgtccagagacaagacttcgggaaggtgtctggacattcagaacaccaagacttgaaggtgccttgctcaatggaagaggccaggacagagctgacaaaattttgctccccagtgaaggccacagcaaccttctgcccatcctgtctgttcatggagagggtccctgcctcacctctgccattttgggttaggagaagtcaagttgggagcctgaaatagtggttcttggaaaaatggatccccagtgaaaactagagctctaagcccattcagcccatttcacacctgaaaatgttagtgatcaccacttggaccagcatccttaagtatcagaaagccccaagcaattgctgcatcttagtagggtgagggataagcaaaagaggatgttcaccataacccaggaatgaagataccatcagcaaagaatttcaatttgttcagtctttcatttagagctagtctttcacagtaccatctgaatacctctttgaaagaaggaagactttacgtagtgtagatttgttttgtgttgtttgaaaatattatctttgtaattatttttaatatgtaaggaatgcttggaatatctgctgtatgtcaactttatgcagcttccttttgagggacaaatttaaaacaaacaaccccccatcacaaacttaaaggattgcaagggccagatctgttaagtggtttcataggagacacatccagcaattgtgtggtcagtggctcttttacccaataagatacatcacagtcacatgcttgatggtttatgttgacctaagatttattttgttaaaatctctctctgttgtgttcgttcttgttctgttttgttttgttttttaaagtcttgctgtggtctctttgtggcagaagtgtttcatgcatggcagcaggcctgttgcttttttatggcgattcccattgaaaatgtaagtaaatgtctgtggccttgttctctctatggtaaagatattattcaccatgtaaaacaaaaaacaatatttattgtattttagtatatttatataattatgttattgaaaaaaattggcattaaaacttaaccgcatcagaagcctattgtaaatacaagttctatttaagtgtactaattaacatataatatatgttttaaatatagaatttttaatgtttttaaatatattttcaaagtacataaaa

SEQ ID NO: 111914 - DNA, 4176 bp, Homo sapiens; identical to SEQ ID NO: 111908
  Payload ID: 1934
  Gene Symbol: BDNF
  Gene Name: brain-derived neurotrophic factor
  ENST ID: ENST00000530786
  CDS Start-End: 142-375

SEQ ID NO: 111915 - DNA, 3918 bp, Homo sapiens
  Payload ID: 1934
  Gene Symbol: BDNF
  Gene Name: brain-derived neurotrophic factor
  Uniprot ID: P23560
  ENST ID: ENST00000530861
  CDS Start-End: 247-990
agagttgaaagctaggggagcgagacctcggggcgtgcgattctcactcgctccctcccgccccagcgcccacagccggggtttctgcagagggcgcgggacgcggggttccccggggctgaggctggggctggaacacccctcgaagccgcgggcgtcctgtccaaggcgccccaggagggcgcaggactcgcagggcgatgtcgcggggccctaggggaggagttccaccaggtgagaagagtgatgaccatccttttccttactatggttatttcatactttggttgcatgaaggctgcccccatgaaagaagcaaacatccgaggacaaggtggcttggcctacccaggtgtgcggacccatgggactctggagagcgtgaatgggcccaaggcaggttcaagaggcttgacatcattggctgacactttcgaacacgtgatagaagagctgttggatgaggaccagaaagttcggcccaatgaagaaaacaataaggacgcagacttgtacacgtccagggtgatgctcagtagtcaagtgcctttggagcctcctcttctctttctgctggaggaatacaaaaattacctagatgctgcaaacatgtccatgagggtccggcgccactctgaccctgcccgccgaggggagctgagcgtgtgtgacagtattagtgagtgggtaacggcggcagacaaaaagactgcagtggacatgtcgggcgggacggtcacagtccttgaaaaggtccctgtatcaaaaggccaactgaagcaatacttctacgagaccaagtgcaatcccatgggttacacaaaagaaggctgcaggggcatagacaaaaggcattggaactcccagtgccgaactacccagtcgtacgtgcgggcccttaccatggatagcaaaaagagaattggctggcgattcataaggatagacacttcttgtgtatgtacattgaccattaaaaggggaagatagtggatttatgttgtatagattagattatattgagacaaaaattatctatttgtatatatacataacagggtaaattattcagttaagaaaaaaataattttatgaactgcatgtataaatgaagtttatacagtacagtggttctacaatctatttattggacatgtccatgaccagaagggaaacagtcatttgcgcacaacttaaaaagtctgcattacattccttgataatgttgtggtttgttgccgttgccaagaactgaaaacataaaaagttaaaaaaaataataaattgcatgctgctttaattgtgaattgataataaactgtcctctttcagaaaacagaaaaaaaacacacacacacacaacaaaaatttgaaccaaaacattccgtttacattttagacagtaagtatcttcgttcttgttagtactatatctgttttactgcttttaacttctgatagcgttggaattaaaacaatgtcaaggtgctgttgtcattgctttactggcttaggggatgggggatggggggtatatttttgtttgttttgtgtttttttttcgtttgtttgttttgttttttagttcccacagggagtagagatggggaaagaattcctacaatatatattctggctgataaaagatacatttgtatgttgtgaagatgtttgcaatatcgatcagatgactagaaagtgaataaaaattaaggcaactgaacaaaaaaatgctcacactccacatcccgtgatgcacctcccaggccccgctcattctttgggcgttggtcagagtaagctgcttttgacggaaggacctatgtttgctcagaacacattctttccccccctccccctctggtctcctctttgttttgttttaaggaagaaaaatcagttgcgcgttctgaaatattttaccactgctgtgaacaagtgaacacattgtgtcacatcatgacactcgtataagcatggagaacagtgatttttttttagaacagaaaacaacaaaaaataaccccaaaatgaagattattttttatgaggagtgaacatttgggtaaatcatggctaagcttaaaaaaaactcatggtgaggcttaacaatgtcttgtaagcaaaaggtagagccctgtatcaacccagaaacacctagatcagaacaggaatccacattgccagtgacatgagactgaacagccaaatggaggctatgtggagttggcattgcatttaccggcagtgcgggaggaatttctgagtggccatcccaaggtctaggtggaggtggggcatggtatttgagacattccaaaacgaaggcctctgaaggacccttcagaggtggctctggaatgacatgtgtcaagctgcttggacctcgtgctttaagtgcctacattatctaactgtgctcaagaggttctcgactggaggaccacactcaagccgacttatgcccaccatcccacctctggataattttgcataaaattggattagcctggagcaggttgggagccaaatgtggcatttgtgatcatgagattgatgcaatgagatagaagatgtttgctacctgaacacttattgctttgaaactagacttgaggaaaccagggtttatcttttgagaacttttggtaagggaaaagggaacaggaaaagaaaccccaaactcaggccgaatgatcaaggggacccataggaaatcttgtccagagacaagacttcgggaaggtgtctggacattcagaacaccaagacttgaaggtgccttgctcaatggaagaggccaggacagagctgacaaaattttgctccccagtgaaggccacagcaaccttctgcccatcctgtctgttcatggagagggtccctgcctcacctctgccattttgggttaggagaagtcaagttgggagcctgaaatagtggttcttggaaaaatggatccccagtgaaaactagagctctaagcccattcagcccatttcacacctgaaaatgttagtgatcaccacttggaccagcatccttaagtatcagaaagccccaagcaattgctgcatcttagtagggtgagggataagcaaaagaggatgttcaccataacccaggaatgaagataccatcagcaaagaatttcaatttgttcagtctttcatttagagctagtctttcacagtaccatctgaatacctctttgaaagaaggaagactttacgtagtgtagatttgttttgtgttgtttgaaaatattatctttgtaattatttttaatatgtaaggaatgcttggaatatctgctgtatgtcaactttatgcagcttccttttgagggacaaatttaaaacaaacaaccccccatcacaaacttaaaggattgcaagggccagatctgttaagtggtttcataggagacacatccagcaattgtgtggtcagtggctcttttacccaataagatacatcacagtcacatgcttgatggtttatgttgacctaagatttattttgttaaaatctctctctgttgtgttcgttcttgttctgttttgttttgttttttaaagtcttgctgtggtctctttgtggcagaagtgtttcatgcatggcagcaggcctgttgcttttttatggcgattcccattgaaaatgtaagtaaatgtctgtggccttgttctctctatggtaaagatattattcaccatgtaaaacaaaaaacaatatttattgtattttagtatatttatataattatgttattgaaaaaaattggcattaaaacttaaccgcatcagaagcctattgtaaatacaagttctatttaagtgtactaattaacatataatatatgttttaaatatagaatttttaatgtttttaaatatattttcaaagtacataaaa

SEQ ID NO: 111916 - DNA, 3930 bp, Homo sapiens
  Payload ID: 1934
  Gene Symbol: BDNF
  Gene Name: brain-derived neurotrophic factor
  Uniprot ID: P23560
  ENST ID: ENST00000532997
  CDS Start-End: 259-1002
cttccaccccgccccctcctccagcctccatccctccctcattctatctcttcctctccgtcgccctcgctcctcgctggatgcttctttctgggttttcttttttttttcccttctgtcctccctccccgcgagtttcgggcgctggcttagagggttcccgctttctcaagggaaggggagctgccgagaccgcgctccgctccccagccgggccggatgcctcactgagcccagttccaccaggtgagaagagtgatgaccatccttttccttactatggttatttcatactttggttgcatgaaggctgcccccatgaaagaagcaaacatccgaggacaaggtggcttggcctacccaggtgtgcggacccatgggactctggagagcgtgaatgggcccaaggcaggttcaagaggcttgacatcattggctgacactttcgaacacgtgatagaagagctgttggatgaggaccagaaagttcggcccaatgaagaaaacaataaggacgcagacttgtacacgtccagggtgatgctcagtagtcaagtgcctttggagcctcctcttctctttctgctggaggaatacaaaaattacctagatgctgcaaacatgtccatgagggtccggcgccactctgaccctgcccgccgaggggagctgagcgtgtgtgacagtattagtgagtgggtaacggcggcagacaaaaagactgcagtggacatgtcgggcgggacggtcacagtccttgaaaaggtccctgtatcaaaaggccaactgaagcaatacttctacgagaccaagtgcaatcccatgggttacacaaaagaaggctgcaggggcatagacaaaaggcattggaactcccagtgccgaactacccagtcgtacgtgcgggcccttaccatggatagcaaaaagagaattggctggcgattcataaggatagacacttcttgtgtatgtacattgaccattaaaaggggaagatagtggatttatgttgtatagattagattatattgagacaaaaattatctatttgtatatatacataacagggtaaattattcagttaagaaaaaaataattttatgaactgcatgtataaatgaagtttatacagtacagtggttctacaatctatttattggacatgtccatgaccagaagggaaacagtcatttgcgcacaacttaaaaagtctgcattacattccttgataatgttgtggtttgttgccgttgccaagaactgaaaacataaaaagttaaaaaaaataataaattgcatgctgctttaattgtgaattgataataaactgtcctctttcagaaaacagaaaaaaaacacacacacacacaacaaaaatttgaaccaaaacattccgtttacattttagacagtaagtatcttcgttcttgttagtactatatctgttttactgcttttaacttctgatagcgttggaattaaaacaatgtcaaggtgctgttgtcattgctttactggcttaggggatgggggatggggggtatatttttgtttgttttgtgtttttttttcgtttgtttgttttgttttttagttcccacagggagtagagatggggaaagaattcctacaatatatattctggctgataaaagatacatttgtatgttgtgaagatgtttgcaatatcgatcagatgactagaaagtgaataaaaattaaggcaactgaacaaaaaaatgctcacactccacatcccgtgatgcacctcccaggccccgctcattctttgggcgttggtcagagtaagctgcttttgacggaaggacctatgtttgctcagaacacattctttccccccctccccctctggtctcctctttgttttgttttaaggaagaaaaatcagttgcgcgttctgaaatattttaccactgctgtgaacaagtgaacacattgtgtcacatcatgacactcgtataagcatggagaacagtgatttttttttagaacagaaaacaacaaaaaataaccccaaaatgaagattattttttatgaggagtgaacatttgggtaaatcatggctaagcttaaaaaaaactcatggtgaggcttaacaatgtcttgtaagcaaaaggtagagccctgtatcaacccagaaacacctagatcagaacaggaatccacattgccagtgacatgagactgaacagccaaatggaggctatgtggagttggcattgcatttaccggcagtgcgggaggaatttctgagtggccatcccaaggtctaggtggaggtggggcatggtatttgagacattccaaaacgaaggcctctgaaggacccttcagaggtggctctggaatgacatgtgtcaagctgcttggacctcgtgctttaagtgcctacattatctaactgtgctcaagaggttctcgactggaggaccacactcaagccgacttatgcccaccatcccacctctggataattttgcataaaattggattagcctggagcaggttgggagccaaatgtggcatttgtgatcatgagattgatgcaatgagatagaagatgtttgctacctgaacacttattgctttgaaactagacttgaggaaaccagggtttatcttttgagaacttttggtaagggaaaagggaacaggaaaagaaaccccaaactcaggccgaatgatcaaggggacccataggaaatcttgtccagagacaagacttcgggaaggtgtctggacattcagaacaccaagacttgaaggtgccttgctcaatggaagaggccaggacagagctgacaaaattttgctccccagtgaaggccacagcaaccttctgcccatcctgtctgttcatggagagggtccctgcctcacctctgccattttgggttaggagaagtcaagttgggagcctgaaatagtggttcttggaaaaatggatccccagtgaaaactagagctctaagcccattcagcccatttcacacctgaaaatgttagtgatcaccacttggaccagcatccttaagtatcagaaagccccaagcaattgctgcatcttagtagggtgagggataagcaaaagaggatgttcaccataacccaggaatgaagataccatcagcaaagaatttcaatttgttcagtctttcatttagagctagtctttcacagtaccatctgaatacctctttgaaagaaggaagactttacgtagtgtagatttgttttgtgttgtttgaaaatattatctttgtaattatttttaatatgtaaggaatgcttggaatatctgctgtatgtcaactttatgcagcttccttttgagggacaaatttaaaacaaacaaccccccatcacaaacttaaaggattgcaagggccagatctgttaagtggtttcataggagacacatccagcaattgtgtggtcagtggctcttttacccaataagatacatcacagtcacatgcttgatggtttatgttgacctaagatttattttgttaaaatctctctctgttgtgttcgttcttgttctgttttgttttgttttttaaagtcttgctgtggtctctttgtggcagaagtgtttcatgcatggcagcaggcctgttgcttttttatggcgattcccattgaaaatgtaagtaaatgtctgtggccttgttctctctatggtaaagatattattcaccatgtaaaacaaaaaacaatatttattgtattttagtatatttatataattatgttattgaaaaaaattggcattaaaacttaaccgcatcagaagcctattgtaaatacaagttctatttaagtgtactaattaacatataatatatgttttaaatatagaatttttaatgtttttaaatatattttcaaagtacataaaa

SEQ ID NO: 111917 - DNA, 4766 bp, Homo sapiens
  Payload ID: 1934
  Gene Symbol: BDNF
  Gene Name: brain-derived neurotrophic factor
  Uniprot ID: P23560
  ENST ID: ENST00000525528
  CDS Start-End: 1095-1838
gcgcgcgcgcacacacacacacacacacagagagaacatctctagtaaaaagaaaagttgagctttcttagctagatgtgtgtattagccagaaaaagccaaggagtgaagggttttagagaactggaggagataaagtggagtctgcatatgggaggcatttgaaatggacttaaatgtctttttaatgctgactttttcagttttctccttaccagacacattgttttcatgacattagccccaggcatagacacatcattaaaatgaacatgtcaaaaaatgatttctgtttagaaataagcaaaacattttcagttgtgaccacccaggtgtagaataaagaacagtggaattgggagccctgagttctaacataaactttcttcatgacataaggcaagtcttctatggcctttggtttccttacctgtaaaacaggatggctcaatgaaattatctttcttctttgctataatagagtatctctgtgggaagaggaaaaaaaaagtcaatttaaaggctccttatagttccccaactgctgttttattgtgctattcatgcctagacatcacatagctagaaaggcccatcagacccctcaggccactgctgttcctgtcacacattcctgcaaaggaccatgttgctaacttgaaaaaaattactattaattacacttgcagttgttgcttagtaacatttatgattttgtgtttctcgtgacagcatgagcagagatcattaaaaattaaacttacaaagctgctaaagtgggaagaaggagaacttgaagccacaatttttgcacttgcttagaagccatctaatctcaggtttatatgctagatcttgggggaaacactgcatgtctctggtttatattaaaccacatacagcacactactgacactgatttgtgtctggtgcagctggagtttatcaccaagacataaaaaaaccttgaccctgcagaatggcctggaattacaatcagatgggccacatggcatcccggtgaaagaaagccctaaccagttttctgtcttgtttctgctttctccctacagttccaccaggtgagaagagtgatgaccatccttttccttactatggttatttcatactttggttgcatgaaggctgcccccatgaaagaagcaaacatccgaggacaaggtggcttggcctacccaggtgtgcggacccatgggactctggagagcgtgaatgggcccaaggcaggttcaagaggcttgacatcattggctgacactttcgaacacgtgatagaagagctgttggatgaggaccagaaagttcggcccaatgaagaaaacaataaggacgcagacttgtacacgtccagggtgatgctcagtagtcaagtgcctttggagcctcctcttctctttctgctggaggaatacaaaaattacctagatgctgcaaacatgtccatgagggtccggcgccactctgaccctgcccgccgaggggagctgagcgtgtgtgacagtattagtgagtgggtaacggcggcagacaaaaagactgcagtggacatgtcgggcgggacggtcacagtccttgaaaaggtccctgtatcaaaaggccaactgaagcaatacttctacgagaccaagtgcaatcccatgggttacacaaaagaaggctgcaggggcatagacaaaaggcattggaactcccagtgccgaactacccagtcgtacgtgcgggcccttaccatggatagcaaaaagagaattggctggcgattcataaggatagacacttcttgtgtatgtacattgaccattaaaaggggaagatagtggatttatgttgtatagattagattatattgagacaaaaattatctatttgtatatatacataacagggtaaattattcagttaagaaaaaaataattttatgaactgcatgtataaatgaagtttatacagtacagtggttctacaatctatttattggacatgtccatgaccagaagggaaacagtcatttgcgcacaacttaaaaagtctgcattacattccttgataatgttgtggtttgttgccgttgccaagaactgaaaacataaaaagttaaaaaaaataataaattgcatgctgctttaattgtgaattgataataaactgtcctctttcagaaaacagaaaaaaaacacacacacacacaacaaaaatttgaaccaaaacattccgtttacattttagacagtaagtatcttcgttcttgttagtactatatctgttttactgcttttaacttctgatagcgttggaattaaaacaatgtcaaggtgctgttgtcattgctttactggcttaggggatgggggatggggggtatatttttgtttgttttgtgtttttttttcgtttgtttgttttgttttttagttcccacagggagtagagatggggaaagaattcctacaatatatattctggctgataaaagatacatttgtatgttgtgaagatgtttgcaatatcgatcagatgactagaaagtgaataaaaattaaggcaactgaacaaaaaaatgctcacactccacatcccgtgatgcacctcccaggccccgctcattctttgggcgttggtcagagtaagctgcttttgacggaaggacctatgtttgctcagaacacattctttccccccctccccctctggtctcctctttgttttgttttaaggaagaaaaatcagttgcgcgttctgaaatattttaccactgctgtgaacaagtgaacacattgtgtcacatcatgacactcgtataagcatggagaacagtgatttttttttagaacagaaaacaacaaaaaataaccccaaaatgaagattattttttatgaggagtgaacatttgggtaaatcatggctaagcttaaaaaaaactcatggtgaggcttaacaatgtcttgtaagcaaaaggtagagccctgtatcaacccagaaacacctagatcagaacaggaatccacattgccagtgacatgagactgaacagccaaatggaggctatgtggagttggcattgcatttaccggcagtgcgggaggaatttctgagtggccatcccaaggtctaggtggaggtggggcatggtatttgagacattccaaaacgaaggcctctgaaggacccttcagaggtggctctggaatgacatgtgtcaagctgcttggacctcgtgctttaagtgcctacattatctaactgtgctcaagaggttctcgactggaggaccacactcaagccgacttatgcccaccatcccacctctggataattttgcataaaattggattagcctggagcaggttgggagccaaatgtggcatttgtgatcatgagattgatgcaatgagatagaagatgtttgctacctgaacacttattgctttgaaactagacttgaggaaaccagggtttatcttttgagaacttttggtaagggaaaagggaacaggaaaagaaaccccaaactcaggccgaatgatcaaggggacccataggaaatcttgtccagagacaagacttcgggaaggtgtctggacattcagaacaccaagacttgaaggtgccttgctcaatggaagaggccaggacagagctgacaaaattttgctccccagtgaaggccacagcaaccttctgcccatcctgtctgttcatggagagggtccctgcctcacctctgccattttgggttaggagaagtcaagttgggagcctgaaatagtggttcttggaaaaatggatccccagtgaaaactagagctctaagcccattcagcccatttcacacctgaaaatgttagtgatcaccacttggaccagcatccttaagtatcagaaagccccaagcaattgctgcatcttagtagggtgagggataagcaaaagaggatgttcaccataacccaggaatgaagataccatcagcaaagaatttcaatttgttcagtctttcatttagagctagtctttcacagtaccatctgaatacctctttgaaagaaggaagactttacgtagtgtagatttgttttgtgttgtttgaaaatattatctttgtaattatttttaatatgtaaggaatgcttggaatatctgctgtatgtcaactttatgcagcttccttttgagggacaaatttaaaacaaacaaccccccatcacaaacttaaaggattgcaagggccagatctgttaagtggtttcataggagacacatccagcaattgtgtggtcagtggctcttttacccaataagatacatcacagtcacatgcttgatggtttatgttgacctaagatttattttgttaaaatctctctctgttgtgttcgttcttgttctgttttgttttgttttttaaagtcttgctgtggtctctttgtggcagaagtgtttcatgcatggcagcaggcctgttgcttttttatggcgattcccattgaaaatgtaagtaaatgtctgtggccttgttctctctatggtaaagatattattcaccatgtaaaacaaaaaacaatatttattgtattttagtatatttatataattatgttattgaaaaaaattggcattaaaacttaaccgcatcagaagcctattgtaaatacaagttctatttaagtgtactaattaacatataatatatgttttaaatatagaatttttaatgtttttaaatatattttcaaagtacataaaa

SEQ ID NO: 111918 - DNA, 2674 bp, Homo sapiens
  Payload ID: 1935
  Gene Symbol: BEGAIN
  Gene Name: brain-enriched guanylate kinase-associated
  Uniprot ID: Q9BUH8
  ENST ID: ENST00000355173
  CDS Start-End: 73-1854
ctgctttgtctgctgtcccctctctgctggagaacttagcccagagctagtgaacgagcctctgccgcagacatggagaaactcagcgcgctgcaggagcagaagggcgagctgcgcaagcggctgtcctacaccacacacaagctcgagaagctcgagaccgagttcgactccacgcgccactacctggagatcgagctgcggcgcgcgcaggaggaactggagaaggtcacggagaagctgcgcaggattcagagcaactacatggcactgcagaggatcaaccaggagctggaggacaagctgtaccgcatgggccagcactatgaggaggagaagcgtgcgctgagccacgagattgttgccctcaacagccatctgctagaagccaaggtgaccatcgacaagctgtcagaggacaacgagctctataggaaggactgcaatctagcggcccagctgctgcagtgcagccagacctacggcagggtccacaaggtgtctgagctgccctcggatttccaggagcgcgtgagcctgcacatggagaagcacggctgcagcctgccatccccgctctgccacccggcctacgccgacagcgtccccacctgcgtcattgccaaggtgctggagaagccggaccccgccagcctgtcctcccgcctgtccgatgcctccgcccgcgacctggccttctgcgacggggtggagaaaccaggcccgcggcccccctacaagggagacatctactgcagtgacacagccctctactgcccggaggagcggcggcgagaccggcggcctagcgtggacgcgcccgtgaccgacgtgggcttcctgcgggcccagaactccactgacagcgcggccgaggaggaggaggaggccgaggcggcggccttcccggcgggcttccagcatgaggccttccccagctacgcaggctcactgcccacgtccagctcctactccagcttcagcgccacgtcggaggagaaggagcacgcgcaggccagcacgctgaccgcgtcgcagcaggccatctacctgaacagccgcgacgagctcttcgaccgcaagccacccgccaccacctacgagggcagccctcgctttgccaaggccacggccgcggtggcggccccgctggaggccgaagtggccccaggcttcgggcggaccatgtcaccgtacccggccgagaccttccgcttcccggcctctccgggtccccagcaggccctgatgcccccaaacctgtggagcctgcgggccaagccggggaccgcccggctccccggggaggacatgaggggccagtggcgtcccctgagcgtggaggacatcggcgcctactcctaccccgtgagcgctgccggccgcgcctcaccctgcagcttctctgaacgctactacggcggggccgggggcagcccgggcaagaaggccgacggccgcgccagcccgctctacgccagctacaaggccgacagcttctccgagggggacgacctctcccagggccacctggcagagccctgcttcctgcgggcgggcggcgacctgagcctcagtcccggccgctcggctgacccactgcccggctatgcacccagcgaggggggggacggggacaggctcggggtgcagctgtgtgggaccgccagcagccctgagcccgagcagggttccagggactccttggagccgagctccatggaggcctccccggaaatgcatcctgccgcccgcctcagcccccagcaggcctttccgcggactggtggctcggggctgagccgcaaggacagcctcaccaaggcccagctctacggaaccttgctcaactgagcgcctgcgtgcaggcctggccgtggttcgctccccgccagcccacgtgccccagaagggccggcctcacctctccccagcccccgctgttcccctgccccggccaacaacgaggagtctgttcctccccgcacctcctctcctccccagccctgtaggcctgaggggagggtcccccacaccacggtgtccacccggccccggcccgtggaactccacttagagcgtttttcacgcgtccttcccccatgtgagaggagcatccccccttttataaagcgaaactatttttatagagaaaaagggtctttcttaacgcacttggcctccagctccctggacggctgccttggcgttttcaacacaaagctcctttattttttgggcgagggtgcgtggggcctgccccttggaagggaagggaaggacggtgtcctgtggagaccagactctgcaagtggggagaccacccccgcaagccagtgacaagggagccctgaagttgtgtccacgaagagggagctgaaacaaattcggggctatgaagtgttttaaaaatccattcttcgcagtgtggccaccacaccgccctgagccctcccacggcccatcgtcccgggtgggccgggatgatgccccagtgcggccggtgctcatctccgcccccgggtccgccccctgacaccgtcttactctacctcagacatgaggaggccctccattcctggtttctgtagcttgcattcttgttgtctctgatgcatgccctgccagttagtactgtattttgcattcattaataaaagacaccggtggaaag

SEQ ID NO: 111919 - DNA, 2744 bp, Homo sapiens
  Payload ID: 1935
  Gene Symbol: BEGAIN
  Gene Name: brain-enriched guanylate kinase-associated
  Uniprot ID: Q9BUH8
  ENST ID: ENST00000443071
  CDS Start-End: 147-1928
gcggcgccgggcttcccacggacggggccccgcggggttgcccggccgtgcccgctgtgcccggctctgcccggcgcggccgcggagcgcacgcctcctgcctgctgaccctctcgtttggtttctcgcaggcctctgccgcagacatggagaaactcagcgcgctgcaggagcagaagggcgagctgcgcaagcggctgtcctacaccacacacaagctcgagaagctcgagaccgagttcgactccacgcgccactacctggagatcgagctgcggcgcgcgcaggaggaactggagaaggtcacggagaagctgcgcaggattcagagcaactacatggcactgcagaggatcaaccaggagctggaggacaagctgtaccgcatgggccagcactatgaggaggagaagcgtgcgctgagccacgagattgttgccctcaacagccatctgctagaagccaaggtgaccatcgacaagctgtcagaggacaacgagctctataggaaggactgcaatctagcggcccagctgctgcagtgcagccagacctacggcagggtccacaaggtgtctgagctgccctcggatttccaggagcgcgtgagcctgcacatggagaagcacggctgcagcctgccatccccgctctgccacccggcctacgccgacagcgtccccacctgcgtcattgccaaggtgctggagaagccggaccccgccagcctgtcctcccgcctgtccgatgcctccgcccgcgacctggccttctgcgacggggtggagaaaccaggcccgcggcccccctacaagggagacatctactgcagtgacacagccctctactgcccggaggagcggcggcgagaccggcggcctagcgtggacgcgcccgtgaccgacgtgggcttcctgcgggcccagaactccactgacagcgcggccgaggaggaggaggaggccgaggcggcggccttcccggcgggcttccagcatgaggccttccccagctacgcaggctcactgcccacgtccagctcctactccagcttcagcgccacgtcggaggagaaggagcacgcgcaggccagcacgctgaccgcgtcgcagcaggccatctacctgaacagccgcgacgagctcttcgaccgcaagccacccgccaccacctacgagggcagccctcgctttgccaaggccacggccgcggtggcggccccgctggaggccgaagtggccccaggcttcgggcggaccatgtcaccgtacccggccgagaccttccgcttcccggcctctccgggtccccagcaggccctgatgcccccaaacctgtggagcctgcgggccaagccggggaccgcccggctccccggggaggacatgaggggccagtggcgtcccctgagcgtggaggacatcggcgcctactcctaccccgtgagcgctgccggccgcgcctcaccctgcagcttctctgaacgctactacggcggggccgggggcagcccgggcaagaaggccgacggccgcgccagcccgctctacgccagctacaaggccgacagcttctccgagggggacgacctctcccagggccacctggcagagccctgcttcctgcgggcgggcggcgacctgagcctcagtcccggccgctcggctgacccactgcccggctatgcacccagcgaggggggggacggggacaggctcggggtgcagctgtgtgggaccgccagcagccctgagcccgagcagggttccagggactccttggagccgagctccatggaggcctccccggaaatgcatcctgccgcccgcctcagcccccagcaggcctttccgcggactggtggctcggggctgagccgcaaggacagcctcaccaaggcccagctctacggaaccttgctcaactgagcgcctgcgtgcaggcctggccgtggttcgctccccgccagcccacgtgccccagaagggccggcctcacctctccccagcccccgctgttcccctgccccggccaacaacgaggagtctgttcctccccgcacctcctctcctccccagccctgtaggcctgaggggagggtcccccacaccacggtgtccacccggccccggcccgtggaactccacttagagcgtttttcacgcgtccttcccccatgtgagaggagcatccccccttttataaagcgaaactatttttatagagaaaaagggtctttcttaacgcacttggcctccagctccctggacggctgccttggcgttttcaacacaaagctcctttattttttgggcgagggtgcgtggggcctgccccttggaagggaagggaaggacggtgtcctgtggagaccagactctgcaagtggggagaccacccccgcaagccagtgacaagggagccctgaagttgtgtccacgaagagggagctgaaacaaattcggggctatgaagtgttttaaaaatccattcttcgcagtgtggccaccacaccgccctgagccctcccacggcccatcgtcccgggtgggccgggatgatgccccagtgcggccggtgctcatctccgcccccgggtccgccccctgacaccgtcttactctacctcagacatgaggaggccctccattcctggtttctgtagcttgcattcttgttgtctctgatgcatgccctgccagttagtactgtattttgcattcattaataaaagacaccggtgg

SEQ ID NO: 111920 - DNA, 649 bp, Homo sapiens
  Payload ID: 1935
  Gene Symbol: BEGAIN
  Gene Name: brain-enriched guanylate kinase-associated
  ENST ID: ENST00000557378
  CDS Start-End: 147-649
gcggcgccgggcttcccacggacggggccccgcggggttgcccggccgtgcccgctgtgcccggctctgcccggcgcggccgcggagcgcacgcctcctgcctgctgaccctctcgtttggtttctcgcaggcctctgccgcagacatggagaaactcagcgcgctgcaggagcagaagggcgagctgcgcaagcggctgtcctacaccacacacaagctcgagaagctcgagaccgagttcgactccacgcgccactacctggagatcgagctgcggcgcgcgcaggaggaactggagaaggtcacggagaagctgcgcaggattcagagcaactacatggcactgcagaggatcaaccaggagctggaggacaagctgtaccgcatgggccagcactatgaggaggagaagcgtgcgctgagccacgagattgttgccctcaacagccatctgctagaagccaaggtgaccatcgacaagctgtcagaggacaacgagctctataggaaggactgcaatctagcggcccagctgctgcagtgcagccagacctacggcagggtccacaaggtgtctgagctgccctcggatttccaggagcgcgtgagcctgcacatggagaagcacggctgcagcctgccatcccc

SEQ ID NO: 111921 - DNA, 632 bp, Homo sapiens
  Payload ID: 1935
  Gene Symbol: BEGAIN
  Gene Name: brain-enriched guanylate kinase-associated
  ENST ID: ENST00000554140
  CDS Start-End: 124-632
cctgcgggaagccgggcggggtgggggagccccggccgcgccggctcccggcgcgctcggcctcggaggggagggggcggcggtagcggcggcggcggtgagcggcgcggctgccctggggccatgtggactggcggtcgccggccgggccggctgcgccgggcggcctctgccgcagacatggagaaactcagcgcgctgcaggagcagaagggcgagctgcgcaagcggctgtcctacaccacacacaagctcgagaagctcgagaccgagttcgactccacgcgccactacctggagatcgagctgcggcgcgcgcaggaggaactggagaaggtcacggagaagctgcgcaggattcagagcaactacatggcactgcagaggatcaaccaggagctggaggacaagctgtaccgcatgggccagcactatgaggaggagaagcgtgcgctgagccacgagattgttgccctcaacagccatctgctagaagccaaggtgaccatcgacaagctgtcagaggacaacgagctctataggaaggactgcaatctagcggcccagctgctgcagtgcagccagacctacggcagggtccacaaggtgtctgagctgccctcggatttcca

SEQ ID NO: 111922 - DNA, 5811 bp, Homo sapiens
  Payload ID: 1935
  Gene Symbol: BEGAIN
  Gene Name: brain-enriched guanylate kinase-associated
  ENST ID: ENST00000556751
  CDS Start-End: 3406-4995
gctgtttccagacgctggggactccctgacccatctcggcccttgccaggacaccttttcacccagggcaggggacagaggcctctgagccacaggcctccagcagtttcccccagattcccagtggcctggtggccccaccccacacagtgccacctcttgacattgtccactgtgtggagggtgctactatgtagaatgtggaccagcaacagccctgcccccgtgtctgggtgcaccatccagttctgcagatgtggagacaggctgccgtggcagggctcgggttattgcccggtgtggggaacactggacagggaaggaggtactacccgggtgaccgcagaccctaggtacacagcctggactgggcagaggggacacgttcagaggtgtgagaagctgaacccccaggacttagtgacagggctgtgaggggtaaagaggggtcaccatgcccaccccccgggtggggaacgtggagggcagtgaaggtgtggtggatgtggctgcattggacgggttgggtgtggagatgcctgagggccataggtgggtggctggacgtggtgagggtatggagcctgacagacaccccgctggagtcagatggaaacctgggaggggtccctgtgcagctggcttggaggggatttggtctgagcatgcagggcaggggtgcaggtgcaaaccggggccccagggaacagcccgggcgaggtcgggaggggcctgtggtgtgatcgccggaccagcagaggtggggaaagacgtggcaggaaccctggggcggccaagtgcggggcatcagctatgcctggggacggggtgcgtgtccatggcccgatgcctgcagcaagcggacactgaggcagagaggggtgtgagagtcaggggctgggggcactgctagcccaaagattggttgggtgtagcaggtggttgggtgtgaaggacttggggagggggagcagtatttaagggctggtggaacagggagttgactgctgtatctggaaggccatccaaaggccaggggtaaactgaggctctgtgaagctgcctgacttgtgagatgtctgccccgagcccaccccatagccccttcgtcctcccctcccacacctgccccgtggagaatccctgcctagctcattgtctgcctcccctctggaccgcaggctcccggggcaggggcagggtttgtcttactcctggctgtgaggtctcagacaggttgcttgctctgagaggtgagggtagggacctcagggtgcccagaaggggcagggctgggtgagggggcacagtgagctaggggtgcaggtctcagaatagcaaggacctaaggctgctcagtgaggcctggggtgtggctggagaaggggtgaggactcggggctgaggtggccacgtgggtggatggatgacgccctcacctcttcccgagggctgtgggtacaccaggagcccctgcagggaacagtcgacttcaggggctgctgtgcagcccattgtgcctgccctaggagcccaggatggcataggagtccccaggaagttcaccacctccctggggaggacaggtctgtgtgggaagcagcctgggacctgtagctatagagtgctagaagtggggcagccacggaaggctgcctggaggaggtggaaggaggcctgagcactgtcccagagagcgctcccggaggcagacccacgtgggcagctgtggcactttgcctcagggcttccctctttgcttgttactctacttcctcttgtggtgactgactcttgggaagacccgccctgcccttctctgaggttctcaaaaacgtaagcgacgctttatttttatttgtttttaaaaatatagccctgggcaggaatccaagagtgcttcctggaggcttgctgggtgtgtgcccgcagtgccacatgcggtttactcacggggcccagacagaagatgcctctgctcggggctgggggacagtggtggccccagggggactgggagcctcctgcctgccctctactcccctcgcttgggtttgggtcgggaatatcacaagaacgcgggcttttgcccaaggtcccacagcacatctgggcagagtcagggttccaggccctctcccacacctcaagtttccttcatgacacccgggacttctgcctgtcccgtccccatctcacagcaacacaatccaaaagatgttggtcccagatagcccctgggctgtgcacccattgcaaggaaagaactgctggctgctgaccccactctgacccagacaaccggaagtgcagcccctgccttggggagctccgagccatccctgttggaggcccccacactaccctcctgcctttgcacagctttagttcaggtgaattgttggcaggtggctcggaagagtgggtcatagtgggtctctgtttcctgagcatgtggggctctgcatcctggggtcctaccctccaggagaccccattctgggggaagaaaatagagcctcaagaattgtctgggtttctggaaggcttcctggaggaaggggaacttgagcaggccaggaccttgccaggtttcccgtgctgcatgcagcctcattggccatggtggcagacactgcccgggcatgggacattgccaccaaacatctctctggcccagagaagtgacccagggtcccagggccacacagccattttggggaaagcaggtctggtcttgggcatggcactgctgactctgggcctcagccatcccaacctagcactgtggaggagcaggagtgagggccccagtcacctgtgccacccagggccagctctgtgatagcctgggtgctgatgggtgctctttgtacctgggtcctttaaaccgcccccaacacactggccaggttctggggtcaaagactcctccagccaccacctgggatttacctgtgtgagggacactggtggagtctgaggaaccgcccaggccagactggctcagggtcagagtccctgactctggggcgccatggtcttcagtgacgcccgggaggctgggtgtgtgtgagtgtgtgtgtgtgtgtgtgtgtgtgtgtgtgtgcgcgcgcgcgcgcgcgccggtactcgcgtgttagtgcggcacgccccggctggcctgcgggccttagtttcccccgctcagcgccgcggcccggcccgccgccgccatgtcgttgcagcgcgctgcaggagcagaagggcgagctgcgcaagcggctgtcctacaccacacacaagctcgagaagctcgagaccgagttcgactccacgcgccactacctggagatcgagctgcggcgcgcgcaggaggaactggagaaggtcacggagaagctgcgcaggattcagagcaactacatggcactgcagaggatcaaccaggagctggaggacaagctgtaccgcatgggccagcactatgaggaggagaagcgtgcgctgagccacgagattgttgccctcaacagccatctgctagaagccaaggtgaccatcgacaagctgtcagaggacaacgagctctataggaaggactgcaatctagcggcccagctgctgcagtgcagccagacctacggcagggtccacaaggtgtctgagctgccctcggatttccaggagcgcgtgagcctgcacatggagaagcacggctgcagcctgccatccccgctctgccacccggcctacgccgacagcgtccccacctgcgtcattgccaaggtgctggagaagccggaccccgccagcctgtcctcccgcctgtccgatgcctccgcccgcgacctggccttctgcgacggggtggagaaaccaggcccgcggcccccctacaagggagacatctactgcagtgacacagccctctactgcccggaggagcggcggcgagaccggcggcctagcgtggacgcgcccgtgaccgacgtgggcttcctgcgggcccagaactccactgacagcgcggccgaggaggaggaggaggccgaggcggcggccttcccggcgggcttccagcatgaggccttccccagctacgcaggctcactgcccacgtccagctcctactccagcttcagcgccacgtcggaggagaaggagcacgcgcaggccagcacgctgaccgcgtcgcagcaggccatctacctgaacagccgcgacgagctcttcgaccgcaagccacccgccaccacctacgagggcagccctcgctttgccaaggccacggccgcggtggcggccccgctggaggccgaagtggccccaggcttcgggcggaccatgtcaccgtacccggccgagaccttccgcttcccggcctctccgggtccccagcaggccctgatgcccccaaacctgtggagcctgcgggccaagccggggaccgcccggctccccggggaggacatgaggggccagtggcgtcccctgagcgtggaggacatcggcgcctactcctaccccgtgagcgctgccggccgcgcctcaccctgcagcttctctgaacgctactacggcggggccgggggcagcccgggcaagaaggccgacggccgcgccagcccgctctacgccagctacaaggccgacagcttctccgagggggacgacctctcccagggccacctggcagagccctgcttcctgcgggcgggcggcgacctgagcctcagtcccggccgctcggctgacccactgcccggctatgcacccagcgaggggggggacggggacaggctcggggtgcagctgtgtgggaccgccagcagccctgagcccgagcagggttccagggactccttggagccgagctccatggaggcctccccggaaatgcatcctgccgcccgcctcagcccccagcaggcctttccgcggactggtggctcggggctgagccgcaaggacagcctcaccaaggcccagctctacggaaccttgctcaactgagcgcctgcgtgcaggcctggccgtggttcgctccccgccagcccacgtgccccagaagggccggcctcacctctccccagcccccgctgttcccctgccccggccaacaacgaggagtctgttcctccccgcacctcctctcctccccagccctgtaggcctgaggggagggtcccccacaccacggtgtccacccggccccggcccgtggaactccacttagagcgtttttcacgcgtccttcccccatgtgagaggagcatccccccttttataaagcgaaactatttttatagagaaaaagggtctttcttaacgcacttggcctccagctccctggacggctgccttggcgttttcaacacaaagctcctttattttttgggcgagggtgcgtggggcctgccccttggaagggaagggaaggacggtgtcctgtggagaccagactctgcaagtggggagaccacccccgcaagccagtgacaagggagccctgaagttgtgtccacgaagagggagctgaaacaaattcggggctatgaagtgttttaaaaatccattcttcgcagtgtggccaccacaccgccctgagccctcccacggcccatcgtcccgggtgggccgggatgatgccccagtgcggccggtgctcatctccgcccccgggtccgccccctgacaccgtcttactctacctcagacatgaggaggccctccattcctggtttctgtagcttgcattcttgttgtctctgatgcatgccctgccagttagtactgtattttgcattcattaataaaagacaccggtgg

SEQ ID NO: 111923 - DNA, 925 bp, Homo sapiens
  Payload ID: 1935
  Gene Symbol: BEGAIN
  Gene Name: brain-enriched guanylate kinase-associated
  ENST ID: ENST00000553553
  CDS Start-End: 27-925
ccctgattgaggagtcgaggctccaaatgccatcgccctcggattgtgcctctgccgcagacatggagaaactcagcgcgctgcaggagcagaagggcgagctgcgcaagcggctgtcctacaccacacacaagctcgagaagctcgagaccgagttcgactccacgcgccactacctggagatcgagctgcggcgcgcgcaggaggaactggagaaggtcacggagaagctgcgcaggattcagagcaactacatggcactgcagaggatcaaccaggagctggaggacaagctgtaccgcatgggccagcactatgaggaggagaagcgtgcgctgagccacgagattgttgccctcaacagccatctgctagaagccaaggtgaccatcgacaagctgtcagaggacaacgagctctataggaaggactgcaatctagcggcccagctgctgcagtgcagccagacctacggcagggtccacaaggtgtctgagctgccctcggatttccaggagcgcgtgagcctgcacatggagaagcacggctgcagcctgccatccccgctctgccacccggcctacgccgacagcgtccccacctgcgtcattgccaaggtgctggagaagccggaccccgccagcctgtcctcccgcctgtccgatgcctccgcccgcgacctggccttctgcgacggggtggagaaaccaggcccgcggcccccctacaagggagacatctactgcagtgacacagccctctactgcccggaggagcggcggcgagaccggcggcctagcgtggacgcgcccgtgaccgacgtgggcttcctgcgggcccagaactccactgacagcgcggccgaggaggaggaggaggccgaggcggcggccttcccggcgggcttccagcatgaggccttccc

SEQ ID NO: 111924 - DNA, 1010 bp, Homo sapiens
  Payload ID: 1935
  Gene Symbol: BEGAIN
  Gene Name: brain-enriched guanylate kinase-associated
  ENST ID: ENST00000556188
  CDS Start-End: 148-1010
ccaggaggggaaagggccaggaaagacaggctccagtgccgtaggatccaggcatgcactgtccgtgtttattgagcgcctgctgtatgctgggacctagcatgagaagcgctgtcatggggacccggaaaggcctctgccgcagacatggagaaactcagcgcgctgcaggagcagaagggcgagctgcgcaagcggctgtcctacaccacacacaagctcgagaagctcgagaccgagttcgactccacgcgccactacctggagatcgagctgcggcgcgcgcaggaggaactggagaaggtcacggagaagctgcgcaggattcagagcaactacatggcactgcagaggatcaaccaggagctggaggacaagctgtaccgcatgggccagcactatgaggaggagaagcgtgcgctgagccacgagattgttgccctcaacagccatctgctagaagccaaggtgaccatcgacaagctgtcagaggacaacgagctctataggaaggactgcaatctagcggcccagctgctgcagtgcagccagacctacggcagggtccacaaggtgtctgagctgccctcggatttccaggagcgcgtgagcctgcacatggagaagcacggctgcagcctgccatccccgctctgccacccggcctacgccgacagcgtccccacctgcgtcattgccaaggtgctggagaagccggaccccgccagcctgtcctcccgcctgtccgatgcctccgcccgcgacctggccttctgcgacggggtggagaaaccaggcccgcggcccccctacaagggagacatctactgcagtgacacagccctctactgcccggaggagcggcggcgagaccggcggcctagcgtggacgcgcccgtgaccgacgtgggcttcctgcgggcccagaactccactgacagcgcggccgaggaggaggaggaggccgaggcggcggccttcccggcgggcttccagcatgaggccttccc

SEQ ID NO: 111925 - DNA, 747 bp, Homo sapiens
  Payload ID: 1935
  Gene Symbol: BEGAIN
  Gene Name: brain-enriched guanylate kinase-associated
  ENST ID: ENST00000554356
  CDS Start-End: 224-747
ctcttgggaagacccgccctgcccttctctgaggttctcaaaaaccgcgctgcaggagcagaagggcgagctgcgcaagcggctgtcctacaccacacacaagctcgagaagctcgagaccgagttcgactccacgcgccactacctggagatcgagctgcggcgcgcgcaggaggaactggagaaggtcacggagaagctgcgcaggattcagagcaactacatggcactgcagaggatcaaccaggagctggaggacaagctgtaccgcatgggccagcactatgaggaggagaagcgtgcgctgagccacgagattgttgccctcaacagccatctgctagaagccaaggtgaccatcgacaagctgtcagaggacaacgagctctataggaaggactgcaatctagcggcccagctgctgcagtgcagccagacctacggcagggtccacaaggtgtctgagctgccctcggatttccaggagcgcgtgagcctgcacatggagaagcacggctgcagcctgccatccccgctctgccacccggcctacgccgacagcgtccccacctgcgtcattgccaaggtgctggagaagccggaccccgccagcctgtcctcccgcctgtccgatgcctccgcccgcgacctggccttctgcgacggggtggagaaaccaggcccgcggcccccctacaagggagacatctactgcagtgacacagccctctactgcccggaggagcg

SEQ ID NO: 111926 - DNA, 830 bp, Homo sapiens
  Payload ID: 1936
  Gene Symbol: BSX
  Gene Name: brain-specific homeobox
  Uniprot ID: Q3C1V8
  ENST ID: ENST00000343035
  CDS Start-End: 50-751
tcctccacttcgtcccggcccttgtcctgtggcaggtgctccgctcaagatgaatctcaacttcacctctcctctacacccggcgtcttctcagaggcccacatccttcttcatcgaggacatcctgctgcacaagcccaagccgctgagagaggtggccccagaccatttcgccagctctctggcctctcgggtgcctctgctagactatggctaccccctcatgcccacacccaccctcttggctcctcacgcccatcaccctctgcataagggagaccaccatcatccttatttcctcaccacctcggggatgccagtcccagcgctgttcccgcacccgcagcacgcggagctgccggggaagcactgccgccgccgcaaagcccgcacggttttctctgactcgcagctctcgggcttggagaagaggttcgagatccagcgctacctgtccacgccagaacgagtggagctggccacggccctcagcctgtccgagacgcaggtgaaaacgtggttccagaaccggcggatgaagcataaaaagcaactgcggaaaagccaagacgaacccaaagcaccagacgggccagaaagccccgagggcagcccccgcggttcagaggccgccaccgccgccgaggctcggctgagcctgcccgccggtcccttcgtgctgaccgagccagaggacgaggtggacattggagacgagggggagctgggctcagggccgcacgtgctctgagccgccaggctggggagggtagtaggcaggggaggagactgcggggccgagcgcggttccctcctggaccggaagactc

SEQ ID NO: 111927 - DNA, 9674 bp, Homo sapiens
  Payload ID: 1937
  Gene Symbol: BCAT1
  Gene Name: branched chain amino-acid transaminase 1, cytosolic
  Uniprot ID: P54687
  ENST ID: ENST00000261192
  CDS Start-End: 528-1688
agtagggaggtgggcaggagccagtgatgacggaatggcaatcacatttgacctctgatctgtttatttcctcctccttgacgtctccatataaatgttacacgggcatccccacactcggatacgcacccacagtggctgattcgggggtaaccgtgtcatttgcttgcaacactggcacctctgccctgcaccccgggagtgagcagtgagtgaggctcgggtctgggcgctggctccgaatcttcgggctgggagagactccaccatctgggggcggcctgggggagcagccttagtgtcttcctgctgatgcaatccgctaggtcgcgagtctccgccgcgagagggccggtctgcaatccagcccgccacgtgtactcgccgccgcctcgggcactgccccaggtcttgctgcagccgggaccgcgctctgcagccgcagacccggtccacacggccaggggctacgacccttgggatctgccctccgctcagctcgagcttccctcgtggccgacggaacaatgaaggattgcagtaacggatgctccgcagagtgtaccggagaaggaggatcaaaagaggtggtggggacttttaaggctaaagacctaatagtcacaccagctaccattttaaaggaaaaaccagaccccaataatctggtttttggaactgtgttcacggatcatatgctgacggtggagtggtcctcagagtttggatgggagaaacctcatatcaagcctcttcagaacctgtcattgcaccctggctcatcagctttgcactatgcagtggaattatttgaaggattgaaggcatttcgaggagtagataataaaattcgactgtttcagccaaacctcaacatggatagaatgtatcgctctgctgtgagggcaactctgccggtatttgacaaagaagagctcttagagtgtattcaacagcttgtgaaattggatcaagaatgggtcccatattcaacatctgctagtctgtatattcgtcctacattcattggaactgagccttctcttggagtcaagaagcctaccaaagccctgctctttgtactcttgagcccagtgggaccttatttttcaagtggaacctttaatccagtgtccctgtgggccaatcccaagtatgtaagagcctggaaaggtggaactggggactgcaagatgggagggaattacggctcatctctttttgcccaatgtgaagcagtagataatgggtgtcagcaggtcctgtggctctatggagaggaccatcagatcactgaagtgggaactatgaatctttttctttactggataaatgaagatggagaagaagaactggcaactcctccactagatggcatcattcttccaggagtgacaaggcggtgcattctggacctggcacatcagtggggtgaatttaaggtgtcagagagatacctcaccatggatgacttgacaacagccctggaggggaacagagtgagagagatgtttggctctggtacagcctgtgttgtttgcccagtttctgatatactgtacaaaggcgagacaatacacattccaactatggagaatggtcctaagctggcaagccgcatcttgagcaaattaactgatatccagtatggaagagaagagagcgactggacaattgtgctatcctgaatggaaaatagaggatacaatggaaaatagaggataccaactgtatgctactgggacagactgttgcatttgaattgtgatagatttctttggctacctgtgcataatgtagtttgtagtatcaatgtgttacaagagtgattgtttcttcatgccagagaaaatgaattgcaatcatcaaatggtgtttcataacttggtagtagtaacttaccttaccttacctagaaaaacattaatgtaagccatataacatgggattttcctcaatgattttagtgcctccttttgtacttcactcagatactaaatagtagtttattctttaatataagttacattctgctcctcaaacaaatgcaattttttgtgtgtgtttgaaagctaatttgagaaaatttcataggttacatttcctgcagcctatctttatccacagaaagtgttttcttttttttaaatcaagacttttaaaactggatttcctcccatcactgttttttgaaggtcctccaagtccgtgttaaggtaaatatctgttttcttcctgatgtcacagcctgagcatactctgtgcattaggaagacctgagtgcatttcccaccattgtcctttccacattatgttgtagctggctggctgtcaggcgactacaagactgagggtcttgtgccttatagatctttgtatcccccatggctgacatatagtaggtactcagtaaatggttttataatgaatcagtgaacattttgcttctatagaagtgtaccttctttgtttctatattatgaaacctctttattagaatttgtgattgattctgacagtgtatagatttaccttatattgtctttattttccatgagctactaagtcattagagatactctgaagcatagttagtttaggaaatcacttcatattgattgtattagaattatcttggaattgaagatatatccctagagcaggggaccccaacccccaggccatgggccacacagcaggaagaggtgagtggtgggccattgaggagcttcatctgtatttatggctacttcccatcactcgaattaccacctgaactccacctcttgtcagctcagtggcagcattagattctcataggagcacaaatcctattgtgaactctgcatgcaagggatctaggctatgcgctccttatgagaatctaatgcttgatgacctgaggtgtaacagtttcatcctgaaaccacccttcaccctgcagtctgtggaaaaattgtcttccacaaaactggtccctggtgccaaaaatgttggggaccactgctctagagagaggtcatgatatcataccaaccaaatggaaatgacaaatgttttatgtcaagtgttaattgcagaaataaatcttttttttttttttttggtagaaaacaaagaggcatactctgatttttatactctgtttttgcaggtgctcttttctttgaatggagatttgatgagcaagtggttaggatgcagggagagctactatgggtgatattttccttgtttaggagctgtgagttaaaattgtatcctttgtggtttatctaaggaaagtcaaatcttgacagaaaacatttttccttggaaggtcaactctcagacattgtattttggtttccctcagtcctcataacttccttcttgctgaacatattttattctcttttcagagaaggaaaataaaaaggattctaaaagtttgatgcattggaaaaatttccttgaggcatttagcaacacatagaaaatgggctttgattcttttccaaaacttttagccatagggtcttttatagacagggatagtaaaatgaaaattgagaaatataagatgaaaaggaatgataaaaatatcttttagggggcttttaattggtgatctgaaatcttgggagaagctgttcttttcaggcctgaggtgctcttgactgtcgcctgcgcactgtgtaccccgagcaacattctaagggtgtgctttcgccttggctaactcctttgacctcattcttcatatagtagtctaggaaaaagttgcaggtaatttaaactgtctagtggtacatagtaactaaatttctattcctatgagaaatgagaattatttatttgccatcaacacattttatactttgcatctccaaatttattgtggcgagacttgtccattgtgaaagttagagaacattatgtttgtatcatttctttcataaaacctcaagagcatttttaagcccttttcatcagacccagtgaaaactaaggatagatgtttaaaaactggaggtctcctgataaggagaacacaatccaccattgtcatttaagtaataagacaggaaattgaccttgacgctttcttgttaaatagatttaacaggaacatctgcacatcttttttccttgtgcactatttgtttaattgcagtggattaatacagcaagagtgccacattataactaggcaattatccattcttcaagacttagttattgtcacactaattgatcgtttaaggcataagatggtctagcattaggaacatgtgaagctaatctgctcaaaaagatcaacaaattaatattgttgctgatatttgcataattggctgcaattatttaatgtttaattgggttgatcaaatgagattcagcaattcacaagtgcattaatataaacagaactggtggcacttaaaatgataatgattaacttatattgcatgttctcttcctttcacttttttcagtttctacatttcagaccgagcttgtcagcttttttgaaaacacatcagtagaaaccaagattttaaaatgaagtgtcaagacaaaggcaaaacctgagcagttcctaaaaagatttgctgttagaaattttctttgtggcagtcatttattaaggattcaactcgtgatacaccaaaagaagagttgacttcagagatgtgttccatgctctctagcacaggaatgaataaatttataacacctgctttagcctttgttttcaaaagcacaaaggaaaagtgaaagggaaagagaaacaagtgactgagaagtcttgttaaggaatcaggttttttctacctggtaaacattctctattcttttctcaaaagattgctgtaagaaaaaatgtaagacaaaaaaaaaaaaaaaaaacaaacagaggcagaggcaggcagtagcaagaaagcagagcgtaacatcagctagatggtaacatgcaatgtcagctctcttgaagacatgggaaacctaagttacaccttgggttaaaattcttcaccatattagttttgttgcttcataaaatttacctaagcaagtggtcttgcttgcctcaaatccaagcagtcttgaacacttggaggcaattaatgagtatatcttagtcaaaagaattgttggagctttttattaaagctacagtttcagttctgcttttggggaattgtgctatgaaagcagctgccaaaataagctcatttattttcttcaatcccactcagtgctcagtcactatattctgtttcctttttttttttcaagttgcatatttggtttccccttatgattgggaaagatgaattttcagcagaaaacattgtttgttcactttcaaagagtgatagtttctaaaacatttagagcaataaatattcatcagaggtaccaagtaagccggcagaagagttaagggttagagaaatcccttatttcatgtcttgactctaaaattatcaaagtacttttccttgtaatgtggatttcttcttatgcggatatgcaaaaacttcagttatacgtagtaatgctagcaggtaattttagtagacattttataacaactgtcactttgtttcgccacatgtagagtttgttcagctattttccagatatctccccacaaaaggaggcaaagggtaccagcttttcaatgagcattacctattacttggcaaagatgatgaagactctattaatagttcatttgataaatgttgacataaccaacaatagagattaggaagttagttttaagaaatcaatggcatatagacattaccctcatggagtttgtattctactacttgaactgattgtagctataaaagcatagttagatagctgaatagttagatcataagcaaagaaggccagaacacatctcttatcaagaaatcaatgaatagtttatctcatttttaaagcaactttatccttctttaattccttcctttcttctagtgcaaaactacttaataaggttggtgtttaggttagtgttcacaccattcctcatctggtgtgaattaccttctctttctttactatttactaccaacctagtacatgtgttgactgaattcttttcaaacaatgttgagttatcatggtgcacctaataaattaacaccacagattacagcatccttgctgattttctcagcaaagccagattagatggaaataaacaaagaaaatgatcctagagtgaatttttctagaaaatatctattatgaaccatgctgtttaaagtattagcttgaaggtgatggatccagctattcagaaaataactttcatataaccatgattttgcacagtatgaggtcttaaatgtgtggaaagagataaattttttatcattaccacaaaccccttttaaagattcaaaggtggaagaaagtgatttattttttctcttcagcatacatatataaaagacttgtcagatgtttaatttggggaggttgataatgaaacatatcaacagagtatagtagttatagtagtgtttgtgggtaaataatttcctggggtcagacatatataaacatatttgcttcaaaatgataaaggcatgaaatcagtcttaaaaattgaaatgggggtgatgggggagaaaaagaagaacaaatttgaagtgccctttcaaatctgctggatacaagtattgaagttttaagtcatcttattctgtctgaaagtgtatttttcattctacaatagacccaatcaacaagacgtataacttgagttgcatgatgttcagtttatgtaatctactgttgggatggtaagaattgatgtaggctgtggtgtaagaatgaattaaaatatagtttcactggcttttctctacatatccactatcacaatggctaggtttcctgttgctcactattggattctggagaaaaatttaatgaaagatgatatcagaggaagaataagtggaggtagagaagaaaggaatgatagaggaggggaaaaaaacaaaacatatttttgtgttatccaaaggagctttttccttattctgtcaagcattgagatcttcttcagctttcaatgtagttgctaaatacaaataatgctactaggtagtgactaaatatagcaaacacttcatcagatattagaattaggtcacactattgaggttataatctgaaggttgtgttacatagaaaccactttagattattatcaacttggactaggctttattttataatagcatagtaagtaatatctattgtgtcatttcttcaaccattttattctaagatccatgaagcttcttgaggccaaataaaataataagtttagacaagaagtagattgtgacttttttcccttagagatactatttactatctcctatcctgataggtggaaggtttactgaattggaaattggttgactattagtttttaactaaaatgtgcaataacacattgcagtttcctcaaactagtttcctatgatcattaaactcattctcagggttaagaaaggaatgtaaatttctgcctcaatttgtacttcatcaataagtttttgaagagtgcagatttttagtcaggtcttaaaaataaactcacaaatctggatgcatttctaaattctgcaaatgtttcctggggtgacttaacaaggaataatcccacaatatacctagctacctaatacatggagctggggctcaacccactgtttttaaggatttgcgcttacttgtggctgaggaaaaataagtagttcgaggaagtagtttttaaatgtgagcttatagatagaaacagaatatcaacttaattatgaaattgttagaacctgttctcttgtatctgaatctgattgcaattactattgtactgatagactccagccattgcaagtctcagatatcttagctgtgtagtgattcttgaaattctttttaagaaaaattgagtagaaagaaataaaccctttgtaaatgaggcttggcttttgtgaaagatcatccgcaggctatgttaaaaggattttagctcactaaaagtgtaataatggaaatgtggaaaatatcgtaggtaaaggaaactacctcatgctctgaaggttttgtagaagcacaattaaacatctaaaatggctttgttacaccagagccatctggtgtgaagaactctatatttgtatgttgagagggcatggaataattgtattttgctggcaatagacacattctttattatttgcagattcctcatcaaatctgtaattatgcacagtttctgttatcaataaaacaaaagaatcctgtttgtgtggtttcatgaaatcagcattgttgaatgcatgaagtaataatgctaaattaacatttttatgatgtctcaaggtttctggtcaagggaagtaaatgtaggatagtatttttacaccaaaatgacacagagagaattgagcacaccagaaagaccagaaaccacaccactggatagagattcaatatgtttctttttcaaacatttggacaagaaaaaaatgggcatttaaaaattcttccttcccctggttatggatttatctgtagtaaaacttagctttgtcgtttgagatttgcacagaatggggggagtagattacctcttcccattcattgtcataatggatctacatcactgataaacaccatacttctatatgtggttaactagctttagaataaaagacactttaaaaagtaaaaggcctagagatcttcaatgaagtgtcccttttagccaaaccaggccttgcagaaattgtcctcaaaagcaccaagggagaacaaagccaagtgcagaattacccaagggtcacacattttgtattcattttcttataatttgcccaaatgatttgaagtacagcaaaacctgaagttttgcaaagagttactgtaaactgaacttaaaaatgtcagagtgctcggtgacccacttctccagaccctgtcaacctgtgaaaatattggcctttattcagatctctcaagaagttacgcgcagagtttggaaggtctaggcaaaggttattagtcaagtgttcttacagtgtcaacgctcaattcccacaagcgtgagaaagagagacctgtcattcctgagggtgatgacatacatttactggagcttatataatttatcagataagacagcagtttccttcagggtagaaagtgtgttttctacattgatttagtacaaaacaaaaagaaaaggggatatttcaaattttataattatttttctgctaagctgattcagtgtgatttaagcatatttttcaaatcatgaatctgattccatatacatatgtgccttatattgtgataatttatttttaagtgaaatatgctatcatagcctgactttatgtatagtggtgacaacttgcaggatcgcatttctgtaaccaaacggccgacagctgaggtgtagatgcttcctatggtctgtagaataatcactgggcttgttctctagctatgtctgtatgcaatcgcgacagtgttgatcaaaacccatgatcattctctccaaaggtctttgtcactaagccactagggattctgaaaagttcgtgagctgaaacaaataaattgagttggaagattca

SEQ ID NO: 111928 - DNA, 4319 bp, Homo sapiens
  Payload ID: 1937
  Gene Symbol: BCAT1
  Gene Name: branched chain amino-acid transaminase 1, cytosolic
  Uniprot ID: P54687
  ENST ID: ENST00000342945
  CDS Start-End: 155-1132
acgtgtactcgccgccgcctcgggcactgccccaggtcttgctgcagccgggaccgcgctctgcagccgcagacccggtccacacggccaggggctacgacccttgggatctgccctccgctcagctcgagcttccctcgtggccgacggaacaatgaaggctaaagacctaatagtcacaccagctaccattttaaaggaaaaaccagaccccaataatctggtttttggaactgtgttcacggatcatatgctgacggtggagtggtcctcagagtttggatgggagaaacctcatatcaagcctcttcagaacctgtcattgcaccctggctcatcagctttgcactatgcagtggaagtatttgacaaagaagagctcttagagtgtattcaacagcttgtgaaattggatcaagaatgggtcccatattcaacatctgctagtctgtatattcgtcctacattcattggaactgagccttctcttggagtcaagaagcctaccaaagccctgctctttgtactcttgagcccagtgggaccttatttttcaagtggaacctttaatccagtgtccctgtgggccaatcccaagtatgtaagagcctggaaaggtggaactggggactgcaagatgggagggaattacggctcatctctttttgcccaatgtgaagcagtagataatgggtgtcagcaggtcctgtggctctatggagaggaccatcagatcactgaagtgggaactatgaatctttttctttactggataaatgaagatggagaagaagaactggcaactcctccactagatggcatcattcttccaggagtgacaaggcggtgcattctggacctggcacatcagtggggtgaatttaaggtgtcagagagatacctcaccatggatgacttgacaacagccctggaggggaacagagtgagagagatgtttggctctggtacagcctgtgttgtttgcccagtttctgatatactgtacaaaggcgagacaatacacattccaactatggagaatggtcctaagctggcaagccgcatcttgagcaaattaactgatatccagtatggaagagaagagagcgactggacaattgtgctatcctgaatggaaaatagaggatacaatggaaaatagaggataccaactgtatgctactgggacagactgttgcatttgaattgtgatagatttctttggctacctgtgcataatgtagtttgtagtatcaatgtgttacaagagtgattgtttcttcatgccagagaaaatgaattgcaatcatcaaatggtgtttcataacttggtagtagtaacttaccttaccttacctagaaaaacattaatgtaagccatataacatgggattttcctcaatgattttagtgcctccttttgtacttcactcagatactaaatagtagtttattctttaatataagttacattctgctcctcaaacaaatgcaattttttgtgtgtgtttgaaagctaatttgagaaaatttcataggttacatttcctgcagcctatctttatccacagaaagtgttttcttttttttaaatcaagacttttaaaactggatttcctcccatcactgttttttgaaggtcctccaagtccgtgttaaggtaaatatctgttttcttcctgatgtcacagcctgagcatactctgtgcattaggaagacctgagtgcatttcccaccattgtcctttccacattatgttgtagctggctggctgtcaggcgactacaagactgagggtcttgtgccttatagatctttgtatcccccatggctgacatatagtaggtactcagtaaatggttttataatgaatcagtgaacattttgcttctatagaagtgtaccttctttgtttctatattatgaaacctctttattagaatttgtgattgattctgacagtgtatagatttaccttatattgtctttattttccatgagctactaagtcattagagatactctgaagcatagttagtttaggaaatcacttcatattgattgtattagaattatcttggaattgaagatatatccctagagcaggggaccccaacccccaggccatgggccacacagcaggaagaggtgagtggtgggccattgaggagcttcatctgtatttatggctacttcccatcactcgaattaccacctgaactccacctcttgtcagctcagtggcagcattagattctcataggagcacaaatcctattgtgaactctgcatgcaagggatctaggctatgcgctccttatgagaatctaatgcttgatgacctgaggtgtaacagtttcatcctgaaaccacccttcaccctgcagtctgtggaaaaattgtcttccacaaaactggtccctggtgccaaaaatgttggggaccactgctctagagagaggtcatgatatcataccaaccaaatggaaatgacaaatgttttatgtcaagtgttaattgcagaaataaatcttttttttttttttttggtagaaaacaaagaggcatactctgatttttatactctgtttttgcaggtgctcttttctttgaatggagatttgatgagcaagtggttaggatgcagggagagctactatgggtgatattttccttgtttaggagctgtgagttaaaattgtatcctttgtggtttatctaaggaaagtcaaatcttgacagaaaacatttttccttggaaggtcaactctcagacattgtattttggtttccctcagtcctcataacttccttcttgctgaacatattttattctcttttcagagaaggaaaataaaaaggattctaaaagtttgatgcattggaaaaatttccttgaggcatttagcaacacatagaaaatgggctttgattcttttccaaaacttttagccatagggtcttttatagacagggatagtaaaatgaaaattgagaaatataagatgaaaaggaatgataaaaatatcttttagggggcttttaattggtgatctgaaatcttgggagaagctgttcttttcaggcctgaggtgctcttgactgtcgcctgcgcactgtgtaccccgagcaacattctaagggtgtgctttcgccttggctaactcctttgacctcattcttcatatagtagtctaggaaaaagttgcaggtaatttaaactgtctagtggtacatagtaactaaatttctattcctatgagaaatgagaattatttatttgccatcaacacattttatactttgcatctccaaatttattgtggcgagacttgtccattgtgaaagttagagaacattatgtttgtatcatttctttcataaaacctcaagagcatttttaagcccttttcatcagacccagtgaaaactaaggatagatgtttaaaaactggaggtctcctgataaggagaacacaatccaccattgtcatttaagtaataagacaggaaattgaccttgacgctttcttgttaaatagatttaacaggaacatctgcacatcttttttccttgtgcactatttgtttaattgcagtggattaatacagcaagagtgccacattataactaggcaattatccattcttcaagacttagttattgtcacactaattgatcgtttaaggcataagatggtctagcattaggaacatgtgaagctaatctgctcaaaaagatcaacaaattaatattgttgctgatatttgcataattggctgcaattatttaatgtttaattgggttgatcaaatgagattcagcaattcacaagtgcattaatataaacagaactggtggcacttaaaatgataatgattaacttatattgcatgttctcttcctttcacttttttcagtttctacatttcagaccgagcttgtcagcttttttgaaaacacatcagtagaaaccaagattttaaaatgaagtgtcaagacaaaggcaaaacctgagcagttcctaaaaagatttgctgttagaaattttctttgtggcagtcatttattaaggattcaactcgtgatacaccaaaagaagagttgacttcagagatgtgttccatgctctctagcacaggaatgaataaatttataacacctgctttagcctttgttttcaaaagcacaaaggaaaagtgaaagggaaagagaaacaagtgactgagaagtcttgttaaggaatcaggttttttctacctggtaaacattctctattcttttctcaaaagattgctgtaagaaaaaatgtaagac

SEQ ID NO: 111929 - DNA, 549 bp, Homo sapiens
  Payload ID: 1937
  Gene Symbol: BCAT1
  Gene Name: branched chain amino-acid transaminase 1, cytosolic
  ENST ID: ENST00000546285
  CDS Start-End: 118-549
cttgctgcagccgggaccgcgctctgcagccgcagacccggtccacacggccaggggctacgacccttgggatctgccctccgctcagctcgagcttccctcgtggccgacggaacaatgaaggctaaagacctaatagtcacaccagctaccattttaaaggaaaaaccagaccccaataatctggtttttggaactgtgttcacggatcatatgctgacggtggagtggtcctcagagtttggatgggagaaacctcatatcaagcctcttcagaacctgtcattgcaccctggctcatcagctttgcactatgcagtggaattatttgaaggattgaaggcatttcgaggagtagataataaaattcgactgtttcagccaaacctcaacatggatagaatgtatcgctctgctgtgagggcaactctgccggtatttgacaaagaagagctcttagagtgtattcaacagcttgtgaaattggatcaagaatgggtcccatattcaacatctgctagtctgtatattcgtcctacattcattgga

SEQ ID NO: 111930 - DNA, 4694 bp, Homo sapiens
  Payload ID: 1937
  Gene Symbol: BCAT1
  Gene Name: branched chain amino-acid transaminase 1, cytosolic
  Uniprot ID: P54687
  ENST ID: ENST00000538118
  CDS Start-End: 332-1489
tgattgacaagaccacgaggctgagcgcgccctggagatttttctataaatggcttaacaccccagtctagactatttgctcggatataagggagacaattgtttttttgttctttgccggcgaaccctggctctgtagggctgacctggaatttaaccagtcttccctgagccggcggaggaggacaaaaaccgccgcgaccccggcagggtgggaagtgcagggcagcgctcccaagacacgcttgttggaggttcgggcctgggtgcttggttgtctgagcctccttttttgtgtttgcctgggtcctggagaggagcgcacggtatcatggattgcagtaacggatgctccgcagagtgtaccggagaaggaggatcaaaagaggtggtggggacttttaaggctaaagacctaatagtcacaccagctaccattttaaaggaaaaaccagaccccaataatctggtttttggaactgtgttcacggatcatatgctgacggtggagtggtcctcagagtttggatgggagaaacctcatatcaagcctcttcagaacctgtcattgcaccctggctcatcagctttgcactatgcagtggaattatttgaaggattgaaggcatttcgaggagtagataataaaattcgactgtttcagccaaacctcaacatggatagaatgtatcgctctgctgtgagggcaactctgccggtatttgacaaagaagagctcttagagtgtattcaacagcttgtgaaattggatcaagaatgggtcccatattcaacatctgctagtctgtatattcgtcctacattcattggaactgagccttctcttggagtcaagaagcctaccaaagccctgctctttgtactcttgagcccagtgggaccttatttttcaagtggaacctttaatccagtgtccctgtgggccaatcccaagtatgtaagagcctggaaaggtggaactggggactgcaagatgggagggaattacggctcatctctttttgcccaatgtgaagcagtagataatgggtgtcagcaggtcctgtggctctatggagaggaccatcagatcactgaagtgggaactatgaatctttttctttactggataaatgaagatggagaagaagaactggcaactcctccactagatggcatcattcttccaggagtgacaaggcggtgcattctggacctggcacatcagtggggtgaatttaaggtgtcagagagatacctcaccatggatgacttgacaacagccctggaggggaacagagtgagagagatgtttggctctggtacagcctgtgttgtttgcccagtttctgatatactgtacaaaggcgagacaatacacattccaactatggagaatggtcctaagctggcaagccgcatcttgagcaaattaactgatatccagtatggaagagaagagagcgactggacaattgtgctatcctgaatggaaaatagaggatacaatggaaaatagaggataccaactgtatgctactgggacagactgttgcatttgaattgtgatagatttctttggctacctgtgcataatgtagtttgtagtatcaatgtgttacaagagtgattgtttcttcatgccagagaaaatgaattgcaatcatcaaatggtgtttcataacttggtagtagtaacttaccttaccttacctagaaaaacattaatgtaagccatataacatgggattttcctcaatgattttagtgcctccttttgtacttcactcagatactaaatagtagtttattctttaatataagttacattctgctcctcaaacaaatgcaattttttgtgtgtgtttgaaagctaatttgagaaaatttcataggttacatttcctgcagcctatctttatccacagaaagtgttttcttttttttaaatcaagacttttaaaactggatttcctcccatcactgttttttgaaggtcctccaagtccgtgttaaggtaaatatctgttttcttcctgatgtcacagcctgagcatactctgtgcattaggaagacctgagtgcatttcccaccattgtcctttccacattatgttgtagctggctggctgtcaggcgactacaagactgagggtcttgtgccttatagatctttgtatcccccatggctgacatatagtaggtactcagtaaatggttttataatgaatcagtgaacattttgcttctatagaagtgtaccttctttgtttctatattatgaaacctctttattagaatttgtgattgattctgacagtgtatagatttaccttatattgtctttattttccatgagctactaagtcattagagatactctgaagcatagttagtttaggaaatcacttcatattgattgtattagaattatcttggaattgaagatatatccctagagcaggggaccccaacccccaggccatgggccacacagcaggaagaggtgagtggtgggccattgaggagcttcatctgtatttatggctacttcccatcactcgaattaccacctgaactccacctcttgtcagctcagtggcagcattagattctcataggagcacaaatcctattgtgaactctgcatgcaagggatctaggctatgcgctccttatgagaatctaatgcttgatgacctgaggtgtaacagtttcatcctgaaaccacccttcaccctgcagtctgtggaaaaattgtcttccacaaaactggtccctggtgccaaaaatgttggggaccactgctctagagagaggtcatgatatcataccaaccaaatggaaatgacaaatgttttatgtcaagtgttaattgcagaaataaatcttttttttttttttttggtagaaaacaaagaggcatactctgatttttatactctgtttttgcaggtgctcttttctttgaatggagatttgatgagcaagtggttaggatgcagggagagctactatgggtgatattttccttgtttaggagctgtgagttaaaattgtatcctttgtggtttatctaaggaaagtcaaatcttgacagaaaacatttttccttggaaggtcaactctcagacattgtattttggtttccctcagtcctcataacttccttcttgctgaacatattttattctcttttcagagaaggaaaataaaaaggattctaaaagtttgatgcattggaaaaatttccttgaggcatttagcaacacatagaaaatgggctttgattcttttccaaaacttttagccatagggtcttttatagacagggatagtaaaatgaaaattgagaaatataagatgaaaaggaatgataaaaatatcttttagggggcttttaattggtgatctgaaatcttgggagaagctgttcttttcaggcctgaggtgctcttgactgtcgcctgcgcactgtgtaccccgagcaacattctaagggtgtgctttcgccttggctaactcctttgacctcattcttcatatagtagtctaggaaaaagttgcaggtaatttaaactgtctagtggtacatagtaactaaatttctattcctatgagaaatgagaattatttatttgccatcaacacattttatactttgcatctccaaatttattgtggcgagacttgtccattgtgaaagttagagaacattatgtttgtatcatttctttcataaaacctcaagagcatttttaagcccttttcatcagacccagtgaaaactaaggatagatgtttaaaaactggaggtctcctgataaggagaacacaatccaccattgtcatttaagtaataagacaggaaattgaccttgacgctttcttgttaaatagatttaacaggaacatctgcacatcttttttccttgtgcactatttgtttaattgcagtggattaatacagcaagagtgccacattataactaggcaattatccattcttcaagacttagttattgtcacactaattgatcgtttaaggcataagatggtctagcattaggaacatgtgaagctaatctgctcaaaaagatcaacaaattaatattgttgctgatatttgcataattggctgcaattatttaatgtttaattgggttgatcaaatgagattcagcaattcacaagtgcattaatataaacagaactggtggcacttaaaatgataatgattaacttatattgcatgttctcttcctttcacttttttcagtttctacatttcagaccgagcttgtcagcttttttgaaaacacatcagtagaaaccaagattttaaaatgaagtgtcaagacaaaggcaaaacctgagcagttcctaaaaagatttgctgttagaaattttctttgtggcagtcatttattaaggattcaactcgtgatacaccaaaagaagagttgacttcagagatgtgttccatgctctctagcacaggaatgaataaatttataacacctgctttagcctttgttttcaaaagcacaaaggaaaagtgaaagggaaagagaaacaagtgactgagaagtcttgttaaggaatcaggttttttctacctggtaaacattctctattcttttctcaaaagattgctgtaagaaaaaatgtaagacaaaaaaaaaaaaaaaaaa

SEQ ID NO: 111931 - DNA, 1360 bp, Homo sapiens
  Payload ID: 1937
  Gene Symbol: BCAT1
  Gene Name: branched chain amino-acid transaminase 1, cytosolic
  Uniprot ID: P54687
  ENST ID: ENST00000539780
  CDS Start-End: 112-1161
gcagccgggaccgcgctctgcagccgcagacccggtccacacggccaggggctacgacccttgggatctgccctccgctcagctcgagcttccctcgtggccgacggaacaatgaaggattgcagtaacggatgctccgcagagtgtaccggagaaggaggatcaaaagaggtggtggggacttttaaggctaaagacctaatagtcacaccagctaccattttaaaggaaaaaccagaccccaataatctggtttttggaactgtgttcacggatcatatgctgacggtggagtggtcctcagagtttggatgggagaaacctcatatcaagcctcttcagaacctgtcattgcaccctggctcatcagctttgcactatgcagtggaagtatttgacaaagaagagctcttagagtgtattcaacagcttgtgaaattggatcaagaatgggtcccatattcaacatctgctagtctgtatattcgtcctacattcattggaactgagccttctcttggagtcaagaagcctaccaaagccctgctctttgtactcttgagcccagtgggaccttatttttcaagtggaacctttaatccagtgtccctgtgggccaatcccaagtatgtaagagcctggaaaggtggaactggggactgcaagatgggagggaattacggctcatctctttttgcccaatgtgaagcagtagataatgggtgtcagcaggtcctgtggctctatggagaggaccatcagatcactgaagtgggaactatgaatctttttctttactggataaatgaagatggagaagaagaactggcaactcctccactagatggcatcattcttccaggagtgacaaggcggtgcattctggacctggcacatcagtggggtgaatttaaggtgtcagagagatacctcaccatggatgacttgacaacagccctggaggggaacagagtgagagagatgtttggctctggtacagcctgtgttgtttgcccagtttctgatatactgtacaaaggcgagacaatacacattccaactatggagaatggtcctaagctggcaagccgcatcttgagcaaattaactgatatccagtatggaagagaagagagcgactggacaattgtgctatcctgaatggaaaatagaggatacaatggaaaatagaggataccaactgtatgctactgggacagactgttgcatttgaattgtgatagatttctttggctacctgtgcataatgtagtttgtagtatcaatgtgttacaagagtgattgtttcttcatgccagagaaaatgaattgcaatcatcaaatggtgtttcataacttg

SEQ ID NO: 111932 - DNA, 1811 bp, Homo sapiens
  Payload ID: 1937
  Gene Symbol: BCAT1
  Gene Name: branched chain amino-acid transaminase 1, cytosolic
  Uniprot ID: P54687
  ENST ID: ENST00000539282
  CDS Start-End: 88-1284
gcttggccacaccgcctgctttcgcttccagccgcgcgctccgtgccactgccgctctctgcagccccgcgtccccgcagcctccccatggccagcccgcttcgctccgctgcggcccttgcccgccaggattgcagtaacggatgctccgcagagtgtaccggagaaggaggatcaaaagaggtggtggggacttttaaggctaaagacctaatagtcacaccagctaccattttaaaggaaaaaccagaccccaataatctggtttttggaactgtgttcacggatcatatgctgacggtggagtggtcctcagagtttggatgggagaaacctcatatcaagcctcttcagaacctgtcattgcaccctggctcatcagctttgcactatgcagtggaattatttgaaggattgaaggcatttcgaggagtagataataaaattcgactgtttcagccaaacctcaacatggatagaatgtatcgctctgctgtgagggcaactctgccggtatttgacaaagaagagctcttagagtgtattcaacagcttgtgaaattggatcaagaatgggtcccatattcaacatctgctagtctgtatattcgtcctacattcattggaactgagccttctcttggagtcaagaagcctaccaaagccctgctctttgtactcttgagcccagtgggaccttatttttcaagtggaacctttaatccagtgtccctgtgggccaatcccaagtatgtaagagcctggaaaggtggaactggggactgcaagatgggagggaattacggctcatctctttttgcccaatgtgaagcagtagataatgggtgtcagcaggtcctgtggctctatggagaggaccatcagatcactgaagtgggaactatgaatctttttctttactggataaatgaagatggagaagaagaactggcaactcctccactagatggcatcattcttccaggagtgacaaggcggtgcattctggacctggcacatcagtggggtgaatttaaggtgtcagagagatacctcaccatggatgacttgacaacagccctggaggggaacagagtgagagagatgtttggctctggtacagcctgtgttgtttgcccagtttctgatatactgtacaaaggcgagacaatacacattccaactatggagaatggtcctaagctggcaagccgcatcttgagcaaattaactgatatccagtatggaagagaagagagcgactggacaattgtgctatcctgaatggaaaatagaggatacaatggaaaatagaggataccaactgtatgctactgggacagactgttgcatttgaattgtgatagatttctttggctacctgtgcataatgtagtttgtagtatcaatgtgttacaagagtgattgtttcttcatgccagagaaaatgaattgcaatcatcaaatggtgtttcataacttggtagtagtaacttaccttaccttacctagaaaaacattaatgtaagccatataacatgggattttcctcaatgattttagtgcctccttttgtacttcactcagatactaaatagtagtttattctttaatataagttacattctgctcctcaaacaaatgcaattttttgtgtgtgtttgaaagctaatttgagaaaatttcataggttacatttcctgcagcctatctttatccacagaaagtgttttcttttttttaaatcaagacttttaaaactggatttcctcccatcactgttttttgaaggtcctccaagtccgtgttaa

SEQ ID NO: 111933 - DNA, 675 bp, Homo sapiens
  Payload ID: 1937
  Gene Symbol: BCAT1
  Gene Name: branched chain amino-acid transaminase 1, cytosolic
  ENST ID: ENST00000612790
  CDS Start-End: 1-675
tgaaggcatttcgaggagtagataataaaattcgactgtttcagccaaacctcaacatggatagaatgtatcgctctgctgtgagggcaactctgccggtatttgacaaagaagagctcttagagtgtattcaacagcttgtgaaattggatcaagaatgggtcccatattcaacatctgctagtctgtatattcgtcctacattcattggaactgagccttctcttggagtcaagaagcctaccaaagccctgctctttgtactcttgagcccagtgggaccttatttttcaagtggaacctttaatccagtgtccctgtgggccaatcccaagtatgtaagagcctggaaaggtggaactggggactgcaagatgggagggaattacggctcatctctttttgcccaatgtgaagcagtagataatgggtgtcagcaggtcctgtggctctatggagaggaccatcagatcactgaagtgggaactatgaatctttttctttactggataaatgaagatggagaagaagaactggcaactcctccactagatggcatcattcttccaggagtgacaaggcggtgcattctggacctggcacatcagtgggtgggtgcctttgatatgaacaacttttgtaagcctgaaataaaaaataatcaaaataagccca

SEQ ID NO: 111934 - DNA, 1552 bp, Homo sapiens
  Payload ID: 1938
  Gene Symbol: BCAT2
  Gene Name: branched chain amino-acid transaminase 2, mitochondrial
  Uniprot ID: O15382
  ENST ID: ENST00000316273
  CDS Start-End: 14-1192
cgccgcacggatcatggccgcagccgctctggggcagatctgggcacgaaagcttctctctgtcccttggcttctgtgtggtcccagaagatatgcctcctccagtttcaaggctgcagacctgcagctggaaatgacacagaagcctcataagaagcctggccccggcgagcccctggtgtttgggaagacatttaccgaccacatgctgatggtggaatggaatgacaagggctggggccagccccgaatccagcccttccagaacctcacgctgcacccagcctcctccagcctccactactccctgcagctgtttgagggcatgaaggcgttcaaaggcaaagaccagcaggtgcgcctcttccgcccctggctcaacatggaccggatgctgcgctcagccatgcgcctgtgcctgccgagtttcgacaagctggagttgctggagtgcatccgccggctcatcgaagtggacaaggactgggtccccgatgccgccggcaccagcctctatgtgcggcctgtgctcattgggaacgagccctcgctgggtgtcagccagcccacgcgcgcgctcctgttcgtcattctctgcccagtgggtgcctacttccctggaggctccgtgaccccggtctccctcctggccgacccagccttcatccgggcctgggtgggcggggtcggcaactacaagttaggtgggaattatgggcccaccgtgttagtgcaacaggaggcactcaagcggggctgtgaacaggtcctctggctgtatgggcccgaccaccagctcaccgaggtgggaaccatgaacatctttgtctactggacccacgaagatggggtgctggagctggtgacgcccccgctgaatggtgttatcctgcctggagtggtcagacagagtctactggacatggctcagacctggggtgagttccgggtggtggagcgcacgatcaccatgaagcagttgctgcgggccctggaggagggccgcgtgcgggaagtctttggctcgggcaccgcttgccaggtctgcccagtgcaccgaatcctgtacaaagacaggaacctccacattcccaccatggaaaatgggcctgagctgatcctccgcttccagaaggagctgaaggagatccagtacggaatcagagcccacgagtggatgttcccggtgtgaagctgcaggctgtgctccagatccaccgacccgtagcatctcgtcacgccagcactcgcctccctaccaatgactcacctgaagtgcaatacgaaataaaaggccagcgggcggcgtctgggtctctggcgcccccatgtggttgcgacactcccaaagccgtaagggccgacccaggcatcttggcccccagcccctcgtcgcgggttcaggtccgcccattactccttgtcgtgcggtcaaggatacaccttggccccgattccggatctctccgttctcaggccagacccctggtgctgccgttgatttttttttctctgtctttgctgcaattttgaaataaaatgccaaagaaca

SEQ ID NO: 111935 - DNA, 2041 bp, Homo sapiens
  Payload ID: 1938
  Gene Symbol: BCAT2
  Gene Name: branched chain amino-acid transaminase 2, mitochondrial
  ENST ID: ENST00000402551
  CDS Start-End: 622-1680
agttacgcgccgcacggatcatggccgcagccgctctggggcagaagcatggctgcaaggctgagcagtctagatgtcgccacccaaaggcaatctggggacccacgctctgatcaccccggaatccctggagcctcacaccagcaagaccacgctgcaggcccatctcccagcaactcacctagcgacaagtgaccacgcccattcacgtccatcttccagaatcagtgccaactcacccagctcacagggcaggccaggccaggccactctgtctctctcaacctcacgccccaacgcctccccacagggctggggaaagaggccttgtgaggtcaaaggtcaccagagagggcccagcctgctggacacagccagacctgctcttcctactcccctctgggaggacccgcctgagcctcatgcagtgaggactgcagtggctccccaggcccctgtagctgcccctcagccccaggggctgaagggaattggagtcactgccaaaatgggtttgtatttcagatctgggcacgaaagcttctctctgtcccttggcttctgtgtggtcccagaagatatgcctcctccagtttcaaggctgcagacctgcagctggaaatgacacagaagcctcataagaagcctggccccggcgagcccctggtgtttgggaagacatttaccgaccacatgctgatggtggaatggaatgacaagggctggggccagccccgaatccagcccttccagaacctcacgctgcacccagcctcctccagcctccactactccctgcagctgtttgagggcatgaaggcgttcaaaggcaaagaccagcaggtgcgcctcttccgcccctggctcaacatggaccggatgctgcgctcagccatgcgcctgtgcctgccgagtttcgacaagctggagttgctggagtgcatccgccggctcatcgaagtggacaaggactgggtccccgatgccgccggcaccagcctctatgtgcggcctgtgctcattgggaacgagccctcgctgggtgtcagccagcccacgcgcgcgctcctgttcgtcattctctgcccagtgggtgcctacttccctggaggctccgtgaccccggtctccctcctggccgacccagccttcatccgggcctgggtgggcggggtcggcaactacaagttaggtgggaattatgggcccaccgtgttagtgcaacaggaggcactcaagcggggctgtgaacaggtcctctggctgtatgggcccgaccaccagctcaccgaggtgggaaccatgaacatctttgtctactggacccacgaagatggggtgctggagctggtgacgcccccgctgaatggtgttatcctgcctggagtggtcagacagagtctactggacatggctcagacctggggtgagttccgggtggtggagcgcacgatcaccatgaagcagttgctgcgggccctggaggagggccgcgtgcgggaagtctttggctcgggcaccgcttgccaggtctgcccagtgcaccgaatcctgtacaaagacaggaacctccacattcccaccatggaaaatgggcctgagctgatcctccgcttccagaaggagctgaaggagatccagtacggaatcagagcccacgagtggatgttcccggtgtgaagctgcaggctgtgctccagatccaccgacccgtagcatctcgtcacgccagcactcgcctccctaccaatgactcacctgaagtgcaatacgaaataaaaggccagcgggcggcgtctgggtctctggcgcccccatgtggttgcgacactcccaaagccgtaagggccgacccaggcatcttggcccccagcccctcgtcgcgggttcaggtccgcccattactccttgtcgtgcggtcaaggatacaccttggccccgattccggatctctccgttctcaggccagacccctggtgctgccgttgatttttttttctctgtctttgctgcaattttgaaataaaatgccaaagaacac

SEQ ID NO: 111936 - DNA, 1272 bp, Homo sapiens
  Payload ID: 1938
  Gene Symbol: BCAT2
  Gene Name: branched chain amino-acid transaminase 2, mitochondrial
  Uniprot ID: O15382
  ENST ID: ENST00000545387
  CDS Start-End: 6-908
ggatcatggccgcagccgctctggggcagctgtttgagggcatgaaggcgttcaaaggcaaagaccagcaggtgcgcctcttccgcccctggctcaacatggaccggatgctgcgctcagccatgcgcctgtgcctgccgagtttcgacaagctggagttgctggagtgcatccgccggctcatcgaagtggacaaggactgggtccccgatgccgccggcaccagcctctatgtgcggcctgtgctcattgggaacgagccctcgctgggtgtcagccagcccacgcgcgcgctcctgttcgtcattctctgcccagtgggtgcctacttccctggaggctccgtgaccccggtctccctcctggccgacccagccttcatccgggcctgggtgggcggggtcggcaactacaagttaggtgggaattatgggcccaccgtgttagtgcaacaggaggcactcaagcggggctgtgaacaggtcctctggctgtatgggcccgaccaccagctcaccgaggtgggaaccatgaacatctttgtctactggacccacgaagatggggtgctggagctggtgacgcccccgctgaatggtgttatcctgcctggagtggtcagacagagtctactggacatggctcagacctggggtgagttccgggtggtggagcgcacgatcaccatgaagcagttgctgcgggccctggaggagggccgcgtgcgggaagtctttggctcgggcaccgcttgccaggtctgcccagtgcaccgaatcctgtacaaagacaggaacctccacattcccaccatggaaaatgggcctgagctgatcctccgcttccagaaggagctgaaggagatccagtacggaatcagagcccacgagtggatgttcccggtgtgaagctgcaggctgtgctccagatccaccgacccgtagcatctcgtcacgccagcactcgcctccctaccaatgactcacctgaagtgcaatacgaaataaaaggccagcgggcggcgtctgggtctctggcgcccccatgtggttgcgacactcccaaagccgtaagggccgacccaggcatcttggcccccagcccctcgtcgcgggttcaggtccgcccattactccttgtcgtgcggtcaaggatacaccttggccccgattccggatctctccgttctcaggccagacccctggtgctgccgttgatttttttttctctgtctttgctgcaattttgaaataaaatgccaaagaacacaca

SEQ ID NO: 111937 - DNA, 1664 bp, Homo sapiens
  Payload ID: 1938
  Gene Symbol: BCAT2
  Gene Name: branched chain amino-acid transaminase 2, mitochondrial
  ENST ID: ENST00000593515
  CDS Start-End: 1-1338
atctgggcacgaaagcttctctctgtcccttggcttctgtgtggtcccagaagatatgcctcctccagtttcaaggctgcagacctgcagctggaaatgacacagaagcctcataagaagcctggccccggcgagcccctggtgtttgggaagacatttaccgaccacatgctgatggtggaatggaatgacaagggctggggccagccccgaatccagcccttccagaacctcacgctgcacccagcctcctccagcctccactactccctgcagctgtttgagggcatgaaggcgttcaaaggcaaagaccagcaggtgcgcctcttccgcccctggctcaacatggaccggatgctgcgctcagccatgcgcctgtgcctgccgagtttcgacaagctggagttgctggagtgcatccgccggctcatcgaagtggacaaggactgggtccccgatgccgccggcaccagcctctatgtgcggcctgtgctcattgggaacgagccctcgctgggtgtcagccagcccacgcgcgcgctcctgttcgtcattctctgcccagtgggtgcctacttccctggaggctccgtgaccccggtctccctcctggccgacccagccttcatccgggcctgggtgggcggggtcggcaactacaagttaggtgggaattatgggcccaccgtgttagtgcaacaggaggcactcaagcggggctgtgaacaggtcctctggctgtatgggcccgaccaccagctcaccgaggtgggaaccatgaacatctttgtctactggacccacgaagatggggtgctggagctggtgacgcccccgctgaatggtgttatcctgcctggagtggtcagacagagtctactggacatggctcagacctggggtgagttccgggtggtggagcgcacgatcaccatgaagcagttgctgcgggccctggaggagggccgcgtgcgggaagtctttggctcgggcaccgcttgccaggtctgcccagtgcaccgaatcctgtacaaagacaggaacctccacattcccaccatggaaaatgggcctgagctgatcctccgcttccagaaggagctgaaggagatccagtaccaggaacagataatggcctttcttattgaggccctggagagtgggctttctgtgctgctctgtggcctggaaaaccccttggggctaaatcaccctttcctgggagctcccggagccctggatatgtcttcagctttggaaaccccttcctgtgatcctctgcggctcctgggtgccctgtacggaatcagagcccacgagtggatgttcccggtgtgaagctgcaggctgtgctccagatccaccgacccgtagcatctcgtcacgccagcactcgcctccctaccaatgactcacctgaagtgcaatacgaaataaaaggccagcgggcggcgtctgggtctctggcgcccccatgtggttgcgacactcccaaagccgtaagggccgacccaggcatcttggcccccagcccctcgtcgcgggttcaggtccgcccattactccttgtcgtgcggtcaaggatacaccttggccccgattccggatctctccgttctcaggccagacccctggtgctgccgttgatttttttttctctgtct

SEQ ID NO: 111938 - DNA, 1579 bp, Homo sapiens
  Payload ID: 1938
  Gene Symbol: BCAT2
  Gene Name: branched chain amino-acid transaminase 2, mitochondrial
  ENST ID: ENST00000597011
  CDS Start-End: 205-1263
tggcctgcagccggtccgactcggcgccgctcctcccgccctggggttccgctgcagggcgcggaggaggatggcgccctttggaaaggagcacgaggctttaatgggatctgggcacgaaagcttctctctgtcccttggcttctgtgtggtcccagaagatatgcctcctccagtttcaaggctgcagacctgcagctggaaatgacacagaagcctcataagaagcctggccccggcgagcccctggtgtttgggaagacatttaccgaccacatgctgatggtggaatggaatgacaagggctggggccagccccgaatccagcccttccagaacctcacgctgcacccagcctcctccagcctccactactccctgcagctgtttgagggcatgaaggcgttcaaaggcaaagaccagcaggtgcgcctcttccgcccctggctcaacatggaccggatgctgcgctcagccatgcgcctgtgcctgccgagtttcgacaagctggagttgctggagtgcatccgccggctcatcgaagtggacaaggactgggtccccgatgccgccggcaccagcctctatgtgcggcctgtgctcattgggaacgagccctcgctgggtgtcagccagcccacgcgcgcgctcctgttcgtcattctctgcccagtgggtgcctacttccctggaggctccgtgaccccggtctccctcctggccgacccagccttcatccgggcctgggtgggcggggtcggcaactacaagttaggtgggaattatgggcccaccgtgttagtgcaacaggaggcactcaagcggggctgtgaacaggtcctctggctgtatgggcccgaccaccagctcaccgaggtgggaaccatgaacatctttgtctactggacccacgaagatggggtgctggagctggtgacgcccccgctgaatggtgttatcctgcctggagtggtcagacagagtctactggacatggctcagacctggggtgagttccgggtggtggagcgcacgatcaccatgaagcagttgctgcgggccctggaggagggccgcgtgcgggaagtctttggctcgggcaccgcttgccaggtctgcccagtgcaccgaatcctgtacaaagacaggaacctccacattcccaccatggaaaatgggcctgagctgatcctccgcttccagaaggagctgaaggagatccagtacggaatcagagcccacgagtggatgttcccggtgtgaagctgcaggctgtgctccagatccaccgacccgtagcatctcgtcacgccagcactcgcctccctaccaatgactcacctgaagtgcaatacgaaataaaaggccagcgggcggcgtctgggtctctggcgcccccatgtggttgcgacactcccaaagccgtaagggccgacccaggcatcttggcccccagcccctcgtcgcgggttcaggtccgcccattactccttgtcgtgcggtcaaggatacaccttggccccgattccggatctctccgttctcaggccagacccctggtgctgccgttgattttttt

SEQ ID NO: 111939 - DNA, 1329 bp, Homo sapiens
  Payload ID: 1938
  Gene Symbol: BCAT2
  Gene Name: branched chain amino-acid transaminase 2, mitochondrial
  ENST ID: ENST00000598162
  CDS Start-End: 21-1238
agttacgcgccgcacggatcatggccgcagccgctctggggcagatctgggcacgaaagcttctctctgtcccttggcttctgtgtggtcccagaagatatgcctcctccagtttcaaggctgcagacctgcagctggaaatgacacagaagcctcataagaagcctggccccggcgagcccctggtgtttgggaagacatttaccgaccacatgctgatggtggaatggaatgacaagggctggggccagccccgaatccagcccttccagaacctcacgctgcacccagcctcctccagcctccactactccctgcagctgtttgagggcatgaaggcgttcaaaggcaaagaccagcaggtgcgcctcttccgcccctggctcaacatggaccggatgctgcgctcagccatgcgcctgtgcctgccgagtttcgacaagctggagttgctggagtgcatccgccggctcatcgaagtggacaaggactgggtccccgatgccgccggcaccagcctctatgtgcggcctgtgctcattgggaacgagccctcgctgggtgtcagccagcccacgcgcgcgctcctgttcgtcattctctgcccagtgggtgcctacttccctggaggctccgtgaccccggtctccctcctggccgacccagccttcatccgggcctgggtgggcggggtcggcaactacaagttaggtgggaattatgggcccaccgtgttagtgcaacaggaggcactcaagcggggctgtgaacaggtcctctggctgtatgggcccgaccaccagctcaccgaggtgggaaccatgaacatctttgtctactggacccacgaagatggggtgctggagctggtgacgcccccgctgaatggtgttatcctgcctggagtggtcagacagagtctactggacatggctcagacctggggtgagttccgggtggtggagcgcacgatcaccatgaagcagttgctgcgggccctggaggagggccgcgtgcgggaagtctttggctcgggcaccgcttgccaggtctgcccagtgcaccgaatcctgtacaaagacaggaacctccacattcccaccatggaaaatgggcctgagctgatcctccgcttccagaaggagctgaaggagatccaggtgagctgcagggagctggggaatgggctgggagcttgttccctggagaagttggtgtcccatgagcccctggactaacagccagcctccttcagtagtaccaggaacagataatggcctttcttattgaggccctggagagtgggctttctgtgctgctctgtggcct

SEQ ID NO: 111940 - DNA, 1449 bp, Homo sapiens
  Payload ID: 1938
  Gene Symbol: BCAT2
  Gene Name: branched chain amino-acid transaminase 2, mitochondrial
  ENST ID: ENST00000599246
  CDS Start-End: 23-964
acagttacgcgccgcacggatcatggccgcagccgctctggggcagctgtttgagggcatgaaggcgttcaaaggcaaagaccagcaggtgcgcctcttccgcccctggctcaacatggaccggatgctgcgctcagccatgcgcctgtgcctgccgagtttcgacaagctggagttgctggagtgcatccgccggctcatcgaagtggacaaggactgggtccccgatgccgccggcaccagcctctatgtgcggcctgtgctcattgggaacgagccctcgctgggtgtcagccagcccacgcgcgcgctcctgttcgtcattctctgcccagtgggtgcctacttccctggaggctccgtgaccccggtctccctcctggccgacccagccttcatccgggcctgggtgggcggggtcggcaactacaagttaggtgggaattatgggcccaccgtgttagtgcaacaggaggcactcaagcggggctgtgaacaggtcctctggctgtatgggcccgaccaccagctcaccgaggtgggaaccatgaacatctttgtctactggacccacgaagatggggtgctggagctggtgacgcccccgctgaatggtgttatcctgcctggagtggtcagacagagtctactggacatggctcagacctggggtgagttccgggtggtggagcgcacgatcaccatgaagcagttgctgcgggccctggaggagggccgcgtgcgggaagtctttggctcgggcaccgcttgccaggtctgcccagtgcaccgaatcctgtacaaagacaggaacctccacattcccaccatggaaaatgggcctgagctgatcctccgcttccagaaggagctgaaggagatccaggtgagctgcagggagctggggaatgggctgggagcttgttccctggagaagttggtgtcccatgagcccctggactaacagccagcctccttcagtagtaccaggaacagataatggcctttcttattgaggccctggagagtgggctttctgtgctgctctgtggcctggaaaaccccttggggctaaatcaccctttcctgggagctcccggagccctggatatgtcttcagctttggaaaccccttcctgtgatcctctgcggctcctgggtgccctggtaggagaaaccccctctccgtgggcctctgaggcccctgggtgccctggtgggagaaactccctccctgtgatcctctgctgccccgggtgccctggtgggagaaaggccctttccatgaatcactgagaccttagccagccctctggccatctcagaggttggcctcccaagattccctggagccctgggctatccctttggccggagaaagcttcctcccatgagcctctggaccttggcccctctctggcaccagactgtttaatcccataaatctct

SEQ ID NO: 111941 - DNA, 1016 bp, Homo sapiens
  Payload ID: 1938
  Gene Symbol: BCAT2
  Gene Name: branched chain amino-acid transaminase 2, mitochondrial
  ENST ID: ENST00000601681
  CDS Start-End: 691-1016
accactggcctgcagccggtccgactcggcgccgctcctcccgccctggggttccgctgcagggcgcggaggaggatggcgccctttggaaaggagcacgaggctttaatgggaagcatggctgcaaggctgagcagtctagatgtcgccacccaaaggcaatctggggacccacgctctgatcaccccggaatccctggagcctcacaccagcaagaccacgctgcaggcccatctcccagcaactcacctagcgacaagtgaccacgcccattcacgtccatcttccagaatcagtgccaactcacccagctcacagggcaggccaggccaggccactctgtctctctcaacctcacgccccaacgcctccccacagggctggggaaagaggccttgtgaggtcaaaggtcaccagagagggcccagcctgctggacacagccagacctgctcttcctactcccctctgggaggacccgcctgagcctcatgcagtgaggactgcagtggctccccaggcccctgtagctgcccctcagccccaggggctgaagggaattggagtcactgccaaaatgggtttgtatttcagatctgggcacgaaagcttctctctgtcccttggcttctgtgtggtcccagaagatatgcctcctccagtttcaaggctgcagacctgcagctggaaatgacacagaagcctcataagaagcctggccccggcgagcccctggtgtttgggaagacatttaccgaccacatgctgatggtggaatggaatgacaagggctggggccagccccgaatccagcccttccagaacctcacgctgcacccagcctcctccagcctccactactccctgcagctgtttgagggcatgaaggcgttcaaaggcaaagaccagcaggtgcgcctcttccgcccctggctcaacatggaccggatgctgcgctcagccatgcgcctgtgcctgccgagtttcgacaagctggagttgctggagtgcatccg

SEQ ID NO: 111942 - DNA, 2103 bp, Homo sapiens
  Payload ID: 1939
  Gene Symbol: BCKDHA
  Gene Name: branched chain keto acid dehydrogenase E1, alpha polypeptide
  Uniprot ID: P12694
  ENST ID: ENST00000269980
  CDS Start-End: 369-1706
accaacaatctggctccgcccagtcccacctcctaactctggcaacgccattggacatttgggaacagaaggcaggccttggcattgatccgctttactctgggcccccgggccctaaatccctgaggccctggtcaggttgccctcttctttgcctgttacaggagtaactacaatgaggcgattggagaaaattttgggtagatagatttttttttctccaaatctctgtgcattctatctaccacagaacgggaagaagatggttttcttgtcagatggtgctggagtttgcgtcaggcacataaagaggcagccccgaatctagcctacgtgagtgccggaccgctgagtggttgttagccaagatggcggtagcgatcgctgcagcgagggtctggcggctaaaccgtggtttgagccaggctgccctcctgctgctgcggcagcctggggctcggggactggctagatctcacccccccaggcagcagcagcagttttcatctctggatgacaagccccagttcccaggggcctcggcggagtttatagataagttggaattcatccagcccaacgtcatctctggaatccccatctaccgcgtcatggaccggcaaggccagatcatcaaccccagcgaggacccccacctgccgaaggagaaggtgctgaagctctacaagagcatgacactgcttaacaccatggaccgcatcctctatgagtctcagcggcagggccggatctccttctacatgaccaactatggtgaggagggcacgcacgtggggagtgccgccgccctggacaacacggacctggtgtttggccagtaccgggaggcaggtgtgctgatgtatcgggactaccccctggaactattcatggcccagtgctatggcaacatcagtgacttgggcaaggggcgccagatgcctgtccactacggctgcaaggaacgccacttcgtcactatctcctctccactggccacgcagatccctcaggcggtgggggcggcgtacgcagccaagcgggccaatgccaacagggtcgtcatctgttacttcggcgagggggcagccagtgagggggacgcccatgccggcttcaacttcgctgccacacttgagtgccccatcatcttcttctgccggaacaatggctacgccatctccacgcccacctctgagcagtatcgcggcgatggcattgcagcacgaggccccgggtatggcatcatgtcaatccgcgtggatggtaatgatgtgtttgccgtatacaacgccacaaaggaggcccgacggcgggctgtggcagagaaccagcccttcctcatcgaggccatgacctacaggatcgggcaccacagcaccagtgacgacagttcagcgtaccgctcggtggatgaggtcaattactgggataaacaggaccaccccatctcccggctgcggcactatctgctgagccaaggctggtgggatgaggagcaggagaaggcctggaggaagcagtcccgcaggaaggtgatggaggcctttgagcaggccgagcggaagcccaaacccaaccccaacctactcttctcagacgtgtatcaggagatgcccgcccagctccgcaagcagcaggagtctctggcccgccacctgcagacctacggggagcactacccactggatcacttcgataagtgagacctgctcagcccacccccacccatcctcagctaccccgagaggtagccccactctaaggggagcagggggacctgacagcacaccactgtcttccccagtcagctccctctaaaatactcagcggccagggcggctgccactcttcacccctgctcctcccggctgttacattgtcaggggacagcatctgcagcagttgctgaggctccgtcagccccctcttcacctgttgttacagtgccttctcccaggggctgggtgagggcacattcaggactagaagcccctctgggcatggggtggacatggcaggtcagcctgtggaacttgcgcaggtgcgagtggccagcagaggtcacgaataaactgcatctctgcgcctggctctctacca

SEQ ID NO: 111943 - DNA, 1745 bp, Homo sapiens
  Payload ID: 1939
  Gene Symbol: BCKDHA
  Gene Name: branched chain keto acid dehydrogenase E1, alpha polypeptide
  Uniprot ID: P12694
  ENST ID: ENST00000457836
  CDS Start-End: 6-1352
ccaagatggcggtagcgatcgctgcagcgagggtctggcggctaaaccgtggtttgagccagcagcagcagttttcatctctggatgacaagccccagttcccaggggcctcggcggagtttatagataagttggaattcatccagcccaacgtcatctctggaatccccatctaccgcgtcatggaccggcaaggccagatcatcaaccccagcgaggacccccacctgccgaaggagaaggtgctgaagctctacaagagcatgacactgcttaacaccatggaccgcatcctctatgagtctcagcggcagggccggatctccttctacatgaccaactatggtgaggagggcacgcacgtggggagtgccgccgccctggacaacacggacctggtgtttggccagtaccgggaggcaggtgtgctgatgtatcgggactaccccctggaactattcatggcccagtgctatggcaacatcagtgacttgggcaaggggcgccagatgcctgtccactacggctgcaaggaacgccacttcgtcactatctcctctccactggccacgcagatccctcaggcggtgggggcggcgtacgcagccaagcgggccaatgccaacagggtcgtcatctgttacttcggcgagggggcagccagtgagggggacgcccatgccggcttcaacttcgctgccacacttgagtgccccatcatcttcttctgccggaacaatggctacgccatctccacgcccacctctgagcagtatcgcggcgatggcattgcagcacgaggccccgggtatggcatcatgtcaatccgcgtggatggtaatgatgtgtttgccgtatacaacgccacaaaggaggcccgacggcgggctgtggcagagaaccagcccttcctcatcgaggccatgacctacagttcatcccccatcctccctcctgacccccactccagggagcccacactgacctggggccccttgcccctgtgcaggatcgggcaccacagcaccagtgacgacagttcagcgtaccgctcggtggatgaggtcaattactgggataaacaggaccaccccatctcccggctgcggcactatctgctgagccaaggctggtgggatgaggagcaggagaaggcctggaggaagcagtcccgcaggaaggtgatggaggcctttgagcaggccgagcggaagcccaaacccaaccccaacctactcttctcagacgtgtatcaggagatgcccgcccagctccgcaagcagcaggagtctctggcccgccacctgcagacctacggggagcactacccactggatcacttcgataagtgagacctgctcagcccacccccacccatcctcagctaccccgagaggtagccccactctaaggggagcagggggacctgacagcacaccactgtcttccccagtcagctccctctaaaatactcagcggccagggcggctgccactcttcacccctgctcctcccggctgttacattgtcaggggacagcatctgcagcagttgctgaggctccgtcagccccctcttcacctgttgttacagtgccttctcccaggggctgggtgagggcacattcaggactagaagcccctctgggcatggggtggacatggcaggtcagcctgtggaacttgcgcaggtgcgagtggccagcagaggtcacgaataaactgcatctctgcgcctggctctct

SEQ ID NO: 111944 - DNA, 994 bp, Homo sapiens
  Payload ID: 1939
  Gene Symbol: BCKDHA
  Gene Name: branched chain keto acid dehydrogenase E1, alpha polypeptide
  ENST ID: ENST00000542943
  CDS Start-End: 9-994
tagccaagatggcggtagcgatcgctgcagcgagggtctggcggctaaaccgtggtttgagccaggctgccctcctgctgctgcggcagcctggggctcggggactggctagatctcacccccccaggcagcagcagcagttttcatctctggatgacaagccccagttcccaggggcctcggcggagtttatagataagttggaattcatccagcccaacgtcatctctggaatccccatctaccgcgtcatggaccggcaaggccagatcatcaaccccagcgaggacccccacggccggatctccttctacatgaccaactatggtgaggagggcacgcacgtggggagtgccgccgccctggacaacacggacctggtgtttggccagtaccgggaggcaggtgtgctgatgtatcgggactaccccctggaactattcatggcccagtgctatggcaacatcagtgacttgggcaaggggcgccagatgcctgtccactacggctgcaaggaacgccacttcgtcactatctcctctccactggccacgcagatccctcaggcggtgggggcggcgtacgcagccaagcgggccaatgccaacagggtcgtcatctgttacttcggcgagggggcagccagtgagggggacgcccatgccggcttcaacttcgctgccacacttgagtgccccatcatcttcttctgccggaacaatggctacgccatctccacgcccacctctgagcagtatcgcggcgatggcattgcagcacgaggccccgggtatggcatcatgtcaatccgcgtggatggtaatgatgtgtttgccgtatacaacgccacaaaggaggcccgacggcgggctgtggcagagaaccagcccttcctcatcgaggccatgacctacaggatcgggcaccacagcaccagtgacgacagttcagcgtaccgctcggtggatgaggtcaattactgggataaacagga

SEQ ID NO: 111945 - DNA, 562 bp, Homo sapiens
  Payload ID: 1939
  Gene Symbol: BCKDHA
  Gene Name: branched chain keto acid dehydrogenase E1, alpha polypeptide
  ENST ID: ENST00000544905
  CDS Start-End: 1-283
gagccaaggctggtgggatgaggagcaggagaaggcctggaggaagcagtcccgcaggaagacgtgtatcaggagatgcccgcccagctccgcaagcagcaggagtctctggcccgccacctgcagacctacggggagcactacccactggatcacttcgataagtgagacctgctcagcccacccccacccatcctcagctaccccgagaggtagccccactctaaggggagcagggggacctgacagcacaccactgtcttccccagtcagctccctctaaaatactcagcggccagggcggctgccactcttcacccctgctcctcccggctgttacattgtcaggggacagcatctgcagcagttgctgaggctccgtcagccccctcttcacctgttgttacagtgccttctcccaggggctgggtgagggcacattcaggactagaagcccctctgggcatggggtggacatggcaggtcagcctgtggaacttgcgcaggtgcgagtggccagcagaggtcacgaataaactgcatctctgcgcctggctctcta

SEQ ID NO: 111946 - DNA, 632 bp, Homo sapiens
  Payload ID: 1939
  Gene Symbol: BCKDHA
  Gene Name: branched chain keto acid dehydrogenase E1, alpha polypeptide
  ENST ID: ENST00000541315
  CDS Start-End: 1-632
tggaattcatccagcccaacgtcatctctggaatccccatctaccgcgtcatggaccggcaaggccagatcatcaaccccagcgaggacccccacctgccgaaggagaaggtgctgaagctctacaagagcatgacactgcttaacaccatggaccgcatcctctatgagtctcagcggcagggccggatctccttctacatgaccaactatggtgaggagggcacgcacgtggggagtgccgccgccctggacaacacggacctggtgtttggccagtaccgggaggcagaagcgaggcctcaccatgttgctcaggctggtctccaactcctgggctcaagcgatcctccaacgtcagcctctcaaagtgctgggattacaggtgtgctgatgtatcgggactaccccctggaactattcatggcccagtgctatggcaacatcagtgacttgggcaaggggcgccagatgcctgtccactacggctgcaaggaacgccacttcgtcactatctcctctccactggccacgcagatccctcaggcggtgggggcggcgtacgcagccaagcgggccaatgccaacagggtcgtcatctgttacttcggcgagggggcagccagtgagggg

SEQ ID NO: 111947 - DNA, 1251 bp, Homo sapiens
  Payload ID: 1939
  Gene Symbol: BCKDHA
  Gene Name: branched chain keto acid dehydrogenase E1, alpha polypeptide
  ENST ID: ENST00000595085
  CDS Start-End: 40-1251
ctacgtgagtgccggaccgctgagtggttgttagccaagatggcggtagcgatcgctgcagcgagggtctggcggctaaaccgtggtttgagccaggctgccctcctgctgctgcggcagcctggggctcggggactggctagatctcacccccccaggcagcagcagcagttttcatctctggatgacaagccccagttcccaggggcctcggcggagtttatagataagttggaattcatccagcccaacgtcatctctggaatccccatctaccgcgtcatggaccggcaaggccagatcatcaaccccagcgaggacccccacctgccgaaggagaaggtgctgaagctctacaagagcatgacactgcttaacaccatggaccgcatcctctatgagtctcagcggcagggccggatctccttctacatgaccaactatggtgaggagggcacgcacgtggggagtgccgccgccctggacaacacggacctggtgtttggccagtaccgggaggcaggtgtgctgatgtatcgggactaccccctggaactattcatggcccagtgctatggcaacatcagtgacttgggcaaggggcgccagatgcctgtccactacggctgcaaggaacgccacttcgtcactatctcctctccactggccacgcagatccctcaggcggtgggggcggcgtacgcagccaagcgggccaatgccaacagggtcgtcatctgttacttcggcgagggggcagccagtgagggggacgcccatgccggcttcaacttcgctgccacacttgagtgccccatcatcttcttctgccggaacaatggctacgccatctccacgcccacctctgagcagtatcgcggcgatggcattgcagcacgaggccccgggtatggcatcatgtcaatccgcgtggatggtaatgatgtgtttgccgtatacacagccacagggggtcccaaggcacgtgcttcagttggtccctcatctccgtcaaccacaggcacttgtgggattatgatgccattgcatgccatgggcctctggcatcctgtttcccatcagcaagagctcagcgcggcgcccaagcccaaaggcacaaccaaaccaatcctggaatcctatcttaagagtcatctcctgggacactccaggtatcaactctatatccatcaggatgcagtcaggagagaaaaaccacagagtaacttgaacagggaaagtttaatatag

SEQ ID NO: 111948 - DNA, 3692 bp, Homo sapiens
  Payload ID: 1940
  Gene Symbol: BCKDHB
  Gene Name: branched chain keto acid dehydrogenase E1, beta polypeptide
  Uniprot ID: P21953
  ENST ID: ENST00000320393
  CDS Start-End: 48-1226
aggcggcgtgcggctgcatagcctgagaatcccggtggtgagcggggatggcggttgtagcggcggctgccggctggctactcaggctcagggcggcaggggctgaggggcactggcgtcggcttcctggcgcggggctggcgcggggctttttgcaccccgccgcgactgtcgaggatgcggcccagaggcggcaggtggctcattttactttccagccagatccggagccccgggagtacgggcaaactcagaaaatgaatcttttccagtctgtaacaagtgccttggataactcattggccaaagatcctactgcagtaatatttggtgaagatgttgcctttggtggagtctttagatgcactgttggcttgcgagacaaatatggaaaagatagagtttttaataccccattgtgtgaacaaggaattgttggatttggaatcggaattgcggtcactggagctactgccattgcggaaattcagtttgcagattatattttccctgcatttgatcagattgttaatgaagctgccaagtatcgctatcgctctggggatctttttaactgtggaagcctcactatccggtccccttggggctgtgttggtcatggggctctctatcattctcagagtcctgaagcattttttgcccattgcccaggaatcaaggtggttatacccagaagccctttccaggccaaaggacttcttttgtcatgcatagaggataaaaatccttgtatattttttgaacctaaaatactttacagggcagcagcggaagaagtccctatagaaccatacaacatcccactgtcccaggccgaagtcatacaggaagggagtgatgttactctagttgcctggggcactcaggttcatgtgatccgagaggtagcttccatggcaaaagaaaagcttggagtgtcttgtgaagtcattgatctgaggactataataccttgggatgtggacacaatttgtaagtctgtgatcaaaacagggcgactgctaatcagtcacgaggctcccttgacaggcggctttgcatcggaaatcagctctacagttcaggaggaatgtttcttgaacctagaggctcctatatcaagagtatgtggttatgacacaccatttcctcacatttttgaaccattctacatcccagacaaatggaagtgttatgatgcccttcgaaaaatgatcaactattgaccatataggtaggtatgcatcttgagaaagctactatgtgcccctgacattaacgtactgttaaccaagacacagcaatcatcagtgttttgatggtaacaaactttgatggtaaagttggtaaaaggcaactttcagaagaaaataatgtgctttagaaaaaaaattcaaatttatagtagtatatttacatttttgttgttgttgttgttctgagatggagtctcactctgtcgcccaggctagactgcagtggtgcaatctcagctcactgcaacctcccccctacccctgagttcaagcgattctcctgcctcagcctgctgagtagttgggattacaggcgcccaccaccatgcccagctaatttttgtgtttttattggaggtggggtgtcactatgttggctcagctgatttcaaattcctgacctcaagtgatccacctgccttagcctcccaaagtgctgggattacaggcatgagccactgcacctggctatatttacatttaatagaaacatatctagcatatgtatatgtgattttttttttttttttgagaccgagtctcactctgtcaccaggctggagtgcagtggtgcgatcttggctcatggcaacctctgcctcccaggttcaagcgattgtcctgcctcagtctcctgagtagctgggactacaggtgtgcaccaacatgcccagctaattttttatatttttagtagagacggggtttcaccatgttggccaggatggtctcgatctcttgaccttgtgttccacccgccttggcctcccaaagtgctggaattacaggcatgagccaccgcgcctggcctgtatatgtgatttctaaaaaatagatgcatgcatatgttaacattgaatagtcaatcactagatgaagatgctctctaccatggtttagattgcaagtgtactttataccattgtttcaacttcaacctttatttttgtatatattttttcagctacttaaactgttcatgaataggcgtactttctgtatttaaaaatggcccctcaagcaccgttaatttacattccagttatttacatgataattcatgacattctgaaacttgcctgtatattatctgaaaaatggatttcttgagcaaaagatctgtttattgtatgtaaggaaaaattttacctgaaaacaaacaaacaaaccctaaaactcagcaccactaccatttccagaagcttttttaacaagtgaatattttttacataatggataataaatggtatttattcatcatgattttctaagtaatgcttatcagccccttcagtggtgttattctaacaaaatgaatacattacaaattattaagttagcttttcagagttttaatatagaagttactagcactgacacactgattttgaaatgtttcaaaatgagtagatatgattagatcctttaccttttaatatctagtttttccaaaaatgatagtaatatcttttgaagaactatgctttttcaaaagcaaaatcaactctgtataatagcacattctctactttttaaagatcagaaatgctagaattcttgacttttgtgtatgggtagtaaatctagctcactgaaaatcagagtgaaacgcctttacatttgtgcggatagagaagttaactctccctcatatgtcactgtgctaccataatccctacattttctgtctgttctagtctaagaatattgttatagatggaagttaggaccattagcccacagatgcatgtattctctcagacataccggtgtagatgctatatttctgatgtcttcttaatgtctgtgaaagcaactggcatctacaataaatcacacttagagctggttagaggactccttcacttttgttgtccatgtggttcccttccgtggaccagccgtaataaagagccaaggtagtgatggtggccacgtgcctcgttgctatttttaaagtaatattcagatgtggttttaaatttagattatgtattccttttgaaacataagaaaaacatttaaacctatgctgaaaatacgataaaagaaaaacaactccaatatgctaaaagttaaatatggtatttaagaaaatagtcatgtatgcaattgagaaagtctataatttattttacagaaaagctggaagattatgactagatatggaaatattttttctgaatttttttttatatttcctccgacttacctctttttgaaaagagagtttttattaagtgaaccatcacgatattggctgaaaagttctacattctattattgtattgtaacacacatgtattgatgattttcattaagagtttcagattaactttgaaaaatattccacatggtaatcttataaattctgtttaattacatctgtaaatattatgtgtgtgatagtattcaataaagtaaaatcaaattgtc

SEQ ID NO: 111949 - DNA, 1514 bp, Homo sapiens
  Payload ID: 1940
  Gene Symbol: BCKDHB
  Gene Name: branched chain keto acid dehydrogenase E1, beta polypeptide
  Uniprot ID: P21953
  ENST ID: ENST00000356489
  CDS Start-End: 48-1226
aggcggcgtgcggctgcatagcctgagaatcccggtggtgagcggggatggcggttgtagcggcggctgccggctggctactcaggctcagggcggcaggggctgaggggcactggcgtcggcttcctggcgcggggctggcgcggggctttttgcaccccgccgcgactgtcgaggatgcggcccagaggcggcaggtggctcattttactttccagccagatccggagccccgggagtacgggcaaactcagaaaatgaatcttttccagtctgtaacaagtgccttggataactcattggccaaagatcctactgcagtaatatttggtgaagatgttgcctttggtggagtctttagatgcactgttggcttgcgagacaaatatggaaaagatagagtttttaataccccattgtgtgaacaaggaattgttggatttggaatcggaattgcggtcactggagctactgccattgcggaaattcagtttgcagattatattttccctgcatttgatcagattgttaatgaagctgccaagtatcgctatcgctctggggatctttttaactgtggaagcctcactatccggtccccttggggctgtgttggtcatggggctctctatcattctcagagtcctgaagcattttttgcccattgcccaggaatcaaggtggttatacccagaagccctttccaggccaaaggacttcttttgtcatgcatagaggataaaaatccttgtatattttttgaacctaaaatactttacagggcagcagcggaagaagtccctatagaaccatacaacatcccactgtcccaggccgaagtcatacaggaagggagtgatgttactctagttgcctggggcactcaggttcatgtgatccgagaggtagcttccatggcaaaagaaaagcttggagtgtcttgtgaagtcattgatctgaggactataataccttgggatgtggacacaatttgtaagtctgtgatcaaaacagggcgactgctaatcagtcacgaggctcccttgacaggcggctttgcatcggaaatcagctctacagttcaggaggaatgtttcttgaacctagaggctcctatatcaagagtatgtggttatgacacaccatttcctcacatttttgaaccattctacatcccagacaaatggaagtgttatgatgcccttcgaaaaatgatcaactattgaccatatagaaaagctggaagattatgactagatatggaaatattttttctgaatttttttttatatttcctccgacttacctctttttgaaaagagagtttttattaagtgaaccatcacgatattggctgaaaagttctacattctattattgtattgtaacacacatgtattgatgattttcattaagagtttcagattaactttgaaaaatattccacatggtaatcttataaattctgtttaattacatctgtaaatattatgtgtgtgatagtattcaataaa

SEQ ID NO: 111950 - DNA, 743 bp, Homo sapiens
  Payload ID: 1940
  Gene Symbol: BCKDHB
  Gene Name: branched chain keto acid dehydrogenase E1, beta polypeptide
  Uniprot ID: P21953
  ENST ID: ENST00000369760
  CDS Start-End: 48-704
aggcggcgtgcggctgcatagcctgagaatcccggtggtgagcggggatggcggttgtagcggcggctgccggctggctactcaggctcagggcggcaggggctgaggggcactggcgtcggcttcctggcgcggggctggcgcggggctttttgcaccccgccgcgactgtcgaggatgcggcccagaggcggcaggtggctcattttactttccagccagatccggagccccgggagtacgggcaaactcagaaaatgaatcttttccagtctgtaacaagtgccttggataactcattggccaaagatcctactgcagtaatatttggtgaagatgttgcctttggtggagtctttagatgcactgttggcttgcgagacaaatatggaaaagatagagtttttaataccccattgtgtgaacaaggaattgttggatttggaatcggaattgcggtcactggagctactgccattgcggaaattcagtttgcagattatattttccctgcatttgatcagattgttaatgaagctgccaagtatcgctatcgctctggggatctttttaactgtggaagcctcactatccggtccccttggggctgtgttggtcatggggctctctatcattctcagagtcctgaagcattttttgcccattgcccaggaatcaagatcaaagttataagcttatcttagttgagtagatgttgcctgatttttgaatgtgagctagaa

SEQ ID NO: 111951 - DNA, 2128 bp, Homo sapiens
  Payload ID: 1941
  Gene Symbol: BCKDK
  Gene Name: branched chain ketoacid dehydrogenase kinase
  Uniprot ID: O14874
  ENST ID: ENST00000219794
  CDS Start-End: 364-1602
ggcgtggcctggatgcgcgggcgcccgggacggcacgtcctcagaccaaactacaactcccaggacccagcgggcgctgccgcccacgcgacgtcacggcggcggagggcgcaggcggctgggcgcctggcgagtggactgttcgagcccttccgctgggacccgggccctggctccggccccgcgatgggagctgctctccgcgggctgagcctgtcagcatcctcgacgcaccctggtccctgaagtcggagaagagcccctacccacccacacccccttgccccattttgggtcgcctgggtcctcagtcctagcggatcctcagtcctagcggccaccgggtctgaaaggagcaagacgatgatcctggcgtcggtgctgaggagcggtcccgggggcgggcttccgctccggcccctcctgggacccgcactcgcgctccgggcccgctcgacgtcggccaccgacacacaccacgtggagatggctcgggagcgctccaagaccgtcacctccttttacaaccagtcggccatcgacgcggcagcggagaagccctcagtccgcctaacgcccaccatgatgctctacgctggccgctctcaggacggcagccaccttctgaaaagtgctcggtacctgcagcaagaacttccagtgaggattgctcaccgcatcaagggcttccgctgccttcctttcatcattggctgcaaccccaccatactgcacgtgcatgagctatatatccgtgccttccagaagctgacagacttccctccgatcaaggaccaggcggacgaggcccagtactgccagctggtgcgacagctgctggatgaccacaaggatgtggtgaccctcttggcagagggcctacgtgagagccggaagcacatagaggatgaaaagctcgtccgctacttcttggacaagacgctgacttcgaggcttggaatccgcatgttggccacgcatcacctggcgctgcatgaggacaagcctgactttgtcggcatcatctgtactcgtctctcaccaaagaagattattgagaagtgggtggactttgccagacgcctgtgtgagcacaagtatggcaatgcgccccgtgtccgcatcaatggccatgtggctgcccggttccccttcatccctatgccactggactacatcctgccggagctgctcaagaatgccatgagagccacaatggagagtcacctagacactccctacaatgtcccagatgtggtcatcaccatcgccaacaatgatgtcgatctgatcatcaggatctcagaccgtggtggaggaatcgctcacaaagatctggaccgggtcatggactaccacttcactactgctgaggccagcacacaggacccccggatcagccccctctttggccatctggacatgcatagtggcgcccagtcaggacccatgcacggctttggcttcgggttgcccacgtcacgggcctacgcggagtacctcggtgggtctctgcagctgcagtccctgcagggcattggcacggacgtctacctgcggctccgccacatcgatggccgggaggaaagcttccggatctgaccccacagcctttggcctgctcacccgaccagcctgggccgcattccctgcaggacctcccgggtcaggcagggcggccccctgctccacacactgctgcatcttgggtctcagggacccagacagatggacttacatggagctgggcactgccctgcctcaacagggtccattgcctcctcgcctccagaacttggagcagggaagtgggcaccctgaggcctccagcaccagttccgtcattctcgttcctggggaacccccactctgacctgttattaaagttcacattttgaatgccctctcgggccccgtgtgtggggagggcaggtgaacttttgtttctgcccccattcaggttcactgagcccttgggttgaactggttcgtgtcccagtctcttacctgccctgagagcctggcaggccaggagtagaatgggtcccaagtctgttgcatgtttgatttggtgggagtgggatgactgcagcaccttatacaaagagctttcattcatcttgttgaa

SEQ ID NO: 111952 - DNA, 1907 bp, Homo sapiens
  Payload ID: 1941
  Gene Symbol: BCKDK
  Gene Name: branched chain ketoacid dehydrogenase kinase
  Uniprot ID: O14874
  ENST ID: ENST00000287507
  CDS Start-End: 364-1371
ggcgtggcctggatgcgcgggcgcccgggacggcacgtcctcagaccaaactacaactcccaggacccagcgggcgctgccgcccacgcgacgtcacggcggcggagggcgcaggcggctgggcgcctggcgagtggactgttcgagcccttccgctgggacccgggccctggctccggccccgcgatgggagctgctctccgcgggctgagcctgtcagcatcctcgacgcaccctggtccctgaagtcggagaagagcccctacccacccacacccccttgccccattttgggtcgcctgggtcctcagtcctagcggatcctcagtcctagcggccaccgggtctgaaaggagcaagacgatgatcctggcgtcggtgctgaggagcggtcccgggggcgggcttccgctccggcccctcctgggacccgcactcgcgctccgggcccgctcgacgtcggccaccgacacacaccacgtggagatggctcgggagcgctccaagaccgtcacctccttttacaaccagtcggccatcgacgcggcagcggagaagccctcagtccgcctaacgcccaccatgatgctctacgctggccgctctcaggacggcagccaccttctgaaaagtgctcggtacctgcagcaagaacttccagtgaggattgctcaccgcatcaagggcttccgctgccttcctttcatcattggctgcaaccccaccatactgcacgtgcatgagctatatatccgtgccttccagaagctgacagacttccctccgatcaaggaccaggcggacgaggcccagtactgccagctggtgcgacagctgctggatgaccacaaggatgtggtgaccctcttggcagagggcctacgtgagagccggaagcacatagaggatgaaaagctcgtccgctacttcttggacaagacgctgacttcgaggcttggaatccgcatgttggccacgcatcacctggcgctgcatgaggacaagcctgactttgtcggcatcatctgtactcgtctctcaccaaagaagattattgagaagtgggtggactttgccagacgcctgtgtgagcacaagtatggcaatgcgccccgtgtccgcatcaatggccatgtggctgcccggttccccttcatccctatgccactggactacatcctgccggagctgctcaagaatgccatgaggatctcagaccgtggtggaggaatcgctcacaaagatctggaccgggtcatggactaccacttcactactgctgaggccagcacacaggacccccggatcagccccctctttggccatctggacatgcatagtggcgcccagtcaggacccatgcacgggtgagaccctgccaggccaggatggaggggtgggggaccccaggagactcaagcctctgaagcctcctgtcctgtccccctgcccacccccagctttggcttcgggttgcccacgtcacgggcctacgcggagtacctcggtgggtctctgcagctgcagtccctgcagggcattggcacggacgtctacctgcggctccgccacatcgatggccgggaggaaagcttccggatctgaccccacagcctttggcctgctcacccgaccagcctgggccgcattccctgcaggacctcccgggtcaggcagggcggccccctgctccacacactgctgcatcttgggtctcagggacccagacagatggacttacatggagctgggcactgccctgcctcaacagggtccattgcctcctcgcctccagaacttggagcagggaagtgggcaccctgaggcctccagcaccagttccgtcattctcgttcctggggaacccccactctgacctgttattaaagttcacattttgaatgccc

SEQ ID NO: 111953 - DNA, 1997 bp, Homo sapiens
  Payload ID: 1941
  Gene Symbol: BCKDK
  Gene Name: branched chain ketoacid dehydrogenase kinase
  Uniprot ID: O14874
  ENST ID: ENST00000394950
  CDS Start-End: 364-1461
ggcgtggcctggatgcgcgggcgcccgggacggcacgtcctcagaccaaactacaactcccaggacccagcgggcgctgccgcccacgcgacgtcacggcggcggagggcgcaggcggctgggcgcctggcgagtggactgttcgagcccttccgctgggacccgggccctggctccggccccgcgatgggagctgctctccgcgggctgagcctgtcagcatcctcgacgcaccctggtccctgaagtcggagaagagcccctacccacccacacccccttgccccattttgggtcgcctgggtcctcagtcctagcggatcctcagtcctagcggccaccgggtctgaaaggagcaagacgatgatcctggcgtcggtgctgaggagcggtcccgggggcgggcttccgctccggcccctcctgggacccgcactcgcgctccgggcccgctcgacgtcggccaccgacacacaccacgtggagatggctcgggagcgctccaagaccgtcacctccttttacaaccagtcggccatcgacgcggcagcggagaagccctcagtccgcctaacgcccaccatgatgctctacgctggccgctctcaggacggcagccaccttctgaaaagtgctcggtacctgcagcaagaacttccagtgaggattgctcaccgcatcaagggcttccgctgccttcctttcatcattggctgcaaccccaccatactgcacgtgcatgagctatatatccgtgccttccagaagctgacagacttccctccgatcaaggaccaggcggacgaggcccagtactgccagctggtgcgacagctgctggatgaccacaaggatgtggtgaccctcttggcagagggcctacgtgagagccggaagcacatagaggatgaaaagctcgtccgctacttcttggacaagacgctgacttcgaggcttggaatccgcatgttggccacgcatcacctggcgctgcatgaggacaagcctgactttgtcggcatcatctgtactcgtctctcaccaaagaagattattgagaagtgggtggactttgccagacgcctgtgtgagcacaagtatggcaatgcgccccgtgtccgcatcaatggccatgtggctgcccggttccccttcatccctatgccactggactacatcctgccggagctgctcaagaatgccatgagagccacaatggagagtcacctagacactccctacaatgtcccagatgtggtcatcaccatcgccaacaatgatgtcgatctgatcatcaggatctcagaccgtggtggaggaatcgctcacaaagatctggaccgggtcatggactaccacttcactactgctgaggccagcacacaggacccccggatcagccccctctttggccatctggacatgcatagtggcgcccagtcaggacccatgcacgggtgagaccctgccaggccaggatggaggggtgggggaccccaggagactcaagcctctgaagcctcctgtcctgtccccctgcccacccccagctttggcttcgggttgcccacgtcacgggcctacgcggagtacctcggtgggtctctgcagctgcagtccctgcagggcattggcacggacgtctacctgcggctccgccacatcgatggccgggaggaaagcttccggatctgaccccacagcctttggcctgctcacccgaccagcctgggccgcattccctgcaggacctcccgggtcaggcagggcggccccctgctccacacactgctgcatcttgggtctcagggacccagacagatggacttacatggagctgggcactgccctgcctcaacagggtccattgcctcctcgcctccagaacttggagcagggaagtgggcaccctgaggcctccagcaccagttccgtcattctcgttcctggggaacccccactctgacctgttattaaagttcacattttgaatgccc

SEQ ID NO: 111954 - DNA, 2164 bp, Homo sapiens
  Payload ID: 1941
  Gene Symbol: BCKDK
  Gene Name: branched chain ketoacid dehydrogenase kinase
  Uniprot ID: O14874
  ENST ID: ENST00000394951
  CDS Start-End: 624-1862
aaagaacgggtgggaatggtgtgggtgggggtcaaagaggaaacccagagatgcagggcgcccctttcccgtggtctgcccccaattgctcaggcaggccagtcacgggcacggaaagatctattcaactcactgcccaatctcctctcctggtgcagaaaagacacccagtcagcgacttgcattatctgcaggcatgagtgaataataataatgcctaacccttatatagtgctaattccacgcctggcactgttctaggcactcatataaattcatgtaatccacacaaccccaaaactgatgatatctcttcatcttaccaagcactgagcagttaaataacttgctccagatattaaggggtcgagctggggtttgaagcctggttacccataaatgaaccaagaactggaaggaggacaagagctccgagaaggagtcagatgggagctgctctccgcgggctgagcctgtcagcatcctcgacgcaccctggtccctgaagtcggagaagagcccctacccacccacacccccttgccccattttgggtcgcctgggtcctcagtcctagcggatcctcagtcctagcggccaccgggtctgaaaggagcaagacgatgatcctggcgtcggtgctgaggagcggtcccgggggcgggcttccgctccggcccctcctgggacccgcactcgcgctccgggcccgctcgacgtcggccaccgacacacaccacgtggagatggctcgggagcgctccaagaccgtcacctccttttacaaccagtcggccatcgacgcggcagcggagaagccctcagtccgcctaacgcccaccatgatgctctacgctggccgctctcaggacggcagccaccttctgaaaagtgctcggtacctgcagcaagaacttccagtgaggattgctcaccgcatcaagggcttccgctgccttcctttcatcattggctgcaaccccaccatactgcacgtgcatgagctatatatccgtgccttccagaagctgacagacttccctccgatcaaggaccaggcggacgaggcccagtactgccagctggtgcgacagctgctggatgaccacaaggatgtggtgaccctcttggcagagggcctacgtgagagccggaagcacatagaggatgaaaagctcgtccgctacttcttggacaagacgctgacttcgaggcttggaatccgcatgttggccacgcatcacctggcgctgcatgaggacaagcctgactttgtcggcatcatctgtactcgtctctcaccaaagaagattattgagaagtgggtggactttgccagacgcctgtgtgagcacaagtatggcaatgcgccccgtgtccgcatcaatggccatgtggctgcccggttccccttcatccctatgccactggactacatcctgccggagctgctcaagaatgccatgagagccacaatggagagtcacctagacactccctacaatgtcccagatgtggtcatcaccatcgccaacaatgatgtcgatctgatcatcaggatctcagaccgtggtggaggaatcgctcacaaagatctggaccgggtcatggactaccacttcactactgctgaggccagcacacaggacccccggatcagccccctctttggccatctggacatgcatagtggcgcccagtcaggacccatgcacggctttggcttcgggttgcccacgtcacgggcctacgcggagtacctcggtgggtctctgcagctgcagtccctgcagggcattggcacggacgtctacctgcggctccgccacatcgatggccgggaggaaagcttccggatctgaccccacagcctttggcctgctcacccgaccagcctgggccgcattccctgcaggacctcccgggtcaggcagggcggccccctgctccacacactgctgcatcttgggtctcagggacccagacagatggacttacatggagctgggcactgccctgcctcaacagggtccattgcctcctcgcctccagaacttggagcagggaagtgggcaccctgaggcctccagcaccagttccgtcattctcgttcctggggaacccccactctgacctgttattaaagttcacattttgaatgccc

SEQ ID NO: 111955 - DNA, 554 bp, Homo sapiens
  Payload ID: 1941
  Gene Symbol: BCKDK
  Gene Name: branched chain ketoacid dehydrogenase kinase
  ENST ID: ENST00000567676
  CDS Start-End: 291-554
gggagtggtggggagaggtcgcccgggtctggggagaccgatgcacaggtggagagatggtgcgggttctgtggattcggatccttacaacttcctcttccccgccccggtagatgggagctgctctccgcgggctgagcctgtcagcatcctcgacgcaccctggtccctgaagtcggagaagagcccctacccacccacacccccttgccccattttgggtcgcctgggtcctcagtcctagcggatcctcagtcctagcggccaccgggtctgaaaggagcaagacgatgatcctggcgtcggtgctgaggagcggtcccgggggcgggcttccgctccggcccctcctgggacccgcactcgcgctccgggcccgctcgacgtcggccaccgacacacaccacgtggagatggctcgggagcgctccaagaccgtcacctccttttacaaccagtcggccatcgacgcggcagcggagaagccctcagtccgcctaacgcccaccatgatgctctacgctggccgctctcaggacggcagccaccttctg

SEQ ID NO: 111956 - DNA, 640 bp, Homo sapiens
  Payload ID: 1941
  Gene Symbol: BCKDK
  Gene Name: branched chain ketoacid dehydrogenase kinase
  ENST ID: ENST00000561755
  CDS Start-End: 461-640
gtggggcgaccccagcctactcagtccgcggaggccccgcggcgcacgtccgcagcctccatcacagcgcgggcgcgcagacggggctggcatctaccatatggggggcatccgggccgaaccaagtgacccgcgtggggggtcccgctggggactccgtgccgcaccctcccaagccggccccaggggcccagggctggtgtcgcacgttcgctggccgcgctcccagggcccgggtttgaaggcgctgggcaggcaggggcagccccgccccctgagaaggatgggagctgctctccgcgggctgagcctgtcagcatcctcgacgcaccctggtccctgaagtcggagaagagcccctacccacccacacccccttgccccattttgggtcgcctgggtcctcagtcctagcggatcctcagtcctagcggccaccgggtctgaaaggagcaagacgatgatcctggcgtcggtgctgaggagcggtcccgggggcgggcttccgctccggcccctcctgggacccgcactcgcgctccgggcccgctcgacgtcggccaccgacacacaccacgtggagatggctcgggagcgctccaagaccgtcacctccttttacaaccagtcggccatcgac

SEQ ID NO: 111957 - DNA, 1796 bp, Homo sapiens
  Payload ID: 1941
  Gene Symbol: BCKDK
  Gene Name: branched chain ketoacid dehydrogenase kinase
  ENST ID: ENST00000567530
  CDS Start-End: 364-1017
ggcgtggcctggatgcgcgggcgcccgggacggcacgtcctcagaccaaactacaactcccaggacccagcgggcgctgccgcccacgcgacgtcacggcggcggagggcgcaggcggctgggcgcctggcgagtggactgttcgagcccttccgctgggacccgggccctggctccggccccgcgatgggagctgctctccgcgggctgagcctgtcagcatcctcgacgcaccctggtccctgaagtcggagaagagcccctacccacccacacccccttgccccattttgggtcgcctgggtcctcagtcctagcggatcctcagtcctagcggccaccgggtctgaaaggagcaagacgatgatcctggcgtcggtgctgaggagcggtcccgggggcgggcttccgctccggcccctcctgggacccgcactcgcgctccgggcccgctcgacgtcggccaccgacacacaccacgtggagatggctcgggagcgctccaagaccgtcacctccttttacaaccagtcggccatcgacgcggcagcggagaagccctcagtccgcctaacgcccaccatgatgctctacgctggccgctctcaggacggcagccaccttctgaaaagtgctcggtacctgcagcaagaacttccagtgaggattgctcaccgcatcaagggcttccgctgccttcctttcatcattggctgcaaccccaccatactgcacgtgcatgagctatatatccgtgccttccagaagctgacagacttccctccgatcaaggaccaggcggacgaggcccagtactgccagctggtgcgacagctgctggatgaccacaaggatgtggtgaccctcttggcagagggcctacgtgagagccggaagcacatagaggatgaaaagctcgtccgctacttcttggacaagacgctgacttcgaggcttggaatccgcatgttggccacgcatcacctggcgctgcatgaggacaagacgcctgtgtgagcacaagtatggcaatgcgccccgtgtccgcatcaatggccatgtggctgcccggttccccttcatccctatgccactggactacatcctgccggagctgctcaagaatgccatgagagccacaatggagagtcacctagacactccctacaatgtcccagatgtggtcatcaccatcgccaacaatgatgtcgatctgatcatcaggatctcagaccgtggtggaggaatcgctcacaaagatctggaccgggtcatggactaccacttcactactgctgaggccagcacacaggacccccggatcagccccctctttggccatctggacatgcatagtggcgcccagtcaggacccatgcacggctttggcttcgggttgcccacgtcacgggcctacgcggagtacctcggtgggtctctgcagctgcagtccctgcagggcattggcacggacgtctacctgcggctccgccacatcgatggccgggaggaaagcttccggatctgaccccacagcctttggcctgctcacccgaccagcctgggccgcattccctgcaggacctcccgggtcaggcagggcggccccctgctccacacactgctgcatcttgggtctcagggacccagacagatggacttacatggagctgggcactgccctgcctcaacagggtccattgcctcctcgcctccagaacttggagcagggaagtgggcaccctgaggcctccagcaccagttccgtcattctcgttcctggggaacccccactc

SEQ ID NO: 111958 - DNA, 754 bp, Homo sapiens
  Payload ID: 1941
  Gene Symbol: BCKDK
  Gene Name: branched chain ketoacid dehydrogenase kinase
  ENST ID: ENST00000484226
  CDS Start-End: 105-754
cccctacccacccacacccccttgccccattttgggtcgcctgggtcctcagtcctagcggatcctcagtcctagcggccaccgggtctgaaaggagcaagacgatgatcctggcgtcggtgctgaggagcggtcccgggggcgggcttccgctccggcccctcctgggacccgcactcgcgctccgggcccgctcgacgtcggccaccgacacacaccacgtggagatggctcgggagcgctccaagaccgtcacctccttttacaaccagtcggccatcgacgcggcagcggagaagccctcagtccgcctaacgcccaccatgatgctctacgctggccgctctcaggacggcagccaccttctgaaaagtgctcggtacctgcagcaagaacttccagtgaggattgctcaccgcatcaagggcttccgctgccttcctttcatcattggctgcaaccccaccatactgcacgtgaagctgacagacttccctccgatcaaggaccaggcggacgaggcccagtactgccagctggtgcgacagctgctggatgaccacaaggatgtggtgaccctcttggcagagggcctacgtgagagccggaagcacatagaggatgaaaagctcgtccgctacttcttggacaagacgctgacttcgaggcttggaatccgcatgttggccacgcatcacctggcgctgcatgaggacaagcctgactttgtcggcatcatctgtactcgtctctc

SEQ ID NO: 111959 - DNA, 439 bp, Homo sapiens
  Payload ID: 1941
  Gene Symbol: BCKDK
  Gene Name: branched chain ketoacid dehydrogenase kinase
  ENST ID: ENST00000567682
  CDS Start-End: 1-439
atgatgtcgatctgatcatcaggatctcagaccgtggtggaggaatcgctcacaaagatctggaccgggtcatggactaccacttcactactgctgaggccagcacacaggacccccggatcagccccctctttggccatctggacatgcatagtggcgcccagtcaggacccatgcacggggcattggcacggacgtctacctgcggctccgccacatcgatggccgggaggaaagcttccggatctgaccccacagcctttggcctgctcacccgaccagcctgggccgcattccctgcaggacctcccgggtcaggcagggcggccccctgctccacacactgctgcatcttgggtctcagggacccagacagatggacttacatggagctgggcactgccctgcctcaacagggtccattgcctcctcgcctcca

SEQ ID NO: 111960 - DNA, 1947 bp, Homo sapiens
  Payload ID: 1942
  Gene Symbol: BRAP
  Gene Name: BRCA1 associated protein
  ENST ID: ENST00000327551
  CDS Start-End: 142-1830
agcgccgcgggtgagtcccgcggcctcgccgcattccctgtagccgggtctgggcccggagggcttcccttcccaaagcactggcccgggaaaagcccgcggcgagggctgttgcccaggaagacacggagagccggggaaatgtctgatgaggagataaaaaagacgacactagcctcagctgtagcctgtttagaaggcaagtcaccaggagagaaagtagcgattatccatcagcatctcggccgtcgagaaatgacagatgtgatcattgagaccatgaagtccaacccagatgaactaaaaactacagtggaagaaaggaagtcttcagaagcctcccccactgcgcaaagaagtaaagatcacagtaaggaatgcataaacgctgccccagattctccgtccaaacagcttccagaccagatttcattcttcagtggaaatccatcagttgaaatagttcatggtattatgcacctatataagacaaataagatgacctccttaaaagaagatgtgcggcgcagtgccatgctgtgtattctcacagtccctgctgcaatgaccagtcatgaccttatgaagtttgttgccccatttaacgaagtaattgaacaaatgaaaattatcagagactctactcccaaccaatatatggtgctgataaagtttcgtgcacaggctgatgcggatagtttttatatgacatgcaatggccgccagttcaactcaatagaagatgacgtttgccagctagtgtatgtggaaagagctgaagtgctcaaatctgaagatggcgccagcctcccagtgatggacctgactgaactccccaagtgcacggtgtgtctggagcgcatggacgagtctgtgaatggcatcctcacaacgttatgtaaccacagcttccacagccagtgtctacagcgctgggacgataccacgtgtcctgtttgccggtactgtcaaacgcccgagccagtagaagaaaataagtgttttgagtgtggtgttcaggaaaatctttggatttgtttaatatgcggccacataggatgtggacggtatgtcagtcgacatgcttataagcactttgaggaaacgcagcacacgtatgccatgcagcttaccaaccatcgagtctgggactatgctggagataactatgttcatcgactggttgcaagtaaaacagatggaaaaatagtacagtatgaatgtgagggggatacttgccaggaagagaaaatagatgccttacagttagagtattcatatttactaacaagccagctggaatctcagcgaatctactgggaaaacaagatagttcggatagagaaggacacagcagaggaaattaacaacatgaagaccaagtttaaagaaacaattgagaagtgtgataatctagagcacaaactaaatgatctcctaaaagaaaagcagtctgtggaaagaaagtgcactcagctaaacacaaaagtggccaaactcaccaacgagctcaaagaggagcaggaaatgaacaagtgtttgcgagccaaccaagtcctcctgcagaacaagctaaaagaggaggagagggtgctgaaggagacctgtgaccaaaaagatctgcagatcaccgagatccaggagcagctgcgtgacgtcatgttctacctggagacacagcagaagatcaaccatctgcctgccgagacccggcaggaaatccaggagggacagatcaacatcgccatggcctcggcctcgagccctgcctcttcggggggcagtgggaagttgccctccaggaagggccgcagcaagaggggcaagtgaccttcagagcaacagacatccctgagactgttctccctgacactgtgagagtgtgctgggaccttcagctaaatgtgagggtgggccctaataagtacaagtgaggatcaagccaca

SEQ ID NO: 111961 - DNA, 4026 bp, Homo sapiens
  Payload ID: 1942
  Gene Symbol: BRAP
  Gene Name: BRCA1 associated protein
  Uniprot ID: Q7Z569
  ENST ID: ENST00000419234
  CDS Start-End: 195-1973
agcgacggcggccgggaggcggaagtggaggttgttgtggctccgagggctgttcgaggagctgctgctgctgaggcggcggcaactgcattgaggtggtggcggcgctgccggccccgggccgctcggcctctcggctcgccttccagcctcgcctgagcccgccggggcccgcgccggccagcgcctgccctatgagtgtgtcactggttgttatccgattggagctcgcggaacactcgcctgtccccgccggcttcggcttcagcgccgcggccggggaaatgtctgatgaggagataaaaaagacgacactagcctcagctgtagcctgtttagaaggcaagtcaccaggagagaaagtagcgattatccatcagcatctcggccgtcgagaaatgacagatgtgatcattgagaccatgaagtccaacccagatgaactaaaaactacagtggaagaaaggaagtcttcagaagcctcccccactgcgcaaagaagtaaagatcacagtaaggaatgcataaacgctgccccagattctccgtccaaacagcttccagaccagatttcattcttcagtggaaatccatcagttgaaatagttcatggtattatgcacctatataagacaaataagatgacctccttaaaagaagatgtgcggcgcagtgccatgctgtgtattctcacagtccctgctgcaatgaccagtcatgaccttatgaagtttgttgccccatttaacgaagtaattgaacaaatgaaaattatcagagactctactcccaaccaatatatggtgctgataaagtttcgtgcacaggctgatgcggatagtttttatatgacatgcaatggccgccagttcaactcaatagaagatgacgtttgccagctagtgtatgtggaaagagctgaagtgctcaaatctgaagatggcgccagcctcccagtgatggacctgactgaactccccaagtgcacggtgtgtctggagcgcatggacgagtctgtgaatggcatcctcacaacgttatgtaaccacagcttccacagccagtgtctacagcgctgggacgataccacgtgtcctgtttgccggtactgtcaaacgcccgagccagtagaagaaaataagtgttttgagtgtggtgttcaggaaaatctttggatttgtttaatatgcggccacataggatgtggacggtatgtcagtcgacatgcttataagcactttgaggaaacgcagcacacgtatgccatgcagcttaccaaccatcgagtctgggactatgctggagataactatgttcatcgactggttgcaagtaaaacagatggaaaaatagtacagtatgaatgtgagggggatacttgccaggaagagaaaatagatgccttacagttagagtattcatatttactaacaagccagctggaatctcagcgaatctactgggaaaacaagatagttcggatagagaaggacacagcagaggaaattaacaacatgaagaccaagtttaaagaaacaattgagaagtgtgataatctagagcacaaactaaatgatctcctaaaagaaaagcagtctgtggaaagaaagtgcactcagctaaacacaaaagtggccaaactcaccaacgagctcaaagaggagcaggaaatgaacaagtgtttgcgagccaaccaagtcctcctgcagaacaagctaaaagaggaggagagggtgctgaaggagacctgtgaccaaaaagatctgcagatcaccgagatccaggagcagctgcgtgacgtcatgttctacctggagacacagcagaagatcaaccatctgcctgccgagacccggcaggaaatccaggagggacagatcaacatcgccatggcctcggcctcgagccctgcctcttcggggggcagtgggaagttgccctccaggaagggccgcagcaagaggggcaagtgaccttcagagcaacagacatccctgagactgttctccctgacactgtgagagtgtgctgggaccttcagctaaatgtgagggtgggccctaataagtacaagtgaggatcaagccacagttgtttggctctttcatttgctagtgtgtgatgtagtgaatgtaaagggtgctgactggagagctgatagaaaggcgctgcgttcgaaaaggtcttaagagttcactaacctcacattctaatgaccattttgccttcctgcttggtagaagccccaactctgctgtgcatttttccattgtatttatggagttggcgtatttgacattcagttctggggtaggtttaagatgttaagttatttcttgtaacctcaaaggtaaggttatctagcactaaagcaccaaacctctctgagggcataacagctgctttaaagagaggtttccattggctattaaggagttatgaaaactccctagcaatagtgtcatatcattatcatctcccccttcctctggggagtggaagaattgcttgaatgttatctgaaaagaggcctggtagtaaaccaggccctggctctttaccagcagtcatctcttcttgctctggggccagccaggaaaaacaaacaacccggggcacattgggtagactcagtgtaggaaaaatggtggcagctccactgtttatttttggtgacttcgtacatcattatgaaccgcaattaaggaggaggcttaatggctgttcccaaactcaaatctcagagtgggtatcctagcatctagcaagactgagtggggagatttctcatccgtgtgaaaatgtagagtgaggcctctgactagctaattgtgtattttgttgggtttagtattttctaaatgtttacaaaatattgggctgcatgttcaggttgcagctagagggagcttgggcagattttcaattacgctttcaagatataaccaaaagctgtttctaaatcctaaaattagaatttcaacagagccccctttagaacagtcatataacgcttgtgtgggccaacagaggggctgtgtactctctctggaaccataaatgtcaaataatttataacctgcagtaattgagcaaacttaaaataagacctgtgttggaatttagtttcttgaagaggtagagggataggttagtaagatgtattgttaaacaacaggttttagtttttgctttataattagccacaggttttcaaatgatcacatttcagaataggtttttagcctgtaattaggcctcatcccctttgacctaaatgtcttacatgttacttgttagcacatcaactgtatcactaatcaccatctgtttttgtgggatgtgctgcagcatttcccaaaaaactttacgtgtaatgttgcaaaatgaatgtactcagacattcttaatttttacttagggcagaccaactctttgagtctctcttggacttatatatacagatatcttaagagtgggaatgtaaagcataacctaattctctttcctatagagattctattttatttaaaatctatttttacactagttagaatcctgctgttttggccaagtacttgtcttgcatgtctgaccttgcagaagctggggtggatcatagcatactaatgaagagaattagaagtagtttacaaagctcgctcactcctcatttctctgtgatcccttctatccagtggccccaccaccacctgggaaaacagatttttcagtacaggtgggataaatgctctgaaaggctgtgcccagaggaatgagcaaataggcaagtgtttccaaactacttggaggtttacaaaaaatatgtcccagaaaaaaaaaaaatcttaccaagatacgtaaagaaaaaaaaatttttttttaaacagtcaaagagtcatgtttgaatttcacaaaatcacatcagacagaagttgttttcttcaggagggaaatgaaccacttaatatacccatactaccttgaacaatgaaattgaattaaaatagccaaactttgaaatta

SEQ ID NO: 111962 - DNA, 3434 bp, Homo sapiens
  Payload ID: 1943
  Gene Symbol: BAP1
  Gene Name: BRCA1 associated protein-1 (ubiquitin carboxy-terminal hydrolase)
  ENST ID: ENST00000296288
  CDS Start-End: 37-2172
cctggacatggcgctgaggggccgccccgcgggaagatgaataagggctggctggagctggagagcgacccaggcctcttcaccctgctcgtggaagatttcggtgtcaagggggtgcaagtggaggagatctacgaccttcagagcaaatgtcagggccctgtatatggatttatcttcctgttcaaatggatcgaagagcgccggtcccggcgaaaggtctctaccttggtggatgatacgtccgtgattgatgatgatattgtgaataacatgttctttgcccaccagctgatacccaactcttgtgcaactcatgccttgctgagcgtgctcctgaactgcagcagcgtggacctgggacccaccctgagtcgcatgaaggacttcaccaagggtttcagccctgagagcaaaggatatgcgattggcaatgccccggagttggccaaggcccataatagccatgccaggcccgagccacgccacctccctgagaagcagaatggccttagtgcagtgcggaccatggaggcgttccactttgtcagctatgtgcctatcacaggccggctctttgagctggatgggctgaaggtctaccccattgaccatgggccctggggggaggacgaggagtggacagacaaggcccggcgggtcatcatggagcgtatcggcctcgccactgcagggatcaagtatgaggccaggctgcatgtgctgaaggtgaaccgtcagacagtactagaggctctgcagcagctgataagagtaacacagccagagctgattcagacccacaagtctcaagagtcacagctgcctgaggagtccaagtcagccagcaacaagtccccgctggtgctggaagcaaacagggcccctgcagcctctgagggcaaccacacagatggtgcagaggaggcggctggttcatgcgcacaagccccatcccacagccctcccaacaaacccaagctagtggtgaagcctccaggcagcagcctcaatggggttcaccccaaccccactcccattgtccagcggctgccggcctttctagacaatcacaattatgccaagtcccccatgcaggaggaagaagacctggcggcaggtgtgggccgcagccgagttccagtccgcccaccccagcagtactcagatgatgaggatgactatgaggatgacgaggaggatgacgtgcagaacaccaactctgcccttaggtataaggggaagggaacagggaagccaggggcattgagcggttctgctgatgggcaactgtcagtgctgcagcccaacaccatcaacgtcttggctgagaagctcaaagagtcccagaaggacctctcaattcctctgtccatcaagactagcagcggggctgggagtccggctgtggcagtgcccacacactcgcagccctcacccacccccagcaatgagagtacagacacggcctctgagatcggcagtgctttcaactcgccactgcgctcgcctatccgctcagccaacccgacgcggccctccagccctgtcacctcccacatctccaaggtgctttttggagaggatgacagcctgctgcgtgttgactgcatacgctacaaccgtgctgtccgtgatctgggtcctgtcatcagcacaggcctgctgcacctggctgaggatggggtgctgagtcccctggcgctgacagagggtgggaagggttcctcgccctccatcagaccaatccaaggcagccaggggtccagcagcccagtggagaaggaggtcgtggaagccacggacagcagagagaagacggggatggtgaggcctggcgagcccttgagtggggagaaatactcacccaaggagctgctggcactgctgaagtgtgtggaggctgagattgcaaactatgaggcgtgcctcaaggaggaggtagagaagaggaagaagttcaagattgatgaccagagaaggacccacaactacgatgagttcatctgcacctttatctccatgctggctcaggaaggcatgctggccaacctagtggagcagaacatctccgtgcggcggcgccaaggggtcagcatcggccggctccacaagcagcggaagcctgaccggcggaaacgctctcgcccctacaaggccaagcgccagtgaggactgctggccctgactctgcagcccactcttgccgtgtggccctcaccagggtccttccctgccccacttccccttttcccagtattactgaatagtcccagctggagagtccaggccctgggaatgggaggaaccaggccacattccttccatcgtgccctgaggcctgacacggcagatcagccccatagtgctcaggaggcagcatctggagttggggcacagcgaggtactgcagcttcctccacagccggctgtggagcagcaggacctggcccttctgcctgggcagcagaatatatattttacctatcagagacatctatttttctgggctccaacccaacatgccaccatgttgacataagttcctacctgactatgctttctctcctaggagctgtcctggtgggcccaggtccttgtatcatgccacggtcccaactacagggtcctagctgggggcctgggtgggccctgggctctgggccctgctgctctagccccagccaccagcctgtccctgttgtaaggaagccaggtcttctctcttcattcctcttaggagagtgccaaactcagggacccagcactgggctgggttgggagtagggtgtcccagtggggttggggtgagcaggctgctgggatcccatggcctgagcagagcatgtgggaactgttcagtggcctgtgaactgtcttccttgttctagccaggctgttcaagactgctctccatagcaaggttctagggctcttcgccttcagtgttgtggccctagctatgggcctaaattgggctctaggtctctgtccctggcgcttgaggctcagaagagcctctgtccagcccctcagtattaccatgtctccctctcaggggtagcagagacagggttgcttataggaagctggcaccactcagctcttcctgctactccagtttcctcagcctctgcaaggcactcagggtgggggacagcaggatcaagacaacccgttggagcccctgtgttccagaggacctgatgccaaggggtaatgggcccagcagtgcctctggagcccaggccccaacacagccccatggcctctgccagatggctttgaaaaaggtgatccaagcaggcccctttatctgtacatagtgactgagtggggggtgctggcaagtgtggcagctgcctctgggctgagcacagcttgacccctctagcccctgtaaatactggatcaatgaatgaataaaactctcc

SEQ ID NO: 111963 - DNA, 3937 bp, Homo sapiens
  Payload ID: 1943
  Gene Symbol: BAP1
  Gene Name: BRCA1 associated protein-1 (ubiquitin carboxy-terminal hydrolase)
  Uniprot ID: Q92560
  ENST ID: ENST00000460680
  CDS Start-End: 473-2662
cgctccgcccctcccctcgcagcacccgggcctagtactgcccgtcccgcccctcctctcgagcctcagcgctcagcatcgcccggaccccctcttcccttcgcccgcctcgtcccgaccctccccttcgcccccgtcccgccccgcccctccccttcgcccccgtcccgtcccgccccgcccctccccttcgcccccgtccctccccttcgcccccgtccctccgcgcgtgcgcgttcgccttcgagcgcatgcccgcatctgctgtccgacaggcggaagacgagcccagaggcggagcagggccgtcgcgccttggtgacgtctgccgccggcgcgggcgggtgacgcgactgggcccgttgtctgtgtgtgggactgaggggccccgggggcggtgggggctcccggtgggggcagcggtggggagggagggcctggacatggcgctgaggggccgccccgcgggaagatgaataagggctggctggagctggagagcgacccaggcctcttcaccctgctcgtggaagatttcggtgtcaagggggtgcaagtggaggagatctacgaccttcagagcaaatgtcagggccctgtatatggatttatcttcctgttcaaatggatcgaagagcgccggtcccggcgaaaggtctctaccttggtggatgatacgtccgtgattgatgatgatattgtgaataacatgttctttgcccaccagctgatacccaactcttgtgcaactcatgccttgctgagcgtgctcctgaactgcagcagcgtggacctgggacccaccctgagtcgcatgaaggacttcaccaagggtttcagccctgagagcaaaggatatgcgattggcaatgccccggagttggccaaggcccataatagccatgccaggcccgagccacgccacctccctgagaagcagaatggccttagtgcagtgcggaccatggaggcgttccactttgtcagctatgtgcctatcacaggccggctctttgagctggatgggctgaaggtctaccccattgaccatgggccctggggggaggacgaggagtggacagacaaggcccggcgggtcatcatggagcgtatcggcctcgccactgcaggggagccctaccacgacatccgcttcaacctgatggcagtggtgcccgaccgcaggatcaagtatgaggccaggctgcatgtgctgaaggtgaaccgtcagacagtactagaggctctgcagcagctgataagagtaacacagccagagctgattcagacccacaagtctcaagagtcacagctgcctgaggagtccaagtcagccagcaacaagtccccgctggtgctggaagcaaacagggcccctgcagcctctgagggcaaccacacagatggtgcagaggaggcggctggttcatgcgcacaagccccatcccacagccctcccaacaaacccaagctagtggtgaagcctccaggcagcagcctcaatggggttcaccccaaccccactcccattgtccagcggctgccggcctttctagacaatcacaattatgccaagtcccccatgcaggaggaagaagacctggcggcaggtgtgggccgcagccgagttccagtccgcccaccccagcagtactcagatgatgaggatgactatgaggatgacgaggaggatgacgtgcagaacaccaactctgcccttaggtataaggggaagggaacagggaagccaggggcattgagcggttctgctgatgggcaactgtcagtgctgcagcccaacaccatcaacgtcttggctgagaagctcaaagagtcccagaaggacctctcaattcctctgtccatcaagactagcagcggggctgggagtccggctgtggcagtgcccacacactcgcagccctcacccacccccagcaatgagagtacagacacggcctctgagatcggcagtgctttcaactcgccactgcgctcgcctatccgctcagccaacccgacgcggccctccagccctgtcacctcccacatctccaaggtgctttttggagaggatgacagcctgctgcgtgttgactgcatacgctacaaccgtgctgtccgtgatctgggtcctgtcatcagcacaggcctgctgcacctggctgaggatggggtgctgagtcccctggcgctgacagagggtgggaagggttcctcgccctccatcagaccaatccaaggcagccaggggtccagcagcccagtggagaaggaggtcgtggaagccacggacagcagagagaagacggggatggtgaggcctggcgagcccttgagtggggagaaatactcacccaaggagctgctggcactgctgaagtgtgtggaggctgagattgcaaactatgaggcgtgcctcaaggaggaggtagagaagaggaagaagttcaagattgatgaccagagaaggacccacaactacgatgagttcatctgcacctttatctccatgctggctcaggaaggcatgctggccaacctagtggagcagaacatctccgtgcggcggcgccaaggggtcagcatcggccggctccacaagcagcggaagcctgaccggcggaaacgctctcgcccctacaaggccaagcgccagtgaggactgctggccctgactctgcagcccactcttgccgtgtggccctcaccagggtccttccctgccccacttccccttttcccagtattactgaatagtcccagctggagagtccaggccctgggaatgggaggaaccaggccacattccttccatcgtgccctgaggcctgacacggcagatcagccccatagtgctcaggaggcagcatctggagttggggcacagcgaggtactgcagcttcctccacagccggctgtggagcagcaggacctggcccttctgcctgggcagcagaatatatattttacctatcagagacatctatttttctgggctccaacccaacatgccaccatgttgacataagttcctacctgactatgctttctctcctaggagctgtcctggtgggcccaggtccttgtatcatgccacggtcccaactacagggtcctagctgggggcctgggtgggccctgggctctgggccctgctgctctagccccagccaccagcctgtccctgttgtaaggaagccaggtcttctctcttcattcctcttaggagagtgccaaactcagggacccagcactgggctgggttgggagtagggtgtcccagtggggttggggtgagcaggctgctgggatcccatggcctgagcagagcatgtgggaactgttcagtggcctgtgaactgtcttccttgttctagccaggctgttcaagactgctctccatagcaaggttctagggctcttcgccttcagtgttgtggccctagctatgggcctaaattgggctctaggtctctgtccctggcgcttgaggctcagaagagcctctgtccagcccctcagtattaccatgtctccctctcaggggtagcagagacagggttgcttataggaagctggcaccactcagctcttcctgctactccagtttcctcagcctctgcaaggcactcagggtgggggacagcaggatcaagacaacccgttggagcccctgtgttccagaggacctgatgccaaggggtaatgggcccagcagtgcctctggagcccaggccccaacacagccccatggcctctgccagatggctttgaaaaaggtgatccaagcaggcccctttatctgtacatagtgactgagtggggggtgctggcaagtgtggcagctgcctctgggctgagcacagcttgacccctctagcccctgtaaatactggatcaatgaatgaataaaactctcctaagaatctcctg

SEQ ID NO: 111964 - DNA, 578 bp, Homo sapiens
  Payload ID: 1943
  Gene Symbol: BAP1
  Gene Name: BRCA1 associated protein-1 (ubiquitin carboxy-terminal hydrolase)
  ENST ID: ENST00000470173
  CDS Start-End: 241-578
ctgcctgaccatcaccccctcctcttgtcgccccacccaggcctcttcaccctgctcgtggaagatttcggtgtcaagggggtgcaagtggaggagatctacgaccttcagagcaaatgtcagggccctgtatatggatttatcttcctgttcaaatggatcgaagagcgccggtcccggcgaaaggtctctaccttggtggatgatacgtccgtgattgatgatgatattgtgaataacatgttctttgcccaccagctgatacccaactcttgtgcaactcatgccttgctgagcgtgctcctgaactgcagcagcgtggacctgggacccaccctgagtcgcatgaaggacttcaccaagggtttcagccctgagagcaaaggatatgcgattggcaatgccccggagttggccaaggcccataatagccatgccaggcccgagccacgccacctccctgagaagcagaatggccttagtgcagtgcggaccatggaggcgttccactttgtcagctatgtgcctatcacaggccggctctttgagctggatgggctgaaggtctaccccattga

SEQ ID NO: 111965 - DNA, 1654 bp, Homo sapiens
  Payload ID: 1943
  Gene Symbol: BAP1
  Gene Name: BRCA1 associated protein-1 (ubiquitin carboxy-terminal hydrolase)
  ENST ID: ENST00000469613
  CDS Start-End: 1-389
tgcagaacaccaactctgcccttaggtataaggggaagggaacagggaagccaggggcattgagcggttctgctgatgggcaactgtcagtgctgcagcccaacaccatcaacgtcttggctgagattgcaaactatgaggcgtgcctcaaggaggaggtagagaagaggaagaagttcaagattgatgaccagagaaggacccacaactacgatgagttcatctgcacctttatctccatgctggctcaggaaggcatgctggccaacctagtggagcagaacatctccgtgcggcggcgccaaggggtcagcatcggccggctccacaagcagcggaagcctgaccggcggaaacgctctcgcccctacaaggccaagcgccagtgaggactgctggccctgactctgcagcccactcttgccgtgtggccctcaccagggtccttccctgccccacttccccttttcccagtattactgaatagtcccagctggagagtccaggccctgggaatgggaggaaccaggccacattccttccatcgtgccctgaggcctgacacggcagatcagccccatagtgctcaggaggcagcatctggagttggggcacagcgaggtactgcagcttcctccacagccggctgtggagcagcaggacctggcccttctgcctgggcagcagaatatatattttacctatcagagacatctatttttctgggctccaacccaacatgccaccatgttgacataagttcctacctgactatgctttctctcctaggagctgtcctggtgggcccaggtccttgtatcatgccacggtcccaactacagggtcctagctgggggcctgggtgggccctgggctctgggccctgctgctctagccccagccaccagcctgtccctgttgtaaggaagccaggtcttctctcttcattcctcttaggagagtgccaaactcagggacccagcactgggctgggttgggagtagggtgtcccagtggggttggggtgagcaggctgctgggatcccatggcctgagcagagcatgtgggaactgttcagtggcctgtgaactgtcttccttgttctagccaggctgttcaagactgctctccatagcaaggttctagggctcttcgccttcagtgttgtggccctagctatgggcctaaattgggctctaggtctctgtccctggcgcttgaggctcagaagagcctctgtccagcccctcagtattaccatgtctccctctcaggggtagcagagacagggttgcttataggaagctggcaccactcagctcttcctgctactccagtttcctcagcctctgcaaggcactcagggtgggggacagcaggatcaagacaacccgttggagcccctgtgttccagaggacctgatgccaaggggtaatgggcccagcagtgcctctggagcccaggccccaacacagccccatggcctctgccagatggctttgaaaaaggtgatccaagcaggcccctttatctgtacatagtgactgagtggggggtgctggcaagtgtggcagctgcctctgggctgagcacagcttgacccctctagcccctgtaaatactggatcaatgaatgaataaaactctcctaa

SEQ ID NO: 111966 - DNA, 521 bp, Homo sapiens
  Payload ID: 1943
  Gene Symbol: BAP1
  Gene Name: BRCA1 associated protein-1 (ubiquitin carboxy-terminal hydrolase)
  ENST ID: ENST00000490917
  CDS Start-End: 74-199
gggggctcccggtgggggcagcggtggggagggagggcctggacatggcgctgaggggccgccccgcgggaagatgaataagggctggctggagctggagagcgacccaggcctcttcaccctgctcgtggaagatttcggtgtcaagggggtgcaagtggaggagatctacgaccttcagagcaaatgtcagggctgatacccaactcttgtgcaactcatgccttgctgagcgtgctcctgaactgcagcagcgtggacctgggacccaccctgagtcgcatgaaggacttcaccaagggtttcagccctgagagcaaaggatatgcgattggcaatgccccggagttggccaaggcccataatagccatgccaggcccgagccacgccacctccctgagaagcagaatggccttagtgcagtgcggaccatggaggcgttccactttgtcagctatgtgcctatcacaggccggctctttgagctggatgggctgaaggtctaccccattgaccatgg

SEQ ID NO: 111967 - DNA, 1234 bp, Homo sapiens
  Payload ID: 1943
  Gene Symbol: BAP1
  Gene Name: BRCA1 associated protein-1 (ubiquitin carboxy-terminal hydrolase)
  ENST ID: ENST00000478368
  CDS Start-End: 1-762
ggcagtgctttcaactcgccactgcgctcgcctatccgctcagccaacccgacgcggccctccagccctgtcacctcccacatctccaaggtgctttttggagaggatgacagcctgctgcgtgttgactgcatacgctacaaccgtgctgtccgtgatctgggtcctgtcatcagcacaggcctgctgcacctggctgaggatggggtgctgagtcccctggcgctgacagagggtgggaagggttcctcgccctccatcagaccaatccaaggcagccaggggtccagcagcccagtggagaaggaggtcgtggaagccacggacagcagagagaagacggggatggtgaggcctggcgagcccttgagtggggagaaatactcacccaagctgcctattgctcgtggggctttgttgctggcccgccccgatcagaggtgcaatgctgggttttggcaggagctgctggcactgctgaagtgtgtggaggctgagattgcaaactatgaggcgtgcctcaaggaggaggtagagaagaggaagaagttcaagattgatgaccagagaaggacccacaactacgatgagttcatctgcacctttatctccatgctggctcaggaaggcatgctggccaacctagtggagcagaacatctccgtgcggcggcgccaaggggtcagcatcggccggctccacaagcagcggaagcctgaccggcggaaacgctctcgcccctacaaggccaagcgccagtgaggactgctggccctgactctgcagcccactcttgccgtgtggccctcaccagggtccttccctgccccacttccccttttcccagtattactgaatagtcccagctggagagtccaggccctgggaatgggaggaaccaggccacattccttccatcgtgccctgaggcctgacacggcagatcagccccatagtgctcaggaggcagcatctggagttggggcacagcgaggtactgcagcttcctccacagccggctgtggagcagcaggacctggcccttctgcctgggcagcagaatatatattttacctatcagagacatctatttttctgggctccaacccaacatgccaccatgttgacataagttcctacctgactatgctttctctcctaggagctgtcctggtgggcccaggtccttgtatcatgccacggtcccaactacagggtcctagctgggggcctg

SEQ ID NO: 111968 - DNA, 489 bp, Homo sapiens
  Payload ID: 1943
  Gene Symbol: BAP1
  Gene Name: BRCA1 associated protein-1 (ubiquitin carboxy-terminal hydrolase)
  ENST ID: ENST00000615113
  CDS Start-End: 1-489
atgggaggaaccaggccacattccttccatcgtgccctgaggcctgacacggcagatcagccccatagtgctcaggaggcagcatctggagttggggcacagcgaggtactgcagcttcctccacagccggctgtggagcagcaggacctggcccttctgcctgggcagcagaatatatattttacctatcagagacatctatttttctgggctccaacccaacatgccaccatgttgacataagttcctacctgactatgctttctctcctaggagctgtcctggtgggcccaggtccttgtatcatgccacggtcccaactacagggtcctagctgggggcctgggtgggccctgggctctgggccctgctgctctagccccagccaccagcctgtccctgttgtaaggaagccaggtcttctctcttcattcctcttaggagagtgccaaactcagggacccagcactgggctgggttgggagtag

SEQ ID NO: 111969 - DNA, 5499 bp, Homo sapiens
  Payload ID: 1944
  Gene Symbol: BARD1
  Gene Name: BRCA1 associated RING domain 1
  Uniprot ID: Q99728
  ENST ID: ENST00000260947
  CDS Start-End: 136-2469
cctctggcggcccgccgtcccagacgcgggaagagcttggccggtttcgagtcgctggcctgcagcttccctgtggtttcccgaggcttccttgcttcccgctctgcgaggagcctttcatccgaaggcgggacgatgccggataatcggcagccgaggaaccggcagccgaggatccgctccgggaacgagcctcgttccgcgcccgccatggaaccggatggtcgcggtgcctgggcccacagtcgcgccgcgctcgaccgcctggagaagctgctgcgctgctcgcgttgtactaacattctgagagagcctgtgtgtttaggaggatgtgagcacatcttctgtagtaattgtgtaagtgactgcattggaactggatgtccagtgtgttacaccccggcctggatacaagacttgaagataaatagacaactggacagcatgattcaactttgtagtaagcttcgaaatttgctacatgacaatgagctgtcagatttgaaagaagataaacctaggaaaagtttgtttaatgatgcaggaaacaagaagaattcaattaaaatgtggtttagccctcgaagtaagaaagtcagatatgttgtgagtaaagcttcagtgcaaacccagcctgcaataaaaaaagatgcaagtgctcagcaagactcatatgaatttgtttccccaagtcctcctgcagatgtttctgagagggctaaaaaggcttctgcaagatctggaaaaaagcaaaaaaagaaaactttagctgaaatcaaccaaaaatggaatttagaggcagaaaaagaagatggtgaatttgactccaaagaggaatctaagcaaaagctggtatccttctgtagccaaccatctgttatctccagtcctcagataaatggtgaaatagacttactagcaagtggctccttgacagaatctgaatgttttggaagtttaactgaagtctctttaccattggctgagcaaatagagtctccagacactaagagcaggaatgaagtagtgactcctgagaaggtctgcaaaaattatcttacatctaagaaatctttgccattagaaaataatggaaaacgtggccatcacaatagactttccagtcccatttctaagagatgtagaaccagcattctgagcaccagtggagattttgttaagcaaacggtgccctcagaaaatataccattgcctgaatgttcttcaccaccttcatgcaaacgtaaagttggtggtacatcagggaggaaaaacagtaacatgtccgatgaattcattagtctttcaccaggtacaccaccttctacattaagtagttcaagttacaggcgagtgatgtctagtccctcagcaatgaagctgttgcccaatatggctgtgaaaagaaatcatagaggagagactttgctccatattgcttctattaagggcgacataccttctgttgaataccttttacaaaatggaagtgatccaaatgttaaagaccatgctggatggacaccattgcatgaagcttgcaatcatgggcacctgaaggtagtggaattattgctccagcataaggcattggtgaacaccaccgggtatcaaaatgactcaccacttcacgatgcagccaagaatgggcatgtggatatagtcaagctgttactttcctatggagcctccagaaatgctgttaatatatttggtctgcggcctgtcgattatacagatgatgaaagtatgaaatcgctattgctgctaccagagaagaatgaatcatcctcagctagccactgctcagtaatgaacactgggcagcgtagggatggacctcttgtacttataggcagtgggctgtcttcagaacaacagaaaatgctcagtgagcttgcagtaattcttaaggctaaaaaatatactgagtttgacagtacagtaactcatgttgttgttcctggtgatgcagttcaaagtaccttgaagtgtatgcttgggattctcaatggatgctggattctaaaatttgaatgggtaaaagcatgtctacgaagaaaagtatgtgaacaggaagaaaagtatgaaattcctgaaggtccacgcagaagcaggctcaacagagaacagctgttgccaaagctgtttgatggatgctacttctatttgtggggaaccttcaaacaccatccaaaggacaaccttattaagctcgtcactgcaggtgggggccagatcctcagtagaaagcccaagccagacagtgacgtgactcagaccatcaatacagtcgcataccatgcgagacccgattctgatcagcgcttctgcacacagtatatcatctatgaagatttgtgtaattatcacccagagagggttcggcagggcaaagtctggaaggctccttcgagctggtttatagactgtgtgatgtcctttgagttgcttcctcttgacagctgaatattataccagatgaacatttcaaattgaatttgcacggtttgtgagagcccagtcattgtactgtttttaatgttcacatttttacaaataggtagagtcattcatatttgtctttgaatcaaaaaaaaaaaaaaagtctaatgccagattaggaattcatgttatgtttaccatttagaagctgggattgcttttaaaggtttttctttttaaaattggcatgtttttgatttatcatgtctttctattcagattattgggtatcaaagattaatgaggacaccagaatcttggttaaatagacaagtggtatcattactgtttgagtcttttaatattctccatacctgccaccagtgaaaaaacttgccttttttttttttttttttttagtaaacagaatattatcaaacaatttattttggctttattgaaaaaagagtatttggtctaaatgtgccaccataggtgttaaattctcctatctgcaattgtctttatcctatattgtgttcatttcttttcttaataatttactttgttgtgtgtttctacactttcatccctgttttttatcttgtatatcatcaggaaattgtgatttaatcattaacattggtttttttgtgtgtgtggtaaaaatcaacactaggctcatggtacatatttttattctgtacatttgcttgtaactatcaatttgtaactctgtttatctactacatgtgtatatatacttagagcattttctctaacacattttaatgttagtattttttaaaaggtctgaccagtctagcaaattgtcagtccaacgtcattactttaaattaagaagcagtcttcttctggtaaaccttgttggtatttgtaaaataattttgaaggtcttaatttcttcctttgtaaaaggaaaaggttttttttaaagtttttaggttggcatggaggcagaagttggtgattacttgatttacaacagattttttccagatcatacaaaaggccatacagtaagtatagaagtaggtatggggagggcttactaatatcaaataggcaaggccttagtgagtgggcaggataccacctgagagtggccagatgtggggaggttactctgctctgggtgctctcattcatgaatcgacaaggatacattagattattttgaaacatttttttaagaagcagaattctttaataattccttcctagacattgaatatacttataaaattaaagacttggggaaggagacactgagagacttgccagtttggttcctcatgaacaaaagaggacagtttgataactaccagaatagaatatccctagttttaaaatagtgagaatctctgaagttcatcaacatcttaagatgcacttacttgaaagtttgagattctgtttatcatttgaaaacacattttgctttaattctttctttgacatgttgttttttcatatcaagaaatatatgaacaaaataataaccttttgaccctgaccttgctgggtgaattagctctgaaacactctctacaaccagtaatgcatttgtcccacatttcattctgatagaaaatgaacaccatagcaccaaacaaaaatccgaggcgttagataatgtctggattaaataatttaagactctctaggattttggttgtcattttttatttataacagactttaagtcactttctgttgcctcataggtcacattttagacaggtttgtgtctgttccttgcatctgaattcctgattgtaaagacacctatgaggtctcttagtttttgtcattcattttcttggtttatcacccctcccttctttttgttgtttttccctgactgttaagcagtttcatctttgcttttgttaaatatttgacagcagttagtttgtgttaagctcttgaaacttgtgattgtactttctgtgtagatatacatgtaattattttttatttttcaatcatagattcaagcttccttcttttttaccacaaatcattaaagttatttgtgtttccatatacctgtgtcttgtataaaattggcttattctgtgctgttgaatgaggctcaacatgacttggtgaggaagtctattaactaacaaaagcttatcttttttaacataatgctttttaattaattttgaataaaaatatttctaaagtgtactagatactttattaccttagattattccgaatacagtataactttgatagtttggaatagtcattaagaaacaattacacactgattgctttgtgtctctaaaagtgagaggctggtagcttttccacattctcatggctattttctagttctacttgaatttataactgtttccctttttccttgacagctgccactttgtagctatttttctgtctctgctaatactttaccatatctatctcaattgttttttcttttgacttgctgaaaaatagaaaccagatgggaagtatattagcattatgattgaaataagggtaaatgagcaatgtgtgaaggttttcactgacttcacctaaaagatagtttagctacttgaattttagtaaatagaatttttcctttatttcatcggtccccccacctttttttttttttgcacctgccttgtaaatttaatagttaagtgacctctgcctagaggatgatatttggggaggtttgatgtttcctgtgggaataagacgattcacaggtgagagtggggccacattagctgttattgtttccatgggtcagtgtggaaaatgcattaatcatattctaaacgttcatgggcctcattacagtcacaattgtctattctgtttcctaccctgaacacattaaaatggtaggaactaatgcttgtcttatttaattactaaaagccaccattttctttgatagattgagctacagattgtaaacttcatgtatttctttataagtcaacccttttcaaagatacgcacatcaaactgaatgaataaataaatattgagaagttg

SEQ ID NO: 111970 - DNA, 766 bp, Homo sapiens
  Payload ID: 1944
  Gene Symbol: BARD1
  Gene Name: BRCA1 associated RING domain 1
  ENST ID: ENST00000421162
  CDS Start-End: 119-766
tcccagacgcgggaagagcttggccggtttcgagtcgctggcctgcagcttccctgtggtttcccgaggcttccttgcttcccgctctgcgaggagcctttcatccgaaggcgggacgatgccggataatcggcagccgaggaaccggcagccgaggatccgctccgggaacgagcctcgttccgcgcccgccatggaaccggatggtcgcggtgcctgggcccacagtcgcgccgcgctcgaccgcctggagaagctgctgcgctgctcgcgttgtactaacattctgagagagcctgtgtgtttaggaggatgtgagcacatcttctgtagtaatatatttggtctgcggcctgtcgattatacagatgatgaaagtatgaaatcgctattgctgctaccagagaagaatgaatcatcctcagctagccactgctcagtaatgaacactgggcagcgtagggatggacctcttgtacttataggcagtgggctgtcttcagaacaacagaaaatgctcagtgagcttgcagtaattcttaaggctaaaaaatatactgagtttgacagtacagtaactcatgttgttgttcctggtgatgcagttcaaagtaccttgaagtgtatgcttgggattctcaatggatgctggattctaaaatttgaatgggtaaaagcatgtctacgaagaaaagtatgtgaacaggaagaaaagtatgaaattcctgaaggtccacgcagaagcaggctcaacagagaacagctg

SEQ ID NO: 111971 - DNA, 615 bp, Homo sapiens
  Payload ID: 1944
  Gene Symbol: BARD1
  Gene Name: BRCA1 associated RING domain 1
  ENST ID: ENST00000432456
  CDS Start-End: 1-134
gggtaaaagcatgtctacgaagaaaagtatgtgaacaggaagaaaagtatgaaattcctgaaggtccacgcagaagcaggctcaacagagaacagctgcacttgattctgaaagatgatcacgatgagcagtaaaatccagaagttgccaaagctgtttgatggatgctacttctatttgtggggaaccttcaaacaccatccaaaggacaaccttattaagctcgtcactgcaggtgggggccagatcctcagtagaaagcccaagccagacagtgacgtgactcagaccatcaatacagtcgcataccatgcgagacccgattctgatcagcgcttctgcacacagtatatcatctatgaagatttgtgtaattatcacccagagagggttcggcagggcaaagtctggaaggctccttcgagctggtttatagactgtgtgatgtcctttgagttgcttcctcttgacagctgaatattataccagatgaacatttcaaattgaatttgcacggtttgtgagagcccagtcattgtactgtttttaatgttcacatttttacaaataggtagagtcattcatatttgtctttgaatcaaaaaaaaaaaaaaa

SEQ ID NO: 111972 - DNA, 2261 bp, Homo sapiens
  Payload ID: 1944
  Gene Symbol: BARD1
  Gene Name: BRCA1 associated RING domain 1
  ENST ID: ENST00000455743
  CDS Start-End: 105-335
agagcttggccggtttcgagtcgctggcctgcagcttccctgtggtttcccgaggcttccttgcttcccgctctgcgaggagcctttcatccgaaggcgggacgatgccggataatcggcagccgaggaaccggcagccgaggatccgctccgggaacgagcctcgttccgcgcccgccatggaaccggatggtcgcggtgcctgggcccacagtcgcgccgcgctcgaccgcctggagaagctgctgcgctgctcgcgttgtactaacattctgagagagcctgtgtgtttaggaggatgtgagcacatcttctgtagatttgaaagaagataaacctaggaaaagtttgtttaatgatgcaggaaacaagaagaattcaattaaaatgtggtttagccctcgaagtaagaaagtcagatatgttgtgagtaaagcttcagtgcaaacccagcctgcaataaaaaaagatgcaagtgctcagcaagactcatatgaatttgtttccccaagtcctcctgcagatgtttctgagagggctaaaaaggcttctgcaagatctggaaaaaagcaaaaaaagaaaactttagctgaaatcaaccaaaaatggaatttagaggcagaaaaagaagatggtgaatttgactccaaagaggaatctaagcaaaagctggtatccttctgtagccaaccatctgttatctccagtcctcagataaatggtgaaatagacttactagcaagtggctccttgacagaatctgaatgttttggaagtttaactgaagtctctttaccattggctgagcaaatagagtctccagacactaagagcaggaatgaagtagtgactcctgagaaggtctgcaaaaattatcttacatctaagaaatctttgccattagaaaataatggaaaacgtggccatcacaatagactttccagtcccatttctaagagatgtagaaccagcattctgagcaccagtggagattttgttaagcaaacggtgccctcagaaaatataccattgcctgaatgttcttcaccaccttcatgcaaacgtaaagttggtggtacatcagggaggaaaaacagtaacatgtccgatgaattcattagtctttcaccaggtacaccaccttctacattaagtagttcaagttacaggcgagtgatgtctagtccctcagcaatgaagctgttgcccaatatggctgtgaaaagaaatcatagaggagagactttgctccatattgcttctattaagggcgacataccttctgttgaataccttttacaaaatggaagtgatccaaatgttaaagaccatgctggatggacaccattgcatgaagcttgcaatcatgggcacctgaaggtagtggaattattgctccagcataaggcattggtgaacaccaccgggtatcaaaatgactcaccacttcacgatgcagccaagaatgggcatgtggatatagtcaagctgttactttcctatggagcctccagaaatgctgttaatatatttggtctgcggcctgtcgattatacagatgatgaaagtatgaaatcgctattgctgctaccagagaagaatgaatcatcctcagctagccactgctcagtaatgaacactgggcagcgtagggatggacctcttgtacttataggcagtgggctgtcttcagaacaacagaaaatgctcagtgagcttgcagtaattcttaaggctaaaaaatatactgagtttgacagtacagtaactcatgttgttgttcctggtgatgcagttcaaagtaccttgaagtgtatgcttgggattctcaatggatgctggattctaaaatttgaatgggtaaaagcatgtctacgaagaaaagtatgtgaacaggaagaaaagtatgaaattcctgaaggtccacgcagaagcaggctcaacagagaacagctgttgccaaagctgtttgatggatgctacttctatttgtggggaaccttcaaacaccatccaaaggacaaccttattaagctcgtcactgcaggtgggggccagatcctcagtagaaagcccaagccagacagtgacgtgactcagaccatcaatacagtcgcataccatgcgagacccgattctgatcagcgcttctgcacacagtatatcatctatgaagatttgtgtaattatcacccagagagggttcggcagggcaaagtctggaaggctccttcgagctggtttatagactgtgtgatgtc

SEQ ID NO: 111973 - DNA, 5449 bp, Homo sapiens
  Payload ID: 1944
  Gene Symbol: BARD1
  Gene Name: BRCA1 associated RING domain 1
  Uniprot ID: Q99728
  ENST ID: ENST00000617164
  CDS Start-End: 143-2419
ccccgcccctctggcggcccgccgtcccagacgcgggaagagcttggccggtttcgagtcgctggcctgcagcttccctgtggtttcccgaggcttccttgcttcccgctctgcgaggagcctttcatccgaaggcgggacgatgccggataatcggcagccgaggaaccggcagccgaggatccgctccgggaacgagcctcgttccgcgcccgccatggaaccggatggtcgcggtgcctgggcccacagtcgcgccgcgctcgaccgcctggagaagctgctgcgctgctcgcgttgtaattgtgtaagtgactgcattggaactggatgtccagtgtgttacaccccggcctggatacaagacttgaagataaatagacaactggacagcatgattcaactttgtagtaagcttcgaaatttgctacatgacaatgagctgtcagatttgaaagaagataaacctaggaaaagtttgtttaatgatgcaggaaacaagaagaattcaattaaaatgtggtttagccctcgaagtaagaaagtcagatatgttgtgagtaaagcttcagtgcaaacccagcctgcaataaaaaaagatgcaagtgctcagcaagactcatatgaatttgtttccccaagtcctcctgcagatgtttctgagagggctaaaaaggcttctgcaagatctggaaaaaagcaaaaaaagaaaactttagctgaaatcaaccaaaaatggaatttagaggcagaaaaagaagatggtgaatttgactccaaagaggaatctaagcaaaagctggtatccttctgtagccaaccatctgttatctccagtcctcagataaatggtgaaatagacttactagcaagtggctccttgacagaatctgaatgttttggaagtttaactgaagtctctttaccattggctgagcaaatagagtctccagacactaagagcaggaatgaagtagtgactcctgagaaggtctgcaaaaattatcttacatctaagaaatctttgccattagaaaataatggaaaacgtggccatcacaatagactttccagtcccatttctaagagatgtagaaccagcattctgagcaccagtggagattttgttaagcaaacggtgccctcagaaaatataccattgcctgaatgttcttcaccaccttcatgcaaacgtaaagttggtggtacatcagggaggaaaaacagtaacatgtccgatgaattcattagtctttcaccaggtacaccaccttctacattaagtagttcaagttacaggcgagtgatgtctagtccctcagcaatgaagctgttgcccaatatggctgtgaaaagaaatcatagaggagagactttgctccatattgcttctattaagggcgacataccttctgttgaataccttttacaaaatggaagtgatccaaatgttaaagaccatgctggatggacaccattgcatgaagcttgcaatcatgggcacctgaaggtagtggaattattgctccagcataaggcattggtgaacaccaccgggtatcaaaatgactcaccacttcacgatgcagccaagaatgggcatgtggatatagtcaagctgttactttcctatggagcctccagaaatgctgttaatatatttggtctgcggcctgtcgattatacagatgatgaaagtatgaaatcgctattgctgctaccagagaagaatgaatcatcctcagctagccactgctcagtaatgaacactgggcagcgtagggatggacctcttgtacttataggcagtgggctgtcttcagaacaacagaaaatgctcagtgagcttgcagtaattcttaaggctaaaaaatatactgagtttgacagtacagtaactcatgttgttgttcctggtgatgcagttcaaagtaccttgaagtgtatgcttgggattctcaatggatgctggattctaaaatttgaatgggtaaaagcatgtctacgaagaaaagtatgtgaacaggaagaaaagtatgaaattcctgaaggtccacgcagaagcaggctcaacagagaacagctgttgccaaagctgtttgatggatgctacttctatttgtggggaaccttcaaacaccatccaaaggacaaccttattaagctcgtcactgcaggtgggggccagatcctcagtagaaagcccaagccagacagtgacgtgactcagaccatcaatacagtcgcataccatgcgagacccgattctgatcagcgcttctgcacacagtatatcatctatgaagatttgtgtaattatcacccagagagggttcggcagggcaaagtctggaaggctccttcgagctggtttatagactgtgtgatgtcctttgagttgcttcctcttgacagctgaatattataccagatgaacatttcaaattgaatttgcacggtttgtgagagcccagtcattgtactgtttttaatgttcacatttttacaaataggtagagtcattcatatttgtctttgaatcaaaaaaaaaaaaaaagtctaatgccagattaggaattcatgttatgtttaccatttagaagctgggattgcttttaaaggtttttctttttaaaattggcatgtttttgatttatcatgtctttctattcagattattgggtatcaaagattaatgaggacaccagaatcttggttaaatagacaagtggtatcattactgtttgagtcttttaatattctccatacctgccaccagtgaaaaaacttgccttttttttttttttttttttagtaaacagaatattatcaaacaatttattttggctttattgaaaaaagagtatttggtctaaatgtgccaccataggtgttaaattctcctatctgcaattgtctttatcctatattgtgttcatttcttttcttaataatttactttgttgtgtgtttctacactttcatccctgttttttatcttgtatatcatcaggaaattgtgatttaatcattaacattggtttttttgtgtgtgtggtaaaaatcaacactaggctcatggtacatatttttattctgtacatttgcttgtaactatcaatttgtaactctgtttatctactacatgtgtatatatacttagagcattttctctaacacattttaatgttagtattttttaaaaggtctgaccagtctagcaaattgtcagtccaacgtcattactttaaattaagaagcagtcttcttctggtaaaccttgttggtatttgtaaaataattttgaaggtcttaatttcttcctttgtaaaaggaaaaggttttttttaaagtttttaggttggcatggaggcagaagttggtgattacttgatttacaacagattttttccagatcatacaaaaggccatacagtaagtatagaagtaggtatggggagggcttactaatatcaaataggcaaggccttagtgagtgggcaggataccacctgagagtggccagatgtggggaggttactctgctctgggtgctctcattcatgaatcgacaaggatacattagattattttgaaacatttttttaagaagcagaattctttaataattccttcctagacattgaatatacttataaaattaaagacttggggaaggagacactgagagacttgccagtttggttcctcatgaacaaaagaggacagtttgataactaccagaatagaatatccctagttttaaaatagtgagaatctctgaagttcatcaacatcttaagatgcacttacttgaaagtttgagattctgtttatcatttgaaaacacattttgctttaattctttctttgacatgttgttttttcatatcaagaaatatatgaacaaaataataaccttttgaccctgaccttgctgggtgaattagctctgaaacactctctacaaccagtaatgcatttgtcccacatttcattctgatagaaaatgaacaccatagcaccaaacaaaaatccgaggcgttagataatgtctggattaaataatttaagactctctaggattttggttgtcattttttatttataacagactttaagtcactttctgttgcctcataggtcacattttagacaggtttgtgtctgttccttgcatctgaattcctgattgtaaagacacctatgaggtctcttagtttttgtcattcattttcttggtttatcacccctcccttctttttgttgtttttccctgactgttaagcagtttcatctttgcttttgttaaatatttgacagcagttagtttgtgttaagctcttgaaacttgtgattgtactttctgtgtagatatacatgtaattattttttatttttcaatcatagattcaagcttccttcttttttaccacaaatcattaaagttatttgtgtttccatatacctgtgtcttgtataaaattggcttattctgtgctgttgaatgaggctcaacatgacttggtgaggaagtctattaactaacaaaagcttatcttttttaacataatgctttttaattaattttgaataaaaatatttctaaagtgtactagatactttattaccttagattattccgaatacagtataactttgatagtttggaatagtcattaagaaacaattacacactgattgctttgtgtctctaaaagtgagaggctggtagcttttccacattctcatggctattttctagttctacttgaatttataactgtttccctttttccttgacagctgccactttgtagctatttttctgtctctgctaatactttaccatatctatctcaattgttttttcttttgacttgctgaaaaatagaaaccagatgggaagtatattagcattatgattgaaataagggtaaatgagcaatgtgtgaaggttttcactgacttcacctaaaagatagtttagctacttgaattttagtaaatagaatttttcctttatttcatcggtccccccacctttttttttttttgcacctgccttgtaaatttaatagttaagtgacctctgcctagaggatgatatttggggaggtttgatgtttcctgtgggaataagacgattcacaggtgagagtggggccacattagctgttattgtttccatgggtcagtgtggaaaatgcattaatcatattctaaacgttcatgggcctcattacagtcacaattgtctattctgtttcctaccctgaacacattaaaatggtaggaactaatgcttgtcttatttaattactaaaagccaccattttctttgatagattgagctacagattgtaaacttcatgtatttctttataagtcaacccttttcaaagatacgcacatcaaactgaatgaataaataaatattgagaagttg

SEQ ID NO: 111974 - DNA, 1456 bp, Homo sapiens
  Payload ID: 1944
  Gene Symbol: BARD1
  Gene Name: BRCA1 associated RING domain 1
  Uniprot ID: Q99728
  ENST ID: ENST00000620057
  CDS Start-End: 74-457
cagcttccctgtggtttcccgaggcttccttgcttcccgctctgcgaggagcctttcatccgaaggcgggacgatgccggataatcggcagccgaggaaccggcagccgaggatccgctccgggaacgagcctcgttccgcgcccgccatggaaccggatggtcgcggtgcctgggcccacagtcgcgccgcgctcgaccgcctggagaagctgctgcgctgctcgcgttgtactaacattctgagagagcctgtgtgtttaggaggatgtgagcacatcttctgtagtaattgtgtaagtgactgcattggaactggatgtccagtgtgttacaccccggcctggatacaagacttgaagataaatagacaactggacagcatgattcaactttgtagtaagcttcgaaatttgctacatgacaatgagctgtcagggcgacataccttctgttgaataccttttacaaaatggaagtgatccaaatgttaaagaccatgctggatggacaccattgcatgaagcttgcaatcatgggcacctgaaggtagtggaattattgctccagcataaggcattggtgaacaccaccgggtatcaaaatgactcaccacttcacgatgcagccaagaatgggcatgtggatatagtcaagctgttactttcctatggagcctccagaaatgctgttaatatatttggtctgcggcctgtcgattatacagatgatgaaagtatgaaatcgctattgctgctaccagagaagaatgaatcatcctcagctagccactgctcagtaatgaacactgggcagcgtagggatggacctcttgtacttataggcagtgggctgtcttcagaacaacagaaaatgctcagtgagcttgcagtaattcttaaggctaaaaaatatactgagtttgacagtacagtaactcatgttgttgttcctggtgatgcagttcaaagtaccttgaagtgtatgcttgggattctcaatggatgctggattctaaaatttgaatgggtaaaagcatgtctacgaagaaaagtatgtgaacaggaagaaaagtatgaaattcctgaaggtccacgcagaagcaggctcaacagagaacagctgttgccaaagctgtttgatggatgctacttctatttgtggggaaccttcaaacaccatccaaaggacaaccttattaagctcgtcactgcaggtgggggccagatcctcagtagaaagcccaagccagacagtgacgtgactcagaccatcaatacagtcgcataccatgcgagacccgattctgatcagcgcttctgcacacagtatatcatctatgaagatttgtgtaattatcacccagagagggttcggcagggcaaagtctggaaggctccttcgagctggtttatagactgtgtgatgtcctttgagttgcttcctcttgacagctg

SEQ ID NO: 111975 - DNA, 3967 bp, Homo sapiens
  Payload ID: 1944
  Gene Symbol: BARD1
  Gene Name: BRCA1 associated RING domain 1
  ENST ID: ENST00000619009
  CDS Start-End: 143-937
ccccgcccctctggcggcccgccgtcccagacgcgggaagagcttggccggtttcgagtcgctggcctgcagcttccctgtggtttcccgaggcttccttgcttcccgctctgcgaggagcctttcatccgaaggcgggacgatgccggataatcggcagccgaggaaccggcagccgaggatccgctccgggaacgagcctcgttccgcgcccgccatggaaccggatggtcgcggtgcctgggcccacagtcgcgccgcgctcgaccgcctggagaagctgctgcgctgctcgcgttgtactaacattctgagagagcctgtgtgtttaggaggatgtgagcacatcttctgtagtaattgtgtaagtgactgcattggaactggatgtccagtgtgttacaccccggcctggatacaagacttgaagataaatagacaactggacagcatgattcaactttgtagtaagcttcgaaatttgctacatgacaatgagctgtcaggggtaaaagcatgtctacgaagaaaagtatgtgaacaggaagaaaagtatgaaattcctgaaggtccacgcagaagcaggctcaacagagaacagctgttgccaaagctgtttgatggatgctacttctatttgtggggaaccttcaaacaccatccaaaggacaaccttattaagctcgtcactgcaggtgggggccagatcctcagtagaaagcccaagccagacagtgacgtgactcagaccatcaatacagtcgcataccatgcgagacccgattctgatcagcgcttctgcacacagtatatcatctatgaagatttgtgtaattatcacccagagagggttcggcagggcaaagtctggaaggctccttcgagctggtttatagactgtgtgatgtcctttgagttgcttcctcttgacagctgaatattataccagatgaacatttcaaattgaatttgcacggtttgtgagagcccagtcattgtactgtttttaatgttcacatttttacaaataggtagagtcattcatatttgtctttgaatcaaaaaaaaaaaaaaagtctaatgccagattaggaattcatgttatgtttaccatttagaagctgggattgcttttaaaggtttttctttttaaaattggcatgtttttgatttatcatgtctttctattcagattattgggtatcaaagattaatgaggacaccagaatcttggttaaatagacaagtggtatcattactgtttgagtcttttaatattctccatacctgccaccagtgaaaaaacttgccttttttttttttttttttttagtaaacagaatattatcaaacaatttattttggctttattgaaaaaagagtatttggtctaaatgtgccaccataggtgttaaattctcctatctgcaattgtctttatcctatattgtgttcatttcttttcttaataatttactttgttgtgtgtttctacactttcatccctgttttttatcttgtatatcatcaggaaattgtgatttaatcattaacattggtttttttgtgtgtgtggtaaaaatcaacactaggctcatggtacatatttttattctgtacatttgcttgtaactatcaatttgtaactctgtttatctactacatgtgtatatatacttagagcattttctctaacacattttaatgttagtattttttaaaaggtctgaccagtctagcaaattgtcagtccaacgtcattactttaaattaagaagcagtcttcttctggtaaaccttgttggtatttgtaaaataattttgaaggtcttaatttcttcctttgtaaaaggaaaaggttttttttaaagtttttaggttggcatggaggcagaagttggtgattacttgatttacaacagattttttccagatcatacaaaaggccatacagtaagtatagaagtaggtatggggagggcttactaatatcaaataggcaaggccttagtgagtgggcaggataccacctgagagtggccagatgtggggaggttactctgctctgggtgctctcattcatgaatcgacaaggatacattagattattttgaaacatttttttaagaagcagaattctttaataattccttcctagacattgaatatacttataaaattaaagacttggggaaggagacactgagagacttgccagtttggttcctcatgaacaaaagaggacagtttgataactaccagaatagaatatccctagttttaaaatagtgagaatctctgaagttcatcaacatcttaagatgcacttacttgaaagtttgagattctgtttatcatttgaaaacacattttgctttaattctttctttgacatgttgttttttcatatcaagaaatatatgaacaaaataataaccttttgaccctgaccttgctgggtgaattagctctgaaacactctctacaaccagtaatgcatttgtcccacatttcattctgatagaaaatgaacaccatagcaccaaacaaaaatccgaggcgttagataatgtctggattaaataatttaagactctctaggattttggttgtcattttttatttataacagactttaagtcactttctgttgcctcataggtcacattttagacaggtttgtgtctgttccttgcatctgaattcctgattgtaaagacacctatgaggtctcttagtttttgtcattcattttcttggtttatcacccctcccttctttttgttgtttttccctgactgttaagcagtttcatctttgcttttgttaaatatttgacagcagttagtttgtgttaagctcttgaaacttgtgattgtactttctgtgtagatatacatgtaattattttttatttttcaatcatagattcaagcttccttcttttttaccacaaatcattaaagttatttgtgtttccatatacctgtgtcttgtataaaattggcttattctgtgctgttgaatgaggctcaacatgacttggtgaggaagtctattaactaacaaaagcttatcttttttaacataatgctttttaattaattttgaataaaaatatttctaaagtgtactagatactttattaccttagattattccgaatacagtataactttgatagtttggaatagtcattaagaaacaattacacactgattgctttgtgtctctaaaagtgagaggctggtagcttttccacattctcatggctattttctagttctacttgaatttataactgtttccctttttccttgacagctgccactttgtagctatttttctgtctctgctaatactttaccatatctatctcaattgttttttcttttgacttgctgaaaaatagaaaccagatgggaagtatattagcattatgattgaaataagggtaaatgagcaatgtgtgaaggttttcactgacttcacctaaaagatagtttagctacttgaattttagtaaatagaatttttcctttatttcatcggtccccccacctttttttttttttgcacctgccttgtaaatttaatagttaagtgacctctgcctagaggatgatatttggggaggtttgatgtttcctgtgggaataagacgattcacaggtgagagtggggccacattagctgttattgtttccatgggtcagtgtggaaaatgcattaatcatattctaaacgttcatgggcctcattacagtcacaattgtctattctgtttcctaccctgaacacattaaaatggtaggaactaatgcttgtcttatttaattactaaaagccaccattttctttgatagattgagctacagattgtaaacttcatgtatttctttataagtcaacccttttcaaagatacgcacatcaaactgaatgaataaataaatattgagaagttg

SEQ ID NO: 111976 - DNA, 703 bp, Homo sapiens
  Payload ID: 1944
  Gene Symbol: BARD1
  Gene Name: BRCA1 associated RING domain 1
  ENST ID: ENST00000613192
  CDS Start-End: 200-703
agacgcgggaagagcttggccggtttcgagtcgctggcctgcagcttccctgtggtttcccgaggcttccttgcttcccgctctgcgaggagcctttcatccgaaggcgggacgatgccggataatcggcagccgaggaaccggcagccgaggatccgctccgggaacgagcctcgttccgcgcccgccatggaaccggatggtcgcggtgcctgggcccacagtcgcgccgcgctcgaccgcctggagaagctgctgcgctgctcgcgttggggtaaaagcatgtctacgaagaaaagtatgtgaacaggaagaaaagtatgaaattcctgaaggtccacgcagaagcaggctcaacagagaacagctgttgccaaagctgtttgatggatgctacttctatttgtggggaaccttcaaacaccatccaaaggacaaccttattaagctcgtcactgcaggtgggggccagatcctcagtagaaagcccaagccagacagtgacgtgactcagaccatcaatacagtcgcataccatgcgagacccgattctgatcagcgcttctgcacacagtatatcatctatgaagatttgtgtaattatcacccagagagggttcggcagggcaaagtctggaaggctccttcgagctggtttatagactgtgtgatgtcctttgagttgcttcctcttgacagctga

SEQ ID NO: 111977 - DNA, 4096 bp, Homo sapiens
  Payload ID: 1944
  Gene Symbol: BARD1
  Gene Name: BRCA1 associated RING domain 1
  ENST ID: ENST00000613374
  CDS Start-End: 143-1066
ccccgcccctctggcggcccgccgtcccagacgcgggaagagcttggccggtttcgagtcgctggcctgcagcttccctgtggtttcccgaggcttccttgcttcccgctctgcgaggagcctttcatccgaaggcgggacgatgccggataatcggcagccgaggaaccggcagccgaggatccgctccgggaacgagcctcgttccgcgcccgccatggaaccggatggtcgcggtgcctgggcccacagtcgcgccgcgctcgaccgcctggagaagctgctgcgctgctcgcgttgtaatatatttggtctgcggcctgtcgattatacagatgatgaaagtatgaaatcgctattgctgctaccagagaagaatgaatcatcctcagctagccactgctcagtaatgaacactgggcagcgtagggatggacctcttgtacttataggcagtgggctgtcttcagaacaacagaaaatgctcagtgagcttgcagtaattcttaaggctaaaaaatatactgagtttgacagtacagtaactcatgttgttgttcctggtgatgcagttcaaagtaccttgaagtgtatgcttgggattctcaatggatgctggattctaaaatttgaatgggtaaaagcatgtctacgaagaaaagtatgtgaacaggaagaaaagtatgaaattcctgaaggtccacgcagaagcaggctcaacagagaacagctgttgccaaagctgtttgatggatgctacttctatttgtggggaaccttcaaacaccatccaaaggacaaccttattaagctcgtcactgcaggtgggggccagatcctcagtagaaagcccaagccagacagtgacgtgactcagaccatcaatacagtcgcataccatgcgagacccgattctgatcagcgcttctgcacacagtatatcatctatgaagatttgtgtaattatcacccagagagggttcggcagggcaaagtctggaaggctccttcgagctggtttatagactgtgtgatgtcctttgagttgcttcctcttgacagctgaatattataccagatgaacatttcaaattgaatttgcacggtttgtgagagcccagtcattgtactgtttttaatgttcacatttttacaaataggtagagtcattcatatttgtctttgaatcaaaaaaaaaaaaaaagtctaatgccagattaggaattcatgttatgtttaccatttagaagctgggattgcttttaaaggtttttctttttaaaattggcatgtttttgatttatcatgtctttctattcagattattgggtatcaaagattaatgaggacaccagaatcttggttaaatagacaagtggtatcattactgtttgagtcttttaatattctccatacctgccaccagtgaaaaaacttgccttttttttttttttttttttagtaaacagaatattatcaaacaatttattttggctttattgaaaaaagagtatttggtctaaatgtgccaccataggtgttaaattctcctatctgcaattgtctttatcctatattgtgttcatttcttttcttaataatttactttgttgtgtgtttctacactttcatccctgttttttatcttgtatatcatcaggaaattgtgatttaatcattaacattggtttttttgtgtgtgtggtaaaaatcaacactaggctcatggtacatatttttattctgtacatttgcttgtaactatcaatttgtaactctgtttatctactacatgtgtatatatacttagagcattttctctaacacattttaatgttagtattttttaaaaggtctgaccagtctagcaaattgtcagtccaacgtcattactttaaattaagaagcagtcttcttctggtaaaccttgttggtatttgtaaaataattttgaaggtcttaatttcttcctttgtaaaaggaaaaggttttttttaaagtttttaggttggcatggaggcagaagttggtgattacttgatttacaacagattttttccagatcatacaaaaggccatacagtaagtatagaagtaggtatggggagggcttactaatatcaaataggcaaggccttagtgagtgggcaggataccacctgagagtggccagatgtggggaggttactctgctctgggtgctctcattcatgaatcgacaaggatacattagattattttgaaacatttttttaagaagcagaattctttaataattccttcctagacattgaatatacttataaaattaaagacttggggaaggagacactgagagacttgccagtttggttcctcatgaacaaaagaggacagtttgataactaccagaatagaatatccctagttttaaaatagtgagaatctctgaagttcatcaacatcttaagatgcacttacttgaaagtttgagattctgtttatcatttgaaaacacattttgctttaattctttctttgacatgttgttttttcatatcaagaaatatatgaacaaaataataaccttttgaccctgaccttgctgggtgaattagctctgaaacactctctacaaccagtaatgcatttgtcccacatttcattctgatagaaaatgaacaccatagcaccaaacaaaaatccgaggcgttagataatgtctggattaaataatttaagactctctaggattttggttgtcattttttatttataacagactttaagtcactttctgttgcctcataggtcacattttagacaggtttgtgtctgttccttgcatctgaattcctgattgtaaagacacctatgaggtctcttagtttttgtcattcattttcttggtttatcacccctcccttctttttgttgtttttccctgactgttaagcagtttcatctttgcttttgttaaatatttgacagcagttagtttgtgttaagctcttgaaacttgtgattgtactttctgtgtagatatacatgtaattattttttatttttcaatcatagattcaagcttccttcttttttaccacaaatcattaaagttatttgtgtttccatatacctgtgtcttgtataaaattggcttattctgtgctgttgaatgaggctcaacatgacttggtgaggaagtctattaactaacaaaagcttatcttttttaacataatgctttttaattaattttgaataaaaatatttctaaagtgtactagatactttattaccttagattattccgaatacagtataactttgatagtttggaatagtcattaagaaacaattacacactgattgctttgtgtctctaaaagtgagaggctggtagcttttccacattctcatggctattttctagttctacttgaatttataactgtttccctttttccttgacagctgccactttgtagctatttttctgtctctgctaatactttaccatatctatctcaattgttttttcttttgacttgctgaaaaatagaaaccagatgggaagtatattagcattatgattgaaataagggtaaatgagcaatgtgtgaaggttttcactgacttcacctaaaagatagtttagctacttgaattttagtaaatagaatttttcctttatttcatcggtccccccacctttttttttttttgcacctgccttgtaaatttaatagttaagtgacctctgcctagaggatgatatttggggaggtttgatgtttcctgtgggaataagacgattcacaggtgagagtggggccacattagctgttattgtttccatgggtcagtgtggaaaatgcattaatcatattctaaacgttcatgggcctcattacagtcacaattgtctattctgtttcctaccctgaacacattaaaatggtaggaactaatgcttgtcttatttaattactaaaagccaccattttctttgatagattgagctacagattgtaaacttcatgtatttctttataagtcaacccttttcaaagatacgcacatcaaactgaatgaataaataaatattgagaagttg

SEQ ID NO: 111978 - DNA, 4153 bp, Homo sapiens
  Payload ID: 1944
  Gene Symbol: BARD1
  Gene Name: BRCA1 associated RING domain 1
  ENST ID: ENST00000613706
  CDS Start-End: 143-1123
ccccgcccctctggcggcccgccgtcccagacgcgggaagagcttggccggtttcgagtcgctggcctgcagcttccctgtggtttcccgaggcttccttgcttcccgctctgcgaggagcctttcatccgaaggcgggacgatgccggataatcggcagccgaggaaccggcagccgaggatccgctccgggaacgagcctcgttccgcgcccgccatggaaccggatggtcgcggtgcctgggcccacagtcgcgccgcgctcgaccgcctggagaagctgctgcgctgctcgcgttgtactaacattctgagagagcctgtgtgtttaggaggatgtgagcacatcttctgtagtaatatatttggtctgcggcctgtcgattatacagatgatgaaagtatgaaatcgctattgctgctaccagagaagaatgaatcatcctcagctagccactgctcagtaatgaacactgggcagcgtagggatggacctcttgtacttataggcagtgggctgtcttcagaacaacagaaaatgctcagtgagcttgcagtaattcttaaggctaaaaaatatactgagtttgacagtacagtaactcatgttgttgttcctggtgatgcagttcaaagtaccttgaagtgtatgcttgggattctcaatggatgctggattctaaaatttgaatgggtaaaagcatgtctacgaagaaaagtatgtgaacaggaagaaaagtatgaaattcctgaaggtccacgcagaagcaggctcaacagagaacagctgttgccaaagctgtttgatggatgctacttctatttgtggggaaccttcaaacaccatccaaaggacaaccttattaagctcgtcactgcaggtgggggccagatcctcagtagaaagcccaagccagacagtgacgtgactcagaccatcaatacagtcgcataccatgcgagacccgattctgatcagcgcttctgcacacagtatatcatctatgaagatttgtgtaattatcacccagagagggttcggcagggcaaagtctggaaggctccttcgagctggtttatagactgtgtgatgtcctttgagttgcttcctcttgacagctgaatattataccagatgaacatttcaaattgaatttgcacggtttgtgagagcccagtcattgtactgtttttaatgttcacatttttacaaataggtagagtcattcatatttgtctttgaatcaaaaaaaaaaaaaaagtctaatgccagattaggaattcatgttatgtttaccatttagaagctgggattgcttttaaaggtttttctttttaaaattggcatgtttttgatttatcatgtctttctattcagattattgggtatcaaagattaatgaggacaccagaatcttggttaaatagacaagtggtatcattactgtttgagtcttttaatattctccatacctgccaccagtgaaaaaacttgccttttttttttttttttttttagtaaacagaatattatcaaacaatttattttggctttattgaaaaaagagtatttggtctaaatgtgccaccataggtgttaaattctcctatctgcaattgtctttatcctatattgtgttcatttcttttcttaataatttactttgttgtgtgtttctacactttcatccctgttttttatcttgtatatcatcaggaaattgtgatttaatcattaacattggtttttttgtgtgtgtggtaaaaatcaacactaggctcatggtacatatttttattctgtacatttgcttgtaactatcaatttgtaactctgtttatctactacatgtgtatatatacttagagcattttctctaacacattttaatgttagtattttttaaaaggtctgaccagtctagcaaattgtcagtccaacgtcattactttaaattaagaagcagtcttcttctggtaaaccttgttggtatttgtaaaataattttgaaggtcttaatttcttcctttgtaaaaggaaaaggttttttttaaagtttttaggttggcatggaggcagaagttggtgattacttgatttacaacagattttttccagatcatacaaaaggccatacagtaagtatagaagtaggtatggggagggcttactaatatcaaataggcaaggccttagtgagtgggcaggataccacctgagagtggccagatgtggggaggttactctgctctgggtgctctcattcatgaatcgacaaggatacattagattattttgaaacatttttttaagaagcagaattctttaataattccttcctagacattgaatatacttataaaattaaagacttggggaaggagacactgagagacttgccagtttggttcctcatgaacaaaagaggacagtttgataactaccagaatagaatatccctagttttaaaatagtgagaatctctgaagttcatcaacatcttaagatgcacttacttgaaagtttgagattctgtttatcatttgaaaacacattttgctttaattctttctttgacatgttgttttttcatatcaagaaatatatgaacaaaataataaccttttgaccctgaccttgctgggtgaattagctctgaaacactctctacaaccagtaatgcatttgtcccacatttcattctgatagaaaatgaacaccatagcaccaaacaaaaatccgaggcgttagataatgtctggattaaataatttaagactctctaggattttggttgtcattttttatttataacagactttaagtcactttctgttgcctcataggtcacattttagacaggtttgtgtctgttccttgcatctgaattcctgattgtaaagacacctatgaggtctcttagtttttgtcattcattttcttggtttatcacccctcccttctttttgttgtttttccctgactgttaagcagtttcatctttgcttttgttaaatatttgacagcagttagtttgtgttaagctcttgaaacttgtgattgtactttctgtgtagatatacatgtaattattttttatttttcaatcatagattcaagcttccttcttttttaccacaaatcattaaagttatttgtgtttccatatacctgtgtcttgtataaaattggcttattctgtgctgttgaatgaggctcaacatgacttggtgaggaagtctattaactaacaaaagcttatcttttttaacataatgctttttaattaattttgaataaaaatatttctaaagtgtactagatactttattaccttagattattccgaatacagtataactttgatagtttggaatagtcattaagaaacaattacacactgattgctttgtgtctctaaaagtgagaggctggtagcttttccacattctcatggctattttctagttctacttgaatttataactgtttccctttttccttgacagctgccactttgtagctatttttctgtctctgctaatactttaccatatctatctcaattgttttttcttttgacttgctgaaaaatagaaaccagatgggaagtatattagcattatgattgaaataagggtaaatgagcaatgtgtgaaggttttcactgacttcacctaaaagatagtttagctacttgaattttagtaaatagaatttttcctttatttcatcggtccccccacctttttttttttttgcacctgccttgtaaatttaatagttaagtgacctctgcctagaggatgatatttggggaggtttgatgtttcctgtgggaataagacgattcacaggtgagagtggggccacattagctgttattgtttccatgggtcagtgtggaaaatgcattaatcatattctaaacgttcatgggcctcattacagtcacaattgtctattctgtttcctaccctgaacacattaaaatggtaggaactaatgcttgtcttatttaattactaaaagccaccattttctttgatagattgagctacagattgtaaacttcatgtatttctttataagtcaacccttttcaaagatacgcacatcaaactgaatgaataaataaatattgagaagttg

SEQ ID NO: 111979 - DNA, 6048 bp, Homo sapiens
  Payload ID: 1945
  Gene Symbol: BRIP1
  Gene Name: BRCA1 interacting protein C-terminal helicase 1
  Uniprot ID: Q9BX63
  ENST ID: ENST00000259008
  CDS Start-End: 269-4018
aattcgtctcgggttgtgtggttgaggggtctggtgggtcgaggaaaggtaacggcggccccagtcctgcacacaaggccggggaagtagcagcacccccaggaagagggaggaggaagggctcgtgccctttcttctcttccagggctccgctttatttgctctcagaagtcggtttcctttccttttcttcagtgaatcggagctcagagcgttgcttcggtttccctccagacagttaggaatctgaaataaacaggaaagcactatgtcttcaatgtggtctgaatatacaattggtggggtgaagatttactttccttataaagcttacccgtcacagcttgctatgatgaattctattctcagaggattaaacagcaagcaacattgtttgttggagagtcccacaggaagtggaaaaagcttagccttactttgttctgctttagcatggcaacaatctcttagtgggaaaccagcagatgagggcgtaagtgaaaaagctgaagtacaattgtcatgttgttgtgcatgccattcaaaggattttacaaacaatgacatgaaccaaggaacttcacgtcatttcaactatccaagcacaccaccttctgaaagaaatggcacttcatcaacttgtcaagactcccctgaaaaaaccactctggctgcaaagttatctgctaagaaacaggcatccatatacagagatgaaaatgatgattttcaagtagagaagaaaagaattcgacccttagaaactacacagcagattagaaaacgtcattgctttggaacagaagtacacaatttggatgcaaaagttgattcaggaaagactgtaaaactcaactctccactggaaaagataaactccttttcgccacagaaaccccctggccactgttctaggtgctgttgttctactaaacaaggaaacagtcaagagtcatcgaataccattaagaaggatcatacagggaaatccaagatacccaaaatatattttgggacacgcacacacaagcagattgctcagattactagagagctccggaggacggcatattcaggggttccaatgactattctttccagcagggatcatacttgtgtccatcctgaggtagtcggtaacttcaacagaaatgagaagtgcatggaattgctagatgggaaaaacggaaaatcctgctatttttatcatggagttcataaaattagtgatcagcacacattacagactttccaagggatgtgcaaagcctgggatatagaagaacttgtcagcctggggaagaaactaaaggcctgtccatattacacagcccgagaactaatacaagatgctgacatcatattttgtccctacaactatcttctagatgcacaaataagggaaagtatggatttaaatctgaaagaacaggttgtcattttagatgaagctcataacatcgaggactgtgctcgggaatcagcaagttacagtgtaacagaagttcagcttcggtttgctcgggatgaactagatagtatggtcaacaataatataaggaagaaagatcatgaacccctacgagctgtgtgctgtagcctcattaattggttagaagcaaacgctgaatatcttgtagaaagagattatgaatcagcttgtaaaatatggagtggaaatgaaatgctcttaactttacacaaaatgggtatcaccactgctacttttcccattttgcagggacatttttctgctgttcttcaaaaagaggaaaaaatctcaccaatttatggtaaagaggaggcaagagaagtacctgttattagtgcatcaactcaaataatgcttaaaggactttttatggtacttgactatctttttaggcaaaatagcagatttgcagatgattataaaattgcgattcaacagacttactcctggacaaatcagattgatatttcagacaaaaatgggttgttggttctaccaaaaaataagaaacgttcacgacagaaaactgcagttcatgtgctaaacttttggtgcttaaatccagctgtggccttttcagatattaatggcaaagttcagaccattgttttgacatctggtacattatcaccaatgaaatccttttcgtcagaacttggtgttacatttactatccagctggaggctaatcatatcattaaaaattcacaggtttgggttggtaccattgggtcaggccccaagggtcggaatctctgtgctaccttccagaatactgaaacatttgagttccaagatgaagtgggagcacttttgttatctgtgtgccagactgtgagccaaggaattttgtgtttcttgccatcttacaagttattagaaaaattaaaagaacgttggctctctactggtttatggcataatctggagttggtgaagacagtcattgtagaaccacagggaggagaaaaaacaaattttgatgaattactgcaggtgtactatgacgcaatcaaatacaaaggagagaaagatggagctctcctggtagcagtttgtcgtggtaaagtgagtgagggtctggatttctcagatgacaatgcccgtgctgtcataacaataggaattccttttccaaatgtgaaagatctacaggttgaactaaaacgacaatacaatgaccaccattcaaaattgagaggtcttctacctggccgtcagtggtatgaaattcaagcatacagggccttaaaccaggcccttggtagatgtattagacacagaaatgattggggagctcttattctagtggatgatcgctttaggaataacccaagtcgctatatatctggactttctaaatgggtacggcagcagattcagcaccattcaacctttgaaagtgcactggaatccttggctgaattttccaaaaagcatcaaaaagttcttaatgtatccataaaggacagaaccaatatacaggacaatgagtctacacttgaagtgacctctttaaagtacagtacctcaccttatttactggaagcagcaagtcatctatcaccagaaaattttgtggaagatgaagcaaagatatgtgtccaggaactacagtgtcctaaaattattaccaaaaattcacctctaccaagtagcattatctccagaaaggagaaaaatgatccagtattcctggaagaagcagggaaagcagaaaaaattgtgatttccagatccacaagcccaactttcaacaaacaaacaaagagagttagctggtcaagctttaattctttgggacagtattttactggtaaaataccgaaggcaacacctgagctcgggtcatcagagaatagtgcctctagtcctccccgtttcaaaacagagaagatggaaagtaaaactgttttgcccttcactgataaatgtgaatcctcaaatctgacagtaaacacatcgtttggatcatgccctcaatcagaaaccattatttcatcattaaagattgatgccacccttactagaaaaaatcattctgaacatccgctctgttctgaagaagccctggatccagacattgaattgtctctagtaagtgaagaagataaacagtccacttcaaatagagattttgaaacagaagcagaagatgaatctatctattttacacctgaactttatgatcctgaagatacagatgaagaaaaaaatgacctagctgaaactgatagaggaaatagattggctaacaattcagattgcattttagctaaagacctttttgaaattagaactataaaagaagtagattcagccagagaagtgaaagctgaggattgcatagatacaaagttgaatggaattctgcatattgaagaaagtaaaattgatgacattgatggtaatgtaaaaacaacttggataaatgaactggaactgggaaaaactcatgaaatagaaataaagaactttaaaccatctccttccaaaaataaaggcatgtttcctggttttaagtaataatacttaactctcaagctaagtaaaaatatgtcatcatgcttatgttaaactctgttgtaagtaataatttgtaaattgaataagtggcatactttttaaaaaactattttatgttcagaaatgtaaatgttattattcttgagtttttgggtttttttttttgagacagagtcttggtctgttgcccaggctggaatgcagtggtgtgctctgggctcactgcaaccttcacctccaggttcaagtgattctcctgcctcagccttctgagtagctgggactacaggtgtgcaccaccatgcccagctagtttttgtatttttagtagagatggggtttcaccatgttggccaggctggtctcgaactcctggcctcgtgatctgcccttctctgcctccctaagttgctgggattacaggtgtgagccacagtgcctggcccattcttgagttttgataaagtaattcatacaaagtactgtcctcaaataagtcttccttagctaaatgcaatttaaaattattcaaagatcctagggcacttctagtttcacgtaaatattcatattaggtggttctcttcatccatttgttttcacactgatacataaaaattaacagcagtctaatctagtgacacctcagtcatatttcgctatagattttacctcaaatcagtccaagactttttcagagatcaccatttgtcttgaaaggtttatttcgttattaaactgcctacttataagtaattaagagaaattaagaaagtagtatgcatttttaattgaaattgttttacattctttgtataataaacctaaaaccaaacatgtcataaacaaattgacgtaaagatataaaatgccaaatgaagtattccaaattttctattctaattatttagcttcaccatcattgtggaaaaaaatactagatcctgcttagtattatatatttttcctagtggatcagtgagtaataagtaccaaacactagactagaaggtaatttctacattgtttagaaagggtgaaacaatttatcccctctggtattgttctagcataagctttagttatacaatgattaagatagaaaacttcatatataaatttgataagcaaacccacatttatagctgcagctaaaatatgtttccttagggcacagtaatcctttctgtgaattttgaccttgtttgtgtttttgtgaatgaagctatatgtctaatcaaaaatgattataaaagaggctcatctctgacatcattccaaaaatacattcattgatctctttttaagaaacatctgttattcactgggcattgggactttttgtgagtaatttgaattgaaattttatgagctatccaagaattctgtatggtctattattttcaagtcaaaatttccagtaaggatttactttacatttcatttggataaatgaatcattatataggtatgtctttgcttccattttgagacatttagatttttacagcctgtttctatagcatttgatgttacaactctaagcgtagttcaaagacatttaaattgacaagttaccagttaaagaatttagaatatattagatcccatctagtattatatattttttctagttgatcattgagcagtaaataccaaatactcgattagaaggtaatttttacattgttttgaaagggtgaaacaatttatctcctctggtattattcttaaaccacagatagggatagtagggtagtgaaacgaataaatacctggtagaagacaagagacttgggctctacacctggctctgccactgatttgctaagtcatattggcaatcaccacacccttcagggaattagtttcatctgtaaaatgcagcggttagtactataaaatcatacaaatttctttgtgctttgagaatctataaaggaatgtctgttgatattctgagtcgattttcatttgcttttgttccagaacggttaaaataaagcatattatttcatttaaaaagtaaa

SEQ ID NO: 111980 - DNA, 466 bp, Homo sapiens
  Payload ID: 1945
  Gene Symbol: BRIP1
  Gene Name: BRCA1 interacting protein C-terminal helicase 1
  ENST ID: ENST00000577913
  CDS Start-End: 258-466
tcctttccttttcttcagtgaatcggagctcagagcgttgcttcggtttccctccagacagcttttttcttctaactggaggactgcagaaaggggtaacacaaaggggaagaactggagaaagagtgatgctacggagttgtagagagagaggcctcaggaacttatttgtttctgtaggttgattacatctgatctaactgttacaagagctcatgtttaatctgttaggaatctgaaataaacaggaaagcactatgtcttcaatgtggtctgaatatacaattggtggggtgaagatttactttccttataaagcttacccgtcacagcttgctatgatgaattctattctcagaggattaaacagcaagcaacattgtttgttggagagtcccacaggaagtggaaaaagcttagccttactttgttctgctttagcatggcaacaatctcttagtgggaa

SEQ ID NO: 111981 - DNA, 716 bp, Homo sapiens
  Payload ID: 1945
  Gene Symbol: BRIP1
  Gene Name: BRCA1 interacting protein C-terminal helicase 1
  ENST ID: ENST00000584322
  CDS Start-End: 1-542
aagatgaagtgggagcacttttgttatctgtgtgccagactgtgagccaaggaattttgtgtttcttgccatcttacaagttattagaaaaattaaaagaacgttggctctctactggtttatggcataatctggagttggtgaagacagtcattgtagaaccacagggaggagaaaaaacaaattttgatgaattactgcaggtgtactatgacgcaatcaaatacaaaggagagaaagatggagctctcctggtagcagtttgtcgtggtaaagtgagtgagggtctggatttctcagatgacaatgcccgtgctgtcataacaataggaattccttttccaaatgtgaaagatctacagttaaccagtgctactgctgagggcactaatggctatgcccaaagctgggtctcctattctaaaatggctgatgctgccttgactacagctactgatgaaacagttgacatctacccaagaaatctactgtcaccatcaacagcattggtgctgcattccactgaagtagagtgctactgatggcactgctgttggtactggtattgtctccttttaatgtcttatcattttactctagctctacattattgcactaaggctgctttgttaaagtggaaagaatccttttcccttctttagaccacatcttcttccaatatcttaataaaatacaattttgttccctaaaactaa

SEQ ID NO: 111982 - DNA, 790 bp, Homo sapiens
  Payload ID: 1945
  Gene Symbol: BRIP1
  Gene Name: BRCA1 interacting protein C-terminal helicase 1
  ENST ID: ENST00000579028
  CDS Start-End: 1-254
aaatatggagtggaaatgaaatgctcttaactttacacaaaatgggtatcaccactgctacttttcccattttgcagggacatttttctgctgttcttcaaaaagaggaaaaaatctcaccaatttatggtaaagaggaggcaagagaagtacctgttattagtgcatcaactcaaataatgcttaaaggactttttatggtacttgactatctttttaggcaaaatagcagagatgagatctcactatgttgatcaggatggtcttgaactcctggcctcaagtgatcctcccacctcagcctcccaaagtgctaggattatttgcagatgattataaaattgcgattcaacagacttactcctggacaaatcagattgatatttcagacaaaaatgggttgttggttctaccaaaaaataagaaacgttcacgacagaaaactgcagttcatgtgctaaacttttggtgcttaaatccagctgtggccttttcagatattaatggcaaagttcagaccattgttttgacatctggtacattatcaccaatgaaatccttttcgtcagaacttggtgttacatttactatccagctggaggctaatcatatcattaaaaattcacaggtttgggttggtaccattgggtcaggccccaagggtcggaatctctgtgctaccttccagaatactgaaacatttgagttccaagatgaagtgggagcacttttgttatctgtgtgccagactgtgagccaaggaattttgtgtttcttgccatcttacaag

SEQ ID NO: 111983 - DNA, 3969 bp, Homo sapiens
  Payload ID: 1945
  Gene Symbol: BRIP1
  Gene Name: BRCA1 interacting protein C-terminal helicase 1
  ENST ID: ENST00000577598
  CDS Start-End: 1-2985
atgtcttcaatgtggtctgaatatacaattggtggggtgaagatttactttccttataaagcttacccgtcacagcttgctatgatgaattctattctcagaggattaaacagcaagcaacattgtttgttggagagtcccacaggaagtggaaaaagcttagccttactttgttctgctttagcatggcaacaatctcttagtgggaaaccagcagatgagggcgtaagtgaaaaagctgaagtacaattgtcatgttgttgtgcatgccattcaaaggattttacaaacaatgacatgaaccaaggaacttcacgtcatttcaactatccaagcacaccaccttctgaaagaaatggcacttcatcaacttgtcaagactcccctgaaaaaaccactctggctgcaaagttatctgctaagaaacaggcatccatatacagagatgaaaatgatgattttcaagtagagaagaaaagaattcgacccttagaaactacacagcagattagaaaacgtcattgctttggaacagaagtacacaatttggatgcaaaagttgattcaggaaagactgtaaaactcaactctccactggaaaagataaactccttttcgccacagaaaccccctggccactgttctaggtgctgttgttctactaaacaaggaaacagtcaagagtcatcgaataccattaagaaggatcatacagggaaatccaagatacccaaaatatattttgggacacgcacacacaagcagattgctcagattactagagagctccggaggacggcatattcaggggttccaatgactattctttccagcagggatcatacttgtgtccatcctgaggtagtcggtaacttcaacagaaatgagaagtgcatggaattgctagatgggaaaaacggaaaatcctgctatttttatcatggagttcataaaattagtgatcagcacacattacagactttccaagggatgtgcaaagcctgggatatagaagaacttgtcagcctggggaagaaactaaaggcctgtccatattacacagcccgagaactaatacaagatgctgacatcatattttgtccctacaactatcttctagatgcacaaataagggaaagtatggatttaaatctgaaagaacaggttgtcattttagatgaagctcataacatcgaggactgtgctcgggaatcagcaagttacagtgtaacagaagttcagcttcggtttgctcgggatgaactagatagtatggtcaacaataatataaggaagaaagatcatgaacccctacgagctgtgtgctgtagcctcattaattggttagaagcaaacgctgaatatcttgtagaaagagattatgaatcagcttgtaaaatatggagtggaaatgaaatgctcttaactttacacaaaatgggtatcaccactgctacttttcccattttgcagggacatttttctgctgttcttcaaaaagaggaaaaaatctcaccaatttatggtaaagaggaggcaagagaagtacctgttattagtgcatcaactcaaataatgcttaaaggactttttatggtacttgactatctttttaggcaaaatagcagatttgcagatgattataaaattgcgattcaacagacttactcctggacaaatcagattgatatttcagacaaaaatgggttgttggttctaccaaaaaataagaaacgttcacgacagaaaactgcagttcatgtgctaaacttttggtgcttaaatccagctgtggccttttcagatattaatggcaaagttcagaccattgttttgacatctggtacattatcaccaatgaaatccttttcgtcagaacttggtgttacatttactatccagctggaggctaatcatatcattaaaaattcacaggtttgggttggtaccattgggtcaggccccaagggtcggaatctctgtgctaccttccagaatactgaaacatttgagttccaagatgaagtgggagcacttttgttatctgtgtgccagactgtgagccaaggaattttgtgtttcttgccatcttacaagttattagaaaaattaaaagaacgttggctctctactggtttatggcataatctggagttggtgaagacagtcattgtagaaccacagggaggagaaaaaacaaattttgatgaattactgcaggtgtactatgacgcaatcaaatacaaaggagagaaagatggagctctcctggtagcagtttgtcgtggtaaagtgagtgagggtctggatttctcagatgacaatgcccgtgctgtcataacaataggaattccttttccaaatgtgaaagatctacaggttgaactaaaacgacaatacaatgaccaccattcaaaattgagaggtcttctacctggccgtcagtggtatgaaattcaagcatacagggccttaaaccaggcccttggtagatgtattagacacagaaatgattggggagctcttattctagtggatgatcgctttaggaataacccaagtcgctatatatctggactttctaaatgggtacggcagcagattcagcaccattcaacctttgaaagtgcactggaatccttggctgaattttccaaaaagcatcaaaaagttcttaatgtatccataaaggacagaaccaatatacaggacaatgagtctacacttgaagtgacctctttaaagtacagtacctcaccttatttactggaagcagcaagtcatctatcaccagaaaattttgtggaagatgaagcaaagatatgtgtccaggaactacagtgtcctaaaattattaccaaaaattcacctctaccaagtagcattatctccagaaaggagaaaagtatgaaaagttcttcccatttacctttgatagagaagtctttcattatatttagtgaaatgatatttatttgggtatagattaattccttaaatatggtggtttgtaatataaggtgttatcataaaatagtgaaacagtatggtgtactgtaatgggaacaaacttttgtcaggagaccagagcatattttctggttttccactaactggctttgccacttactagctttgtgatcatgagcaagtcatttgtcctttttgagtcgtaataggaaaaaaaaaatgcctgcctagctatcccttcaggttgggttgtaaaggtcaaaattataaatatcacagcattgtaaagtaccatgtaagtggtagatgttattctaaaggctatataaaaatttggcctaatttttatgtagatacttctatatgaactacttttcctatatagatagttcttatgaacttatttttaggaggtgagagacatttattttaagtgatgaaaaataatattttaaaatattttgaaataatcatctgtatcagattggcaaactgtggcccatgggccaaatttggcctgctgcctgtttttgtaaataaagtttaatgaaatgtagtcatgcccatttatttacattttagaaacaacagcagagttgagtatttgtgtgtattgcactagaacagcataattgagtagtcgcaacagatacattatgctccacaaagcctaaatattactatctggcctatgacagaaaaggtttgccaaactctggtctattccattggatataatttcagttgttttaattcatatatccaaggcgggtggatcatccgaggtcaggagtccgagaccagcctgaccagtgtggtgaaacaccgtctctactaaaaaaatacaaaaattagctgggtgtggaggcagctgtctgtaatcccagctactcaggaggctgaggcaggagaattgcttgaactgggaggtggaggttgcagtgagccaggattgcgccattgcactccagcctgggcaacaaaagcaaaactcggact

SEQ ID NO: 111984 - DNA, 2496 bp, Homo sapiens
  Payload ID: 1946
  Gene Symbol: BRCC3
  Gene Name: BRCA1/BRCA2-containing complex, subunit 3
  Uniprot ID: P46736
  ENST ID: ENST00000330045
  CDS Start-End: 98-973
gagcgcacagcgctgggcgctggggaggctgcgccgcagcacccggttggtcaggaccaagtgggcccgaggcggacgtgagaagggtcgggccaagatggcggtgcaggtggtgcaggcggtgcaggcggttcatctcgagtctgacgctttcctcgtttgtctcaaccacgctctgagcacagagaaggaggaagtaatggggctgtgcataggggagttgaacgatgatacaaggagtgactccaaatttgcatatactggaactgaaatgcgcacagttgctgaaaaggttgatgccgtcagaattgttcacattcattctgtcatcatcttacgacgttctgataagaggaaggaccgagtagaaatttctccagagcagctgtctgcagcttcaacagaggcagagaggttggctgaactgacaggccgccccatgagagttgtgggctggtatcattcccatcctcatataactgtttggccttcacatgttgatgttcgcacacaagccatgtaccagatgatggatcaaggctttgtaggacttattttttcctgtttcatagaagataagaacacaaagactggccgggtactctacacttgcttccaatccatacaggcccaaaagagttcagagtatgagagaatcgaaatcccaatccatattgtacctcatgtcactatcgggaaagtgtgccttgaatcagcagtagagctgcccaagatcctgtgccaggaggagcaggatgcgtataggaggatccacagccttacacatctggactcagtaaccaagatccataatggctcagtgtttaccaagaatctgtgcagtcagatgtcggcagtcagcgggcctctcctacagtggttggaggacagactggagcaaaaccaacagcatttgcaggaattacaacaagaaaaggaagagcttatgcaagaactttcttctctagaataaatcaggagacaaaatggggaaagatgaaaatatccagtgtaaagttacttaagctaaatcaatttcaaagaagaaaaacttggaggactcattttacctgacttcaagacttactataaagctatagtaatcaagatagatggtattggcagaggaacagacacatacgtcaatggaacagatgagagaacccagaaataaacccatataaatatgctcagctgattttgaaaaagtgaaaaagcaattcaatggaggaagaatagcctttctgacaaattatgctagagcaattagacacccatggcgaggagaaaaaagaacctctacttaaacctcacatcttatataaaatttaactcaaaatgtataacggacttaaatgtgatacataaaactagataactttgaaaaaagccacaggagaaaaatcttcaggatcttgggctaggtgacaagttcttggactttgccccgaaagcacatccataaaagacaaaatctgatatattggacttcttcaaaatttaaaaacttgtgatttaagaagaggaaaagataagctacagattgagatgaatttgcaaaccatatatctgatcaatttggaatatataaagtgtactaaaaactcaactgaagtcaggcatggtagctcatgcttgtaatctcaccactttgggaggccaagatgggaggagtgcttgaggttaggcgttccagaccagcctgggcaacatagtgagactcttgtctctacaaaaagtttttttaaaaaattaactgggcaccatgacacacaccagtagtcccagctactagggaggcaggaggatcacttgagcccaggagtttgaggctgcggtgagctgtgatcacaccaccacactccaacctgtgtaacagagtgaggcctcatctcaaaaaaaaaaaaaggccacaaaactcaacaataaaaacaaacagtccaattagaaaatgggcaaaagacatgaatagatgtttcactgaagaggatctatagatggcaagtaagcatatgaaaagctgttaaactccataagtcatcagggaatgcaaattgaaaccacagcgaggctatgacttacttatctcaatggctaaagaaaaaatagtgaaaataccaaatactgatgaggatacaaactggatattttatacattgctgacaggaatgtaaaatggtacagccactctgggaaagagtttatgaatttcttatcaagttaaacataattttttaatcaagttaaacataagacccagcagttgtgctcctggacattcattccagagaaatgaaaacctatattgtacttgtactcaaatattcataggagctttatttgtaatagccccaaactggaaacaacccagatgtcctacaacaggtacatggttaaacaaaccatccataacttggaatactgctctggaatgaaaaggaactaactgttgatacaagaacttggttgtacctcaggggtattatggtgaacaaa

SEQ ID NO: 111985 - DNA, 1101 bp, Homo sapiens
  Payload ID: 1946
  Gene Symbol: BRCC3
  Gene Name: BRCA1/BRCA2-containing complex, subunit 3
  Uniprot ID: P46736
  ENST ID: ENST00000340647
  CDS Start-End: 109-987
aggcctgggcggagcgcacagcgctgggcgctggggaggctgcgccgcagcacccggttggtcaggaccaagtgggcccgaggcggacgtgagaagggtcgggccaagatggcggtgcaggtggtgcaggcggtgcaggcggttcatctcgagtctgacgctttcctcgtttgtctcaaccacgctctgagcacagagaaggaggaagtaatggggctgtgcataggggagttgaacgatgatacaagtaggagtgactccaaatttgcatatactggaactgaaatgcgcacagttgctgaaaaggttgatgccgtcagaattgttcacattcattctgtcatcatcttacgacgttctgataagaggaaggaccgagtagaaatttctccagagcagctgtctgcagcttcaacagaggcagagaggttggctgaactgacaggccgccccatgagagttgtgggctggtatcattcccatcctcatataactgtttggccttcacatgttgatgttcgcacacaagccatgtaccagatgatggatcaaggctttgtaggacttattttttcctgtttcatagaagataagaacacaaagactggccgggtactctacacttgcttccaatccatacaggcccaaaagagttcagagtatgagagaatcgaaatcccaatccatattgtacctcatgtcactatcgggaaagtgtgccttgaatcagcagtagagctgcccaagatcctgtgccaggaggagcaggatgcgtataggaggatccacagccttacacatctggactcagtaaccaagatccataatggctcagtgtttaccaagaatctgtgcagtcagatgtcggcagtcagcgggcctctcctacagtggttggaggacagactggagcaaaaccaacagcatttgcaggaattacaacaagaaaaggaagagcttatgcaagaactttcttctctagaataaatcaggagacaaaatggggaaagatgaaaatatccagtgtaaagttacttaagctaaatcaatttcaaagaagaaaaacttggaggactcattttacctgacttcaagacttac

SEQ ID NO: 111986 - DNA, 2641 bp, Homo sapiens
  Payload ID: 1946
  Gene Symbol: BRCC3
  Gene Name: BRCA1/BRCA2-containing complex, subunit 3
  Uniprot ID: P46736
  ENST ID: ENST00000369459
  CDS Start-End: 30-773
gaggcggacgtgagaagggtcgggccaagatggcggtgcaggtggtgcaggcggtgcaggcggttcatctcgagtctgacgctttcctcgtttgtctcaaccacgctctgagcacagagaaggaggaagtaatggggctgtgcataggggagttgaacgatgatacaaggagtgactccaaatttgcatatactggaactgaaatgcgcacagttgctgaaaaggttgatgccgtcagaattgttcacattcattctgtcatcatcttacgacgttctgataagaggaaggaccgagtagaaatttctccagagcagctgtctgcagcttcaacagaggcagagaggttggctgaactgacaggccgccccatgagagttgtgggctggtatcattcccatcctcatataactgtttggccttcacatgttgatgttcgcacacaagccatgtaccagatgatggatcaaggctttgtaggacttattttttcctgtttcatagaagataagaacacaaagactggccgggtactctacacttgcttccaatccatacaggcccaaaagagttcagaccttacacatctggactcagtaaccaagatccataatggctcagtgtttaccaagaatctgtgcagtcagatgtcggcagtcagcgggcctctcctacagtggttggaggacagactggagcaaaaccaacagcatttgcaggaattacaacaagaaaaggaagagcttatgcaagaactttcttctctagaataaatcaggagacaaaatggggaaagatgaaaatatccagtgtaaagttacttaagctaaatcaatttcaaagaagaaaaacttggaggactcattttacctgacttcaagacttactataaagctatagtaatcaagatagatggtattggcagaggaacagacacatacgtcaatggaacagatgagagaacccagaaataaacccatataaatatgctcagctgattttgaaaaagtgaaaaagcaattcaatggaggaagaatagcctttctgacaaattatgctagagcaattagacacccatggcgaggagaaaaaagaacctctacttaaacctcacatcttatataaaatttaactcaaaatgtataacggacttaaatgtgatacataaaactagataactttgaaaaaagccacaggagaaaaatcttcaggatcttgggctaggtgacaagttcttggactttgccccgaaagcacatccataaaagacaaaatctgatatattggacttcttcaaaatttaaaaacttgtgatttaagaagaggaaaagataagctacagattgagatgaatttgcaaaccatatatctgatcaatttggaatatataaagtgtactaaaaactcaactgaagtcaggcatggtagctcatgcttgtaatctcaccactttgggaggccaagatgggaggagtgcttgaggttaggcgttccagaccagcctgggcaacatagtgagactcttgtctctacaaaaagtttttttaaaaaattaactgggcaccatgacacacaccagtagtcccagctactagggaggcaggaggatcacttgagcccaggagtttgaggctgcggtgagctgtgatcacaccaccacactccaacctgtgtaacagagtgaggcctcatctcaaaaaaaaaaaaaggccacaaaactcaacaataaaaacaaacagtccaattagaaaatgggcaaaagacatgaatagatgtttcactgaagaggatctatagatggcaagtaagcatatgaaaagctgttaaactccataagtcatcagggaatgcaaattgaaaccacagcgaggctatgacttacttatctcaatggctaaagaaaaaatagtgaaaataccaaatactgatgaggatacaaactggatattttatacattgctgacaggaatgtaaaatggtacagccactctgggaaagagtttatgaatttcttatcaagttaaacataattttttaatcaagttaaacataagacccagcagttgtgctcctggacattcattccagagaaatgaaaacctatattgtacttgtactcaaatattcataggagctttatttgtaatagccccaaactggaaacaacccagatgtcctacaacaggtacatggttaaacaaaccatccataacttggaatactgctctggaatgaaaaggaactaactgttgatacaagaacttggttgtacctcaggggtattatggtgaacaaaaaaaaaaccagtctcaaatggtcacatactgtatgatcgcatttatataacattcttgaggtgacaaaattattgaaatgaagaacagattaatggttgccagggatagggactggagggggtgtggggtatgtatgactataaagggatgacgcaaggagttcctttgtgctgatggaacagttctatatgattatgatgattacgatgttgattataacatttgattatgaggttaagcacatgagtctttacctgtgctgaagttgtatggacctacatacacacaaatgaatgcatgtaaaatctggtgatactgaataaagtctgtggtctagatagcag

SEQ ID NO: 111987 - DNA, 2846 bp, Homo sapiens
  Payload ID: 1946
  Gene Symbol: BRCC3
  Gene Name: BRCA1/BRCA2-containing complex, subunit 3
  Uniprot ID: P46736
  ENST ID: ENST00000369462
  CDS Start-End: 26-976
cggacgtgagaagggtcgggccaagatggcggtgcaggtggtgcaggcggtgcaggcggttcatctcgagtctgacgctttcctcgtttgtctcaaccacgctctgagcacagagaaggaggaagtaatggggctgtgcataggggagttgaacgatgatacaaggagtgactccaaatttgcatatactggaactgaaatgcgcacagttgctgaaaaggttgatgccgtcagaattgttcacattcattctgtcatcatcttacgacgttctgataagaggaaggaccgagtagaaatttctccagagcagctgtctgcagcttcaacagaggcagagaggttggctgaactgacaggccgccccatgagagttgtgggctggtatcattcccatcctcatataactgtttggccttcacatgttgatgttcgcacacaagccatgtaccagatgatggatcaaggctttgtaggacttattttttcctgtttcatagaagataagaacacaaagactggccgggtactctacacttgcttccaatccatacaggcccaaaagagttcagagtcccttcatggtccacgagacttctggagctccagccagcacatctccattgagggccagaaggaagaggaaaggtatgagagaatcgaaatcccaatccatattgtacctcatgtcactatcgggaaagtgtgccttgaatcagcagtagagctgcccaagatcctgtgccaggaggagcaggatgcgtataggaggatccacagccttacacatctggactcagtaaccaagatccataatggctcagtgtttaccaagaatctgtgcagtcagatgtcggcagtcagcgggcctctcctacagtggttggaggacagactggagcaaaaccaacagcatttgcaggaattacaacaagaaaaggaagagcttatgcaagaactttcttctctagaataaatcaggagacaaaatggggaaagatgaaaatatccagtgtaaagttacttaagctaaatcaatttcaaagaagaaaaacttggaggactcattttacctgacttcaagacttactataaagctatagtaatcaagatagatggtattggcagaggaacagacacatacgtcaatggaacagatgagagaacccagaaataaacccatataaatatgctcagctgattttgaaaaagtgaaaaagcaattcaatggaggaagaatagcctttctgacaaattatgctagagcaattagacacccatggcgaggagaaaaaagaacctctacttaaacctcacatcttatataaaatttaactcaaaatgtataacggacttaaatgtgatacataaaactagataactttgaaaaaagccacaggagaaaaatcttcaggatcttgggctaggtgacaagttcttggactttgccccgaaagcacatccataaaagacaaaatctgatatattggacttcttcaaaatttaaaaacttgtgatttaagaagaggaaaagataagctacagattgagatgaatttgcaaaccatatatctgatcaatttggaatatataaagtgtactaaaaactcaactgaagtcaggcatggtagctcatgcttgtaatctcaccactttgggaggccaagatgggaggagtgcttgaggttaggcgttccagaccagcctgggcaacatagtgagactcttgtctctacaaaaagtttttttaaaaaattaactgggcaccatgacacacaccagtagtcccagctactagggaggcaggaggatcacttgagcccaggagtttgaggctgcggtgagctgtgatcacaccaccacactccaacctgtgtaacagagtgaggcctcatctcaaaaaaaaaaaaaggccacaaaactcaacaataaaaacaaacagtccaattagaaaatgggcaaaagacatgaatagatgtttcactgaagaggatctatagatggcaagtaagcatatgaaaagctgttaaactccataagtcatcagggaatgcaaattgaaaccacagcgaggctatgacttacttatctcaatggctaaagaaaaaatagtgaaaataccaaatactgatgaggatacaaactggatattttatacattgctgacaggaatgtaaaatggtacagccactctgggaaagagtttatgaatttcttatcaagttaaacataattttttaatcaagttaaacataagacccagcagttgtgctcctggacattcattccagagaaatgaaaacctatattgtacttgtactcaaatattcataggagctttatttgtaatagccccaaactggaaacaacccagatgtcctacaacaggtacatggttaaacaaaccatccataacttggaatactgctctggaatgaaaaggaactaactgttgatacaagaacttggttgtacctcaggggtattatggtgaacaaaaaaaaaaccagtctcaaatggtcacatactgtatgatcgcatttatataacattcttgaggtgacaaaattattgaaatgaagaacagattaatggttgccagggatagggactggagggggtgtggggtatgtatgactataaagggatgacgcaaggagttcctttgtgctgatggaacagttctatatgattatgatgattacgatgttgattataacatttgattatgaggttaagcacatgagtctttacctgtgctgaagttgtatggacctacatacacacaaatgaatgcatgtaaaatctggtgatactgaataaagtctgtggtctagatagcagta

SEQ ID NO: 111988 - DNA, 456 bp, Homo sapiens
  Payload ID: 1946
  Gene Symbol: BRCC3
  Gene Name: BRCA1/BRCA2-containing complex, subunit 3
  ENST ID: ENST00000399026
  CDS Start-End: 1-273
atgcgcacagttgctgaaaaggttgatgccgtcagaattgttcacattcattctgtcatcatcttacgacgttctgataagaggaaggaccgagtagaaatttctccagagcagctgtctgcagcttcaacagaggcagagaggttggctgaactgacaggccgccccatgagagttgtgggctggtatcattcccatcctcatataactgtttggccttcacatgttggtaagtatcatggggttgcaatgtttattgttttcagaaattaatatcatgtttccttttccattacatagggtatggttattttaaaccaaaatttgactgtcctttagcagatgtcattattttgatttattttattatgtattaaaagtaatgatttatgtcatattgattgtttttaataagtctgtcagttgatataaaaaaattaaactgttaactgaaaa

SEQ ID NO: 111989 - DNA, 954 bp, Homo sapiens
  Payload ID: 1946
  Gene Symbol: BRCC3
  Gene Name: BRCA1/BRCA2-containing complex, subunit 3
  ENST ID: ENST00000399042
  CDS Start-End: 1-954
atggcggtgcaggtggtgcaggcggtgcaggcggttcatctcgagtctgacgctttcctcgtttgtctcaaccacgctctgagcacagagaaggaggaagtaatggggctgtgcataggggagttgaacgatgatacaaggagtgactccaaatttgcatatactggaactgaaatgcgcacagttgctgaaaaggttgatgccgtcagaattgttcacattcattctgtcatcatcttacgacgttctgataagaggaaggaccgagtagaaatttctccagagcagctgtctgcagcttcaacagagacacacaggttggctgaactgacaggccgccccatgagagttgtgggctggtatcattcccatcctcatataactgtttggccttcacatgttgatgttcgcacacaagccatgtaccagatgatggatcaaggctttgtaggacttattttttcctgtttcatagaagataagaacacaaagactggccgggtactctacacttgcttccaatccatacaggcccaaaagagttcagagtcccttcatggtccacgagacttctggagctccagccagcacatctccattgagggccagaaggaagaggaaaggtatgagagaatcgaaatcccaatccatattgtacctcatgtcactatcgggaaagtgtgccttgaatcagcagtagagctgcccaagatcctgtgccaggaggagcaggatgcgtataggaggatccacagccttacacatctggactcagtaaccaagatccataatggctcagaagtgtttaccaagaatctgtgcagtcagatgtcggcagtcagcgggcctctcctacagtggttggaggacagactggagcaaaaccaacagcatttgcaggaattacaacaagaaaaggaagagcttatgcaagaactttcttctctagaataa

SEQ ID NO: 111990 - DNA, 688 bp, Homo sapiens
  Payload ID: 1946
  Gene Symbol: BRCC3
  Gene Name: BRCA1/BRCA2-containing complex, subunit 3
  ENST ID: ENST00000411985
  CDS Start-End: 11-688
tcgggccaagatggcggtgcaggtggtgcaggcggtgcaggcggttcatctcgagtctgacgctttcctcgtttgtctcaaccacgctctgagcacagagaaggaggaagtaatggggctgtgcataggggaggttgatgccgtcagaattgttcacattcattctgtcatcatcttacgacgttctgataagaggaaggaccgagtagaaatttctccagagcagctgtctgcagcttcaacagaggcagagaggttggctgaactgacaggccgccccatgagagttgtgggctggtatcattcccatcctcatataactgtttggccttcacatgttgatgttcgcacacaagccatgtaccagatgatggatcaaggctttgtaggacttattttttcctgtttcatagaagataagaacacaaagactggccgggtactctacacttgcttccaatccatacaggcccaaaagagttcagagtcccttcatggtccacgagacttctggagctccagccagcacatctccattgagggccagaaggaagaggaaaggtatgagagaatcgaaatcccaatccatattgtacctcatgtcactatcgggaaagtgtgccttgaatcagcagtagagctgcccaagatcctgtgccaggaggagcaggatgcgtataggaggatc

SEQ ID NO: 111991 - DNA, 2694 bp, Homo sapiens
  Payload ID: 1946
  Gene Symbol: BRCC3
  Gene Name: BRCA1/BRCA2-containing complex, subunit 3
  ENST ID: ENST00000453705
  CDS Start-End: 1-257
cggtgcaggtggtgcaggcggtgcaggcggttcatctcgagtctgacgctttcctcgtttgtctcaaccacgctctgagcacagagaaggaggaagtaatggggctgtgcataggggaggtgataggagtgactccaaatttgcatatactggaactgaaatgcgcacagttgctgaaaaggttgatgccgtcagaattgttcacattcattctgtcatcatcttacgacgttctgataagaggaaggaccgagtagaaatttctccagagcagctgtctgcagcttcaacagaggcagagaggttggctgaactgacaggccgccccatgagagttgtgggctggtatcattcccatcctcatataactgtttggccttcacatgttgatgttcgcacacaagccatgtaccagatgatggatcaaggctttgtaggacttattttttcctgtttcatagaagataagaacacaaagactggccgggtactctacacttgcttccaatccatacaggcccaaaagagttcagagtatgagagaatcgaaatcccaatccatattgtacctcatgtcactatcgggaaagtgtgccttgaatcagcagtagagctgcccaagatcctgtgccaggaggagcaggatgcgtataggaggatccacagccttacacatctggactcagtaaccaagatccataatggctcagtgtttaccaagaatctgtgcagtcagatgtcggcagtcagcgggcctctcctacagtggttggaggacagactggagcaaaaccaacagcatttgcaggaattacaacaagaaaaggaagagcttatgcaagaactttcttctctagaataaatcaggagacaaaatggggaaagatgaaaatatccagtgtaaagttacttaagctaaatcaatttcaaagaagaaaaacttggaggactcattttacctgacttcaagacttactataaagctatagtaatcaagatagatggtattggcagaggaacagacacatacgtcaatggaacagatgagagaacccagaaataaacccatataaatatgctcagctgattttgaaaaagtgaaaaagcaattcaatggaggaagaatagcctttctgacaaattatgctagagcaattagacacccatggcgaggagaaaaaagaacctctacttaaacctcacatcttatataaaatttaactcaaaatgtataacggacttaaatgtgatacataaaactagataactttgaaaaaagccacaggagaaaaatcttcaggatcttgggctaggtgacaagttcttggactttgccccgaaagcacatccataaaagacaaaatctgatatattggacttcttcaaaatttaaaaacttgtgatttaagaagaggaaaagataagctacagattgagatgaatttgcaaaccatatatctgatcaatttggaatatataaagtgtactaaaaactcaactgaagtcaggcatggtagctcatgcttgtaatctcaccactttgggaggccaagatgggaggagtgcttgaggttaggcgttccagaccagcctgggcaacatagtgagactcttgtctctacaaaaagtttttttaaaaaattaactgggcaccatgacacacaccagtagtcccagctactagggaggcaggaggatcacttgagcccaggagtttgaggctgcggtgagctgtgatcacaccaccacactccaacctgtgtaacagagtgaggcctcatctcaaaaaaaaaaaaaggccacaaaactcaacaataaaaacaaacagtccaattagaaaatgggcaaaagacatgaatagatgtttcactgaagaggatctatagatggcaagtaagcatatgaaaagctgttaaactccataagtcatcagggaatgcaaattgaaaccacagcgaggctatgacttacttatctcaatggctaaagaaaaaatagtgaaaataccaaatactgatgaggatacaaactggatattttatacattgctgacaggaatgtaaaatggtacagccactctgggaaagagtttatgaatttcttatcaagttaaacataattttttaatcaagttaaacataagacccagcagttgtgctcctggacattcattccagagaaatgaaaacctatattgtacttgtactcaaatattcataggagctttatttgtaatagccccaaactggaaacaacccagatgtcctacaacaggtacatggttaaacaaaccatccataacttggaatactgctctggaatgaaaaggaactaactgttgatacaagaacttggttgtacctcaggggtattatggtgaacaaaaaaaaaaccagtctcaaatggtcacatactgtatgatcgcatttatataacattcttgaggtgacaaaattattgaaatgaagaacagattaatggttgccagggatagggactggagggggtgtggggtatgtatgactataaagggatgacgcaaggagttcctttgtgctgatggaacagttctatatgattatgatgattacgatgttgattataacatttgattatgaggttaagcacatgagtctttacctgtgctgaagttgtatggacctacatacacacaaatgaatgcatgtaaaatct

SEQ ID NO: 111992 - DNA, 882 bp, Homo sapiens
  Payload ID: 1946
  Gene Symbol: BRCC3
  Gene Name: BRCA1/BRCA2-containing complex, subunit 3
  ENST ID: ENST00000620502
  CDS Start-End: 1-882
atggcggtgcaggtggtgcaggcggtgcaggcggttcatctcgagtctgacgctttcctcgtttgtctcaaccacgctctgagcacagagaaggaggaagtaatggggctgtgcataggggagttgaacgatgatacaagtaggagtgactccaaatttgcatatactggaactgaaatgcgcacagttgctgaaaaggttgatgccgtcagaattgttcacattcattctgtcatcatcttacgacgttctgataagaggaaggaccgagtagaaatttctccagagcagctgtctgcagcttcaacagagacacacaggttggctgaactgacaggccgccccatgagagttgtgggctggtatcattcccatcctcatataactgtttggccttcacatgttgatgttcgcacacaagccatgtaccagatgatggatcaaggctttgtaggacttattttttcctgtttcatagaagataagaacacaaagactggccgggtactctacacttgcttccaatccatacaggcccaaaagagttcagagtatgagagaatcgaaatcccaatccatattgtacctcatgtcactatcgggaaagtgtgccttgaatcagcagtagagctgcccaagatcctgtgccaggaggagcaggatgcgtataggaggatccacagccttacacatctggactcagtaaccaagatccataatggctcagaagtgtttaccaagaatctgtgcagtcagatgtcggcagtcagcgggcctctcctacagtggttggaggacagactggagcaaaaccaacagcatttgcaggaattacaacaagaaaaggaagagcttatgcaagaactttcttctctagaataa

SEQ ID NO: 111993 - DNA, 954 bp, Homo sapiens
  Payload ID: 1946
  Gene Symbol: BRCC3
  Gene Name: BRCA1/BRCA2-containing complex, subunit 3
  ENST ID: ENST00000630295
  CDS Start-End: 1-954
atggcggtgcaggtggtgcaggcggtgcaggcggttcatctcgagtctgacgctttcctcgtttgtctcaaccacgctctgagcacagagaaggaggaagtaatggggctgtgcataggggaggtgagtagtcccagtaggagtgactccaaatttgcatatactggaactgaaatgcgcacagttgctgaaaaggttgatgccgtcagaattgttcacattcattctgtcatcatcttacgacgttctgataagaggaaggaccgagtagaaatttctccagagcagctgtctgcagcttcaacagagacacacaggttggctgaactgacaggccgccccatgagagttgtgggctggtatcattcccatcctcatataactgtttggccttcacatgttgatgttcgcacacaagccatgtaccagatgatggatcaaggctttgtaggacttattttttcctgtttcatagaagataagaacacaaagactggccgggtactctacacttgcttccaatccatacaggcccaaaagagttcagagtcccttcatggtccacgagacttctggagctccagccagcacatctccattgagggccagaaggaagaggaaaggtatgagagaatcgaaatcccaatccatattgtacctcatgtcactatcgggaaagtgtgccttgaatcagcagtagagctgcccaagatcctgtgccaggaggagcaggatgcgtataggaggatccacagccttacacatctggactcagtaaccaagatccataatggctcagaagtgtttaccaagaatctgtgcagtcagatgtcggcagtcagcgggcctctcctacagtggttggaggacagactggagcaaaaccaacagcatttgcaggaattacaacaagaaaaggaagagcttatgcaagaactttcttctctagaataa

SEQ ID NO: 111994 - DNA, 2915 bp, Homo sapiens
  Payload ID: 1947
  Gene Symbol: BRAT1
  Gene Name: BRCA1-associated ATM activator 1
  Uniprot ID: Q6PJG6
  ENST ID: ENST00000340611
  CDS Start-End: 258-2723
tggcgggggtgatctgtcggagcgaccggcttggcgcctgcctgtccccagcccctctcagcttgaactccttccttcaagtctgggccctcgaggcttccagagcggcctccaggggtgcagtctcagttccccacgccagccgtctccgtcctccgcctcctccgggcctggcaggtggcactgtccggaggcggagccttgggcgaggggtggttgcggcggaggacgcaaccgagcgggcctgcggcctcaccatggacccagaatgcgcccagctgctcccggctctctgtgctgttctggtagatcccaggcagccggtggcagatgacacctgtttggagaagctcctggactggtttaaaacggtcactgaaggagagtccagtgtcgtgctgctgcaggagcacccctgcctggtggagctgctgtcccatgtgctgaaagtccaggacctgagttctggggtcctctccttctcactgcgcctggcaggaaccttcgcagcccaggaaaactgcttccagtatcttcagcagggggagttactaccagggctctttggggagccaggacccctcggccgagcaacctgggccgtccccaccgtgcgcagcggctggatccagggcctgcgctccctggcacagcaccccagcgccctgcgcttcctggccgaccatggtgcggtcgacaccatcttctccctgcagggagactccagcctgtttgtggcctcggcggccagtcagctcctggtgcacgtcctggctttgtccatgcgaggtggagccgaggggcagccctgcctgccggggggtgactggcccgcgtgtgcccagaagatcatggatcacgttgaagagtccttgtgctccgcggccacccccaaggtcactcaggccctgaacgtcctgaccacgaccttcgggcgctgccagagcccctggacggaagccctgtgggtgcggctgagtccccgcgtggcctgtctgctggagagagaccccatccccgccgcacactcgttcgtggacctgcttctctgtgtggctcgttctcccgtgttcagttcttccgacggcagcctgtgggagacagtggcgcgggctctgagctgcctgggtcccacccacatgggacccctggctttggggatcctgaagctcgagcactgtccacaggcactgaggacccaggccttccaggtccttctccagcccctggcctgtgtcctgaaggccacggttcaggcccccggacccccaggcttgctggacgggacggcagacgatgccacgacggtggacacactcctggcctccaagtcgtcctgcgccggcctcctgtgccgcaccctggctcacctggaggagctgcagccgctgccccagcgcccttcaccgtggccccaggcgtctctactgggggctacagtgactgtcctgcggctctgtgacggctcggctgcccctgcctccagtgtggggggccacctctgtgggaccctggcgggctgcgtccgggtccagcgagcagccctcgacttcctggggacgctgtcacaggggacaggcccccaggagctggtgacgcaggcgcttgctgtcctcctggagtgcctcgagagccccggctccagccccacggttctgaagaaggccttccaggccacgctcaggtggctcctgagctcacccaagacccccggctgctctgatctcggccccctcatcccgcagttcctcagagagctgttccctgtgctgcagaaacgcctgtgccacccctgctgggaggtgagggactccgccctcgagttcctgacccagctgagcaggcactggggaggacaggctgacttcagatgcgcactcttggcttcagaggtgcctcagctggccctgcagctcctccaggaccctgagagttatgtccgagcgagtgcagtgaccgccatggggcagctgtccagccagggcctgcacgcccccaccagccctgagcatgcagaggcccggcagagcctgttcctggagctcctgcacatcctctccgtagactcggagggcttcccacggcgggcggtcatgcaagtcttcactgagtggctgcgggacggccacgccgacgcggcccaggacacggagcagttcgtggccactgtgctgcaggcggcgagccgagacctggactgggaggtccgcgcccagggcctggagctggccctcgtgttcctgggccagactttggggccgccgcgtacccactgcccctatgccgtggccctacccgaggtggccccagcccagccactcaccgaggcactgagggctctctgccacgtggggctctttgacttcgccttttgtgccttgtttgactgcgaccgccctgtggcgcagaagtcttgtgacctccttctcttcctgagggacaagattgcttcctacagcagcctgcgggaggccaggggcagccccaacactgcctccgcagaggccaccctgccgaggtggcgggcgggtgagcaggcccagcccccaggggaccaggagcctgaggctgtgctggccatgctcaggtccctagacctggagggcctgcggagcacgctggccgagagcagcgaccacgtggaaaagagtccccagtccctcctgcaggacatgctggccacgggaggcttcctgcagggggacgaggccgactgctactgagcagaaccagagtctgccactggggctcaggaccaagggaggcagcaccatgtccttctgtgggacactgccagccccagggctccagcccagcccggtggatcctctggggaagccaggaccaggagagaagcaaggtcaagaaatcccacagtttgatgtattaaagaaatgacttatttctactcaaaa

SEQ ID NO: 111995 - DNA, 823 bp, Homo sapiens
  Payload ID: 1947
  Gene Symbol: BRAT1
  Gene Name: BRCA1-associated ATM activator 1
  ENST ID: ENST00000421712
  CDS Start-End: 18-524
gggcctgcggcctcaccatggacccagaatgcgcccagctgctcccggctctctgtgctgttctggtagatcccaggcagccggtggcagatgacacctgtttggagaagctcctggactggtttaaaacggtcactgaaggagagtccagtgtcgtgctgctgcaggagcacccctgcctggtggagctgctgtcccatgtgctgaaagtccaggacctgagttctggggtcctctccttctcactgcgcctggcaggaaccttcgcagcccaggaaaactgcttccagtatcttcaggtgcggtcgacaccatcttctccctgcagggagactccagcctgtttgtggcctcggcggccagtcagctcctggtgcacgtcctggctttgtccatgcgaggtggagccgaggggcagccctgcctgccggggggtgactggcccgcgtgtgcccagaagatcatggatcacgttgaagagtccttgtgctccgcggccacccccaaggtcactcaggccctgaacgtcctgaccacgaccttcgggcgctgccagagcccctggacggaagccctgtgggtgcggctgagtccccgcgtggcctgtctgctggagagagaccccatccccgccgcacactcgttcgtggacctgcttctctgtgtggctcgttctcccgtgttcagttcttccgacggcagcctgtgggagacagtggcgcgggctctgagctgcctgggtcccacccacatgggacccctggctttggggatcctgaagctcgagcactgtccacaggcactgaggacccaggccttccag

SEQ ID NO: 111996 - DNA, 1236 bp, Homo sapiens
  Payload ID: 1948
  Gene Symbol: BCCIP
  Gene Name: BRCA2 and CDKN1A interacting protein
  Uniprot ID: Q9P287
  ENST ID: ENST00000278100
  CDS Start-End: 13-957
gtgagcggcaacatggcgtccaggtctaagcggcgtgccgtggaaagtggggttccgcagccgccggatcccccagtccagcgcgacgaggaagaggaaaaagaagtcgaaaatgaggatgaagacgatgatgacagtgacaaggaaaaggatgaagaggacgaggtcattgacgaggaagtgaatattgaatttgaagcttattccctatcagataatgattatgacggaattaagaaattactgcagcagctttttctaaaggctcctgtgaacactgcagaactaacagatctcttaattcaacagaaccatattgggagtgtgattaagcaaacggatgtttcagaagacagcaatgatgatatggatgaagatgaggtttttggtttcataagccttttaaatttaactgaaagaaagggtacccagtgtgttgaacaaattcaagagttggttctacgcttctgtgagaagaactgtgaaaagagcatggttgaacagctggacaagtttttaaatgacaccaccaagcctgtgggccttctcctaagtgaaagattcattaatgtccctccacagatcgctctgcccatgtaccagcagcttcagaaagaactggcgggggcacacagaaccaataagccatgtgggaagtgctacttttaccttctgattagtaagacatttgtggaagcaggaaaaaacaattccaaaaagaaacctagcaacaaaaagaaagctgcgttaatgtttgcaaatgcagaggaagaatttttctatgagaaggcaattctcaagttcaactactcagtgcaggaggagagcgacacttgtctgggaggcaaatggtcttttgatgacgtaccaatgacgcccttgcgaactgtgatgttaattccaggcgacaagatgaacgaaatcatggataaactgaaagaatatctatctgtctaacccatttccaatggacagtgatgggcttgtttttgtaaaattaccagaaaactcagtggagatttactgaaaaactcagactttattcagattaagttcctctacaaaaagtagggttctgtcccatgtgtctctgacacatttacaaaataccagttttttaaaattttggtcaaattatgagtggttgatttaaaaacttttccaagaagaagaaaagcatggagtagtaatttaaagaactcaataaaaacttctattttttattttaaaataata

SEQ ID NO: 111997 - DNA, 2337 bp, Homo sapiens
  Payload ID: 1948
  Gene Symbol: BCCIP
  Gene Name: BRCA2 and CDKN1A interacting protein
  Uniprot ID: Q9P287
  ENST ID: ENST00000299130
  CDS Start-End: 13-891
gtgagcggcaacatggcgtccaggtctaagcggcgtgccgtggaaagtggggttccgcagccgccggatcccccagtccagcgcgacgaggaagaggaaaaagaagtcgaaaatgaggatgaagacgatgatgacagtgacaaggaaaaggatgaagaggacgaggtcattgacgaggaagtgaatattgaatttgaagcttattccctatcagataatgattatgacggaattaagaaattactgcagcagctttttctaaaggctcctgtgaacactgcagaactaacagatctcttaattcaacagaaccatattgggagtgtgattaagcaaacggatgtttcagaagacagcaatgatgatatggatgaagatgaggtttttggtttcataagccttttaaatttaactgaaagaaagggtacccagtgtgttgaacaaattcaagagttggttctacgcttctgtgagaagaactgtgaaaagagcatggttgaacagctggacaagtttttaaatgacaccaccaagcctgtgggccttctcctaagtgaaagattcattaatgtccctccacagatcgctctgcccatgtaccagcagcttcagaaagaactggcgggggcacacagaaccaataagccatgtgggaagtgctacttttaccttctgattagtaagacatttgtggaagcaggaaaaaacaattccaaaaagaaacctagcaacaaaaagaaagctgcgttaatgtttgcaaatgcagaggaagaatttttctatgaggagcagggaaaacctgaggtgcttggaggtccagacacaagaagaggattggaaccagttccgatacagcacaatggttggtctgttcccccagtattagaataaattaaaacatacaagccaggatgaatgaagccaataggaaataaaaaacaggcacacaacattatttggggaaaaacacctctagtgacacattttcttcatctgcactgattatttcagcaaaagaaatctagtatgttttcatacatctgatgtataaatttgctgaactttgagttagttttcttaagataatttttcatattaagaaaattttccttttctaacctattaaaatacctcactatcatttcaaaaggttaaatgagttgatcactatctctgctctgtgctcctcaaaatataatttcaaatggatccgatctaaatctatacctagtgcagatttgcaaaaaaagaaaaggaatagtcattaaggatacctgttaccatggctgcgattgttagcacttcatctacacagtcaaattcacaggacgctaagatagacttcgagagttgtggatcaagaggaaactctgacatgatgattccaaattcagaaagatttccatcattatccagtgctgccagataatctaagtcttccaatgcctgcatcaaactttctggtgctaggaaaggaaaaaaataataatttaagagtctcatatggctaagatggagaaacaggtactggacttttccctcctgcatgaaacaagcaaacaatggacaaaatatgtgaaacaacggtttgcaagccaccaaataccagggagtgaaggatagtgattcttgagagggcaaactcaggaggggagccctgtgattgtccagctcatgctccgaggagggtcccagctgcagtgtgcatgcggggggaacccaggtggagcctgccagcctccctgcagtaggaaaacaatgccagggatccagggagactaaggtggccggaactcgcggtcacagtactggagagagacacacagatctaagtcgggggccagagggagctccctcaactaggcagcacagccctactgatcagcgcatgtgtgtaaggaaccacctcaggccagagaaagagccatgtgagaagattagaaggaacagtggtgctgacacaggacctagggtagggcctgttcccaccaccctagctggaaaacctcatgatttatggggcactgggtagaaaacacaagtgagaaaccctagatgggcactgccacctgacacagctatacagcaggacctgaaaggatcacactgcatcctaggacaaagctcaaaagtacctctgggactacaaaaatattcagtgcccaagaaggtaaaatgtacaatgtctagcatccagtagagaggcatgaaaagcaggaaaatacattgcataatacagagaaaaattaatcacaactgacctggatctcagatgctagaaatagtagacaaagatgttatttcccagtgcaaataaagaaataaagatagcaagct

SEQ ID NO: 111998 - DNA, 1433 bp, Homo sapiens
  Payload ID: 1948
  Gene Symbol: BCCIP
  Gene Name: BRCA2 and CDKN1A interacting protein
  Uniprot ID: Q9P287
  ENST ID: ENST00000368759
  CDS Start-End: 13-981
gtgagcggcaacatggcgtccaggtctaagcggcgtgccgtggaaagtggggttccgcagccgccggatcccccagtccagcgcgacgaggaagaggaaaaagaagtcgaaaatgaggatgaagacgatgatgacagtgacaaggaaaaggatgaagaggacgaggtcattgacgaggaagtgaatattgaatttgaagcttattccctatcagataatgattatgacggaattaagaaattactgcagcagctttttctaaaggctcctgtgaacactgcagaactaacagatctcttaattcaacagaaccatattgggagtgtgattaagcaaacggatgtttcagaagacagcaatgatgatatggatgaagatgaggtttttggtttcataagccttttaaatttaactgaaagaaagggtacccagtgtgttgaacaaattcaagagttggttctacgcttctgtgagaagaactgtgaaaagagcatggttgaacagctggacaagtttttaaatgacaccaccaagcctgtgggccttctcctaagtgaaagattcattaatgtccctccacagatcgctctgcccatgtaccagcagcttcagaaagaactggcgggggcacacagaaccaataagccatgtgggaagtgctacttttaccttctgattagtaagacatttgtggaagcaggaaaaaacaattccaaaaagaaacctagcaacaaaaagaaagctgcgttaatgtttgcaaatgcagaggaagaatttttctatgaggagcagggaaaacctgaggtgcttggaggtccagacacaagaagaggattggaaccagttccgatacagcacaatggtggttcacgggggcaagtgacagccctggtttctctgaaggctggactaattcaatcaagatcaactctaagtgatttccagggaaccttcatgactgttggaattgctctgtcataataagtcagggatatttaggaggctcatagtctcctggagggataaaacatctcggcacctagtaatggtaaattagtcaatatttgttagtttcgtttgagatctcaaatgttaggattttctgaagtctcagtgtctttcagagtttgagataccttgttttcattttttctaatttttaatttaaaagtaataaagaatattttgtaatgattaggatgaaaattttatcgtcaattataagccaaaatttgctaaaattaaagtcagtatacttgaaacaagtttctagtaagttctctggggtaagatactaattactctgataaaggggctatcaaaaaaatccagtaaattgttcataagaagagatcagtttaagagtcaaacaatttgctttgctagtaccttagctaaagaaaaaatactattaaagatgactatcaccttta

SEQ ID NO: 111999 - DNA, 7082 bp, Homo sapiens
  Payload ID: 1949
  Gene Symbol: BCR
  Gene Name: breakpoint cluster region
  Uniprot ID: P11274
  ENST ID: ENST00000305877
  CDS Start-End: 752-4567
ttccaggactgcagaactggcccagacctctgtattggaaaggtctttatggaccagggagtccggtgtcttttttacgggggacccctgggctgcgagttgcacagtccaattcgctgttgttagggcctcagtttcccaaaaggcacagggacggggggagggtggcggctcgatgggggagccgcctccagggggcccccccgccctgtgcccacggcgcggcccctttaagaggcccgcctggctccgtcatccgcgccgcggccacctccccccggccctccccttcctgcggcgcagagtgcgggccgggcgggagtgcggcgagagccggctggctgagcttagcgtccgaggaggcggcggcggcggcggcggcacggcggcggcggggctgtggggcggtgcggaagcgagaggcgaggagcgcgcgggccgtggccagagtctggcggcggcctggcggagcggagagcagcgcccgcgcctcgccgtgcggaggagccccgcacacaatagcggcgcgcgcagcccgcgcccttccccccggcgcgccccgccccgcgcgccgagcgccccgctccgcctcacctgccaccagggagtgggcgggcattgttcgccgccgccgccgccgcgcgggccatgggggccgcccggcgcccggggccgggctggcgaggcgccgcgccgccgctgagacgggccccgcgcgcagcccggcggcgcaggtaaggccggccgcgccatggtggacccggtgggcttcgcggaggcgtggaaggcgcagttcccggactcagagcccccgcgcatggagctgcgctcagtgggcgacatcgagcaggagctggagcgctgcaaggcctccattcggcgcctggagcaggaggtgaaccaggagcgcttccgcatgatctacctgcagacgttgctggccaaggaaaagaagagctatgaccggcagcgatggggcttccggcgcgcggcgcaggcccccgacggcgcctccgagccccgagcgtccgcgtcgcgcccgcagccagcgcccgccgacggagccgacccgccgcccgccgaggagcccgaggcccggcccgacggcgagggttctccgggtaaggccaggcccgggaccgcccgcaggcccggggcagccgcgtcgggggaacgggacgaccggggaccccccgccagcgtggcggcgctcaggtccaacttcgagcggatccgcaagggccatggccagcccggggcggacgccgagaagcccttctacgtgaacgtcgagtttcaccacgagcgcggcctggtgaaggtcaacgacaaagaggtgtcggaccgcatcagctccctgggcagccaggccatgcagatggagcgcaaaaagtcccagcacggcgcgggctcgagcgtgggggatgcatccaggcccccttaccggggacgctcctcggagagcagctgcggcgtcgacggcgactacgaggacgccgagttgaacccccgcttcctgaaggacaacctgatcgacgccaatggcggtagcaggcccccttggccgcccctggagtaccagccctaccagagcatctacgtcgggggcatgatggaaggggagggcaagggcccgctcctgcgcagccagagcacctctgagcaggagaagcgccttacctggccccgcaggtcctactccccccggagttttgaggattgcggaggcggctataccccggactgcagctccaatgagaacctcacctccagcgaggaggacttctcctctggccagtccagccgcgtgtccccaagccccaccacctaccgcatgttccgggacaaaagccgctctccctcgcagaactcgcaacagtccttcgacagcagcagtccccccacgccgcagtgccataagcggcaccggcactgcccggttgtcgtgtccgaggccaccatcgtgggcgtccgcaagaccgggcagatctggcccaacgatggcgagggcgccttccatggagacgcagatggctcgttcggaacaccacctggatacggctgcgctgcagaccgggcagaggagcagcgccggcaccaagatgggctgccctacattgatgactcgccctcctcatcgccccacctcagcagcaagggcaggggcagccgggatgcgctggtctcgggagccctggagtccactaaagcgagtgagctggacttggaaaagggcttggagatgagaaaatgggtcctgtcgggaatcctggctagcgaggagacttacctgagccacctggaggcactgctgctgcccatgaagcctttgaaagccgctgccaccacctctcagccggtgctgacgagtcagcagatcgagaccatcttcttcaaagtgcctgagctctacgagatccacaaggagttctatgatgggctcttcccccgcgtgcagcagtggagccaccagcagcgggtgggcgacctcttccagaagctggccagccagctgggtgtgtaccgggccttcgtggacaactacggagttgccatggaaatggctgagaagtgctgtcaggccaatgctcagtttgcagaaatctccgagaacctgagagccagaagcaacaaagatgccaaggatccaacgaccaagaactctctggaaactctgctctacaagcctgtggaccgtgtgacgaggagcacgctggtcctccatgacttgctgaagcacactcctgccagccaccctgaccaccccttgctgcaggacgccctccgcatctcacagaacttcctgtccagcatcaatgaggagatcacaccccgacggcagtccatgacggtgaagaagggagagcaccggcagctgctgaaggacagcttcatggtggagctggtggagggggcccgcaagctgcgccacgtcttcctgttcaccgacctgcttctctgcaccaagctcaagaagcagagcggaggcaaaacgcagcagtatgactgcaaatggtacattccgctcacggatctcagcttccagatggtggatgaactggaggcagtgcccaacatccccctggtgcccgatgaggagctggacgctttgaagatcaagatctcccagatcaagaatgacatccagagagagaagagggcgaacaagggcagcaaggctacggagaggctgaagaagaagctgtcggagcaggagtcactgctgctgcttatgtctcccagcatggccttcagggtgcacagccgcaacggcaagagttacacgttcctgatctcctctgactatgagcgtgcagagtggagggagaacatccgggagcagcagaagaagtgtttcagaagcttctccctgacatccgtggagctgcagatgctgaccaactcgtgtgtgaaactccagactgtccacagcattccgctgaccatcaataaggaagatgatgagtctccggggctctatgggtttctgaatgtcatcgtccactcagccactggatttaagcagagttcaaatctgtactgcaccctggaggtggattcctttgggtattttgtgaataaagcaaagacgcgcgtctacagggacacagctgagccaaactggaacgaggaatttgagatagagctggagggctcccagaccctgaggatactgtgctatgaaaagtgttacaacaagacgaagatccccaaggaggacggcgagagcacggacagactcatggggaagggccaggtccagctggacccgcaggccctgcaggacagagactggcagcgcaccgtcatcgccatgaatgggatcgaagtaaagctctcggtcaagttcaacagcagggagttcagcttgaagaggatgccgtcccgaaaacagacaggggtcttcggagtcaagattgctgtggtcaccaagagagagaggtccaaggtgccctacatcgtgcgccagtgcgtggaggagatcgagcgccgaggcatggaggaggtgggcatctaccgcgtgtccggtgtggccacggacatccaggcactgaaggcagccttcgacgtcaataacaaggacgtgtcggtgatgatgagcgagatggacgtgaacgccatcgcaggcacgctgaagctgtacttccgtgagctgcccgagcccctcttcactgacgagttctaccccaacttcgcagagggcatcgctctttcagacccggttgcaaaggagagctgcatgctcaacctgctgctgtccctgccggaggccaacctgctcaccttccttttccttctggaccacctgaaaagggtggcagagaaggaggcagtcaataagatgtccctgcacaacctcgccacggtctttggccccacgctgctccggccctccgagaaggagagcaagctccctgccaaccccagccagcctatcaccatgactgacagctggtccttggaggtcatgtcccaggtccaggtgctgctgtacttcctgcagctggaggccatccctgccccggacagcaagagacagagcatcctgttctccaccgaagtctaaaggtcccagtccatctcctggaggcggacagatggcctggaaacctctggctaatcgggccatccgtagagcgggaaccttcctgaggtgtccttgggccacccccaagtgttgggccatctgccaagagacagcgacccaaagccgaaggacaggtggcctggaaagatcccgcccaggtctgggagccccaggctggcctcagactgtggttttttatgtggccacctgagggcgccccaagccagttcatctcggagtccaggcctggccctgggagacagggtgaagggagtggtttttatgaacttaacttagagtctaaaagatttctactggatcacttgtcaagatgcgccctctctggggagaagggaacgtgactggattccctcactgttgtatcttgaataaacgctgctgcttcatcctgtgggggccgtggccctgtccctgtgtgggtggggcctcttccatttccctgacttagaaaccacactccacttctaacagggtttgagaggcttagtcagcactgggtagcgttttgactccattcttggctttctttttctttccagaaggatttttgtgcagaaatgggtcttttgttgccatgttagtcctccttggaaggcagctcagaaggcctgtgaaatgtcaggggacaggacccccagggagggaaccccaggctacgcactttagggttcgttctccagggagagcgacctcgtcccccgatcctgaccgcccttccggcccacgctctcctgtttggcttccacaggcctggacttctctggcttctctgcccacacactccctgcccccagtgtccctgcccctgccccagcacaggtgacttcatttctgtcctctcagctcagtggactcgctcaacttttgtataagtctccacttggtggcagcagcttgctgatgacttgttttaaaactttcatcctaaataaccttttgatacttgaatatttgtaagttttatacatagtttctaatttttttccgaacagatccagatacctaataagatgctggaatgtaatccctggacaatccgtgtcctggcagcatttggtcttcctctaagcgcctggctccgctgttctcaggagtgggttctgaagtctctggagaacaggatacgtggagggttaggaaggggccaggcctagagacgggagactccctcccggagcaggtggaggcacaggaccattcgctaccccatctgccgacacctgcgggggagcccaggcattctttgtaaaccctcctgaccacctggctcaaagaaaacagaagcatggagaccgccaagtattttcaagaaataaccccatgaatattccatcacttttttagaaagaggggcttggggcaggcagaggagagaagggagagcaaactgagagccaagtttccacacggtcctgcaggaggagaggatgcagctgcccagagggaagcaggatcacatttaaggaagtgtgtggggtccctggatgacaccagcacccagtgcggctctgtctggcacccgctcccaaggtgggaggagtgggtgtcccctgtgtgtcagtgggcagctcctgctgaacccgcagctcactagggagcctgacagtggggccatgcgcctgacactcctctctgcttgtggacctggcaaggcagggagcagaaaacagccacttgaaggctttctgtctgcgtctgtgtgcagtgtggatttagttgtgcttttttcttgctgggagagcacagccaccatttacaagcagtgtcaccgtcgtgggtggcgaggacagaacaggagcctctgctctctgtacctatctgggcccggtgggctcccttgtcctggcttccatctctgtctcagcgaccattcagccctgcgcaggaacacgtgttgcttagaaaagccaaatccagccttgtctctgcctcctctggtctcatgatgtgcatctgttaccttgaaactggaaaccagtctatcaatgtctgtgccaattttttattccctccccaacctccttccccatacgactttttatttatgtaggatgtgtgctgtctaatgatgggatgaccacacttttccatgttctaaaagtgctcctctcccgcagggtcccagggctggtggttgctttgggtctacagctacgtcttacccacctcctgcctcaacagcctgtgtggtggcaaagccggtgtggggctggggaacgcagcgttctccaggagggggacctggctctccttctgcaatgcaggcgaaggcctagatgccagtgtgacctcccacaaggcgtggcttccagactccccggccggaagtgatgcttttttgccttgggccctgggtttgaagcagcctggctttctcttggtaagtggctggtgtcttagcagctgcaatctgagctcagccacctacacaccaccgtggccgacactttcattaaaaagtttcctgagacga

SEQ ID NO: 112000 - DNA, 4708 bp, Homo sapiens
  Payload ID: 1949
  Gene Symbol: BCR
  Gene Name: breakpoint cluster region
  Uniprot ID: P11274
  ENST ID: ENST00000359540
  CDS Start-End: 597-4280
ggggggagggtggcggctcgatgggggagccgcctccagggggcccccccgccctgtgcccacggcgcggcccctttaagaggcccgcctggctccgtcatccgcgccgcggccacctccccccggccctccccttcctgcggcgcagagtgcgggccgggcgggagtgcggcgagagccggctggctgagcttagcgtccgaggaggcggcggcggcggcggcggcacggcggcggcggggctgtggggcggtgcggaagcgagaggcgaggagcgcgcgggccgtggccagagtctggcggcggcctggcggagcggagagcagcgcccgcgcctcgccgtgcggaggagccccgcacacaatagcggcgcgcgcagcccgcgcccttccccccggcgcgccccgccccgcgcgccgagcgccccgctccgcctcacctgccaccagggagtgggcgggcattgttcgccgccgccgccgccgcgcgggccatgggggccgcccggcgcccggggccgggctggcgaggcgccgcgccgccgctgagacgggccccgcgcgcagcccggcggcgcaggtaaggccggccgcgccatggtggacccggtgggcttcgcggaggcgtggaaggcgcagttcccggactcagagcccccgcgcatggagctgcgctcagtgggcgacatcgagcaggagctggagcgctgcaaggcctccattcggcgcctggagcaggaggtgaaccaggagcgcttccgcatgatctacctgcagacgttgctggccaaggaaaagaagagctatgaccggcagcgatggggcttccggcgcgcggcgcaggcccccgacggcgcctccgagccccgagcgtccgcgtcgcgcccgcagccagcgcccgccgacggagccgacccgccgcccgccgaggagcccgaggcccggcccgacggcgagggttctccgggtaaggccaggcccgggaccgcccgcaggcccggggcagccgcgtcgggggaacgggacgaccggggaccccccgccagcgtggcggcgctcaggtccaacttcgagcggatccgcaagggccatggccagcccggggcggacgccgagaagcccttctacgtgaacgtcgagtttcaccacgagcgcggcctggtgaaggtcaacgacaaagaggtgtcggaccgcatcagctccctgggcagccaggccatgcagatggagcgcaaaaagtcccagcacggcgcgggctcgagcgtgggggatgcatccaggcccccttaccggggacgctcctcggagagcagctgcggcgtcgacggcgactacgaggacgccgagttgaacccccgcttcctgaaggacaacctgatcgacgccaatggcggtagcaggcccccttggccgcccctggagtaccagccctaccagagcatctacgtcgggggcatgatggaaggggagggcaagggcccgctcctgcgcagccagagcacctctgagcaggagaagcgccttacctggccccgcaggtcctactccccccggagttttgaggattgcggaggcggctataccccggactgcagctccaatgagaacctcacctccagcgaggaggacttctcctctggccagtccagccgcgtgtccccaagccccaccacctaccgcatgttccgggacaaaagccgctctccctcgcagaactcgcaacagtccttcgacagcagcagtccccccacgccgcagtgccataagcggcaccggcactgcccggttgtcgtgtccgaggccaccatcgtgggcgtccgcaagaccgggcagatctggcccaacgatggcgagggcgccttccatggagacgcagatggctcgttcggaacaccacctggatacggctgcgctgcagaccgggcagaggagcagcgccggcaccaagatgggctgccctacattgatgactcgccctcctcatcgccccacctcagcagcaagggcaggggcagccgggatgcgctggtctcgggagccctggagtccactaaagcgagtgagctggacttggaaaagggcttggagatgagaaaatgggtcctgtcgggaatcctggctagcgaggagacttacctgagccacctggaggcactgctgctgcccatgaagcctttgaaagccgctgccaccacctctcagccggtgctgacgagtcagcagatcgagaccatcttcttcaaagtgcctgagctctacgagatccacaaggagttctatgatgggctcttcccccgcgtgcagcagtggagccaccagcagcgggtgggcgacctcttccagaagctggccagccagctgggtgtgtaccgggccttcgtggacaactacggagttgccatggaaatggctgagaagtgctgtcaggccaatgctcagtttgcagaaatctccgagaacctgagagccagaagcaacaaagatgccaaggatccaacgaccaagaactctctggaaactctgctctacaagcctgtggaccgtgtgacgaggagcacgctggtcctccatgacttgctgaagcacactcctgccagccaccctgaccaccccttgctgcaggacgccctccgcatctcacagaacttcctgtccagcatcaatgaggagatcacaccccgacggcagtccatgacggtgaagaagggagagcaccggcagctgctgaaggacagcttcatggtggagctggtggagggggcccgcaagctgcgccacgtcttcctgttcaccgacctgcttctctgcaccaagctcaagaagcagagcggaggcaaaacgcagcagtatgactgcaaatggtacattccgctcacggatctcagcttccagatggtggatgaactggaggcagtgcccaacatccccctggtgcccgatgaggagctggacgctttgaagatcaagatctcccagatcaagaatgacatccagagagagaagagggcgaacaagggcagcaaggctacggagaggctgaagaagaagctgtcggagcaggagtcactgctgctgcttatgtctcccagcatggccttcagggtgcacagccgcaacggcaagagttacacgttcctgatctcctctgactatgagcgtgcagagtggagggagaacatccgggagcagcagaagaagtgtttcagaagcttctccctgacatccgtggagctgcagatgctgaccaactcgtgtgtgaaactccagactgtccacagcattccgctgaccatcaataaggaagatgatgagtctccggggctctatgggtttctgaatgtcatcgtccactcagccactggatttaagcagagttcaaatctgtactgcaccctggaggtggattcctttgggtattttgtgaataaagcaaagacgcgcgtctacagggacacagctgagccaaactggaacgagctggacccgcaggccctgcaggacagagactggcagcgcaccgtcatcgccatgaatgggatcgaagtaaagctctcggtcaagttcaacagcagggagttcagcttgaagaggatgccgtcccgaaaacagacaggggtcttcggagtcaagattgctgtggtcaccaagagagagaggtccaaggtgccctacatcgtgcgccagtgcgtggaggagatcgagcgccgaggcatggaggaggtgggcatctaccgcgtgtccggtgtggccacggacatccaggcactgaaggcagccttcgacgtcaataacaaggacgtgtcggtgatgatgagcgagatggacgtgaacgccatcgcaggcacgctgaagctgtacttccgtgagctgcccgagcccctcttcactgacgagttctaccccaacttcgcagagggcatcgctctttcagacccggttgcaaaggagagctgcatgctcaacctgctgctgtccctgccggaggccaacctgctcaccttccttttccttctggaccacctgaaaagggtggcagagaaggaggcagtcaataagatgtccctgcacaacctcgccacggtctttggccccacgctgctccggccctccgagaaggagagcaagctccctgccaaccccagccagcctatcaccatgactgacagctggtccttggaggtcatgtcccaggtccaggtgctgctgtacttcctgcagctggaggccatccctgccccggacagcaagagacagagcatcctgttctccaccgaagtctaaaggtcccagtccatctcctggaggcggacagatggcctggaaacctctggctaatcgggccatccgtagagcgggaaccttcctgaggtgtccttgggccacccccaagtgttgggccatctgccaagagacagcgacccaaagccgaaggacaggtggcctggaaagatcccgcccaggtctgggagccccaggctggcctcagactgtggttttttatgtggccacctgagggcgccccaagccagttcatctcggagtccaggcctggccctgggagacagggtgaagggagtggtttttatgaacttaacttagagtctaaaagatttctactggatcacttgtcaagatgcgccctctctggggagaagggaacgtgactggattccctcactgttgtatcttgaataaacgctgctgcttca

SEQ ID NO: 112001 - DNA, 5027 bp, Homo sapiens
  Payload ID: 1949
  Gene Symbol: BCR
  Gene Name: breakpoint cluster region
  ENST ID: ENST00000398512
  CDS Start-End: 1-1398
atggtggacccggtgggcttcgcggaggcgtggaaggcgcagttcccggactcagagcccccgcgcatggagctgcgctcagtgggcgacatcgagcaggagctggagcgctgcaaggcctccattcggcgcctggagcaggaggtgaaccaggagcgcttccgcatgatctacctgcagacgttgctggccaaggaaaagaagagctatgaccggcagcgatggggcttccggcgcgcggcgcaggcccccgacggcgcctccgagccccgagcgtccgcgtcgcgcccgcagccagcgcccgccgacggagccgacccgccgcccgccgaggagcccgaggcccggcccgacggcgagggttctccgggtaaggccaggcccgggaccgcccgcaggcccggggcagccgcgtcgggggaacgggacgaccggggaccccccgccagcgtggcggcgctcaggtccaacttcgagcggatccgcaagggccatggccagcccggggcggacgccgagaagcccttctacgtgaacgtcgagtttcaccacgagcgcggcctggtgaaggtcaacgacaaagaggtgtcggaccgcatcagctccctgggcagccaggccatgcagatggagcgcaaaaagtcccagcacggcgcgggctcgagcgtgggggatgcatccaggcccccttaccggggacgctcctcggagagcagctgcggcgtcgacggcgactacgaggacgccgagttgaacccccgcttcctgaaggacaacctgatcgacgccaatggcggtagcaggcccccttggccgcccctggagtaccagccctaccagagcatctacgtcgggggcatgatggaaggggagggcaagggcccgctcctgcgcagccagagcacctctgagcaggagaagcgccttacctggccccgcaggtcctactccccccggagttttgaggattgcggaggcggctataccccggactgcagctccaatgagaacctcacctccagcgaggaggacttctcctctggccagtccagccgcgtgtccccaagccccaccacctaccgcatgttccgggacaaaagccgctctccctcgcagaactcgcaacagtccttcgacagcagcagtccccccacgccgcagtgccataagcggcaccggcactgcccggttgtcgtgtccgaggccaccatcgtgggcgtccgcaagaccgggcagatctggcccaacgatggcgagggcgccttccatggagaacatccgggagcagcagaagaagtgtttcagaagcttctccctgacatccgtggagctgcagatgctgaccaactcgtgtgtgaaactccagactgtccacagcattccgctgaccatcaataaggaagatgatgagtctccggggctctatgggtttctgaatgtcatcgtccactcagccactggatttaagcagagttcaaatctgtactgcaccctggaggtggattcctttgggtattttgtgaataaagcaaagacgcgcgtctacagggacacagctgagccaaactggaacgaggaatttgagatagagctggagggctcccagaccctgaggatactgtgctatgaaaagtgttacaacaagacgaagatccccaaggaggacggcgagagcacggacagactcatggggaagggccaggtccagctggacccgcaggccctgcaggacagagactggcagcgcaccgtcatcgccatgaatgggatcgaagtaaagctctcggtcaagttcaacagcagggagttcagcttgaagaggatgccgtcccgaaaacagacaggggtcttcggagtcaagattgctgtggtcaccaagagagagaggtccaaggtgccctacatcgtgcgccagtgcgtggaggagatcgagcgccgaggcatggaggaggtgggcatctaccgcgtgtccggtgtggccacggacatccaggcactgaaggcagccttcgacgtcaataacaaggacgtgtcggtgatgatgagcgagatggacgtgaacgccatcgcaggcacgctgaagctgtacttccgtgagctgcccgagcccctcttcactgacgagttctaccccaacttcgcagagggcatcgctctttcagacccggttgcaaaggagagctgcatgctcaacctgctgctgtccctgccggaggccaacctgctcaccttccttttccttctggaccacctgaaaagggtggcagagaaggaggcagtcaataagatgtccctgcacaacctcgccacggtctttggccccacgctgctccggccctccgagaaggagagcaagctccctgccaaccccagccagcctatcaccatgactgacagctggtccttggaggtcatgtcccaggtccaggtgctgctgtacttcctgcagctggaggccatccctgccccggacagcaagagacagagcatcctgttctccaccgaagtctaaaggtcccagtccatctcctggaggcggacagatggcctggaaacctctggctaatcgggccatccgtagagcgggaaccttcctgaggtgtccttgggccacccccaagtgttgggccatctgccaagagacagcgacccaaagccgaaggacaggtggcctggaaagatcccgcccaggtctgggagccccaggctggcctcagactgtggttttttatgtggccacctgagggcgccccaagccagttcatctcggagtccaggcctggccctgggagacagggtgaagggagtggtttttatgaacttaacttagagtctaaaagatttctactggatcacttgtcaagatgcgccctctctggggagaagggaacgtgactggattccctcactgttgtatcttgaataaacgctgctgcttcatcctgtgggggccgtggccctgtccctgtgtgggtggggcctcttccatttccctgacttagaaaccacactccacttctaacagggtttgagaggcttagtcagcactgggtagcgttttgactccattcttggctttctttttctttccagaaggatttttgtgcagaaatgggtcttttgttgccatgttagtcctccttggaaggcagctcagaaggcctgtgaaatgtcaggggacaggacccccagggagggaaccccaggctacgcactttagggttcgttctccagggagagcgacctcgtcccccgatcctgaccgcccttccggcccacgctctcctgtttggcttccacaggcctggacttctctggcttctctgcccacacactccctgcccccagtgtccctgcccctgccccagcacaggtgacttcatttctgtcctctcagctcagtggactcgctcaacttttgtataagtctccacttggtggcagcagcttgctgatgacttgttttaaaactttcatcctaaataaccttttgatacttgaatatttgtaagttttatacatagtttctaatttttttccgaacagatccagatacctaataagatgctggaatgtaatccctggacaatccgtgtcctggcagcatttggtcttcctctaagcgcctggctccgctgttctcaggagtgggttctgaagtctctggagaacaggatacgtggagggttaggaaggggccaggcctagagacgggagactccctcccggagcaggtggaggcacaggaccattcgctaccccatctgccgacacctgcgggggagcccaggcattctttgtaaaccctcctgaccacctggctcaaagaaaacagaagcatggagaccgccaagtattttcaagaaataaccccatgaatattccatcacttttttagaaagaggggcttggggcaggcagaggagagaagggagagcaaactgagagccaagtttccacacggtcctgcaggaggagaggatgcagctgcccagagggaagcaggatcacatttaaggaagtgtgtggggtccctggatgacaccagcacccagtgcggctctgtctggcacccgctcccaaggtgggaggagtgggtgtcccctgtgtgtcagtgggcagctcctgctgaacccgcagctcactagggagcctgacagtggggccatgcgcctgacactcctctctgcttgtggacctggcaaggcagggagcagaaaacagccacttgaaggctttctgtctgcgtctgtgtgcagtgtggatttagttgtgcttttttcttgctgggagagcacagccaccatttacaagcagtgtcaccgtcgtgggtggcgaggacagaacaggagcctctgctctctgtacctatctgggcccggtgggctcccttgtcctggcttccatctctgtctcagcgaccattcagccctgcgcaggaacacgtgttgcttagaaaagccaaatccagccttgtctctgcctcctctggtctcatgatgtgcatctgttaccttgaaactggaaaccagtctatcaatgtctgtgccaattttttattccctccccaacctccttccccatacgactttttatttatgtaggatgtgtgctgtctaatgatgggatgaccacacttttccatgttctaaaagtgctcctctcccgcagggtcccagggctggtggttgctttgggtctacagctacgtcttacccacctcctgcctcaacagcctgtgtggtggcaaagccggtgtggggctggggaacgcagcgttctccaggagggggacctggctctccttctgcaatgcaggcgaaggcctagatgccagtgtgacctcccacaaggcgtggcttccagactccccggccggaagtgatgcttttttgccttgggccctgggtttgaagcagcctggctttctcttggtaagtggctggtgtcttagcagctgcaatctgagctcagccacctacacaccaccgtggccgacactttcattaaaaagtttcctgagacga

SEQ ID NO: 112002 - DNA, 771 bp, Homo sapiens
  Payload ID: 1949
  Gene Symbol: BCR
  Gene Name: breakpoint cluster region
  ENST ID: ENST00000427791
  CDS Start-End: 1-771
gccctggagtccactaaagcgagtgagctggacttggaaaagggcttggagatgagaaaatgggtcctgtcgggaatcctggctagcgaggagacttacctgagccacctggaggcactgctgctgcccatgaagcctttgaaagccgctgccaccacctctcagccggtgctgacgagtcagcagatcgagaccatcttcttcaaagtgcctgagctctacgagatccacaaggagttctatgatgggctcttcccccgcgtgcagcagtggagccaccagcagcgggtgggcgacctcttccagaagctgaacctgagagccagaagcaacaaagatgccaaggatccaacgaccaagaactctctggaaactctgctctacaagcctgtggaccgtgtgacgaggagcacgctggtcctccatgacttgctgaagcacactcctgccagccaccctgaccaccccttgctgcaggacgccctccgcatctcacagaacttcctgtccagcatcaatgaggagatcacaccccgacggcagtccatgacggtgaagaagggagagcaccggcagctgctgaaggacagcttcatggtggagctggtggagggggcccgcaagctgcgccacgtcttcctgttcaccgacctgcttctctgcaccaagctcaagaagcagagcggaggcaaaacgcagcagtatgactgcaaatggtacattccgctcacggatctcagcttccagatggtggatgaactggaggcagtg

SEQ ID NO: 112003 - DNA, 3668 bp, Homo sapiens
  Payload ID: 1950
  Gene Symbol: BRCA1
  Gene Name: breast cancer 1, early onset
  Uniprot ID: P38398
  ENST ID: ENST00000352993
  CDS Start-End: 120-2285
gagctcgctgagacttcctggacgggggacaggctgtggggtttctcagataactgggcccctgcgctcaggaggccttcaccctctgctctgggtaaagttcattggaacagaaagaaatggatttatctgctcttcgcgttgaagaagtacaaaatgtcattaatgctatgcagaaaatcttagagtgtcccatctgtctggagttgatcaaggaacctgtctccacaaagtgtgaccacatattttgcaaattttgcatgctgaaacttctcaaccagaagaaagggccttcacagtgtcctttatgtaagaatgatataaccaaaaggagcctacaagaaagtacgagatttagtcaacttgttgaagagctattgaaaatcatttgtgcttttcagcttgacacaggtttggagtatgcaaacagctataattttgcaaaaaaggaaaataactctcctgaacatctaaaagatgaagtttctatcatccaaagtatgggctacagaaaccgtgccaaaagacttctacagagtgaacccgaaaatccttccttgcaggaaaccagtctcagtgtccaactctctaaccttggaactgtgagaactctgaggacaaagcagcggatacaacctcaaaagacgtctgtctacattgaattgggatctgattcttctgaagataccgttaataaggcaacttattgcagtgtgggagatcaagaattgttacaaatcacccctcaaggaaccagggatgaaatcagtttggattctgcaaaaaagggtgaagcagcatctgggtgtgagagtgaaacaagcgtctctgaagactgctcagggctatcctctcagagtgacattttaaccactcagcagagggataccatgcaacataacctgataaagctccagcaggaaatggctgaactagaagctgtgttagaacagcatgggagccagccttctaacagctacccttccatcataagtgactcttctgcccttgaggacctgcgaaatccagaacaaagcacatcagaaaaagcagtattaacttcacagaaaagtagtgaataccctataagccagaatccagaaggcctttctgctgacaagtttgaggtgtctgcagatagttctaccagtaaaaataaagaaccaggagtggaaaggtcatccccttctaaatgcccatcattagatgataggtggtacatgcacagttgctctgggagtcttcagaatagaaactacccatctcaagaggagctcattaaggttgttgatgtggaggagcaacagctggaagagtctgggccacacgatttgacggaaacatcttacttgccaaggcaagatctagagggaaccccttacctggaatctggaatcagcctcttctctgatgaccctgaatctgatccttctgaagacagagccccagagtcagctcgtgttggcaacataccatcttcaacctctgcattgaaagttccccaattgaaagttgcagaatctgcccagagtccagctgctgctcatactactgatactgctgggtataatgcaatggaagaaagtgtgagcagggagaagccagaattgacagcttcaacagaaagggtcaacaaaagaatgtccatggtggtgtctggcctgaccccagaagaatttatgctcgtgtacaagtttgccagaaaacaccacatcactttaactaatctaattactgaagagactactcatgttgttatgaaaacagatgctgagtttgtgtgtgaacggacactgaaatattttctaggaattgcgggaggaaaatgggtagttagctatttctgggtgacccagtctattaaagaaagaaaaatgctgaatgagcatgattttgaagtcagaggagatgtggtcaatggaagaaaccaccaaggtccaaagcgagcaagagaatcccaggacagaaagatcttcagggggctagaaatctgttgctatgggcccttcaccaacatgcccacagatcaactggaatggatggtacagctgtgtggtgcttctgtggtgaaggagctttcatcattcacccttggcacaggtgtccacccaattgtggttgtgcagccagatgcctggacagaggacaatggcttccatgcaattgggcagatgtgtgaggcacctgtggtgacccgagagtgggtgttggacagtgtagcactctaccagtgccaggagctggacacctacctgataccccagatcccccacagccactactgactgcagccagccacaggtacagagccacaggaccccaagaatgagcttacaaagtggcctttccaggccctgggagctcctctcactcttcagtccttctactgtcctggctactaaatattttatgtacatcagcctgaaaaggacttctggctatgcaagggtcccttaaagattttctgcttgaagtctcccttggaaatctgccatgagcacaaaattatggtaatttttcacctgagaagattttaaaaccatttaaacgccaccaattgagcaagatgctgattcattatttatcagccctattctttctattcaggctgttgttggcttagggctggaagcacagagtggcttggcctcaagagaatagctggtttccctaagtttacttctctaaaaccctgtgttcacaaaggcagagagtcagacccttcaatggaaggagagtgcttgggatcgattatgtgacttaaagtcagaatagtccttgggcagttctcaaatgttggagtggaacattggggaggaaattctgaggcaggtattagaaatgaaaaggaaacttgaaacctgggcatggtggctcacgcctgtaatcccagcactttgggaggccaaggtgggcagatcactggaggtcaggagttcgaaaccagcctggccaacatggtgaaaccccatctctactaaaaatacagaaattagccggtcatggtggtggacacctgtaatcccagctactcaggtggctaaggcaggagaatcacttcagcccgggaggtggaggttgcagtgagccaagatcataccacggcactccagcctgggtgacagtgagactgtggctcaaaaaaaaaaaaaaaaaaaggaaaatgaaactagaagagatttctaaaagtctgagatatatttgctagatttctaaagaatgtgttctaaaacagcagaagattttcaagaaccggtttccaaagacagtcttctaattcctcattagtaataagtaaaatgtttattgttgtagctctggtatataatccattcctcttaaaatataagacctctggcatgaatatttcatatctataaaatgacagatcccaccaggaaggaagctgttgctttctttgaggtgatttttttcctttgctccctgttgctgaaaccatacagcttcataaataattttgcttgctgaaggaagaaaaagtgtttttcataaacccattatccaggactgtttatagctgttggaaggactaggtcttccctagcccccccagtgtgcaagggcagtgaagacttgattgtacaaaatacgttttgtaaatgttgtgctgttaacactgcaaataaacttggtagcaaacacttcca

SEQ ID NO: 112004 - DNA, 4497 bp, Homo sapiens
  Payload ID: 1950
  Gene Symbol: BRCA1
  Gene Name: breast cancer 1, early onset
  ENST ID: ENST00000354071
  CDS Start-End: 65-4264
gggcccctgcgctcaggaggccttcaccctctgctctgggtaaagttcattggaacagaaagaaatggatttatctgctcttcgcgttgaagaagtacaaaatgtcattaatgctatgcagaaaatcttagagtgtcccatctgtctggagttgatcaaggaacctgtctccacaaagtgtgaccacatattttgcaaattttgcatgctgaaacttctcaaccagaagaaagggccttcacagtgtcctttatgtaagaatgatataaccaaaaggagcctacaagaaagtacgagatttagtcaacttgttgaagagctattgaaaatcatttgtgcttttcagcttgacacaggtttggagtatgcaaacagctataattttgcaaaaaaggaaaataactctcctgaacatctaaaagatgaagtttctatcatccaaagtatgggctacagaaaccgtgccaaaagacttctacagagtgaacccgaaaatccttccttgcaggaaaccagtctcagtgtccaactctctaaccttggaactgtgagaactctgaggacaaagcagcggatacaacctcaaaagacgtctgtctacattgaattgggatctgattcttctgaagataccgttaataaggcaacttattgcagtgtgggagatcaagaattgttacaaatcacccctcaaggaaccagggatgaaatcagtttggattctgcaaaaaaggctgcttgtgaattttctgagacggatgtaacaaatactgaacatcatcaacccagtaataatgatttgaacaccactgagaagcgtgcagctgagaggcatccagaaaagtatcagggtagttctgtttcaaacttgcatgtggagccatgtggcacaaatactcatgccagctcattacagcatgagaacagcagtttattactcactaaagacagaatgaatgtagaaaaggctgaattctgtaataaaagcaaacagcctggcttagcaaggagccaacataacagatgggctggaagtaaggaaacatgtaatgataggcggactcccagcacagaaaaaaaggtagatctgaatgctgatcccctgtgtgagagaaaagaatggaataagcagaaactgccatgctcagagaatcctagagatactgaagatgttccttggataacactaaatagcagcattcagaaagttaatgagtggttttccagaagtgatgaactgttaggttctgatgactcacatgatggggagtctgaatcaaatgccaaagtagctgatgtattggacgttctaaatgaggtagatgaatattctggttcttcagagaaaatagacttactggccagtgatcctcatgaggctttaatatgtaaaagtgaaagagttcactccaaatcagtagagagtaatattgaagacaaaatatttgggaaaacctatcggaagaaggcaagcctccccaacttaagccatgtaactgaaaatctaattataggagcatttgttactgagccacagataatacaagagcgtcccctcacaaataaattaaagcgtaaaaggagacctacatcaggccttcatcctgaggattttatcaagaaagcagatttggcagttcaaaagactcctgaaatgataaatcagggaactaaccaaacggagcagaatggtcaagtgatgaatattactaatagtggtcatgagaataaaacaaaaggtgattctattcagaatgagaaaaatcctaacccaatagaatcactcgaaaaagaatctgctttcaaaacgaaagctgaacctataagcagcagtataagcaatatggaactcgaattaaatatccacaattcaaaagcacctaaaaagaataggctgaggaggaagtcttctaccaggcatattcatgcgcttgaactagtagtcagtagaaatctaagcccacctaattgtactgaattgcaaattgatagttgttctagcagtgaagagataaagaaaaaaaagtacaaccaaatgccagtcaggcacagcagaaacctacaactcatggaaggtaaagaacctgcaactggagccaagaagagtaacaagccaaatgaacagacaagtaaaagacatgacagcgatactttcccagagctgaagttaacaaatgcacctggttcttttactaagtgttcaaataccagtgaacttaaagaatttgtcaatcctagccttccaagagaagaaaaagaagagaaactagaaacagttaaagtgtctaataatgctgaagaccccaaagatctcatgttaagtggagaaagggttttgcaaactgaaagatctgtagagagtagcagtatttcattggtacctggtactgattatggcactcaggaaagtatctcgttactggaagttagcactctagggaaggcaaaaacagaaccaaataaatgtgtgagtcagtgtgcagcatttgaaaaccccaagggactaattcatggttgttccaaagataatagaaatgacacagaaggctttaagtatccattgggacatgaagttaaccacagtcgggaaacaagcatagaaatggaagaaagtgaacttgatgctcagtatttgcagaatacattcaaggtttcaaagcgccagtcatttgctccgttttcaaatccaggaaatgcagaagaggaatgtgcaacattctctgcccactctgggtccttaaagaaacaaagtccaaaagtcacttttgaatgtgaacaaaaggaagaaaatcaaggaaagaatgagtctaatatcaagcctgtacagacagttaatatcactgcaggctttcctgtggttggtcagaaagataagccagttgataatgccaaatgtagtatcaaaggaggctctaggttttgtctatcatctcagttcagaggcaacgaaactggactcattactccaaataaacatggacttttacaaaacccatatcgtataccaccactttttcccatcaagtcatttgttaaaactaaatgtaagaaaaatctgctagaggaaaactttgaggaacattcaatgtcacctgaaagagaaatgggaaatgagaacattccaagtacagtgagcacaattagccgtaataacattagagaaaatgtttttaaagaagccagctcaagcaatattaatgaagtaggttccagtactaatgaagtgggctccagtattaatgaaataggttccagtgatgaaaacattcaagcagaactaggtagaaacagagggccaaaattgaatgctatgcttagattaggggttttgcaacctgaggtctataaacaaagtcttcctggaagtaattgtaagcatcctgaaataaaaaagcaagaatatgaagaagtagttcagactgttaatacagatttctctccatatctgatttcagataacttagaacagcctatgggaagtagtcatgcatctcaggtttgttctgagacacctgatgacctgttagatgatggtgaaataaaggaagatactagttttgctgaaaatgacattaaggaaagttctgctgtttttagcaaaagcgtccagaaaggagagcttagcaggagtcctagccctttcacccatacacatttggctcagggttaccgaagaggggccaagaaattagagtcctcagaagagaacttatctagtgaggatgaagagcttccctgcttccaacacttgttatttggtaaagtaaacaatataccttctcagtctactaggcatagcaccgttgctaccgagtgtctgtctaagaacacagaggagaatttattatcattgaagaatagcttaaatgactgcagtaaccaggtaatattggcaaaggcatctcaggaacatcaccttagtgaggaaacaaaatgttctgctagcttgttttcttcacagtgcagtgaattggaagacttgactgcaaatacaaacacccaggatcctttcttgattggttcttccaaacaaatgaggcatcagtctgaaagccagggagttggtctgagtgacaaggaattggtttcagatgatgaagaaagaggaacgggcttggaagaaaataatcaagaagagcaaagcatggattcaaacttaggtattggaaccaggtttttgtgtttgccccagtctatttatagaagtgagctaaatgtttatgcttttggggagcacattttacaaatttccaagtatagttaaaggaactgcttcttaaacttgaaacatgttcctcctaaggtgcttttcatagaaaaaagtccttcacacagctaggacgtcatctttgactgaatgagctttaacatcctaattactggtggacttacttctggtttcattttataaaagcaaatccaggtgtcccaaagcaaggaatttaatcattttgtgtgacatgaaagtaaatccagtcctgccaatgagaagaaaaa

SEQ ID NO: 112005 - DNA, 7094 bp, Homo sapiens
  Payload ID: 1950
  Gene Symbol: BRCA1
  Gene Name: breast cancer 1, early onset
  Uniprot ID: P38398
  ENST ID: ENST00000357654
  CDS Start-End: 120-5711
gagctcgctgagacttcctggacgggggacaggctgtggggtttctcagataactgggcccctgcgctcaggaggccttcaccctctgctctgggtaaagttcattggaacagaaagaaatggatttatctgctcttcgcgttgaagaagtacaaaatgtcattaatgctatgcagaaaatcttagagtgtcccatctgtctggagttgatcaaggaacctgtctccacaaagtgtgaccacatattttgcaaattttgcatgctgaaacttctcaaccagaagaaagggccttcacagtgtcctttatgtaagaatgatataaccaaaaggagcctacaagaaagtacgagatttagtcaacttgttgaagagctattgaaaatcatttgtgcttttcagcttgacacaggtttggagtatgcaaacagctataattttgcaaaaaaggaaaataactctcctgaacatctaaaagatgaagtttctatcatccaaagtatgggctacagaaaccgtgccaaaagacttctacagagtgaacccgaaaatccttccttgcaggaaaccagtctcagtgtccaactctctaaccttggaactgtgagaactctgaggacaaagcagcggatacaacctcaaaagacgtctgtctacattgaattgggatctgattcttctgaagataccgttaataaggcaacttattgcagtgtgggagatcaagaattgttacaaatcacccctcaaggaaccagggatgaaatcagtttggattctgcaaaaaaggctgcttgtgaattttctgagacggatgtaacaaatactgaacatcatcaacccagtaataatgatttgaacaccactgagaagcgtgcagctgagaggcatccagaaaagtatcagggtagttctgtttcaaacttgcatgtggagccatgtggcacaaatactcatgccagctcattacagcatgagaacagcagtttattactcactaaagacagaatgaatgtagaaaaggctgaattctgtaataaaagcaaacagcctggcttagcaaggagccaacataacagatgggctggaagtaaggaaacatgtaatgataggcggactcccagcacagaaaaaaaggtagatctgaatgctgatcccctgtgtgagagaaaagaatggaataagcagaaactgccatgctcagagaatcctagagatactgaagatgttccttggataacactaaatagcagcattcagaaagttaatgagtggttttccagaagtgatgaactgttaggttctgatgactcacatgatggggagtctgaatcaaatgccaaagtagctgatgtattggacgttctaaatgaggtagatgaatattctggttcttcagagaaaatagacttactggccagtgatcctcatgaggctttaatatgtaaaagtgaaagagttcactccaaatcagtagagagtaatattgaagacaaaatatttgggaaaacctatcggaagaaggcaagcctccccaacttaagccatgtaactgaaaatctaattataggagcatttgttactgagccacagataatacaagagcgtcccctcacaaataaattaaagcgtaaaaggagacctacatcaggccttcatcctgaggattttatcaagaaagcagatttggcagttcaaaagactcctgaaatgataaatcagggaactaaccaaacggagcagaatggtcaagtgatgaatattactaatagtggtcatgagaataaaacaaaaggtgattctattcagaatgagaaaaatcctaacccaatagaatcactcgaaaaagaatctgctttcaaaacgaaagctgaacctataagcagcagtataagcaatatggaactcgaattaaatatccacaattcaaaagcacctaaaaagaataggctgaggaggaagtcttctaccaggcatattcatgcgcttgaactagtagtcagtagaaatctaagcccacctaattgtactgaattgcaaattgatagttgttctagcagtgaagagataaagaaaaaaaagtacaaccaaatgccagtcaggcacagcagaaacctacaactcatggaaggtaaagaacctgcaactggagccaagaagagtaacaagccaaatgaacagacaagtaaaagacatgacagcgatactttcccagagctgaagttaacaaatgcacctggttcttttactaagtgttcaaataccagtgaacttaaagaatttgtcaatcctagccttccaagagaagaaaaagaagagaaactagaaacagttaaagtgtctaataatgctgaagaccccaaagatctcatgttaagtggagaaagggttttgcaaactgaaagatctgtagagagtagcagtatttcattggtacctggtactgattatggcactcaggaaagtatctcgttactggaagttagcactctagggaaggcaaaaacagaaccaaataaatgtgtgagtcagtgtgcagcatttgaaaaccccaagggactaattcatggttgttccaaagataatagaaatgacacagaaggctttaagtatccattgggacatgaagttaaccacagtcgggaaacaagcatagaaatggaagaaagtgaacttgatgctcagtatttgcagaatacattcaaggtttcaaagcgccagtcatttgctccgttttcaaatccaggaaatgcagaagaggaatgtgcaacattctctgcccactctgggtccttaaagaaacaaagtccaaaagtcacttttgaatgtgaacaaaaggaagaaaatcaaggaaagaatgagtctaatatcaagcctgtacagacagttaatatcactgcaggctttcctgtggttggtcagaaagataagccagttgataatgccaaatgtagtatcaaaggaggctctaggttttgtctatcatctcagttcagaggcaacgaaactggactcattactccaaataaacatggacttttacaaaacccatatcgtataccaccactttttcccatcaagtcatttgttaaaactaaatgtaagaaaaatctgctagaggaaaactttgaggaacattcaatgtcacctgaaagagaaatgggaaatgagaacattccaagtacagtgagcacaattagccgtaataacattagagaaaatgtttttaaagaagccagctcaagcaatattaatgaagtaggttccagtactaatgaagtgggctccagtattaatgaaataggttccagtgatgaaaacattcaagcagaactaggtagaaacagagggccaaaattgaatgctatgcttagattaggggttttgcaacctgaggtctataaacaaagtcttcctggaagtaattgtaagcatcctgaaataaaaaagcaagaatatgaagaagtagttcagactgttaatacagatttctctccatatctgatttcagataacttagaacagcctatgggaagtagtcatgcatctcaggtttgttctgagacacctgatgacctgttagatgatggtgaaataaaggaagatactagttttgctgaaaatgacattaaggaaagttctgctgtttttagcaaaagcgtccagaaaggagagcttagcaggagtcctagccctttcacccatacacatttggctcagggttaccgaagaggggccaagaaattagagtcctcagaagagaacttatctagtgaggatgaagagcttccctgcttccaacacttgttatttggtaaagtaaacaatataccttctcagtctactaggcatagcaccgttgctaccgagtgtctgtctaagaacacagaggagaatttattatcattgaagaatagcttaaatgactgcagtaaccaggtaatattggcaaaggcatctcaggaacatcaccttagtgaggaaacaaaatgttctgctagcttgttttcttcacagtgcagtgaattggaagacttgactgcaaatacaaacacccaggatcctttcttgattggttcttccaaacaaatgaggcatcagtctgaaagccagggagttggtctgagtgacaaggaattggtttcagatgatgaagaaagaggaacgggcttggaagaaaataatcaagaagagcaaagcatggattcaaacttaggtgaagcagcatctgggtgtgagagtgaaacaagcgtctctgaagactgctcagggctatcctctcagagtgacattttaaccactcagcagagggataccatgcaacataacctgataaagctccagcaggaaatggctgaactagaagctgtgttagaacagcatgggagccagccttctaacagctacccttccatcataagtgactcttctgcccttgaggacctgcgaaatccagaacaaagcacatcagaaaaagcagtattaacttcacagaaaagtagtgaataccctataagccagaatccagaaggcctttctgctgacaagtttgaggtgtctgcagatagttctaccagtaaaaataaagaaccaggagtggaaaggtcatccccttctaaatgcccatcattagatgataggtggtacatgcacagttgctctgggagtcttcagaatagaaactacccatctcaagaggagctcattaaggttgttgatgtggaggagcaacagctggaagagtctgggccacacgatttgacggaaacatcttacttgccaaggcaagatctagagggaaccccttacctggaatctggaatcagcctcttctctgatgaccctgaatctgatccttctgaagacagagccccagagtcagctcgtgttggcaacataccatcttcaacctctgcattgaaagttccccaattgaaagttgcagaatctgcccagagtccagctgctgctcatactactgatactgctgggtataatgcaatggaagaaagtgtgagcagggagaagccagaattgacagcttcaacagaaagggtcaacaaaagaatgtccatggtggtgtctggcctgaccccagaagaatttatgctcgtgtacaagtttgccagaaaacaccacatcactttaactaatctaattactgaagagactactcatgttgttatgaaaacagatgctgagtttgtgtgtgaacggacactgaaatattttctaggaattgcgggaggaaaatgggtagttagctatttctgggtgacccagtctattaaagaaagaaaaatgctgaatgagcatgattttgaagtcagaggagatgtggtcaatggaagaaaccaccaaggtccaaagcgagcaagagaatcccaggacagaaagatcttcagggggctagaaatctgttgctatgggcccttcaccaacatgcccacagatcaactggaatggatggtacagctgtgtggtgcttctgtggtgaaggagctttcatcattcacccttggcacaggtgtccacccaattgtggttgtgcagccagatgcctggacagaggacaatggcttccatgcaattgggcagatgtgtgaggcacctgtggtgacccgagagtgggtgttggacagtgtagcactctaccagtgccaggagctggacacctacctgataccccagatcccccacagccactactgactgcagccagccacaggtacagagccacaggaccccaagaatgagcttacaaagtggcctttccaggccctgggagctcctctcactcttcagtccttctactgtcctggctactaaatattttatgtacatcagcctgaaaaggacttctggctatgcaagggtcccttaaagattttctgcttgaagtctcccttggaaatctgccatgagcacaaaattatggtaatttttcacctgagaagattttaaaaccatttaaacgccaccaattgagcaagatgctgattcattatttatcagccctattctttctattcaggctgttgttggcttagggctggaagcacagagtggcttggcctcaagagaatagctggtttccctaagtttacttctctaaaaccctgtgttcacaaaggcagagagtcagacccttcaatggaaggagagtgcttgggatcgattatgtgacttaaagtcagaatagtccttgggcagttctcaaatgttggagtggaacattggggaggaaattctgaggcaggtattagaaatgaaaaggaaacttgaaacctgggcatggtggctcacgcctgtaatcccagcactttgggaggccaaggtgggcagatcactggaggtcaggagttcgaaaccagcctggccaacatggtgaaaccccatctctactaaaaatacagaaattagccggtcatggtggtggacacctgtaatcccagctactcaggtggctaaggcaggagaatcacttcagcccgggaggtggaggttgcagtgagccaagatcataccacggcactccagcctgggtgacagtgagactgtggctcaaaaaaaaaaaaaaaaaaaggaaaatgaaactagaagagatttctaaaagtctgagatatatttgctagatttctaaagaatgtgttctaaaacagcagaagattttcaagaaccggtttccaaagacagtcttctaattcctcattagtaataagtaaaatgtttattgttgtagctctggtatataatccattcctcttaaaatataagacctctggcatgaatatttcatatctataaaatgacagatcccaccaggaaggaagctgttgctttctttgaggtgatttttttcctttgctccctgttgctgaaaccatacagcttcataaataattttgcttgctgaaggaagaaaaagtgtttttcataaacccattatccaggactgtttatagctgttggaaggactaggtcttccctagcccccccagtgtgcaagggcagtgaagacttgattgtacaaaatacgttttgtaaatgttgtgctgttaacactgcaaataaacttggtagcaaacacttcca

SEQ ID NO: 112006 - DNA, 1312 bp, Homo sapiens
  Payload ID: 1950
  Gene Symbol: BRCA1
  Gene Name: breast cancer 1, early onset
  ENST ID: ENST00000412061
  CDS Start-End: 1-1312
gtttggattctgcaaaaaaggctgcttgtgaattttctgagacggatgtaacaaatactgaacatcatcaacccagtaataatgatttgaacaccactgagaagcgtgcagctgagaggcatccagaaaagtatcagggtagttctgtttcaaacttgcatgtggagccatgtggcacaaatactcatgccagctcattacagcatgagaacagcagtttattactcactaaagacagaatgaatgtagaaaaggctgaattctgtaataaaagcaaacagcctggcttagcaaggagccaacataacagatgggctggaagtaaggaaacatgtaatgataggcggactcccagcacagaaaaaaaggtagatctgaatgctgatcccctgtgtgagagaaaagaatggaataagcagaaactgccatgctcagagaatcctagagatactgaagatgttccttggataacactaaatagcagcattcagaaagttaatgagtggttttccagaagtgatgaactgttaggttctgatgactcacatgatggggagtctgaatcaaatgccaaagtagctgatgtattggacgttctaaatgaggtagatgaatattctggttcttcagagaaaatagacttactggccagtgatcctcatgaggctttaatatgtaaaagtgaaagagttcactccaaatcagtagagagtaatattgaagacaaaatatttgggaaaacctatcggaagaaggcaagcctccccaacttaagccatgtaactgaaaatctaattataggagcatttgttactgagccacagataatacaagagcgtcccctcacaaataaattaaagcgtaaaaggagacctacatcaggccttcatcctgaggattttatcaagaaagcagatttggcagttcaaaagactcctgaaatgataaatcagggaactaaccaaacggagcagaatggtcaagtgatgaatattactaatagtggtcatgagaataaaacaaaaggtgattctattcagaatgagaaaaatcctaacccaatagaatcactcgaaaaagaatctgctttcaaaacgaaagctgaacctataagcagcagtataagcaatatggaactcgaattaaatatccacaattcaaaagcacctaaaaagaataggctgaggaggaagtcttctaccaggcatattcatgcgcttgaactagtagtcagtagaaatctaagcccacctaattgtactgaattgcaaattgatagttgttctagcagtgaagagataaagaaaaaaaa

SEQ ID NO: 112007 - DNA, 3273 bp, Homo sapiens
  Payload ID: 1950
  Gene Symbol: BRCA1
  Gene Name: breast cancer 1, early onset
  Uniprot ID: P38398
  ENST ID: ENST00000468300
  CDS Start-End: 195-2294
cttagcggtagccccttggtttccgtggcaacggaaaagcgcgggaattacagataaattaaaactgcgactgcgcggcgtgagctcgctgagacttcctggacgggggacaggctgtggggtttctcagataactgggcccctgcgctcaggaggccttcaccctctgctctggttcattggaacagaaagaaatggatttatctgctcttcgcgttgaagaagtacaaaatgtcattaatgctatgcagaaaatcttagagtgtcccatctgtctggagttgatcaaggaacctgtctccacaaagtgtgaccacatattttgcaaattttgcatgctgaaacttctcaaccagaagaaagggccttcacagtgtcctttatgtaagaatgatataaccaaaaggagcctacaagaaagtacgagatttagtcaacttgttgaagagctattgaaaatcatttgtgcttttcagcttgacacaggtttggagtatgcaaacagctataattttgcaaaaaaggaaaataactctcctgaacatctaaaagatgaagtttctatcatccaaagtatgggctacagaaaccgtgccaaaagacttctacagagtgaacccgaaaatccttccttgcaggaaaccagtctcagtgtccaactctctaaccttggaactgtgagaactctgaggacaaagcagcggatacaacctcaaaagacgtctgtctacattgaattgggatctgattcttctgaagataccgttaataaggcaacttattgcagtgtgggagatcaagaattgttacaaatcacccctcaaggaaccagggatgaaatcagtttggattctgcaaaaaaggctgcttgtgaattttctgagacggatgtaacaaatactgaacatcatcaacccagtaataatgatttgaacaccactgagaagcgtgcagctgagaggcatccagaaaagtatcagggtgaagcagcatctgggtgtgagagtgaaacaagcgtctctgaagactgctcagggctatcctctcagagtgacattttaaccactcagcagagggataccatgcaacataacctgataaagctccagcaggaaatggctgaactagaagctgtgttagaacagcatgggagccagccttctaacagctacccttccatcataagtgactcttctgcccttgaggacctgcgaaatccagaacaaagcacatcagaaaaagtattaacttcacagaaaagtagtgaataccctataagccagaatccagaaggcctttctgctgacaagtttgaggtgtctgcagatagttctaccagtaaaaataaagaaccaggagtggaaaggtcatccccttctaaatgcccatcattagatgataggtggtacatgcacagttgctctgggagtcttcagaatagaaactacccatctcaagaggagctcattaaggttgttgatgtggaggagcaacagctggaagagtctgggccacacgatttgacggaaacatcttacttgccaaggcaagatctagagggaaccccttacctggaatctggaatcagcctcttctctgatgaccctgaatctgatccttctgaagacagagccccagagtcagctcgtgttggcaacataccatcttcaacctctgcattgaaagttccccaattgaaagttgcagaatctgcccagagtccagctgctgctcatactactgatactgctgggtataatgcaatggaagaaagtgtgagcagggagaagccagaattgacagcttcaacagaaagggtcaacaaaagaatgtccatggtggtgtctggcctgaccccagaagaatttatgctcgtgtacaagtttgccagaaaacaccacatcactttaactaatctaattactgaagagactactcatgttgttatgaaaacagatgctgagtttgtgtgtgaacggacactgaaatattttctaggaattgcgggaggaaaatgggtagttagctatttctgggtgacccagtctattaaagaaagaaaaatgctgaatgagcatgattttgaagtcagaggagatgtggtcaatggaagaaaccaccaaggtccaaagcgagcaagagaatcccaggacagaaagatcttcagggggctagaaatctgttgctatgggcccttcaccaacatgcccacagggtgtccacccaattgtggttgtgcagccagatgcctggacagaggacaatggcttccatgcaattgggcagatgtgtgaggcacctgtggtgacccgagagtgggtgttggacagtgtagcactctaccagtgccaggagctggacacctacctgataccccagatcccccacagccactactgactgcagccagccacaggtacagagccacaggaccccaagaatgagcttacaaagtggcctttccaggccctgggagctcctctcactcttcagtccttctactgtcctggctactaaatattttatgtacatcagcctgaaaaggacttctggctatgcaagggtcccttaaagattttctgcttgaagtctcccttggaaatctgccatgagcacaaaattatggtaatttttcacctgagaagattttaaaaccatttaaacgccaccaattgagcaagatgctgattcattatttatcagccctattctttctattcaggctgttgttggcttagggctggaagcacagagtggcttggcctcaagagaatagctggtttccctaagtttacttctctaaaaccctgtgttcacaaaggcagagagtcagacccttcaatggaaggagagtgcttgggatcgattatgtgacttaaagtcagaatagtccttgggcagttctcaaatgttggagtggaacattggggaggaaattctgaggcaggtattagaaatgaaaaggaaacttgaaacctgggcatggtggctcacgcctgtaatcccagcactttgggaggccaaggtgggcagatcactggaggtcaggagttcgaaaccagcctggccaacatggtgaaaccccatctctactaaaaatacagaaattagccggtcatggtggtggacacctgtaatcccagctactcaggtggctaaggcaggagaatcacttcagcccgggaggtggaggttgcagtgagccaagatcataccacggcactccagcctgggtgacagtgagactgtggctcaaaaaaaaaaaaaaaaaaa

SEQ ID NO: 112008 - DNA, 726 bp, Homo sapiens
  Payload ID: 1950
  Gene Symbol: BRCA1
  Gene Name: breast cancer 1, early onset
  ENST ID: ENST00000461574
  CDS Start-End: 1-726
atataccttctcagtctactaggcatagcaccgttgctaccgagtgtctgtctaagaacacagaggagaatttattatcattgaagaatagcttaaatgactgcagtaaccaggtaatattggcaaaggcatctcaggaacatcaccttagtgaggaaacaaaatgttctgctagcttgttttcttcacagtgcagtgaattggaagacttgactgcaaatacaaacacccaggatcctttcttgattggttcttccaaacaaatgaggcatcagtctgaaagccagggagttggtctgagtgacaaggaattggtttcagatgatgaagaaagaggaacgggcttggaagaaaataatcaagaagagcaaagcatggattcaaacttaggtgaagcagcatctgggtgtgagagtgaaacaagcgtctctgaagactgctcagggctatcctctcagagtgacattttaaccactcagcagagggataccatgcaacataacctgataaagctccagcaggaaatggctgaactagaagctgtgttagaacagcatgggagccagccttctaacagctacccttccatcataagtgactcttctgcccttgaggacctgcgaaatccagaacaaagcacatcagaaaaagtattaacttcacagaaaagtagtgaataccctataagccagaatccagaaggcctttctgctgacaagtttgagg

SEQ ID NO: 112009 - DNA, 769 bp, Homo sapiens
  Payload ID: 1950
  Gene Symbol: BRCA1
  Gene Name: breast cancer 1, early onset
  ENST ID: ENST00000476777
  CDS Start-End: 103-769
ctggacgggggacaggctgtggggtttctcagataactgggcccctgcgctcaggaggccttcaccctctgctctgggtaaagttcattggaacagaaagaaatggatttatctgctcttcgcgttgaagaagtacaaaatgtcattaatgctatgcagaaaatcttagagtgtcccatctgtctggagttgatcaaggaacctgtctccacaaagtgtgaccacatattttgcaaattttgcatgctgaaacttctcaaccagaagaaagggccttcacagtgtcctttatgtaagaatgatataaccaaaaggagcctacaagaaagtacgagatttagtcaacttgttgaagagctattgaaaatcatttgtgcttttcagcttgacacaggtttggagtatgcaaacagctataattttgcaaaaaaggaaaataactctcctgaacatctaaaagatgaagtttctatcatccaaagtatgggctacagaaaccgtgccaaaagacttctacagagtgaacccgaaaatccttccttggaaaccagtctcagtgtccaactctctaaccttggaactgtgagaactctgaggacaaagcagcggatacaacctcaaaagacgtctgtctacattgaattgggatctgattcttctgaagataccgttaataaggcaacttattgcagtgtgggagatcaagaattgttacaaatcacccctcaaggaaccagggatgaaatcagtttggattctgcaaaaaagg

SEQ ID NO: 112010 - DNA, 582 bp, Homo sapiens
  Payload ID: 1950
  Gene Symbol: BRCA1
  Gene Name: breast cancer 1, early onset
  Uniprot ID: P38398
  ENST ID: ENST00000461798
  CDS Start-End: 114-305
gagctcgctgagacttcctggacgggggacaggctgtggggtttctcagataactgggcccctgcgctcaggaggccttcaccctctgctctggttcattggaacagaaagaaatggatttatctgctcttcgcgttgaagaagtacaaaatgtcattaatgctatgcagaaaatcttagagtgtcccatctgtctggagttgatcaaggaacctgtctccacaaagtgtgaccacatattttgcaaattttgcatgctgaaacttctcaaccagaagaaagggccttcacagtgtcctttatgagcctacaagaaagtacgagatttagtcaacttgttgaagagctattgaaaatcatttgtgcttttcagcttgacacaggtttggagtatgcaaacagctataattttgcaaaaaaggaaaataactctcctgaacatctaaaagatgaagtttctatcatccaaagtatgggctacagaaaccgtgccaaaagacttctacagagtgaacccgaaaatccttccttgcaggaaaccagtctcagtgtccaactctctaaccttggaactgtgagaac

SEQ ID NO: 112011 - DNA, 800 bp, Homo sapiens
  Payload ID: 1950
  Gene Symbol: BRCA1
  Gene Name: breast cancer 1, early onset
  ENST ID: ENST00000487825
  CDS Start-End: 1-800
gagctattgaaaatcatttgtgcttttcagcttgacacaggtttggagtatgcaaacagctataattttgcaaaaaaggaaaataactctcctgaacatctaaaagatgaagtttctatcatccaaagtatgggctacagaaaccgtgccaaaagacttctacagagtgaacccgaaaatccttccttgcaggaaaccagtctcagtgtccaactctctaaccttggaactgtgagaactctgaggacaaagcagcggatacaacctcaaaagacgtctgtctacattgaattggctgcttgtgaattttctgagacggatgtaacaaatactgaacatcatcaacccagtaataatgatttgaacaccactgagaagcgtgcagctgagaggcatccagaaaagtatcagggtgaagcagcatctgggtgtgagagtgaaacaagcgtctctgaagactgctcagggctatcctctcagagtgacattttaaccactcagcagagggataccatgcaacataacctgataaagctccagcaggaaatggctgaactagaagctgtgttagaacagcatgggagccagccttctaacagctacccttccatcataagtgactcttctgcccttgaggacctgcgaaatccagaacaaagcacatcagaaaaagcagtattaacttcacagaaaagtagtgaataccctataagccagaatccagaaggcctttctgctgacaagtttgaggtgtctgcagatagttctaccagtaaaaataaagaaccaggagtggaaag

SEQ ID NO: 112012 - DNA, 5693 bp, Homo sapiens
  Payload ID: 1950
  Gene Symbol: BRCA1
  Gene Name: breast cancer 1, early onset
  Uniprot ID: P38398
  ENST ID: ENST00000461221
  CDS Start-End: 127-318
cctctgctctgggtaaaggtagtagagtcccgggaaagggacagggggcccaagtgatgctctggggtactggcgtgggagagtggatttccgaagctgacagatggttcattggaacagaaagaaatggatttatctgctcttcgcgttgaagaagtacaaaatgtcattaatgctatgcagaaaatcttagagtgtcccatctgtctggagttgatcaaggaacctgtctccacaaagtgtgaccacatattttgcaaattttgcatgctgaaacttctcaaccagaagaaagggccttcacagtgtcctttatgagcctacaagaaagtacgagatttagtcaacttgttgaagagctattgaaaatcatttgtgcttttcagcttgacacaggtttggagtatgcaaacagctataattttgcaaaaaaggaaaataactctcctgaacatctaaaagatgaagtttctatcatccaaagtatgggctacagaaaccgtgccaaaagacttctacagagtgaacccgaaaatccttccttggaaaccagtctcagtgtccaactctctaaccttggaactgtgagaactctgaggacaaagcagcggatacaacctcaaaagacgtctgtctacattgaattgggatctgattcttctgaagataccgttaataaggcaacttattgcagtgtgggagatcaagaattgttacaaatcacccctcaaggaaccagggatgaaatcagtttggattctgcaaaaaaggctgcttgtgaattttctgagacggatgtaacaaatactgaacatcatcaacccagtaataatgatttgaacaccactgagaagcgtgcagctgagaggcatccagaaaagtatcagggtagttctgtttcaaacttgcatgtggagccatgtggcacaaatactcatgccagctcattacagcatgagaacagcagtttattactcactaaagacagaatgaatgtagaaaaggctgaattctgtaataaaagcaaacagcctggcttagcaaggagccaacataacagatgggctggaagtaaggaaacatgtaatgataggcggactcccagcacagaaaaaaaggtagatctgaatgctgatcccctgtgtgagagaaaagaatggaataagcagaaactgccatgctcagagaatcctagagatactgaagatgttccttggataacactaaatagcagcattcagaaagttaatgagtggttttccagaagtgatgaactgttaggttctgatgactcacatgatggggagtctgaatcaaatgccaaagtagctgatgtattggacgttctaaatgaggtagatgaatattctggttcttcagagaaaatagacttactggccagtgatcctcatgaggctttaatatgtaaaagtgaaagagttcactccaaatcagtagagagtaatattgaagacaaaatatttgggaaaacctatcggaagaaggcaagcctccccaacttaagccatgtaactgaaaatctaattataggagcatttgttactgagccacagataatacaagagcgtcccctcacaaataaattaaagcgtaaaaggagacctacatcaggccttcatcctgaggattttatcaagaaagcagatttggcagttcaaaagactcctgaaatgataaatcagggaactaaccaaacggagcagaatggtcaagtgatgaatattactaatagtggtcatgagaataaaacaaaaggtgattctattcagaatgagaaaaatcctaacccaatagaatcactcgaaaaagaatctgctttcaaaacgaaagctgaacctataagcagcagtataagcaatatggaactcgaattaaatatccacaattcaaaagcacctaaaaagaataggctgaggaggaagtcttctaccaggcatattcatgcgcttgaactagtagtcagtagaaatctaagcccacctaattgtactgaattgcaaattgatagttgttctagcagtgaagagataaagaaaaaaaagtacaaccaaatgccagtcaggcacagcagaaacctacaactcatggaaggtaaagaacctgcaactggagccaagaagagtaacaagccaaatgaacagacaagtaaaagacatgacagcgatactttcccagagctgaagttaacaaatgcacctggttcttttactaagtgttcaaataccagtgaacttaaagaatttgtcaatcctagccttccaagagaagaaaaagaagagaaactagaaacagttaaagtgtctaataatgctgaagaccccaaagatctcatgttaagtggagaaagggttttgcaaactgaaagatctgtagagagtagcagtatttcattggtacctggtactgattatggcactcaggaaagtatctcgttactggaagttagcactctagggaaggcaaaaacagaaccaaataaatgtgtgagtcagtgtgcagcatttgaaaaccccaagggactaattcatggttgttccaaagataatagaaatgacacagaaggctttaagtatccattgggacatgaagttaaccacagtcgggaaacaagcatagaaatggaagaaagtgaacttgatgctcagtatttgcagaatacattcaaggtttcaaagcgccagtcatttgctccgttttcaaatccaggaaatgcagaagaggaatgtgcaacattctctgcccactctgggtccttaaagaaacaaagtccaaaagtcacttttgaatgtgaacaaaaggaagaaaatcaaggaaagaatgagtctaatatcaagcctgtacagacagttaatatcactgcaggctttcctgtggttggtcagaaagataagccagttgataatgccaaatgtagtatcaaaggaggctctaggttttgtctatcatctcagttcagaggcaacgaaactggactcattactccaaataaacatggacttttacaaaacccatatcgtataccaccactttttcccatcaagtcatttgttaaaactaaatgtaagaaaaatctgctagaggaaaactttgaggaacattcaatgtcacctgaaagagaaatgggaaatgagaacattccaagtacagtgagcacaattagccgtaataacattagagaaaatgtttttaaagaagccagctcaagcaatattaatgaagtaggttccagtactaatgaagtgggctccagtattaatgaaataggttccagtgatgaaaacattcaagcagaactaggtagaaacagagggccaaaattgaatgctatgcttagattaggggttttgcaacctgaggtctataaacaaagtcttcctggaagtaattgtaagcatcctgaaataaaaaagcaagaatatgaagaagtagttcagactgttaatacagatttctctccatatctgatttcagataacttagaacagcctatgggaagtagtcatgcatctcaggtttgttctgagacacctgatgacctgttagatgatggtgaaataaaggaagatactagttttgctgaaaatgacattaaggaaagttctgctgtttttagcaaaagcgtccagaaaggagagcttagcaggagtcctagccctttcacccatacacatttggctcagggttaccgaagaggggccaagaaattagagtcctcagaagagaacttatctagtgaggatgaagagcttccctgcttccaacacttgttatttggtaaagtaaacaatataccttctcagtctactaggcatagcaccgttgctaccgagtgtctgtctaagaacacagaggagaatttattatcattgaagaatagcttaaatgactgcagtaaccaggtaatattggcaaaggcatctcaggaacatcaccttagtgaggaaacaaaatgttctgctagcttgttttcttcacagtgcagtgaattggaagacttgactgcaaatacaaacacccaggatcctttcttgattggttcttccaaacaaatgaggcatcagtctgaaagccagggagttggtctgagtgacaaggaattggtttcagatgatgaagaaagaggaacgggcttggaagaaaataatcaagaagagcaaagcatggattcaaacttaggtgaagcagcatctgggtgtgagagtgaaacaagcgtctctgaagactgctcagggctatcctctcagagtgacattttaaccactcagcagagggataccatgcaacataacctgataaagctccagcaggaaatggctgaactagaagctgtgttagaacagcatgggagccagccttctaacagctacccttccatcataagtgactcttctgcccttgaggacctgcgaaatccagaacaaagcacatcagaaaaagcagtattaacttcacagaaaagtagtgaataccctataagccagaatccagaaggcctttctgctgacaagtttgaggtgtctgcagatagttctaccagtaaaaataaagaaccaggagtggaaaggtcatccccttctaaatgcccatcattagatgataggtggtacatgcacagttgctctgggagtcttcagaatagaaactacccatctcaagaggagctcattaaggttgttgatgtggaggagcaacagctggaagagtctgggccacacgatttgacggaaacatcttacttgccaaggcaagatctagagggaaccccttacctggaatctggaatcagcctcttctctgatgaccctgaatctgatccttctgaagacagagccccagagtcagctcgtgttggcaacataccatcttcaacctctgcattgaaagttccccaattgaaagttgcagaatctgcccagagtccagctgctgctcatactactgatactgctgggtataatgcaatggaagaaagtgtgagcagggagaagccagaattgacagcttcaacagaaagggtcaacaaaagaatgtccatggtggtgtctggcctgaccccagaagaatttatgctcgtgtacaagtttgccagaaaacaccacatcactttaactaatctaattactgaagagactactcatgttgttatgaaaacagatgctgagtttgtgtgtgaacggacactgaaatattttctaggaattgcgggaggaaaatgggtagttagctatttctgggtgacccagtctattaaagaaagaaaaatgctgaatgagcatgattttgaagtcagaggagatgtggtcaatggaagaaaccaccaaggtccaaagcgagcaagagaatcccaggacagaaagatcttcagggggctagaaatctgttgctatgggcccttcaccaacatgcccacagatcaactggaatggatggtacagctgtgtggtgcttctgtggtgaaggagctttcatcattcacccttggcacaggtgtccacccaattgtggttgtgcagccagatgcctggacagaggacaatggcttccatgcaattgggcagatgtgtgaggcacctgtggtgacccgagagtgggtgttggacagtgtagcactctaccagtgccaggagctggacacctacctgataccccagatcccccacagccactactga

SEQ ID NO: 112013 - DNA, 5732 bp, Homo sapiens
  Payload ID: 1950
  Gene Symbol: BRCA1
  Gene Name: breast cancer 1, early onset
  Uniprot ID: P38398
  ENST ID: ENST00000493795
  CDS Start-End: 233-5683
acagataaattaaaactgcgactgcgcggcgtgagctcgctgagacttcctggacgggggacaggctgtggggtttctcagataactgggcccctgcgctcaggaggccttcaccctctgctctggttcattggaacagaaagaaatggatttatctgctcttcgcgttgaagaagtacaaaatgtcattaatgctatgcagaaaatcttagagtgtcccatctgattttgcatgctgaaacttctcaaccagaagaaagggccttcacagtgtcctttatgtaagaatgatataaccaaaaggagcctacaagaaagtacgagatttagtcaacttgttgaagagctattgaaaatcatttgtgcttttcagcttgacacaggtttggagtatgcaaacagctataattttgcaaaaaaggaaaataactctcctgaacatctaaaagatgaagtttctatcatccaaagtatgggctacagaaaccgtgccaaaagacttctacagagtgaacccgaaaatccttccttgcaggaaaccagtctcagtgtccaactctctaaccttggaactgtgagaactctgaggacaaagcagcggatacaacctcaaaagacgtctgtctacattgaattgggatctgattcttctgaagataccgttaataaggcaacttattgcagtgtgggagatcaagaattgttacaaatcacccctcaaggaaccagggatgaaatcagtttggattctgcaaaaaaggctgcttgtgaattttctgagacggatgtaacaaatactgaacatcatcaacccagtaataatgatttgaacaccactgagaagcgtgcagctgagaggcatccagaaaagtatcagggtagttctgtttcaaacttgcatgtggagccatgtggcacaaatactcatgccagctcattacagcatgagaacagcagtttattactcactaaagacagaatgaatgtagaaaaggctgaattctgtaataaaagcaaacagcctggcttagcaaggagccaacataacagatgggctggaagtaaggaaacatgtaatgataggcggactcccagcacagaaaaaaaggtagatctgaatgctgatcccctgtgtgagagaaaagaatggaataagcagaaactgccatgctcagagaatcctagagatactgaagatgttccttggataacactaaatagcagcattcagaaagttaatgagtggttttccagaagtgatgaactgttaggttctgatgactcacatgatggggagtctgaatcaaatgccaaagtagctgatgtattggacgttctaaatgaggtagatgaatattctggttcttcagagaaaatagacttactggccagtgatcctcatgaggctttaatatgtaaaagtgaaagagttcactccaaatcagtagagagtaatattgaagacaaaatatttgggaaaacctatcggaagaaggcaagcctccccaacttaagccatgtaactgaaaatctaattataggagcatttgttactgagccacagataatacaagagcgtcccctcacaaataaattaaagcgtaaaaggagacctacatcaggccttcatcctgaggattttatcaagaaagcagatttggcagttcaaaagactcctgaaatgataaatcagggaactaaccaaacggagcagaatggtcaagtgatgaatattactaatagtggtcatgagaataaaacaaaaggtgattctattcagaatgagaaaaatcctaacccaatagaatcactcgaaaaagaatctgctttcaaaacgaaagctgaacctataagcagcagtataagcaatatggaactcgaattaaatatccacaattcaaaagcacctaaaaagaataggctgaggaggaagtcttctaccaggcatattcatgcgcttgaactagtagtcagtagaaatctaagcccacctaattgtactgaattgcaaattgatagttgttctagcagtgaagagataaagaaaaaaaagtacaaccaaatgccagtcaggcacagcagaaacctacaactcatggaaggtaaagaacctgcaactggagccaagaagagtaacaagccaaatgaacagacaagtaaaagacatgacagcgatactttcccagagctgaagttaacaaatgcacctggttcttttactaagtgttcaaataccagtgaacttaaagaatttgtcaatcctagccttccaagagaagaaaaagaagagaaactagaaacagttaaagtgtctaataatgctgaagaccccaaagatctcatgttaagtggagaaagggttttgcaaactgaaagatctgtagagagtagcagtatttcattggtacctggtactgattatggcactcaggaaagtatctcgttactggaagttagcactctagggaaggcaaaaacagaaccaaataaatgtgtgagtcagtgtgcagcatttgaaaaccccaagggactaattcatggttgttccaaagataatagaaatgacacagaaggctttaagtatccattgggacatgaagttaaccacagtcgggaaacaagcatagaaatggaagaaagtgaacttgatgctcagtatttgcagaatacattcaaggtttcaaagcgccagtcatttgctccgttttcaaatccaggaaatgcagaagaggaatgtgcaacattctctgcccactctgggtccttaaagaaacaaagtccaaaagtcacttttgaatgtgaacaaaaggaagaaaatcaaggaaagaatgagtctaatatcaagcctgtacagacagttaatatcactgcaggctttcctgtggttggtcagaaagataagccagttgataatgccaaatgtagtatcaaaggaggctctaggttttgtctatcatctcagttcagaggcaacgaaactggactcattactccaaataaacatggacttttacaaaacccatatcgtataccaccactttttcccatcaagtcatttgttaaaactaaatgtaagaaaaatctgctagaggaaaactttgaggaacattcaatgtcacctgaaagagaaatgggaaatgagaacattccaagtacagtgagcacaattagccgtaataacattagagaaaatgtttttaaagaagccagctcaagcaatattaatgaagtaggttccagtactaatgaagtgggctccagtattaatgaaataggttccagtgatgaaaacattcaagcagaactaggtagaaacagagggccaaaattgaatgctatgcttagattaggggttttgcaacctgaggtctataaacaaagtcttcctggaagtaattgtaagcatcctgaaataaaaaagcaagaatatgaagaagtagttcagactgttaatacagatttctctccatatctgatttcagataacttagaacagcctatgggaagtagtcatgcatctcaggtttgttctgagacacctgatgacctgttagatgatggtgaaataaaggaagatactagttttgctgaaaatgacattaaggaaagttctgctgtttttagcaaaagcgtccagaaaggagagcttagcaggagtcctagccctttcacccatacacatttggctcagggttaccgaagaggggccaagaaattagagtcctcagaagagaacttatctagtgaggatgaagagcttccctgcttccaacacttgttatttggtaaagtaaacaatataccttctcagtctactaggcatagcaccgttgctaccgagtgtctgtctaagaacacagaggagaatttattatcattgaagaatagcttaaatgactgcagtaaccaggtaatattggcaaaggcatctcaggaacatcaccttagtgaggaaacaaaatgttctgctagcttgttttcttcacagtgcagtgaattggaagacttgactgcaaatacaaacacccaggatcctttcttgattggttcttccaaacaaatgaggcatcagtctgaaagccagggagttggtctgagtgacaaggaattggtttcagatgatgaagaaagaggaacgggcttggaagaaaataatcaagaagagcaaagcatggattcaaacttaggtgaagcagcatctgggtgtgagagtgaaacaagcgtctctgaagactgctcagggctatcctctcagagtgacattttaaccactcagcagagggataccatgcaacataacctgataaagctccagcaggaaatggctgaactagaagctgtgttagaacagcatgggagccagccttctaacagctacccttccatcataagtgactcttctgcccttgaggacctgcgaaatccagaacaaagcacatcagaaaaagcagtattaacttcacagaaaagtagtgaataccctataagccagaatccagaaggcctttctgctgacaagtttgaggtgtctgcagatagttctaccagtaaaaataaagaaccaggagtggaaaggtcatccccttctaaatgcccatcattagatgataggtggtacatgcacagttgctctgggagtcttcagaatagaaactacccatctcaagaggagctcattaaggttgttgatgtggaggagcaacagctggaagagtctgggccacacgatttgacggaaacatcttacttgccaaggcaagatctagagggaaccccttacctggaatctggaatcagcctcttctctgatgaccctgaatctgatccttctgaagacagagccccagagtcagctcgtgttggcaacataccatcttcaacctctgcattgaaagttccccaattgaaagttgcagaatctgcccagagtccagctgctgctcatactactgatactgctgggtataatgcaatggaagaaagtgtgagcagggagaagccagaattgacagcttcaacagaaagggtcaacaaaagaatgtccatggtggtgtctggcctgaccccagaagaatttatgctcgtgtacaagtttgccagaaaacaccacatcactttaactaatctaattactgaagagactactcatgttgttatgaaaacagatgctgagtttgtgtgtgaacggacactgaaatattttctaggaattgcgggaggaaaatgggtagttagctatttctgggtgacccagtctattaaagaaagaaaaatgctgaatgagcatgattttgaagtcagaggagatgtggtcaatggaagaaaccaccaaggtccaaagcgagcaagagaatcccaggacagaaagatcttcagggggctagaaatctgttgctatgggcccttcaccaacatgcccacagatcaactggaatggatggtacagctgtgtggtgcttctgtggtgaaggagctttcatcattcacccttggcacaggtgtccacccaattgtggttgtgcagccagatgcctggacagaggacaatggcttccatgcaattgggcagatgtgtgaggcacctgtggtgacccgagagtgggtgttggacagtgtagcactctaccagtgccaggagctggacacctacctgataccccagatcccccacagccactactgactgcagccagccacaggtacagagccacaggaccccaagaatgagctta

SEQ ID NO: 112014 - DNA, 1948 bp, Homo sapiens
  Payload ID: 1950
  Gene Symbol: BRCA1
  Gene Name: breast cancer 1, early onset
  ENST ID: ENST00000493919
  CDS Start-End: 233-1948
acagataaattaaaactgcgactgcgcggcgtgagctcgctgagacttcctggacgggggacaggctgtggggtttctcagataactgggcccctgcgctcaggaggccttcaccctctgctctggttcattggaacagaaagaaatggatttatctgctcttcgcgttgaagaagtacaaaatgtcattaatgctatgcagaaaatcttagagtgtcccatctgattttgcatgctgaaacttctcaaccagaagaaagggccttcacagtgtcctttatgtaagaatgatataaccaaaaggagcctacaagaaagtacgagatttagtcaacttgttgaagagctattgaaaatcatttgtgcttttcagcttgacacaggtttggagtatgcaaacagctataattttgcaaaaaaggaaaataactctcctgaacatctaaaagatgaagtttctatcatccaaagtatgggctacagaaaccgtgccaaaagacttctacagagtgaacccgaaaatccttccttgcaggaaaccagtctcagtgtccaactctctaaccttggaactgtgagaactctgaggacaaagcagcggatacaacctcaaaagacgtctgtctacattgaattgggatctgattcttctgaagataccgttaataaggcaacttattgcagtgtgggagatcaagaattgttacaaatcacccctcaaggaaccagggatgaaatcagtttggattctgcaaaaaaggctgcttgtgaattttctgagacggatgtaacaaatactgaacatcatcaacccagtaataatgatttgaacaccactgagaagcgtgcagctgagaggcatccagaaaagtatcagggtgaagcagcatctgggtgtgagagtgaaacaagcgtctctgaagactgctcagggctatcctctcagagtgacattttaaccactcagcagagggataccatgcaacataacctgataaagctccagcaggaaatggctgaactagaagctgtgttagaacagcatgggagccagccttctaacagctacccttccatcataagtgactcttctgcccttgaggacctgcgaaatccagaacaaagcacatcagaaaaagcagtattaacttcacagaaaagtagtgaataccctataagccagaatccagaaggcctttctgctgacaagtttgaggtgtctgcagatagttctaccagtaaaaataaagaaccaggagtggaaaggtcatccccttctaaatgcccatcattagatgataggtggtacatgcacagttgctctgggagtcttcagaatagaaactacccatctcaagaggagctcattaaggttgttgatgtggaggagcaacagctggaagagtctgggccacacgatttgacggaaacatcttacttgccaaggcaagatctagagggaaccccttacctggaatctggaatcagcctcttctctgatgaccctgaatctgatccttctgaagacagagccccagagtcagctcgtgttggcaacataccatcttcaacctctgcattgaaagttccccaattgaaagttgcagaatctgcccagagtccagctgctgctcatactactgatactgctgggtataatgcaatggaagaaagtgtgagcagggagaagccagaattgacagcttcaacagaaagggtcaacaaaagaatgtccatggtggtgtctggcctgaccccagaagaatttatgctcgtgtacaagtttgccagaaaacaccacatcactttaactaatctaattactgaagagactactcatgttgttatgaaaacagatgctgagtttgtgtgtgaacggacactgaaatattttctaggaattgcgggaggaaaatgggtagttagctatttctgggtgacccagtct

SEQ ID NO: 112015 - DNA, 5936 bp, Homo sapiens
  Payload ID: 1950
  Gene Symbol: BRCA1
  Gene Name: breast cancer 1, early onset
  Uniprot ID: P38398
  ENST ID: ENST00000471181
  CDS Start-End: 233-5887
gtaccttgatttcgtattctgagaggctgctgcttagcggtagccccttggtttccgtggcaacggaaaagcgcgggaattacagataaattaaaactgcgactgcgcggcgtgagctcgctgagacttcctggacgggggacaggctgtggggtttctcagataactgggcccctgcgctcaggaggccttcaccctctgctctgggtaaagttcattggaacagaaagaaatggatttatctgctcttcgcgttgaagaagtacaaaatgtcattaatgctatgcagaaaatcttagagtgtcccatctgtctggagttgatcaaggaacctgtctccacaaagtgtgaccacatattttgcaaattttgcatgctgaaacttctcaaccagaagaaagggccttcacagtgtcctttatgtaagaatgatataaccaaaaggagcctacaagaaagtacgagatttagtcaacttgttgaagagctattgaaaatcatttgtgcttttcagcttgacacaggtttggagtatgcaaacagctataattttgcaaaaaaggaaaataactctcctgaacatctaaaagatgaagtttctatcatccaaagtatgggctacagaaaccgtgccaaaagacttctacagagtgaacccgaaaatccttccttgcaggaaaccagtctcagtgtccaactctctaaccttggaactgtgagaactctgaggacaaagcagcggatacaacctcaaaagacgtctgtctacattgaattgggatctgattcttctgaagataccgttaataaggcaacttattgcagtgtgggagatcaagaattgttacaaatcacccctcaaggaaccagggatgaaatcagtttggattctgcaaaaaaggctgcttgtgaattttctgagacggatgtaacaaatactgaacatcatcaacccagtaataatgatttgaacaccactgagaagcgtgcagctgagaggcatccagaaaagtatcagggtagttctgtttcaaacttgcatgtggagccatgtggcacaaatactcatgccagctcattacagcatgagaacagcagtttattactcactaaagacagaatgaatgtagaaaaggctgaattctgtaataaaagcaaacagcctggcttagcaaggagccaacataacagatgggctggaagtaaggaaacatgtaatgataggcggactcccagcacagaaaaaaaggtagatctgaatgctgatcccctgtgtgagagaaaagaatggaataagcagaaactgccatgctcagagaatcctagagatactgaagatgttccttggataacactaaatagcagcattcagaaagttaatgagtggttttccagaagtgatgaactgttaggttctgatgactcacatgatggggagtctgaatcaaatgccaaagtagctgatgtattggacgttctaaatgaggtagatgaatattctggttcttcagagaaaatagacttactggccagtgatcctcatgaggctttaatatgtaaaagtgaaagagttcactccaaatcagtagagagtaatattgaagacaaaatatttgggaaaacctatcggaagaaggcaagcctccccaacttaagccatgtaactgaaaatctaattataggagcatttgttactgagccacagataatacaagagcgtcccctcacaaataaattaaagcgtaaaaggagacctacatcaggccttcatcctgaggattttatcaagaaagcagatttggcagttcaaaagactcctgaaatgataaatcagggaactaaccaaacggagcagaatggtcaagtgatgaatattactaatagtggtcatgagaataaaacaaaaggtgattctattcagaatgagaaaaatcctaacccaatagaatcactcgaaaaagaatctgctttcaaaacgaaagctgaacctataagcagcagtataagcaatatggaactcgaattaaatatccacaattcaaaagcacctaaaaagaataggctgaggaggaagtcttctaccaggcatattcatgcgcttgaactagtagtcagtagaaatctaagcccacctaattgtactgaattgcaaattgatagttgttctagcagtgaagagataaagaaaaaaaagtacaaccaaatgccagtcaggcacagcagaaacctacaactcatggaaggtaaagaacctgcaactggagccaagaagagtaacaagccaaatgaacagacaagtaaaagacatgacagcgatactttcccagagctgaagttaacaaatgcacctggttcttttactaagtgttcaaataccagtgaacttaaagaatttgtcaatcctagccttccaagagaagaaaaagaagagaaactagaaacagttaaagtgtctaataatgctgaagaccccaaagatctcatgttaagtggagaaagggttttgcaaactgaaagatctgtagagagtagcagtatttcattggtacctggtactgattatggcactcaggaaagtatctcgttactggaagttagcactctagggaaggcaaaaacagaaccaaataaatgtgtgagtcagtgtgcagcatttgaaaaccccaagggactaattcatggttgttccaaagataatagaaatgacacagaaggctttaagtatccattgggacatgaagttaaccacagtcgggaaacaagcatagaaatggaagaaagtgaacttgatgctcagtatttgcagaatacattcaaggtttcaaagcgccagtcatttgctccgttttcaaatccaggaaatgcagaagaggaatgtgcaacattctctgcccactctgggtccttaaagaaacaaagtccaaaagtcacttttgaatgtgaacaaaaggaagaaaatcaaggaaagaatgagtctaatatcaagcctgtacagacagttaatatcactgcaggctttcctgtggttggtcagaaagataagccagttgataatgccaaatgtagtatcaaaggaggctctaggttttgtctatcatctcagttcagaggcaacgaaactggactcattactccaaataaacatggacttttacaaaacccatatcgtataccaccactttttcccatcaagtcatttgttaaaactaaatgtaagaaaaatctgctagaggaaaactttgaggaacattcaatgtcacctgaaagagaaatgggaaatgagaacattccaagtacagtgagcacaattagccgtaataacattagagaaaatgtttttaaagaagccagctcaagcaatattaatgaagtaggttccagtactaatgaagtgggctccagtattaatgaaataggttccagtgatgaaaacattcaagcagaactaggtagaaacagagggccaaaattgaatgctatgcttagattaggggttttgcaacctgaggtctataaacaaagtcttcctggaagtaattgtaagcatcctgaaataaaaaagcaagaatatgaagaagtagttcagactgttaatacagatttctctccatatctgatttcagataacttagaacagcctatgggaagtagtcatgcatctcaggtttgttctgagacacctgatgacctgttagatgatggtgaaataaaggaagatactagttttgctgaaaatgacattaaggaaagttctgctgtttttagcaaaagcgtccagaaaggagagcttagcaggagtcctagccctttcacccatacacatttggctcagggttaccgaagaggggccaagaaattagagtcctcagaagagaacttatctagtgaggatgaagagcttccctgcttccaacacttgttatttggtaaagtaaacaatataccttctcagtctactaggcatagcaccgttgctaccgagtgtctgtctaagaacacagaggagaatttattatcattgaagaatagcttaaatgactgcagtaaccaggtaatattggcaaaggcatctcaggaacatcaccttagtgaggaaacaaaatgttctgctagcttgttttcttcacagtgcagtgaattggaagacttgactgcaaatacaaacacccaggatcctttcttgattggttcttccaaacaaatgaggcatcagtctgaaagccagggagttggtctgagtgacaaggaattggtttcagatgatgaagaaagaggaacgggcttggaagaaaataatcaagaagagcaaagcatggattcaaacttaggtgaagcagcatctgggtgtgagagtgaaacaagcgtctctgaagactgctcagggctatcctctcagagtgacattttaaccactcagcagagggataccatgcaacataacctgataaagctccagcaggaaatggctgaactagaagctgtgttagaacagcatgggagccagccttctaacagctacccttccatcataagtgactcttctgcccttgaggacctgcgaaatccagaacaaagcacatcagaaaaagattcgcatatacatggccaaaggaacaactccatgttttctaaaaggcctagagaacatatatcagtattaacttcacagaaaagtagtgaataccctataagccagaatccagaaggcctttctgctgacaagtttgaggtgtctgcagatagttctaccagtaaaaataaagaaccaggagtggaaaggtcatccccttctaaatgcccatcattagatgataggtggtacatgcacagttgctctgggagtcttcagaatagaaactacccatctcaagaggagctcattaaggttgttgatgtggaggagcaacagctggaagagtctgggccacacgatttgacggaaacatcttacttgccaaggcaagatctagagggaaccccttacctggaatctggaatcagcctcttctctgatgaccctgaatctgatccttctgaagacagagccccagagtcagctcgtgttggcaacataccatcttcaacctctgcattgaaagttccccaattgaaagttgcagaatctgcccagagtccagctgctgctcatactactgatactgctgggtataatgcaatggaagaaagtgtgagcagggagaagccagaattgacagcttcaacagaaagggtcaacaaaagaatgtccatggtggtgtctggcctgaccccagaagaatttatgctcgtgtacaagtttgccagaaaacaccacatcactttaactaatctaattactgaagagactactcatgttgttatgaaaacagatgctgagtttgtgtgtgaacggacactgaaatattttctaggaattgcgggaggaaaatgggtagttagctatttctgggtgacccagtctattaaagaaagaaaaatgctgaatgagcatgattttgaagtcagaggagatgtggtcaatggaagaaaccaccaaggtccaaagcgagcaagagaatcccaggacagaaagatcttcagggggctagaaatctgttgctatgggcccttcaccaacatgcccacagatcaactggaatggatggtacagctgtgtggtgcttctgtggtgaaggagctttcatcattcacccttggcacaggtgtccacccaattgtggttgtgcagccagatgcctggacagaggacaatggcttccatgcaattgggcagatgtgtgaggcacctgtggtgacccgagagtgggtgttggacagtgtagcactctaccagtgccaggagctggacacctacctgataccccagatcccccacagccactactgactgcagccagccacaggtacagagccacaggaccccaagaatgagctta

SEQ ID NO: 112016 - DNA, 779 bp, Homo sapiens
  Payload ID: 1950
  Gene Symbol: BRCA1
  Gene Name: breast cancer 1, early onset
  ENST ID: ENST00000497488
  CDS Start-End: 249-779
ggaggccttcaccctctgctctgggtaaagctgcttgtgaattttctgagacggatgtaacaaatactgaacatcatcaacccagtaataatgatttgaacaccactgagaagcgtgcagctgagaggcatccagaaaagtatcagggtagttctgtttcaaacttgcatgtggagccatgtggcacaaatactcatgccagctcattacagcatgagaacagcagtttattactcactaaagacagaatgaatgtagaaaaggctgaattctgtaataaaagcaaacagcctggcttagcaaggagccaacataacagatgggctggaagtaaggaaacatgtaatgataggcggactcccagcacagaaaaaaaggtagatctgaatgctgatcccctgtgtgagagaaaagaatggaataagcagaaactgccatgctcagagaatcctagagatactgaagatgttccttggataacactaaatagcagcattcagaaagttaatgagtggttttccagaagtgatgaactgttaggttctgatgactcacatgatggggagtctgaatcaaatgccaaagtagctgatgtattggacgttctaaatgaggtagatgaatattctggttcttcagagaaaatagacttactggccagtgatcctcatgaggctttaatatgtaaaagtgaaagagttcactccaaatcagtagagagtaatattgaagacaaaatatttgggaaaacctatcggaagaaggcaagcctccccaac

SEQ ID NO: 112017 - DNA, 1612 bp, Homo sapiens
  Payload ID: 1950
  Gene Symbol: BRCA1
  Gene Name: breast cancer 1, early onset
  ENST ID: ENST00000494123
  CDS Start-End: 194-1612
ttagcggtagccccttggtttccgtggcaacggaaaagcgcgggaattacagataaattaaaactgcgactgcgcggcgtgagctcgctgagacttcctggacgggggacaggctgtggggtttctcagataactgggcccctgcgctcaggaggccttcaccctctgctctggttcattggaacagaaagaaatggatttatctgctcttcgcgttgaagaagtacaaaatgtcattaatgctatgcagaaaatcttagagtgtcccatctgtctggagttgatcaaggaacctgtctccacaaagtgtgaccacatattttgcaaattttgcatgctgaaacttctcaaccagaagaaagggccttcacagtgtcctttatgtaagaatgatataaccaaaaggagcctacaagaaagtacgagatttagtcaacttgttgaagagctattgaaaatcatttgtgcttttcagcttgacacaggtttggagtatgcaaacagctataattttgcaaaaaaggaaaataactctcctgaacatctaaaagatgaagtttctatcatccaaagtatgggctacagaaaccgtgccaaaagacttctacagagtgaacccgaaaatccttccttgcaggaaaccagtctcagtgtccaactctctaaccttggaactgtgagaactctgaggacaaagcagcggatacaacctcaaaagacgtctgtctacattgaattgggatctgattcttctgaagataccgttaataaggcaacttattgcagtgtgggagatcaagaattgttacaaatcacccctcaaggaaccagggatgaaatcagtttggattctgcaaaaaaggctgcttgtgaattttctgagacggatgtaacaaatactgaacatcatcaacccagtaataatgatttgaacaccactgagaagcgtgcagctgagaggcatccagaaaagtatcagggtagttctgtttcaaacttgcatgtggagccatgtggcacaaatactcatgccagctcattacagcatgagaacagcagtttattactcactaaagacagaatgaatgtagaaaaggctgaattctgtaataaaagcaaacagcctggcttagcaaggagccaacataacagatgggctggaagtaaggaaacatgtaatgataggcggactcccagcacagaaaaaaaggtagatctgaatgctgatcccctgtgtgagagaaaagaatggaataagcagaaactgccatgctcagagaatcctagagatactgaagatgttccttggataacactaaatagcagcattcagaaagttaatgagtggttttccagaagtgatgaactgttaggttctgatgactcacatgatggggagtctgaatcaaatgccaaagtagctgatgtattggacgttctaaatgaggtagatgaatattctggttcttcagagaaaatagacttactggccagtgatcctcatgaggctttaatatgtaaaagtgaaagagttcactccaaatcagtagagagtaatattgaagacaaaatatttgggaaaacctatcggaagaaggcaagcctccccaac

SEQ ID NO: 112018 - DNA, 2108 bp, Homo sapiens
  Payload ID: 1950
  Gene Symbol: BRCA1
  Gene Name: breast cancer 1, early onset
  ENST ID: ENST00000470026
  CDS Start-End: 162-2108
agataactgggcccctgcgctcaggaggccttcaccctctgctctgggtaaaggtagtagagtcccgggaaagggacagggggcccaagtgatgctctggggtactggcgtgggagagtggatttccgaagctgacagatggttcattggaacagaaagaaatggatttatctgctcttcgcgttgaagaagtacaaaatgtcattaatgctatgcagaaaatcttagagtgtcccatctgtctggagttgatcaaggaacctgtctccacaaagtgtgaccacatattttgcaaattttgcatgctgaaacttctcaaccagaagaaagggccttcacagtgtcctttatgtaagaatgatataaccaaaaggagcctacaagaaagtacgagatttagtcaacttgttgaagagctattgaaaatcatttgtgcttttcagcttgacacaggtttggagtatgcaaacagctataattttgcaaaaaaggaaaataactctcctgaacatctaaaagatgaagtttctatcatccaaagtatgggctacagaaaccgtgccaaaagacttctacagagtgaacccgaaaatccttccttgcaggaaaccagtctcagtgtccaactctctaaccttggaactgtgagaactctgaggacaaagcagcggatacaacctcaaaagacgtctgtctacattgaattgggatctgattcttctgaagataccgttaataaggcaacttattgcagtgtgggagatcaagaattgttacaaatcacccctcaaggaaccagggatgaaatcagtttggattctgcaaaaaaggctgcttgtgaattttctgagacggatgtaacaaatactgaacatcatcaacccagtaataatgatttgaacaccactgagaagcgtgcagctgagaggcatccagaaaagtatcagggtagttctgtttcaaacttgcatgtggagccatgtggcacaaatactcatgccagctcattacagcatgagaacagcagtttattactcactaaagacagaatgaatgtagaaaaggctgaattctgtaataaaagcaaacagcctggcttagcaaggagccaacataacagatgggctggaagtaaggaaacatgtaatgataggcggactcccagcacagaaaaaaaggtagatctgaatgctgatcccctgtgtgagagaaaagaatggaataagcagaaactgccatgctcagagaatcctagagatactgaagatgttccttggataacactaaatagcagcattcagaaagttaatgagtggttttccagaagtgatgaactgttaggttctgatgactcacatgatggggagtctgaatcaaatgccaaagtagctgatgtattggacgttctaaatgaggtagatgaatattctggttcttcagagaaaatagacttactggccagtgatcctcatgaggctttaatatgtaaaagtgaaagagttcactccaaatcagtagagagtaatattgaagacaaaatatttgggaaaacctatcggaagaaggcaagcctccccaacttaagccatgtaactgaaaatctaattataggagcatttgttactgagccacagataatacaagagcgtcccctcacaaataaattaaagcgtaaaaggagacctacatcaggccttcatcctgaggattttatcaagaaagcagatttggcagttcaaaagactcctgaaatgataaatcagggaactaaccaaacggagcagaatggtcaagtgatgaatattactaatagtggtcatgagaataaaacaaaaggtgattctattcagaatgagaaaaatcctaacccaatagaatcactcgaaaaagaatctgctttcaaaacgaaagctgaacctataagcagcagtataagcaatatggaactcgaattaaatatccacaattcaaaagcacctaaaaagaataggctgaggaggaagtcttctaccaggcatattcatgcgcttgaactagtagtcagtagaaatctaagcccacctaattgtactgaattgcaaattgatagttgttctagcagtgaagag

SEQ ID NO: 112019 - DNA, 1495 bp, Homo sapiens
  Payload ID: 1950
  Gene Symbol: BRCA1
  Gene Name: breast cancer 1, early onset
  ENST ID: ENST00000484087
  CDS Start-End: 1-1495
gagctattgaaaatcatttgtgcttttcagcttgacacaggtttggagtatgcaaacagctataattttgcaaaaaaggaaaataactctcctgaacatctaaaagatgaagtttctatcatccaaagtatgggctacagaaaccgtgccaaaagacttctacagagtgaacccgaaaatccttccttggaaaccagtctcagtgtccaactctctaaccttggaactgtgagaactctgaggacaaagcagcggatacaacctcaaaagacgtctgtctacattgaattggctgcttgtgaattttctgagacggatgtaacaaatactgaacatcatcaacccagtaataatgatttgaacaccactgagaagcgtgcagctgagaggcatccagaaaagtatcagggtgaagcagcatctgggtgtgagagtgaaacaagcgtctctgaagactgctcagggctatcctctcagagtgacattttaaccactcagcagagggataccatgcaacataacctgataaagctccagcaggaaatggctgaactagaagctgtgttagaacagcatgggagccagccttctaacagctacccttccatcataagtgactcttctgcccttgaggacctgcgaaatccagaacaaagcacatcagaaaaagcagtattaacttcacagaaaagtagtgaataccctataagccagaatccagaaggcctttctgctgacaagtttgaggtgtctgcagatagttctaccagtaaaaataaagaaccaggagtggaaaggtcatccccttctaaatgcccatcattagatgataggtggtacatgcacagttgctctgggagtcttcagaatagaaactacccatctcaagaggagctcattaaggttgttgatgtggaggagcaacagctggaagagtctgggccacacgatttgacggaaacatcttacttgccaaggcaagatctagagggaaccccttacctggaatctggaatcagcctcttctctgatgaccctgaatctgatccttctgaagacagagccccagagtcagctcgtgttggcaacataccatcttcaacctctgcattgaaagttccccaattgaaagttgcagaatctgcccagagtccagctgctgctcatactactgatactgctgggtataatgcaatggaagaaagtgtgagcagggagaagccagaattgacagcttcaacagaaagggtcaacaaaagaatgtccatggtggtgtctggcctgaccccagaagaatttatgctcgtgtacaagtttgccagaaaacaccacatcactttaactaatctaattactgaagagactactcatgttgttatgaaaacagatgctgagtttgtgtgtgaacggacactgaaatattttctaggaattgcgggaggaaaatgggtagttagctatttctgggtgacccagtctattaaagaaagaaaaa

SEQ ID NO: 112020 - DNA, 1980 bp, Homo sapiens
  Payload ID: 1950
  Gene Symbol: BRCA1
  Gene Name: breast cancer 1, early onset
  ENST ID: ENST00000477152
  CDS Start-End: 114-1980
gctgagacttcctggacgggggacaggctgtggggtttctcagataactgggcccctgcgctcaggaggccttcaccctctgctctgggtaaagttcattggaacagaaagaaatggatttatctgctcttcgcgttgaagaagtacaaaatgtcattaatgctatgcagaaaatcttagagtgtcccatctgtctggagttgatcaaggaacctgtctccacaaagtgtgaccacatattttgcaagagcctacaagaaagtacgagatttagtcaacttgttgaagagctattgaaaatcatttgtgcttttcagcttgacacaggtttggagtatgcaaacagctataattttgcaaaaaaggaaaataactctcctgaacatctaaaagatgaagtttctatcatccaaagtatgggctacagaaaccgtgccaaaagacttctacagagtgaacccgaaaatccttccttgcaggaaaccagtctcagtgtccaactctctaaccttggaactgtgagaactctgaggacaaagcagcggatacaacctcaaaagacgtctgtctacattgaattgggatctgattcttctgaagataccgttaataaggcaacttattgcagtgtgggagatcaagaattgttacaaatcacccctcaaggaaccagggatgaaatcagtttggattctgcaaaaaaggctgcttgtgaattttctgagacggatgtaacaaatactgaacatcatcaacccagtaataatgatttgaacaccactgagaagcgtgcagctgagaggcatccagaaaagtatcagggtagttctgtttcaaacttgcatgtggagccatgtggcacaaatactcatgccagctcattacagcatgagaacagcagtttattactcactaaagacagaatgaatgtagaaaaggctgaattctgtaataaaagcaaacagcctggcttagcaaggagccaacataacagatgggctggaagtaaggaaacatgtaatgataggcggactcccagcacagaaaaaaaggtagatctgaatgctgatcccctgtgtgagagaaaagaatggaataagcagaaactgccatgctcagagaatcctagagatactgaagatgttccttggataacactaaatagcagcattcagaaagttaatgagtggttttccagaagtgatgaactgttaggttctgatgactcacatgatggggagtctgaatcaaatgccaaagtagctgatgtattggacgttctaaatgaggtagatgaatattctggttcttcagagaaaatagacttactggccagtgatcctcatgaggctttaatatgtaaaagtgaaagagttcactccaaatcagtagagagtaatattgaagacaaaatatttgggaaaacctatcggaagaaggcaagcctccccaacttaagccatgtaactgaaaatctaattataggagcatttgttactgagccacagataatacaagagcgtcccctcacaaataaattaaagcgtaaaaggagacctacatcaggccttcatcctgaggattttatcaagaaagcagatttggcagttcaaaagactcctgaaatgataaatcagggaactaaccaaacggagcagaatggtcaagtgatgaatattactaatagtggtcatgagaataaaacaaaaggtgattctattcagaatgagaaaaatcctaacccaatagaatcactcgaaaaagaatctgctttcaaaacgaaagctgaacctataagcagcagtataagcaatatggaactcgaattaaatatccacaattcaaaagcacctaaaaagaataggctgaggaggaagtcttctaccaggcatattcatgcgcttgaactagtagtcagtagaaatctaagcccacctaattgtactgaattgcaaattgatagttgttctagcagtgaag

SEQ ID NO: 112021 - DNA, 958 bp, Homo sapiens
  Payload ID: 1950
  Gene Symbol: BRCA1
  Gene Name: breast cancer 1, early onset
  ENST ID: ENST00000473961
  CDS Start-End: 1-958
ttcagcttgacacaggtttggagtatgcaaacagctataattttgcaaaaaaggaaaataactctcctgaacatctaaaagatgaagtttctatcatccaaagtatgggctacagaaaccgtgccaaaagacttctacagagtgaacccgaaaatccttccttggaaaccagtctcagtgtccaactctctaaccttggaactgtgagaactctgaggacaaagcagcggatacaacctcaaaagacgtctgtctacattgaattggctgcttgtgaattttctgagacggatgtaacaaatactgaacatcatcaacccagtaataatgatttgaacaccactgagaagcgtgcagctgagaggcatccagaaaagtatcagggtagttctgtttcaaacttgcatgtggagccatgtggcacaaatactcatgccagctcattacagcatgagaacagcagtttattactcactaaagacagaatgaatgtagaaaaggctgaattctgtaataaaagcaaacagcctggcttagcaaggagccaacataacagatgggctggaagtaaggaaacatgtaatgataggcggactcccagcacagaaaaaaaggtagatctgaatgctgatcccctgtgtgagagaaaagaatggaataagcagaaactgccatgctcagagaatcctagagatactgaagatgttccttggataacactaaatagcagcattcagaaagttaatgagtggttttccagaagtgatgaactgttaggttctgatgactcacatgatggggagtctgaatcaaatgccaaagtagctgatgtattggacgttctaaatgaggtagatgaatattctggttcttcagagaaaatagacttactggccagtgatcctcatgaggctttaatatgtaaaagtgaaagagttcactccaaatcagtagagag

SEQ ID NO: 112022 - DNA, 1584 bp, Homo sapiens
  Payload ID: 1950
  Gene Symbol: BRCA1
  Gene Name: breast cancer 1, early onset
  ENST ID: ENST00000492859
  CDS Start-End: 50-229
ggaggccttcaccctctgctctgggtaaagttcattggaacagaaagaaatggatttatctgctcttcgcgttgaagaagtacaaaatgtcattaatgctatgcagaaaatcttagagtgtcccatctgtctggagttgatcaaggaacctgtctccacaaagtgtgaccacatattttgcaaggtcttactctgttgtcccagctggagtacagtggtgcgatcatgaggcttactgttgccttgacctcctaggctcaagcgatcctatcacctcagtctcccaagtagctgggactattttgcatgctgaaacttctcaaccagaagaaagggccttcacagtgtcctttatgtaagaatgatataaccaaaaggagcctacaagaaagtacgagatttagtcaacttgttgaagagctattgaaaatcatttgtgcttttcagcttgacacaggtttggagtatgcaaacagctataattttgcaaaaaaggaaaataactctcctgaacatctaaaagatgaagtttctatcatccaaagtatgggctacagaaaccgtgccaaaagacttctacagagtgaacccgaaaatccttccttgcaggaaaccagtctcagtgtccaactctctaaccttggaactgtgagaactctgaggacaaagcagcggatacaacctcaaaagacgtctgtctacattgaattgggatctgattcttctgaagataccgttaataaggcaacttattgcagtgtgggagatcaagaattgttacaaatcacccctcaaggaaccagggatgaaatcagtttggattctgcaaaaaaggctgcttgtgaattttctgagacggatgtaacaaatactgaacatcatcaacccagtaataatgatttgaacaccactgagaagcgtgcagctgagaggcatccagaaaagtatcagggtagttctgtttcaaacttgcatgtggagccatgtggcacaaatactcatgccagctcattacagcatgagaacagcagtttattactcactaaagacagaatgaatgtagaaaaggctgaattctgtaataaaagcaaacagcctggcttagcaaggagccaacataacagatgggctggaagtaaggaaacatgtaatgataggcggactcccagcacagaaaaaaaggtagatctgaatgctgatcccctgtgtgagagaaaagaatggaataagcagaaactgccatgctcagagaatcctagagatactgaagatgttccttggataacactaaatagcagcattcagaaagttaatgagtggttttccagaagtgatgaactgttaggttctgatgactcacatgatggggagtctgaatcaaatgccaaagtagctgatgtattggacgttctaaatgaggtagatgaatattctggttcttcagagaaaatagacttactggccagtgatcctcatgaggctttaatatgtaaaagtgaaagagttcactccaaatcagtagagagtaatattgaagacaaaatatttgggaaaacctatcggaagaaggcaagcctccccaac

SEQ ID NO: 112023 - DNA, 1972 bp, Homo sapiens
  Payload ID: 1950
  Gene Symbol: BRCA1
  Gene Name: breast cancer 1, early onset
  ENST ID: ENST00000478531
  CDS Start-End: 103-1972
gacttcctggacgggggacaggctgtggggtttctcagataactgggcccctgcgctcaggaggccttcaccctctgctctggttcattggaacagaaagaaatggatttatctgctcttcgcgttgaagaagtacaaaatgtcattaatgctatgcagaaaatcttagagtgtcccatctgtctggagttgatcaaggaacctgtctccacaaagtgtgaccacatattttgcaaattttgcatgctgaaacttctcaaccagaagaaagggccttcacagtgtcctttatgtaagaatgatataaccaaaaggagcctacaagaaagtacgagatttagtcaacttgttgaagagctattgaaaatcatttgtgcttttcagcttgacacaggtttggagtatgcaaacagctataattttgcaaaaaaggaaaataactctcctgaacatctaaaagatgaagtttctatcatccaaagtatgggctacagaaaccgtgccaaaagacttctacagagtgaacccgaaaatccttccttggaaaccagtctcagtgtccaactctctaaccttggaactgtgagaactctgaggacaaagcagcggatacaacctcaaaagacgtctgtctacattgaattgggatctgattcttctgaagataccgttaataaggcaacttattgcagtgtgggagatcaagaattgttacaaatcacccctcaaggaaccagggatgaaatcagtttggattctgcaaaaaaggctgcttgtgaattttctgagacggatgtaacaaatactgaacatcatcaacccagtaataatgatttgaacaccactgagaagcgtgcagctgagaggcatccagaaaagtatcagggtgaagcagcatctgggtgtgagagtgaaacaagcgtctctgaagactgctcagggctatcctctcagagtgacattttaaccactcagcagagggataccatgcaacataacctgataaagctccagcaggaaatggctgaactagaagctgtgttagaacagcatgggagccagccttctaacagctacccttccatcataagtgactcttctgcccttgaggacctgcgaaatccagaacaaagcacatcagaaaaagcagtattaacttcacagaaaagtagtgaataccctataagccagaatccagaaggcctttctgctgacaagtttgaggtgtctgcagatagttctaccagtaaaaataaagaaccaggagtggaaaggtcatccccttctaaatgcccatcattagatgataggtggtacatgcacagttgctctgggagtcttcagaatagaaactacccatctcaagaggagctcattaaggttgttgatgtggaggagcaacagctggaagagtctgggccacacgatttgacggaaacatcttacttgccaaggcaagatctagagggaaccccttacctggaatctggaatcagcctcttctctgatgaccctgaatctgatccttctgaagacagagccccagagtcagctcgtgttggcaacataccatcttcaacctctgcattgaaagttccccaattgaaagttgcagaatctgcccagagtccagctgctgctcatactactgatactgctgggtataatgcaatggaagaaagtgtgagcagggagaagccagaattgacagcttcaacagaaagggtcaacaaaagaatgtccatggtggtgtctggcctgaccccagaagaatttatgctcgtgtacaagtttgccagaaaacaccacatcactttaactaatctaattactgaagagactactcatgttgttatgaaaacagatgctgagtttgtgtgtgaacggacactgaaatattttctaggaattgcgggaggaaaatgggtagttagctatttctgggtgacccagtctattaaagaaagaaaaa

SEQ ID NO: 112024 - DNA, 2379 bp, Homo sapiens
  Payload ID: 1950
  Gene Symbol: BRCA1
  Gene Name: breast cancer 1, early onset
  Uniprot ID: P38398
  ENST ID: ENST00000491747
  CDS Start-End: 100-2379
ttcctggacgggggacaggctgtggggtttctcagataactgggcccctgcgctcaggaggccttcaccctctgctctggttcattggaacagaaagaaatggatttatctgctcttcgcgttgaagaagtacaaaatgtcattaatgctatgcagaaaatcttagagtgtcccatctgtctggagttgatcaaggaacctgtctccacaaagtgtgaccacatattttgcaaattttgcatgctgaaacttctcaaccagaagaaagggccttcacagtgtcctttatgtaagaatgatataaccaaaaggagcctacaagaaagtacgagatttagtcaacttgttgaagagctattgaaaatcatttgtgcttttcagcttgacacaggtttggagtatgcaaacagctataattttgcaaaaaaggaaaataactctcctgaacatctaaaagatgaagtttctatcatccaaagtatgggctacagaaaccgtgccaaaagacttctacagagtgaacccgaaaatccttccttgcaggaaaccagtctcagtgtccaactctctaaccttggaactgtgagaactctgaggacaaagcagcggatacaacctcaaaagacgtctgtctacattgaattgggatctgattcttctgaagataccgttaataaggcaacttattgcagtgtgggagatcaagaattgttacaaatcacccctcaaggaaccagggatgaaatcagtttggattctgcaaaaaaggctgcttgtgaattttctgagacggatgtaacaaatactgaacatcatcaacccagtaataatgatttgaacaccactgagaagcgtgcagctgagaggcatccagaaaagtatcagggtgaagcagcatctgggtgtgagagtgaaacaagcgtctctgaagactgctcagggctatcctctcagagtgacattttaaccactcagcagagggataccatgcaacataacctgataaagctccagcaggaaatggctgaactagaagctgtgttagaacagcatgggagccagccttctaacagctacccttccatcataagtgactcttctgcccttgaggacctgcgaaatccagaacaaagcacatcagaaaaagtattaacttcacagaaaagtagtgaataccctataagccagaatccagaaggcctttctgctgacaagtttgaggtgtctgcagatagttctaccagtaaaaataaagaaccaggagtggaaaggtcatccccttctaaatgcccatcattagatgataggtggtacatgcacagttgctctgggagtcttcagaatagaaactacccatctcaagaggagctcattaaggttgttgatgtggaggagcaacagctggaagagtctgggccacacgatttgacggaaacatcttacttgccaaggcaagatctagagggaaccccttacctggaatctggaatcagcctcttctctgatgaccctgaatctgatccttctgaagacagagccccagagtcagctcgtgttggcaacataccatcttcaacctctgcattgaaagttccccaattgaaagttgcagaatctgcccagagtccagctgctgctcatactactgatactgctgggtataatgcaatggaagaaagtgtgagcagggagaagccagaattgacagcttcaacagaaagggtcaacaaaagaatgtccatggtggtgtctggcctgaccccagaagaatttatgctcgtgtacaagtttgccagaaaacaccacatcactttaactaatctaattactgaagagactactcatgttgttatgaaaacagatgctgagtttgtgtgtgaacggacactgaaatattttctaggaattgcgggaggaaaatgggtagttagctatttctgggtgacccagtctattaaagaaagaaaaatgctgaatgagcatgattttgaagtcagaggagatgtggtcaatggaagaaaccaccaaggtccaaagcgagcaagagaatcccaggacagaaagatcttcagggggctagaaatctgttgctatgggcccttcaccaacatgcccacagatcaactggaatggatggtacagctgtgtggtgcttctgtggtgaaggagctttcatcattcacccttggcacaggtgtccacccaattgtggttgtgcagccagatgcctggacagaggacaatggcttccatgcaattgggcagatgtgtgaggcacctgtggtgacccgagagtgggtgttggacagtgtagcactctaccagtgccaggagctggacacctacctgataccccagatcccccacagccactactga

SEQ ID NO: 112025 - DNA, 455 bp, Homo sapiens
  Payload ID: 1950
  Gene Symbol: BRCA1
  Gene Name: breast cancer 1, early onset
  ENST ID: ENST00000489037
  CDS Start-End: 160-455
ataactgggcccctgcgctcaggaggccttcaccctctgctctgggtaaaggtagtagagtcccgggaaagggacagggggcccaagtgatgctctggggtactggcgtgggagagtggatttccgaagctgacagatggttcattggaacagaaagaaatggatttatctgctcttcgcgttgaagaagtacaaaatgtcattaatgctatgcagaaaatcttagagtgtcccatctgtctggagttgatcaaggaacctgtctccacaaagtgtgaccacatattttgcaagagcctacaagaaagtacgagatttagtcaacttgttgaagagctattgaaaatcatttgtgcttttcagcttgacacaggtttggagtatgcaaacagctataattttgcaaaaaaggaaaataactctcctgaacatctaaaagatgaagtttctatcat

SEQ ID NO: 112026 - DNA, 563 bp, Homo sapiens
  Payload ID: 1950
  Gene Symbol: BRCA1
  Gene Name: breast cancer 1, early onset
  ENST ID: ENST00000591849
  CDS Start-End: 158-448
tttctcagataactgggcccctgcgctcaggaggccttcaccctctgctctgggtaaagcaaaagctacccacctttgcctcctgtgcctgcttctgcccagggacttaggtcctcttacaccttagagaaaggccttagcatctggtcacaggcagatgagtgacagcaagaaaacctggctgcaatatcaactggaatggatggtacagctgtgtggtgcttctgtggtgaaggagctttcatcattcacccttggcacaggtgtccacccaattgtggttgtgcagccagatgcctggacagaggacaatggcttccatgcaattgggcagatgtgtgaggcacctgtggtgacccgagagtgggtgttggacagtgtagcactctaccagtgccaggagctggacacctacctgataccccagatcccccacagccactactgactgcagccagccacaggtacagagccacaggaccccaagaatgagcttacaaagtggcctttccaggccctgggagctcctctcactcttcagtccttctactgtcctggctact

SEQ ID NO: 112027 - DNA, 781 bp, Homo sapiens
  Payload ID: 1950
  Gene Symbol: BRCA1
  Gene Name: breast cancer 1, early onset
  ENST ID: ENST00000586385
  CDS Start-End: 145-666
tttctcagataactgggcccctgcgctcaggaggccttcaccctctgctctgggtaaaggtagtagagtcccgggaaagggacagggggcccaagtgatgctctggggtactggcgtgggagagtggatttccgaagctgacagatggatgctgagtttgtgtgtgaacggacactgaaatattttctaggaattgcgggaggaaaatgggtagttagctatttctgggtgacccagtctattaaagaaagaaaaatgctgaatgagcatgattttgaagtcagaggagatgtggtcaatggaagaaaccaccaaggtccaaagcgagcaagagaatcccaggacagaaagatcttcagggggctagaaatctgttgctatgggcccttcaccaacatgcccacagatcaactggaatggatggtacagctgtgtggtgcttctgtggtgaaggagctttcatcattcacccttggcacaggtgtccacccaattgtggttgtgcagccagatgcctggacagaggacaatggcttccatgcaattgggcagatgtgtgaggcacctgtggtgacccgagagtgggtgttggacagtgtagcactctaccagtgccaggagctggacacctacctgataccccagatcccccacagccactactgactgcagccagccacaggtacagagccacaggaccccaagaatgagcttacaaagtggcctttccaggccctgggagctcctctcactcttcagtccttctactgtcctggctact

SEQ ID NO: 112028 - DNA, 1282 bp, Homo sapiens
  Payload ID: 1950
  Gene Symbol: BRCA1
  Gene Name: breast cancer 1, early onset
  ENST ID: ENST00000591534
  CDS Start-End: 103-1167
tttctcagataactgggcccctgcgctcaggaggccttcaccctctgctctgggtaaaggtcatccccttctaaatgcccatcattagatgataggtggtacatgcacagttgctctgggagtcttcagaatagaaactacccatctcaagaggagctcattaaggttgttgatgtggaggagcaacagctggaagagtctgggccacacgatttgacggaaacatcttacttgccaaggcaagatctagagggaaccccttacctggaatctggaatcagcctcttctctgatgaccctgaatctgatccttctgaagacagagccccagagtcagctcgtgttggcaacataccatcttcaacctctgcattgaaagttccccaattgaaagttgcagaatctgcccagagtccagctgctgctcatactactgatactgctgggtataatgcaatggaagaaagtgtgagcagggagaagccagaattgacagcttcaacagaaagggtcaacaaaagaatgtccatggtggtgtctggcctgaccccagaagaatttatgctcgtgtacaagtttgccagaaaacaccacatcactttaactaatctaattactgaagagactactcatgttgttatgaaaacagatgctgagtttgtgtgtgaacggacactgaaatattttctaggaattgcgggaggaaaatgggtagttagctatttctgggtgacccagtctattaaagaaagaaaaatgctgaatgagcatgattttgaagtcagaggagatgtggtcaatggaagaaaccaccaaggtccaaagcgagcaagagaatcccaggacagaaagatcttcagggggctagaaatctgttgctatgggcccttcaccaacatgcccacagatcaactggaatggatggtacagctgtgtggtgcttctgtggtgaaggagctttcatcattcacccttggcacaggtgtccacccaattgtggttgtgcagccagatgcctggacagaggacaatggcttccatgcaattgggcagatgtgtgaggcacctgtggtgacccgagagtgggtgttggacagtgtagcactctaccagtgccaggagctggacacctacctgataccccagatcccccacagccactactgactgcagccagccacaggtacagagccacaggaccccaagaatgagcttacaaagtggcctttccaggccctgggagctcctctcactcttcagtccttctactgtcctggctact

SEQ ID NO: 112029 - DNA, 718 bp, Homo sapiens
  Payload ID: 1950
  Gene Symbol: BRCA1
  Gene Name: breast cancer 1, early onset
  ENST ID: ENST00000618469
  CDS Start-End: 648-718
gctgagacttcctggacgggggacaggctgtggggtttctcagataactgggcccctgcgctcaggaggccttcaccctctgctctgggtaaaggtagtagagtcccgggaaagggacagggggcccaagtgatgctctggggtactggcgtgggagagtggatttccgaagctgacagatgggtattctttgacggggggtaggggcggaacctgagaggcgtaaggcgttgtgaaccctggggaggggggcagtttgtaggtcgcgagggaagcgctgaggatcaggaagggggcactgagtgtccgtgggggaatcctcgtgataggaactggaatatgccttgagggggacactatgtctttaaaaacgtcggctggtcatgaggtcaggagttccagaccagcctgaccaacgtggtgaaactccgtctctactaaaaatacaaaaattagccgggcgtggtgccgctccagctactcaggaggctgaggcaggagaatcgctagaacccgggaggcggaggttgcagtgagccgagatcgcgccattgcactccagcctgggcgacagagcgagactgtctcaaaacaaaacaaaacaaaacaaaacaaaaaacaccggctgttcattggaacagaaagaaatggatttatctgctcttcgcgttgaagaagtacaaaatgtcattaatgctatgcagaaaatcttagagtg

SEQ ID NO: 112030 - DNA, 2534 bp, Homo sapiens
  Payload ID: 1950
  Gene Symbol: BRCA1
  Gene Name: breast cancer 1, early onset
  ENST ID: ENST00000634433
  CDS Start-End: 140-2534
aaagcgtgggaattacagataaattaaaactgtggaacccctttcctcggctgccgccaaggtgttcggtccttccgaggaagctaaggccgcgttggggtgagaccctcacttcatccgttcattggaacagaaagaaatggatttatctgctcttcgcgttgaagaagtacaaaatgtcattaatgctatgcagaaaatcttagagtgtcccatctgtctggagttgatcaaggaacctgtctccacaaagtgtgaccacatattttgcaaattttgcatgctgaaacttctcaaccagaagaaagggccttcacagtgtcctttatgtaagaatgatataaccaaaaggagcctacaagaaagtacgagatttagtcaacttgttgaagagctattgaaaatcatttgtgcttttcagcttgacacaggtttggagtatgcaaacagctataattttgcaaaaaaggaaaataactctcctgaacatctaaaagatgaagtttctatcatccaaagtatgggctacagaaaccgtgccaaaagacttctacagagtgaacccgaaaatccttccttgcaggaaaccagtctcagtgtccaactctctaaccttggaactgtgagaactctgaggacaaagcagcggatacaacctcaaaagacgtctgtctacattgaattggctgcttgtgaattttctgagacggatgtaacaaatactgaacatcatcaacccagtaataatgatttgaacaccactgagaagcgtgcagctgagaggcatccagaaaagtatcagggtagttctgtttcaaacttgcatgtggagccatgtggcacaaatactcatgccagctcattacagcatgagaacagcagtttattactcactaaagacagaatgaatgtagaaaaggctgaattctgtaataaaagcaaacagcctggcttagcaaggagccaacataacagatgggctggaagtaaggaaacatgtaatgataggcggactcccagcacagaaaaaaaggtagatctgaatgctgatcccctgtgtgagagaaaagaatggaataagcagaaactgccatgctcagagaatcctagagatactgaagatgttccttggataacactaaatagcagcattcagaaagttaatgagtggttttccagaagtgatgaactgttaggttctgatgactcacatgatggggagtctgaatcaaatgccaaagtagctgatgtattggacgttctaaatgaggtagatgaatattctggttcttcagagaaaatagacttactggccagtgatcctcatgaggctttaatatgtaaaagtgaaagagttcactccaaatcagtagagagtaatattgaagacaaaatatttgggaaaacctatcggaagaaggcaagcctccccaacttaagccatgtaactgaaaatctaattataggagcatttgttactgagccacagataatacaagagcgtcccctcacaaataaattaaagcgtaaaaggagacctacatcaggccttcatcctgaggattttatcaagaaagcagatttggcagttcaaaagactcctgaaatgataaatcagggaactaaccaaacggagcagaatggtcaagtgatgaatattactaatagtggtcatgagaataaaacaaaaggtgattctattcagaatgagaaaaatcctaacccaatagaatcactcgaaaaagaatctgctttcaaaacgaaagctgaacctataagcagcagtataagcaatatggaactcgaattaaatatccacaattcaaaagcacctaaaaagaataggctgaggaggaagtcttctaccaggcatattcatgcgcttgaactagtagtcagtagaaatctaagcccacctaattgtactgaattgcaaattgatagttgttctagcagtgaagagataaagaaaaaaaagtacaaccaaatgccagtcaggcacagcagaaacctacaactcatggaaggtaaagaacctgcaactggagccaagaagagtaacaagccaaatgaacagacaagtaaaagacatgacagcgatactttcccagagctgaagttaacaaatgcacctggttcttttactaagtgttcaaataccagtgaacttaaagaatttgtcaatcctagccttccaagagaagaaaaagaagagaaactagaaacagttaaagtgtctaataatgctgaagaccccaaagatctcatgttaagtggagaaagggttttgcaaactgaaagatctgtagagagtagcagtatttcattggtacctggtactgattatggcactcaggaaagtatctcgttactggaagttagcactctagggaaggcaaaaacagaaccaaataaatgtgtgagtcagtgtgcagcatttgaaaaccccaagggactaattcatggttgttccaaagataatagaaatgacacagaaggctttaagtatccattgggacatgaagttaaccaca

SEQ ID NO: 112031 - DNA, 11986 bp, Homo sapiens
  Payload ID: 1951
  Gene Symbol: BRCA2
  Gene Name: breast cancer 2, early onset
  Uniprot ID: P51587
  ENST ID: ENST00000380152
  CDS Start-End: 234-10490
gggcttgtggcgcgagcttctgaaactaggcggcagaggcggagccgctgtggcactgctgcgcctctgctgcgcctcgggtgtcttttgcggcggtgggtcgccgccgggagaagcgtgaggggacagatttgtgaccggcgcggtttttgtcagcttactccggccaaaaaagaactgcacctctggagcggacttatttaccaagcattggaggaatatcgtaggtaaaaatgcctattggatccaaagagaggccaacattttttgaaatttttaagacacgctgcaacaaagcagatttaggaccaataagtcttaattggtttgaagaactttcttcagaagctccaccctataattctgaacctgcagaagaatctgaacataaaaacaacaattacgaaccaaacctatttaaaactccacaaaggaaaccatcttataatcagctggcttcaactccaataatattcaaagagcaagggctgactctgccgctgtaccaatctcctgtaaaagaattagataaattcaaattagacttaggaaggaatgttcccaatagtagacataaaagtcttcgcacagtgaaaactaaaatggatcaagcagatgatgtttcctgtccacttctaaattcttgtcttagtgaaagtcctgttgttctacaatgtacacatgtaacaccacaaagagataagtcagtggtatgtgggagtttgtttcatacaccaaagtttgtgaagggtcgtcagacaccaaaacatatttctgaaagtctaggagctgaggtggatcctgatatgtcttggtcaagttctttagctacaccacccacccttagttctactgtgctcatagtcagaaatgaagaagcatctgaaactgtatttcctcatgatactactgctaatgtgaaaagctatttttccaatcatgatgaaagtctgaagaaaaatgatagatttatcgcttctgtgacagacagtgaaaacacaaatcaaagagaagctgcaagtcatggatttggaaaaacatcagggaattcatttaaagtaaatagctgcaaagaccacattggaaagtcaatgccaaatgtcctagaagatgaagtatatgaaacagttgtagatacctctgaagaagatagtttttcattatgtttttctaaatgtagaacaaaaaatctacaaaaagtaagaactagcaagactaggaaaaaaattttccatgaagcaaacgctgatgaatgtgaaaaatctaaaaaccaagtgaaagaaaaatactcatttgtatctgaagtggaaccaaatgatactgatccattagattcaaatgtagcaaatcagaagccctttgagagtggaagtgacaaaatctccaaggaagttgtaccgtctttggcctgtgaatggtctcaactaaccctttcaggtctaaatggagcccagatggagaaaatacccctattgcatatttcttcatgtgaccaaaatatttcagaaaaagacctattagacacagagaacaaaagaaagaaagattttcttacttcagagaattctttgccacgtatttctagcctaccaaaatcagagaagccattaaatgaggaaacagtggtaaataagagagatgaagagcagcatcttgaatctcatacagactgcattcttgcagtaaagcaggcaatatctggaacttctccagtggcttcttcatttcagggtatcaaaaagtctatattcagaataagagaatcacctaaagagactttcaatgcaagtttttcaggtcatatgactgatccaaactttaaaaaagaaactgaagcctctgaaagtggactggaaatacatactgtttgctcacagaaggaggactccttatgtccaaatttaattgataatggaagctggccagccaccaccacacagaattctgtagctttgaagaatgcaggtttaatatccactttgaaaaagaaaacaaataagtttatttatgctatacatgatgaaacatcttataaaggaaaaaaaataccgaaagaccaaaaatcagaactaattaactgttcagcccagtttgaagcaaatgcttttgaagcaccacttacatttgcaaatgctgattcaggtttattgcattcttctgtgaaaagaagctgttcacagaatgattctgaagaaccaactttgtccttaactagctcttttgggacaattctgaggaaatgttctagaaatgaaacatgttctaataatacagtaatctctcaggatcttgattataaagaagcaaaatgtaataaggaaaaactacagttatttattaccccagaagctgattctctgtcatgcctgcaggaaggacagtgtgaaaatgatccaaaaagcaaaaaagtttcagatataaaagaagaggtcttggctgcagcatgtcacccagtacaacattcaaaagtggaatacagtgatactgactttcaatcccagaaaagtcttttatatgatcatgaaaatgccagcactcttattttaactcctacttccaaggatgttctgtcaaacctagtcatgatttctagaggcaaagaatcatacaaaatgtcagacaagctcaaaggtaacaattatgaatctgatgttgaattaaccaaaaatattcccatggaaaagaatcaagatgtatgtgctttaaatgaaaattataaaaacgttgagctgttgccacctgaaaaatacatgagagtagcatcaccttcaagaaaggtacaattcaaccaaaacacaaatctaagagtaatccaaaaaaatcaagaagaaactacttcaatttcaaaaataactgtcaatccagactctgaagaacttttctcagacaatgagaataattttgtcttccaagtagctaatgaaaggaataatcttgctttaggaaatactaaggaacttcatgaaacagacttgacttgtgtaaacgaacccattttcaagaactctaccatggttttatatggagacacaggtgataaacaagcaacccaagtgtcaattaaaaaagatttggtttatgttcttgcagaggagaacaaaaatagtgtaaagcagcatataaaaatgactctaggtcaagatttaaaatcggacatctccttgaatatagataaaataccagaaaaaaataatgattacatgaacaaatgggcaggactcttaggtccaatttcaaatcacagttttggaggtagcttcagaacagcttcaaataaggaaatcaagctctctgaacataacattaagaagagcaaaatgttcttcaaagatattgaagaacaatatcctactagtttagcttgtgttgaaattgtaaataccttggcattagataatcaaaagaaactgagcaagcctcagtcaattaatactgtatctgcacatttacagagtagtgtagttgtttctgattgtaaaaatagtcatataacccctcagatgttattttccaagcaggattttaattcaaaccataatttaacacctagccaaaaggcagaaattacagaactttctactatattagaagaatcaggaagtcagtttgaatttactcagtttagaaaaccaagctacatattgcagaagagtacatttgaagtgcctgaaaaccagatgactatcttaaagaccacttctgaggaatgcagagatgctgatcttcatgtcataatgaatgccccatcgattggtcaggtagacagcagcaagcaatttgaaggtacagttgaaattaaacggaagtttgctggcctgttgaaaaatgactgtaacaaaagtgcttctggttatttaacagatgaaaatgaagtggggtttaggggcttttattctgctcatggcacaaaactgaatgtttctactgaagctctgcaaaaagctgtgaaactgtttagtgatattgagaatattagtgaggaaacttctgcagaggtacatccaataagtttatcttcaagtaaatgtcatgattctgttgtttcaatgtttaagatagaaaatcataatgataaaactgtaagtgaaaaaaataataaatgccaactgatattacaaaataatattgaaatgactactggcacttttgttgaagaaattactgaaaattacaagagaaatactgaaaatgaagataacaaatatactgctgccagtagaaattctcataacttagaatttgatggcagtgattcaagtaaaaatgatactgtttgtattcataaagatgaaacggacttgctatttactgatcagcacaacatatgtcttaaattatctggccagtttatgaaggagggaaacactcagattaaagaagatttgtcagatttaacttttttggaagttgcgaaagctcaagaagcatgtcatggtaatacttcaaataaagaacagttaactgctactaaaacggagcaaaatataaaagattttgagacttctgatacattttttcagactgcaagtgggaaaaatattagtgtcgccaaagagtcatttaataaaattgtaaatttctttgatcagaaaccagaagaattgcataacttttccttaaattctgaattacattctgacataagaaagaacaaaatggacattctaagttatgaggaaacagacatagttaaacacaaaatactgaaagaaagtgtcccagttggtactggaaatcaactagtgaccttccagggacaacccgaacgtgatgaaaagatcaaagaacctactctattgggttttcatacagctagcgggaaaaaagttaaaattgcaaaggaatctttggacaaagtgaaaaacctttttgatgaaaaagagcaaggtactagtgaaatcaccagttttagccatcaatgggcaaagaccctaaagtacagagaggcctgtaaagaccttgaattagcatgtgagaccattgagatcacagctgccccaaagtgtaaagaaatgcagaattctctcaataatgataaaaaccttgtttctattgagactgtggtgccacctaagctcttaagtgataatttatgtagacaaactgaaaatctcaaaacatcaaaaagtatctttttgaaagttaaagtacatgaaaatgtagaaaaagaaacagcaaaaagtcctgcaacttgttacacaaatcagtccccttattcagtcattgaaaattcagccttagctttttacacaagttgtagtagaaaaacttctgtgagtcagacttcattacttgaagcaaaaaaatggcttagagaaggaatatttgatggtcaaccagaaagaataaatactgcagattatgtaggaaattatttgtatgaaaataattcaaacagtactatagctgaaaatgacaaaaatcatctctccgaaaaacaagatacttatttaagtaacagtagcatgtctaacagctattcctaccattctgatgaggtatataatgattcaggatatctctcaaaaaataaacttgattctggtattgagccagtattgaagaatgttgaagatcaaaaaaacactagtttttccaaagtaatatccaatgtaaaagatgcaaatgcatacccacaaactgtaaatgaagatatttgcgttgaggaacttgtgactagctcttcaccctgcaaaaataaaaatgcagccattaaattgtccatatctaatagtaataattttgaggtagggccacctgcatttaggatagccagtggtaaaatcgtttgtgtttcacatgaaacaattaaaaaagtgaaagacatatttacagacagtttcagtaaagtaattaaggaaaacaacgagaataaatcaaaaatttgccaaacgaaaattatggcaggttgttacgaggcattggatgattcagaggatattcttcataactctctagataatgatgaatgtagcacgcattcacataaggtttttgctgacattcagagtgaagaaattttacaacataaccaaaatatgtctggattggagaaagtttctaaaatatcaccttgtgatgttagtttggaaacttcagatatatgtaaatgtagtatagggaagcttcataagtcagtctcatctgcaaatacttgtgggatttttagcacagcaagtggaaaatctgtccaggtatcagatgcttcattacaaaacgcaagacaagtgttttctgaaatagaagatagtaccaagcaagtcttttccaaagtattgtttaaaagtaacgaacattcagaccagctcacaagagaagaaaatactgctatacgtactccagaacatttaatatcccaaaaaggcttttcatataatgtggtaaattcatctgctttctctggatttagtacagcaagtggaaagcaagtttccattttagaaagttccttacacaaagttaagggagtgttagaggaatttgatttaatcagaactgagcatagtcttcactattcacctacgtctagacaaaatgtatcaaaaatacttcctcgtgttgataagagaaacccagagcactgtgtaaactcagaaatggaaaaaacctgcagtaaagaatttaaattatcaaataacttaaatgttgaaggtggttcttcagaaaataatcactctattaaagtttctccatatctctctcaatttcaacaagacaaacaacagttggtattaggaaccaaagtgtcacttgttgagaacattcatgttttgggaaaagaacaggcttcacctaaaaacgtaaaaatggaaattggtaaaactgaaactttttctgatgttcctgtgaaaacaaatatagaagtttgttctacttactccaaagattcagaaaactactttgaaacagaagcagtagaaattgctaaagcttttatggaagatgatgaactgacagattctaaactgccaagtcatgccacacattctctttttacatgtcccgaaaatgaggaaatggttttgtcaaattcaagaattggaaaaagaagaggagagccccttatcttagtgggagaaccctcaatcaaaagaaacttattaaatgaatttgacaggataatagaaaatcaagaaaaatccttaaaggcttcaaaaagcactccagatggcacaataaaagatcgaagattgtttatgcatcatgtttctttagagccgattacctgtgtaccctttcgcacaactaaggaacgtcaagagatacagaatccaaattttaccgcacctggtcaagaatttctgtctaaatctcatttgtatgaacatctgactttggaaaaatcttcaagcaatttagcagtttcaggacatccattttatcaagtttctgctacaagaaatgaaaaaatgagacacttgattactacaggcagaccaaccaaagtctttgttccaccttttaaaactaaatcacattttcacagagttgaacagtgtgttaggaatattaacttggaggaaaacagacaaaagcaaaacattgatggacatggctctgatgatagtaaaaataagattaatgacaatgagattcatcagtttaacaaaaacaactccaatcaagcagtagctgtaactttcacaaagtgtgaagaagaacctttagatttaattacaagtcttcagaatgccagagatatacaggatatgcgaattaagaagaaacaaaggcaacgcgtctttccacagccaggcagtctgtatcttgcaaaaacatccactctgcctcgaatctctctgaaagcagcagtaggaggccaagttccctctgcgtgttctcataaacagctgtatacgtatggcgtttctaaacattgcataaaaattaacagcaaaaatgcagagtcttttcagtttcacactgaagattattttggtaaggaaagtttatggactggaaaaggaatacagttggctgatggtggatggctcataccctccaatgatggaaaggctggaaaagaagaattttatagggctctgtgtgacactccaggtgtggatccaaagcttatttctagaatttgggtttataatcactatagatggatcatatggaaactggcagctatggaatgtgcctttcctaaggaatttgctaatagatgcctaagcccagaaagggtgcttcttcaactaaaatacagatatgatacggaaattgatagaagcagaagatcggctataaaaaagataatggaaagggatgacacagctgcaaaaacacttgttctctgtgtttctgacataatttcattgagcgcaaatatatctgaaacttctagcaataaaactagtagtgcagatacccaaaaagtggccattattgaacttacagatgggtggtatgctgttaaggcccagttagatcctcccctcttagctgtcttaaagaatggcagactgacagttggtcagaagattattcttcatggagcagaactggtgggctctcctgatgcctgtacacctcttgaagccccagaatctcttatgttaaagatttctgctaacagtactcggcctgctcgctggtataccaaacttggattctttcctgaccctagaccttttcctctgcccttatcatcgcttttcagtgatggaggaaatgttggttgtgttgatgtaattattcaaagagcataccctatacagtggatggagaagacatcatctggattatacatatttcgcaatgaaagagaggaagaaaaggaagcagcaaaatatgtggaggcccaacaaaagagactagaagccttattcactaaaattcaggaggaatttgaagaacatgaagaaaacacaacaaaaccatatttaccatcacgtgcactaacaagacagcaagttcgtgctttgcaagatggtgcagagctttatgaagcagtgaagaatgcagcagacccagcttaccttgagggttatttcagtgaagagcagttaagagccttgaataatcacaggcaaatgttgaatgataagaaacaagctcagatccagttggaaattaggaaggccatggaatctgctgaacaaaaggaacaaggtttatcaagggatgtcacaaccgtgtggaagttgcgtattgtaagctattcaaaaaaagaaaaagattcagttatactgagtatttggcgtccatcatcagatttatattctctgttaacagaaggaaagagatacagaatttatcatcttgcaacttcaaaatctaaaagtaaatctgaaagagctaacatacagttagcagcgacaaaaaaaactcagtatcaacaactaccggtttcagatgaaattttatttcagatttaccagccacgggagccccttcacttcagcaaatttttagatccagactttcagccatcttgttctgaggtggacctaataggatttgtcgtttctgttgtgaaaaaaacaggacttgcccctttcgtctatttgtcagacgaatgttacaatttactggcaataaagttttggatagaccttaatgaggacattattaagcctcatatgttaattgctgcaagcaacctccagtggcgaccagaatccaaatcaggccttcttactttatttgctggagatttttctgtgttttctgctagtccaaaagagggccactttcaagagacattcaacaaaatgaaaaatactgttgagaatattgacatactttgcaatgaagcagaaaacaagcttatgcatatactgcatgcaaatgatcccaagtggtccaccccaactaaagactgtacttcagggccgtacactgctcaaatcattcctggtacaggaaacaagcttctgatgtcttctcctaattgtgagatatattatcaaagtcctttatcactttgtatggccaaaaggaagtctgtttccacacctgtctcagcccagatgacttcaaagtcttgtaaaggggagaaagagattgatgaccaaaagaactgcaaaaagagaagagccttggatttcttgagtagactgcctttacctccacctgttagtcccatttgtacatttgtttctccggctgcacagaaggcatttcagccaccaaggagttgtggcaccaaatacgaaacacccataaagaaaaaagaactgaattctcctcagatgactccatttaaaaaattcaatgaaatttctcttttggaaagtaattcaatagctgacgaagaacttgcattgataaatacccaagctcttttgtctggttcaacaggagaaaaacaatttatatctgtcagtgaatccactaggactgctcccaccagttcagaagattatctcagactgaaacgacgttgtactacatctctgatcaaagaacaggagagttcccaggccagtacggaagaatgtgagaaaaataagcaggacacaattacaactaaaaaatatatctaagcatttgcaaaggcgacaataaattattgacgcttaacctttccagtttataagactggaatataatttcaaaccacacattagtacttatgttgcacaatgagaaaagaaattagtttcaaatttacctcagcgtttgtgtatcgggcaaaaatcgttttgcccgattccgtattggtatacttttgcttcagttgcatatcttaaaactaaatgtaatttattaactaatcaagaaaaacatctttggctgagctcggtggctcatgcctgtaatcccaacactttgagaagctgaggtgggaggagtgcttgaggccaggagttcaagaccagcctgggcaacatagggagacccccatctttacaaagaaaaaaaaaaggggaaaagaaaatcttttaaatctttggatttgatcactacaagtattattttacaagtgaaataaacataccattttcttttagattgtgtcattaaatggaatgaggtctcttagtacagttattttgatgcagataattccttttagtttagctactattttaggggattttttttagaggtaactcactatgaaatagttctccttaatgcaaatatgttggttctgctatagttccatcctgttcaaaagtcaggatgaatatgaagagtggtgtttccttttgagcaattcttcatccttaagtcagcatgattataagaaaaatagaaccctcagtgtaactctaattcctttttactattccagtgtgatctctgaaattaaattacttcaactaaaaattcaaatactttaaatcagaagatttcatagttaatttattttttttttcaacaaaatggtcatccaaactcaaacttgagaaaatatcttgctttcaaattggcactgattctgcctgctttatttttagcgctatcacaggacccagagcctatgcccttttaaacttaccacaaaagcagaagattaattcaatttaagatgatactctcatttgttacgtcctttttttttttttttggagatggagtcttgctttgtcgcccatgctggagtgcagtggcatgatcctggctcactgcagcctccacttcccgggttcacgtaattctcccacctcaagcctccctagtagctgggattacagggacgcaccaccatgcccagctaatttttgcatttttagtagagactgggttttaccatgttggccaagctggtctcaaactcctgatgtcaggtgatccatctgcctcagcctcccaaagtgctgggattataggcgtgagccactgtgcccggccaatatttgttactttcttaggtttaatagagaaaagggataaaacatttctaactgggagttaattgcatggagaaggtcttaaatcagatgttttaatgccttaaatgtctgtataatatcatgttttcaaatctaattataaatacgtttaaagccaagaataaatcttttaaaaaatt

SEQ ID NO: 112032 - DNA, 495 bp, Homo sapiens
  Payload ID: 1951
  Gene Symbol: BRCA2
  Gene Name: breast cancer 2, early onset
  ENST ID: ENST00000528762
  CDS Start-End: 1-195
tcatctggattatacatatttcgcaatgaaagagaggaagaaaaggaagcagcaaaatatgtggaggcccaacaaaagagactagaagccttattcactaaaattcaggaggaatttgaagaacatgaagttacttcctccactgaagtcttgaaccccccaaagtcatccatgagggttggaatcaacttctgaaaacacaacaaaaccatatttaccatcacgtgcactaacaagacagcaagttcgtgctttgcaagatggtgcagagctttatgaagcagtgaagaatgcagcagacccagcttaccttgagggttatttcagtgaagagcagttaagagccttgaataatcacaggcaaatgttgaatgataagaaacaagctcagatccagttggaaattaggaaggccatggaatctgctgaacaaaaggaacaaggtttatcaagggatgtcacaaccgtgtggaagttgcgtattgtaagctattc

SEQ ID NO: 112033 - DNA, 842 bp, Homo sapiens
  Payload ID: 1951
  Gene Symbol: BRCA2
  Gene Name: breast cancer 2, early onset
  ENST ID: ENST00000470094
  CDS Start-End: 1-560
aatctaaaagtaaatctgaaagagctaacatacagttagcagcgacaaaaaaaactcagtatcaacaactaccggtttcagatgaaattttatttcagatttaccagccacgggagccccttcacttcagcaaatttttagatccagactttcagccatcttgttctgaggtggacctaataggatttgtcgtttctgttgtgaaaaaaacaggacttgcccctttcgtctatttgtcagacgaatgttacaatttactggcaataaagttttggatagaccttaatgaggacattattaagcctcatatgttaattgctgcaagcaacctccagtggcgaccagaatccaaatcaggccttcttactttatttgctggagatttttctgtgttttctgctagtccaaaagagggccactttcaagagacattcaacaaaatgaaaaatactgttgagagacagagtcttgctttgtcacccccaggctggagtacaatagcacaatctcggatcactgcagtgtctgcctcctgggctcaagcgattctcgtgccttagcctcccaagtagctgggactacagaatattgacatactttgcaatgaagcagaaaacaagcttatgcatatactgcatgcaaatgatcccaagtggtccaccccaactaaagactgtacttcagggccgtacactgctcaaatcattcctggtacaggaaacaagcttctgatgtcttctcctaattgtgagatatattatcaaagtcctttatcactttgtatggccaaaaggaagtctgtttccacacctgtctcagcccagatgacttcaaagtcttgt

SEQ ID NO: 112034 - DNA, 10984 bp, Homo sapiens
  Payload ID: 1951
  Gene Symbol: BRCA2
  Gene Name: breast cancer 2, early onset
  Uniprot ID: P51587
  ENST ID: ENST00000544455
  CDS Start-End: 228-10484
gtggcgcgagcttctgaaactaggcggcagaggcggagccgctgtggcactgctgcgcctctgctgcgcctcgggtgtcttttgcggcggtgggtcgccgccgggagaagcgtgaggggacagatttgtgaccggcgcggtttttgtcagcttactccggccaaaaaagaactgcacctctggagcggacttatttaccaagcattggaggaatatcgtaggtaaaaatgcctattggatccaaagagaggccaacattttttgaaatttttaagacacgctgcaacaaagcagatttaggaccaataagtcttaattggtttgaagaactttcttcagaagctccaccctataattctgaacctgcagaagaatctgaacataaaaacaacaattacgaaccaaacctatttaaaactccacaaaggaaaccatcttataatcagctggcttcaactccaataatattcaaagagcaagggctgactctgccgctgtaccaatctcctgtaaaagaattagataaattcaaattagacttaggaaggaatgttcccaatagtagacataaaagtcttcgcacagtgaaaactaaaatggatcaagcagatgatgtttcctgtccacttctaaattcttgtcttagtgaaagtcctgttgttctacaatgtacacatgtaacaccacaaagagataagtcagtggtatgtgggagtttgtttcatacaccaaagtttgtgaagggtcgtcagacaccaaaacatatttctgaaagtctaggagctgaggtggatcctgatatgtcttggtcaagttctttagctacaccacccacccttagttctactgtgctcatagtcagaaatgaagaagcatctgaaactgtatttcctcatgatactactgctaatgtgaaaagctatttttccaatcatgatgaaagtctgaagaaaaatgatagatttatcgcttctgtgacagacagtgaaaacacaaatcaaagagaagctgcaagtcatggatttggaaaaacatcagggaattcatttaaagtaaatagctgcaaagaccacattggaaagtcaatgccaaatgtcctagaagatgaagtatatgaaacagttgtagatacctctgaagaagatagtttttcattatgtttttctaaatgtagaacaaaaaatctacaaaaagtaagaactagcaagactaggaaaaaaattttccatgaagcaaacgctgatgaatgtgaaaaatctaaaaaccaagtgaaagaaaaatactcatttgtatctgaagtggaaccaaatgatactgatccattagattcaaatgtagcaaatcagaagccctttgagagtggaagtgacaaaatctccaaggaagttgtaccgtctttggcctgtgaatggtctcaactaaccctttcaggtctaaatggagcccagatggagaaaatacccctattgcatatttcttcatgtgaccaaaatatttcagaaaaagacctattagacacagagaacaaaagaaagaaagattttcttacttcagagaattctttgccacgtatttctagcctaccaaaatcagagaagccattaaatgaggaaacagtggtaaataagagagatgaagagcagcatcttgaatctcatacagactgcattcttgcagtaaagcaggcaatatctggaacttctccagtggcttcttcatttcagggtatcaaaaagtctatattcagaataagagaatcacctaaagagactttcaatgcaagtttttcaggtcatatgactgatccaaactttaaaaaagaaactgaagcctctgaaagtggactggaaatacatactgtttgctcacagaaggaggactccttatgtccaaatttaattgataatggaagctggccagccaccaccacacagaattctgtagctttgaagaatgcaggtttaatatccactttgaaaaagaaaacaaataagtttatttatgctatacatgatgaaacatcttataaaggaaaaaaaataccgaaagaccaaaaatcagaactaattaactgttcagcccagtttgaagcaaatgcttttgaagcaccacttacatttgcaaatgctgattcaggtttattgcattcttctgtgaaaagaagctgttcacagaatgattctgaagaaccaactttgtccttaactagctcttttgggacaattctgaggaaatgttctagaaatgaaacatgttctaataatacagtaatctctcaggatcttgattataaagaagcaaaatgtaataaggaaaaactacagttatttattaccccagaagctgattctctgtcatgcctgcaggaaggacagtgtgaaaatgatccaaaaagcaaaaaagtttcagatataaaagaagaggtcttggctgcagcatgtcacccagtacaacattcaaaagtggaatacagtgatactgactttcaatcccagaaaagtcttttatatgatcatgaaaatgccagcactcttattttaactcctacttccaaggatgttctgtcaaacctagtcatgatttctagaggcaaagaatcatacaaaatgtcagacaagctcaaaggtaacaattatgaatctgatgttgaattaaccaaaaatattcccatggaaaagaatcaagatgtatgtgctttaaatgaaaattataaaaacgttgagctgttgccacctgaaaaatacatgagagtagcatcaccttcaagaaaggtacaattcaaccaaaacacaaatctaagagtaatccaaaaaaatcaagaagaaactacttcaatttcaaaaataactgtcaatccagactctgaagaacttttctcagacaatgagaataattttgtcttccaagtagctaatgaaaggaataatcttgctttaggaaatactaaggaacttcatgaaacagacttgacttgtgtaaacgaacccattttcaagaactctaccatggttttatatggagacacaggtgataaacaagcaacccaagtgtcaattaaaaaagatttggtttatgttcttgcagaggagaacaaaaatagtgtaaagcagcatataaaaatgactctaggtcaagatttaaaatcggacatctccttgaatatagataaaataccagaaaaaaataatgattacatgaacaaatgggcaggactcttaggtccaatttcaaatcacagttttggaggtagcttcagaacagcttcaaataaggaaatcaagctctctgaacataacattaagaagagcaaaatgttcttcaaagatattgaagaacaatatcctactagtttagcttgtgttgaaattgtaaataccttggcattagataatcaaaagaaactgagcaagcctcagtcaattaatactgtatctgcacatttacagagtagtgtagttgtttctgattgtaaaaatagtcatataacccctcagatgttattttccaagcaggattttaattcaaaccataatttaacacctagccaaaaggcagaaattacagaactttctactatattagaagaatcaggaagtcagtttgaatttactcagtttagaaaaccaagctacatattgcagaagagtacatttgaagtgcctgaaaaccagatgactatcttaaagaccacttctgaggaatgcagagatgctgatcttcatgtcataatgaatgccccatcgattggtcaggtagacagcagcaagcaatttgaaggtacagttgaaattaaacggaagtttgctggcctgttgaaaaatgactgtaacaaaagtgcttctggttatttaacagatgaaaatgaagtggggtttaggggcttttattctgctcatggcacaaaactgaatgtttctactgaagctctgcaaaaagctgtgaaactgtttagtgatattgagaatattagtgaggaaacttctgcagaggtacatccaataagtttatcttcaagtaaatgtcatgattctgttgtttcaatgtttaagatagaaaatcataatgataaaactgtaagtgaaaaaaataataaatgccaactgatattacaaaataatattgaaatgactactggcacttttgttgaagaaattactgaaaattacaagagaaatactgaaaatgaagataacaaatatactgctgccagtagaaattctcataacttagaatttgatggcagtgattcaagtaaaaatgatactgtttgtattcataaagatgaaacggacttgctatttactgatcagcacaacatatgtcttaaattatctggccagtttatgaaggagggaaacactcagattaaagaagatttgtcagatttaacttttttggaagttgcgaaagctcaagaagcatgtcatggtaatacttcaaataaagaacagttaactgctactaaaacggagcaaaatataaaagattttgagacttctgatacattttttcagactgcaagtgggaaaaatattagtgtcgccaaagagtcatttaataaaattgtaaatttctttgatcagaaaccagaagaattgcataacttttccttaaattctgaattacattctgacataagaaagaacaaaatggacattctaagttatgaggaaacagacatagttaaacacaaaatactgaaagaaagtgtcccagttggtactggaaatcaactagtgaccttccagggacaacccgaacgtgatgaaaagatcaaagaacctactctattgggttttcatacagctagcgggaaaaaagttaaaattgcaaaggaatctttggacaaagtgaaaaacctttttgatgaaaaagagcaaggtactagtgaaatcaccagttttagccatcaatgggcaaagaccctaaagtacagagaggcctgtaaagaccttgaattagcatgtgagaccattgagatcacagctgccccaaagtgtaaagaaatgcagaattctctcaataatgataaaaaccttgtttctattgagactgtggtgccacctaagctcttaagtgataatttatgtagacaaactgaaaatctcaaaacatcaaaaagtatctttttgaaagttaaagtacatgaaaatgtagaaaaagaaacagcaaaaagtcctgcaacttgttacacaaatcagtccccttattcagtcattgaaaattcagccttagctttttacacaagttgtagtagaaaaacttctgtgagtcagacttcattacttgaagcaaaaaaatggcttagagaaggaatatttgatggtcaaccagaaagaataaatactgcagattatgtaggaaattatttgtatgaaaataattcaaacagtactatagctgaaaatgacaaaaatcatctctccgaaaaacaagatacttatttaagtaacagtagcatgtctaacagctattcctaccattctgatgaggtatataatgattcaggatatctctcaaaaaataaacttgattctggtattgagccagtattgaagaatgttgaagatcaaaaaaacactagtttttccaaagtaatatccaatgtaaaagatgcaaatgcatacccacaaactgtaaatgaagatatttgcgttgaggaacttgtgactagctcttcaccctgcaaaaataaaaatgcagccattaaattgtccatatctaatagtaataattttgaggtagggccacctgcatttaggatagccagtggtaaaatcgtttgtgtttcacatgaaacaattaaaaaagtgaaagacatatttacagacagtttcagtaaagtaattaaggaaaacaacgagaataaatcaaaaatttgccaaacgaaaattatggcaggttgttacgaggcattggatgattcagaggatattcttcataactctctagataatgatgaatgtagcacgcattcacataaggtttttgctgacattcagagtgaagaaattttacaacataaccaaaatatgtctggattggagaaagtttctaaaatatcaccttgtgatgttagtttggaaacttcagatatatgtaaatgtagtatagggaagcttcataagtcagtctcatctgcaaatacttgtgggatttttagcacagcaagtggaaaatctgtccaggtatcagatgcttcattacaaaacgcaagacaagtgttttctgaaatagaagatagtaccaagcaagtcttttccaaagtattgtttaaaagtaacgaacattcagaccagctcacaagagaagaaaatactgctatacgtactccagaacatttaatatcccaaaaaggcttttcatataatgtggtaaattcatctgctttctctggatttagtacagcaagtggaaagcaagtttccattttagaaagttccttacacaaagttaagggagtgttagaggaatttgatttaatcagaactgagcatagtcttcactattcacctacgtctagacaaaatgtatcaaaaatacttcctcgtgttgataagagaaacccagagcactgtgtaaactcagaaatggaaaaaacctgcagtaaagaatttaaattatcaaataacttaaatgttgaaggtggttcttcagaaaataatcactctattaaagtttctccatatctctctcaatttcaacaagacaaacaacagttggtattaggaaccaaagtgtcacttgttgagaacattcatgttttgggaaaagaacaggcttcacctaaaaacgtaaaaatggaaattggtaaaactgaaactttttctgatgttcctgtgaaaacaaatatagaagtttgttctacttactccaaagattcagaaaactactttgaaacagaagcagtagaaattgctaaagcttttatggaagatgatgaactgacagattctaaactgccaagtcatgccacacattctctttttacatgtcccgaaaatgaggaaatggttttgtcaaattcaagaattggaaaaagaagaggagagccccttatcttagtgggagaaccctcaatcaaaagaaacttattaaatgaatttgacaggataatagaaaatcaagaaaaatccttaaaggcttcaaaaagcactccagatggcacaataaaagatcgaagattgtttatgcatcatgtttctttagagccgattacctgtgtaccctttcgcacaactaaggaacgtcaagagatacagaatccaaattttaccgcacctggtcaagaatttctgtctaaatctcatttgtatgaacatctgactttggaaaaatcttcaagcaatttagcagtttcaggacatccattttatcaagtttctgctacaagaaatgaaaaaatgagacacttgattactacaggcagaccaaccaaagtctttgttccaccttttaaaactaaatcacattttcacagagttgaacagtgtgttaggaatattaacttggaggaaaacagacaaaagcaaaacattgatggacatggctctgatgatagtaaaaataagattaatgacaatgagattcatcagtttaacaaaaacaactccaatcaagcagtagctgtaactttcacaaagtgtgaagaagaacctttagatttaattacaagtcttcagaatgccagagatatacaggatatgcgaattaagaagaaacaaaggcaacgcgtctttccacagccaggcagtctgtatcttgcaaaaacatccactctgcctcgaatctctctgaaagcagcagtaggaggccaagttccctctgcgtgttctcataaacagctgtatacgtatggcgtttctaaacattgcataaaaattaacagcaaaaatgcagagtcttttcagtttcacactgaagattattttggtaaggaaagtttatggactggaaaaggaatacagttggctgatggtggatggctcataccctccaatgatggaaaggctggaaaagaagaattttatagggctctgtgtgacactccaggtgtggatccaaagcttatttctagaatttgggtttataatcactatagatggatcatatggaaactggcagctatggaatgtgcctttcctaaggaatttgctaatagatgcctaagcccagaaagggtgcttcttcaactaaaatacagatatgatacggaaattgatagaagcagaagatcggctataaaaaagataatggaaagggatgacacagctgcaaaaacacttgttctctgtgtttctgacataatttcattgagcgcaaatatatctgaaacttctagcaataaaactagtagtgcagatacccaaaaagtggccattattgaacttacagatgggtggtatgctgttaaggcccagttagatcctcccctcttagctgtcttaaagaatggcagactgacagttggtcagaagattattcttcatggagcagaactggtgggctctcctgatgcctgtacacctcttgaagccccagaatctcttatgttaaagatttctgctaacagtactcggcctgctcgctggtataccaaacttggattctttcctgaccctagaccttttcctctgcccttatcatcgcttttcagtgatggaggaaatgttggttgtgttgatgtaattattcaaagagcataccctatacagtggatggagaagacatcatctggattatacatatttcgcaatgaaagagaggaagaaaaggaagcagcaaaatatgtggaggcccaacaaaagagactagaagccttattcactaaaattcaggaggaatttgaagaacatgaagaaaacacaacaaaaccatatttaccatcacgtgcactaacaagacagcaagttcgtgctttgcaagatggtgcagagctttatgaagcagtgaagaatgcagcagacccagcttaccttgagggttatttcagtgaagagcagttaagagccttgaataatcacaggcaaatgttgaatgataagaaacaagctcagatccagttggaaattaggaaggccatggaatctgctgaacaaaaggaacaaggtttatcaagggatgtcacaaccgtgtggaagttgcgtattgtaagctattcaaaaaaagaaaaagattcagttatactgagtatttggcgtccatcatcagatttatattctctgttaacagaaggaaagagatacagaatttatcatcttgcaacttcaaaatctaaaagtaaatctgaaagagctaacatacagttagcagcgacaaaaaaaactcagtatcaacaactaccggtttcagatgaaattttatttcagatttaccagccacgggagccccttcacttcagcaaatttttagatccagactttcagccatcttgttctgaggtggacctaataggatttgtcgtttctgttgtgaaaaaaacaggacttgcccctttcgtctatttgtcagacgaatgttacaatttactggcaataaagttttggatagaccttaatgaggacattattaagcctcatatgttaattgctgcaagcaacctccagtggcgaccagaatccaaatcaggccttcttactttatttgctggagatttttctgtgttttctgctagtccaaaagagggccactttcaagagacattcaacaaaatgaaaaatactgttgagaatattgacatactttgcaatgaagcagaaaacaagcttatgcatatactgcatgcaaatgatcccaagtggtccaccccaactaaagactgtacttcagggccgtacactgctcaaatcattcctggtacaggaaacaagcttctgatgtcttctcctaattgtgagatatattatcaaagtcctttatcactttgtatggccaaaaggaagtctgtttccacacctgtctcagcccagatgacttcaaagtcttgtaaaggggagaaagagattgatgaccaaaagaactgcaaaaagagaagagccttggatttcttgagtagactgcctttacctccacctgttagtcccatttgtacatttgtttctccggctgcacagaaggcatttcagccaccaaggagttgtggcaccaaatacgaaacacccataaagaaaaaagaactgaattctcctcagatgactccatttaaaaaattcaatgaaatttctcttttggaaagtaattcaatagctgacgaagaacttgcattgataaatacccaagctcttttgtctggttcaacaggagaaaaacaatttatatctgtcagtgaatccactaggactgctcccaccagttcagaagattatctcagactgaaacgacgttgtactacatctctgatcaaagaacaggagagttcccaggccagtacggaagaatgtgagaaaaataagcaggacacaattacaactaaaaaatatatctaagcatttgcaaaggcgacaataaattattgacgcttaacctttccagtttataagactggaatataatttcaaaccacacattagtacttatgttgcacaatgagaaaagaaattagtttcaaatttacctcagcgtttgtgtatcgggcaaaaatcgttttgcccgattccgtattggtatacttttgcttcagttgcatatcttaaaactaaatgtaatttattaactaatcaagaaaaacatctttggctgagctcggtggctcatgcctgtaatcccaacactttgagaagctgaggtgggaggagtgcttgaggccaggagttcaagaccagcctgggcaacatagggagacccccatctttacaaagaaaaaaaaaaggggaaaagaaaatcttttaaatctttggatttgatcactacaagtattattttacaatcaacaaaatggtcatccaaactcaaacttgagaaaatatcttgctttcaaattggcact

SEQ ID NO: 112035 - DNA, 3221 bp, Homo sapiens
  Payload ID: 1952
  Gene Symbol: BCAR1
  Gene Name: breast cancer anti-estrogen resistance 1
  Uniprot ID: P56945
  ENST ID: ENST00000162330
  CDS Start-End: 128-2740
ggccgaggcggcagctgcgcggcggcaccggggcggctgcggcgcgctcggagccccgagggcacgcggcccgggcagctcggtgtgcgcccccgcgagagccggggccccaggcccgccggacaccatgaaccacctgaacgtgctggccaaagcgctctatgacaatgtggccgagtccccggatgagctctccttccgcaagggtgacatcatgacggtgctggagcaggacacgcagggcctggacggctggtggctctgctcgctgcatgggcgccagggcatcgtgcctgggaaccgcctcaagatcttggtgggcatgtatgataagaagccagcagggcctggccccggccctcccgccaccccggcccagcctcagcctggcctccatgccccagcgcctccggcctcccagtacacgcccatgctccccaacacctaccagccccagccagacagcgtctacctggtgcccactcccagcaaggctcagcaaggcctctaccaagtcccgggtcccagccctcagttccagtctcccccagccaagcagacatccaccttctcgaagcagacaccccatcacccgtttcccagcccggccacagacctgtaccaggtgcccccagggcctggaggccctgcccaggatatttaccaggtgccaccttctgccgggatggggcatgacatctaccaggtccccccgtccatggacacacgcagctgggagggcacgaagcccccggcaaaggtggtggtgcccacccgcgtggggcagggctatgtatacgaggccgcccagccggagcaggacgagtacgacatcccgcgacacctgctggccccggggccacaggacatctatgatgtgcccccggttcgggggctgcttcccagccagtatggccaggaggtgtatgacacaccccccatggctgtcaagggtcccaatggccgagacccgttgctggaggtgtatgacgtgccccccagtgtggagaagggcctgccaccgtccaaccaccacgcagtctacgacgttcctccatcggtgagcaaggatgtgcccgatggcccactgctgcgtgaggagacctacgatgtgccccccgccttcgccaaggccaagccctttgacccggcccgcaccccactggtactggctgcgccccctccagactccccgccggccgaggacgtgtatgacgtgccgcccccggctcctgacctctacgacgtgccccctggcttgcggcggcctggcccgggcaccctgtacgatgtgccccgtgaacgggtgcttcctcctgaggtggctgatggtggcgtggtcgacagtggtgtgtatgcggtgcctcccccagctgaacgtgaagccccggcagagggcaagcgcctgtcggcctccagcaccggcagcacacgcagcagccagtctgcgtcctccttggaggtggcagggccgggccgggaacccctggagctggaagttgctgtggaggccctggcacggctgcagcagggtgtgagcgccaccgttgcccaccttctggacctggcaggcagcgccggtgcgactgggagctggcgtagcccctctgagccacaggagccgctggtgcaggacctgcaggctgctgtggccgctgtccagagtgccgtccacgagctgttggagtttgcccgcagcgcggtgggcaatgctgcccacacatctgaccgtgccctgcatgccaagcttagccggcagctgcagaagatggaggacgtgcaccagacgctggtggcacatggtcaggccctcgacgctggccggggaggctctggagccacccttgaggacctggaccggctggtggcctgctcgcgggctgtgcccgaggacgccaagcagctggcctccttcctgcacggcaatgcctcactgctcttcagacggaccaaggccactgccccggggcctgaggggggtggcaccctgcaccccaaccccactgacaagaccagcagcatccagtcacgacccctgccctcaccccctaagttcacctcccaggactcgccagatgggcagtacgagaacagcgaggggggctggatggaggactatgactacgtccacctacaggggaaggaggagtttgagaagacccagaaggagctgctggaaaagggcagcatcacgcggcagggcaagagccagctggagttgcagcagctgaagcagtttgaacgactggaacaggaggtgtcacggcccatagaccacgacctggccaactggacgccagcccaacccctggccccggggcgaacaggcggcctggggccctcggaccggcagctgctgctcttctacctggagcagtgtgaggccaacctgaccacactgaccaacgccgtggacgccttctttaccgccgtggccaccaaccagccgcccaagatctttgtggcgcacagcaagttcgtcatcctcagcgcccacaagctggtgttcatcggggacacactgtcacggcaggccaaggctgctgacgtgcgcagccaggtgacccactacagcaacctgctgtgcgacctcctgcgcggcatcgtggccaccaccaaggccgctgccttgcagtacccatcgccttccgcggcccaggacatggtggagagggtcaaggagctgggccacagcacccagcagttccgccgcgtcctaggccagctggcagccgcctgagggtggtgaccccaggagggaggcaggggaggggtgcggcggtcccagctccctggctcccatgtcaagagtcgctgtgccacaggcttagggacaggaccccagctctgcgtcggtcctggtgccctggatgcccaggaatctgtatatatttatggccgggcagggtgtggggccatgcctcctcaggagccgaagcccaggggccggccagtggccttccccagcatgcaccacgggcccgggttgggtcaccagacggggctggagtgtgagggtcctgcagcctgcaggacctcgtgccaccccgagggctgagcctggtcccacgagggtgccgtgtcccctgacagggccagtgcagtttggtgtgtcctccgccttaccaggagaagaacctgaagaactatttttcgttattggttttccaatcatttgactaagagtctccatttaaataaagtttttaaaaggaagagca

SEQ ID NO: 112036 - DNA, 2667 bp, Homo sapiens
  Payload ID: 1952
  Gene Symbol: BCAR1
  Gene Name: breast cancer anti-estrogen resistance 1
  Uniprot ID: P56945
  ENST ID: ENST00000393420
  CDS Start-End: 1-2667
atgaaccacctgaacgtgctggccaaagcgctctatgacaatgtggccgagtccccggatgagctctccttccgcaagggtgacatcatgacggtgctggagcaggacacgcagggcctggacggctggtggctctgctcgctgcatgggcgccagggcatcgtgcctgggaaccgcctcaagatcttggtgggcatgtatgataagaagccagcagggcctggccccggccctcccgccaccccggcccagcctcagcctggcctccatgccccagcgcctccggcctcccagtacacgcccatgctccccaacacctaccagccccagccagacagcgtctacctggtgcccactcccagcaaggctcagcaaggcctctaccaagtcccgggtcccagccctcagttccagtctcccccagccaagcagacatccaccttctcgaagcagacaccccatcacccgtttcccagcccggccacagacctgtaccaggtgcccccagggcctggaggccctgcccaggatatttaccaggtgccaccttctgccgggatggggcatgacatctaccaggtccccccgtccatggacacacgcagctgggagggcacgaagcccccggcaaaggtggtggtgcccacccgcgtggggcagggctatgtatacgaggccgcccagccggagcaggacgagtacgacatcccgcgacacctgctggccccggggccacaggacatctatgatgtgcccccggttcgggggctgcttcccagccagtatggccaggaggtgtatgacacaccccccatggctgtcaagggtcccaatggccgagacccgttgctggaggtgtatgacgtgccccccagtgtggagaagggcctgccaccgtccaaccaccacgcagtgagcaaatgccagggcaatgccagggccaggctgaggctgtggggtgtctgggtctacgacgttcctccatcggtgagcaaggatgtgcccgatggcccactgctgcgtgaggagacctacgatgtgccccccgccttcgccaaggccaagccctttgacccggcccgcaccccactggtactggctgcgccccctccagactccccgccggccgaggacgtgtatgacgtgccgcccccggctcctgacctctacgacgtgccccctggcttgcggcggcctggcccgggcaccctgtacgatgtgccccgtgaacgggtgcttcctcctgaggtggctgatggtggcgtggtcgacagtggtgtgtatgcggtgcctcccccagctgaacgtgaagccccggcagagggcaagcgcctgtcggcctccagcaccggcagcacacgcagcagccagtctgcgtcctccttggaggtggcagggccgggccgggaacccctggagctggaagttgctgtggaggccctggcacggctgcagcagggtgtgagcgccaccgttgcccaccttctggacctggcaggcagcgccggtgcgactgggagctggcgtagcccctctgagccacaggagccgctggtgcaggacctgcaggctgctgtggccgctgtccagagtgccgtccacgagctgttggagtttgcccgcagcgcggtgggcaatgctgcccacacatctgaccgtgccctgcatgccaagcttagccggcagctgcagaagatggaggacgtgcaccagacgctggtggcacatggtcaggccctcgacgctggccggggaggctctggagccacccttgaggacctggaccggctggtggcctgctcgcgggctgtgcccgaggacgccaagcagctggcctccttcctgcacggcaatgcctcactgctcttcagacggaccaaggccactgccccggggcctgaggggggtggcaccctgcaccccaaccccactgacaagaccagcagcatccagtcacgacccctgccctcaccccctaagttcacctcccaggactcgccagatgggcagtacgagaacagcgaggggggctggatggaggactatgactacgtccacctacaggggaaggaggagtttgagaagacccagaaggagctgctggaaaagggcagcatcacgcggcagggcaagagccagctggagttgcagcagctgaagcagtttgaacgactggaacaggaggtgtcacggcccatagaccacgacctggccaactggacgccagcccaacccctggccccggggcgaacaggcggcctggggccctcggaccggcagctgctgctcttctacctggagcagtgtgaggccaacctgaccacactgaccaacgccgtggacgccttctttaccgccgtggccaccaaccagccgcccaagatctttgtggcgcacagcaagttcgtcatcctcagcgcccacaagctggtgttcatcggggacacactgtcacggcaggccaaggctgctgacgtgcgcagccaggtgacccactacagcaacctgctgtgcgacctcctgcgcggcatcgtggccaccaccaaggccgctgccttgcagtacccatcgccttccgcggcccaggacatggtggagagggtcaaggagctgggccacagcacccagcagttccgccgcgtcctaggccagctggcagccgcctga

SEQ ID NO: 112037 - DNA, 4064 bp, Homo sapiens
  Payload ID: 1952
  Gene Symbol: BCAR1
  Gene Name: breast cancer anti-estrogen resistance 1
  Uniprot ID: P56945
  ENST ID: ENST00000393422
  CDS Start-End: 74-2740
tttgcctgccaggagtgggtgagggaggagcagccgccgccttcacagacacctggtagtgtcaggagagggcatgcactgccctggtgaggctcctctggctgcccccaggcccacacccaaggatccctgcctcagaaacgtgctggccaaagcgctctatgacaatgtggccgagtccccggatgagctctccttccgcaagggtgacatcatgacggtgctggagcaggacacgcagggcctggacggctggtggctctgctcgctgcatgggcgccagggcatcgtgcctgggaaccgcctcaagatcttggtgggcatgtatgataagaagccagcagggcctggccccggccctcccgccaccccggcccagcctcagcctggcctccatgccccagcgcctccggcctcccagtacacgcccatgctccccaacacctaccagccccagccagacagcgtctacctggtgcccactcccagcaaggctcagcaaggcctctaccaagtcccgggtcccagccctcagttccagtctcccccagccaagcagacatccaccttctcgaagcagacaccccatcacccgtttcccagcccggccacagacctgtaccaggtgcccccagggcctggaggccctgcccaggatatttaccaggtgccaccttctgccgggatggggcatgacatctaccaggtccccccgtccatggacacacgcagctgggagggcacgaagcccccggcaaaggtggtggtgcccacccgcgtggggcagggctatgtatacgaggccgcccagccggagcaggacgagtacgacatcccgcgacacctgctggccccggggccacaggacatctatgatgtgcccccggttcgggggctgcttcccagccagtatggccaggaggtgtatgacacaccccccatggctgtcaagggtcccaatggccgagacccgttgctggaggtgtatgacgtgccccccagtgtggagaagggcctgccaccgtccaaccaccacgcagtctacgacgttcctccatcggtgagcaaggatgtgcccgatggcccactgctgcgtgaggagacctacgatgtgccccccgccttcgccaaggccaagccctttgacccggcccgcaccccactggtactggctgcgccccctccagactccccgccggccgaggacgtgtatgacgtgccgcccccggctcctgacctctacgacgtgccccctggcttgcggcggcctggcccgggcaccctgtacgatgtgccccgtgaacgggtgcttcctcctgaggtggctgatggtggcgtggtcgacagtggtgtgtatgcggtgcctcccccagctgaacgtgaagccccggcagagggcaagcgcctgtcggcctccagcaccggcagcacacgcagcagccagtctgcgtcctccttggaggtggcagggccgggccgggaacccctggagctggaagttgctgtggaggccctggcacggctgcagcagggtgtgagcgccaccgttgcccaccttctggacctggcaggcagcgccggtgcgactgggagctggcgtagcccctctgagccacaggagccgctggtgcaggacctgcaggctgctgtggccgctgtccagagtgccgtccacgagctgttggagtttgcccgcagcgcggtgggcaatgctgcccacacatctgaccgtgccctgcatgccaagcttagccggcagctgcagaagatggaggacgtgcaccagacgctggtggcacatggtcaggccctcgacgctggccggggaggctctggagccacccttgaggacctggaccggctggtggcctgctcgcgggctgtgcccgaggacgccaagcagctggcctccttcctgcacggcaatgcctcactgctcttcagacggaccaaggccactgccccggggcctgaggggggtggcaccctgcaccccaaccccactgacaagaccagcagcatccagtcacgacccctgccctcaccccctaagttcacctcccaggactcgccagatgggcagtacgagaacagcgaggggggctggatggaggactatgactacgtccacctacaggggaaggaggagtttgagaagacccagaaggagctgctggaaaagggcagcatcacgcggcagggcaagagccagctggagttgcagcagctgaagcagtttgaacgactggaacaggaggtgtcacggcccatagaccacgacctggccaactggacgccagcccaacccctggccccggggcgaacaggcggcctggggccctcggaccggcagctgctgctcttctacctggagcagtgtgaggccaacctgaccacactgaccaacgccgtggacgccttctttaccgccgtggccaccaaccagccgcccaagatctttgtggcgcacagcaagttcgtcatcctcagcgcccacaagctggtgttcatcggggacacactgtcacggcaggccaaggctgctgacgtgcgcagccaggtgacccactacagcaacctgctgtgcgacctcctgcgcggcatcgtggccaccaccaaggccgctgccttgcagtacccatcgccttccgcggcccaggacatggtggagagggtcaaggagctgggccacagcacccagcagttccgccgcgtcctaggccagctggcagccgcctgagggtggtgaccccaggagggaggcaggggaggggtgcggcggtcccagctccctggctcccatgtcaagagtcgctgtgccacaggcttagggacaggaccccagctctgcgtcggtcctggtgccctggatgcccaggaatctgtatatatttatggccgggcagggtgtggggccatgcctcctcaggagccgaagcccaggggccggccagtggccttccccagcatgcaccacgggcccgggttgggtcaccagacggggctggagtgtgagggtcctgcagcctgcaggacctcgtgccaccccgagggctgagcctggtcccacgagggtgccgtgtcccctgacagggccagtgcagtttggtgtgtcctccgccttaccaggagaagaacctgaagaactatttttcgttattggttttccaatcatttgactaagagtctccatttaaataaagtttttaaaaggaagagcagctgcctgagggtggcagatgagagcagcccggggtgggtgacggttctggggaaggcacccgggggcaagggccatgcgtggcatctcccgggagggcagaggaggagtgggtctctctagaagaaaaccaaggaacgccgaggctgggtgtctcctggaggcggggtgaggcctgcagctggccacaaggccctgggagccagggcagagcctgggcccaagaaagggggcagtttcagagctgcagggtctggggcccagaaagcacagcctgggcatggcccctgcaaccctagggagctgccacagtgagcacctgcccatgcccacagctggcatctggagtgagggcagattggggcaggaacagctgcacaaggggacgggttcctgtgagccgagggcaccgctgggggctgcatccagagctctgcttaaaagaatctcatcccagcctgcggaactcccgaagtgcacatggaattatacctggacctggcatctgagttgggagggaggggcttggagaagacccttgccctgggcaagtgtgtcccccttcgtggctcccccacccagcagcccgcagcccagatggaagcttcagggtgcttggaacccctggtgctgctcccagccctgaccgttctgcatatgaacatgggccttggtttccccatctgtatgaagaagggagtagggctgggtgattcgcaagccctcctgatcttacctctacagaggttgtccccgtgacagcatctgtccccccacctcagccacatcatgctcagcccacctgccttggtgaggacacagaggtaaaggtgtatgcagttgc

SEQ ID NO: 112038 - DNA, 3387 bp, Homo sapiens
  Payload ID: 1952
  Gene Symbol: BCAR1
  Gene Name: breast cancer anti-estrogen resistance 1
  Uniprot ID: P56945
  ENST ID: ENST00000418647
  CDS Start-End: 285-3035
atgcgcggcgcggctggagcggccggacagtccggcgtccgggaacgctcaggagccggaggagccggaaagcgccgggacccctcgcggggcctctgagcggcgcgggcggacccgagcccccagcccgctggcgccgctgcccgccaggccccgggggcggcggccaagatgtccgtgcctatgaaaaaatgagggcttccagactgtgctgatgtgagccccgccatccgttctggttcagagcataatcgtctcgtcttcagaaagaaggaagacagaacatgcctgccaagcccttcctctcttctgttctgctctcctggaaagttctggacttctctggcccagggcctcaggggactggccagccctgctcctgtgggcactgggcagagggacaaggcggaccacctgagcctgctggagggccgaacgtgctggccaaagcgctctatgacaatgtggccgagtccccggatgagctctccttccgcaagggtgacatcatgacggtgctggagcaggacacgcagggcctggacggctggtggctctgctcgctgcatgggcgccagggcatcgtgcctgggaaccgcctcaagatcttggtgggcatgtatgataagaagccagcagggcctggccccggccctcccgccaccccggcccagcctcagcctggcctccatgccccagcgcctccggcctcccagtacacgcccatgctccccaacacctaccagccccagccagacagcgtctacctggtgcccactcccagcaaggctcagcaaggcctctaccaagtcccgggtcccagccctcagttccagtctcccccagccaagcagacatccaccttctcgaagcagacaccccatcacccgtttcccagcccggccacagacctgtaccaggtgcccccagggcctggaggccctgcccaggatatttaccaggtgccaccttctgccgggatggggcatgacatctaccaggtccccccgtccatggacacacgcagctgggagggcacgaagcccccggcaaaggtggtggtgcccacccgcgtggggcagggctatgtatacgaggccgcccagccggagcaggacgagtacgacatcccgcgacacctgctggccccggggccacaggacatctatgatgtgcccccggttcgggggctgcttcccagccagtatggccaggaggtgtatgacacaccccccatggctgtcaagggtcccaatggccgagacccgttgctggaggtgtatgacgtgccccccagtgtggagaagggcctgccaccgtccaaccaccacgcagtctacgacgttcctccatcggtgagcaaggatgtgcccgatggcccactgctgcgtgaggagacctacgatgtgccccccgccttcgccaaggccaagccctttgacccggcccgcaccccactggtactggctgcgccccctccagactccccgccggccgaggacgtgtatgacgtgccgcccccggctcctgacctctacgacgtgccccctggcttgcggcggcctggcccgggcaccctgtacgatgtgccccgtgaacgggtgcttcctcctgaggtggctgatggtggcgtggtcgacagtggtgtgtatgcggtgcctcccccagctgaacgtgaagccccggcagagggcaagcgcctgtcggcctccagcaccggcagcacacgcagcagccagtctgcgtcctccttggaggtggcagggccgggccgggaacccctggagctggaagttgctgtggaggccctggcacggctgcagcagggtgtgagcgccaccgttgcccaccttctggacctggcaggcagcgccggtgcgactgggagctggcgtagcccctctgagccacaggagccgctggtgcaggacctgcaggctgctgtggccgctgtccagagtgccgtccacgagctgttggagtttgcccgcagcgcggtgggcaatgctgcccacacatctgaccgtgccctgcatgccaagcttagccggcagctgcagaagatggaggacgtgcaccagacgctggtggcacatggtcaggccctcgacgctggccggggaggctctggagccacccttgaggacctggaccggctggtggcctgctcgcgggctgtgcccgaggacgccaagcagctggcctccttcctgcacggcaatgcctcactgctcttcagacggaccaaggccactgccccggggcctgaggggggtggcaccctgcaccccaaccccactgacaagaccagcagcatccagtcacgacccctgccctcaccccctaagttcacctcccaggactcgccagatgggcagtacgagaacagcgaggggggctggatggaggactatgactacgtccacctacaggggaaggaggagtttgagaagacccagaaggagctgctggaaaagggcagcatcacgcggcagggcaagagccagctggagttgcagcagctgaagcagtttgaacgactggaacaggaggtgtcacggcccatagaccacgacctggccaactggacgccagcccaacccctggccccggggcgaacaggcggcctggggccctcggaccggcagctgctgctcttctacctggagcagtgtgaggccaacctgaccacactgaccaacgccgtggacgccttctttaccgccgtggccaccaaccagccgcccaagatctttgtggcgcacagcaagttcgtcatcctcagcgcccacaagctggtgttcatcggggacacactgtcacggcaggccaaggctgctgacgtgcgcagccaggtgacccactacagcaacctgctgtgcgacctcctgcgcggcatcgtggccaccaccaaggccgctgccttgcagtacccatcgccttccgcggcccaggacatggtggagagggtcaaggagctgggccacagcacccagcagttccgccgcgtcctaggccagctggcagccgcctgagggtggtgaccccaggagggaggcaggggaggggtgcggcggtcccagctccctggctcccatgtcaagagtcgctgtgccacaggcttagggacaggaccccagctctgcgtcggtcctggtgccctggatgcccaggaatctgtatatatttatggccgggcagggtgtggggccatgcctcctcaggagccgaagcccaggggccggccagtggccttccccagcatgcaccacgggcccgggttgggtcaccagacggggctggagtgtgagggtcctgcagcctgcaggacctcgtgccaccccgagggctgagcctggtcccacgagggtgccgtgtcccctgaca

SEQ ID NO: 112039 - DNA, 2725 bp, Homo sapiens
  Payload ID: 1952
  Gene Symbol: BCAR1
  Gene Name: breast cancer anti-estrogen resistance 1
  Uniprot ID: P56945
  ENST ID: ENST00000420641
  CDS Start-End: 3-2669
agatgctcacccaccgtccccaggaagcagaacagaggggtcggacccctggtccttcctttgagtggaacgtgctggccaaagcgctctatgacaatgtggccgagtccccggatgagctctccttccgcaagggtgacatcatgacggtgctggagcaggacacgcagggcctggacggctggtggctctgctcgctgcatgggcgccagggcatcgtgcctgggaaccgcctcaagatcttggtgggcatgtatgataagaagccagcagggcctggccccggccctcccgccaccccggcccagcctcagcctggcctccatgccccagcgcctccggcctcccagtacacgcccatgctccccaacacctaccagccccagccagacagcgtctacctggtgcccactcccagcaaggctcagcaaggcctctaccaagtcccgggtcccagccctcagttccagtctcccccagccaagcagacatccaccttctcgaagcagacaccccatcacccgtttcccagcccggccacagacctgtaccaggtgcccccagggcctggaggccctgcccaggatatttaccaggtgccaccttctgccgggatggggcatgacatctaccaggtccccccgtccatggacacacgcagctgggagggcacgaagcccccggcaaaggtggtggtgcccacccgcgtggggcagggctatgtatacgaggccgcccagccggagcaggacgagtacgacatcccgcgacacctgctggccccggggccacaggacatctatgatgtgcccccggttcgggggctgcttcccagccagtatggccaggaggtgtatgacacaccccccatggctgtcaagggtcccaatggccgagacccgttgctggaggtgtatgacgtgccccccagtgtggagaagggcctgccaccgtccaaccaccacgcagtctacgacgttcctccatcggtgagcaaggatgtgcccgatggcccactgctgcgtgaggagacctacgatgtgccccccgccttcgccaaggccaagccctttgacccggcccgcaccccactggtactggctgcgccccctccagactccccgccggccgaggacgtgtatgacgtgccgcccccggctcctgacctctacgacgtgccccctggcttgcggcggcctggcccgggcaccctgtacgatgtgccccgtgaacgggtgcttcctcctgaggtggctgatggtggcgtggtcgacagtggtgtgtatgcggtgcctcccccagctgaacgtgaagccccggcagagggcaagcgcctgtcggcctccagcaccggcagcacacgcagcagccagtctgcgtcctccttggaggtggcagggccgggccgggaacccctggagctggaagttgctgtggaggccctggcacggctgcagcagggtgtgagcgccaccgttgcccaccttctggacctggcaggcagcgccggtgcgactgggagctggcgtagcccctctgagccacaggagccgctggtgcaggacctgcaggctgctgtggccgctgtccagagtgccgtccacgagctgttggagtttgcccgcagcgcggtgggcaatgctgcccacacatctgaccgtgccctgcatgccaagcttagccggcagctgcagaagatggaggacgtgcaccagacgctggtggcacatggtcaggccctcgacgctggccggggaggctctggagccacccttgaggacctggaccggctggtggcctgctcgcgggctgtgcccgaggacgccaagcagctggcctccttcctgcacggcaatgcctcactgctcttcagacggaccaaggccactgccccggggcctgaggggggtggcaccctgcaccccaaccccactgacaagaccagcagcatccagtcacgacccctgccctcaccccctaagttcacctcccaggactcgccagatgggcagtacgagaacagcgaggggggctggatggaggactatgactacgtccacctacaggggaaggaggagtttgagaagacccagaaggagctgctggaaaagggcagcatcacgcggcagggcaagagccagctggagttgcagcagctgaagcagtttgaacgactggaacaggaggtgtcacggcccatagaccacgacctggccaactggacgccagcccaacccctggccccggggcgaacaggcggcctggggccctcggaccggcagctgctgctcttctacctggagcagtgtgaggccaacctgaccacactgaccaacgccgtggacgccttctttaccgccgtggccaccaaccagccgcccaagatctttgtggcgcacagcaagttcgtcatcctcagcgcccacaagctggtgttcatcggggacacactgtcacggcaggccaaggctgctgacgtgcgcagccaggtgacccactacagcaacctgctgtgcgacctcctgcgcggcatcgtggccaccaccaaggccgctgccttgcagtacccatcgccttccgcggcccaggacatggtggagagggtcaaggagctgggccacagcacccagcagttccgccgcgtcctaggccagctggcagccgcctgagggtggtgaccccaggagggaggcaggggaggggtgcggcggtcccagctccctgg

SEQ ID NO: 112040 - DNA, 2894 bp, Homo sapiens
  Payload ID: 1952
  Gene Symbol: BCAR1
  Gene Name: breast cancer anti-estrogen resistance 1
  Uniprot ID: P56945
  ENST ID: ENST00000535626
  CDS Start-End: 277-2445
aggagccggaaagcgccgggacccctcgcggggcctctgagcggcgcgggcggacccgagcccccagcccgctggcgccgctgcccgccaggccccgggggcggcggccaagatgtccgtgccttgccgctctcctaccccatgtcgctgaagcagatgagttggagcaggactcaggagggtactaggcccaggttttaggctgaacctaggaatgagtaatgagaggaggcagatcagctggaggaccagcccgagtccccagatgtcggcacaatgcaggggaagaacgtgctggccaaagcgctctatgacaatgtggccgagtccccggatgagctctccttccgcaagggtgacatcatgacggtgctggagcaggacacgcagggcctggacggctggtggctctgctcgctgcatgggcgccagggcatcgtgcctgggaaccgcctcaagatcttggtggtggtgcccacccgcgtggggcagggctatgtatacgaggccgcccagccggagcaggacgagtacgacatcccgcgacacctgctggccccggggccacaggacatctatgatgtgcccccggttcgggggctgcttcccagccagtatggccaggaggtgtatgacacaccccccatggctgtcaagggtcccaatggccgagacccgttgctggaggtgtatgacgtgccccccagtgtggagaagggcctgccaccgtccaaccaccacgcagtctacgacgttcctccatcggtgagcaaggatgtgcccgatggcccactgctgcgtgaggagacctacgatgtgccccccgccttcgccaaggccaagccctttgacccggcccgcaccccactggtactggctgcgccccctccagactccccgccggccgaggacgtgtatgacgtgccgcccccggctcctgacctctacgacgtgccccctggcttgcggcggcctggcccgggcaccctgtacgatgtgccccgtgaacgggtgcttcctcctgaggtggctgatggtggcgtggtcgacagtggtgtgtatgcggtgcctcccccagctgaacgtgaagccccggcagagggcaagcgcctgtcggcctccagcaccggcagcacacgcagcagccagtctgcgtcctccttggaggtggcagggccgggccgggaacccctggagctggaagttgctgtggaggccctggcacggctgcagcagggtgtgagcgccaccgttgcccaccttctggacctggcaggcagcgccggtgcgactgggagctggcgtagcccctctgagccacaggagccgctggtgcaggacctgcaggctgctgtggccgctgtccagagtgccgtccacgagctgttggagtttgcccgcagcgcggtgggcaatgctgcccacacatctgaccgtgccctgcatgccaagcttagccggcagctgcagaagatggaggacgtgcaccagacgctggtggcacatggtcaggccctcgacgctggccggggaggctctggagccacccttgaggacctggaccggctggtggcctgctcgcgggctgtgcccgaggacgccaagcagctggcctccttcctgcacggcaatgcctcactgctcttcagacggaccaaggccactgccccggggcctgaggggggtggcaccctgcaccccaaccccactgacaagaccagcagcatccagtcacgacccctgccctcaccccctaagttcacctcccaggactcgccagatgggcagtacgagaacagcgaggggggctggatggaggactatgactacgtccacctacaggggaaggaggagtttgagaagacccagaaggagctgctggaaaagggcagcatcacgcggcagggcaagagccagctggagttgcagcagctgaagcagtttgaacgactggaacaggaggtgtcacggcccatagaccacgacctggccaactggacgccagcccaacccctggccccggggcgaacaggcggcctggggccctcggaccggcagctgctgctcttctacctggagcagtgtgaggccaacctgaccacactgaccaacgccgtggacgccttctttaccgccgtggccaccaaccagccgcccaagatctttgtggcgcacagcaagttcgtcatcctcagcgcccacaagctggtgttcatcggggacacactgtcacggcaggccaaggctgctgacgtgcgcagccaggtgacccactacagcaacctgctgtgcgacctcctgcgcggcatcgtggccaccaccaaggccgctgccttgcagtacccatcgccttccgcggcccaggacatggtggagagggtcaaggagctgggccacagcacccagcagttccgccgcgtcctaggccagctggcagccgcctgagggtggtgaccccaggagggaggcaggggaggggtgcggcggtcccagctccctggctcccatgtcaagagtcgctgtgccacaggcttagggacaggaccccagctctgcgtcggtcctggtgccctggatgcccaggaatctgtatatatttatggccgggcagggtgtggggccatgcctcctcaggagccgaagcccaggggccggccagtggccttccccagcatgcaccacgggcccgggttgggtcaccagacggggctggagtgtgagggtcctgcagcctgcaggacctcgtgccaccccgagggctgagcctggtcccacgagggtgccgtgtcccctgacagggccagtgcagtttggtgtgtcctccgccttaccaggagaagaacctgaagaactatttttcgttattggttttccaatcatttgactaagagtct

SEQ ID NO: 112041 - DNA, 2846 bp, Homo sapiens
  Payload ID: 1952
  Gene Symbol: BCAR1
  Gene Name: breast cancer anti-estrogen resistance 1
  Uniprot ID: P56945
  ENST ID: ENST00000542031
  CDS Start-End: 182-2788
aaaggcctgtgacatttcctctggtggtttccacgaacccaggcgtcacccctcggtggagataaagtggagccacccagctccaccgtgtctcagcctggggtcggcctctgctgcttctggactcagtgaccctgggctgtcagggagcttctgagccttggttttcctgtctagtaagatggagaacgtgctggccaaagcgctctatgacaatgtggccgagtccccggatgagctctccttccgcaagggtgacatcatgacggtgctggagcaggacacgcagggcctggacggctggtggctctgctcgctgcatgggcgccagggcatcgtgcctgggaaccgcctcaagatcttggtgggcatgtatgataagaagccagcagggcctggccccggccctcccgccaccccggcccagcctcagcctggcctccatgccccagcgcctccggcctcccagtacacgcccatgctccccaacacctaccagccccagccagacagcgtctacctggtgcccactcccagcaaggctcagcaaggcctctaccaagtcccgggtcccagccctcagttccagtctcccccagccaagcagacatccaccttctcgaagcagacaccccatcacccgtttcccagcccggccacagacctgtaccaggtgcccccagggcctggaggccctgcccaggatatttaccaggtgccaccttctgccgggatggggcatgacatctaccaggtccccccgtccatggacacacgcagctgggagggcacgaagcccccggcaaaggtggtggtgcccacccgcgtggggcagggctatgtatacgaggccgcccagccggagcaggacgagtacgacatcccgcgacacctgctggccccggggccacaggacatctatgatgtgcccccggttcgggggctgcttcccagccagtatggccaggaggtgtatgacacaccccccatggctgtcaagggtcccaatggccgagacccgttgctggaggtgtatgacgtgccccccagtgtggagaagggcctgccaccgtccaaccaccacgcagtctacgacgttcctccatcggtgagcaaggatgtgcccgatggcccactgctgcgtgaggagacctacgatgtgccccccgccttcgccaaggccaagccctttgacccggcccgcaccccactggtactggctgcgccccctccagactccccgccggccgaggacgtgtatgacgtgccgcccccggctcctgacctctacgacgtgccccctggcttgcggcggcctggcccgggcaccctgtacgatgtgccccgtgaacgggtgcttcctcctgaggtggctgatggtggcgtggtcgacagtggtgtgtatgcggtgcctcccccagctgaacgtgaagccccggcagagggcaagcgcctgtcggcctccagcaccggcagcacacgcagcagccagtctgcgtcctccttggaggtggcagggccgggccgggaacccctggagctggaagttgctgtggaggccctggcacggctgcagcagggtgtgagcgccaccgttgcccaccttctggacctggcaggcagcgccggtgcgactgggagctggcgtagcccctctgagccacaggagccgctggtgcaggacctgcaggctgctgtggccgctgtccagagtgccgtccacgagctgttggagtttgcccgcagcgcggtgggcaatgctgcccacacatctgaccgtgccctgcatgccaagcttagccggcagctgcagaagatggaggacgtgcaccagacgctggtggcacatggtcaggccctcgacgctggccggggaggctctggagccacccttgaggacctggaccggctggtggcctgctcgcgggctgtgcccgaggacgccaagcagctggcctccttcctgcacggcaatgcctcactgctcttcagacggaccaaggccactgccccggggcctgaggggggtggcaccctgcaccccaaccccactgacaagaccagcagcatccagtcacgacccctgccctcaccccctaagttcacctcccaggactcgccagatgggcagtacgagaacagcgaggggggctggatggaggactatgactacgtccacctacaggggaaggaggagtttgagaagacccagaaggagctgctggaaaagggcagcatcacgcggcagggcaagagccagctggagttgcagcagctgaagcagtttgaacgactggaacaggaggtgtcacggcccatagaccacgacctggccaactggacgccagcccaacccctggccccggggcgaacaggcggcctggggccctcggaccggcagctgctgctcttctacctggagcagtgtgaggccaacctgaccacactgaccaacgccgtggacgccttctttaccgccgtggccaccaaccagccgcccaagatctttgtggcgcacagcaagttcgtcatcctcagcgcccacaagctggtgttcatcggggacacactgtcacggcaggccaaggctgctgacgtgcgcagccaggtgacccactacagcaacctgctgtgcgacctcctgcgcggcatcgtggccaccaccaaggccgctgccttgcagtacccatcgccttccgcggcccaggacatggtggagagggtcaaggagctgggccacagcacccagcagttccgccgcgtcctaggccagctggcagccgcctgagggtggtgaccccaggagggaggcaggggaggggtgcggcggtcccagctccctggct

SEQ ID NO: 112042 - DNA, 1340 bp, Homo sapiens
  Payload ID: 1952
  Gene Symbol: BCAR1
  Gene Name: breast cancer anti-estrogen resistance 1
  ENST ID: ENST00000546196
  CDS Start-End: 716-889
actttcctgggaagttttcctctcgctgcggaacccccggggccctgactggccgcttcctccccgctggccgtagggagttttctgtccgacaccccctcttcctggccgggcagcctggcttcggcagacccccgggccatgtttccacacttgggcactggcatctctgagcatctcagtctcacctcctgagaacagcaagtgatcctggctaccccgggtaaccaggcctcaggtgcaggccccacatgacagatggacagactgaagtgggaggtgggaggcggacaccccggcgtcctgccaggaagggacaccatctgcacctggcgagctgtggcctccagccatcgtttccctgcctagttaggggcttttccctccagagccctgtccactctggccttgtttctggaactgctcctcacccggaggaccccatcctttccgtgaagcaggcagtgggggctttctggcaagtggcctcttcattaactatcccagagtgagtgcagatgaccagagggaagctggccaagtgcaaagcattgttattgtggaattaaagagcccgctcctgctcgcctccagaagtggtaatgtatttacagatgaaaaaatgagggcttccagactgtgctgatgtgagccccgccatccgttctggttcagagcataatcgtctcgtcttcagaaagaaggaagacagaacatgcctgccaagcccttcctctcttctgttctgctctcctggaaagttctggacttctctggcccagggcctcaggggactggccagccctgctcctgtgggcactgggcagagggacaaggcggaccacctgagcctgctggagggccggtatcccagggcagtagtgattagggaatgtcactctggccacatcccagcctgggcgggcctctatggggaggtccccgtttgatttggtttggttgtccacagtcagagccaagctctgggcatggagtctgggatggcaccctgaccccttgccttacaggactttgggcagccttctttggcactgtgcctcatctgtaacaagagaggaacagcgggctgggtaggacttggacagataggcactgtcgtggggacctgcagcctggccacaccatcacgggctctgagtcatctcctaccctctcccttgtagtcacagcccaggagaattctgctgggggtgggcagaggtctttgccatctgccccctacgtggctggctggcagatcaccgtggctctctctcctgggaccttgggcagtgtgtgaggtggtggggccaagaggagaattcatttttggaacagtc

SEQ ID NO: 112043 - DNA, 3192 bp, Homo sapiens
  Payload ID: 1952
  Gene Symbol: BCAR1
  Gene Name: breast cancer anti-estrogen resistance 1
  Uniprot ID: P56945
  ENST ID: ENST00000538440
  CDS Start-End: 172-2784
atgcgcggcgcggctggagcggccggacagtccggcgtccgggaacgctcaggagccggaggagccggaaagcgccgggacccctcgcggggcctctgagcggcgcgggcggacccgagcccccagcccgctggcgccgctgcccgccaggccccgggggcggcggccaagatgtccgtgcctaacgtgctggccaaagcgctctatgacaatgtggccgagtccccggatgagctctccttccgcaagggtgacatcatgacggtgctggagcaggacacgcagggcctggacggctggtggctctgctcgctgcatgggcgccagggcatcgtgcctgggaaccgcctcaagatcttggtgggcatgtatgataagaagccagcagggcctggccccggccctcccgccaccccggcccagcctcagcctggcctccatgccccagcgcctccggcctcccagtacacgcccatgctccccaacacctaccagccccagccagacagcgtctacctggtgcccactcccagcaaggctcagcaaggcctctaccaagtcccgggtcccagccctcagttccagtctcccccagccaagcagacatccaccttctcgaagcagacaccccatcacccgtttcccagcccggccacagacctgtaccaggtgcccccagggcctggaggccctgcccaggatatttaccaggtgccaccttctgccgggatggggcatgacatctaccaggtccccccgtccatggacacacgcagctgggagggcacgaagcccccggcaaaggtggtggtgcccacccgcgtggggcagggctatgtatacgaggccgcccagccggagcaggacgagtacgacatcccgcgacacctgctggccccggggccacaggacatctatgatgtgcccccggttcgggggctgcttcccagccagtatggccaggaggtgtatgacacaccccccatggctgtcaagggtcccaatggccgagacccgttgctggaggtgtatgacgtgccccccagtgtggagaagggcctgccaccgtccaaccaccacgcagtctacgacgttcctccatcggtgagcaaggatgtgcccgatggcccactgctgcgtgaggagacctacgatgtgccccccgccttcgccaaggccaagccctttgacccggcccgcaccccactggtactggctgcgccccctccagactccccgccggccgaggacgtgtatgacgtgccgcccccggctcctgacctctacgacgtgccccctggcttgcggcggcctggcccgggcaccctgtacgatgtgccccgtgaacgggtgcttcctcctgaggtggctgatggtggcgtggtcgacagtggtgtgtatgcggtgcctcccccagctgaacgtgaagccccggcagagggcaagcgcctgtcggcctccagcaccggcagcacacgcagcagccagtctgcgtcctccttggaggtggcagggccgggccgggaacccctggagctggaagttgctgtggaggccctggcacggctgcagcagggtgtgagcgccaccgttgcccaccttctggacctggcaggcagcgccggtgcgactgggagctggcgtagcccctctgagccacaggagccgctggtgcaggacctgcaggctgctgtggccgctgtccagagtgccgtccacgagctgttggagtttgcccgcagcgcggtgggcaatgctgcccacacatctgaccgtgccctgcatgccaagcttagccggcagctgcagaagatggaggacgtgcaccagacgctggtggcacatggtcaggccctcgacgctggccggggaggctctggagccacccttgaggacctggaccggctggtggcctgctcgcgggctgtgcccgaggacgccaagcagctggcctccttcctgcacggcaatgcctcactgctcttcagacggaccaaggccactgccccggggcctgaggggggtggcaccctgcaccccaaccccactgacaagaccagcagcatccagtcacgacccctgccctcaccccctaagttcacctcccaggactcgccagatgggcagtacgagaacagcgaggggggctggatggaggactatgactacgtccacctacaggggaaggaggagtttgagaagacccagaaggagctgctggaaaagggcagcatcacgcggcagggcaagagccagctggagttgcagcagctgaagcagtttgaacgactggaacaggaggtgtcacggcccatagaccacgacctggccaactggacgccagcccaacccctggccccggggcgaacaggcggcctggggccctcggaccggcagctgctgctcttctacctggagcagtgtgaggccaacctgaccacactgaccaacgccgtggacgccttctttaccgccgtggccaccaaccagccgcccaagatctttgtggcgcacagcaagttcgtcatcctcagcgcccacaagctggtgttcatcggggacacactgtcacggcaggccaaggctgctgacgtgcgcagccaggtgacccactacagcaacctgctgtgcgacctcctgcgcggcatcgtggccaccaccaaggccgctgccttgcagtacccatcgccttccgcggcccaggacatggtggagagggtcaaggagctgggccacagcacccagcagttccgccgcgtcctaggccagctggcagccgcctgagggtggtgaccccaggagggaggcaggggaggggtgcggcggtcccagctccctggctcccatgtcaagagtcgctgtgccacaggcttagggacaggaccccagctctgcgtcggtcctggtgccctggatgcccaggaatctgtatatatttatggccgggcagggtgtggggccatgcctcctcaggagccgaagcccaggggccggccagtggccttccccagcatgcaccacgggcccgggttgggtcaccagacggggctggagtgtgagggtcctgcagcctgcaggacctcgtgccaccccgagggctgagcctggtcccacgagggtgccgtgtcccctgacagggccagtgcagtttggtgtgtcctccgccttaccaggagaagaacctgaagaact

SEQ ID NO: 112044 - DNA, 714 bp, Homo sapiens
  Payload ID: 1952
  Gene Symbol: BCAR1
  Gene Name: breast cancer anti-estrogen resistance 1
  ENST ID: ENST00000569340
  CDS Start-End: 1-714
gccctcagttccagtctcccccagccaagcagacatccaccttctcgaagcagacaccccatcacccgtttcccagcccggccacagacctgtaccaggtgcccccagggcctggaggccctgcccaggatatttaccaggtgccaccttctgccgggatggggcatgacatctaccaggtccccccgtccatggacacacgcagctgggagggcacgaagcccccggcaaaggtggtggtgcccacccgcgtggggcagggctatgtatacgaggccgcccagccggagcaggacgagtacgacatcccgcgacacctgctggccccggggccacaggacatctatgatgtgcccccggttcgggggctgcttcccagccagtatggccaggaggtctacgacgttcctccatcggtgagcaaggatgtgcccgatggcccactgctgcgtgaggagacctacgatgtgccccccgccttcgccaaggccaagccctttgacccggcccgcaccccactggtactggctgcgccccctccagactccccgccggccgaggacgtgtatgacgtgccgcccccggctcctgacctctacgacgtgccccctggcttgcggcggcctggcccgggcaccctgtacgatgtgccccgtgaacgggtgcttcctcctgaggtggctgatggtggcgtggtcgacagtggtgtgtatg

SEQ ID NO: 112045 - DNA, 4659 bp, Homo sapiens
  Payload ID: 1952
  Gene Symbol: BCAR1
  Gene Name: breast cancer anti-estrogen resistance 1
  ENST ID: ENST00000562556
  CDS Start-End: 716-889
actttcctgggaagttttcctctcgctgcggaacccccggggccctgactggccgcttcctccccgctggccgtagggagttttctgtccgacaccccctcttcctggccgggcagcctggcttcggcagacccccgggccatgtttccacacttgggcactggcatctctgagcatctcagtctcacctcctgagaacagcaagtgatcctggctaccccgggtaaccaggcctcaggtgcaggccccacatgacagatggacagactgaagtgggaggtgggaggcggacaccccggcgtcctgccaggaagggacaccatctgcacctggcgagctgtggcctccagccatcgtttccctgcctagttaggggcttttccctccagagccctgtccactctggccttgtttctggaactgctcctcacccggaggaccccatcctttccgtgaagcaggcagtgggggctttctggcaagtggcctcttcattaactatcccagagtgagtgcagatgaccagagggaagctggccaagtgcaaagcattgttattgtggaattaaagagcccgctcctgctcgcctccagaagtggtaatgtatttacagatgaaaaaatgagggcttccagactgtgctgatgtgagccccgccatccgttctggttcagagcataatcgtctcgtcttcagaaagaaggaagacagaacatgcctgccaagcccttcctctcttctgttctgctctcctggaaagttctggacttctctggcccagggcctcaggggactggccagccctgctcctgtgggcactgggcagagggacaaggcggaccacctgagcctgctggagggccggtatcccagggcagtagtgattagggaatgtcactctggccacatcccagcctgggcgggcctctatggggaggtccccgtttgatttggtttggttgtccacagtcagagccaagctctgggcatggagtctgggatggcaccctgaccccttgccttacaggactttgggcagccttctttggcactgtgcctcatctgtaacaagagaggaacagcgggctgggtaggacttggacagataggcactgtcgtggggacctgcagcctggccacaccatcacgggctctgagtcatctcctaccctctcccttgtagtcacagcccaggagaattctgctgggggtgggcagaggtctttgccatctgccccctacgtggctggctggcagatcaccgtggctctctctcctgggaccttgggcagtgtgtgaggtggtggggccaagaggagaattcatttttggaacagtcttgaagtgttcggaaaattgctttcatgtgctgaggaggccctgcggaggcttccagactgagctgcctgctcaagccctgcccttggaacccagagtggcgactgctcagggacacgtctgggttttaagcacacccatccatttgggcagtcttttcctagatgggctgacgcagcaggcactttggcccacagaaattataagatgcttcagaaggggatgggaggggaagcaggaacgtgctggccaaagcgctctatgacaatgtggccgagtccccggatgagctctccttccgcaagggtgacatcatgacggtgctggagcaggacacgcagggcctggacggctggtggctctgctcgctgcatgggcgccagggcatcgtgcctgggaaccgcctcaagatcttggtgggcatgtatgataagaagccagcagggcctggccccggccctcccgccaccccggcccagcctcagcctggcctccatgccccagcgcctccggcctcccagtacacgcccatgctccccaacacctaccagccccagccagacagcgtctacctggtgcccactcccagcaaggctcagcaaggcctctaccaagtcccgggtcccagccctcagttccagtctcccccagccaagcagacatccaccttctcgaagcagacaccccatcacccgtttcccagcccggccacagacctgtaccaggtgcccccagggcctggaggccctgcccaggatatttaccaggtgccaccttctgccgggatggggcatgacatctaccaggtccccccgtccatggacacacgcagctgggagggcacgaagcccccggcaaaggtggtggtgcccacccgcgtggggcagggctatgtatacgaggccgcccagccggagcaggacgagtacgacatcccgcgacacctgctggccccggggccacaggacatctatgatgtgcccccggttcgggggctgcttcccagccagtatggccaggaggtgtatgacacaccccccatggctgtcaagggtcccaatggccgagacccgttgctggaggtgtatgacgtgccccccagtgtggagaagggcctgccaccgtccaaccaccacgcagtctacgacgttcctccatcggtgagcaaggatgtgcccgatggcccactgctgcgtgaggagacctacgatgtgccccccgccttcgccaaggccaagccctttgacccggcccgcaccccactggtactggctgcgccccctccagactccccgccggccgaggacgtgtatgacgtgccgcccccggctcctgacctctacgacgtgccccctggcttgcggcggcctggcccgggcaccctgtacgatgtgccccgtgaacgggtgcttcctcctgaggtggctgatggtggcgtggtcgacagtggtgtgtatgcggtgcctcccccagctgaacgtgaagccccggcagagggcaagcgcctgtcggcctccagcaccggcagcacacgcagcagccagtctgcgtcctccttggaggtggcagggccgggccgggaacccctggagctggaagttgctgtggaggccctggcacggctgcagcagggtgtgagcgccaccgttgcccaccttctggacctggcaggcagcgccggtgcgactgggagctggcgtagcccctctgagccacaggagccgctggtgcaggacctgcaggctgctgtggccgctgtccagagtgccgtccacgagctgttggagtttgcccgcagcgcggtgggcaatgctgcccacacatctgaccgtgccctgcatgccaagcttagccggcagctgcagaagatggaggacgtgcaccagacgctggtggcacatggtcaggccctcgacgctggccggggaggctctggagccacccttgaggacctggaccggctggtggcctgctcgcgggctgtgcccgaggacgccaagcagctggcctccttcctgcacggcaatgcctcactgctcttcagacggaccaaggccactgccccggggcctgaggggggtggcaccctgcaccccaaccccactgacaagaccagcagcatccagtcacgacccctgccctcaccccctaagttcacctcccaggactcgccagatgggcagtacgagaacagcgaggggggctggatggaggactatgactacgtccacctacaggggaaggaggagtttgagaagacccagaaggagctgctggaaaagggcagcatcacgcggcagggcaagagccagctggagttgcagcagctgaagcagtttgaacgactggaacaggaggtgtcacggcccatagaccacgacctggccaactggacgccagcccaacccctggccccggggcgaacaggcggcctggggccctcggaccggcagctgctgctcttctacctggagcagtgtgaggccaacctgaccacactgaccaacgccgtggacgccttctttaccgccgtggccaccaaccagccgcccaagatctttgtggcgcacagcaagttcgtcatcctcagcgcccacaagctggtgttcatcggggacacactgtcacggcaggccaaggctgctgacgtgcgcagccaggtgacccactacagcaacctgctgtgcgacctcctgcgcggcatcgtggccaccaccaaggccgctgccttgcagtacccatcgccttccgcggcccaggacatggtggagagggtcaaggagctgggccacagcacccagcagttccgccgcgtcctaggccagctggcagccgcctgagggtggtgaccccaggagggaggcaggggaggggtgcggcggtcccagctccctggctcccatgtcaagagtcgctgtgccacaggcttagggacaggaccccagctctgcgtcggtcctggtgccctggatgcccaggaatctgtatatatttatggccgggcagggtgtggggccatgcctcctcaggagccgaagcccaggggccggccagtggccttccccagcatgcaccacgggcccgggttgggtcaccagacggggctggagtgtgagggtcctgcagcctgcaggacctcgtgccaccccgagggctgagcctggtcccacgagggtgccgtgtcccctgacagggccagtgcagtttggtgtgtcctccgccttaccaggagaagaacctgaagaactatttttcgttattggttttccaatcatttgactaagagtctccatttaaataaagtttttaaaaggaagagc

SEQ ID NO: 112046 - DNA, 558 bp, Homo sapiens
  Payload ID: 1952
  Gene Symbol: BCAR1
  Gene Name: breast cancer anti-estrogen resistance 1
  ENST ID: ENST00000564028
  CDS Start-End: 158-558
gtgcatttgttggagagcggtgtcctgcgccctaggctggaagcctggcctcgggcaggggcctggagcctcggggttggagaacgtgctggccaaagcgctctatgacaatgtggccgagtccccggatgagctctccttccgcaagggtgacatcatgacggtgctggagcaggacacgcagggcctggacggctggtggctctgctcgctgcatgggcgccagggcatcgtgcctgggaaccgcctcaagatcttggtgggcatgtatgataagaagccagcagggcctggccccggccctcccgccaccccggcccagcctcagcctggcctccatgccccagcgcctccggcctcccagtacacgcccatgctccccaacacctaccagccccagccagacagcgtctacctggtgcccactcccagcaaggctcagcaaggcctctaccaagtcccgggtcccagccctcagttccagtctcccccagccaagcagacatccaccttctcgaagcagacaccccatcacccgtttcccagcccggccacaga

SEQ ID NO: 112047 - DNA, 556 bp, Homo sapiens
  Payload ID: 1952
  Gene Symbol: BCAR1
  Gene Name: breast cancer anti-estrogen resistance 1
  ENST ID: ENST00000568864
  CDS Start-End: 152-556
cagccctgctcctgtgggcactgggcagagggacaaggcggaccacctgagcctgctggagggccggtatcccaggaacgtgctggccaaagcgctctatgacaatgtggccgagtccccggatgagctctccttccgcaagggtgacatcatgacggtgctggagcaggacacgcagggcctggacggctggtggctctgctcgctgcatgggcgccagggcatcgtgcctgggaaccgcctcaagatcttggtgggcatgtatgataagaagccagcagggcctggccccggccctcccgccaccccggcccagcctcagcctggcctccatgccccagcgcctccggcctcccagtacacgcccatgctccccaacacctaccagccccagccagacagcgtctacctggtgcccactcccagcaaggctcagcaaggcctctaccaagtcccgggtcccagccctcagttccagtctcccccagccaagcagacatccaccttctcgaagcagacaccccatcacccgtttcccagcccggccacagacctg

SEQ ID NO: 112048 - DNA, 547 bp, Homo sapiens
  Payload ID: 1952
  Gene Symbol: BCAR1
  Gene Name: breast cancer anti-estrogen resistance 1
  ENST ID: ENST00000566465
  CDS Start-End: 164-547
ataaaggcatctgctgtggtgctgcagccaaggccaggctgtgctctgtgcttgtgtcggggagcccttggcagtggccaccccacagaacgtgctggccaaagcgctctatgacaatgtggccgagtccccggatgagctctccttccgcaagggtgacatcatgacggtgctggagcaggacacgcagggcctggacggctggtggctctgctcgctgcatgggcgccagggcatcgtgcctgggaaccgcctcaagatcttggtgggcatgtatgataagaagccagcagggcctggccccggccctcccgccaccccggcccagcctcagcctggcctccatgccccagcgcctccggcctcccagtacacgcccatgctccccaacacctaccagccccagccagacagcgtctacctggtgcccactcccagcaaggctcagcaaggcctctaccaagtcccgggtcccagccctcagttccagtctcccccagccaagcagacatccaccttctcgaagcagacaccccatcacccgttt

SEQ ID NO: 112049 - DNA, 558 bp, Homo sapiens
  Payload ID: 1952
  Gene Symbol: BCAR1
  Gene Name: breast cancer anti-estrogen resistance 1
  ENST ID: ENST00000563323
  CDS Start-End: 383-558
tccggggtggggagctcctcttccctgggggtctcggggctcgctctcagctgggggagggcagaggggctccgggaggcctgctatgctgccccgcgatcaccttccgccggccgagccctcccggtctgcgcccggacacagggcctaggagcccggccagggccacagggcagtgtagtgttgggggaggggactggttgggcgacccagagctggtgcgactggaggtggcccgcgagggatcggcgaggagcggaggagaccgcgcctccccgccgcgttgggccgacagaaaaaggcctagaacgtgctggccaaagcgctctatgacaatgtggccgagtccccggatgagctctccttccgcaagggtgacatcatgacggtgctggagcaggacacgcagggcctggacggctggtggctctgctcgctgcatgggcgccagggcatcgtgcctgggaaccgcctcaagatcttggtgggcatgtatgataagaagccagcagggcctggccccggccctcccgccaccccggcccagcctcagcctgg

SEQ ID NO: 112050 - DNA, 581 bp, Homo sapiens
  Payload ID: 1952
  Gene Symbol: BCAR1
  Gene Name: breast cancer anti-estrogen resistance 1
  ENST ID: ENST00000567215
  CDS Start-End: 431-581
gcagatggggacactgaggtacagagagacagtcagttgtcctcagaattggatccagaacctcgtcttctggcatggccccccagtgcagcaccacatgtggcctccgaattcccagtctgggattgggggagctctggtccttgggggaccaccatgctcttttggagttgtcaacttggtaggaaccctctggttccaacgctgtgcctttgcggccctctcctggcatctgctgtccctttaggaggtcctaccacccttttcttctgagcctggacaactccttcccttgcccccaggagcccacagccggctaaaccaactggtcagctagaaccaaccagcaggggagaacgtgctggccaaagcgctctatgacaatgtggccgagtccccggatgagctctccttccgcaagggtgacatcatgacggtgctggagcaggacacgcagggcctggacggctggtggctctgctcgctgcatgggcgccagggcatcgtgcctgggaaccgcctcaagatcttggtgggcatgtatgataagaagccagcagggcctggccccggccctcccg

SEQ ID NO: 112051 - DNA, 594 bp, Homo sapiens
  Payload ID: 1952
  Gene Symbol: BCAR1
  Gene Name: breast cancer anti-estrogen resistance 1
  ENST ID: ENST00000561970
  CDS Start-End: 355-594
aatgattcactccggccgccggcgcggggttccgggagcggagcgggagtgggggcgggcgcgccgcgggctttgcagccccgcacgccgagcgccggtggaagccgggtcctggccacaggagtcctagccgcacgcgagtgtcgcgggagggggccagggccgggttctgcagtgtggacatgaaggctttggagtccatggttgggggacccgcaagagctagagcagggtcggagctccctctcgagggtccgagaggctgatcgctggaccgagaacgtgctggccaaagcgctctatgacaatgtggccgagtccccggatgagctctccttccgcaagggtgacatcatgacggtgctggagcaggacacgcagggcctggacggctggtggctctgctcgctgcatgggcgccagggcatcgtgcctgggaaccgcctcaagatcttggtgggcatgtatgataagaagccagcagggcctggccccggccctcccgccaccccggcccagcctcagcctggcctccatgccccagcgcctccggcctcccagtacacgcccatgctccccaacacctaccagccc

SEQ ID NO: 112052 - DNA, 574 bp, Homo sapiens
  Payload ID: 1952
  Gene Symbol: BCAR1
  Gene Name: breast cancer anti-estrogen resistance 1
  ENST ID: ENST00000569006
  CDS Start-End: 215-574
agtcctgagtgcatgctctgcggtctggggtcacctggggtgcttaccagtaggcacacgcctgggttatgaggtggaaggtgcgagctctgctggccatgggagctgcgtggggcattgcccctctctctgcctccagaacgtgctggccaaagcgctctatgacaatgtggccgagtccccggatgagctctccttccgcaagggtgacatcatgacggtgctggagcaggacacgcagggcctggacggctggtggctctgctcgctgcatgggcgccagggcatcgtgcctgggaaccgcctcaagatcttggtgggcatgtatgataagaagccagcagggcctggccccggccctcccgccaccccggcccagcctcagcctggcctccatgccccagcgcctccggcctcccagtacacgcccatgctccccaacacctaccagccccagccagacagcgtctacctggtgcccactcccagcaaggctcagcaaggcctctaccaagtcccgggtcccagccctcagttccagtctcccccagccaagcagacatccaccttctcg

SEQ ID NO: 112053 - DNA, 3171 bp, Homo sapiens
  Payload ID: 1953
  Gene Symbol: BCAR3
  Gene Name: breast cancer anti-estrogen resistance 3
  Uniprot ID: O75815
  ENST ID: ENST00000260502
  CDS Start-End: 244-2721
gcctgctgctggccgggcgggggacggggccgggaccggagccggagctgcggggcgcaccggctagacgcgcgcgggattctcggcgggcacgccccgcggaccatgagcgtccccagctccgggagcagccgcggcgcgggcggtgcgaggccggccgcgcggcgcctttgagccccagccggaggtccagagatcctgagagcccgagcgcccagcgccgcgccgggagagttgagaattatggctgcaggaaaatttgcaagccttcccagaaacatgccggtgaatcaccagttccccctggcctcatccatggaccttctgagcagcaggtcccctctcgctgagcatcgcccagatgcctatcaagatgtgtctatacatggcacccttccacggaagaaaaaaggtcctcctcccataaggtcctgtgatgacttcagtcacatgggcaccctcccccactccaaatccccacggcagaactcgcctgtgacccaggatggcatccaggagagcccatggcaggaccggcacggcgaaaccttcaccttcagggatccacatcttctggacccaactgtggaatatgtgaagttctccaaggagaggcacatcatggacaggacccccgagaaactgaagaaggagctggaggaggagctgctcctgagcagcgaggacctgcgcagccatgcctggtaccacggccgcatcccccgacaggtgtctgaaaaccttgtgcagcgagatggtgacttcctagttcgtgactctctgtccagccctgggaactttgtcctgacctgtcagtggaagaacctcgctcagcacttcaaaatcaaccggacagttctgcgactcagcgaggcctacagccgcgtgcagtaccagttcgagatggagagcttcgactccatccccggcctggtgcgctgctacgtgggcaaccgccggcccatctcccagcagagtggcgccatcatcttccagcccatcaacaggacggtgcctctgcggtgcctggaggagcattatggcacctccccaggccaggcccgggagggcagcctcaccaagggaaggccggatgtggccaagaggctgagcctcaccatgggtggcgtccaggcccgagagcagaatttgcccaggggaaacctcctcagaaacaaagaaaagagtggtagccagcccgcctgcctggatcacatgcaggacagaagagccttgtccctcaaagcccaccagtcagagagctacctgccgattggctgcaagctgccacctcagtcctcgggtgtggacacaagcccctgcccaaactcacctgtgttcaggacgggaagcgagcctgccctgagcccagcagtggttcggagggtctcctcagacgccagggctggggaggcgctgaggggatcagacagtcaactgtgccctaagcccccgcctaagccctgcaaggtgccgttcctcaaggttccctcgtctccctctgcctggctcaactcagaggccaactactgtgaactgaacccagcgtttgccacaggctgcggcaggggagcaaagctaccctcatgtgcccagggaagccacacagaactgctcacagccaagcagaatgaggcgccaggtccccggaactctggcgtcaactacttgatccttgatgatgatgacagggaaagaccttgggaacctgcggcagctcagatggagaaggggcagtgggacaagggcgagtttgtgacgcccctcctggagactgtctcctccttcaggcccaacgagtttgagtcaaagttccttccccctgagaataagcccctggaaacagcaatgttgaaacgtgcaaaagaactgttcaccaacaacgaccccaaggtcatcgcccagcacgtactgagcatggactgcagggttgctaggatacttggagtctctgaagagatgaggaggaacatgggggtgagctcaggcctggaactcattaccttgcctcacggacaccagctgcgcctggacataattgaaagacacaacacaatggccatcggcattgcagtggacattctgggatgcacgggcactttggaggaccgagcggccactctgagtaagatcatccaggtggcggtggaactgaaggattccatgggggacctctattccttctcagctctcatgaaagccctggaaatgccacagatcacaaggttagaaaagacgtggactgctctgcggcaccagtacacccaaactgccattctctatgagaaacagctgaagcccttcagcaaactcctgcatgaaggcagagagtccacatgtgttcccccaaacaatgtatcagtcccactgctgatgccgcttgtgacgttaatggagcgccaggctgtgacttttgaaggaaccgacatgtgggaaaaaaacgaccagagctgtgaaatcatgctgaaccatttggcaacagcgcgattcatggccgaggctgcagacagctaccggatgaatgctgagaggatcctggcaggttttcaaccagatgaagaaatgaatgaaatctgcaagactgaatttcaaatgcgattgctatggggcagcaaaggtgcacaagtcaatcagacagagagatatgagaaattcaaccagattttaactgccctctcgcgtaaattggaacctcctcctgtaaagcaggcagagctttgataactctccagagaacctttagaatatcttttcaagtttccccagcttcatctttgggaaagcttactgtttttgataaagtaataatgtgcaaatctgacaatatacaagcttttagtatccacaggatattaaacgtgtaaattgcacagagcacacttatttatgaattgtctaaagttactactgattttaaaatgaataatttattattaaggtaactactgctaatgttgatcagcaaatttaagagaagacctagctatgttggctggttgctttctattatcatggtatttgaccattttagttttaattccatgtcagataagtgtaaatagaagagtttaaaagcatgaaacatttcagaaggtatcagttatatgatattctttaaacaaatatgaaaaatgtaaatactcatgaatgaaaatacatctttttgtgaaa

SEQ ID NO: 112054 - DNA, 3200 bp, Homo sapiens
  Payload ID: 1953
  Gene Symbol: BCAR3
  Gene Name: breast cancer anti-estrogen resistance 3
  Uniprot ID: O75815
  ENST ID: ENST00000370243
  CDS Start-End: 276-2753
gagcgcgctgggactccccgagacgtggcccacggcggggagcgctcagcgattggcggccaggcatcttgctcggtggcactcgagcggcatcttcccgggcgctggcctcgcccgaccccctgcccgtcggagctgctctgccggccaccccgccctgtcccgcccgtcccctcttcgcagaagccggccggggtcgggcagatgcgagggcccagagcgctctggtggaagcccaaggctccgaggaggcgagtttctccgagttgagaattatggctgcaggaaaatttgcaagccttcccagaaacatgccggtgaatcaccagttccccctggcctcatccatggaccttctgagcagcaggtcccctctcgctgagcatcgcccagatgcctatcaagatgtgtctatacatggcacccttccacggaagaaaaaaggtcctcctcccataaggtcctgtgatgacttcagtcacatgggcaccctcccccactccaaatccccacggcagaactcgcctgtgacccaggatggcatccaggagagcccatggcaggaccggcacggcgaaaccttcaccttcagggatccacatcttctggacccaactgtggaatatgtgaagttctccaaggagaggcacatcatggacaggacccccgagaaactgaagaaggagctggaggaggagctgctcctgagcagcgaggacctgcgcagccatgcctggtaccacggccgcatcccccgacaggtgtctgaaaaccttgtgcagcgagatggtgacttcctagttcgtgactctctgtccagccctgggaactttgtcctgacctgtcagtggaagaacctcgctcagcacttcaaaatcaaccggacagttctgcgactcagcgaggcctacagccgcgtgcagtaccagttcgagatggagagcttcgactccatccccggcctggtgcgctgctacgtgggcaaccgccggcccatctcccagcagagtggcgccatcatcttccagcccatcaacaggacggtgcctctgcggtgcctggaggagcattatggcacctccccaggccaggcccgggagggcagcctcaccaagggaaggccggatgtggccaagaggctgagcctcaccatgggtggcgtccaggcccgagagcagaatttgcccaggggaaacctcctcagaaacaaagaaaagagtggtagccagcccgcctgcctggatcacatgcaggacagaagagccttgtccctcaaagcccaccagtcagagagctacctgccgattggctgcaagctgccacctcagtcctcgggtgtggacacaagcccctgcccaaactcacctgtgttcaggacgggaagcgagcctgccctgagcccagcagtggttcggagggtctcctcagacgccagggctggggaggcgctgaggggatcagacagtcaactgtgccctaagcccccgcctaagccctgcaaggtgccgttcctcaaggttccctcgtctccctctgcctggctcaactcagaggccaactactgtgaactgaacccagcgtttgccacaggctgcggcaggggagcaaagctaccctcatgtgcccagggaagccacacagaactgctcacagccaagcagaatgaggcgccaggtccccggaactctggcgtcaactacttgatccttgatgatgatgacagggaaagaccttgggaacctgcggcagctcagatggagaaggggcagtgggacaagggcgagtttgtgacgcccctcctggagactgtctcctccttcaggcccaacgagtttgagtcaaagttccttccccctgagaataagcccctggaaacagcaatgttgaaacgtgcaaaagaactgttcaccaacaacgaccccaaggtcatcgcccagcacgtactgagcatggactgcagggttgctaggatacttggagtctctgaagagatgaggaggaacatgggggtgagctcaggcctggaactcattaccttgcctcacggacaccagctgcgcctggacataattgaaagacacaacacaatggccatcggcattgcagtggacattctgggatgcacgggcactttggaggaccgagcggccactctgagtaagatcatccaggtggcggtggaactgaaggattccatgggggacctctattccttctcagctctcatgaaagccctggaaatgccacagatcacaaggttagaaaagacgtggactgctctgcggcaccagtacacccaaactgccattctctatgagaaacagctgaagcccttcagcaaactcctgcatgaaggcagagagtccacatgtgttcccccaaacaatgtatcagtcccactgctgatgccgcttgtgacgttaatggagcgccaggctgtgacttttgaaggaaccgacatgtgggaaaaaaacgaccagagctgtgaaatcatgctgaaccatttggcaacagcgcgattcatggccgaggctgcagacagctaccggatgaatgctgagaggatcctggcaggttttcaaccagatgaagaaatgaatgaaatctgcaagactgaatttcaaatgcgattgctatggggcagcaaaggtgcacaagtcaatcagacagagagatatgagaaattcaaccagattttaactgccctctcgcgtaaattggaacctcctcctgtaaagcaggcagagctttgataactctccagagaacctttagaatatcttttcaagtttccccagcttcatctttgggaaagcttactgtttttgataaagtaataatgtgcaaatctgacaatatacaagcttttagtatccacaggatattaaacgtgtaaattgcacagagcacacttatttatgaattgtctaaagttactactgattttaaaatgaataatttattattaaggtaactactgctaatgttgatcagcaaatttaagagaagacctagctatgttggctggttgctttctattatcatggtatttgaccattttagttttaattccatgtcagataagtgtaaatagaagagtttaaaagcatgaaacatttcagaaggtatcagttatatgatattctttaaacaaatatgaaaaatgtaaatactcatgaatgaaaatacatctttttgtg

SEQ ID NO: 112055 - DNA, 3217 bp, Homo sapiens
  Payload ID: 1953
  Gene Symbol: BCAR3
  Gene Name: breast cancer anti-estrogen resistance 3
  Uniprot ID: O75815
  ENST ID: ENST00000370244
  CDS Start-End: 290-2767
aagccgggccggtgacgccgggcctttacgtcgcgcctgtgagcggccgaggccgagcggcctcccctcgggctgcgagacggagacattacctcatccctcaagattgctcgctgcaaacacaacgctgagaaatggcccaagtaaagcgtgatcagggtcttgcattcttggcacatctaggaagaacgtgcaaggatgcgaattgtgaatcgcttctccaaacagagctgcttcatctgacccaagctggcctggagaaaggaggaagaggcaagagttgagaattatggctgcaggaaaatttgcaagccttcccagaaacatgccggtgaatcaccagttccccctggcctcatccatggaccttctgagcagcaggtcccctctcgctgagcatcgcccagatgcctatcaagatgtgtctatacatggcacccttccacggaagaaaaaaggtcctcctcccataaggtcctgtgatgacttcagtcacatgggcaccctcccccactccaaatccccacggcagaactcgcctgtgacccaggatggcatccaggagagcccatggcaggaccggcacggcgaaaccttcaccttcagggatccacatcttctggacccaactgtggaatatgtgaagttctccaaggagaggcacatcatggacaggacccccgagaaactgaagaaggagctggaggaggagctgctcctgagcagcgaggacctgcgcagccatgcctggtaccacggccgcatcccccgacaggtgtctgaaaaccttgtgcagcgagatggtgacttcctagttcgtgactctctgtccagccctgggaactttgtcctgacctgtcagtggaagaacctcgctcagcacttcaaaatcaaccggacagttctgcgactcagcgaggcctacagccgcgtgcagtaccagttcgagatggagagcttcgactccatccccggcctggtgcgctgctacgtgggcaaccgccggcccatctcccagcagagtggcgccatcatcttccagcccatcaacaggacggtgcctctgcggtgcctggaggagcattatggcacctccccaggccaggcccgggagggcagcctcaccaagggaaggccggatgtggccaagaggctgagcctcaccatgggtggcgtccaggcccgagagcagaatttgcccaggggaaacctcctcagaaacaaagaaaagagtggtagccagcccgcctgcctggatcacatgcaggacagaagagccttgtccctcaaagcccaccagtcagagagctacctgccgattggctgcaagctgccacctcagtcctcgggtgtggacacaagcccctgcccaaactcacctgtgttcaggacgggaagcgagcctgccctgagcccagcagtggttcggagggtctcctcagacgccagggctggggaggcgctgaggggatcagacagtcaactgtgccctaagcccccgcctaagccctgcaaggtgccgttcctcaaggttccctcgtctccctctgcctggctcaactcagaggccaactactgtgaactgaacccagcgtttgccacaggctgcggcaggggagcaaagctaccctcatgtgcccagggaagccacacagaactgctcacagccaagcagaatgaggcgccaggtccccggaactctggcgtcaactacttgatccttgatgatgatgacagggaaagaccttgggaacctgcggcagctcagatggagaaggggcagtgggacaagggcgagtttgtgacgcccctcctggagactgtctcctccttcaggcccaacgagtttgagtcaaagttccttccccctgagaataagcccctggaaacagcaatgttgaaacgtgcaaaagaactgttcaccaacaacgaccccaaggtcatcgcccagcacgtactgagcatggactgcagggttgctaggatacttggagtctctgaagagatgaggaggaacatgggggtgagctcaggcctggaactcattaccttgcctcacggacaccagctgcgcctggacataattgaaagacacaacacaatggccatcggcattgcagtggacattctgggatgcacgggcactttggaggaccgagcggccactctgagtaagatcatccaggtggcggtggaactgaaggattccatgggggacctctattccttctcagctctcatgaaagccctggaaatgccacagatcacaaggttagaaaagacgtggactgctctgcggcaccagtacacccaaactgccattctctatgagaaacagctgaagcccttcagcaaactcctgcatgaaggcagagagtccacatgtgttcccccaaacaatgtatcagtcccactgctgatgccgcttgtgacgttaatggagcgccaggctgtgacttttgaaggaaccgacatgtgggaaaaaaacgaccagagctgtgaaatcatgctgaaccatttggcaacagcgcgattcatggccgaggctgcagacagctaccggatgaatgctgagaggatcctggcaggttttcaaccagatgaagaaatgaatgaaatctgcaagactgaatttcaaatgcgattgctatggggcagcaaaggtgcacaagtcaatcagacagagagatatgagaaattcaaccagattttaactgccctctcgcgtaaattggaacctcctcctgtaaagcaggcagagctttgataactctccagagaacctttagaatatcttttcaagtttccccagcttcatctttgggaaagcttactgtttttgataaagtaataatgtgcaaatctgacaatatacaagcttttagtatccacaggatattaaacgtgtaaattgcacagagcacacttatttatgaattgtctaaagttactactgattttaaaatgaataatttattattaaggtaactactgctaatgttgatcagcaaatttaagagaagacctagctatgttggctggttgctttctattatcatggtatttgaccattttagttttaattccatgtcagataagtgtaaatagaagagtttaaaagcatgaaacatttcagaaggtatcagttatatgatattctttaaacaaatatgaaaaatgtaaatactcatgaatgaaaatacatctttttgtgaaa

SEQ ID NO: 112056 - DNA, 2827 bp, Homo sapiens
  Payload ID: 1953
  Gene Symbol: BCAR3
  Gene Name: breast cancer anti-estrogen resistance 3
  Uniprot ID: O75815
  ENST ID: ENST00000370247
  CDS Start-End: 168-2372
agactagcctgggagaaggagccgactcactcccccggctgccgacttccctgacttctgggcagaaacagcacagctgctgtggtgggctagggctttaacgtccgaagccccctttcttttaaccctaaagaaagtgtgtggtccccgggactgaagaccgaaagatgcctaaggaatgcagtgctttccacgccctctcagcagctctgtgctgcttctatcaccgcaagtctttcattggagtcaagttctccaaggagaggcacatcatggacaggacccccgagaaactgaagaaggagctggaggaggagctgctcctgagcagcgaggacctgcgcagccatgcctggtaccacggccgcatcccccgacaggtgtctgaaaaccttgtgcagcgagatggtgacttcctagttcgtgactctctgtccagccctgggaactttgtcctgacctgtcagtggaagaacctcgctcagcacttcaaaatcaaccggacagttctgcgactcagcgaggcctacagccgcgtgcagtaccagttcgagatggagagcttcgactccatccccggcctggtgcgctgctacgtgggcaaccgccggcccatctcccagcagagtggcgccatcatcttccagcccatcaacaggacggtgcctctgcggtgcctggaggagcattatggcacctccccaggccaggcccgggagggcagcctcaccaagggaaggccggatgtggccaagaggctgagcctcaccatgggtggcgtccaggcccgagagcagaatttgcccaggggaaacctcctcagaaacaaagaaaagagtggtagccagcccgcctgcctggatcacatgcaggacagaagagccttgtccctcaaagcccaccagtcagagagctacctgccgattggctgcaagctgccacctcagtcctcgggtgtggacacaagcccctgcccaaactcacctgtgttcaggacgggaagcgagcctgccctgagcccagcagtggttcggagggtctcctcagacgccagggctggggaggcgctgaggggatcagacagtcaactgtgccctaagcccccgcctaagccctgcaaggtgccgttcctcaaggttccctcgtctccctctgcctggctcaactcagaggccaactactgtgaactgaacccagcgtttgccacaggctgcggcaggggagcaaagctaccctcatgtgcccagggaagccacacagaactgctcacagccaagcagaatgaggcgccaggtccccggaactctggcgtcaactacttgatccttgatgatgatgacagggaaagaccttgggaacctgcggcagctcagatggagaaggggcagtgggacaagggcgagtttgtgacgcccctcctggagactgtctcctccttcaggcccaacgagtttgagtcaaagttccttccccctgagaataagcccctggaaacagcaatgttgaaacgtgcaaaagaactgttcaccaacaacgaccccaaggtcatcgcccagcacgtactgagcatggactgcagggttgctaggatacttggagtctctgaagagatgaggaggaacatgggggtgagctcaggcctggaactcattaccttgcctcacggacaccagctgcgcctggacataattgaaagacacaacacaatggccatcggcattgcagtggacattctgggatgcacgggcactttggaggaccgagcggccactctgagtaagatcatccaggtggcggtggaactgaaggattccatgggggacctctattccttctcagctctcatgaaagccctggaaatgccacagatcacaaggttagaaaagacgtggactgctctgcggcaccagtacacccaaactgccattctctatgagaaacagctgaagcccttcagcaaactcctgcatgaaggcagagagtccacatgtgttcccccaaacaatgtatcagtcccactgctgatgccgcttgtgacgttaatggagcgccaggctgtgacttttgaaggaaccgacatgtgggaaaaaaacgaccagagctgtgaaatcatgctgaaccatttggcaacagcgcgattcatggccgaggctgcagacagctaccggatgaatgctgagaggatcctggcaggttttcaaccagatgaagaaatgaatgaaatctgcaagactgaatttcaaatgcgattgctatggggcagcaaaggtgcacaagtcaatcagacagagagatatgagaaattcaaccagattttaactgccctctcgcgtaaattggaacctcctcctgtaaagcaggcagagctttgataactctccagagaacctttagaatatcttttcaagtttccccagcttcatctttgggaaagcttactgtttttgataaagtaataatgtgcaaatctgacaatatacaagcttttagtatccacaggatattaaacgtgtaaattgcacagagcacacttatttatgaattgtctaaagttactactgattttaaaatgaataatttattattaaggtaactactgctaatgttgatcagcaaatttaagagaagacctagctatgttggctggttgctttctattatcatggtatttgaccattttagttttaattccatgtcagataagtgtaaatagaagagtttaaaagcatgaaacatttcagaaggtatcagttatatgatattctttaaacaaatatgaaaaatgtaaatactcatgaatgaaaatacatctttttgtgaaacagtt

SEQ ID NO: 112057 - DNA, 2114 bp, Homo sapiens
  Payload ID: 1953
  Gene Symbol: BCAR3
  Gene Name: breast cancer anti-estrogen resistance 3
  Uniprot ID: O75815
  ENST ID: ENST00000539242
  CDS Start-End: 155-1660
cttttgtaatttgccctcggtcttgtcttatcttcgaaaggttgctggaatttctctgttccttggagtttgggggttttttgatttgttttttctttggtgcttgtaaagaaacaaagaaaagagtggtagccagcccgcctgcctggatcacatgcaggacagaagagccttgtccctcaaagcccaccagtcagagagctacctgccgattggctgcaagctgccacctcagtcctcgggtgtggacacaagcccctgcccaaactcacctgtgttcaggacgggaagcgagcctgccctgagcccagcagtggttcggagggtctcctcagacgccagggctggggaggcgctgaggggatcagacagtcaactgtgccctaagcccccgcctaagccctgcaaggtgccgttcctcaaggttccctcgtctccctctgcctggctcaactcagaggccaactactgtgaactgaacccagcgtttgccacaggctgcggcaggggagcaaagctaccctcatgtgcccagggaagccacacagaactgctcacagccaagcagaatgaggcgccaggtccccggaactctggcgtcaactacttgatccttgatgatgatgacagggaaagaccttgggaacctgcggcagctcagatggagaaggggcagtgggacaagggcgagtttgtgacgcccctcctggagactgtctcctccttcaggcccaacgagtttgagtcaaagttccttccccctgagaataagcccctggaaacagcaatgttgaaacgtgcaaaagaactgttcaccaacaacgaccccaaggtcatcgcccagcacgtactgagcatggactgcagggttgctaggatacttggagtctctgaagagatgaggaggaacatgggggtgagctcaggcctggaactcattaccttgcctcacggacaccagctgcgcctggacataattgaaagacacaacacaatggccatcggcattgcagtggacattctgggatgcacgggcactttggaggaccgagcggccactctgagtaagatcatccaggtggcggtggaactgaaggattccatgggggacctctattccttctcagctctcatgaaagccctggaaatgccacagatcacaaggttagaaaagacgtggactgctctgcggcaccagtacacccaaactgccattctctatgagaaacagctgaagcccttcagcaaactcctgcatgaaggcagagagtccacatgtgttcccccaaacaatgtatcagtcccactgctgatgccgcttgtgacgttaatggagcgccaggctgtgacttttgaaggaaccgacatgtgggaaaaaaacgaccagagctgtgaaatcatgctgaaccatttggcaacagcgcgattcatggccgaggctgcagacagctaccggatgaatgctgagaggatcctggcaggttttcaaccagatgaagaaatgaatgaaatctgcaagactgaatttcaaatgcgattgctatggggcagcaaaggtgcacaagtcaatcagacagagagatatgagaaattcaaccagattttaactgccctctcgcgtaaattggaacctcctcctgtaaagcaggcagagctttgataactctccagagaacctttagaatatcttttcaagtttccccagcttcatctttgggaaagcttactgtttttgataaagtaataatgtgcaaatctgacaatatacaagcttttagtatccacaggatattaaacgtgtaaattgcacagagcacacttatttatgaattgtctaaagttactactgattttaaaatgaataatttattattaaggtaactactgctaatgttgatcagcaaatttaagagaagacctagctatgttggctggttgctttctattatcatggtatttgaccattttagttttaattccatgtcagataagtgtaaatagaagagtttaaaagcatgaaacatttcagaaggtatcagttatatgatattctttaaacaaatatgaaaaatgtaaatactcatgaatgaaaatacatctttttgtgaaacagt

SEQ ID NO: 112058 - DNA, 1445 bp, Homo sapiens
  Payload ID: 1954
  Gene Symbol: BRMS1
  Gene Name: breast cancer metastasis suppressor 1
  Uniprot ID: Q9HCU9
  ENST ID: ENST00000359957
  CDS Start-End: 162-902
gatgacgcacacggaagcaccgataggctctgcctcccgaagaaaagggagccgcgcagcgcctacgggagtccggcggcagcagccggtaccggcaaccacgggcagctctcagggaatctccgtcgtgaggccagaggctccagtccccgcgagtccagatgcctgtccagcctccaagcaaagacacagaagagatggaagcagagggtgattctgctgctgagatgaatggggaggaggaagagagtgaggaggagcggagcggcagccagacagagtcagaagaggagagctccgagatggatgatgaggactatgagcgacgccgcagcgagtgtgtcagtgagatgctggacctagagaagcagttctcggagctaaaggagaagttgttcagggaacgactgagtcagctgcggttgcggctggaggaagtgggggctgagagagcccctgaatacacggagccccttggggggctgcagcggagcctcaagattcgcattcaggtggcagggatctacaagggcttctgtctggatgtgatcaggaataagtacgaatgtgagctgcagggagccaaacagcacctggagagtgagaagctgctgctctatgacacgctgcagggggagctgcaggagcggatccagaggctggaggaggaccgccagagcctggacctcagctctgaatggtgggatgacaaactgcacgccagaggcagctccaggtcttgggactccctgccgcccagcaagaggaagaaggcacctctggtttctggcccatacatcgtgtacatgcttcaagagatcgacatcctggaggactggacagccatcaaaaaggctagggcagctgtgtcccctcagaagagaaaatcggatggaccttgaccctgctgttcacagccagggggaccctcagagcagctggcactgcacccaggattctcgtcttcctcctgcagacaggcggacccacaggcccctcagggtctgcccagccaggctcctgtggtgctgctgggccctcccactccatctggcactggcctggactcctcctctgccctcctcgaggcctgcacagctgtggccgtggagctgacctgaccaggcaaggctgctgtctccatccctgagccgcctgccacctcccactcctgaagatccatctcttggggctcccctgacagagaagacagccgaagtcaaagccacatcctcttgctgatgttggatgcaggctgtccggcctcagggccagggagccagtttccactgtgcgggaactctgagtcagacgtgattatctgggggtctgtccaccctggctggatctggaggcaagatgccaggccccccaggtgttctcagggcagttcttggtgtctgcttctcagattccaaggactggaattaaaacctttcctggga

SEQ ID NO: 112059 - DNA, 1363 bp, Homo sapiens
  Payload ID: 1954
  Gene Symbol: BRMS1
  Gene Name: breast cancer metastasis suppressor 1
  ENST ID: ENST00000425825
  CDS Start-End: 156-1028
gcacacggaagcaccgataggctctgcctcccgaagaaaagggagccgcgcagcgcctacgggagtccggcggcagcagccggtaccggcaaccacgggcagctctcagggaatctccgtcgtgaggccagaggctccagtccccgcgagtccagatgcctgtccagcctccaagcaaagacacagaagagatggaagcagagggtgattctgctgctgagatgaatggggaggaggaagagagtgaggaggagcggagcggcagccagacagagtcagaagaggagagctccgagatggatgatgaggactatgagcgacgccgcagcgagtgtgtcagtgagatgctggacctagagaagcagttctcggagctaaaggagaagttgttcagggaacgactgagtcagctgcggttgcggctggaggaagtgggggctgagagagcccctgaatacacggagccccttggggggctgcagcggagcctcaagattcgcattcaggtggcagggatctacaagggcttctgtctggatgtgatcaggaataagtacgaatgtgagctgcagggagccaaacagcacctggagagtgagaagctgctgctctatgacacgctgcagggggagctgcaggagcggatccagaggctggaggaggaccgccagagcctggacctcagctctgaatggtgggatgacaaactgcacgccagaggcagctccaggtcttgggactccctgccgcccagcaagaggaagaaggcacctctggtttctggcccatacatcgtgtacatgcttcaagagatcgacatcctggaggactggacagccatcaaaaaggctagggcagctgtgtcccctcagaagagaaaatcggatgacaggcggacccacaggcccctcagggtctgcccagccaggctcctgtggtgctgctgggccctcccactccatctggcactggcctggactcctcctctgccctcctcgaggcctgcacagctgtggccgtggagctgacctgaccaggcaaggctgctgtctccatccctgagccgcctgccacctcccactcctgaagatccatctcttggggctcccctgacagagaagacagccgaagtcaaagccacatcctcttgctgatgttggatgcaggctgtccggcctcagggccagggagccagtttccactgtgcgggaactctgagtcagacgtgattatctgggggtctgtccaccctggctggatctggaggcaagatgccaggccccccaggtgttctcagggcagttcttggtgtctgcttctcagattccaaggactggaattaaaacctttcctgggactctgg

SEQ ID NO: 112060 - DNA, 1131 bp, Homo sapiens
  Payload ID: 1954
  Gene Symbol: BRMS1
  Gene Name: breast cancer metastasis suppressor 1
  ENST ID: ENST00000524699
  CDS Start-End: 1-802
gacagagtcagaagaggagagctccgagatggatgatgaggactatgagcgacgccgcagcgagtgtgtcagtgagatgctggacctagagaagcagttctcggagctaaaggagaagttgttcagggaacgactgagtcagctgcggttgcggctggaggaagtgggggctgagagagcccctgaatacacggagccccttggggggctgcagcggagcctcaagattcgcattcaggtggcagggatctacaagggcttctgtctggatgtgatcaggaataagtacgaatgtgagctgcagggagccaaacagcacctggagagtgagaagctgctgctctatgacacgctgcagggggagctgcaggagcggatccagaggctggaggaggaccgccagagcctggacctcagctctgaatggtgggatgacaaactgcacgccagaggcagctccaggtcttgggactccctgccgcccagcaagaggaagaaggcacctctggtttctggcccatacatcgtgtacatgcttcaagagatcgacatcctggaggactggacagccatcaaaaaggaccttgaccctgctgttcacagccagggggaccctcagagcagctggcactgcacccaggattctcgtcttcctcctgcagacaggcggacccacaggcccctcagggtctgcccagccaggctcctgtggtgctgctgggccctcccactccatctggcactggcctggactcctcctctgccctcctcgaggcctgcacagctgtggccgtggagctgacctgaccaggcaaggctgctgtctccatccctgagccgcctgccacctcccactcctgaagatccatctcttggggctcccctgacagagaagacagccgaagtcaaagccacatcctcttgctgatgttggatgcaggctgtccggcctcagggccagggagccagtttccactgtgcgggaactctgagtcagacgtgattatctgggggtctgtccaccctggctggatctggaggcaagatgccaggccccccaggtgttctcagggcagttcttggtgtctgcttctcagattccaaggactggaattaaaacctttcctggga

SEQ ID NO: 112061 - DNA, 963 bp, Homo sapiens
  Payload ID: 1954
  Gene Symbol: BRMS1
  Gene Name: breast cancer metastasis suppressor 1
  ENST ID: ENST00000530756
  CDS Start-End: 231-963
agaagggagcgggaggccccctgggcgctgcggagaagctggattgacctctgcgagagtggggagggtctgccttccctaggggcctgccccggaggagctgccattctgaaaagataaattgcctgtgtacagcgctttacagtgtgcttttccatcccttaccacctgtgagctcctcaacactcagagcaggaatggttatccgctttttgcacccgggagtccagatgcctgtccagcctccaagcaaagacacagaagagatggaagcagagggtgattctgctgctgagatgaatggggaggaggaagagagtgaggaggagcggagcggcagccagacagagtcagaagaggagagctccgagatggatgatgaggactatgagcgacgccgcagcgagtgtgtcagtgagatgctggacctagagaagcagttctcggagctaaaggagaagttgttcagggaacgactgagtcagctgcggttgcggctggaggaagtgggggctgagagagcccctgaatacacggagccccttggggggctgcagcggagcctcaagattcgcattcaggtggcagggatctacaagggcttctgtctggatgtgatcaggaataagtacgaatgtgagctgcagggagccaaacagcacctggagagtgagaagctgctgctctatgacacgctgcagggggagctgcaggagcggatccagaggctggaggaggaccgccagagcctggacctcagctctgaatggtgggatgacaaactgcacgccagaggcagctccaggtcttgggactccctgccgcccagcaagaggaagaaggcacctctggtttctggcccatacatcgtgtacatgcttcaagagatcgacatcctggaggactggacagccatcaaaaaggctagggcagctgtgtcccctcagaagagaaaatcggatg

SEQ ID NO: 112062 - DNA, 913 bp, Homo sapiens
  Payload ID: 1954
  Gene Symbol: BRMS1
  Gene Name: breast cancer metastasis suppressor 1
  ENST ID: ENST00000527375
  CDS Start-End: 116-496
gggagccgcgcagcgcctacgggagtccggcggcagcagccggtaccggcaaccacgggcagctctcagggaatctccgtcgtgaggccagaggctccagtccccgcgagtccagatgcctgtccagcctccaagcaaagacacagaagagatggaagcagagggtgattctgctgctgagatgaatggggaggaggaagagagtgaggaggagcggagcggcagccagacagagtcagaagaggagagctccgagatggatgatgaggactatgagcgacgccgcagcgagtgtgtcagtgagatgctggacctagagaagcagttctcggagctaaaggagaagttgttcagggaacgactgagtcagctgcggttgcggctggaggaagtgggggctgagagagcccctgaatacacggagccccttggggggctgcagcggagcctcaagattcgcattcagggatctacaagggcttctgtctggatgtgatcaggaataagtacgaatgtgagctgcagggagccaaacagcacctggagagtgagaagctgctgctctatgacacgctgcagggggagctgcaggagcggatccagaggctggaggaggaccgccagagcctggacctcagctctgaatggtgggatgacaaactgcacgccagaggcagctccaggtcttgggactccctgccgcccagcaagaggaagaaggcacctctggtttctggcccatacatcgtgtacatgcttcaagagatcgacatcctggaggactggacagccatcaaaaaggaccttgaccctgctgttcacagccagggggaccctcagagcagctggcactgcacccaggattctcgtcttcctcctgcagacaggcggacccacaggcccctcagggtct

SEQ ID NO: 112063 - DNA, 2657 bp, Homo sapiens
  Payload ID: 1955
  Gene Symbol: BRMS1L
  Gene Name: breast cancer metastasis-suppressor 1-like
  Uniprot ID: Q5PSV4
  ENST ID: ENST00000216807
  CDS Start-End: 200-1171
ggaaggcctccgccaatggcagagctcccatcgcagagcctgcgggttaggttgtgaggcccgggccgggggcggggaggagccaagggggcgagcaagctcggtggctgggtgggttggggcgttccgcgcgcccttcattgaagcggcggtggccgggctgggcgccggtagtggaaagcgacggcgcggctggaaaatgccagtccattcccgaggggataagaaggagaccaaccatcacgatgagatggaggtggactacgccgaaaatgaggggagcagctccgaggacgaggacactgagagctcgtcggtctccgaggatggagatagctcagaaatggatgatgaagactgtgaaagaagaagaatggaatgtttggatgaaatgtccaatcttgaaaaacagtttaccgatctcaaagatcaactttataaagaacgattaagtcaggtggatgcaaaactacaagaagtcatagctggaaaagcaccagaatacttggaaccgctggcaactttacaggaaaatatgcaaattcgtacaaaggtagcaggaatctatagagagctctgcttagaatctgtaaagaacaaatatgaatgtgaaattcaagcttctcgccagcattgtgagagcgaaaagctgttgctatatgatacagtccagagtgaactagaggagaagataagaaggcttgaagaggataggcacagcattgatattacctcagagctgtggaatgatgagcttcagtcaagaaaaaagaggaaggatcctttcagtcctgacaaaaagaagccagttgttgtttcaggtccatatatagtttatatgctacaagatcttgatattcttgaagactggacaacaattaggaaggcaatggctacattggggccacacagagtgaaaacggaaccacctgtgaaactggaaaaacatctgcacagtgctagatctgaagagggaagactatattatgatggtgaatggtatatacgtggacaaacaatatgtattgataaaaaagatgaatgtcctacaagtgctgtaattacaacaattaaccatgatgaagtttggtttaagaggcctgatggaagcaaatctaagctttacatttcacagctacagaaaggaaaatattcaattaaacattcataatcatgatttaagtgttatctaaatttaccttattagtgttaccaaatgtaagtgccatgagagtaaaaaaatgtattcaataacttaatattctcactgaatcatgagagaatgtgtatttgtaggtagtactctaaatagatctcattgatatgttattaaaagaaacagtaataaaaattttatcacgatccttacgttgatttgcctcttaggtccgatgaccaataggtattctgtatatggtaggggtttctttctaaacatttttctttggttttaaaaaaagttatgcaaatttgtcttatctttagtaaactatgactacatttatctgcaatttttaaaattttccatatctttgtcattcattgtgtgtttgtaaataaggccgatagaatgtttcctataaatggtttgtactagtacattagtgttaaaccagaactgaaatttaaacatatatatatatgaggatgtatatatggcatcatcagcttatttagaactgatggccataccttacaatcttgttttacccaaaattaagctattggggttgaaagctaaaaggagcacttttgtagaatagcaacttttcttttcctctttcttgattgtatggtggggtggtgacctatttttacaaattatacctaatgagtaaaattagtgtaaagtgataacatgcttctacctgtatttctagtgaccctttagcggcaggtatttatacctggtatttatgatgcagtatataagtggtgaacaataactgacagtattgtgcttgctgtacatgtctggtcttttgaaacagattttagtaagcattttccagaggtaaaactgtgtccttattctaattttattcctagggcaaagtagacagggattatttccttgaatctatttccaaattaatatttttttctttggtatttctacactttaaggccatttggtgcaatttagaaagtgttggcctcccttccgctagccacattcaaaattaacttccaaaacctcaggaacagtacaaagaattgaaaccctcaatatggcagcacagccggctgtagtgtatatttagggtacaccaaatcaggtattcctggtggtcttgtgcactttaatttctgttacaatgagttaagaggatgaggaagaaatctacttattaacacttactgcagaaatgtctgcattattccgtttgttttcttattattttacctctccaaacatcttcctgtgcagatcactacttcatagttgccaaattttaaaacacttaactgctgaaattcagtgtcagcaaagtgatattacgttgttctgtttctaattaaccttagcaaatgtacataatgtcaaaacccaatagtatttgacagtacttatgtatacaatgtttgataagcatttttaataagatttgtatttttaaatttagtatataataaaaagatgtgtttcagtgtga

SEQ ID NO: 112064 - DNA, 1201 bp, Homo sapiens
  Payload ID: 1955
  Gene Symbol: BRMS1L
  Gene Name: breast cancer metastasis-suppressor 1-like
  ENST ID: ENST00000551774
  CDS Start-End: 1-647
aggtggatgcaaaactacaagaagtcatagctggaaaagcaccagaatacttggaaccgctggcaactttacaggaaaatatgcaaattcgtacaaaggtagcaggaatctatagagagctctgcttagaatctgtaaagaacaaatatgaatgtgaaattcaagcttctcgccagcattgtgagagcgaaaagctgttgctatatgatacagtccagagtgaactagaggagaagataagaaggcttgaagaggataggcacagcattgatattacctcagagctgtggaatgatgagcttcagtcaagaaaaaagaggaaggatcctttcagtcctgacaaaaagaagccagttgttgtttcaggtccatatatagtttatatgctacaagatcttgatattcttgaagactggacaacaattaggaaggcaatggctacattggggccacacagagtgaaaacggaaccacctgtgaaactggaaaaacatctgcacagtgctagatctgaagagggaagactatattatgatggtgaatggtatatacgtggacaaacaatatgtattgataaaaaagatgaatgtcctacaaggtcatacaatgctgcatatgtgtaccctattggcgtcattatgaagtaattagtttgcgtgtgtgagttgtggcacaggactcaatgcttggcaagctgatattcatatattttgtcttattttagctcttagaatgagccagatatttgaaatatttgtggcacttttctttttaaaggtcaaaacatttaaaactatgtactttgagtatcatgaatttagttctacagataaagaacaaaactgataattctcgaaagttttattaaagtcaatttatatttaagttatatgtatatctcctaaacattgtgaatctgtcttagtccaggatcttataacttttcgccagaactattgaagtattctttcaattggttcctgctgtggacagactaaatggctgtaggatgactccaattattctacccctggtggtctgccctgtgtaactccctcccctcaaatgtgtgccaagcctgggacttgcttctcacctacagaatatgacaaagatgaggagatttttcagatataattaaggttccaaatcagtttttgagttaattgaaagattatcctgggtgggccttacttgatca

SEQ ID NO: 112065 - DNA, 650 bp, Homo sapiens
  Payload ID: 1955
  Gene Symbol: BRMS1L
  Gene Name: breast cancer metastasis-suppressor 1-like
  ENST ID: ENST00000547420
  CDS Start-End: 72-218
gcgcgcccttcattgaagcggcggtggccgggctgggcgccggtagtggaaagcgacggcgcggctggaaaatgccagtccattcccgaggggataagaaggagaccaaccatcacgatgagatggaggtggactacgccgaaaatgaggggagcagctccgaggacgaggacactgagagctcgtcggtctccgaggatggagatagctcagtttgacttttatttgatgaagatcaagatgcagatcattttgtgcttcagttattttgatgaatgaatatatgtgatatgaacatagaaaatgtggactataggacagacctgaaatggatgatgaagactgtgaaagaagaagaatggaatgtttggatgaaatgtccaatcttgaaaaacagtttaccgatctcaaagatcaactttataaagaacgattaagtcaggtggatgcaaaactacaagaagtcatagctggaaaagcaccagaatacttggaaccgctggcaactttacaggaaaatatgcaaattcgtacaaaggtagcagtctcagtggccaggaatttgggagcaacttagctggatggttctggctcagggaatcccaagaagttgcagtgaagatatcagccagggatgcagtcatctcaag

SEQ ID NO: 112066 - DNA, 1544 bp, Homo sapiens
  Payload ID: 1955
  Gene Symbol: BRMS1L
  Gene Name: breast cancer metastasis-suppressor 1-like
  ENST ID: ENST00000552677
  CDS Start-End: 77-223
gttccgcgcgcccttcattgaagcggcggtggccgggctgggcgccggtagtggaaagcgacggcgcggctggaaaatgccagtccattcccgaggggataagaaggagaccaaccatcacgatgagatggaggtggactacgccgaaaatgaggggagcagctccgaggacgaggacactgagagctcgtcggtctccgaggatggagatagctcagtttgacttttatttgatgaagatcaagatgcagatcattttgtgcttcagttattttgatgaatgaatatatgtgatatgaacatagaaaatgtggactataggacagacctgaaatggatgatgaagactgtgaaagaagaagaatggaatgtttggatgaaatgtccaatcttgaaaaacagtttaccgatctcaaagatcaactttataaagaacgattaagtcaggtggatgcaaaactacaagaagtcatagctggaaaagcaccagaatacttggaaccgctggcaactttacaggaaaatatgcaaattcgtacaaaggtagcaggaatctatagagagctctgcttagaatctgtaaagaacaaatatgaatgtgaaattcaagcttctcgccagcattgtgagagcgaaaagctgttgctatatgatacagtccagagtgaactagaggagaagataagaaggcttgaagaggataggcacagcattgatattacctcagagctgtggaatgatgagcttcagtcaagaaaaaagaggaaggatcctttcagtcctgacaaaaagaagccagttgttgtttcaggtccatatatagtttatatgctacaagatcttgatattcttgaagactggacaacaattaggaaggcaatggctacattggggccacacagagtgaaaacggaaccacctgtgaaactggaaaaacatctgcacagtgctagatctgaagagggaagactatattatgatggtgaatggtatatacgtggacaaacaatatgtattgataaaaaagatgaatgtcctacaagtgctgtaattacaacaattaaccatgatgaagtttggtttaagaggcctgatggaagcaaatctaagctttacatttcacagctacagaaaggaaaatattcaattaaacattcataatcatgatttaagtgttatctaaatttaccttattagtgttaccaaatgtaagtgccatgagagtaaaaaaatgtattcaataacttaatattctcactgaatcatgagagaatgtgtatttgtaggtagtactctaaatagatctcattgatatgttattaaaagaaacagtaataaaaattttatcacgatccttacgttgatttgcctcttaggtccgatgaccaataggtattctgtatatggtaggggtttctttctaaacatttttctttggttttaaaaaaagttatgcaaatttgtcttatctttagtaaactatgactacatttatctgcaatttttaaaattttccatatctttgtcattcattgtgtgtttgt

SEQ ID NO: 112067 - DNA, 3020 bp, Homo sapiens
  Payload ID: 1956
  Gene Symbol: BCAS1
  Gene Name: breast carcinoma amplified sequence 1
  ENST ID: ENST00000371435
  CDS Start-End: 119-1639
gctccaccgacagccaggcactgggcagcacgcactggagacccaggaccctgtgcaggagcagctccgggtgacacgaggggactgaagatactcccacaggggctcagcaggagcaatgggtaaccaaatgagtgttccccaaagagttgaagaccaagagaatgaaccagaagcagagacttaccaggacaacgcgtctgctctgaacggggttccagtggtggtgtcgacccacacagttcagcacttagaggaagtcgacttgggaataagtgtcaagacggataatgtggccacttcttcccccgagacaacggagataagtgctgttgcggatgccaacggaaagaatcttgggaaagaggccaaacccgaggcaccagctgctaaatctcgttttttcttgatgctctctcggcctgtaccaggacgtaccggagaccaagccgcagattcatcccttggatcagtgaagcttgatgtcagctccaataaagctccagcgaacaaagacccaagtgagagctggacacttccggtggcagctggaccggggcaggacacagataaaaccccagggcacgccccggcccaagacaaggtcctctctgccgccagggatcccacgcttctcccacctgagacagggggagcaggaggagaagctccctccaagcccaaggactccagcttttttgacaaattcttcaagctggacaagggacaggaaaaggtgccaggtgacagccaacaggaagccaagagggcagagcatcaagacaaggtggatgaggttcctggcttatcagggcagtccgatgatgtccctgcagggaaggacatagttgacggcaaggaaaaagaaggacaagaacttggaactgcggattgctctgtccctggggacccagaaggactggagactgcaaaggacgattcccaggcagcagctatagcagagaataataattccatcatgagtttctttaaaactctggtttcacctaacaaagctgaaacaaaaaaggacccagaagacacgggtgctgaaaagtcacccaccacttcagctgaccttaagtcagacaaagccaactttacatcccaggagacccaaggggctggcaagaattccaaaggatgcaacccatcggggcacacacagtccgtgacaacccctgaacctgcgaaggaaggcaccaaggagaaatcaggacccacctctctgcctctgggcaaactgttttggaaaaagtcagttaaagaggactcagtccccacaggtgcggaggagaatacatcagactccacagaaaagactatcacaccgccagagcctgaaccaacaggagcaccacagaagggtaaagagggctcctcgaaggacaagaagtcagcagccgagatgaacaagcagaagagcaacaagcaggaagccaaagaaccagcccagtgcacagagcaggccacggtggacacgaactcactgcagaatggggacaagctccaaaagagacctgagaagcggcagcagtcccttgggggcttctttaaaggcctgggaccaaagcggatgttggatgctcaagtgcaaacagacccagtatccatcggaccagttggcaaatccaagtaaacaaatcagcacggttcccaccaggttctcctgccaccaagatgtgttctccttactccatctcctccccaaacacgctccatgtatatattcttctgatggccagcaaatgaaattctgcctagaaattaagcccgagctgttgtatattgaggtgtattatttacgtctctggtccagtcttttctggcaaataacagtaaagatggtttagcaggtcacctagttgggtcagaagagtcgatgatcaccaagcaggaaagggagggaatagaggaatgtgttcgggttaagtgatgaaaatggcagtggtggccgggcgtggtggctctcgcctgtaatctcagcactttgggaggccgaggcaggtggatcacctgaggtcaggagttcaagactagcctggccaacatcatgaaaccccgtctctactaaaaatacaaaaattagccaggcatggtggcacacacctgtagtcccagctactcgggagcccaacgcacgagaaccgcttgtacccaggaggtggaggttgcagtgagccgaagttgcaccattgcactccaccctgggcgacagagcaagattctatcaaaaaaaaaaaaaggcagtggcaagtaagttatagaagagaaatgctgctagaaggaattaagcgttgtagtaaatgcgtgcttatcctctaagcttgaagaagggagacgaaaatccatttgtttaaattcacatctcaaggagggagaacccgggctgtgttgggtggttgccaatttcctagaacggaatgtgtggggtatagaaaaaggaatgaataagcgttgtttttcaaatagggtccttgtaagttattgatgagagggaaaagattgactggggagggcttaaaatgatttgggaaaacaattgcttttgaggctcagtgacaacggcaaagattacaacttaaaaaaaaaaaataaataaaaaataaaggaagttgcacggttattttgcaacacaagggggcggcaaggtccccatttttatcctgtaatactgtatccctaacaaagatttggtctctgctatcttacattattaatgtttctcagatggctgaggggctcgcttcatctgttccgtctgacacttatctcaagtgtgtctgtcattcctaatgttctcaggatgtgctctgataaaaccctccccataacctcagttaataaaaatttacagaagacttctcaaatacctgagttgtttttaatacctgtacaaaggagtaaataggaccctgagtctattaaaatgtaattcaaagtagcatatgattgactgacagtcatgtaaactgtatctttctttttctgatttaataaaaaatacatttacttctaaa

SEQ ID NO: 112068 - DNA, 2581 bp, Homo sapiens
  Payload ID: 1956
  Gene Symbol: BCAS1
  Gene Name: breast carcinoma amplified sequence 1
  ENST ID: ENST00000371440
  CDS Start-End: 483-1637
gctccaccgacagccaggcactgggcagcacgcactggagacccaggaccctgtgcaggagcagctccgggtgacacgaggggactgaagatactcccacaggggctcagcaggagcaatgggtaaccaaatgagtgttccccaaagagttgaagaccaagagaatgaaccagaagcagagacttaccaggacaacgcgtctgctctgaacggggttccagtggtggtgtcgacccacacagttcagcacttagaggaagtcgacttgggaataagtgtcaagacggataatgtggccacttcttcccccgagacaacggagataagtgctgttgcggatgccaacggaaagaatcttgggaaagaggccaaacccgaggcaccagctgctaaatctcgttttttcttgatgctctctcggcctgtaccaggacgtaccggagaccaagccgcagattcatcccttggatcagtgaagcttgatgtcagctccaataaagctccagcgaacaaagacccaagtgagagctggacacttccggtggcagctggaccggggcaggacacagataaaaccccagggcacgccccggcccaagacaaggtcctctctgccgccagggatcccacgcttctcccacctgagacagggggagcaggaggagaagctccctccaagcccaaggactccagcttttgacaaattcttcaagctggacaagggacaggaaaaggtgccaggtgacagccaacaggaagccaagagggcagagcatcaagacaaggtggatgaggttcctggcttatcagggcagtccgatgatgtccctgcagggaaggacatagttgacggcaaggaaaaagaaggacaagaacttggaactgcggattgctctgtccctggggacccagaaggactggagactgcaaaggacgattcccaggcagcagctatagcagagaataataattccatcatgagtttctttaaaactctggtttcacctaacaaagctgaaacaaaaaaggacccagaagacacgggtgctgaaaagtcacccaccacttcagctgaccttaagtcagacaaagccaactttacatcccaggagacccaaggggctggcaagaattccaaaggatgcaacccatcggggcacacacagtccgtgacaacccctgaacctgcgaaggaaggcaccaaggagaaatcaggacccacctctctgcctctgggcaaactgttttggaaaaagtcagttaaagaggactcagtccccacaggtgcggaggagaatacatcagactccacagaaaagactatcacaccgccagagcctgaaccaacaggagcaccacagaagggtaaagagggctcctcgaaggacaagaagtcagcagccgagatgaacaagcagaagagcaacaagcaggaagccaaagaaccagcccagtgcacagagcaggccacggtggacacgaactcactgcagaatggggacaagctccaaaagagacctgagaagcggcagcagtcccttgggggcttctttaaaggcctgggaccaaagcggatgttggatgctcaagtgcaaacagacccagtatccatcggaccagttggcaaatccaagtaaacaaatcagcacggttcccaccaggttctcctgccaccaagatgtgttctccttactccatctcctccccaaacacgctccatgtatatattcttctgatggccagcaaatgaaattctgcctagaaattaagcccgagctgttgtatattgaggtgtattatttacgtctctggtccagtcttttctggcaaataacagtaaagatggtttagcaggtcacctagttgggtcagaagagtcgatgatcaccaagcaggaaagggagggaatagaggaatgtgttcgggttaagtgatgaaaatggcagtggtggccgggcgtggtggctctcgcctgtaatctcagcactttgggaggccgaggcaggtggatcacctgaggtcaggagttcaagactagcctggccaacatcatgaaaccccgtctctactaaaaatacaaaaattagccaggcatggtggcacacacctgtagtcccagctactcgggagcccaacgcacgagaaccgcttgtacccaggaggtggaggttgcagtgagccgaagttgcaccattgcactccaccctgggcgacagagcaagattctatcaaaaaaaaaaaaaggcagtggcaagtaagttatagaagagaaatgctgctagaaggaattaagcgttgtagtaaatgcgtgcttatcctctaagcttgaagaagggagacgaaaatccatttgtttaaattcacatctcaaggagggagaacccgggctgtgttgggtggttgccaatttcctagaacggaatgtgtggggtatagaaaaaggaatgaataagcgttgtttttcaaatagggtccttgtaagttattgatgagagggaaaagattgactggggagggcttaaaatgatttgggaaaacaattgcttttgaggctcagtgacaacggcaaagattacaactt

SEQ ID NO: 112069 - DNA, 3303 bp, Homo sapiens
  Payload ID: 1956
  Gene Symbol: BCAS1
  Gene Name: breast carcinoma amplified sequence 1
  Uniprot ID: O75363
  ENST ID: ENST00000395961
  CDS Start-End: 168-1922
gtattcagccagcaggctctgcacaaggaagcaaagtgcagggagccaggctccaccgacagccaggcactgggcagcacgcactggagacccaggaccctgtgcaggagcagctccgggtgacacgaggggactgaagatactcccacaggggctcagcaggagcaatgggtaaccaaatgagtgttccccaaagagttgaagaccaagagaatgaaccagaagcagagacttaccaggacaacgcgtctgctctgaacggggttccagtggtggtgtcgacccacacagttcagcacttagaggaagtcgacttgggaataagtgtcaagacggataatgtggccacttcttcccccgagacaacggagataagtgctgttgcggatgccaacggaaagaatcttgggaaagaggccaaacccgaggcaccagctgctaaatctcgttttttcttgatgctctctcggcctgtaccaggacgtaccggagaccaagccgcagattcatcccttggatcagtgaagcttgatgtcagctccaataaagctccagcgaacaaagacccaagtgagagctggacacttccggtggcagctggaccggggcaggacacagataaaaccccagggcacgccccggcccaagacaaggtcctctctgccgccagggatcccacgcttctcccacctgagacagggggagcaggaggagaagctccctccaagcccaaggactccagcttttttgacaaattcttcaagctggacaagggacaggaaaaggtgccaggtgacagccaacaggaagccaagagggcagagcatcaagacaaggtggatgaggttcctggcttatcagggcagtccgatgatgtccctgcagggaaggacatagttgacggcaaggaaaaagaaggacaagaacttggaactgcggattgctctgtccctggggacccagaaggactggagactgcaaaggacgattcccaggcagcagctatagcagagaataataattccatcatgagtttctttaaaactctggtttcacctaacaaagctgaaacaaaaaaggacccagaagacacgggtgctgaaaagtcacccaccacttcagctgaccttaagtcagacaaagccaactttacatcccaggagacccaaggggctggcaagaattccaaaggatgcaacccatcggggcacacacagtccgtgacaacccctgaacctgcgaaggaaggcaccaaggagaaatcaggacccacctctctgcctctgggcaaactgttttggaaaaagtcagttaaagaggactcagtccccacaggtgcggaggagaatgtggtgtgtgagtcaccagtagagattataaagtccaaggaagtagaatcagccttacaaacagtggacctcaacgaaggagatgctgcacctgaacccacagaagcgaaactcaaaagagaagaaagcaaaccaagaacctctctgatggcgtttctcagacaaatgtcagtgaaaggggatggagggatcacccactcagaagaaataaatgggaaagactccagctgccaaacatcagactccacagaaaagactatcacaccgccagagcctgaaccaacaggagcaccacagaagggtaaagagggctcctcgaaggacaagaagtcagcagccgagatgaacaagcagaagagcaacaagcaggaagccaaagaaccagcccagtgcacagagcaggccacggtggacacgaactcactgcagaatggggacaagctccaaaagagacctgagaagcggcagcagtcccttgggggcttctttaaaggcctgggaccaaagcggatgttggatgctcaagtgcaaacagacccagtatccatcggaccagttggcaaatccaagtaaacaaatcagcacggttcccaccaggttctcctgccaccaagatgtgttctccttactccatctcctccccaaacacgctccatgtatatattcttctgatggccagcaaatgaaattctgcctagaaattaagcccgagctgttgtatattgaggtgtattatttacgtctctggtccagtcttttctggcaaataacagtaaagatggtttagcaggtcacctagttgggtcagaagagtcgatgatcaccaagcaggaaagggagggaatagaggaatgtgttcgggttaagtgatgaaaatggcagtggtggccgggcgtggtggctctcgcctgtaatctcagcactttgggaggccgaggcaggtggatcacctgaggtcaggagttcaagactagcctggccaacatcatgaaaccccgtctctactaaaaatacaaaaattagccaggcatggtggcacacacctgtagtcccagctactcgggagcccaacgcacgagaaccgcttgtacccaggaggtggaggttgcagtgagccgaagttgcaccattgcactccaccctgggcgacagagcaagattctatcaaaaaaaaaaaaaggcagtggcaagtaagttatagaagagaaatgctgctagaaggaattaagcgttgtagtaaatgcgtgcttatcctctaagcttgaagaagggagacgaaaatccatttgtttaaattcacatctcaaggagggagaacccgggctgtgttgggtggttgccaatttcctagaacggaatgtgtggggtatagaaaaaggaatgaataagcgttgtttttcaaatagggtccttgtaagttattgatgagagggaaaagattgactggggagggcttaaaatgatttgggaaaacaattgcttttgaggctcagtgacaacggcaaagattacaacttaaaaaaaaaaaataaataaaaaataaaggaagttgcacggttattttgcaacacaagggggcggcaaggtccccatttttatcctgtaatactgtatccctaacaaagatttggtctctgctatcttacattattaatgtttctcagatggctgaggggctcgcttcatctgttccgtctgacacttatctcaagtgtgtctgtcattcctaatgttctcaggatgtgctctgataaaaccctccccataacctcagttaataaaaatttacagaagacttctcaaatacctgagttgtttttaatacctgtacaaaggagtaaataggaccctgagtctattaaaatgtaattcaaagtagcatatgattgactgacagtcatgtaaactgtatctttctttttctgatttaataaaaaatacatttacttctaaa

SEQ ID NO: 112070 - DNA, 6112 bp, Homo sapiens
  Payload ID: 1956
  Gene Symbol: BCAS1
  Gene Name: breast carcinoma amplified sequence 1
  ENST ID: ENST00000448484
  CDS Start-End: 1-1431
acacttccggtggcagctggaccggggcaggacacagataaaaccccagggcacgccccggcccaagacaaggtcctctctgccgccagggatcccacgcttctcccacctgagacagggggagcaggaggagaagctccctccaagcccaaggactccagcttttttgacaaattcttcaagctggacaagggacaggaaaaggtgccaggtgacagccaacaggaagccaagagggcagagcatcaagacaaggtggatgaggttcctggcttatcagggcagtccgatgatgtccctgcagggaaggacatagttgacggcaaggaaaaagaaggacaagaacttggaactgcggattgctctgtccctggggacccagaaggactggagactgcaaaggacgattcccaggcagcagctatagcagagaataataattccatcatgagtttctttaaaactctggtttcacctaacaaagctgaaacaaaaaaggacccagaagacacggcatcgaaagcagaaagtgtctgtgatggacaagctggtcagaagacatccgagatccaggctagaggcaccaagaaaaagcacctggatagccccaggctaggactcgcctttagaaaattctttaggcataagggtgctgaaaagtcacccaccacttcagctgaccttaagtcagacaaagccaactttacatcccaggagacccaaggggctggcaagaattccaaaggatgcaacccatcggggcacacacagtccgtgacaacccctgaacctgcgaaggaaggcaccaaggagaaatcaggacccacctctctgcctctgggcaaactgttttggaaaaaggtggtgtgtgagtcaccagtagagattataaagtccaaggaagtagaatcagccttacaaacagtggacctcaacgaaggagatgctgcacctgaacccacagaagcgaaactcaaaagagaagaaagcaaaccaagaacctctctgatggcgtttctcagacaaatgacatcagactccacagaaaagactatcacaccgccagagcctgaaccaacaggagcaccacagaagggtaaagagggctcctcgaaggacaagaagtcagcagccgagatgaacaagcagaagagcaacaagcaggaagccaaagaaccagcccagtgcacagagcaggccacggtggacacgaactcactgcagaatggggacaagctccaaaagagacctgagaagcggcagcagtcccttgggggcttctttaaaggcctgggaccaaagcggatgttggatgctcaagtgcaaacagacccagtatccatcggaccagttggcaaatccaagtacacagggaagtgtgtcttctcccatgtcaagaagaagtggcctttccaggaatggagctattgagctgaaatggctgccactgcgcgtacacacacacacgcgcacacacacacacacacacacacctcccttccagttccagctgacggtgactttttgactggtaaccataaaagaattcattcaaaagggcagttgttcccagcagccagtgaggtccttcctgcattcgttgtcttggagaaggaggcacataacaaaatagaaaccaaaatgggaaggaaaagagaaagaaagtgaaattcctggtctttgttgtatgtatccccttgctttttagataaattatcaggggtttaaacacacactctctcccctccctcctcccacttcacacacactagattgttcttgtctgtttgcaaacagtccagaagcactggggtctcattaaattagattctaagtgtcttaaagaattagatttcaagaaaccaagaatctgtgtcctttcccttctcagagtgcctggaagggtgcagatttctccaatctgaatctgacaatgttatttcttatgtcagataatcccaagtagatcttataccttaaaaaaataaaatcagctacactacctaccttacagggaaggaaaaagaactaattccaattattaactaacccaagatacaaacacaggggaaactagggaatgtgctttgcagcaatgtaagattataggggttggttttaaccatcctttgaatgtccctctttaagcctttttaaagggcaattttgcacggtgagtagaattaggcttctccgtggtcaagattttgttcactctatcagtgcaaattaagtggcaccggcccactggaaattatagtctccattaggaagaaaagaaattacttaccgagcagcaaattctctaaatttgtaattcagatctttagtgcagaatgccggtcaggatccagccctttgcataaattggttttctggggagtttaaccccttagcctctgttgcccttttcttgaatggcattcacgcaaccctctccatctcctggccctttaactggccccggcagaagttgcagtccacaatttcacagaagtaaggataatacattatcacacattaccgtttataaagtgctctgggtacaatctgtaatttaaagctgtatttccctcactgaacttaagtgcttcctttgttacatttcattaccgggggactggcatgcacctgtatagattttttttttttttttcattttttgttttgttttgtttttccaaataagcacttcttgacaaaatggcccccagctgcacttctgctaatgacagccatggaagggctggttccttacgtgatctactctctcagaagcttgcttttgtcaaaatgcagccacgtgggggagctgcaggacctggggttttacaatgcctagccctttttccctgattgcctaaccgggaaactgggccaaagcagcctgagagtgtatttgttgattaacttctagaaagcagtcaagtttaattaggagaactagaacgagaaagctgaactgggcaagtcagttgccttctatgattctcagtcctccaaatgaagataaggttggttggtttgtgtttccatccttatctgctctatcttggaagaagctcaaggaagattgtgtgattgcaaaacgtttcagttggtgtcattgcaatgcatttaagtaatccttactggcccatcctgctccacaaagcagccttacctctcatcttctccactcccaactaaagagcaagtgatttaaactctgagtgtcctccctcaacaatgggctaataatagagcctactcgtggagttgctgccagcatgcagtgagatggtgcataccaaacatttagtgcagtggctggcacattgtaagcacttaggaaaggcaagctattctatcatggggaacttttagcaccaagtaacagaaaacccctacttgaattggcagataatcgtaacaataagggtatttatcatttcatataataggtgttgtataacatctttggctttgattctctgagactctcttccagctaacaacgataatgaggaaatgtatcgtttcatataactggtgttaagtctcatagcctggctctggttctctgacactccattctgccatgttccatgggttgacttcatcctaaaactgtgctgaatgatggatgcagttccaggcaaggggattatgggaataccataatcagtttcaatgaatcattttggtgaaatcatgttgagaaggcaatacaatgatacagtagacagtaaagccattattggtatcagtggctttaaggctaaccattccccaaactaactgtgtcccttcaattcacacccatgggatttgtgtaatgacggcccccaccttccaaagcagtgccactagaatgtgaacttatcaagatctgaaccttcttgtcttgctcattcattgttctattgtcagtgtctagcacaatgcctggacatggtagatactcaacaaatattggttgaatggataaattgctaaacaaatatcctgtggccacacccattgtggattgccttatcctctagtgtgaatttgttttagctctgaatgtctgatcaccctaaccagacatctacccttcccaggtaaccagcccagtggttctaaaagtacagtcccaggaccagcagcctcagcaccacctgagaacatgttaggaatgcaaactctcaagccccactccatacccgcagaatcaaaaactcttggggtgggacccagtaacctgtgttttagcagcctctcaggaggttccaatgaaggagaaaatttgaaaaccactggtccaggtagagctaccacttcactgagcatcaacagcatgtttggtccaaagactggccctgaagatgcttagataaaaaaagctaacattgaacctcactatatgccaggtattgtgtgtcacatgacttaactttgttcactgcttatttggcagctgaggaaactaaggctcacagagaaaaaaacaactttgcccaagaacacacatggcagagccaaggttgaaatccaacctaagtacataaaagcttgctttcatgtctgtgggagagacaggcaggcaaaaagataataataatacaatgtaagagaagcaaatgcagggtgtcatgggactcaggggaaggcactggcgcaagaccacagtgggtggaggttggccactttggggaggtgacagttgagttaactcacacagaatgaataagcgttggacaaaagggctcccagaagaacagcaagtgcaagagcccagggtccacagagagaatggcaggtagcttagcatggctgaagtgagactgtgaggagaacggataagaggatggaagctggggaggtggcacagatggatctcaaggacttggagtaaaaagtccatagtaacgagtttaaattgtctcttgacggcaatggggagccatggaagatatttgagctggagggtaacatagatttatattttggctgcaggtaggatctaatacaaaagcaattcaactaatattcactaagtgacctgagttatctgtgagatatttattataaggtgttaaacttctttgaagattgtaagaaagagataaaacctctaaatggttttgacccttcaaaggacatttaaatggttatttctaagtgtcataaacatggacttgggatttggcctcatcattcacccagatgattcatacccatgatcccaggctgtgaggtcttgagcaaattacttcttctcagagccttagtttgttcctctgtggaatgggaatgctaacagcacttacctcggaaagttgctgagaataaacgagaccgtgcatttagagcatgtaggcaccgtgtctggcaggtaatgagtgctcagtcagcttattgatgaggatgcagatgacctcagcctgagatagaacagatgtgttctctttcatggactgaaggccacccagactttgcgacatccttaaactttgccccagtttctccttatcctcataagcagttggctggctggcttatctagaaaaaagaaaggagggaggagaaaaagcaaagaaaaatgttcattttccctgctgttcaccccattctaaagtaaggcagaatttctggagagggggctcaggtccacccttggctatccttggttgtacagttgcatctacttataacggtggccaagtcgccatggcagtaggtgctgtggctgccctgccccatcgtcttcagactacccgagtttacctgcagcactgacagcttcccaccccaaaactcctcgttctttgcttttcctctcggtggctttctccaggggctgtaggagcttgtttagcccacctgcatggcattttgaaaatacctgaaattttatgccccgaaggacaattctcaatcagtgaaagatgggagaggaaaggtaaacacctcagctgccccatctctcagtgggacaatgttgaggggtcgtctttgtgttctctcaagggtcctcagcaagaccgagccacccgtcacccacagcagtaacatactcatgagcacgcccccccaccccaccttttgtgcttcctgggatcacttcccaaataaactacttgcacct

SEQ ID NO: 112071 - DNA, 882 bp, Homo sapiens
  Payload ID: 1956
  Gene Symbol: BCAS1
  Gene Name: breast carcinoma amplified sequence 1
  ENST ID: ENST00000422805
  CDS Start-End: 1-743
agaataataattccatcatgagtttctttaaaactctggtttcacctaacaaagctgaaacaaaaaaggacccagaagacacgggtgctgaaaagtcacccaccacttcagctgaccttaagtcagacaaagccaactttacatcccaggagacccaaggggctggcaagaattccaaaggatgcaacccatcggggcacacacagtccgtgacaacccctgaacctgcgaaggaaggcaccaaggagaaatcaggacccacctctctgcctctgggcaaactgttttggaaaaagtcagttaaagaggactcagtccccacaggtgcggaggagaattcagtgaaaggggatggagggatcacccactcagaagaaataaatgggaaagactccagctgccaaacatcagactccacagaaaagactatcacaccgccagagcctgaaccaacaggagcaccacagaagggtaaagagggctcctcgaaggacaagaagtcagcagccgagatgaacaagcagaagagcaacaagcaggaagccaaagaaccagcccagtgcacagagcaggccacggtggacacgaactcactgcagaatggggacaagctccaaaagagacctgagaagcggcagcagtcccttgggggcttctttaaaggcctgggaccaaagcggatgttggatgctcaagtgcaaacagacccagtatccatcggaccagttggcaaatccaagtaaacaaatcagcacggttcccaccaggttctcctgccaccaagatgtgttctccttactccatctcctccccaaacacgctccatgtatatattcttctgatggccagcaaatgaaattctgcctagaaattaagcccgag

SEQ ID NO: 112072 - DNA, 1299 bp, Homo sapiens
  Payload ID: 1957
  Gene Symbol: BCAS2
  Gene Name: breast carcinoma amplified sequence 2
  Uniprot ID: O75934
  ENST ID: ENST00000369541
  CDS Start-End: 49-726
tgagtttacgcagacgcagaaaacgcaggcaaacctgaggtcctcagaatggcgggcacaggtttggtggctggagaggttgtggtggatgcgctgccgtattttgatcaaggttatgaagcccctggtgtgcgggaagcggctgcagcgctggtggaggaggaaactcgcagataccgacctactaagaactacctgagctacctgacagccccggattattctgcctttgaaactgacataatgagaaatgaatttgaaagactggctgctcgacaaccaattgaattgctcagtatgaaacgatatgagcttccagccccctcctctggtcaaaaaaatgacattactgcatggcaagaatgtgtaaacaattctatggcccagttagagcatcaagcagttagaattgagaatctggaactaatgtcacagcatggatgtaatgcctggaaagtatacaatgaaaatctagttcatatgattgaacacgcacagaaggaacttcagaagttaagaaaacatattcaagatttaaactggcagagaaagaacatgcaactcacagctggatctaaattgagagaaatggagtcaaattgggtatccctggtcagtaagaattatgagattgaacggactattgttcagctagaaaatgaaatctatcaaattaagcagcaacatggagaggcaaacaaagaaaacatccggcaagacttctgaaaagacaatttagcaggtagaagaaaagttgggctttcacaaaaggcatctgaacttttaatgaactttgaaggacaacagcatcttcccaaaaccattgatgtttaagtgtttagaaatcatagaaggtgtaggctgctgtggtaattctatttgtatatctcaacagaattaaaatgtctagcttggtggtatttttatagccataaaagaaaatctttaggctttcaaaataaggatgactttagaataatattgtgtcatagaattaattttcagccatgtggaccatattttgtatccaaggatccttatttaaagctttcaacatgtacaggaagttggaaatttttggtttatgactttgtctaataaagagatagttctaaacacattcttgatcaccaaacaacttcagaaagacagtgactgtacagttatcattatcatcatcatcgtcatcatcataggtaacagttatatcaagcttaatatgtgctgaacattgttctgaacactttaggtagatgaactagatgtatgtgaataaaaattatttggtcctcacaaaaa

SEQ ID NO: 112073 - DNA, 3531 bp, Homo sapiens
  Payload ID: 1958
  Gene Symbol: BCAS3
  Gene Name: breast carcinoma amplified sequence 3
  Uniprot ID: Q9H6U6
  ENST ID: ENST00000390652
  CDS Start-End: 32-2818
actagcgttaaccggcggggcggccggttttatgaatgaagctatggctacagattccccaagaagacccagtcgttgtactggtggagttgtggttcgcccccaggctgtcacagagcagtcctacatggaaagtgttgtgacttttctgcaggatgttgtgccacaggcttacagtggaacacctctaacagaagaaaaggagaaaatagtctgggtcagatttgaaaatgcagatttaaatgatacatcaagaaatctggaatttcatgaaatacatagtactgggaatgaaccgcctttgttgattatgattggctacagtgatggaatgcaggtctggagcatccctatcagtggtgaagcacaagagctcttctctgttcgacatggcccaattcgagcggctagaatcttgcctgctccacagtttggtgctcaaaaatgtgataactttgctgaaaaaagacccctccttggtgtttgtaagagcattggatcttctggcacaagcccaccgtactgttgtgtggatctgtattcacttcgtactggggagatggtcaagtccattcaatttaagacacctatttatgatctccattgcaataaacggatccttgtcgtagtcttgcaggagaaaattgctgcctttgatagctgtactttcacgaagaaattctttgttacaagctgctatccatgtccagggccaaacatgaatcctattgctcttgggagccgctggcttgcttatgcagaaaacaagttgattcgatgtcatcagtcccgtggtggagcctgtggagacaacattcagtcttatactgccacagtcattagtgctgctaaaacattgaaaagtggcctgacaatggtagggaaagtggtgactcagctgacaggcacactgccttcaggtgtgacagaagatgatgttgccatccacagtaattcacggcggagtcctttggtcccaggcatcatcacagttattgacaccgaaaccgttggagagggccaggtgcttgtgagtgaggattctgacagtgatggcattgtggcccacttccctgcccatgagaagccagtgtgctgcatggcttttaatacaagtggaatgcttctagtcacaacagacacccttggccatgactttcatgtcttccaaattctgactcatccttggtcctcatcacaatgtgctgtccaccatctgtatactcttcacaggggagaaactgaagccaaagtacaggacatctgcttcagccatgactgtcgctgggttgtggtcagtactctccggggtacttcccacgttttccccatcaacccttatggtggccagccttgtgttcgtacacatatgtcaccacgagtagtgaatcgcatgagccgtttccagaaaagtgctggactggaagagattgaacaagaactgacgtctaagcaaggaggtcgctgtagccctgttccaggtctatcaagcagcccttctgggtcacccttgcatgggaaactgaacagccaagactcctataacaattttaccaacaacaaccctggcaaccctcggctctctcctcttcccagcttgatggtagtgatgcctcttgcacaaatcaagcagccaatgacattggggaccatcaccaaacgaaccgggccttatctctttggagcggggtgtttttccataaaagccccatgcaaagttaaacctcctccacaaatttcacccagcaaatcgatgggcggagaattttgtgtggctgctatcttcggaacatccaggtcatggtttgcaaataatgcaggtctgaaaagagaaaaagatcagtccaaacaagttgtagttgagtccctgtacattatcagttgctatggcaccttagtggaacacatgatggagccgcgacccctcagcactgcacccaagattagtgacgacacaccactggaaatgatgacatcgcctcgagccagctggactctggttagaacccctcaatggaatgaattgcagccaccgtttaatgcaaaccaccctctgctcctcgctgcagatgcagtacagtattatcagttcctgcttgctggcctggttccccctggaagtcctgggcccattactcgacatgggtcttacgacagtttagcttctgaccatagtggacaggaagatgaagaatggctttcccaggttgaaattgtaacacacactggaccccatagacgtctgtggatgggtccacagttccagttcaaaaccatccatccctcaggccaaaccacagttatctcatccagttcatctgtgttgcagtctcatggtccgagtgacacgccacagcctcttttggattttgatacagatgatcttgatctcaacagtctcaggatccagccagtccgctctgaccccgtcagcatgccagggtcatcccgtccagtctctgatcgaaggggagtttccacagtgattgatgctgcctcaggtacctttgacaggagcgtgaccctgctggaggtgtgcgggagctggcctgagggcttcgggctgcggcacatgtcctccatggagcacacggaggagggcctccgggagcgacttgccgacgccatggccgagtcacctagccgggacgtcgtgggatccggaacagaacttcagcgagagggaagcatcgagactctgagtaacagctcaggctccaccagcggcagcataccaagaaactttgatggctaccgatctccgctgcccaccaatgagagccagcccctcagcctcttcccgactggcttcccgtaggtaccagcaacctgcttctgactggccagccccctcccctgctggaggaggggagaagccccgctctggtcctacccttcagtctctgctcttccttcatcaaccaccttccccaagcttagtgacagcagccgcccatcctacctggatggagaagagacccttctccaagcacctcagcgcacttgccctctgccacacctgtcggtggaggctgtggccaggagagactgtagaagctcggtccctgtgtatgtttgcatatgacatcctgcattggatccgcttttgtattttttaaccatacccacggtggggcgggtggggggagcctggaacagtgaccagatctgggggcctgagtggggacagagttgatcgtccacctggccattttgaccctgagtggacagtcacagcctcagctcatgtctggctgtgacacacactgcccccagcttcccttggtcagccccactccagcacggggtgaacggaggcccagagtactagggaaggaggaagggaggacatgcctcttcttcctcctttctttccccatctgttcatgggaagagtttgtctttcttatctttaagcccctttaccctggtcctgtactgatcagtgaaggaaaccgtggttactgaggccctgttgaaaagtgcacgtcttgtccaataaatcacgctgcagttggtgtccatccctga

SEQ ID NO: 112074 - DNA, 3496 bp, Homo sapiens
  Payload ID: 1958
  Gene Symbol: BCAS3
  Gene Name: breast carcinoma amplified sequence 3
  Uniprot ID: Q9H6U6
  ENST ID: ENST00000407086
  CDS Start-End: 49-2790
tgagcctagagctggagactagcgttaaccggcggggcggccggttttatgaatgaagctatggctacagattccccaagaagacccagtcgttgtactggtggagttgtggttcgcccccaggctgtcacagagcagtcctacatggaaagtgttgtgacttttctgcaggatgttgtgccacaggcttacagtggaacacctctaacagaagaaaaggagaaaatagtctgggtcagatttgaaaatgcagatttaaatgatacatcaagaaatctggaatttcatgaaatacatagtactgggaatgaaccgcctttgttgattatgattggctacagtgatggaatgcaggtctggagcatccctatcagtggtgaagcacaagagctcttctctgttcgacatggcccaattcgagcggctagaatcttgcctgctccacagtttggtgctcaaaaatgtgataactttgctgaaaaaagacccctccttggtgtttgtaagagcattggatcttctggcacaagcccaccgtactgttgtgtggatctgtattcacttcgtactggggagatggtcaagtccattcaatttaagacacctatttatgatctccattgcaataaacggatccttgtcgtagtcttgcaggagaaaattgctgcctttgatagctgtactttcacgaagaaattctttgttacaagctgctatccatgtccagggccaaacatgaatcctattgctcttgggagccgctggcttgcttatgcagaaaacaagttgattcgatgtcatcagtcccgtggtggagcctgtggagacaacattcagtcttatactgccacagtcattagtgctgctaaaacattgaaaagtggcctgacaatggtagggaaagtggtgactcagctgacaggcacactgccttcaggtgtgacagaagatgatgttgccatccacagtaattcacggcggagtcctttggtcccaggcatcatcacagttattgacaccgaaaccgttggagagggccaggtgcttgtgagtgaggattctgacagtgatggcattgtggcccacttccctgcccatgagaagccagtgtgctgcatggcttttaatacaagtggaatgcttctagtcacaacagacacccttggccatgactttcatgtcttccaaattctgactcatccttggtcctcatcacaatgtgctgtccaccatctgtatactcttcacaggggagaaactgaagccaaagtacaggacatctgcttcagccatgactgtcgctgggttgtggtcagtactctccggggtacttcccacgttttccccatcaacccttatggtggccagccttgtgttcgtacacatatgtcaccacgagtagtgaatcgcatgagccgtttccagaaaagtgctggactggaagagattgaacaagaactgacgtctaagcaaggaggtcgctgtagccctgttccaggtctatcaagcagcccttctgggtcacccttgcatgggaaactgaacagccaagactcctataacaattttaccaacaacaaccctggcaaccctcggctctctcctcttcccagcttgatggtagtgatgcctcttgcacaaatcaagcagccaatgacattggggaccatcaccaaacgaaccggcaaagttaaacctcctccacaaatttcacccagcaaatcgatgggcggagaattttgtgtggctgctatcttcggaacatccaggtcatggtttgcaaataatgcaggtctgaaaagagaaaaagatcagtccaaacaagttgtagttgagtccctgtacattatcagttgctatggcaccttagtggaacacatgatggagccgcgacccctcagcactgcacccaagattagtgacgacacaccactggaaatgatgacatcgcctcgagccagctggactctggttagaacccctcaatggaatgaattgcagccaccgtttaatgcaaaccaccctctgctcctcgctgcagatgcagtacagtattatcagttcctgcttgctggcctggttccccctggaagtcctgggcccattactcgacatgggtcttacgacagtttagcttctgaccatagtggacaggaagatgaagaatggctttcccaggttgaaattgtaacacacactggaccccatagacgtctgtggatgggtccacagttccagttcaaaaccatccatccctcaggccaaaccacagttatctcatccagttcatctgtgttgcagtctcatggtccgagtgacacgccacagcctcttttggattttgatacagatgatcttgatctcaacagtctcaggatccagccagtccgctctgaccccgtcagcatgccagggtcatcccgtccagtctctgatcgaaggggagtttccacagtgattgatgctgcctcaggtacctttgacaggagcgtgaccctgctggaggtgtgcgggagctggcctgagggcttcgggctgcggcacatgtcctccatggagcacacggaggagggcctccgggagcgacttgccgacgccatggccgagtcacctagccgggacgtcgtgggatccggaacagaacttcagcgagagggaagcatcgagactctgagtaacagctcaggctccaccagcggcagcataccaagaaactttgatggctaccgatctccgctgcccaccaatgagagccagcccctcagcctcttcccgactggcttcccgtaggtaccagcaacctgcttctgactggccagccccctcccctgctggaggaggggagaagccccgctctggtcctacccttcagtctctgctcttccttcatcaaccaccttccccaagcttagtgacagcagccgcccatcctacctggatggagaagagacccttctccaagcacctcagcgcacttgccctctgccacacctgtcggtggaggctgtggccaggagagactgtagaagctcggtccctgtgtatgtttgcatatgacatcctgcattggatccgcttttgtattttttaaccatacccacggtggggcgggtggggggagcctggaacagtgaccagatctgggggcctgagtggggacagagttgatcgtccacctggccattttgaccctgagtggacagtcacagcctcagctcatgtctggctgtgacacacactgcccccagcttcccttggtcagccccactccagcacggggtgaacggaggcccagagtactagggaaggaggaagggaggacatgcctcttcttcctcctttctttccccatctgttcatgggaagagtttgtctttcttatctttaagcccctttaccctggtcctgtactgatcagtgaaggaaaccgtggttactgaggccctgttgaaaagtgcacgtcttgtccaataaatcacgctgcagttggtgtcca

SEQ ID NO: 112075 - DNA, 3514 bp, Homo sapiens
  Payload ID: 1958
  Gene Symbol: BCAS3
  Gene Name: breast carcinoma amplified sequence 3
  Uniprot ID: Q9H6U6
  ENST ID: ENST00000408905
  CDS Start-End: 1-2808
atgaatgaagctatggctacagattccccaagaagacccagtcgttgtactggtggagttgtggttcgcccccaggctgtcacagagcagtcctacatggaaagtgttgtgacttttctgcaggatgttgtgccacaggcttacagtggaacacctctaacagaagaaaaggagaaaatagtctgggtcagatttgaaaatgcagatttaaatgatacatcaagaaatctggaatttcatgaaatacatagtactgggaatgaaccgcctttgttgattatgattggctacagtgatggaatgcaggtctggagcatccctatcagtggtgaagcacaagagctcttctctgttcgacatggcccaattcgagcggctagaatcttgcctgctccacagtttggtgctcaaaaatgtgataactttgctgaaaaaagacccctccttggtgtttgtaagagcattggatcttctggcacaagcccaccgtactgttgtgtggatctgtattcacttcgtactggggagatggtcaagtccattcaatttaagacacctatttatgatctccattgcaataaacggatccttgtcgtagtcttgcaggagaaaattgctgcctttgatagctgtactttcacgaagaaattctttgttacaagctgctatccatgtccagggccaaacatgaatcctattgctcttgggagccgctggcttgcttatgcagaaaacaagttgattcgatgtcatcagtcccgtggtggagcctgtggagacaacattcagtcttatactgccacagtcattagtgctgctaaaacattgaaaagtggcctgacaatggtagggaaagtggtgactcagctgacaggcacactgccttcaggtgtgacagaagatgatgttgccatccacagtaattcacggcggagtcctttggtcccaggcatcatcacagttattgacaccgaaaccgttggagagggccaggtgcttgtgagtgaggattctgacagtgatggcattgtggcccacttccctgcccatgagaagccagtgtgctgcatggcttttaatacaagtggaatgcttctagtcacaacagacacccttggccatgactttcatgtcttccaaattctgactcatccttggtcctcatcacaatgtgctgtccaccatctgtatactcttcacaggggagaaactgaagccaaagtacaggacatctgcttcagccatgactgtcgctgggttgtggtcagtactctccggggtacttcccacgttttccccatcaacccttatggtggccagccttgtgttcgtacacatatgtcaccacgagtagtgaatcgcatgagccgtttccagaaaagtgctggactggaagagattgaacaagaactgacgtctaagcaaggaggtcgctgtagccctgttccaggtctatcaagcagcccttctgggtcacccttgcatgggaaactgaacagccaagactcctataacaattttaccaacaacaaccctggcaaccctcggctctctcctcttcccagcttgatggtagtgatgcctcttgcacaaatcaagcagccaatgacattggggaccatcaccaaacgaaccggcaaagttaaacctcctccacaaatttcacccagcaaatcgatgggcggagaattttgtgtggctgctatcttcggaacatccaggtcatggtttgcaaataatgcaggtctgaaaagagaaaaagatcagtccaaacaagttgtagttgagtccctgtacattatcagttgctatggcaccttagtggaacacatgatggagccgcgacccctcagcactgcacccaagattagtgacgacacaccactggaaatgatgacatcgcctcgagccagctggactctggttagaacccctcaatggaatgaattgcagccaccgtttaatgcaaaccaccctctgctcctcgctgcagatgcagtacagtattatcagttcctgcttgctggcctggttccccctggaagtcctgggcccattactcgacatgggtcttacgacagtttagcttctgaccatagtggacaggaagatgaagaatggctttcccaggttgaaattgtaacacacactggaccccatagacgtctgtggatgggtccacagttccagttcaaaaccatccatccctcaggccaaaccacagttatctcatccagttcatctgtgttgcagtctcatggtccgagtgacacgccacagcctcttttggattttgatacagatgatcttgatctcaacagtctcaggatccagccagtccgctctgaccccgtcagcatgccagggtcatcccgtccagtctctgatcgaaggggagtttccacagtgattgatgctgcctcaggtacctttgacaggagcgtgaccctgctggaggtgtgcgggagctggcctgagggcttcgggctgcggcacatgtcctccatggagcacacggaggagggcctccgggagcgacttgccgacgccatggccgagtcacctagccgggacgtcgtgggatccggaacagacacagcccttgacgtagcagtaaaaaccttcccccctgagagacacgtggcagtgaagtgttttgaacttcagcgagagggaagcatcgagactctgagtaacagctcaggctccaccagcggcagcataccaagaaactttgatggctaccgatctccgctgcccaccaatgagagccagcccctcagcctcttcccgactggcttcccgtaggtaccagcaacctgcttctgactggccagccccctcccctgctggaggaggggagaagccccgctctggtcctacccttcagtctctgctcttccttcatcaaccaccttccccaagcttagtgacagcagccgcccatcctacctggatggagaagagacccttctccaagcacctcagcgcacttgccctctgccacacctgtcggtggaggctgtggccaggagagactgtagaagctcggtccctgtgtatgtttgcatatgacatcctgcattggatccgcttttgtattttttaaccatacccacggtggggcgggtggggggagcctggaacagtgaccagatctgggggcctgagtggggacagagttgatcgtccacctggccattttgaccctgagtggacagtcacagcctcagctcatgtctggctgtgacacacactgcccccagcttcccttggtcagccccactccagcacggggtgaacggaggcccagagtactagggaaggaggaagggaggacatgcctcttcttcctcctttctttccccatctgttcatgggaagagtttgtctttcttatctttaagcccctttaccctggtcctgtactgatcagtgaaggaaaccgtggttactgaggccctgttgaaaagtgcacgtcttgtccaataaatcacgctgcagttggtgtcca

SEQ ID NO: 112076 - DNA, 550 bp, Homo sapiens
  Payload ID: 1958
  Gene Symbol: BCAS3
  Gene Name: breast carcinoma amplified sequence 3
  ENST ID: ENST00000587002
  CDS Start-End: 1-550
tcatctgtgttgcagtctcatggtccgagtgacacgccacagcctcttttggattttgatacagatgatcttgatctcaacagtctcaggatccagccagtccgctctgaccccgtcagcatgccagggtcatcccgtccagtctctgatcgaaggggagtttccacagtgattgatgctgcctcagtggactcttccaccgcccttgagtggggaacatccaggccttcacactcacgctcagcccatcacccctctgtgcaaggtgcaaggtcctctgcccacctgaagcctcaaggcctgatggaaaccatccacagccactctaggatgagtcaacattgcatgcagccagccatggccactgggagaagagtcagacatgggccatggagctgcaggctcacctgcccccggctgagtcaggaccgagcacaggacttgacagaggaggcatcgcagcaaggtacctttgacaggagcgtgaccctgctggaggtgtgcgggagctggcctgagggcttcgggctgcggcacatgtcctccatgg

SEQ ID NO: 112077 - DNA, 2948 bp, Homo sapiens
  Payload ID: 1958
  Gene Symbol: BCAS3
  Gene Name: breast carcinoma amplified sequence 3
  Uniprot ID: Q9H6U6
  ENST ID: ENST00000588874
  CDS Start-End: 189-2243
gccgccttgcagtttgatctcagactgctgtgctggcaatcagcgagactccgtgggcgtaggaccctccgagccaggtgtgggatatagtctcgtggtgcgccgttttttaagccggtctgaaaagcgcaatattcgggtgggagtgacccgattttccaggctgctatccatgtccagggccaaacatgaatcctattgctcttgggagccgctggcttgcttatgcagaaaacaagttgattcgatgtcatcagtcccgtggtggagcctgtggagacaacattcagtcttatactgccacagtcattagtgctgctaaaacattgaaaagtggcctgacaatggtagggaaagtggtgactcagctgacaggcacactgccttcaggtgtgacagaagatgatgttgccatccacagtaattcacggcggagtcctttggtcccaggcatcatcacagttattgacaccgaaaccgttggagagggccaggtgcttgtgagtgaggattctgacagtgatggcattgtggcccacttccctgcccatgagaagccagtgtgctgcatggcttttaatacaagtggaatgcttctagtcacaacagacacccttggccatgactttcatgtcttccaaattctgactcatccttggtcctcatcacaatgtgctgtccaccatctgtatactcttcacaggggagaaactgaagccaaagtacaggacatctgcttcagccatgactgtcgctgggttgtggtcagtactctccggggtacttcccacgttttccccatcaacccttatggtggccagccttgtgttcgtacacatatgtcaccacgagtagtgaatcgcatgagccgtttccagaaaagtgctggactggaagagattgaacaagaactgacgtctaagcaaggaggtcgctgtagccctgttccaggtctatcaagcagcccttctgggtcacccttgcatgggaaactgaacagccaagactcctataacaattttaccaacaacaaccctggcaaccctcggctctctcctcttcccagcttgatggtagtgatgcctcttgcacaaatcaagcagccaatgacattggggaccatcaccaaacgaaccggcaaagttaaacctcctccacaaatttcacccagcaaatcgatgggcggagaattttgtgtggctgctatcttcggaacatccaggtcatggtttgcaaataatgcaggtctgaaaagagaaaaagatcagtccaaacaagttgtagttgagtccctgtacattatcagttgctatggcaccttagtggaacacatgatggagccgcgacccctcagcactgcacccaagattagtgacgacacaccactggaaatgatgacatcgcctcgagccagctggactctggttagaacccctcaatggaatgaattgcagccaccgtttaatgcaaaccaccctctgctcctcgctgcagatgcagtacagtattatcagttcctgcttgctggcctggttccccctggaagtcctgggcccattactcgacatgggtcttacgacagtttagcttctgaccatagtggacaggaagatgaagaatggctttcccaggttgaaattgtaacacacactggaccccatagacgtctgtggatgggtccacagttccagttcaaaaccatccatccctcaggccaaaccacagttatctcatccagttcatctgtgttgcagtctcatggtccgagtgacacgccacagcctcttttggattttgatacagatgatcttgatctcaacagtctcaggatccagccagtccgctctgaccccgtcagcatgccagggtcatcccgtccagtctctgatcgaaggggagtttccacagtgattgatgctgcctcaggtacctttgacaggagcgtgaccctgctggaggtgtgcgggagctggcctgagggcttcgggctgcggcacatgtcctccatggagcacacggaggagggcctccgggagcgacttgccgacgccatggccgagtcacctagccgggacgtcgtgggatccggaacagaacttcagcgagagggaagcatcgagactctgagtaacagctcaggctccaccagcggcagcataccaagaaactttgatggctaccgatctccgctgcccaccaatgagagccagcccctcagcctcttcccgactggcttcccgtaggtaccagcaacctgcttctgactggccagccccctcccctgctggaggaggggagaagccccgctctggtcctacccttcagtctctgctcttccttcatcaaccaccttccccaagcttagtgacagcagccgcccatcctacctggatggagaagagacccttctccaagcacctcagcgcacttgccctctgccacacctgtcggtggaggctgtggccaggagagactgtagaagctcggtccctgtgtatgtttgcatatgacatcctgcattggatccgcttttgtattttttaaccatacccacggtggggcgggtggggggagcctggaacagtgaccagatctgggggcctgagtggggacagagttgatcgtccacctggccattttgaccctgagtggacagtcacagcctcagctcatgtctggctgtgacacacactgcccccagcttcccttggtcagccccactccagcacggggtgaacggaggcccagagtactagggaaggaggaagggaggacatgcctcttcttcctcctttctttccccatctgttcatgggaagagtttgtctttcttatctttaagcccctttaccctggtcctgtactgatcagtgaaggaaaccgtggttactgaggccctgttgaaaagtgcacgtcttgtccaataaatcacgctgcagttggtgtcc

SEQ ID NO: 112078 - DNA, 558 bp, Homo sapiens
  Payload ID: 1958
  Gene Symbol: BCAS3
  Gene Name: breast carcinoma amplified sequence 3
  ENST ID: ENST00000586241
  CDS Start-End: 29-139
agcgttaaccggcggggcggccggttttatgaatgaagctatggctacagattccccaagaagacccagtcgttgtactggtggagttgtggttcgcccccaggctgtcacatacatcaagaaatctggaatttcatgaaatacatagtactgggaatgaaccgcctttgttgattatgattggctacagtgatggaatgcaggtctggagcatccctatcagtggtgaagcacaagagctcttctctgttcgacatggcccaattcgagcggctagaatcttgcctgctccacagtttggtgctcaaaaatgtgataactttgctgaaaaaagacccctccttggtgtttgtaagagcattggatcttctggcacaagcccaccgtactgttgtgtggatctgtattcacttcgtactggggagatggtcaagtccattcaatttaagacacctatttatgatctccattgcaataaacggatccttgtcgtagtcttgcaggagaaaattgctgcctttgatagctgtactttcacgaagaaattctttgttacaa

SEQ ID NO: 112079 - DNA, 633 bp, Homo sapiens
  Payload ID: 1958
  Gene Symbol: BCAS3
  Gene Name: breast carcinoma amplified sequence 3
  ENST ID: ENST00000590128
  CDS Start-End: 100-633
cggaaagggaactccctgaccccttgcgcttcccaggtgaggcaatgcctcgccctgcttcggctcgcgcacggctgctatccatgtccagggccaaacatgaatcctattgctcttgggagccgctggcttgcttatgcagaaaacaagttgattcgatgtcatcagtcccgtggtggagcctgtggagacaacattcagtcttatactgccacagtcattagtgctgctaaaacattgaaaagtggcctgacaatggtagggaaagtggtgactcagctgacaggcacactgccttcaggtgtgacagaagatgatgttgccatccacagtaattcacggcggagtcctttggtcccaggcatcatcacagttattgacaccgaaaccgttggagagggccaggtgcttgtgagtgaggattctgacagtgatggcattgtggcccacttccctgcccatgagaagccagtgtgctgcatggcttttaatacaagtggaatgcttctagtcacaacagacacccttggccatgactttcatgtcttccaaattctgactcatccttggtcctcatcacaatgtgctgtccaccatctgtatactcttcacaggggagaaactgaagccaaa

SEQ ID NO: 112080 - DNA, 545 bp, Homo sapiens
  Payload ID: 1958
  Gene Symbol: BCAS3
  Gene Name: breast carcinoma amplified sequence 3
  ENST ID: ENST00000588168
  CDS Start-End: 140-545
gagaattcgatgtaaacagaccagtctccctgtcctccggctccaacctgaaacgctcacgtgagcgggacaggagtctggatcatgttgcttttcttttcaaagccacgaaggttctgtcttccaaaaaaaatgttttatgaatgaagctatggctacagattccccaagaagacccagtcgttgtactggtggagttgtggttcgcccccaggctgtcacagagcagtcctacatggaaagtgttgtgacttttctgcaggatgttgtgccacaggcttacagtggaacacctctaacagaagaaaaggagaaaatagtctgggtcagatttgaaaatgcagatttaaatgatacatcaagaaatctggaatttcatgaaatacatagtactgggaatgaaccgcctttgttgattatgattggctacagtgatggaatgcaggtctggagcatccctatcagtggtgaagcacaagagctcttctctgttcgacatggcccaattcgagcggctagaatcttgcctgctccacagtttggtg

SEQ ID NO: 112081 - DNA, 594 bp, Homo sapiens
  Payload ID: 1958
  Gene Symbol: BCAS3
  Gene Name: breast carcinoma amplified sequence 3
  ENST ID: ENST00000588532
  CDS Start-End: 42-203
agagctggagactagcgttaaccggcggggcggccggttttatgaatgaagctatggctacagattccccaagaagacccagtcgttgtactggtggagttgtggttcgcccccaggctgtcacagagcagtcctacatggaaagtgttgtgacttttctgcaggatgttgtgccacagaaatcaaatgtcgcaaaggaataagtctgctaagctgaagaagaatttgaaaatgttattgcttcaccacgttaaaggaaaggaaagcctgatacaggaaaaaaggaagttgtcctaaatgcaggatagcatcctggtttggatcctggagcagagaaaggacattagtgagaaaggcttccaggaagcagctgataggttgggtctagaagcttgataagagactaaaaaagtacagtaatactcacaccagtataattgccacaaacacctagcacttaatagttaaaggcttacagtggaacacctctaacagaagaaaaggagaaaatagtctgggtcagatttgaaaatgcagatttaaatgatacatcaagaaatctggaatttcatgaaatacatagtactgggaatg

SEQ ID NO: 112082 - DNA, 562 bp, Homo sapiens
  Payload ID: 1958
  Gene Symbol: BCAS3
  Gene Name: breast carcinoma amplified sequence 3
  ENST ID: ENST00000586705
  CDS Start-End: 128-562
ggtttgaatgtcctcccgtagctcagagtaattcgatcgtctgaagccttcttctctcagcttgtcaaagtcattctccatccacctttgttccgttgctggctgctatccatgtccagggccaaacatgaatcctattgctcttgggagccgctggcttgcttatgcagaaaacaagttgattcgatgtcatcagtcccgtggtggagcctgtggagacaacattcagtcttatactgccacagtcattagtgctgctaaaacattgaaaagtggcctgacaatggtagggaaagtggtgactcagctgacaggcacactgccttcaggtgtgacagaagatgatgttgccatccacagtaattcacggcggagtcctttggtcccaggcatcatcacagttattgacaccgaaaccgttggagagggccaggtgcttgtgagtgaggattctgacagtgatggcattgtggcccacttccctgcccatgagaagccagtgtgctgcatggcttttaatacaagtggaatgcttctagtcacaacagacacccttggccat

SEQ ID NO: 112083 - DNA, 590 bp, Homo sapiens
  Payload ID: 1958
  Gene Symbol: BCAS3
  Gene Name: breast carcinoma amplified sequence 3
  ENST ID: ENST00000591147
  CDS Start-End: 73-243
atcactcggggagactccaaacagtgagcctagagctggagactagcgttaaccggcggggcggccggttttatgaatgaagctatggctacagattccccaagaagacccagtcgttgtactggtggagttgtggttcgcccccaggctgtcacagagcagtcctacatggaaagtgttgtgacttttctgcaggatgttgtgccacaggcttccaggaagcagctgataggttgggtctagaagcttgataagagactaaaaaagtacagtaatactcacaccagtataattgccacaaacacctagcacttaatagttaaaggcttacagtggaacacctctaacagaagaaaaggagaaaatagtctgggtcagatttgaaaatgcagatttaaatgatacatcaagaaatctggaatttcatgaaatacatagtactgggaatgaaccgcctttgttgattatgattggctacagtgatggaatgcaggtctggagcatccctatcagtggtgaagcacaagagctcttctctgttcgacatggcccaattcgagcggctagaatcttgcctgctccacagtttg

SEQ ID NO: 112084 - DNA, 3673 bp, Homo sapiens
  Payload ID: 1958
  Gene Symbol: BCAS3
  Gene Name: breast carcinoma amplified sequence 3
  Uniprot ID: Q9H6U6
  ENST ID: ENST00000589222
  CDS Start-End: 69-2855
ctcggggagactccaaacagtgagcctagagctggagactagcgttaaccggcggggcggccggttttatgaatgaagctatggctacagattccccaagaagacccagtcgttgtactggtggagttgtggttcgcccccaggctgtcacagagcagtcctacatggaaagtgttgtgacttttctgcaggatgttgtgccacaggcttacagtggaacacctctaacagaagaaaaggagaaaatagtctgggtcagatttgaaaatgcagatttaaatgatacatcaagaaatctggaatttcatgaaatacatagtactgggaatgaaccgcctttgttgattatgattggctacagtgatggaatgcaggtctggagcatccctatcagtggtgaagcacaagagctcttctctgttcgacatggcccaattcgagcggctagaatcttgcctgctccacagtttggtgctcaaaaatgtgataactttgctgaaaaaagacccctccttggtgtttgtaagagcattggatcttctggcacaagcccaccgtactgttgtgtggatctgtattcacttcgtactggggagatggtcaagtccattcaatttaagacacctatttatgatctccattgcaataaacggatccttgtcgtagtcttgcaggagaaaattgctgcctttgatagctgtactttcacgaagaaattctttgttacaagctgctatccatgtccagggccaaacatgaatcctattgctcttgggagccgctggcttgcttatgcagaaaacaagttgattcgatgtcatcagtcccgtggtggagcctgtggagacaacattcagtcttatactgccacagtcattagtgctgctaaaacattgaaaagtggcctgacaatggtagggaaagtggtgactcagctgacaggcacactgccttcaggtgtgacagaagatgatgttgccatccacagtaattcacggcggagtcctttggtcccaggcatcatcacagttattgacaccgaaaccgttggagagggccaggtgcttgtgagtgaggattctgacagtgatggcattgtggcccacttccctgcccatgagaagccagtgtgctgcatggcttttaatacaagtggaatgcttctagtcacaacagacacccttggccatgactttcatgtcttccaaattctgactcatccttggtcctcatcacaatgtgctgtccaccatctgtatactcttcacaggggagaaactgaagccaaagtacaggacatctgcttcagccatgactgtcgctgggttgtggtcagtactctccggggtacttcccacgttttccccatcaacccttatggtggccagccttgtgttcgtacacatatgtcaccacgagtagtgaatcgcatgagccgtttccagaaaagtgctggactggaagagattgaacaagaactgacgtctaagcaaggaggtcgctgtagccctgttccaggtctatcaagcagcccttctgggtcacccttgcatgggaaactgaacagccaagactcctataacaattttaccaacaacaaccctggcaaccctcggctctctcctcttcccagcttgatggtagtgatgcctcttgcacaaatcaagcagccaatgacattggggaccatcaccaaacgaaccggcaaagttaaacctcctccacaaatttcacccagcaaatcgatgggcggagaattttgtgtggctgctatcttcggaacatccaggtcatggtttgcaaataatgcaggtctgaaaagagaaaaagatcagtccaaacaagttgtagttgagtccctgtacattatcagttgctatggcaccttagtggaacacatgatggagccgcgacccctcagcactgcacccaagattagtgacgacacaccactggaaatgatgacatcgcctcgagccagctggactctggttagaacccctcaatggaatgaattgcagccaccgtttaatgcaaaccaccctctgctcctcgctgcagatgcagtacagtattatcagttcctgcttgctggcctggttccccctggaagtcctgggcccattactcgacatgggtcttacgacagtttagcttctgaccatagtggacaggaagatgaagaatggctttcccaggttgaaattgtaacacacactggaccccatagacgtctgtggatgggtccacagttccagttcaaaaccatccatccctcaggccaaaccacagttatctcatccagttcatctgtgttgcagtctcatggtccgagtgacacgccacagcctcttttggattttgatacagatgatcttgatctcaacagtctcaggatccagccagtccgctctgaccccgtcagcatgccagggtcatcccgtccagtctctgatcgaaggggagtttccacagtgattgatgctgcctcaggtacctttgacaggagcgtgaccctgctggaggtgtgcgggagctggcctgagggcttcgggctgcggcacatgtcctccatggagcacacggaggagggcctccgggagcgacttgccgacgccatggccgagtcacctagccgggacgtcgtgggatccggaacagacacagcccttgacgtagcagtaaaaaccttcccccctgagagacacgtggcagtgaagtgttttgggaaaaaaaaaggaaaaaaaaaacaatgccaacagcccagcgtccgtgagcaacccaacagtaacaaagcatgcgttcgggatggaggaagaacttcagcgagagggaagcatcgagactctgagtaacagctcaggctccaccagcggcagcataccaagaaactttgatggctaccgatctccgctgcccaccaatgagagccagcccctcagcctcttcccgactggcttcccgtaggtaccagcaacctgcttctgactggccagccccctcccctgctggaggaggggagaagccccgctctggtcctacccttcagtctctgctcttccttcatcaaccaccttccccaagcttagtgacagcagccgcccatcctacctggatggagaagagacccttctccaagcacctcagcgcacttgccctctgccacacctgtcggtggaggctgtggccaggagagactgtagaagctcggtccctgtgtatgtttgcatatgacatcctgcattggatccgcttttgtattttttaaccatacccacggtggggcgggtggggggagcctggaacagtgaccagatctgggggcctgagtggggacagagttgatcgtccacctggccattttgaccctgagtggacagtcacagcctcagctcatgtctggctgtgacacacactgcccccagcttcccttggtcagccccactccagcacggggtgaacggaggcccagagtactagggaaggaggaagggaggacatgcctcttcttcctcctttctttccccatctgttcatgggaagagtttgtctttcttatctttaagcccctttaccctggtcctgtactgatcagtgaaggaaaccgtggttactgaggccctgttgaaaagtgcacgtcttgtccaataaatcacgctgcagttggtgtcca

SEQ ID NO: 112085 - DNA, 747 bp, Homo sapiens
  Payload ID: 1958
  Gene Symbol: BCAS3
  Gene Name: breast carcinoma amplified sequence 3
  ENST ID: ENST00000586484
  CDS Start-End: 196-747
ggcaatgcctcgccctgcttcggctcgcgcacggtgcacggtgcgtgcacccactgacctgcgcccactgtctggcactccctagtgagatgaacccggtacctcagatggaaatgcagaaatcacccgtcttctgcgttgctcacgctgggagctgtagactggagctgctgctatccatgtccagggccaaacatgaatcctattgctcttgggagccgctggcttgcttatgcagaaaacaagttgattcgatgtcatcagtcccgtggtggagcctgtggagacaacattcagtcttatactgccacagtcattagtgctgctaaaacattgaaaagtggcctgacaatggtagggaaagtggtgactcagctgacaggcacactgccttcaggtgtgacagaagatgatgttgccatccacagtaattcacggcggagtcctttggtcccaggcatcatcacagttattgacaccgaaaccgttggagagggccaggtgcttgtgagtgaggattctgacagtgatggcattgtggcccacttccctgcccatgagaagccagtgtgctgcatggcttttaatacaagtggaatgcttctagtcacaacagacacccttggccatgactttcatgtcttccaaattctgactcatccttggtcctcatcacaatgtgctgtccaccatctgtatactcttcacaggggagaaactgaagccaaagtacaggacatctgcttc

SEQ ID NO: 112086 - DNA, 918 bp, Homo sapiens
  Payload ID: 1958
  Gene Symbol: BCAS3
  Gene Name: breast carcinoma amplified sequence 3
  ENST ID: ENST00000592848
  CDS Start-End: 34-195
agactagcgttaaccggcggggcggccggttttatgaatgaagctatggctacagattccccaagaagacccagtcgttgtactggtggagttgtggttcgcccccaggctgtcacagagcagtcctacatggaaagtgttgtgacttttctgcaggatgttgtgccacagaaatcaaatgtcgcaaaggaataagtctgctaagctgaagaagaatttgaaaatgttattgcttcaccacgttaaaggaaaggaaagcctgatacaggaaaaaaggaagttgtcctaaatgcaggatagcatcctggtttggatcctggagcagagaaaggacattagtgagaaaggcttacagtggaacacctctaacagaagaaaaggagaaaatagtctgggtcagatttgaaaatgcagatttaaatgatacatcaagaaatctggaatttcatgaaatacatagtactgggaatgaaccgcctttgttgattatgattggctacagtgatggaatgcaggtctggagcatccctatcagtggtgaagcacaagagctcttctctgttcgacatggcccaattcgagcggctagaatcttgcctgctccacagtttggtgctcaaaaatgtgataactttgctgaaaaaagacccctccttggtgtttgtaagagcattggatcttctggcacaagcccaccgtactgttgtgtggatctgtattcacttcgtactggggagatggtcaagtccattcaatttaagacacctatttatgatctccattgcaataaacggatccttgtcgtagtcttgcaggagaaaattgctgcctttgatagctgtactttcacgaagaaattctttgttacaagctgctatccatgtccagggccaaacatgaatcctattgctcttggga

SEQ ID NO: 112087 - DNA, 3559 bp, Homo sapiens
  Payload ID: 1958
  Gene Symbol: BCAS3
  Gene Name: breast carcinoma amplified sequence 3
  Uniprot ID: Q9H6U6
  ENST ID: ENST00000588462
  CDS Start-End: 1-2853
atgaatgaagctatggctacagattccccaagaagacccagtcgttgtactggtggagttgtggttcgcccccaggctgtcacagagcagtcctacatggaaagtgttgtgacttttctgcaggatgttgtgccacaggcttacagtggaacacctctaacagaagaaaaggagaaaatagtctgggtcagatttgaaaatgcagatttaaatgatacatcaagaaatctggaatttcatgaaatacatagtactgggaatgaaccgcctttgttgattatgattggctacagtgatggaatgcaggtctggagcatccctatcagtggtgaagcacaagagctcttctctgttcgacatggcccaattcgagcggctagaatcttgcctgctccacagtttggtgctcaaaaatgtgataactttgctgaaaaaagacccctccttggtgtttgtaagagcattggatcttctggcacaagcccaccgtactgttgtgtggatctgtattcacttcgtactggggagatggtcaagtccattcaatttaagacacctatttatgatctccattgcaataaacggatccttgtcgtagtcttgcaggagaaaattgctgcctttgatagctgtactttcacgaagaaattctttgttacaagctgctatccatgtccagggccaaacatgaatcctattgctcttgggagccgctggcttgcttatgcagaaaacaagttgattcgatgtcatcagtcccgtggtggagcctgtggagacaacattcagtcttatactgccacagtcattagtgctgctaaaacattgaaaagtggcctgacaatggtagggaaagtggtgactcagctgacaggcacactgccttcaggtgtgacagaagatgatgttgccatccacagtaattcacggcggagtcctttggtcccaggcatcatcacagttattgacaccgaaaccgttggagagggccaggtgcttgtgagtgaggattctgacagtgatggcattgtggcccacttccctgcccatgagaagccagtgtgctgcatggcttttaatacaagtggaatgcttctagtcacaacagacacccttggccatgactttcatgtcttccaaattctgactcatccttggtcctcatcacaatgtgctgtccaccatctgtatactcttcacaggggagaaactgaagccaaagtacaggacatctgcttcagccatgactgtcgctgggttgtggtcagtactctccggggtacttcccacgttttccccatcaacccttatggtggccagccttgtgttcgtacacatatgtcaccacgagtagtgaatcgcatgagccgtttccagaaaagtgctggactggaagagattgaacaagaactgacgtctaagcaaggaggtcgctgtagccctgttccaggtctatcaagcagcccttctgggtcacccttgcatgggaaactgaacagccaagactcctataacaattttaccaacaacaaccctggcaaccctcggctctctcctcttcccagcttgatggtagtgatgcctcttgcacaaatcaagcagccaatgacattggggaccatcaccaaacgaaccgggccttatctctttggagcggggtgtttttccataaaagccccatgcaaagttaaacctcctccacaaatttcacccagcaaatcgatgggcggagaattttgtgtggctgctatcttcggaacatccaggtcatggtttgcaaataatgcaggtctgaaaagagaaaaagatcagtccaaacaagttgtagttgagtccctgtacattatcagttgctatggcaccttagtggaacacatgatggagccgcgacccctcagcactgcacccaagattagtgacgacacaccactggaaatgatgacatcgcctcgagccagctggactctggttagaacccctcaatggaatgaattgcagccaccgtttaatgcaaaccaccctctgctcctcgctgcagatgcagtacagtattatcagttcctgcttgctggcctggttccccctggaagtcctgggcccattactcgacatgggtcttacgacagtttagcttctgaccatagtggacaggaagatgaagaatggctttcccaggttgaaattgtaacacacactggaccccatagacgtctgtggatgggtccacagttccagttcaaaaccatccatccctcaggccaaaccacagttatctcatccagttcatctgtgttgcagtctcatggtccgagtgacacgccacagcctcttttggattttgatacagatgatcttgatctcaacagtctcaggatccagccagtccgctctgaccccgtcagcatgccagggtcatcccgtccagtctctgatcgaaggggagtttccacagtgattgatgctgcctcaggtacctttgacaggagcgtgaccctgctggaggtgtgcgggagctggcctgagggcttcgggctgcggcacatgtcctccatggagcacacggaggagggcctccgggagcgacttgccgacgccatggccgagtcacctagccgggacgtcgtgggatccggaacagacacagcccttgacgtagcagtaaaaaccttcccccctgagagacacgtggcagtgaagtgttttgaacttcagcgagagggaagcatcgagactctgagtaacagctcaggctccaccagcggcagcataccaagaaactttgatggctaccgatctccgctgcccaccaatgagagccagcccctcagcctcttcccgactggcttcccgtaggtaccagcaacctgcttctgactggccagccccctcccctgctggaggaggggagaagccccgctctggtcctacccttcagtctctgctcttccttcatcaaccaccttccccaagcttagtgacagcagccgcccatcctacctggatggagaagagacccttctccaagcacctcagcgcacttgccctctgccacacctgtcggtggaggctgtggccaggagagactgtagaagctcggtccctgtgtatgtttgcatatgacatcctgcattggatccgcttttgtattttttaaccatacccacggtggggcgggtggggggagcctggaacagtgaccagatctgggggcctgagtggggacagagttgatcgtccacctggccattttgaccctgagtggacagtcacagcctcagctcatgtctggctgtgacacacactgcccccagcttcccttggtcagccccactccagcacggggtgaacggaggcccagagtactagggaaggaggaagggaggacatgcctcttcttcctcctttctttccccatctgttcatgggaagagtttgtctttcttatctttaagcccctttaccctggtcctgtactgatcagtgaaggaaaccgtggttactgaggccctgttgaaaagtgcacgtcttgtccaataaatcacgctgcagttggtgtcca

SEQ ID NO: 112088 - DNA, 2203 bp, Homo sapiens
  Payload ID: 1958
  Gene Symbol: BCAS3
  Gene Name: breast carcinoma amplified sequence 3
  ENST ID: ENST00000585744
  CDS Start-End: 104-2203
gccgccttgcagtttgatctcagactgctgtgctggcaatcagcgagactccgtgggcgtaggaccctccgagccaggctgctatccatgtccagggccaaacatgaatcctattgctcttgggagccgctggcttgcttatgcagaaaacaagttgattcgatgtcatcagtcccgtggtggagcctgtggagacaacattcagtcttatactgccacagtcattagtgctgctaaaacattgaaaagtggcctgacaatggtagggaaagtggtgactcagctgacaggcacactgccttcaggtgtgacagaagatgatgttgccatccacagtaattcacggcggagtcctttggtcccaggcatcatcacagttattgacaccgaaaccgttggagagggccaggtgcttgtgagtgaggattctgacagtgatggcattgtggcccacttccctgcccatgagaagccagtgtgctgcatggcttttaatacaagtggaatgcttctagtcacaacagacacccttggccatgactttcatgtcttccaaattctgactcatccttggtcctcatcacaatgtgctgtccaccatctgtatactcttcacaggggagaaactgaagccaaagtacaggacatctgcttcagccatgactgtcgctgggttgtggtcagtactctccggggtacttcccacgttttccccatcaacccttatggtggccagccttgtgttcgtacacatatgtcaccacgagtagtgaatcgcatgagccgtttccagaaaagtgctggactggaagagattgaacaagaactgacgtctaagcaaggaggtcgctgtagccctgttccaggtctatcaagcagcccttctgggtcacccttgcatgggaaactgaacagccaagactcctataacaattttaccaacaacaaccctggcaaccctcggctctctcctcttcccagcttgatggtagtgatgcctcttgcacaaatcaagcagccaatgacattggggaccatcaccaaacgaaccgggccttatctctttggagcggggtgtttttccataaaagccccatgcaaagttaaacctcctccacaaatttcacccagcaaatcgatgggcggagaattttgtgtggctgctatcttcggaacatccaggtcatggtttgcaaataatgcaggtctgaaaagagaaaaagatcagtccaaacaagttgtagttgagtccctgtacattatcagttgctatggcaccttagtggaacacatgatggagccgcgacccctcagcactgcacccaagattagtgacgacacaccactggaaatgatgacatcgcctcgagccagctggactctggttagaacccctcaatggaatgaattgcagccaccgtttaatgcaaaccaccctctgctcctcgctgcagatgcagtacagtattatcagttcctgcttgctggcctggttccccctggaagtcctgggcccattactcgacatgggtcttacgacagtttagcttctgaccatagtggacaggaagatgaagaatggctttcccaggttgaaattgtaacacacactggaccccatagacgtctgtggatgggtccacagttccagttcaaaaccatccatccctcaggccaaaccacagttatctcatccagttcatctgtgttgcagtctcatggtccgagtgacacgccacagcctcttttggattttgatacagatgatcttgatctcaacagtctcaggatccagccagtccgctctgaccccgtcagcatgccagggtcatcccgtccagtctctgatcgaaggggagtttccacagtgattgatgctgcctcaggtacctttgacaggagcgtgaccctgctggaggtgtgcgggagctggcctgagggcttcgggctgcggcacatgtcctccatggagcacacggaggagggcctccgggagcgacttgccgacgccatggccgagtcacctagccgggacgtcgtgggatccggaacagaacttcagcgagagggaagcatcgagactctgagtaacagctcaggctccaccagcggcagcataccaagaaactttgatggctaccgatctccgctgcccaccaatgagagccagcccctcagcctcttcccgactggcttcccgtag

SEQ ID NO: 112089 - DNA, 1950 bp, Homo sapiens
  Payload ID: 1958
  Gene Symbol: BCAS3
  Gene Name: breast carcinoma amplified sequence 3
  ENST ID: ENST00000614888
  CDS Start-End: 1-1950
acaagcccaccgtactgttgtgtggatctgtattcacttcgtactggggagatggtcaagtccattcaatttaagacacctatttatgatctccattgcaataaacggatccttgtcgtagtcttgcaggagaaaattgctgcctttgatagctgtactttcacgaagaaattctttgttacaagctgctatccatgtccagggccaaacatgaatcctattgctcttgggagccgctggcttgcttatgcagaaaacaagttgattcgatgtcatcagtcccgtggtggagcctgtggagacaacattcagtcttatactgccacagtcattagtgctgctaaaacattgaaaagtggcctgacaatggtagggaaagtggtgactcagctgacaggcacactgccttcaggtgtgacagaagatgatgttgccatccacagtaattcacggcggagtcctttggtcccaggcatcatcacagttattgacaccgaaaccgttggagagggccaggtgcttgtgagtgaggattctgacagtgatggcattgtggcccacttccctgcccatgagaagccagtgtgctgcatggcttttaatacaagtggaatgcttctagtcacaacagacacccttggccatgactttcatgtcttccaaattctgactcatccttggtcctcatcacaatgtgctgtccaccatctgtatactcttcacaggggagaaactgaagccaaagtacaggacatctgcttcagccatgactgtcgctgggttgtggtcagtactctccggggtacttcccacgttttccccatcaacccttatggtggccagccttgtgttcgtacacatatgtcaccacgagtagtgaatcgcatgagccgtttccagaaaagtgctggactggaagagattgaacaagaactgacgtctaagcaaggaggtcgctgtagccctgttccaggtctatcaagcagcccttctgggtcacccttgcatgggaaactgaacagccaagactcctataacaattttaccaacaacaaccctggcaaccctcggctctctcctcttcccagcttgatggtagtgatgcctcttgcacaaatcaagcagccaatgacattggggaccatcaccaaacgaaccggcaaagttaaacctcctccacaaatttcacccagcaaatcgatgggcggagaattttgtgtggctgctatcttcggaacatccaggtcatggtttgcaaataatgcaggtctgaaaagagaaaaagatcagtccaaacaagttgtagttgagtccctgtacattatcagttgctatggcaccttagtggaacacatgatggagccgcgacccctcagcactgcacccaagattagtgacgacacaccactggaaatgatgacatcgcctcgagccagctggactctggttagaacccctcaatggaatgaattgcagccaccgtttaatgcaaaccaccctctgctcctcgctgcagatgcagtacagtattatcagttcctgcttgctggcctggttccccctggaagtcctgggcccattactcgacatgggtcttacgacagtttagcttctgaccatagtggacaggaagatgaagaatggctttcccaggttgaaattgtaacacacactggaccccatagacgtctgtggatgggtccacagttccagttcaaaaccatccatccctcaggccaaaccacagttatctcatccagttcatctgtgttgcagtctcatggtccgagtgacacgccacagcctcttttggattttgatacagatgatcttgatctcaacagtctcaggatccagccagtccgctctgaccccgtcagcatgccagggtcatcccgtccagtctctgatcgaaggggagtttccacagtgattgatgctgcctcaggt

SEQ ID NO: 112090 - DNA, 1995 bp, Homo sapiens
  Payload ID: 1958
  Gene Symbol: BCAS3
  Gene Name: breast carcinoma amplified sequence 3
  ENST ID: ENST00000613443
  CDS Start-End: 1-1995
acaagcccaccgtactgttgtgtggatctgtattcacttcgtactggggagatggtcaagtccattcaatttaagacacctatttatgatctccattgcaataaacggatccttgtcgtagtcttgcaggagaaaattgctgcctttgatagctgtactttcacgaagaaattctttgttacaagctgctatccatgtccagggccaaacatgaatcctattgctcttgggagccgctggcttgcttatgcagaaaacaagttgattcgatgtcatcagtcccgtggtggagcctgtggagacaacattcagtcttatactgccacagtcattagtgctgctaaaacattgaaaagtggcctgacaatggtagggaaagtggtgactcagctgacaggcacactgccttcaggtgtgacagaagatgatgttgccatccacagtaattcacggcggagtcctttggtcccaggcatcatcacagttattgacaccgaaaccgttggagagggccaggtgcttgtgagtgaggattctgacagtgatggcattgtggcccacttccctgcccatgagaagccagtgtgctgcatggcttttaatacaagtggaatgcttctagtcacaacagacacccttggccatgactttcatgtcttccaaattctgactcatccttggtcctcatcacaatgtgctgtccaccatctgtatactcttcacaggggagaaactgaagccaaagtacaggacatctgcttcagccatgactgtcgctgggttgtggtcagtactctccggggtacttcccacgttttccccatcaacccttatggtggccagccttgtgttcgtacacatatgtcaccacgagtagtgaatcgcatgagccgtttccagaaaagtgctggactggaagagattgaacaagaactgacgtctaagcaaggaggtcgctgtagccctgttccaggtctatcaagcagcccttctgggtcacccttgcatgggaaactgaacagccaagactcctataacaattttaccaacaacaaccctggcaaccctcggctctctcctcttcccagcttgatggtagtgatgcctcttgcacaaatcaagcagccaatgacattggggaccatcaccaaacgaaccgggccttatctctttggagcggggtgtttttccataaaagccccatgcaaagttaaacctcctccacaaatttcacccagcaaatcgatgggcggagaattttgtgtggctgctatcttcggaacatccaggtcatggtttgcaaataatgcaggtctgaaaagagaaaaagatcagtccaaacaagttgtagttgagtccctgtacattatcagttgctatggcaccttagtggaacacatgatggagccgcgacccctcagcactgcacccaagattagtgacgacacaccactggaaatgatgacatcgcctcgagccagctggactctggttagaacccctcaatggaatgaattgcagccaccgtttaatgcaaaccaccctctgctcctcgctgcagatgcagtacagtattatcagttcctgcttgctggcctggttccccctggaagtcctgggcccattactcgacatgggtcttacgacagtttagcttctgaccatagtggacaggaagatgaagaatggctttcccaggttgaaattgtaacacacactggaccccatagacgtctgtggatgggtccacagttccagttcaaaaccatccatccctcaggccaaaccacagttatctcatccagttcatctgtgttgcagtctcatggtccgagtgacacgccacagcctcttttggattttgatacagatgatcttgatctcaacagtctcaggatccagccagtccgctctgaccccgtcagcatgccagggtcatcccgtccagtctctgatcgaaggggagtttccacagtgattgatgctgcctcaggt

SEQ ID NO: 112091 - DNA, 227 bp, Homo sapiens
  Payload ID: 1958
  Gene Symbol: BCAS3
  Gene Name: breast carcinoma amplified sequence 3
  ENST ID: ENST00000626960
  CDS Start-End: 66-227
ggggagactccaaacagtgagcctagagctggagactagcgttaaccggcggggcggccggttttatgaatgaagctatggctacagattccccaagaagacccagtcgttgtactggtggagttgtggttcgcccccaggctgtcacagagcagtcctacatggaaagtgttgtgacttttctgcaggatgttgtgccacagaaatcaaatgtcgcaaaggaataa

SEQ ID NO: 112092 - DNA, 1378 bp, Homo sapiens
  Payload ID: 1959
  Gene Symbol: BCAS4
  Gene Name: breast carcinoma amplified sequence 4
  Uniprot ID: Q8TDM0
  ENST ID: ENST00000358791
  CDS Start-End: 101-736
cactgggtggcgctgcccgctcggcccggcgctcctggagctgcgagccgcgaccgccgggagcgcacctgccccgcctccgccaggcggtccgcggggcatgcagcggaccgggggcggggctccgaggcccgggcgcaaccacgggctcccaggcagcctccgccagccggaccccgtcgccctcctgatgctgctcgtggacgctgatcagccggagcccatgcgcagcggggcgcgcgagctcgcgctcttcctgacccccgagcctggggccgaggcgaaggaggtggaggagaccatcgagggcatgctcctcaggctggaagagttttgcagcctggctgacctgatcaggagtgatacttcacagatcctggaggaaaacatcccagtccttaaggccaaactgacagaaatgcgtggcatctatgccaaagtggaccggctagaggccttcgtcaagatggttggacaccacgtcgccttcctggaagcagacgtgcttcaggctgagcgggaccatggggccttccctcaggccctgcggaggtggctgggatccgcagggctcccctccttcaggaacgtggagtgcagtggcacaatcccagctcgctgcaacctccgcctcccgggttcaagtgattctcctgcctccgcctcccaagtagctgggattacagaagtcacctgcaccggtgcccgtgacgtacgagctgcccacactgtataggacggaggactattttcctgtggacgccggggaagcacagcaccacccccgcacctgccctcggcctttgtgagctttgtggtcttcccatcaggaacgctggaaagtgacattgtgtacacactgcagcttgggggttttttctttgtattgctgtttattttatattttaaaaatatttaaaaaaatgtcgagatggggtctcactatgttgtccagactgatctcaaactcctgggctcaagtgatccacccaccttggccttccaaagtggtgggattatgggcaggagcctccgtgcccaggctgctgccattttcaaatttcctccctgcctcatgtgagaccacagggtttggagaagcagttggaacccacgtgtggtgatgcctcccacatcggcctgcttggggttctacaggggttgagggaccaggcctggccggggctgatggacagtggggactttccttctctccatgatggctttgcaggggctccatggtccttctctctgtgatgggtttttgcacggggtgtgctctgccactgtggtgggtgggtggatgctgcttctgttgcctccagacctcggtgcccacagccttgaggatccttccaataaaggtgtcaagagctca

SEQ ID NO: 112093 - DNA, 6680 bp, Homo sapiens
  Payload ID: 1959
  Gene Symbol: BCAS4
  Gene Name: breast carcinoma amplified sequence 4
  Uniprot ID: Q8TDM0
  ENST ID: ENST00000371608
  CDS Start-End: 1-612
atgcagcggaccgggggcggggctccgaggcccgggcgcaaccacgggctcccaggcagcctccgccagccggaccccgtcgccctcctgatgctgctcgtggacgctgatcagccggagcccatgcgcagcggggcgcgcgagctcgcgctcttcctgacccccgagcctggggccgaggcgaaggaggtggaggagaccatcgagggcatgctcctcaggctggaagagttttgcagcctggctgacctgatcaggagtgatacttcacagatcctggaggaaaacatcccagtccttaaggccaaactgacagaaatgcgtggcatctatgccaaagtggaccggctagaggccttcgtcaagatggttggacaccacgtcgccttcctggaagcagacgtgcttcaggctgagcgggaccatggggccttccctcaggccctgcggaggtggctgggatccgcagggctcccctccttcaggaacaagtcacctgcaccggtgcccgtgacgtacgagctgcccacactgtataggacggaggactattttcctgtggacgccggggaagcacagcaccacccccgcacctgccctcggcctttgtgagctttgtggtcttcccatcaggaacgctggaaagtgacattgtgtacacactgcagcttgggggttttttctttgtattgctgtttattttatattttaaaaatatttaaaaaaatgtcgagatggggtctcactatgttgtccagactgatctcaaactcctgggctcaagtgatccacccaccttggccttccaaagtggtgggattatgggcaggagcctccgtgcccaggctgctgccattttcaaatttcctccctgcctcatgtgagaccacagggtttggagaagcagttggaacccacgtgtggtgatgcctcccacatcggcctgcttggggttctacaggggttgagggaccaggcctggccggggctgatggacagtggggactttccttctctccatgatggctttgcaggggctccatggtccttctctctgtgatgggtttttgcacggggtgtgctctgccactgtggtgggtgggtggatgctgcttctgttgcctccagacctcggtgcccacagccttgaggatccttccaataaaggtgtcaagagctcagccctggtctggtgtgagaatgacggggagtgatagtttccttttcacctgtgcagtgttttctagaaggttcctcctgtgcctcacctgcgagggcctgatcctgggcacctgctgatgaggctccagctgagggaggggtagtcccggcctttggatttccagcaagagtgcagaggtcattaggacccccagggtcttcaaaggcttgtttacccacatttcttcccatgcagatgagtttcctgctattgtcctaacactccggatttctcactgtggcttcaacctgcaatgggtatttctggaattcctcgaagagccaagaacacacacataattcccctatgcacatacaggactgaactgtaaatctgcattagaatttcaagataatctgcctgggcaaggtgactcatgcctgtaatcccagcatcttgggaggctgaggcaggagggtcgcttatgcacagggtcaagactgcagtgagccgtgattgttctactgcaccctagcatgtgcaacagagcaagaccctgtcccccacaccccaaaaaagtttttcaaggaagcctaaaataatgaatctggcaagatagagtagaggccaggtgcagcggctcatgtctgtgatcccagcactttgggaggccgaggcaggcagatcgcccaggagtttgagaccagcctgggcaacataatgagaccatatctctaccaaaaatacaaaaattagcctggcgtgctggtgcacatctgtggtcccagctacttgggaggctgaggtgggaggattgcttgagcctgggaggttgaggctgcagtgagccatgattgtgccactgcactctagcctgggtaaccaagtgagatcttggctaaaaatgtttttaaaaattaaaaacagaaaagcagggaaatagtttagacaatttttggaattcagagatataggtagaccccttgtttctggaaaagtcagcatttttattctcttttcttttttttcgagatggagtctcactctgtcacccaggctgtagtgcggtggcatgatctcagctcactgcaacctccgcctcccgagttcaagctattttcctgcctcagcctcccaggaagctgggattacgggagcacaccaccacgcccagctaatttttgtatttttagtagagacggggtttcgccatgttggtcaggctggtctcgaactcctgacctcaggtgatcctcctactttggcctcccaaggtgctgggattacaggtgtgagccaccatgcccggtcagcatttttttattgaggtgacttttacaattttttttttctttaaatgagacacctgtcacccagcctggagtgcagtggtgtgatcatggctccctgaaacctcaagctcctgggctcaagtgatcctcctgcctcagcctcccaagtagctgggaccacaaatgtgcaccaccatgcctggcaacttttcaaatttgttttattttttgtagagacagggtctccctatgttgttcaggctggtcttgaacttctgggctcaggggaccctcctgtttcggcctcccaaaatgtagtgttggcacaaacctttattgaagtataatttatattacagaaaggggtgcctaagtggttcactaaatttttcacaaactgagtgtatctatttaagcctcaccagactgagcaaccaacattatcagcactgagcagccccctcatgcccgcttctggtccatgcccatacccacccccaccccaggctgacagcatactgacatctaaccatatggactggagtttcttgtttctgtgctctgtataaagagaggacacacgggatgtgtacctacggtgtgtcatctcttgtctctggcctcaccggcttgatgttaccttgggaggtgtcactgttgctgtgtcactgtagatcattcccatggctgtgttgtattggctgggactgtttttatcgaagggagcttggacactctgcatgccccagtgtgctcagggagagcacacgttggatggaaagttggccgggtgaggtggctcacgcctgtaatcccagcactttgggaggccaaggtgggcagatcacttgaggtcaggaattcgagaccagcctggccaacatagtgaaacctcatctctactaaaaatacaaaaattagccaggtgctgtggtgcacccctgtaatcccacctactcgggaggctgaggcaggagaatcgctcgaatctgggaggtggaggttgcagcaagccaagatcgtgccactgcactccagcctgggcaacagagcgagaccctatctcaaaaaagaagaaaaaggagaaagctaatgttaattttttagacaagcagttgaggacactcatttccggaagggtgagtatctgctgagtgttgggcactcccaggcttctttctcctcccagcccctgaaacaggggccagggagagttggaaggaaatcccatgtgattaagccgcagcaacgttgagtgtcctaaagcagggacccacaggccccacgctaggagcatggccctgaggttagcctgcctggcagcactgtccgctcccatgcctcttagctgtgtgagctgggcttttcacttgctctctctgagtccagctgcccctgcggtaagacatgaggatggctctggtctgatgggttgtggtgagggtgacatgaggtgagctgtgtgcatgctgggcacactggcgaggggctctcagtaatgggaggctgctgttgcagggcccgggctgtgatggggaaagggttgattgtcctgcgtttctcagttgaccagcggcatccgagggcctgaacagcgagtgactcagggactgcccttacgtgtcagagttagaagtcatgggagaatggaggctgctctctctgggtttccctgtcctgttaggaggggtgaggttgcacaggaaatctatggggaaaaggtgacaagtgaactggaagtagccgttccaaagttcctaggatttgcactgccaaacaatgagctttaagggacgcttggaaacatctggggagaaggaaggccgggacactgcgccctgccatcaccaacccctaacctcagtcctctgagcggctccactgtccctgtgccaggtgacttcatgtgcgtcctcattaaagcaaagtgcctgacatttccattgtccagtcaatgatgtcctcggttgctgactattgatggcctctaaccccttggtaagggtaactgcagcctaggaaagggtgatctgatctttctcttttttaaacagagacggggttttgctatgttgtccaggctagtctcaacctcctgggctcaagcgatcctcctaccttggccacccaaagtattgggattacagtcgtgagccaccgaggcctgccagtctttttcttttgtggctgatgttggacagggacaccagtagaaaggtcactgcagatttcttcccaagagcaaggctcttcggtcaaccccctttcccactttcccagcggatgtgaacttcgtgctcaccaaagcaagaggtttcaaggtagcagcccatggggttgtatctgattggcagaaatgtgtggtttgccctgaattgttttaagatgttttcatgttgtgacaattgggtaaacttctggaaaaaatagagctccatacctcactcagcacacctggattgtaaatcgattaggagcttaatgtataaaatgaatctattggccgggtgcagtggctcacacctgaatcctaccactttgggaggccaaggtgggtggatcgcttgagctcaggagttcaagaccagcatgggcaacatagcaaaaccccttctctgtaaaaaatagaaaaattagccaggcatggtggtgcttgcctatagacccagctacttggtgggaggtgggaagattgctcgagccagggaacttgaggctgcagtgagctgagattgtgccactgcactccagcctgggtgacaaagtgttaccctgtcttagaaagtaaaataaaacgaatctattgaagaaataggttaaaaacattggcgaagtgtacaaaatcgagaagccataaaagaggtcaatttgattatataaaatttttaaacttctgcatggcaaaaccaacggaaaactcaaccaaaaaatcccaaaacaacaaaatcctaagcaaattcaaaagatagatgacaaattgggaaaatatatttgcatctcatgctacaaagggataatctccctaaaaaatgtcacctacaaaaaagggaaacagtagcaaaacaggcaaaggctatgaacaggagtttcacagaaaatgcaaaacatgaaaagatactcaaccttaatgtatgccaataagtatggaaaaataccctgagatttttcacatttcaggctggcaaggattaaaatttttgatgacactattgaatttttttttttttttgagacagagtctgctctgttgcccaggctggagtgcagtggtgtgatctcagctcactgcaacccctgcctcctgggctcaaatgatcctcccacctcaggcacccaagtagctgggattacaggtgcgcaccaccatgcccagctaatttttgtgtttttagtaaagatggggttttgccatgttggccaggctggtctcaaactcctggcctcaagtgatccacctgcctcagcctcctaaagtgctggaattacaggcttgagccactgtgcctggtcttgctggtgatattttgaagaaacatattcttgtacattgatggtgggacaccattctcatgggggggcaattggcatacctaacaaaattagaaatggtcctagctactcagtaggctgcggcagcaggatcgcttgagtgagcccaggaggttgaggctgcagtaagccgtgatcatgccactgcactccagcctggatgacaaagcaaaacccaatctcttaaaaaaaaaagggggggttgcggggggaaatgtcctcagacccagtaattccacccctaggaatccagcttacacacacaagaaagaaaagataaatgtacaaggttagtcactgcacagtgagacagcaaaagattagaaagaacccaagtgattattgatctgggttttattcctttatagcccaaccatatgatggaatactataatgttgtaaaaatgggttaagagttctttatgaattggtgtggaaacatcgccaagatatgaaagccaaatgcagaaaaatatatgtggtatgctattatctatgtgaaaaagacattactattctctggaaggataaacacaaatttgagaatggtggatatctggggtgagaggtatccttttcactgttctttaaaagttttgatattttggtgtttgcctattcaaaaaaatggttaaaatcagttgccaccaattaaaaattaggagaatgcatataaa

SEQ ID NO: 112094 - DNA, 365 bp, Homo sapiens
  Payload ID: 1959
  Gene Symbol: BCAS4
  Gene Name: breast carcinoma amplified sequence 4
  ENST ID: ENST00000445038
  CDS Start-End: 15-365
ccgtcgccctcctgatgctgctcgtggacgctgatcagccggagcccatgcgcagcggggcgcgcgagctcgcgctcttcctgacccccgagcctggggccgaggcgaaggaggtggaggagaccatcgagggcatgctcctcaggctggaagagttttgcagcctggctgacctgatcaggagtgatacttcacagatcctggaggaaaacatcccagtccttaaggccaaactgacagaaatgcgtggcatctatgccaaagtggaccggctagagaagtcacctgcaccggtgcccgtgacgtacgagctgcccacactgtataggacggaggactattttcctgtggacgccggggaagca

SEQ ID NO: 112095 - DNA, 1498 bp, Homo sapiens
  Payload ID: 1959
  Gene Symbol: BCAS4
  Gene Name: breast carcinoma amplified sequence 4
  ENST ID: ENST00000463943
  CDS Start-End: 14-283
cgtcgccctcctgatgctgctcgtggacgctgatcagccggagcccatgcgcagcggggcgcgcgagctcgcgctcttcctgacccccgagcctggggccgaggcgaaggaggtggaggagaccatcgagggcatgctcctcaggctggaagagttttgcagcctggctgacctgatcaggagtgatacttcacagatcctggaggaaaacatcccagtccttaaggccaaactgacagaaatgcgtggcatctatgccaaagtggaccggctagagagttaaacagctaaaagaagtaaaataagaaggcaatgcttgtggaatgtacagtgcatattgacggcacacgcctcattacgattcgcctgcttgcttctcctgttcaatcgtttctttggaaggcagtggatttttctcttgcgtctctgtcttcttcagtttcgacttatcgaatttctcgatctcagccatatcggatttgtcagacatggttacggaggagaagcggagcgaggcacgcgagaacgagcgaagtctggtctgcgtagtggccaccactgagttgtccaattttatttatttttttgagacggagtttcactcttgtcgcgcaggctggactgcaatggcgcgatctcagctcactgcaacctccgcctcccgggttcaagccttcgtcaagatggttggacaccacgtcgccttcctggaagcagacgtgcttcaggctgagcgggaccatggggccttccctcaggccctgcggaggtggctgggatccgcagggctcccctccttcaggaacaagtcacctgcaccggtgcccgtgacgtacgagctgcccacactgtataggacggaggactattttcctgtggacgccggggaagcacagcaccacccccgcacctgccctcggcctttgtgagctttgtggtcttcccatcaggaacgctggaaagtgacattgtgtacacactgcagcttgggggttttttctttgtattgctgtttattttatattttaaaaatatttaaaaaaatgtcgagatggggtctcactatgttgtccagactgatctcaaactcctgggctcaagtgatccacccaccttggccttccaaagtggtgggattatgggcaggagcctccgtgcccaggctgctgccattttcaaatttcctccctgcctcatgtgagaccacagggtttggagaagcagttggaacccacgtgtggtgatgcctcccacatcggcctgcttggggttctacaggggttgagggaccaggcctggccggggctgatggacagtggggactttccttctctccatgatggctttgcaggggctccatggtccttctctctgtgatgggtttttgcacggggtgtgctctgccactgtggtgggtgggtggatgctgcttctgttgcctccagacctcggtgcccacagccttgaggatccttccaataaaggtgtcaagagctca

SEQ ID NO: 112096 - DNA, 787 bp, Homo sapiens
  Payload ID: 1959
  Gene Symbol: BCAS4
  Gene Name: breast carcinoma amplified sequence 4
  ENST ID: ENST00000609336
  CDS Start-End: 54-599
gcaaccacgggctcccaggcagcctccgccagccggaccccgtcgccctcctgatgctgctcgtggacgctgatcagccggagcccatgcgcagcggggcgcgcgagctcgcgctcttcctgacccccgagcctggggccgaggcgaaggaggtggaggagaccatcgagggcatgctcctcaggctggaagagttttgcagcctggctgacctgatcaggagtgatacttcacagatcctggaggaaaacatcccagtccttaaggccaaactgacagaaatgcgtggcatctatgccaaagtggaccggctagaggccttcgtcaagatggttggacaccacgtcgccttcctggaagcagacgtgcttcaggctgagcgggaccatggggccttccctcaggccctgcggaggtggctgggatccgcagggctcccctccttcaggaacgtggagtgcagtggcacaatcccagctcgctgcaacctccgcctcccgggttcaagtgattctcctgcctccgcctcccaagtagctgggattacagaagtcacctgcaccggtgcccgtgacgtacgagctgcccacactgtataggacggaggactattttcctgtggacgccggggaagcacagcaccacccccgcacctgccctcggcctttgtgagctttgtggtcttcccatcaggaacgctggaaagtgacattgtgtacacactgcagcttgggggttttttctttgtattgctgtttattttatattttaaaaatatttaaaaaaa

SEQ ID NO: 112097 - DNA, 3466 bp, Homo sapiens
  Payload ID: 1960
  Gene Symbol: BCAN
  Gene Name: brevican
  Uniprot ID: Q96GW7
  ENST ID: ENST00000329117
  CDS Start-End: 337-3072
ccttgctctcgccgctgctgccggagccgaagcagagaaggcagcgggtcccgtgaccgtcccgagagccccgcgctcccgaccagggggcgggggcggccccggggagggcggggcaggggcggggggaagaaagggggttttgtgctgcgccgggagggccggcgccctcttccgaatgtcctgcggccccagcctctcctcacgctcgcgcagtctccgccgcagtctcagctgcagctgcaggactgagccgtgcacccggaggagacccccggaggaggcgacaaacttcgcagtgccgcgacccaaccccagccctgggtagcctgcagcatggcccagctgttcctgcccctgctggcagccctggtcctggcccaggctcctgcagctttagcagatgttctggaaggagacagctcagaggaccgcgcttttcgcgtgcgcatcgcgggcgacgcgccactgcagggcgtgctcggcggcgccctcaccatcccttgccacgtccactacctgcggccaccgccgagccgccgggctgtgctgggctctccgcgggtcaagtggactttcctgtcccggggccgggaggcagaggtgctggtggcgcggggagtgcgcgtcaaggtgaacgaggcctaccggttccgcgtggcactgcctgcgtacccagcgtcgctcaccgacgtctccctggcgctgagcgagctgcgccccaacgactcaggtatctatcgctgtgaggtccagcacggcatcgatgacagcagcgacgctgtggaggtcaaggtcaaaggggtcgtctttctctaccgagagggctctgcccgctatgctttctccttttctggggcccaggaggcctgtgcccgcattggagcccacatcgccaccccggagcagctctatgccgcctaccttgggggctatgagcaatgtgatgctggctggctgtcggatcagaccgtgaggtatcccatccagaccccacgagaggcctgttacggagacatggatggcttccccggggtccggaactatggtgtggtggacccggatgacctctatgatgtgtactgttatgctgaagacctaaatggagaactgttcctgggtgaccctccagagaagctgacattggaggaagcacgggcgtactgccaggagcggggtgcagagattgccaccacgggccaactgtatgcagcctgggatggtggcctggaccactgcagcccagggtggctagctgatggcagtgtgcgctaccccatcgtcacacccagccagcgctgtggtgggggcttgcctggtgtcaagactctcttcctcttccccaaccagactggcttccccaataagcacagccgcttcaacgtctactgcttccgagactcggcccagccttctgccatccctgaggcctccaacccagcctccaacccagcctctgatggactagaggctatcgtcacagtgacagagaccctggaggaactgcagctgcctcaggaagccacagagagtgaatcccgtggggccatctactccatccccatcatggaggacggaggaggtggaagctccactccagaagacccagcagaggcccctaggacgctcctagaatttgaaacacaatccatggtaccgcccacggggttctcagaagaggaaggtaaggcattggaggaagaagagaaatatgaagatgaagaagagaaagaggaggaagaagaagaggaggaggtggaggatgaggctctgtgggcatggcccagcgagctcagcagcccgggccctgaggcctctctccccactgagccagcagcccaggaggagtcactctcccaggcgccagcaagggcagtcctgcagcctggtgcatcaccacttcctgatggagagtcagaagcttccaggcctccaagggtccatggaccacctactgagactctgcccactcccagggagaggaacctagcatccccatcaccttccactctggttgaggcaagagaggtgggggaggcaactggtggtcctgagctatctggggtccctcgaggagagagcgaggagacaggaagctccgagggtgccccttccctgcttccagccacacgggcccctgagggtaccagggagctggaggccccctctgaagataattctggaagaactgccccagcagggacctcagtgcaggcccagccagtgctgcccactgacagcgccagccgaggtggagtggccgtggtccccgcatcaggtgactgtgtccccagcccctgccacaatggtgggacatgcttggaggaggaggaaggggtccgctgcctatgtctgcctggctatgggggggacctgtgcgatgttggcctccgcttctgcaaccccggctgggacgccttccagggcgcctgctacaagcacttttccacacgaaggagctgggaggaggcagagacccagtgccggatgtacggcgcgcatctggccagcatcagcacacccgaggaacaggacttcatcaacaaccggtaccgggagtaccagtggatcggactcaacgacaggaccatcgaaggcgacttcttgtggtcggatggcgtccccctgctctatgagaactggaaccctgggcagcctgacagctacttcctgtctggagagaactgcgtggtcatggtgtggcatgatcagggacaatggagtgacgtgccctgcaactaccacctgtcctacacctgcaagatggggctggtgtcctgtgggccgccaccggagctgcccctggctcaagtgttcggccgcccacggctgcgctatgaggtggacactgtgcttcgctaccggtgccgggaaggactggcccagcgcaatctgccgctgatccgatgccaagagaacggtcgttgggaggccccccagatctcctgtgtgcccagaagacctgcccgagctctgcacccagaggaggacccagaaggacgtcaggggaggctactgggacgctggaaggcgctgttgatccccccttccagccccatgccaggtccctagggggcaaggccttgaacactgccggccacagcactgccctgtcacccaaattttccctcacaccctgcgctcccgccaccacaggaagtgacaacatgacgaggggtggtactggagtccaggtgacagttcctgaaggggcttctgggaaatacctaggaggctccagcccagcccaggccctctccccctaccctgggcaccagatcttccatcagggccggagtaaatccctaagtgcctcaactgccctctccctggcagccatcttgtcccctctattcctctagggagcactgtgcccactctttctgggttttccaagggaatgggcttgcaggatggagtgtctgtaaaatcaacaggaaataaaactgtgtatgagcccaggcaa

SEQ ID NO: 112098 - DNA, 2563 bp, Homo sapiens
  Payload ID: 1960
  Gene Symbol: BCAN
  Gene Name: brevican
  Uniprot ID: Q96GW7
  ENST ID: ENST00000361588
  CDS Start-End: 42-2057
gcagtgccgcgacccaaccccagccctgggtagcctgcagcatggcccagctgttcctgcccctgctggcagccctggtcctggcccaggctcctgcagctttagcagatgttctggaaggagacagctcagaggaccgcgcttttcgcgtgcgcatcgcgggcgacgcgccactgcagggcgtgctcggcggcgccctcaccatcccttgccacgtccactacctgcggccaccgccgagccgccgggctgtgctgggctctccgcgggtcaagtggactttcctgtcccggggccgggaggcagaggtgctggtggcgcggggagtgcgcgtcaaggtgaacgaggcctaccggttccgcgtggcactgcctgcgtacccagcgtcgctcaccgacgtctccctggcgctgagcgagctgcgccccaacgactcaggtatctatcgctgtgaggtccagcacggcatcgatgacagcagcgacgctgtggaggtcaaggtcaaaggggtcgtctttctctaccgagagggctctgcccgctatgctttctccttttctggggcccaggaggcctgtgcccgcattggagcccacatcgccaccccggagcagctctatgccgcctaccttgggggctatgagcaatgtgatgctggctggctgtcggatcagaccgtgaggtatcccatccagaccccacgagaggcctgttacggagacatggatggcttccccggggtccggaactatggtgtggtggacccggatgacctctatgatgtgtactgttatgctgaagacctaaatggagaactgttcctgggtgaccctccagagaagctgacattggaggaagcacgggcgtactgccaggagcggggtgcagagattgccaccacgggccaactgtatgcagcctgggatggtggcctggaccactgcagcccagggtggctagctgatggcagtgtgcgctaccccatcgtcacacccagccagcgctgtggtgggggcttgcctggtgtcaagactctcttcctcttccccaaccagactggcttccccaataagcacagccgcttcaacgtctactgcttccgagactcggcccagccttctgccatccctgaggcctccaacccagcctccaacccagcctctgatggactagaggctatcgtcacagtgacagagaccctggaggaactgcagctgcctcaggaagccacagagagtgaatcccgtggggccatctactccatccccatcatggaggacggaggaggtggaagctccactccagaagacccagcagaggcccctaggacgctcctagaatttgaaacacaatccatggtaccgcccacggggttctcagaagaggaaggtaaggcattggaggaagaagagaaatatgaagatgaagaagagaaagaggaggaagaagaagaggaggaggtggaggatgaggctctgtgggcatggcccagcgagctcagcagcccgggccctgaggcctctctccccactgagccagcagcccaggaggagtcactctcccaggcgccagcaagggcagtcctgcagcctggtgcatcaccacttcctgatggagagtcagaagcttccaggcctccaagggtccatggaccacctactgagactctgcccactcccagggagaggaacctagcatccccatcaccttccactctggttgaggcaagagaggtgggggaggcaactggtggtcctgagctatctggggtccctcgaggagagagcgaggagacaggaagctccgagggtgccccttccctgcttccagccacacgggcccctgagggtaccagggagctggaggccccctctgaagataattctggaagaactgccccagcagggacctcagtgcaggcccagccagtgctgcccactgacagcgccagccgaggtggagtggccgtggtccccgcatcaggtaattctgcccaaggctcaactgccctctctatcctactccttttcttccccctgcagctctgggtcacctgacctgtagtcctttaacccaccatcatcccaaactctcctgtcctttgccttcattctcttacccacctctacctatgggtctccaatctcggatatccaccttgtgggtatctcagctctccgcgtctttaccctgtgatcccagccccgccactgaccatctgtgacccttccctgccattgggccctccacctgtggctcacatctcgccagccccacagagcatcctcaggcctctccaagggtcctcatcacctattgcagccttcagggctcggcctattttccactactcccttcatccgcctgtgtgccgtcccctttagctgcctcctattgatctcagggaagcctgggagtcccttctcacccctcaacctccggagtccaggagaacccgtacccccacagagccttaagcaactacttctgtgaagtattttttgactgtttcatggaaaacaagccttggaaataaatctctattaaaccgctttgtaaccaa

SEQ ID NO: 112099 - DNA, 807 bp, Homo sapiens
  Payload ID: 1960
  Gene Symbol: BCAN
  Gene Name: brevican
  ENST ID: ENST00000457777
  CDS Start-End: 167-807
gccctcttccgaatgtcctgcggccccagcctctcctcacgctcgcgcagtctccgccgcagtctcagctgcagctgcaggactgagccgtgcacccggaggagacccccggaggaggcgacaaacttcgcagtgccgcgacccaaccccagccctggcctgcagcatggcccagctgttcctgcccctgctggcagccctggtcctggcccaggctcctgcagctttagcagatgttctggaaggagacagctcagaggaccgcgcttttcgcgtgcgcatcgcgggcgacgcgccactgcagggcgtgctcggcggcgccctcaccatcccttgccacgtccactacctgcggccaccgccgagccgccgggctgtgctgggctctccgcgggtcaagtggactttcctgtcccggggccgggaggcagaggtgctggtggcgcggggagtgcgcgtcaaggtgaacgaggcctaccggttccgcgtggcactgcctgcgtacccagcgtcgctcaccgacgtctccctggcgctgagcgagctgcgccccaacgactcaggtatctatcgctgtgaggtccagcacggcatcgatgacagcagcgacgctgtggaggtcaaggtcaaaggggtcgtctttctctaccgagagggctctgcccgctatgctttctccttttctggggcccaggaggcctgtgcccgcattggagcccacatcgccaccccggagcagctctatgccgcctaccttgggggctatgagcaatgtgatgctggctggctgtcggatcagaccgtgag

SEQ ID NO: 112100 - DNA, 600 bp, Homo sapiens
  Payload ID: 1960
  Gene Symbol: BCAN
  Gene Name: brevican
  ENST ID: ENST00000441358
  CDS Start-End: 166-600
ggctcccagcaacgcctgcattttgcacattggtttgcatgactgtctccgccgcagtctcagctgcagctgcaggactgagccgtgcacccggaggagacccccggaggaggcgacaaacttcgcagtgccgcgacccaaccccagccctgggtagcctgcagcatggcccagctgttcctgcccctgctggcagccctggtcctggcccaggctcctgcagctttagcagatgttctggaaggagacagctcagaggaccgcgcttttcgcgtgcgcatcgcgggcgacgcgccactgcagggcgtgctcggcggcgccctcaccatcccttgccacgtccactacctgcggccaccgccgagccgccgggctgtgctgggctctccgcgggtcaagtggactttcctgtcccggggccgggaggcagaggtgctggtggcgcggggagtgcgcgtcaaggtgaacgaggcctaccggttccgcgtggcactgcctgcgtacccagcgtcgctcaccgacgtctccctggcgctgagcgagctgcgccccaacgactcaggtatctatcgctgtgaggtccagcacggcatcgatgac

SEQ ID NO: 112101 - DNA, 844 bp, Homo sapiens
  Payload ID: 1960
  Gene Symbol: BCAN
  Gene Name: brevican
  ENST ID: ENST00000424639
  CDS Start-End: 151-844
cctgcggccccagcctctcctcacgctcgcgcagtctccgccgcagtctcagctgcagctgcaggactgagccgtgcacccggaggagacccccggaggaggcgacaaacttcgcagtgccgcgacccaaccccagccctggcctgcagcatggcccagctgttcctgcccctgctggcagccctggtcctggcccaggctcctgcagctttagcagatgttctggaaggagacagctcaggtatctatcgctgtgaggtccagcacggcatcgatgacagcagcgacgctgtggaggtcaaggtcaaaggggtcgtctttctctaccgagagggctctgcccgctatgctttctccttttctggggcccaggaggcctgtgcccgcattggagcccacatcgccaccccggagcagctctatgccgcctaccttgggggctatgagcaatgtgatgctggctggctgtcggatcagaccgtgaggtatcccatccagaccccacgagaggcctgttacggagacatggatggcttccccggggtccggaactatggtgtggtggacccggatgacctctatgatgtgtactgttatgctgaagacctaaatggagaactgttcctgggtgaccctccagagaagctgacattggaggaagcacgggcgtactgccaggagcggggtgcagagattgccaccacgggccaactgtatgcagcctgggatggtggcctggaccactgcagcccagggtggctagctgatggcagtgtgcgctaccccatcgtcacacccagccagcgctgtggtgggggcttgcctggtgtcaagactctcttcc

SEQ ID NO: 112102 - DNA, 790 bp, Homo sapiens
  Payload ID: 1960
  Gene Symbol: BCAN
  Gene Name: brevican
  ENST ID: ENST00000491823
  CDS Start-End: 1-80
agcacggcatcgatgacagcagcgacgctgtggaggtcaaggtcaaaggtggaggacattctacccacaatctaacttaagtccctcatgctgtagagggtcgtctttctctaccgagagggctctgcccgctatgctttctccttttctggggcccaggaggcctgtgcccgcattggagcccacatcgccaccccggagcagctctatgccgcctaccttgggggctatgagcaatgtgatgctggctggctgtcggatcagaccgtgaggtatcccatccagaccccacgagaggcctgttacggagacatggatggcttccccggggtccggaactatggtgtggtggacccggatgacctctatgatgtgtactgttatgctgaagacctaaatggagaactgttcctgggtgaccctccagagaagctgacattggaggaagcacgggcgtactgccaggagcggggtgcagagattgccaccacgggccaactgtatgcagcctgggatggtggcctggaccactgcagcccagggtggctagctgatggcagtgtgcgctaccccatcgtcacacccagccagcgctgtggtgggggcttgcctggtgtcaagactctcttcctcttccccaaccagactggcttccccaataagcacagccgcttcaacgtctactgcttccgagactcggcccagccttctgccatccctgaggcctccaacccagcctccaacccagcctctgatggactagaggctatcgtcacagtgacagagaccc

SEQ ID NO: 112103 - DNA, 1705 bp, Homo sapiens
  Payload ID: 1960
  Gene Symbol: BCAN
  Gene Name: brevican
  ENST ID: ENST00000479949
  CDS Start-End: 153-743
tgcggccccagcctctcctcacgctcgcgcagtctccgccgcagtctcagctgcagctgcaggactgagccgtgcacccggaggagacccccggaggaggcgacaaacttcgcagtgccgcgacccaaccccagccctgggtagcctgcagcatggcccagctgttcctgcccctgctggcagccctggtcctggcccaggctcctgcagctttagcagatgttctggaaggagacagctcagaggaccgcgcttttcgcgtgcgcatcgcgggcgacgcgccactgcagggcgtgctcggcggcgccctcaccatcccttgccacgtccactacctgcggccaccgccgagccgccgggctgtgctgggctctccgcgggtcaagtggactttcctgtcccggggccgggaggcagaggtgctggtggcgcggggagtgcgcgtcaaggtgaacgaggcctaccggttccgcgtggcactgcctgcgtacccagcgtcgctcaccgacgtctccctggcgctgagcgagctgcgccccaacgactcaggtatctatcgctgtgaggtccagcacggcatcgatgacagcagcgacgctgtggaggtcaaggtcaaaggtatcccatccagaccccacgagaggcctgttacggagacatggatggcttccccggggtccggaactatggtgtggtggacccggatgacctctatgatgtgtactgttatgctgaagacctaaatggagaactgttcctgggtgaccctccagagaagctgacattggaggaagcacgggcgtactgccaggagcggggtgcagagattgccaccacgggccaactgtatgcagcctgggatggtggcctggaccactgcagcccagggtggctagctgatggcagtgtgcgctaccccatcgtcacacccagccagcgctgtggtgggggcttgcctggtgtcaagactctcttcctcttccccaaccagactggcttccccaataagcacagccgcttcaacgtctactgcttccgagactcggcccagccttctgccatccctgaggcctccaacccagcctccaacccagcctctgatggactagaggctatcgtcacagtgacagagaccctggaggaactgcagctgcctcaggaagccacagagagtgaatcccgtggggccatctactccatccccatcatggaggacggaggaggtggaagctccactccagaagacccagcagaggcccctaggacgctcctagaatttgaaacacaatccatggtaccgcccacggggttctcagaagaggaaggtaaggcattggaggaagaagagaaatatgaagatgaagaagagaaagaggaggaagaagaagaggaggaggtggaggatgaggctctgtgggcatggcccagcgagctcagcagcccgggccctgaggcctctctccccactgagccagcagcccaggaggagtcactctcccaggcgccagcaagggcagtcctgcagcctggtgcatcaccacttcctgatggagagtcagaagcttccaggcctccaagggtccatggaccacctactgagactctgcccactcccagggagaggaacctagcatccccatcaccttccactctggttgaggcaagagaggtgggggaggcaactggtggtcctgagctatctggg

SEQ ID NO: 112104 - DNA, 2292 bp, Homo sapiens
  Payload ID: 1961
  Gene Symbol: BRF1
  Gene Name: BRF1, RNA polymerase III transcription initiation factor 90 kDa subunit
  Uniprot ID: Q92994
  ENST ID: ENST00000327359
  CDS Start-End: 331-2019
acaaccgagtcctgcgcgccccgtgcgccgggggtcgctcccaggccgaggtctgacagtgtcgccgaacgcgaaaggaagcgtgtggtacccgagagaggaagcaccctcgtcaccccggccggcaccgcattgaggcaggtgtgcaggtgcggttgcggcgagccaggtgctggcaaaaccccgactctgggtggcggcttccacgtgaatctggggaaggagtcgagagcgcagaccctgcagaatgggaggcgccacatccaccacctggggaaccagctgcagctgaaccagcactgcctggacaccgccttcaacttcttcaagatggccgtgagcaggcacctgacccgcggccggaagatggcccacgtgattgctgcctgcctctacctggtctgccgtacggagggcacgccgcacatgctcctggacctcagcgacctgctccaggtgaatgtgtacgtgcttggaaagacgtttcttctcttggcaagagagctctgcatcaatgcgccggccatagacccgtgcctgtatattccacgctttgcgcacctgctggaattcggggagaagaaccacgaggtgtccatgactgccctgaggctcctacagaggatgaagcgggactggatgcacacaggccggcgcccctcgggcctctgcggagcagcgctcctggttgcagccagaatgcatgacttcaggaggactgtgaaggaggtcatcagtgtggtcaaagtgtgtgagtccacgctgcggaagaggctcacggaatttgaagacacccccaccagtcagttgaccattgatgagttcatgaagatcgacctggaggaggagtgcgaccccccctcgtacacagctgggcagaggaagctgcggatgaagcagcttgaacaagtcctgtcaaaaaaactggaggaggttgaaggtgaaatatccagttaccaggatgcaattgagattgaactagaaaacagccggccaaaggccaaggggggcctggccagcctggcaaaagatggctccaccgaggacaccgcgtccagcttgtgtggcgaggaggacacagaggacgaggagctggaagccgcggccagccacctgaacaaagacttataccgggagctccttggtggtgcccccggcagctcggaagcagcaggaagccccgagtggggcggcagacctccggccctggggtccctgctggaccccctccccactgcagccagcctgggcatctcagactccatccgcgaatgcatctcctctcagagcagcgaccccaaagatgcttcaggagacggtgagctggacctcagtggcattgatgacctggagattgacaggtacatcctgaatgagtcggaagcccgcgtgaaggccgagctgtggatgagggagaacgccgagtacctgcgggaacagagggaaaaagaagcaagaatagcgaaagagaaggagctcggcatctacaaggaacacaagcccaagaagtcttgcaagcgacgggagccaattcaggccagtaccgccagggaggccatcgagaagatgctggagcagaagaagatctccagcaagatcaattatagcgtgctccggggcctcagcagcgccggcgggggcagtccgcacagggaggatgcacagcccgagcatagcgccagtgccaggaagctgtcacgaaggaggacgccggccagcagaagtggggctgaccctgtgaccagtgtggggaaaaggttgaggcctctggtgtctacgcagccagcaaagaaggtggccacgggagaggctttgctcccaagctctcccaccctcggagctgagcctgccaggccccaggcggtgctggtggagagcgggcccgtgtcataccacgccgacgaggaggctgacgaggaggagcctgacgaggaggacggggagccctgcgtcagtgccctgcagatgatgggcagcaacgactatggctgtgatggcgatgaggacgacggctactgaagtgtggcctccaggcaggtgatgtcctggcagggggcctcgcgggtctcctcagcatcagacgggcttccaggaccgcagcaggcaggccccagcgccgagactcctggtgacaggtggcacctgtcccacagccctcgtcccatgtggaacttaccattgggattgtgtttctattcagcaagggaaaccggaccaagcgtctgcatgtgtgtgatcagatgtgggccgggtgtgtgcagggctgggtcccgctgcctgccgtcgactcat

SEQ ID NO: 112105 - DNA, 884 bp, Homo sapiens
  Payload ID: 1961
  Gene Symbol: BRF1
  Gene Name: BRF1, RNA polymerase III transcription initiation factor 90 kDa subunit
  ENST ID: ENST00000379932
  CDS Start-End: 397-801
ccgccaaggacacacccaccgaggccacagctgcgatttcatagtgtgggaccccactggcaaagacacgctggctgctgtggccgtggtttctgtcccagccgtctgtttccatagaaaaaggtaacgggcataagcagtttccaggagaaatacaaatggccagagtggagacagcctacatgtccatcagcaacagaaaggatcagcaggttgtggtgggtccatttggggaatgcagtgagaaggaataacttacagcagcacacaagacctgggcgacagctgtctccgggggtgccaggatagaattgctgagccgccagagacccgtgcctgtatattccacgctttgcgcacctgctggaattcggggagaagaaccacgaggtgtccatgactgccctgaggctcctacagaggatgaagcgggactggatgcacacaggccggcgcccctcgggcctctgcggagcagcgctcctggttgcagccagaatgcatgacttcaggaggactgtgaaggaggtcatcagtgtggtcaaagtgtgtgagtccacgctgcggaagaggctcacggaatttgaagacacccccaccagtcagttgaccattgatgagttcatgaagatcgacctggaggaggagtgcgaccccccctccgaggagggagggcagacggaggcccgagagcctccccaggcctcttcgtgggaaggccccagtaccactcgtaggaggtctcagctctggcatggctgccccggatgtggccgagggggcttcaccctgtgtccttaggagggggtggccttgaggcagagccgtgcctcactgacccccaggggcctcatcctccccatggaatgggctgtatgtcctgc

SEQ ID NO: 112106 - DNA, 3314 bp, Homo sapiens
  Payload ID: 1961
  Gene Symbol: BRF1
  Gene Name: BRF1, RNA polymerase III transcription initiation factor 90 kDa subunit
  Uniprot ID: Q92994
  ENST ID: ENST00000379937
  CDS Start-End: 97-2049
gcggctgggcctgggcgggcggcgcgggctgctccggaggctcgggtggcttgagagtcttgggaggctccgggcgctgcccgcgcggtcgccggcatgacgggccgcgtgtgccgcggttgcggcggcacggacatcgagctggacgcggcgcgcggggacgcggtgtgcaccgcctgcggctcagtgctggaggacaacatcatcgtgtccgaggtgcagttcgtggagagcagcggcggcggctcctcggccgtgggccagttcgtgtccctggacgggaggcgccacatccaccacctggggaaccagctgcagctgaaccagcactgcctggacaccgccttcaacttcttcaagatggccgtgagcaggcacctgacccgcggccggaagatggcccacgtgattgctgcctgcctctacctggtctgccgtacggagggcacgccgcacatgctcctggacctcagcgacctgctccaggtgaatgtgtacgtgcttggaaagacgtttcttctcttggcaagagagctctgcatcaatgcgccggccatagacccgtgcctgtatattccacgctttgcgcacctgctggaattcggggagaagaaccacgaggtgtccatgactgccctgaggctcctacagaggatgaagcgggactggatgcacacaggccggcgcccctcgggcctctgcggagcagcgctcctggttgcagccagaatgcatgacttcaggaggactgtgaaggaggtcatcagtgtggtcaaagtgtgtgagtccacgctgcggaagaggctcacggaatttgaagacacccccaccagtcagttgaccattgatgagttcatgaagatcgacctggaggaggagtgcgaccccccctcgtacacagctgggcagaggaagctgcggatgaagcagcttgaacaagtcctgtcaaaaaaactggaggaggttgaaggtgaaatatccagttaccaggatgcaattgagattgaactagaaaacagccggccaaaggccaaggggggcctggccagcctggcaaaagatggctccaccgaggacaccgcgtccagcttgtgtggcgaggaggacacagaggacgaggagctggaagccgcggccagccacctgaacaaagacttataccgggagctccttggtggtgcccccggcagctcggaagcagcaggaagccccgagtggggcggcagacctccggccctggggtccctgctggaccccctccccactgcagccagcctgggcatctcagactccatccgcgaatgcatctcctctcagagcagcgaccccaaagatgcttcaggagacggtgagctggacctcagtggcattgatgacctggagattgacaggtacatcctgaatgagtcggaagcccgcgtgaaggccgagctgtggatgagggagaacgccgagtacctgcgggaacagagggaaaaagaagcaagaatagcgaaagagaaggagctcggcatctacaaggaacacaagcccaagaagtcttgcaagcgacgggagccaattcaggccagtaccgccagggaggccatcgagaagatgctggagcagaagaagatctccagcaagatcaattatagcgtgctccggggcctcagcagcgccggcgggggcagtccgcacagggaggatgcacagcccgagcatagcgccagtgccaggaagctgtcacgaaggaggacgccggccagcagaagtggggctgaccctgtgaccagtgtggggaaaaggttgaggcctctggtgtctacgcagccagcaaagaaggtggccacgggagaggctttgctcccaagctctcccaccctcggagctgagcctgccaggccccaggcggtgctggtggagagcgggcccgtgtcataccacgccgacgaggaggctgacgaggaggagcctgacgaggaggacggggagccctgcgtcagtgccctgcagatgatgggcagcaacgactatggctgtgatggcgatgaggacgacggctactgaagtgtggcctccaggcaggtgatgtcctggcagggggcctcgcgggtctcctcagcatcagacgggcttccaggaccgcagcaggcaggccccagcgccgagactcctggtgacaggtggcacctgtcccacagccctcgtcccatgtggaacttaccattgggattgtgtttctattcagcaagggaaaccggaccaagcgtctgcatgtgtgtgatcagatgtgggccgggtgtgtgcagggctgggtcccgctgcctgccgtcgactcatccaaggaccctccaaggctggcagtgtggtgttgctactattaaggaaacaggcttggggcagccccactgctggtccaagtgtgtggagggctgagtgtgctggccctgtgactcaggaccagctctggagtctccagcccaccctccgcaccgtcccctcctgagcagcactcggcgccagcagcctctgccagagtggaagccagagccctgcaggtgtccggcgcagccgtgggagctgaggatctggcacttgagaggcagcagctccttgaaggtcctctgcctccagctgtggccctgcatccagatacctgcctcgtccgaggcagacacccccacccctgcctcctccagacccccctccccgctgcctgcaccgcctggagcagcatgggggtcagacccctgctccagggccacttgagttgtgggcccaggagccctgcggctgccggcaggtgaactgagtgcccgacagctgagaccggcgcccacccgtcctgagcatagctctgtaggcagtgcgggcatagcctgcatagtgtcctggcgctgggagttccccgtggacagagccagagggcagtggcgctccctgtcagagctggatcaggccccccatcgaggagggagggcagacggaggcccgagagcctccccaggcctcttcgtgggaaggccccagtaccactcgtaggaggtctcagctctggcatggctgccccggatgtggccgagggggcttcaccctgtgtccttaggagggggtggccttgaggcagagccgtgcctcactgacccccaggggcctcatcctccccatggaatgggctgtatgtcctgccccaacttggcccgcagcaggccagacccccctacccccgcccagagctcagtagccagcctgggtcctgccagggcttctcgagggcttgggggaagaatagatttagtaaagcaggaagatctgttgttacttaacagaaa

SEQ ID NO: 112107 - DNA, 3579 bp, Homo sapiens
  Payload ID: 1961
  Gene Symbol: BRF1
  Gene Name: BRF1, RNA polymerase III transcription initiation factor 90 kDa subunit
  Uniprot ID: Q92994
  ENST ID: ENST00000392557
  CDS Start-End: 893-2314
gggaggtgcgtggcatggggcactggctttgctgatgaggagaccagacttcagaggccgtgtcacctggcctgggccgcacagctggtgcatgccaagctcgcgtgcagacgaagctccagaggcctggctgtcaggagggttcctccccgaggacacacacgcaacctcctggaccgccaggctttagacttttaaaacttccatatgcaggaaaccccacaggacgcagccagcatctcgggtcatgggtgcacctgtcaccgcagtcctgggctaaacagtgaacaggagctctgtgtctctgtggtcgttacagttgtagtgaatgttccctgggagagtcctcttcagaagatatttgcggtattttcaacaaaggactctccaggatggaggagcaactacaagtcaggaaggaaaaggctgacaacccagttttttaaaaaacgggcaaaggacgtgaacagacaccatgcaatggcccagagtgcacaaatcatcatttctcccaggaatggggtgcccgagcccccaggcggctgaacttgagacttgtcacgtagtgttggtggaatgcagagcagctggagatcacctgctgcaggtgggtgcgtaactccgcacggccaagccgtttggaaagctgtagcatatgcatgagagtccggaaagttccgagagaaagtgtgtggatgcacccgccaaggacacacccaccgaggccacagctgcgatttcatagtgtgggaccccactggcaaagacacgctggctgctgtggccgtggtttctgtcccagccgtctgtttccatagaaaaagacccgtgcctgtatattccacgctttgcgcacctgctggaattcggggagaagaaccacgaggtgtccatgactgccctgaggctcctacagaggatgaagcgggactggatgcacacaggccggcgcccctcgggcctctgcggagcagcgctcctggttgcagccagaatgcatgacttcaggaggactgtgaaggaggtcatcagtgtggtcaaagtgtgtgagtccacgctgcggaagaggctcacggaatttgaagacacccccaccagtcagttgaccattgatgagttcatgaagatcgacctggaggaggagtgcgaccccccctcgtacacagctgggcagaggaagctgcggatgaagcagcttgaacaagtcctgtcaaaaaaactggaggaggttgaaggtgaaatatccagttaccaggatgcaattgagattgaactagaaaacagccggccaaaggccaaggggggcctggccagcctggcaaaagatggctccaccgaggacaccgcgtccagcttgtgtggcgaggaggacacagaggacgaggagctggaagccgcggccagccacctgaacaaagacttataccgggagctccttggtggtgcccccggcagctcggaagcagcaggaagccccgagtggggcggcagacctccggccctggggtccctgctggaccccctccccactgcagccagcctgggcatctcagactccatccgcgaatgcatctcctctcagagcagcgaccccaaagatgcttcaggagacggtgagctggacctcagtggcattgatgacctggagattgacaggtacatcctgaatgagtcggaagcccgcgtgaaggccgagctgtggatgagggagaacgccgagtacctgcgggaacagagggaaaaagaagcaagaatagcgaaagagaaggagctcggcatctacaaggaacacaagcccaagaagtcttgcaagcgacgggagccaattcaggccagtaccgccagggaggccatcgagaagatgctggagcagaagaagatctccagcaagatcaattatagcgtgctccggggcctcagcagcgccggcgggggcagtccgcacagggaggatgcacagcccgagcatagcgccagtgccaggaagctgtcacgaaggaggacgccggccagcagaagtggggctgaccctgtgaccagtgtggggaaaaggttgaggcctctggtgtctacgcagccagcaaagaaggtggccacgggagaggctttgctcccaagctctcccaccctcggagctgagcctgccaggccccaggcggtgctggtggagagcgggcccgtgtcataccacgccgacgaggaggctgacgaggaggagcctgacgaggaggacggggagccctgcgtcagtgccctgcagatgatgggcagcaacgactatggctgtgatggcgatgaggacgacggctactgaagtgtggcctccaggcaggtgatgtcctggcagggggcctcgcgggtctcctcagcatcagacgggcttccaggaccgcagcaggcaggccccagcgccgagactcctggtgacaggtggcacctgtcccacagccctcgtcccatgtggaacttaccattgggattgtgtttctattcagcaagggaaaccggaccaagcgtctgcatgtgtgtgatcagatgtgggccgggtgtgtgcagggctgggtcccgctgcctgccgtcgactcatccaaggaccctccaaggctggcagtgtggtgttgctactattaaggaaacaggcttggggcagccccactgctggtccaagtgtgtggagggctgagtgtgctggccctgtgactcaggaccagctctggagtctccagcccaccctccgcaccgtcccctcctgagcagcactcggcgccagcagcctctgccagagtggaagccagagccctgcaggtgtccggcgcagccgtgggagctgaggatctggcacttgagaggcagcagctccttgaaggtcctctgcctccagctgtggccctgcatccagatacctgcctcgtccgaggcagacacccccacccctgcctcctccagacccccctccccgctgcctgcaccgcctggagcagcatgggggtcagacccctgctccagggccacttgagttgtgggcccaggagccctgcggctgccggcaggtgaactgagtgcccgacagctgagaccggcgcccacccgtcctgagcatagctctgtaggcagtgcgggcatagcctgcatagtgtcctggcgctgggagttccccgtggacagagccagagggcagtggcgctccctgtcagagctggatcaggccccccatcgaggagggagggcagacggaggcccgagagcctccccaggcctcttcgtgggaaggccccagtaccactcgtaggaggtctcagctctggcatggctgccccggatgtggccgagggggcttcaccctgtgtccttaggagggggtggccttgaggcagagccgtgcctcactgacccccaggggcctcatcctccccatggaatgggctgtatgtcctgccccaacttggcccgcagcaggccagacccccctacccccgcccagagctcagtagccagcctgggtcctgccagggcttctcgagggcttgggggaagaatagatttagtaaagcaggaagatctgttgttacttaacagaaa

SEQ ID NO: 112108 - DNA, 2368 bp, Homo sapiens
  Payload ID: 1961
  Gene Symbol: BRF1
  Gene Name: BRF1, RNA polymerase III transcription initiation factor 90 kDa subunit
  Uniprot ID: Q92994
  ENST ID: ENST00000440513
  CDS Start-End: 430-2184
ggcgacgcctctaaatgagagacagcgccaaccaggtacccgcgaggacgaccccgccccgcaggacagggcatctccaccgcgcgctggacggaggatacaaccgagtcctgcgcgccccgtgcgccgggggtcgctcccaggccgaggtctgacagtgtcgccgaacgcgaaaggaagcgtgtggtacccgagagaggaagcaccctcgtcaccccggccggcaccgcattgaggcaggtgtgcaggtgcggttgcggcgagccaggtgctggcaaaaccccgactctgggtggcggcttccacgtgaatctggggaaggagtcgagagcgcagaccctgcagaatgggaggcgccacatccaccacctggggaaccagctgcagctgaaccagcactgcctggacaccgccttcaacttcttcaagatggccgtgagcaggcacctgacccgcggccggaagatggcccacgtgattgctgcctgcctctacctggtctgccgtacggagggcacgccgcacatgctcctggacctcagcgacctgctccaggtgaatgtgtacgtgcttggaaagacgtttcttctcttggcaagagagctctgcatcaatgcgccggccatagacccgtgcctgtatattccacgctttgcgcacctgctggaattcggggagaagaaccacgaggtgtccatgactgccctgaggctcctacagaggatgaagcgggactggatgcacacaggccggcgcccctcgggcctctgcggagcagcgctcctggttgcagccagaatgcatgacttcaggaggactgtgaaggaggtcatcagtgtggtcaaagtgtgtgagtccacgctgcggaagaggctcacggaatttgaagacacccccaccagtcagttgaccattgatgagttcatgaagatcgacctggaggaggagtgcgaccccccctcgtacacagctgggcagaggaagctgcggatgaagcagcttgaacaagtcctgtcaaaaaaactggaggaggttgaaggtgaaatatccagttaccaggatgcaattgagattgaactagaaaacagccggccaaaggccaaggggggcctggccagcctggcaaaagatggctccaccgaggacaccgcgtccagcttgtgtggcgaggaggacacagaggacgaggagctggaagccgcggccagccacctgaacaaagacttataccgggagctccttggtggtgcccccggcagctcggaagcagcaggaagccccgagtggggcggcagacctccggccctggggtccctgctggaccccctccccactgcagccagcctgggcatctcagactccatccgcgaatgcatctcctctcagagcagcgaccccaaagatgcttcaggagacggtgagctggacctcagtggcattgatgacctggagattgacaggcgcgaccttagcatgccccggtgtgcgaaggctaaaagccagccccacttccctgtgctcgcccagtacatcctgaatgagtcggaagcccgcgtgaaggccgagctgtggatgagggagaacgccgagtacctgcgggaacagagggaaaaagaagcaagaatagcgaaagagaaggagctcggcatctacaaggaacacaagcccaagaagtcttgcaagcgacgggagccaattcaggccagtaccgccagggaggccatcgagaagatgctggagcagaagaagatctccagcaagatcaattatagcgtgctccggggcctcagcagcgccggcgggggcagtccgcacagggaggatgcacagcccgagcatagcgccagtgccaggaagctgtcacgaaggaggacgccggccagcagaagtggggctgaccctgtgaccagtgtggggaaaaggttgaggcctctggtgtctacgcagccagcaaagaaggtggccacgggagaggctttgctcccaagctctcccaccctcggagctgagcctgccaggccccaggcggtgctggtggagagcgggcccgtgtcataccacgccgacgaggaggctgacgaggaggagcctgacgaggaggacggggagccctgcgtcagtgccctgcagatgatgggcagcaacgactatggctgtgatggcgatgaggacgacggctactgaagtgtggcctccaggcaggtgatgtcctggcagggggcctcgcgggtctcctcagcatcagacgggcttccaggaccgcagcaggcaggccccagcgccgagactcctggtgacaggtggcacctgtcccacagccctcgtcccatgtggaacttaccattgggattgtgtttctattcagcaa

SEQ ID NO: 112109 - DNA, 2858 bp, Homo sapiens
  Payload ID: 1961
  Gene Symbol: BRF1
  Gene Name: BRF1, RNA polymerase III transcription initiation factor 90 kDa subunit
  Uniprot ID: Q92994
  ENST ID: ENST00000446501
  CDS Start-End: 277-1596
gtagaacatggcatagaagacggagctgccgacagccaagacgtactgggaggagaaagcgccgccgtgagcctggctctcccgcaggctgcgtgtcagccacacggcggacggggcggacggggcacgcgttccgagaggggccgccgctacccaccttgtgggcgggcaccgtcctggtcgcccccgggggccccacgacgaagtgcacgtcggccatgagctcgttgttgaacatgagcgcgttcctgcaaagcgctcctggttgcagccagaatgcatgacttcaggaggactgtgaaggaggtcatcagtgtggtcaaagtgtgtgagtccacgctgcggaagaggctcacggaatttgaagacacccccaccagtcagttgaccattgatgagttcatgaagatcgacctggaggaggagtgcgaccccccctcgtacacagctgggcagaggaagctgcggatgaagcagcttgaacaagtcctgtcaaaaaaactggaggaggttgaaggtgaaatatccagttaccaggatgcaattgagattgaactagaaaacagccggccaaaggccaaggggggcctggccagcctggcaaaagatggctccaccgaggacaccgcgtccagcttgtgtggcgaggaggacacagaggacgaggagctggaagccgcggccagccacctgaacaaagacttataccgggagctccttggtggtgcccccggcagctcggaagcagcaggaagccccgagtggggcggcagacctccggccctggggtccctgctggaccccctccccactgcagccagcctgggcatctcagactccatccgcgaatgcatctcctctcagagcagcgaccccaaagatgcttcaggagacggtgagctggacctcagtggcattgatgacctggagattgacaggtacatcctgaatgagtcggaagcccgcgtgaaggccgagctgtggatgagggagaacgccgagtacctgcgggaacagagggaaaaagaagcaagaatagcgaaagagaaggagctcggcatctacaaggaacacaagcccaagaagtcttgcaagcgacgggagccaattcaggccagtaccgccagggaggccatcgagaagatgctggagcagaagaagatctccagcaagatcaattatagcgtgctccggggcctcagcagcgccggcgggggcagtccgcacagggaggatgcacagcccgagcatagcgccagtgccaggaagctgtcacgaaggaggacgccggccagcagaagtggggctgaccctgtgaccagtgtggggaaaaggttgaggcctctggtgtctacgcagccagcaaagaaggtggccacgggagaggctttgctcccaagctctcccaccctcggagctgagcctgccaggccccaggcggtgctggtggagagcgggcccgtgtcataccacgccgacgaggaggctgacgaggaggagcctgacgaggaggacggggagccctgcgtcagtgccctgcagatgatgggcagcaacgactatggctgtgatggcgatgaggacgacggctactgaagtgtggcctccaggcaggtgatgtcctggcagggggcctcgcgggtctcctcagcatcagacgggcttccaggaccgcagcaggcaggccccagcgccgagactcctggtgacaggtggcacctgtcccacagccctcgtcccatgtggaacttaccattgggattgtgtttctattcagcaagggaaaccggaccaagcgtctgcatgtgtgtgatcagatgtgggccgggtgtgtgcagggctgggtcccgctgcctgccgtcgactcatccaaggaccctccaaggctggcagtgtggtgttgctactattaaggaaacaggcttggggcagccccactgctggtccaagtgtgtggagggctgagtgtgctggccctgtgactcaggaccagctctggagtctccagcccaccctccgcaccgtcccctcctgagcagcactcggcgccagcagcctctgccagagtggaagccagagccctgcaggtgtccggcgcagccgtgggagctgaggatctggcacttgagaggcagcagctccttgaaggtcctctgcctccagctgtggccctgcatccagatacctgcctcgtccgaggcagacacccccacccctgcctcctccagacccccctccccgctgcctgcaccgcctggagcagcatgggggtcagacccctgctccagggccacttgagttgtgggcccaggagccctgcggctgccggcaggtgaactgagtgcccgacagctgagaccggcgcccacccgtcctgagcatagctctgtaggcagtgcgggcatagcctgcatagtgtcctggcgctgggagttccccgtggacagagccagagggcagtggcgctccctgtcagagctggatcaggccccccatcgaggagggagggcagacggaggcccgagagcctccccaggcctcttcgtgggaaggccccagtaccactcgtaggaggtctcagctctggcatggctgccccggatgtggccgagggggcttcaccctgtgtccttaggagggggtggccttgaggcagagccgtgcctcactgacccccaggggcctcatcctccccatggaatgggctgtatgtcctgccccaacttggcccgcagcaggccagacccccctacccccgcccagagctcagtagccagcctgggtcctgccagggcttctcgagggcttgggggaagaatagatttagtaaagcaggaagatctgttgttacttaacag

SEQ ID NO: 112110 - DNA, 1452 bp, Homo sapiens
  Payload ID: 1961
  Gene Symbol: BRF1
  Gene Name: BRF1, RNA polymerase III transcription initiation factor 90 kDa subunit
  Uniprot ID: Q92994
  ENST ID: ENST00000548421
  CDS Start-End: 650-1276
gctcgccgctggagaccgcgctcactatccgaggaggaccctcctctgccccgcgtccagctttagtccccgactgcgttcatcgccaagggcccgcccactgccttaggtcgcgtcgccagccttgggtcccgtcgccagccttgggtcccgtccccggctgcactcaccgcgaggccccacccttagctctagtccccggtgtcgcccaccgacgaggccccgccccaaactccagtcccgggctgcgctcaccgccgtggccccgcccccaagcgccagtcctcggctgcgctcaccggtaggccccgctcgggttccgccgaagcccagcccccgcaggtcgcccctccgacgccggcgcgccgcaagggaggccagctcgctcgcagtggggaggtcgcggctccagtcctcgcgtccccgccgtggtcccggtgcctgtcccatcccgcgggcgcggccgttgcgggcggcgcggcccgggcgcgcgcggcgaatctgcggctgcgaatcggctggagcggggcctcgcgagagcggcgaggcctgggcggctgggcctgggcgggcggcgcgggctgctccggaggctcgggtggcttgagagtcttgggaggctccgggcgctgcccgcgcggtcgccggcatgacgggccgcgtgtgccgcggttgcggcggcacggacatcgagctggacgcggcgcgcggggacgcggtgtgcaccgcctgcggctcagtgctggaggacaacatcatcgtgtccgaggtgcagttcgtggagagcagcggcggcggctcctcggccgtgggccagttcgtgtccctggacggtgctggcaaaaccccgactctgggtggcggcttccacgtgaatctggggaaggagtcgagagcgcagaccctgcagaatgggaggcgccacatccaccacctggggaaccagctgcagctgaaccagcactgcctggacaccgccttcaacttcttcaagatggccgtgagcaggcacctgacccgcggccggaagatggcccacgtgattgctgcctgcctctacctggtctgccgtacggagggcacgccgcacatgctcctggacctcagcgacctgctccaggtagacagcctccgtcctgcatctttccccacctggggttgtgacctgggggttgtgaccagggttgtgaccggggtgtaccccaggtgcctccacgcatctcagtggccggtctgtgctgcctgcccagtcaggaagttttggtctgtaggatgaggggccttcatgacatgggggtcacagtccgagacttgtgggagtgtgggtctccatggcaggagggcacctgccaatgctgggcacggttgggtgttagctaggcctgggtgaacagtgaacttttgtcctacacaaaggagattattttcaattaaaaaatttttttgtgagta

SEQ ID NO: 112111 - DNA, 824 bp, Homo sapiens
  Payload ID: 1961
  Gene Symbol: BRF1
  Gene Name: BRF1, RNA polymerase III transcription initiation factor 90 kDa subunit
  ENST ID: ENST00000551787
  CDS Start-End: 192-677
ccgccaaggacacacccaccgaggccacagctgcgatttcatagtgtgggaccccactggcaaagacacgctggctgctgtggccgtggtttctgtcccagccgtctgtttccatagaaaaagacccgtgcctgtatattccacgctttgcgcacctgctggaattcggggagaagaaccacgaggtgtccatgactgccctgaggctcctacagaggatgaagcgggactggatgcacacaggccggcgcccctcgggcctctgcggagcagcgctcctggttgcagccagaatgcatgacttcaggaggactgtgaaggaggtcatcagtgtggtcaaagtgtgtgagtccacgctgcggaagaggctcacggaatttgaagacacccccaccagtcagttgaccattgatgagttcatgaagatcgacctggaggaggagtgcgaccccccctcgtacacagctgggcagaggaagctgcggatgaagcagcttgaacaagtcctgtcaaaaaaactggaggaggttgaaggtgaaatatccagttaccaggatgcaattgagattgaactagaaaacagccggccaaaggccccccatcgaggagggagggcagacggaggcccgagagcctccccaggcctcttcgtgggaaggccccagtaccactcgtaggaggtctcagctctggcatggctgccccggatgtggccgagggggcttcaccctgtgtccttaggagggggtggccttgaggcagagccgtgcctcactgacccccaggggcctcatcctccccatggaatgggctgtatgtcctgc

SEQ ID NO: 112112 - DNA, 1362 bp, Homo sapiens
  Payload ID: 1961
  Gene Symbol: BRF1
  Gene Name: BRF1, RNA polymerase III transcription initiation factor 90 kDa subunit
  ENST ID: ENST00000550375
  CDS Start-End: 1321-1362
acgctgcgtcagggccgcgccccgcgcgacgtcgctgcctcgcggccccgcccccaggcccgacatcctcgaagctgctcgagcttctgcccagcaaccggcgcgagccgcgcgctgtgcagaggtagccgtggaaggcggctcccggcgctggcaggcggccgcccccagacccgcagtgccatgcgcaggtgcttgcgcccgttcttcagttagcgatcttttggttaggaacgcaggtggacctgcttgtttggccatttgcattccggagtctgcctctggccgcggcctgtgggatggtcgttgggcttcctcgttcgttcagatgcttcgcgatttagcttgctacggacgccagcagccagcgcttgcagagagcgcggtccactctgctctgagggctttacaggggcaggcgctgctatttcccggcattttcctcgaggaaataggcacagagaggttagtcgcgcgctgaaggtcacacagccggcgggtgggcaagtcaggatctggccctgggcctgcagccctggagcttgggccccagggcgcgccctgcctctgtggctctgcctgtggatcgcagtcgcaggctcgctccttgtggggcctctagcctcccggcctggggctaatcctgggaggtgcgtggcatggggcactggctttgctgatgaggagaccagacttcagaggccgtgtcacctggcctgggccgcacagctggtgcatgccaagctcgcgtgcagacgaagctccagaggcctggctgtcaggagggttcctccccgaggacacacacgcaacctcctggaccgccaggctttagacttttaaaacttccatatgcaggaaaccccacaggacgcagccagcatctcgggtcatgggtgcacctgtcaccgcagtcctgggctaaacagtgaacaggagctctgtgtctctgtggtcgttacagttgtagtgaatgttccctgggagagtcctcttcagaagatatttgcggtattttcaacaaaggactctccaggatggaggagcaactacaagtcaggaaggaaaaggctgacaacccagttttttaaaaaacgggcaaaggacgtgaacagacaccatgcaatggcccagagtgcacaaatcatcatttctcccaggaatggggtgcccgagcccccaggcggctgaacttgagacttgtcacgtagtgttggtggaatgcagagcagctggagatcacctgctgcagacccgtgcctgtatattccacgctttgcgcacctgctggaattcggggagaagaaccacgaggtgtccatgactgccctgaggctcctacagaggatgaagcgggactgg

SEQ ID NO: 112113 - DNA, 3358 bp, Homo sapiens
  Payload ID: 1961
  Gene Symbol: BRF1
  Gene Name: BRF1, RNA polymerase III transcription initiation factor 90 kDa subunit
  ENST ID: ENST00000547530
  CDS Start-End: 60-2093
aggctcgggtggcttgagagtcttgggaggctccgggcgctgcccgcgcggtcgccggcatgacgggccgcgtgtgccgcggttgcggcggcacggacatcgagctggacgcggcgcgcggggacgcggtgtgcaccgcctgcggctcagtgctggaggacaacatcatcgtgtccgaggtgcagttcgtggagagcagcggcggcggctcctcggccgtgggccagttcgtgtccctggacggtgctggcaaaaccccgactctgggtggcggcttccacgtgaatctggggaaggagtcgagagcgcagaccctgcagaatgggaggcgccacatccaccacctggggaaccagctgcagctgaaccagcactgcctggacaccgccttcaacttcttcaagatggccgtgagcaggcacctgacccgcggccggaagatggcccacgtgattgctgcctgcctctacctggtctgccgtacggagggcacgccgcacatgctcctggacctcagcgacctgctccaggtgaatgtgtacgtgcttggaaagacgtttcttctcttggcaagagagctctgcatcaatgcgccggccatagacccgtgcctgtatattccacgctttgcgcacctgctggaattcggggagaagaaccacgaggtgtccatgactgccctgaggctcctacagaggatgaagcgggactggatgcacacaggccggcgcccctcgggcctctgcggagcagcgctcctggttgcagccagaatgcatgacttcaggaggactgtgaaggaggtcatcagtgtggtcaaagtgtgtgagtccacgctgcggaagaggctcacggaatttgaagacacccccaccagtcagttgaccattgatgagttcatgaagatcgacctggaggaggagtgcgaccccccctcgtacacagctgggcagaggaagctgcggatgaagcagcttgaacaagtcctgtcaaaaaaactggaggaggttgaaggtgaaatatccagttaccaggatgcaattgagattgaactagaaaacagccggccaaaggccaaggggggcctggccagcctggcaaaagatggctccaccgaggacaccgcgtccagcttgtgtggcgaggaggacacagaggacgaggagctggaagccgcggccagccacctgaacaaagacttataccgggagctccttggtggtgcccccggcagctcggaagcagcaggaagccccgagtggggcggcagacctccggccctggggtccctgctggaccccctccccactgcagccagcctgggcatctcagactccatccgcgaatgcatctcctctcagagcagcgaccccaaagatgcttcaggagacggtgagctggacctcagtggcattgatgacctggagattgacaggtacatcctgaatgagtcggaagcccgcgtgaaggccgagctgtggatgagggagaacgccgagtacctgcgggaacagagggaaaaagaagcaagaatagcgaaagagaaggagctcggcatctacaaggaacacaagcccaagaagtcttgcaagcgacgggagccaattcaggccagtaccgccagggaggccatcgagaagatgctggagcagaagaagatctccagcaagatcaattatagcgtgctccggggcctcagcagcgccggcgggggcagtccgcacagggaggatgcacagcccgagcatagcgccagtgccaggaagctgtcacgaaggaggacgccggccagcagaagtggggctgaccctgtgaccagtgtggggaaaaggttgaggcctctggtgtctacgcagccagcaaagaaggtggccacgggagaggctttgctcccaagctctcccaccctcggagctgagcctgccaggccccaggcggtgctggtggagagcgggcccgtgtcataccacgccgacgaggaggctgacgaggaggagcctgacgaggaggacggggagccctgcgtcagtgccctgcagatgatgggcagcaacgactatggctgtgatggcgatgaggacgacggctactgaagtgtggcctccaggcaggtgatgtcctggcagggggcctcgcgggtctcctcagcatcagacgggcttccaggaccgcagcaggcaggccccagcgccgagactcctggtgacaggtggcacctgtcccacagccctcgtcccatgtggaacttaccattgggattgtgtttctattcagcaagggaaaccggaccaagcgtctgcatgtgtgtgatcagatgtgggccgggtgtgtgcagggctgggtcccgctgcctgccgtcgactcatccaaggaccctccaaggctggcagtgtggtgttgctactattaaggaaacaggcttggggcagccccactgctggtccaagtgtgtggagggctgagtgtgctggccctgtgactcaggaccagctctggagtctccagcccaccctccgcaccgtcccctcctgagcagcactcggcgccagcagcctctgccagagtggaagccagagccctgcaggtgtccggcgcagccgtgggagctgaggatctggcacttgagaggcagcagctccttgaaggtcctctgcctccagctgtggccctgcatccagatacctgcctcgtccgaggcagacacccccacccctgcctcctccagacccccctccccgctgcctgcaccgcctggagcagcatgggggtcagacccctgctccagggccacttgagttgtgggcccaggagccctgcggctgccggcaggtgaactgagtgcccgacagctgagaccggcgcccacccgtcctgagcatagctctgtaggcagtgcgggcatagcctgcatagtgtcctggcgctgggagttccccgtggacagagccagagggcagtggcgctccctgtcagagctggatcaggccccccatcgaggagggagggcagacggaggcccgagagcctccccaggcctcttcgtgggaaggccccagtaccactcgtaggaggtctcagctctggcatggctgccccggatgtggccgagggggcttcaccctgtgtccttaggagggggtggccttgaggcagagccgtgcctcactgacccccaggggcctcatcctccccatggaatgggctgtatgtcctgccccaacttggcccgcagcaggccagacccccctacccccgcccagagctcagtagccagcctgggtcctgccagggcttctcgagggcttgggggaagaatagatttagtaaagcaggaagatctgttgttacttaacagaaa

SEQ ID NO: 112114 - DNA, 1962 bp, Homo sapiens
  Payload ID: 1961
  Gene Symbol: BRF1
  Gene Name: BRF1, RNA polymerase III transcription initiation factor 90 kDa subunit
  ENST ID: ENST00000549655
  CDS Start-End: 1260-1962
gcaccaccacgccctgcaaattttgtatttttagtaaagatggggtttctccatgttggtcaggccggtctcgaactgcggacctcaggtgatccgcccgcctcggcccccaaagtgctgggattagaggtgtgagccaccgcgcccagcctatgagcatattttttatcgttctctttatttctagctgcgatgattgtatcttattgaaaatcattaaaaatcttagcaattgttttaaattatctaatttttttctccaaataatatctattttagcagccaaatcaccacaaatcattggtttttatctttagttgtgggtgcacagcgggtgcgtgtattttggggcatgtgaggtgtcttgatgcgttcatgcagtgtgtaacagtcacatcagggtaaatgggacatctttcacctcaagcatttatccttcgtgttatggacaccctcagctggaaaggggggctgcgtcgtgagtatgaatggatgcaagtcatagccacctgagcctggtggggcacagcagggccctgtggagtcacatcccggcctcatgctcggcataggggagcgctgcttaggtccatgcagtcgctcagggcccaggctgtgcagcgcccagcctgtcctgctccaggcactcccccgtggcactgtgccgtgctggcagaggtgcacagcgccaggcctcagtgtgcacacacagcccccgtggcaccgccatgctggtagagatgccagaagtgggccctcctctcacccatgagtgtcagctgatgccggccggctggcgacttgtgtacccagcccacgcctgtcttgctctaagagtccccggaccgttgttgcgtgtggtgctgtctgcatggtctggagggaaggctgctgggtgtgcgcccctctgtgtcctgagcagggcggccatgcagtaggagcacgctgcctggccctagcgtgtctgcagcaggctggctggcagcaggtggccagtggctctcctgggttcggtgcgatggctgccctagctgagggtcagagaggctttgtccaggggaggggaactggtggggggcctgggggcctggaaagacaagtgcaggttgccccacccctgggctgcgtgggccgcctgtgcacgtgccatggcacatggaggtgggcactgaggtgctgtgtctgccgcagacccgtgcctgtatattccacgctttgcgcacctgctggaattcggggagaagaaccacgaggtgtccatgactgccctgaggctcctacagaggatgaagcgggactggatgcacacaggccggcgcccctcgggcctctgcggagcagcgctcctggttgcagccagaatgcatgacttcaggaggactgtgaaggaggtcatcagtgtggtcaaagtgtgtgagtccacgctgcggaagaggctcacggaatttgaagacacccccaccagtcagttgaccattgatgagttcatgaagatcgacctggaggaggagtgcgaccccccctcgtacacagctgggcagaggaagctgcggatgaagcagcttgaacaagtcctgtcaaaaaaactggaggaggttgaaggtgaaatatccagttaccaggatgcaattgagattgaactagaaaacagccggccaaaggccaaggggggcctggccagcctggcaaaagatggctccaccgaggacaccgcgtccagcttgtgtggcgaggaggacacagaggacgaggagctggaagccgcggccagccacctgaacaaagacttataccgggagctccttggtggtgcccccggcagctcggaagcagcaggaagccccgagtggggcggcagacctccggccctggggtccctgctggaccccctccccactgcagccagcctgggcatctcagactccatccgcgaatgcatctcctctcagagcagcgacccca

SEQ ID NO: 112115 - DNA, 600 bp, Homo sapiens
  Payload ID: 1961
  Gene Symbol: BRF1
  Gene Name: BRF1, RNA polymerase III transcription initiation factor 90 kDa subunit
  ENST ID: ENST00000550692
  CDS Start-End: 410-600
ggcgacgcctctaaatgagagacagcgccaaccaggtacccgcgaggacgaccccgccccgcaggacagggcatctccaccgcgcgctggacggaggatacaaccgagtcctgcgcgccccgtgcgccgggggtcgctcccaggccgaggtctgacagtgtcgccgaacgcgaaaggaagcgtgtggtacccgagagaggaagcaccctcgtcaccccggccggcaccgcattgaggcaggtgtgcaggtgctggcaaaaccccgactctgggtggcggcttccacgtgaatctggggaaggagtcgagagcgcagaccctgcagaatgggaggcgccacatccaccacctggggaaccagctgcagctgaaccagcactgcctggacaccgccttcaacttcttcaagatggccgtgagcaggcacctgacccgcggccggaagatggcccacgtgattgctgcctgcctctacctggtctgccgtacggagggcacgccgcacatgctcctggacctcagcgacctgctccaggtgaatgtgtacgtgcttggaaagacgtttcttctcttggcaagagagctctgcatcaatgcgcc

SEQ ID NO: 112116 - DNA, 1040 bp, Homo sapiens
  Payload ID: 1961
  Gene Symbol: BRF1
  Gene Name: BRF1, RNA polymerase III transcription initiation factor 90 kDa subunit
  ENST ID: ENST00000550208
  CDS Start-End: 906-1040
gcggccgcggcgctggcgggagcgtagagttccgccgccatcttcgcgggcggggcggcgggggcagcctcggcgcctgtggacgccgcgccccgcgccctcgcgccgcgccggggcctcgggagcggctctgcaagcaaaagcaaggaggtcaggcactgagcgacgcggccgtgcaggcaggctaggggcagcagcatgggcggcggcggcgctgtgacccgcggggctgccacccgctcccctgccacccccgcccctgcgaccctgcccgagcccagcctagcgcagcccggccaggcccggccgcggggggcgccgtcccgcccgcccgcccgcccgagcccgtacccgccgcggcgccggtgcgtcacgctgcgtcagggccgcgccccgcgcgacgtcgctgcctcgcggccccgcccccaggcccgacatcctcgaagctgctcgagcttctgcccagcaaccggcgcgagccgcgcgctgtgcagaggtagccgtggaaggcggctcccggcgctggcaggcggccgcccccagacccgcagtgccatgcgcaggtgcttgcgcccgttcttcagttagcgatcttttggttaggaacgcaggtggacctgcttgtttggccatttgcattccggagtctgcctctggccgcggcctgtgggatggtcgttgggcttcctcgttcgttcagatgcttcgcgatttagcttgctacggacgccagcagccagcgcttgcagagagcgcggtccactctgctctgagggctttacaggggcaggcgctgctatttcccggcattttcctcgaggaaataggcacagagagacccgtgcctgtatattccacgctttgcgcacctgctggaattcggggagaagaaccacgaggtgtccatgactgccctgaggctcctacagaggatgaagcgggactggatgcacacaggccggcgcccctcgggcctctgcggagcagcgctcctggttgcagccagaatgcatgacttcaggaggactgtgaaggaggtc

SEQ ID NO: 112117 - DNA, 778 bp, Homo sapiens
  Payload ID: 1961
  Gene Symbol: BRF1
  Gene Name: BRF1, RNA polymerase III transcription initiation factor 90 kDa subunit
  ENST ID: ENST00000552127
  CDS Start-End: 313-778
atagaagacggagctgccgacagccaagacgtactgggaggagaaagcgccgccgtgagcctggctctcccgcaggctgcgtgtcagccacacggcggacggggcggacggggcacgcgttccgagaggggccgccgctacccaccttgtgggcgggcaccgtcctggtcgcccccgggggccccacgacgaagtgcacgtcggccatgagctcgttgttgaacatgagcgcgttcctgcaaagacccgtgcctgtatattccacgctttgcgcacctgctggaattcggggagaagaaccacgaggtgtccatgactgccctgaggctcctacagaggatgaagcgggactggatgcacacaggccggcgcccctcgggcctctgcggagcagcgctcctggttgcagccagaatgcatgacttcaggaggactgtgaaggaggtcatcagtgtggtcaaagtgtgtgagtccacgctgcggaagaggctcacggaatttgaagacacccccaccagtcagttgaccattgatgagttcatgaagatcgacctggaggaggagtgcgaccccccctcgtacacagctgggcagaggaagctgcggatgaagcagcttgaacaagtcctgtcaaaaaaactggaggaggttgaaggtgaaatatccagttaccaggatgcaattgagattgaactagaaaacagccggccaaaggccaaggggggcctggccagcctggcaaaagatggctccaccgaggacaccgcgtccagcttgt

SEQ ID NO: 112118 - DNA, 554 bp, Homo sapiens
  Payload ID: 1961
  Gene Symbol: BRF1
  Gene Name: BRF1, RNA polymerase III transcription initiation factor 90 kDa subunit
  ENST ID: ENST00000546417
  CDS Start-End: 1-554
gggccagttcgtgtccctggacggtgctggcaaaaccccgactctgggtggcggcttccacgtgaatctggggaaggagtcgagagcgcagaccctgcagaatgacccgtgcctgtatattccacgctttgcgcacctgctggaattcggggagaagaaccacgaggtgtccatgactgccctgaggctcctacagaggatgaagcgggactggatgcacacaggccggcgcccctcgggcctctgcggagcagcgctcctggttgcagccagaatgcatgacttcaggaggactgtgaaggaggtcatcagtgtggtcaaagtgtgtgagtccacgctgcggaagaggctcacggaatttgaagacacccccaccagtcagttgaccattgatgagttcatgaagatcgacctggaggaggagtgcgaccccccctcgtacacagctgggcagaggaagctgcggatgaagcagcttgaacaagtcctgtcaaaaaaactggaggaggttgaaggtgaaatatccagttaccaggatgcaattgagattgaac

SEQ ID NO: 112119 - DNA, 1530 bp, Homo sapiens
  Payload ID: 1961
  Gene Symbol: BRF1
  Gene Name: BRF1, RNA polymerase III transcription initiation factor 90 kDa subunit
  ENST ID: ENST00000619151
  CDS Start-End: 976-1530
cggctgcgctcaccggtaggccccgctcgggttccgccgaagcccagcccccgcaggtcgcccctccgacgccggcgcgccgcaagggaggccagctcgctcgcagtggggaggtcgcggctccagtcctcgcgtccccgccgtggtcccggtgcctgtcccatcccgcgggcgcggccgttgcgggcggcgcggcccgggcgcgcgcggcgaatctgcggctgcgaatcggctggagcggggcctcgcgagagcggcgaggcctgggcggctgggcctgggcgggcggcgcgggctgctccggaggctcgggtggcttgagagtcttgggaggctccgggcgctgcccgcgcggtcgccggcatgacgggccgcgtgtgccgcggttgcggcggcacggacatcgagctggacgcggcgcgcggggacgcggtgtgcaccgcctgcggctcagtgctggaggacaacatcatcgtgtccgaggtgcagttcgtggagagcagcggcggcggctcctcggccgtgggccagttcgtgtccctggacggtgctggcaaaaccccgactctgggtggcggcttccacgtgaatctggggaaggagtcgagagcgcagaccctgcagaatgggaggcgccacatccaccacctggggaaccagctgcagctgaaccagcactgcctggacaccgccttcaacttcttcaagatggccgtgagcaggcacctgacccgcggccggaagatggcccacgtgattgctgcctgcctctacctggtctgccgtacggagggcacgccgcacatgctcctggacctcagcgacctgctccaggtgaatgtgtacgtgcttggaaagacgtttcttctcttggcaagagagctctgcatcaatgcgccggccatagacccgtgcctgtatattccacgctttgcgcacctgctggaattcggggagaagaaccacgaggtgtccatgactgccctgaggctcctacagaggatgaagcgggactggatgcacacaggccggcgcccctcgggcctctgcggagcagcgctcctggttgcagccagaatgcatgacttcaggaggactgtgaaggaggtcatcagtgtggtcaaagtgtgtgagtccacgctgcggaagaggctcacggaatttgaagacacccccaccagtcagttgaccattgatgagttcatgaagatcgacctggaggaggagtgcgaccccccctcgtacacagctgggcagaggaagctgcggatgaagcagcttgaacaagtcctgtcaaaaaaactggaggaggttgaaggtgaaatatccagttaccaggatgcaattgagattgaactagaaaacagccccccatcgaggagggagggcagacggaggcccgagagcctccccaggcctcttcgtgggaaggccccagtaccactcgtaggaggtctcagctctggcatggctgccccggatgtggccgagggggcttcaccctgtgtccttaggagggggtggccttga

SEQ ID NO: 112120 - DNA, 2603 bp, Homo sapiens
  Payload ID: 1962
  Gene Symbol: BRF2
  Gene Name: BRF2, RNA polymerase III transcription initiation factor 50 kDa subunit
  Uniprot ID: Q9HAW0
  ENST ID: ENST00000220659
  CDS Start-End: 122-1381
tggccggaagacgggggtgcaaccctttgaagtgtcccctcctacttcttgctgcctcacggttgctgttgcagacccaggagtctctgaaggcttccgcggctttggggccggttgtgagatgccaggcagaggccgctgcccggactgcggctccacggagctggtggaagactcgcactattcgcagagccagctggtgtgctccgactgcggctgcgtggtcaccgagggggtccttaccactaccttcagcgacgagggcaatctccgagaggtaacatattcccgaagcacaggggaaaacgaacaagttagtcgcagccagcaacgaggtctccggcgagtgagagacctttgtcgagttctgcagttgccaccaacatttgaggataccgcggttgcctactaccaacaggcatatcggcactctggcatccgagcggccaggctgcaaaagaaggaggtgttggttgggtgctgcgtcttaatcacctgccgacagcataactggcccctaacaatgggggccatctgcacgctgttgtatgcagatttggatgtgttttctagcacttacatgcagatagtgaagctcctgggactggatgtgccatctctgtgcttggcagaactggtgaagacctattgcagcagcttcaaactgttccaagcttcaccttctgtgccagccaaatacgtggaagacaaagagaagatgctgtctcgaacaatgcagttggtggagctggcaaatgagacgtggctggtgaccgggaggcatcccttgcccgtcatcactgctgcgactttcctggcttggcagtcgctgcagcctgcagatcggctttcatgttcccttgcccgattttgtaaattggcaaatgtggacctgccctacccggcgtcctcccgcctgcaggagctgctggctgtgctgctgcggatggctgagcagctggcctggttacgagttctgagacttgacaaacggtctgtggtgaagcacatcggtgaccttctccagcaccgccagtcactggtccgctctgcctttcgggatgggacagcagaagtggagacccgagagaaggagccaccggggtggggacaggggcaaggagaaggggaggtgggaaataattccttaggtttaccccaggggaagcggccggccagtcctgcccttctcttgccaccctgcatgttgaagtccccgaagcggatctgccctgtaccccctgtctccactgtcactggagatgagaacatttctgatagtgaaatagaacagtatttgcgtacccctcaggaagttagggactttcagagagcccaggctgctagacaggctgccacgagtgtccctaaccctccctgatggatatccactgggagcacttcatcctgttctgacagcttgataacattcctgttataaccaaggatggaagtgtacaccagtccgtaggtattgcttttcttgtttgaaggaaccaagaggggctctgccattagttggaccctgggtcctggagtaaagtcaggagtgcagggatgactataggtaggagagattcccatcccttggtgtgggagagcaagttgcctatgtccatgttctgtgagatggctttcctcatagatggatgggaaaatgtcaggctctttgctgctggtttgaattggacacactgctgcggctcctcctgcaggcctgagggggcttccctctgcttgtggagtggttggcattcccagcagtatcaaccctcagaggagcgggaactggggaattctggccctacgtgcattcacaggcaatgatgggtttgtgtgtatggtgtcatgagatcctctacctcataacaaaaggacagtgggtagactaaggcagtagctcaaagggctttgcaaaattttaatatattaaaacaagaggcatctgctagaaaacattctattgtataaaacccgagttcttaaaaacatgttttctttggcactttcattccctccctcccctttccccagcatattgcaaaaagctctccagtgctaaggcattggcagggtgtgtaaacagcagccagcatatgtggaagaataatacaaagcttttttttttcttctaatatgtctgtgcagcaagcataaataacaggacccattccaaggagtgtgtgtgggttttccccctcccctgtgtcctctgtcaccttggtgatgaggccagagtgatgtgaagactgggagggaaccctaggtcagaccttggtttcctgttgttcttcccaagacccagggttccctcggtttccatttggtcctgtagtgaaatgctggtggttggttttaggttggggaaaagacgggtgctggtgtttaaaaggagtaaaggcataggcccctcatgacctgcagggaccccagccactgcctctgggcttggcttgagctcctgggagtcgggaagctggtttgacattttgtaggtttctctctactgtggagctggagatcaaatgattgggatggttcttcctctggccttacggaggcaaggaagtgctcttccttagtcccgtggtgttgtaaggctg

SEQ ID NO: 112121 - DNA, 473 bp, Homo sapiens
  Payload ID: 1962
  Gene Symbol: BRF2
  Gene Name: BRF2, RNA polymerase III transcription initiation factor 50 kDa subunit
  ENST ID: ENST00000522539
  CDS Start-End: 72-290
gctgcctcacggttgctgttgcagacccaggagtctctgaaggcttccgcggctttggggccggttgtgagatgccaggcagaggccgctgcccggactgcggctccacggagctggtggaagactcgcactattcgcagagccagctggtgtgctccgactgcggctgcgtggtcaccgagggggtccttaccactaccttcagcgacgagggcaatctccgagaggtaacatattcccgaagcacaggggaaaacgaacaagttagtcgcagccagcaacgagaatgactataccaagtgtcactcctgtctatgcagaaaggtacataatttgtgcatctgatatctgaggtctccggcgagtgagagacctttgtcgagttctgcagttgccaccaacatttgaggataccgcggttgcctactaccaacaggcatatcggcactctggcatccgagcggccaggctgc

SEQ ID NO: 112122 - DNA, 1192 bp, Homo sapiens
  Payload ID: 1962
  Gene Symbol: BRF2
  Gene Name: BRF2, RNA polymerase III transcription initiation factor 50 kDa subunit
  ENST ID: ENST00000520601
  CDS Start-End: 56-664
tgttgcagacccaggagtctctgaaggcttccgcggctttggggccggttgtgagatgccaggcagaggccgctgcccggactgcggctccacggagctggtggaagactcgcactattcgcagagccagctggtgtgctccgactgcggctgcgtggtcaccgagggggtccttaccactaccttcagcgacgagggcaatctccgagaggtaacatattcccgaagcacaggggaaaacgaacaagttagtcgcagccagcaacgaggtctccggcgagtgagagacctttgtcgagttctgcagttgccaccaacatttgaggataccgcggttgcctactaccaacaggcatatcggcactctggcatccgagcggccaggctgcaaaagaaggaggtgttggttgggtgctgcgtcttaatcacctgccgacagcataactggcccctaacaatgggggccatctgcacgctgttgtatgcagatttggatgtgttttctagcacttacatgcagatagtgaagctcctgggactggatgtgccatctctgtgcttggcagaactggtgaagacctattgcagcagcctggagtgcagtggcaccatcatagctcactgcagcctggaactcatgggctcaagcgatctgcccacctgatcctcccaaaatgcagcttcaaactgttccaagcttcaccttctgtgccagccaaatacgtggaagacaaagagaagatgctgtctcgaacaatgcagttggtggagctggcaaatgagacgtggctggtgaccgggaggcatcccttgcccgtcatcactgctgcgactttcctggcttggcagtcgctgcagcctgcagatcggctttcatgttcccttgcccgattttgtaaattggcaaatgtggacctgccctacccggcgtcctcccgcctgcaggagctgctggctgtgctgctgcggatggctgagcagctggcctggttacgagttctgagacttgacaaacggtctgtggtgaagcacatcggtgaccttctccagcaccgccagtcactggtccgctctgcctttcgggatgggacagcagaagtggagacccgagagaaggagccaccggggtggggacaggggcaaggagaaggggaggtgggaaataattccttaggtttaccccaggggaagc

SEQ ID NO: 112123 - DNA, 550 bp, Homo sapiens
  Payload ID: 1962
  Gene Symbol: BRF2
  Gene Name: BRF2, RNA polymerase III transcription initiation factor 50 kDa subunit
  ENST ID: ENST00000521170
  CDS Start-End: 79-297
acttcttgctgcctcacggttgctgttgcagacccaggagtctctgaaggcttccgcggctttggggccggttgtgagatgccaggcagaggccgctgcccggactgcggctccacggagctggtggaagactcgcactattcgcagagccagctggtgtgctccgactgcggctgcgtggtcaccgagggggtccttaccactaccttcagcgacgagggcaatctccgagaggtaacatattcccgaagcacaggggaaaacgaacaagttagtcgcagccagcaacgagaatgactataccaagtgtcactcctgtctatgcagaaaggtctccggcgagtgagagacctttgtcgagttctgcagttgccaccaacatttgaggataccgcggttgcctactaccaacaggcatatcggcactctggcatccgagcggccaggctgcaaaagaaggaggtgttggttgggtgctgcgtcttaatcacctgccgacagcataactggcccctaacaatgggggccatctgcacgctgttgtatgcag

SEQ ID NO: 112124 - DNA, 6648 bp, Homo sapiens
  Payload ID: 1963
  Gene Symbol: BRI3BP
  Gene Name: BRI3 binding protein
  Uniprot ID: Q8WY22
  ENST ID: ENST00000341446
  CDS Start-End: 92-847
gagcgcgccaaccttgccctagccggagcccgctgcggcccagcgcacggccctcaccccgcatcgcgaccccgcgccccgccggccgagcatgggcgcgcgcgcctcaggcgggcccctggcccgggccgggctcctgctgctgctgctgctgctgctgctgctcgggctgctggccccgggcgcgcagggggcgcggggccgcggcggcgcggagaagaacagctaccgccgcacggtcaacaccttctcccagagcgtcagcagcctgttcggcgaggacaacgtgcgcgccgctcagaagttcttggccaggctgactgagagatttgtgctgggagtggatatgttcgtggagacactgtggaaagtctggaccgagctcttggatgttcttggacttgacgtctccaacctgtcccagtatttcagcccagcctcggtgtccagcagcccggcccgcgcgctcctgctggtcggcgtcgtcctcctggcctactggttcttgtccctgaccctgggcttcactttcagcgtcctgcacgtggtgttcggccgcttcttctggatcgtgcgggtcgtcctgttttccatgtcctgcgtgtacatcctgcacaagtacgagggcgagccggagaacgcggtgctgccgctgtgcttcgtggtggccgtctacttcatgaccgggcccatgggcttctactggcgaagcagtcccagcggccccagcaaccccagcaaccccagcgtggaggagaagctggagcacctggagaagcaggtcagactgctcaacatccgtctcaaccgggtgctcgagagcctggaccgctccaaggacaagtgaaggtcagccggccgggcgggtccacagttaccagcacgctgtctcagaaaacgaaaacggaggaaaaaaaccccaaaccccaaacaatcttaataaacacgactgagcaagaaagtggcgctgtgtagggctatttccacccacccggcagctcttaggacacattcccagaagagcggaaagatcattgacgtggaactacacacgaagtgtaattagtgggggaaaaaatattttttaaacaaaggatataaccatatttagttgtacagtaagagaaatttatctgtgcatagagcataaagttaattttttcaagcatttaaatacatcttttgtaaggttttttaataaaggcagattgagtcaagtttattaaaactttacatggaggggaagaatatgctaatttgacatttgagaaaagtttaaatgcgagcgtttgttttcacagcttagggattggtgggtgaggtctgtgtgcgttattttcatgttcccaaactgtgagctttatttcatgttatttttggtggatgttgacttagttcatgaatgttgtcacttctaaatgtggacagttgggctgcaggatgcaactcaacctcttttggatcctagagacccctgccaagcccccatcagtcctatttttaaatgaagacatcgccatttctagaagacctgagattttcttccctctgtgcttcgatgtattttaacctcaacattttgaaacggaaaatgcaaggaggggccaagaaatgtcctggggatttgatgccaggaagtacctggtaaggattggagattgctccagaatctactgcatgtcccaatttgcagtttgctcactagggctatatacaaaagctatacccttgagggtttttttttttttcttttgatttcctcaggaccttagagggaaaacaaacagtagcagctaatattctcaagtatattgctgcttagaaagatcctcaggaacaattagcagcaataagcaagcctttgaaaagatctgaattctttttcctgaaatatttacgatacacaggtgctttttatctgaaatctgttgtgtcctccttttaggcagtctctgtgggcagagagtgggacttgcgaggtggacagctgtggggatcctgggcaagggagtttcagaaggtgtggctcaggggctggtagaaacccccttttgttaggacttgttttttaaaaaagaaagccctaggccaggcgcagtggctgatgcctgtaatcccagcgctttgggaggccgaggagtatggatcacctgaggtcaggagttcaagaccagcctggccaacatggtgaaacccccgtctctactaaaaatacaaaaattagtcaggcatggtggtgggtgcctgtagtccagctactcaggaggctgaggcaggagaattgcttgaacctgggaggtggaggttgcggtgagccgagatcacgccactgcactccagcctaggcaacagagcaagacttcatcttaaaaaaaaaaaaaaaagcccagcattttgcagctttgaagctgctggggatcacgactgtctctgtggcccttacctggccacagatgtaccctggcaacccgctcacagtgccctgcgtgcaggtttatagataacccctgccagacctgctacaaccaagaccttatggtccaggtctcagtttggagaagatttagctgtctaccacttcttgtgtagtgttcctgtgaagttttatttttggttgcaagtatctggaaaacagatgcagatgtttttgtggatgttgttgagacttttgagacttctgtttctaaggtacacatgatgggacccaaactctcctggagagttccattcacttcctgaaacgtgcacctgtttcaggtgcatgtttattcagtgtgcatggatatttaagatttgctggagcaggctgggcagggtggctcacccctataatcccaacactttgggaggccaaggcaggtggatcacctgaggtcaggagtttgagaccagcccggccaacagagtgaaaccccgtctctactaaaaatacaaaaattagccaggcctggtggtgggcgcctgtgatcccagctacttgggaggctgaggctggagaatcgcttgaacatgggaggcggaggttgcagtcagctgagatcataccaccacactctagcctcagcaacagagtgagactccgtctcaaaaaaaattatttgctggatcgaatctttttttttttgagatggagtctcactgtcaaccaggctggagtgcagtggcaccatctcggctcactgcaagctccgcctcctgggttcacgccattctcctacctcagcctcccaagtagccgggactacaggcgcccaccatcatgcccggctaattttttatatttttagtagagacggggtttcaccgtgttagccaggatggtctcgatctcctgacctcgtgatccgcccgcctcggcctcccaaagtgctgggattacaggcgtgagccaccgcgctgggcctagatcaaatctttatccatgcacattggaacacaggattactgggttgaaatcattctagttttgtcatttagatacttgtagatgaatctattttagcacaaggtataaataactcgggaggtcatctctatcttctttccttttgtgcatttggctataccacgtttaggtactaaaacagctttgcttatgttggccaggggaaaacatggcattctgtgcgcaaagctaatgatcgccagccctgccttggcccctcccttgtttatggtcattgtaagatgcccgcatgttaaggcttaagctgtcactgggctgggtgtaatacccgcttcattcctcctcccaccctcttacccgaaacatgaagggcactgtgctctattgagatctcgataagatcatcattttaacttgtattcaactgagggaggtaacatgatatctgggtgctggtggattgagacctcaagcatcaattcaaaattgctgtcgaaaatatgcactattttttttttccactctggctaagtgtaggctctgaagccagttttatagcttgatacattctggtgaaagatgtcttcatttttaatgaaagaacctacagttagtaggtgtcacctcagggtagaaattctgatagaaattctgattatttgaaactctgatagaaatcctagatgctagatttgaagaaaacctgggttttattgcatagatttcaccttttctggggcacatcttaccccaaaataattggggatttttttgttccttctccattccatggaaccttgtagggtgttgggattgggcctcccctcgccacccgccacatgtctttgtttttttctctcttttgtatgtggaaaaatgtatttttgtaccatatctcatacctggagagaaaccttttttctatcttcagggctgtagaatatattagcgtaacacttcactgaatgtgacgtaaaagcattctgatgaaaactggttctgttataattaagactcagtgtttaaaatatcttaatcagtgttaatttcccagtgtttcagtatcacagtaaatacttgttttactgagaacagaaaataatccagaaaaggaaaaggaccagccctctctagattgctggaattgtatggatgtgttggggttggtttagtgatctcttccttgacaccctagcaaagatgcttttgtggagtgcaaacctttcataaatatactttccaggctgggtgcagtggctcaagcttgtaatcccagcactttgggaggccaaggcgggtggatcacttgcggtcgggagttcgagaccagcctggccaacatagtgaaatcccgtctctaccaaaaaatacaaaaaaaaaaaaaaaaaaaaaaatagccaggtgtggtggtgggttcctgtagtcccagctactcaggaggctgaggtgggagaattgtatgaacctgggaggcagaggttgcagtgaactgagatcacaccactgtactccagttgaggcgacagagtgagacccagtctcaaaaaaaaaaaaaagtgtgtgtgtgtgtatatatatgtatatatatatacacacacacacactttccaataccagtcggcattacccgccctttggtttcttttgctttggatttcagcccccatatcatttctggtaacagagcacagcaatagaatttctgggaagcagaccttgtgaatcgtgcctgtgtcttaattcacaaagggtaagtgaatgccgttgaaaggtgtttcatacacttaccccagaaatgagagcctgtctcatgcaggagtcgggaggcagcgatgtcagggaactgggactatgtctttatgactgtgatggtggtaaccaagtggggtggtcccctctggggagctgagtaagaacgcaaaggtttgggtcagtgattaggaagactataatatgactttgtgcatgcccgggagggctgccttgtagagaggatgtgagcagcttagtcgctcatctggccctgtgattcaggcttatggagcgttaagaataacagctgtcaaatggcctagacatggttaatgcaatttgttgctagtggaaatcctgaattgcttcctttctgtgatcactgctacttcttaagatgcttttgatgaatgtcatctgccttacaagttgacacctgataacttctccctgatgggtttccgaactggctgacttaaccaaaaagccagctcttgccatctatcttgcattaaaaggaattcctgaggctcctaaggggtcagctgccccactcctgacttttttatttttaatggtctataccttctgcaacatttttgtttatggccatttgaatagttggactttgactcctcacttgtgaataataggaatatattttgcagaatctaacataatacccttaaaattcatactggacaaccatcagtgtgatgtatagtatctggtgtaaacaaattttattcagcatattaaattattctgtgttttgcttttccttgatatgtaggaggtgcaccagtaccagtttttctcttgtggtggcttaaaacgctgattgccatttgcattgtctactgaaaagctgtggcagcgagtggtattattgaccatgtgttctcatgtctttttgcagatttaaaggttttattgtagtgtccatttaatatctgcatgtgtgtttaatctctgaataccatgtaattaaactgattaacttgtgatggtgatggtgattagcacacactaaaaacccaatgaagcaattgtctccctcttcttaactggaaatcacacttgtgaggtatggtatccattatcaacagtggattcatgattgacttcatattttgtgtatctggttataaattttgtatagcatttaatttggcacttaatataaatccatttgatttgaatagtgtgtgtgtgtacatggtgtgtgtgtgtgtgtgcactttagtttcgtgagccttgggaaactgattctacaaatatcttatatagagataaatgtatcaggcatttttttgcaaagcgatatatacattcctcttatttattaaatcactggctttggtgttatgtagagatatttgtagatctcagaacagaattaaaatattgtgaaaattacagcttaataaatgtttattgtaattttgttgtatggacttttaaaatatatctcatcacttctaaccaaa

SEQ ID NO: 112125 - DNA, 1913 bp, Homo sapiens
  Payload ID: 1964
  Gene Symbol: BRICD5
  Gene Name: BRICHOS domain containing 5
  Uniprot ID: Q6PL45
  ENST ID: ENST00000328540
  CDS Start-End: 1118-1804
tgccgtctcaccacgggtgggaggactcaaagtagatgggtaactggggttccaactccagagctggaatgccaactgcccactcccagcctggttcagaggaagatgttttgaagaatgagggaaagccaggcacaaagggaagccagggaagcaaagggccctggagtgaagctggtgggctgccgtgtcagagcgcccagggcagggagcagagctcagaagtaatgctggcccgggcgcagtggctcacacccgtaatcccaacgctttggaaggctgaggcaggtggattacttgagatcaggagttcaagaccagcctggccaaaatggtgaaaacccatctctactaaaaatacaaaaattagcgggacttggtggcatgtatctgtaatcccagctactagggaggctgaggcatgagaattgtgtgaacccgggaggcagaggttgcagtgagctgagatcacgccactgcactccagcctgggggacacagcgagactccgtctcaaaaaaaaaaaagttgggctaggcgggcccccgaggctggcctgactgtcccaggggcacaggctccagcaggctgcctgtctgtggtccaggcttcaggaacccccggtcttgggtgtgcgggggctgggaagtggctgggggtgcacagtcccacacctgtcattcactgaacaggcacgtattgacagcttgtggcgtgtcaggccctgtgcccaactctgggagtcaaggataacctgacagactcaggccactttaggaaaacgaaatccaccccaaccacacttagcgagtcaccctggccgggcctgggctgccctccagtcggtcagccggactggatttccacgcggccgagccctacgcctcccagaccctgagctccagtctgcacaggccaggtgtctggagccgggcctggtgacaggcatcccccaggtgggaggaggggctgtcctggctctgacctggatatcagatccagagctgagggggaggcgcagggtcaggaggggaggggttctgttctgagtttcccctggccaaggctgcagacaagggacgcagacaatcggcacattgtgagcaggggctgcaggatggaaccagcaagctgctgtgctgagcgccccaaacctgggcctacaggggtgaagaccaagccctcctgcgggggctggagagccgtgagcctgctcctgctgctgctgctgctggtgctggccgctgtgggggttgtggctggagggcttcttggctctgctcagggccctcccaagccaaggctgcagacgctgcgaatgaccctcccgagcccccacatgccccggcccaaccaaaccatcctggtggacgtggcccggaacgcggcgaccatcacagtgaccccacctcagagcaaccacagctgggcggtgctgttcgacgggcagagcggctgcatctgttaccgccctgaggagcaccaggtctgcttcctccgcctgatggaggacagtgatcgggagaccctgcggctgctggtggatacctccaaggtccaagaggcttgggtccccagccaggacacccaccacacccaggagctgctggcagtgcaggggagcctcgaagtggaccccgcccaggcgggggctttggtgcagcgcctgtgcatgaggacccccatctactgggcccggcgagcagaggggccccggagacagcggctgatttatctctgcatcgacatctgcttcccgagcaacatctgcgtgtcggtctgcttttattacctcccagactgagcccccgacctggcccagcctggcccgtccccaatccagtgggctggccaggccacctgcaccagggaggacagctgctggcagggactaataaacccttccacctggc

SEQ ID NO: 112126 - DNA, 783 bp, Homo sapiens
  Payload ID: 1964
  Gene Symbol: BRICD5
  Gene Name: BRICHOS domain containing 5
  Uniprot ID: Q6PL45
  ENST ID: ENST00000562360
  CDS Start-End: 1-783
atggaaccagcaagctgctgtgctgagcgccccaaacctgggcctacaggggtgaagaccaagccctcctgcgggggctggagagccgtgagcctgctcctgctgctgctgctgctggtgctggccgctgtgggggttgtggctggagggcttcttggctctgctcagggccctcccaagccaaggctgcagacgctgcgaatgaccctcccgagcccccacatgccccggcccaaccaaaccatcctggtggacgtggcccggaacgcggcgaccatcacagtgaccccacctcagagcaaccacagctgggcggtgctgttcgacgggcagagcggctgcatctgttaccgccctgaggagcaccaggtctgcttcctccgcctgatggaggacagtgatcgggagaccctgcggctgctggtggatacctccaaggtccaagaggcttgggtccccagccaggacacccaccacacccaggagctgctggcagtgcaggggagcctcgaagtggaccccgcccaggcgggggctttggtgcagcgcctgtgcatgaggacccccatctactgggcccggcgagcagagggtgagtcaggaccgctgtgggggaaggccaggccctcgggatggtttgaggagctgggggcggagcccttggagattcacggcaccctcgccacagggccccggagacagcggctgatttatctctgcatcgacatctgcttcccgagcaacatctgcgtgtcggtctgcttttattacctcccagactga

SEQ ID NO: 112127 - DNA, 555 bp, Homo sapiens
  Payload ID: 1964
  Gene Symbol: BRICD5
  Gene Name: BRICHOS domain containing 5
  ENST ID: ENST00000566018
  CDS Start-End: 73-534
ctgagtttcccctggccaaggctgcagacaagggacgcagacaatcggcacattgtgagcaggggctgcaggatggaaccagcaagctgctgtgctgagcgccccaaacctgggcctacaggggtgaagaccaagccctcctgcgggggctggagagccgtgagcctgctcctgctgctgctgctgctggtgctggccgctgtgggggttgtggctggagggcttcttggctctgctcagggccctcccaagccaaggctgcagacgctgcgaatgaccctcccgagcccccacatgccccggcccaaccaaaccatcctggtggacgtggcccggaacgcggcgaccatcacagtgaccccacctcagagcaaccacagctgggcggtgctgttcgacgggcagagcgtgagtgggcagggaggggtcaccctggcaggtgtcggtctggggggccccgcctcacccccctgcctccccagggctgcatctgttaccgccctgaggagcaccaggtctgcttcctccgcctgatggaggacagtgatcgggaga

SEQ ID NO: 112128 - DNA, 1233 bp, Homo sapiens
  Payload ID: 1965
  Gene Symbol: BRK1
  Gene Name: BRICK1, SCAR/WAVE actin-nucleating complex subunit
  Uniprot ID: Q8WUW1
  ENST ID: ENST00000530758
  CDS Start-End: 111-338
ccgagaattcgtgggtgctcaagaggatgggtgtggcctggcagcgcaggcgcactagaggcctgtagggtcggggcgcctgcgcagtcgctcttcctcaggcggcggccatggcgggacaggaggatccggtgcagcgggagattcaccaggactgggctaaccgggagtacattgagataatcaccagcagcatcaagaaaatcgcagactttctcaactcgttcgatatgtcttgtcgttcaagacttgcaacactaaacgagaaattgacagcccttgaacggagaatagagtacattgaagctcgggtgacaaaaggtgagacactcacctagaacagtgccgtgctgctgctgggaagttgctttacacaacacaggccacatgggaaaggccccagcagccttcagctccttcctttctccttaaagagcaacagggcttattcttgtttttcttttttcaaaagtgtggcctttgggctctgccatctggggtgtggtgtggtatgtgggaagaagttcagaggaaccgttggaaacgacgttaggcattttaccttttcagtaacattttatacatctacttgtcaatgtatttgagacattcacagccaaaagcctgggactctttgtgaaggtcctcctcacctctatctttctttctctctctctcaaactttccttaaagttctcattgcctttgcactgcttctgtgaacagtctttgtctcctccccacctttggtgggaagtgcggggcagtcctggtcaagacactcatgccctggcaatgtggctgccagagaatgttgttgctaacccaccagtttcttgttgatttggagaggtcaaggccaggcccccacttggcttgaagggacattttcagacttttctttctgtcacttggagtgtctatgcctctcatatttccctaataaactcctcaactttttatctgactgctgtgattatggtggggagaggagctagagatgggttcacttattgcacagaaatgtaatacatggcgttattattctaacataaaactttcagatgtagctgtttgattcaaagcctaggtggcttaccagcccaagtccccatgtttggactttcagctgactagctcatcttgggaatcatttggtcattcagcacatttaccaagtatttactatgtaggcatgttaaactccaataaaacatacagcattgaatcaga

SEQ ID NO: 112129 - DNA, 2074 bp, Homo sapiens
  Payload ID: 1966
  Gene Symbol: BIN1
  Gene Name: bridging integrator 1
  Uniprot ID: O00499
  ENST ID: ENST00000348750
  CDS Start-End: 346-1575
cgcgcccctccctcctcgcggacctggcggtgccggcgcccggagtggccctttaaaaggcagcttattgtccggagggggcgggcggggggcgccgaccgcggcctgaggcccggcccctcccctctccctccctctgtccccgcgtcgctcgctggctagctcgctggctcgctcgcccgtccggcgcacgctccgcctccgtcagttggctccgctgtcgggtgcgcggcgtggagcggcagccggtctggacgcgcggccggggctgggggctgggagcgcggcgcgcaagatctccccgcgcgagagcggcccctgccaccgggcgaggcctgcgccgcgatggcagagatgggcagtaaaggggtgacggcgggaaagatcgccagcaacgtgcagaagaagctcacccgcgcgcaggagaaggttctccagaagctggggaaggcagatgagaccaaggatgagcagtttgagcagtgcgtccagaatttcaacaagcagctgacggagggcacccggctgcagaaggatctccggacctacctggcctccgtcaaagccatgcacgaggcttccaagaagctgaatgagtgtctgcaggaggtgtatgagcccgattggcccggcagggatgaggcaaacaagatcgcagagaacaacgacctgctgtggatggattaccaccagaagctggtggaccaggcgctgctgaccatggacacgtacctgggccagttccccgacatcaagtcacgcattgccaagcgggggcgcaagctggtggactacgacagtgcccggcaccactacgagtcccttcaaactgccaaaaagaaggatgaagccaaaattgccaaggccgaggaggagctcatcaaagcccagaaggtgtttgaggagatgaatgtggatctgcaggaggagctgccgtccctgtggaacagccgcgtaggtttctacgtcaacacgttccagagcatcgcgggcctggaggaaaacttccacaaggagatgagcaagctcaaccagaacctcaatgatgtgctggtcggcctggagaagcaacacgggagcaacaccttcacggtcaaggcccagcccagtgacaacgcgcctgcaaaagggaacaagagcccttcgcctccagatggctcccctgccgccacccccgagatcagagtcaaccacgagccagagccggccggcggggccacgcccggggccaccctccccaagtccccatctcagagctctcttcctgctgtcgtggtggagaccttcccagcaactgtgaatggcaccgtggagggcggcagtggggccgggcgcttggacctgcccccaggtttcatgttcaaggtacaggcccagcacgactacacggccactgacacagacgagctgcagctcaaggctggtgatgtggtgctggtgatccccttccagaaccctgaagagcaggatgaaggctggctcatgggcgtgaaggagagcgactggaaccagcacaaggagctggagaagtgccgtggcgtcttccccgagaacttcactgagagggtcccatgacggcggggcccaggcagcctccgggcgtgtgaagaacacctcctcccgaaaaatgtgtggttcttttttttgttttgttttcgtttttcatcttttgaagagcaaagggaaatcaagaggagacccccaggcagaggggcgttctcccaaagattaggtcgttttccaaagagccgcgtcccggcaagtccggcggaattcaccagtgttcctgaagctgctgtgtcctctagttgagtttctggcgcccctgcctgtgcccgcatgtgtgcctggccgcagggcggggctgggggctgccgagccaccatgcttgcctgaagcttcggccgcgccacccgggcaagggtcctcttttcctggcagctgctgtgggtggggcccagacaccagcctagcctggctctgccccgcagacggtctgtgtgctgtttgaaaataaatcttagtgttcaaaacaaaatgaaacaaaaaaaaaatgataaaaactctcagaaaa

SEQ ID NO: 112130 - DNA, 2338 bp, Homo sapiens
  Payload ID: 1966
  Gene Symbol: BIN1
  Gene Name: bridging integrator 1
  Uniprot ID: O00499
  ENST ID: ENST00000259238
  CDS Start-End: 346-1839
cgcgcccctccctcctcgcggacctggcggtgccggcgcccggagtggccctttaaaaggcagcttattgtccggagggggcgggcggggggcgccgaccgcggcctgaggcccggcccctcccctctccctccctctgtccccgcgtcgctcgctggctagctcgctggctcgctcgcccgtccggcgcacgctccgcctccgtcagttggctccgctgtcgggtgcgcggcgtggagcggcagccggtctggacgcgcggccggggctgggggctgggagcgcggcgcgcaagatctccccgcgcgagagcggcccctgccaccgggcgaggcctgcgccgcgatggcagagatgggcagtaaaggggtgacggcgggaaagatcgccagcaacgtgcagaagaagctcacccgcgcgcaggagaaggttctccagaagctggggaaggcagatgagaccaaggatgagcagtttgagcagtgcgtccagaatttcaacaagcagctgacggagggcacccggctgcagaaggatctccggacctacctggcctccgtcaaagccatgcacgaggcttccaagaagctgaatgagtgtctgcaggaggtgtatgagcccgattggcccggcagggatgaggcaaacaagatcgcagagaacaacgacctgctgtggatggattaccaccagaagctggtggaccaggcgctgctgaccatggacacgtacctgggccagttccccgacatcaagtcacgcattgccaagcgggggcgcaagctggtggactacgacagtgcccggcaccactacgagtcccttcaaactgccaaaaagaaggatgaagccaaaattgccaaggccgaggaggagctcatcaaagcccagaaggtgtttgaggagatgaatgtggatctgcaggaggagctgccgtccctgtggaacagccgcgtaggtttctacgtcaacacgttccagagcatcgcgggcctggaggaaaacttccacaaggagatgagcaagctcaaccagaacctcaatgatgtgctggtcggcctggagaagcaacacgggagcaacaccttcacggtcaaggcccagcccagaaagaaaagtaaactgttttcgcggctgcgcagaaagaagaacagtgacaacgcgcctgcaaaagggaacaagagcccttcgcctccagatggctcccctgccgccacccccgagatcagagtcaaccacgagccagagccggccggcggggccacgcccggggccaccctccccaagtccccatctcagctccggaaaggcccaccagtccctccgcctcccaaacacaccccgtccaaggaagtcaagcaggagcagatcctcagcctgtttgaggacacgtttgtccctgagatcagcgtgaccaccccctcccagccagcagaggcctcggaggtggcgggtgggacccaacctgcggctggagcccaggagccaggggagacggcggcaagtgaagcagcctccagctctcttcctgctgtcgtggtggagaccttcccagcaactgtgaatggcaccgtggagggcggcagtggggccgggcgcttggacctgcccccaggtttcatgttcaaggtacaggcccagcacgactacacggccactgacacagacgagctgcagctcaaggctggtgatgtggtgctggtgatccccttccagaaccctgaagagcaggatgaaggctggctcatgggcgtgaaggagagcgactggaaccagcacaaggagctggagaagtgccgtggcgtcttccccgagaacttcactgagagggtcccatgacggcggggcccaggcagcctccgggcgtgtgaagaacacctcctcccgaaaaatgtgtggttcttttttttgttttgttttcgtttttcatcttttgaagagcaaagggaaatcaagaggagacccccaggcagaggggcgttctcccaaagattaggtcgttttccaaagagccgcgtcccggcaagtccggcggaattcaccagtgttcctgaagctgctgtgtcctctagttgagtttctggcgcccctgcctgtgcccgcatgtgtgcctggccgcagggcggggctgggggctgccgagccaccatgcttgcctgaagcttcggccgcgccacccgggcaagggtcctcttttcctggcagctgctgtgggtggggcccagacaccagcctagcctggctctgccccgcagacggtctgtgtgctgtttgaaaataaatcttagtgttcaaaacaaaatgaaacaaaaaaaaaatgataaaaactctcagaaaa

SEQ ID NO: 112131 - DNA, 2209 bp, Homo sapiens
  Payload ID: 1966
  Gene Symbol: BIN1
  Gene Name: bridging integrator 1
  Uniprot ID: O00499
  ENST ID: ENST00000352848
  CDS Start-End: 346-1710
cgcgcccctccctcctcgcggacctggcggtgccggcgcccggagtggccctttaaaaggcagcttattgtccggagggggcgggcggggggcgccgaccgcggcctgaggcccggcccctcccctctccctccctctgtccccgcgtcgctcgctggctagctcgctggctcgctcgcccgtccggcgcacgctccgcctccgtcagttggctccgctgtcgggtgcgcggcgtggagcggcagccggtctggacgcgcggccggggctgggggctgggagcgcggcgcgcaagatctccccgcgcgagagcggcccctgccaccgggcgaggcctgcgccgcgatggcagagatgggcagtaaaggggtgacggcgggaaagatcgccagcaacgtgcagaagaagctcacccgcgcgcaggagaaggttctccagaagctggggaaggcagatgagaccaaggatgagcagtttgagcagtgcgtccagaatttcaacaagcagctgacggagggcacccggctgcagaaggatctccggacctacctggcctccgtcaaagccatgcacgaggcttccaagaagctgaatgagtgtctgcaggaggtgtatgagcccgattggcccggcagggatgaggcaaacaagatcgcagagaacaacgacctgctgtggatggattaccaccagaagctggtggaccaggcgctgctgaccatggacacgtacctgggccagttccccgacatcaagtcacgcattgccaagcgggggcgcaagctggtggactacgacagtgcccggcaccactacgagtcccttcaaactgccaaaaagaaggatgaagccaaaattgccaaggccgaggaggagctcatcaaagcccagaaggtgtttgaggagatgaatgtggatctgcaggaggagctgccgtccctgtggaacagccgcgtaggtttctacgtcaacacgttccagagcatcgcgggcctggaggaaaacttccacaaggagatgagcaagctcaaccagaacctcaatgatgtgctggtcggcctggagaagcaacacgggagcaacaccttcacggtcaaggcccagcccagaaagaaaagtaaactgttttcgcggctgcgcagaaagaagaacagtgacaacgcgcctgcaaaagggaacaagagcccttcgcctccagatggctcccctgccgccacccccgagatcagagtcaaccacgagccagagccggccggcggggccacgcccggggccaccctccccaagtccccatctcagccagcagaggcctcggaggtggcgggtgggacccaacctgcggctggagcccaggagccaggggagacggcggcaagtgaagcagcctccagctctcttcctgctgtcgtggtggagaccttcccagcaactgtgaatggcaccgtggagggcggcagtggggccgggcgcttggacctgcccccaggtttcatgttcaaggtacaggcccagcacgactacacggccactgacacagacgagctgcagctcaaggctggtgatgtggtgctggtgatccccttccagaaccctgaagagcaggatgaaggctggctcatgggcgtgaaggagagcgactggaaccagcacaaggagctggagaagtgccgtggcgtcttccccgagaacttcactgagagggtcccatgacggcggggcccaggcagcctccgggcgtgtgaagaacacctcctcccgaaaaatgtgtggttcttttttttgttttgttttcgtttttcatcttttgaagagcaaagggaaatcaagaggagacccccaggcagaggggcgttctcccaaagattaggtcgttttccaaagagccgcgtcccggcaagtccggcggaattcaccagtgttcctgaagctgctgtgtcctctagttgagtttctggcgcccctgcctgtgcccgcatgtgtgcctggccgcagggcggggctgggggctgccgagccaccatgcttgcctgaagcttcggccgcgccacccgggcaagggtcctcttttcctggcagctgctgtgggtggggcccagacaccagcctagcctggctctgccccgcagacggtctgtgtgctgtttgaaaataaatcttagtgttcaaaacaaaatgaaacaaaaaaaaaatgataaaaactctcagaaaa

SEQ ID NO: 112132 - DNA, 2365 bp, Homo sapiens
  Payload ID: 1966
  Gene Symbol: BIN1
  Gene Name: bridging integrator 1
  Uniprot ID: O00499
  ENST ID: ENST00000351659
  CDS Start-End: 346-1866
cgcgcccctccctcctcgcggacctggcggtgccggcgcccggagtggccctttaaaaggcagcttattgtccggagggggcgggcggggggcgccgaccgcggcctgaggcccggcccctcccctctccctccctctgtccccgcgtcgctcgctggctagctcgctggctcgctcgcccgtccggcgcacgctccgcctccgtcagttggctccgctgtcgggtgcgcggcgtggagcggcagccggtctggacgcgcggccggggctgggggctgggagcgcggcgcgcaagatctccccgcgcgagagcggcccctgccaccgggcgaggcctgcgccgcgatggcagagatgggcagtaaaggggtgacggcgggaaagatcgccagcaacgtgcagaagaagctcacccgcgcgcaggagaaggttctccagaagctggggaaggcagatgagaccaaggatgagcagtttgagcagtgcgtccagaatttcaacaagcagctgacggagggcacccggctgcagaaggatctccggacctacctggcctccgtcaaagccatgcacgaggcttccaagaagctgaatgagtgtctgcaggaggtgtatgagcccgattggcccggcagggatgaggcaaacaagatcgcagagaacaacgacctgctgtggatggattaccaccagaagctggtggaccaggcgctgctgaccatggacacgtacctgggccagttccccgacatcaagtcacgcattgccaagcgggggcgcaagctggtggactacgacagtgcccggcaccactacgagtcccttcaaactgccaaaaagaaggatgaagccaaaattgccaagcctgtctcgctgcttgagaaagccgccccccagtggtgccaaggcaaactgcaggctcatctcgtagctcaaactaacctgctccgaaatcaggccgaggaggagctcatcaaagcccagaaggtgtttgaggagatgaatgtggatctgcaggaggagctgccgtccctgtggaacagccgcgtaggtttctacgtcaacacgttccagagcatcgcgggcctggaggaaaacttccacaaggagatgagcaagctcaaccagaacctcaatgatgtgctggtcggcctggagaagcaacacgggagcaacaccttcacggtcaaggcccagcccagtgacaacgcgcctgcaaaagggaacaagagcccttcgcctccagatggctcccctgccgccacccccgagatcagagtcaaccacgagccagagccggccggcggggccacgcccggggccaccctccccaagtccccatctcagcccacagagagtccagccggcagcctgccttccggggagcccagcgctgccgagggcacctttgctgtgtcctggcccagccagacggccgagccggggcctgcccaaccagcagaggcctcggaggtggcgggtgggacccaacctgcggctggagcccaggagccaggggagacggcggcaagtgaagcagcctccagctctcttcctgctgtcgtggtggagaccttcccagcaactgtgaatggcaccgtggagggcggcagtggggccgggcgcttggacctgcccccaggtttcatgttcaaggtacaggcccagcacgactacacggccactgacacagacgagctgcagctcaaggctggtgatgtggtgctggtgatccccttccagaaccctgaagagcaggatgaaggctggctcatgggcgtgaaggagagcgactggaaccagcacaaggagctggagaagtgccgtggcgtcttccccgagaacttcactgagagggtcccatgacggcggggcccaggcagcctccgggcgtgtgaagaacacctcctcccgaaaaatgtgtggttcttttttttgttttgttttcgtttttcatcttttgaagagcaaagggaaatcaagaggagacccccaggcagaggggcgttctcccaaagattaggtcgttttccaaagagccgcgtcccggcaagtccggcggaattcaccagtgttcctgaagctgctgtgtcctctagttgagtttctggcgcccctgcctgtgcccgcatgtgtgcctggccgcagggcggggctgggggctgccgagccaccatgcttgcctgaagcttcggccgcgccacccgggcaagggtcctcttttcctggcagctgctgtgggtggggcccagacaccagcctagcctggctctgccccgcagacggtctgtgtgctgtttgaaaataaatcttagtgttcaaaacaaaatgaaacaaaaaaaaaatgataaaaactctcagaaaa

SEQ ID NO: 112133 - DNA, 2401 bp, Homo sapiens
  Payload ID: 1966
  Gene Symbol: BIN1
  Gene Name: bridging integrator 1
  Uniprot ID: O00499
  ENST ID: ENST00000346226
  CDS Start-End: 346-1902
cgcgcccctccctcctcgcggacctggcggtgccggcgcccggagtggccctttaaaaggcagcttattgtccggagggggcgggcggggggcgccgaccgcggcctgaggcccggcccctcccctctccctccctctgtccccgcgtcgctcgctggctagctcgctggctcgctcgcccgtccggcgcacgctccgcctccgtcagttggctccgctgtcgggtgcgcggcgtggagcggcagccggtctggacgcgcggccggggctgggggctgggagcgcggcgcgcaagatctccccgcgcgagagcggcccctgccaccgggcgaggcctgcgccgcgatggcagagatgggcagtaaaggggtgacggcgggaaagatcgccagcaacgtgcagaagaagctcacccgcgcgcaggagaaggttctccagaagctggggaaggcagatgagaccaaggatgagcagtttgagcagtgcgtccagaatttcaacaagcagctgacggagggcacccggctgcagaaggatctccggacctacctggcctccgtcaaagccatgcacgaggcttccaagaagctgaatgagtgtctgcaggaggtgtatgagcccgattggcccggcagggatgaggcaaacaagatcgcagagaacaacgacctgctgtggatggattaccaccagaagctggtggaccaggcgctgctgaccatggacacgtacctgggccagttccccgacatcaagtcacgcattgccaagcgggggcgcaagctggtggactacgacagtgcccggcaccactacgagtcccttcaaactgccaaaaagaaggatgaagccaaaattgccaaggccgaggaggagctcatcaaagcccagaaggtgtttgaggagatgaatgtggatctgcaggaggagctgccgtccctgtggaacagccgcgtaggtttctacgtcaacacgttccagagcatcgcgggcctggaggaaaacttccacaaggagatgagcaagctcaaccagaacctcaatgatgtgctggtcggcctggagaagcaacacgggagcaacaccttcacggtcaaggcccagcccagtgacaacgcgcctgcaaaagggaacaagagcccttcgcctccagatggctcccctgccgccacccccgagatcagagtcaaccacgagccagagccggccggcggggccacgcccggggccaccctccccaagtccccatctcagctccggaaaggcccaccagtccctccgcctcccaaacacaccccgtccaaggaagtcaagcaggagcagatcctcagcctgtttgaggacacgtttgtccctgagatcagcgtgaccaccccctcccagcccacagagagtccagccggcagcctgccttccggggagcccagcgctgccgagggcacctttgctgtgtcctggcccagccagacggccgagccggggcctgcccaaccagcagaggcctcggaggtggcgggtgggacccaacctgcggctggagcccaggagccaggggagacggcggcaagtgaagcagcctccagctctcttcctgctgtcgtggtggagaccttcccagcaactgtgaatggcaccgtggagggcggcagtggggccgggcgcttggacctgcccccaggtttcatgttcaaggtacaggcccagcacgactacacggccactgacacagacgagctgcagctcaaggctggtgatgtggtgctggtgatccccttccagaaccctgaagagcaggatgaaggctggctcatgggcgtgaaggagagcgactggaaccagcacaaggagctggagaagtgccgtggcgtcttccccgagaacttcactgagagggtcccatgacggcggggcccaggcagcctccgggcgtgtgaagaacacctcctcccgaaaaatgtgtggttcttttttttgttttgttttcgtttttcatcttttgaagagcaaagggaaatcaagaggagacccccaggcagaggggcgttctcccaaagattaggtcgttttccaaagagccgcgtcccggcaagtccggcggaattcaccagtgttcctgaagctgctgtgtcctctagttgagtttctggcgcccctgcctgtgcccgcatgtgtgcctggccgcagggcggggctgggggctgccgagccaccatgcttgcctgaagcttcggccgcgccacccgggcaagggtcctcttttcctggcagctgctgtgggtggggcccagacaccagcctagcctggctctgccccgcagacggtctgtgtgctgtttgaaaataaatcttagtgttcaaaacaaaatgaaacaaaaaaaaaatgataaaaactctcagaaaa

SEQ ID NO: 112134 - DNA, 2693 bp, Homo sapiens
  Payload ID: 1966
  Gene Symbol: BIN1
  Gene Name: bridging integrator 1
  Uniprot ID: O00499
  ENST ID: ENST00000316724
  CDS Start-End: 413-2194
tccccgccccggggcggtgcagctggagcgtcaggggagtcccgctcgccgcagccccagcgccgcgcgcgcccctccctcctcgcggacctggcggtgccggcgcccggagtggccctttaaaaggcagcttattgtccggagggggcgggcggggggcgccgaccgcggcctgaggcccggcccctcccctctccctccctctgtccccgcgtcgctcgctggctagctcgctggctcgctcgcccgtccggcgcacgctccgcctccgtcagttggctccgctgtcgggtgcgcggcgtggagcggcagccggtctggacgcgcggccggggctgggggctgggagcgcggcgcgcaagatctccccgcgcgagagcggcccctgccaccgggcgaggcctgcgccgcgatggcagagatgggcagtaaaggggtgacggcgggaaagatcgccagcaacgtgcagaagaagctcacccgcgcgcaggagaaggttctccagaagctggggaaggcagatgagaccaaggatgagcagtttgagcagtgcgtccagaatttcaacaagcagctgacggagggcacccggctgcagaaggatctccggacctacctggcctccgtcaaagccatgcacgaggcttccaagaagctgaatgagtgtctgcaggaggtgtatgagcccgattggcccggcagggatgaggcaaacaagatcgcagagaacaacgacctgctgtggatggattaccaccagaagctggtggaccaggcgctgctgaccatggacacgtacctgggccagttccccgacatcaagtcacgcattgccaagcgggggcgcaagctggtggactacgacagtgcccggcaccactacgagtcccttcaaactgccaaaaagaaggatgaagccaaaattgccaagcctgtctcgctgcttgagaaagccgccccccagtggtgccaaggcaaactgcaggctcatctcgtagctcaaactaacctgctccgaaatcaggccgaggaggagctcatcaaagcccagaaggtgtttgaggagatgaatgtggatctgcaggaggagctgccgtccctgtggaacagccgcgtaggtttctacgtcaacacgttccagagcatcgcgggcctggaggaaaacttccacaaggagatgagcaagctcaaccagaacctcaatgatgtgctggtcggcctggagaagcaacacgggagcaacaccttcacggtcaaggcccagcccagtgacaacgcgcctgcaaaagggaacaagagcccttcgcctccagatggctcccctgccgccacccccgagatcagagtcaaccacgagccagagccggccggcggggccacgcccggggccaccctccccaagtccccatctcagctccggaaaggcccaccagtccctccgcctcccaaacacaccccgtccaaggaagtcaagcaggagcagatcctcagcctgtttgaggacacgtttgtccctgagatcagcgtgaccaccccctcccagtttgaggccccggggcctttctcggagcaggccagtctgctggacctggactttgaccccctcccgcccgtgacgagccctgtgaaggcacccacgccctctggtcagtcaattccatgggacctctgggagcccacagagagtccagccggcagcctgccttccggggagcccagcgctgccgagggcacctttgctgtgtcctggcccagccagacggccgagccggggcctgcccaaccagcagaggcctcggaggtggcgggtgggacccaacctgcggctggagcccaggagccaggggagacggcggcaagtgaagcagcctccagctctcttcctgctgtcgtggtggagaccttcccagcaactgtgaatggcaccgtggagggcggcagtggggccgggcgcttggacctgcccccaggtttcatgttcaaggtacaggcccagcacgactacacggccactgacacagacgagctgcagctcaaggctggtgatgtggtgctggtgatccccttccagaaccctgaagagcaggatgaaggctggctcatgggcgtgaaggagagcgactggaaccagcacaaggagctggagaagtgccgtggcgtcttccccgagaacttcactgagagggtcccatgacggcggggcccaggcagcctccgggcgtgtgaagaacacctcctcccgaaaaatgtgtggttcttttttttgttttgttttcgtttttcatcttttgaagagcaaagggaaatcaagaggagacccccaggcagaggggcgttctcccaaagattaggtcgttttccaaagagccgcgtcccggcaagtccggcggaattcaccagtgttcctgaagctgctgtgtcctctagttgagtttctggcgcccctgcctgtgcccgcatgtgtgcctggccgcagggcggggctgggggctgccgagccaccatgcttgcctgaagcttcggccgcgccacccgggcaagggtcctcttttcctggcagctgctgtgggtggggcccagacaccagcctagcctggctctgccccgcagacggtctgtgtgctgtttgaaaataaatcttagtgttcaaaacaaaatgaaacaaaaaaaaaatgataaaaactctcagaaaa

SEQ ID NO: 112135 - DNA, 2497 bp, Homo sapiens
  Payload ID: 1966
  Gene Symbol: BIN1
  Gene Name: bridging integrator 1
  Uniprot ID: O00499
  ENST ID: ENST00000357970
  CDS Start-End: 346-1998
cgcgcccctccctcctcgcggacctggcggtgccggcgcccggagtggccctttaaaaggcagcttattgtccggagggggcgggcggggggcgccgaccgcggcctgaggcccggcccctcccctctccctccctctgtccccgcgtcgctcgctggctagctcgctggctcgctcgcccgtccggcgcacgctccgcctccgtcagttggctccgctgtcgggtgcgcggcgtggagcggcagccggtctggacgcgcggccggggctgggggctgggagcgcggcgcgcaagatctccccgcgcgagagcggcccctgccaccgggcgaggcctgcgccgcgatggcagagatgggcagtaaaggggtgacggcgggaaagatcgccagcaacgtgcagaagaagctcacccgcgcgcaggagaaggttctccagaagctggggaaggcagatgagaccaaggatgagcagtttgagcagtgcgtccagaatttcaacaagcagctgacggagggcacccggctgcagaaggatctccggacctacctggcctccgtcaaagccatgcacgaggcttccaagaagctgaatgagtgtctgcaggaggtgtatgagcccgattggcccggcagggatgaggcaaacaagatcgcagagaacaacgacctgctgtggatggattaccaccagaagctggtggaccaggcgctgctgaccatggacacgtacctgggccagttccccgacatcaagtcacgcattgccaagcgggggcgcaagctggtggactacgacagtgcccggcaccactacgagtcccttcaaactgccaaaaagaaggatgaagccaaaattgccaagcctgtctcgctgcttgagaaagccgccccccagtggtgccaaggcaaactgcaggctcatctcgtagctcaaactaacctgctccgaaatcaggccgaggaggagctcatcaaagcccagaaggtgtttgaggagatgaatgtggatctgcaggaggagctgccgtccctgtggaacagccgcgtaggtttctacgtcaacacgttccagagcatcgcgggcctggaggaaaacttccacaaggagatgagcaagctcaaccagaacctcaatgatgtgctggtcggcctggagaagcaacacgggagcaacaccttcacggtcaaggcccagcccagtgacaacgcgcctgcaaaagggaacaagagcccttcgcctccagatggctcccctgccgccacccccgagatcagagtcaaccacgagccagagccggccggcggggccacgcccggggccaccctccccaagtccccatctcagtttgaggccccggggcctttctcggagcaggccagtctgctggacctggactttgaccccctcccgcccgtgacgagccctgtgaaggcacccacgccctctggtcagtcaattccatgggacctctgggagcccacagagagtccagccggcagcctgccttccggggagcccagcgctgccgagggcacctttgctgtgtcctggcccagccagacggccgagccggggcctgcccaaccagcagaggcctcggaggtggcgggtgggacccaacctgcggctggagcccaggagccaggggagacggcggcaagtgaagcagcctccagctctcttcctgctgtcgtggtggagaccttcccagcaactgtgaatggcaccgtggagggcggcagtggggccgggcgcttggacctgcccccaggtttcatgttcaaggtacaggcccagcacgactacacggccactgacacagacgagctgcagctcaaggctggtgatgtggtgctggtgatccccttccagaaccctgaagagcaggatgaaggctggctcatgggcgtgaaggagagcgactggaaccagcacaaggagctggagaagtgccgtggcgtcttccccgagaacttcactgagagggtcccatgacggcggggcccaggcagcctccgggcgtgtgaagaacacctcctcccgaaaaatgtgtggttcttttttttgttttgttttcgtttttcatcttttgaagagcaaagggaaatcaagaggagacccccaggcagaggggcgttctcccaaagattaggtcgttttccaaagagccgcgtcccggcaagtccggcggaattcaccagtgttcctgaagctgctgtgtcctctagttgagtttctggcgcccctgcctgtgcccgcatgtgtgcctggccgcagggcggggctgggggctgccgagccaccatgcttgcctgaagcttcggccgcgccacccgggcaagggtcctcttttcctggcagctgctgtgggtggggcccagacaccagcctagcctggctctgccccgcagacggtctgtgtgctgtttgaaaataaatcttagtgttcaaaacaaaatgaaacaaaaaaaaaatgataaaaactctcagaaaa

SEQ ID NO: 112136 - DNA, 1832 bp, Homo sapiens
  Payload ID: 1966
  Gene Symbol: BIN1
  Gene Name: bridging integrator 1
  Uniprot ID: O00499
  ENST ID: ENST00000376113
  CDS Start-End: 59-1333
cgcgcaagatctccccgcgcgagagcggcccctgccaccgggcgaggcctgcgccgcgatggcagagatgggcagtaaaggggtgacggcgggaaagatcgccagcaacgtgcagaagaagctcacccgcgcgcaggagaaggttctccagaagctggggaaggcagatgagaccaaggatgagcagtttgagcagtgcgtccagaatttcaacaagcagctgacggagggcacccggctgcagaaggatctccggacctacctggcctccgtcaaagccatgcacgaggcttccaagaagctgaatgagtgtctgcaggaggtgtatgagcccgattggcccggcagggatgaggcaaacaagatcgcagagaacaacgacctgctgtggatggattaccaccagaagctggtggaccaggcgctgctgaccatggacacgtacctgggccagttccccgacatcaagtcacgcattgccaagcgggggcgcaagctggtggactacgacagtgcccggcaccactacgagtcccttcaaactgccaaaaagaaggatgaagccaaaattgccaaggccgaggaggagctcatcaaagcccagaaggtgtttgaggagatgaatgtggatctgcaggaggagctgccgtccctgtggaacagccgcgtaggtttctacgtcaacacgttccagagcatcgcgggcctggaggaaaacttccacaaggagatgagcaagctcaaccagaacctcaatgatgtgctggtcggcctggagaagcaacacgggagcaacaccttcacggtcaaggcccagcccagaaagaaaagtaaactgttttcgcggctgcgcagaaagaagaacagtgacaacgcgcctgcaaaagggaacaagagcccttcgcctccagatggctcccctgccgccacccccgagatcagagtcaaccacgagccagagccggccggcggggccacgcccggggccaccctccccaagtccccatctcagagctctcttcctgctgtcgtggtggagaccttcccagcaactgtgaatggcaccgtggagggcggcagtggggccgggcgcttggacctgcccccaggtttcatgttcaaggtacaggcccagcacgactacacggccactgacacagacgagctgcagctcaaggctggtgatgtggtgctggtgatccccttccagaaccctgaagagcaggatgaaggctggctcatgggcgtgaaggagagcgactggaaccagcacaaggagctggagaagtgccgtggcgtcttccccgagaacttcactgagagggtcccatgacggcggggcccaggcagcctccgggcgtgtgaagaacacctcctcccgaaaaatgtgtggttcttttttttgttttgttttcgtttttcatcttttgaagagcaaagggaaatcaagaggagacccccaggcagaggggcgttctcccaaagattaggtcgttttccaaagagccgcgtcccggcaagtccggcggaattcaccagtgttcctgaagctgctgtgtcctctagttgagtttctggcgcccctgcctgtgcccgcatgtgtgcctggccgcagggcggggctgggggctgccgagccaccatgcttgcctgaagcttcggccgcgccacccgggcaagggtcctcttttcctggcagctgctgtgggtggggcccagacaccagcctagcctggctctgccccgcagacggtctgtgtgctgtttgaaaataaatcttagtgttcaaaacaaaatgaaacaaaaaaaaaatgataaaaactctcagaaaa

SEQ ID NO: 112137 - DNA, 2293 bp, Homo sapiens
  Payload ID: 1966
  Gene Symbol: BIN1
  Gene Name: bridging integrator 1
  Uniprot ID: O00499
  ENST ID: ENST00000393040
  CDS Start-End: 346-1794
cgcgcccctccctcctcgcggacctggcggtgccggcgcccggagtggccctttaaaaggcagcttattgtccggagggggcgggcggggggcgccgaccgcggcctgaggcccggcccctcccctctccctccctctgtccccgcgtcgctcgctggctagctcgctggctcgctcgcccgtccggcgcacgctccgcctccgtcagttggctccgctgtcgggtgcgcggcgtggagcggcagccggtctggacgcgcggccggggctgggggctgggagcgcggcgcgcaagatctccccgcgcgagagcggcccctgccaccgggcgaggcctgcgccgcgatggcagagatgggcagtaaaggggtgacggcgggaaagatcgccagcaacgtgcagaagaagctcacccgcgcgcaggagaaggttctccagaagctggggaaggcagatgagaccaaggatgagcagtttgagcagtgcgtccagaatttcaacaagcagctgacggagggcacccggctgcagaaggatctccggacctacctggcctccgtcaaagccatgcacgaggcttccaagaagctgaatgagtgtctgcaggaggtgtatgagcccgattggcccggcagggatgaggcaaacaagatcgcagagaacaacgacctgctgtggatggattaccaccagaagctggtggaccaggcgctgctgaccatggacacgtacctgggccagttccccgacatcaagtcacgcattgccaagcgggggcgcaagctggtggactacgacagtgcccggcaccactacgagtcccttcaaactgccaaaaagaaggatgaagccaaaattgccaaggccgaggaggagctcatcaaagcccagaaggtgtttgaggagatgaatgtggatctgcaggaggagctgccgtccctgtggaacagccgcgtaggtttctacgtcaacacgttccagagcatcgcgggcctggaggaaaacttccacaaggagatgagcaagctcaaccagaacctcaatgatgtgctggtcggcctggagaagcaacacgggagcaacaccttcacggtcaaggcccagcccagtgacaacgcgcctgcaaaagggaacaagagcccttcgcctccagatggctcccctgccgccacccccgagatcagagtcaaccacgagccagagccggccggcggggccacgcccggggccaccctccccaagtccccatctcagctccggaaaggcccaccagtccctccgcctcccaaacacaccccgtccaaggaagtcaagcaggagcagatcctcagcctgtttgaggacacgtttgtccctgagatcagcgtgaccaccccctcccagccagcagaggcctcggaggtggcgggtgggacccaacctgcggctggagcccaggagccaggggagacggcggcaagtgaagcagcctccagctctcttcctgctgtcgtggtggagaccttcccagcaactgtgaatggcaccgtggagggcggcagtggggccgggcgcttggacctgcccccaggtttcatgttcaaggtacaggcccagcacgactacacggccactgacacagacgagctgcagctcaaggctggtgatgtggtgctggtgatccccttccagaaccctgaagagcaggatgaaggctggctcatgggcgtgaaggagagcgactggaaccagcacaaggagctggagaagtgccgtggcgtcttccccgagaacttcactgagagggtcccatgacggcggggcccaggcagcctccgggcgtgtgaagaacacctcctcccgaaaaatgtgtggttcttttttttgttttgttttcgtttttcatcttttgaagagcaaagggaaatcaagaggagacccccaggcagaggggcgttctcccaaagattaggtcgttttccaaagagccgcgtcccggcaagtccggcggaattcaccagtgttcctgaagctgctgtgtcctctagttgagtttctggcgcccctgcctgtgcccgcatgtgtgcctggccgcagggcggggctgggggctgccgagccaccatgcttgcctgaagcttcggccgcgccacccgggcaagggtcctcttttcctggcagctgctgtgggtggggcccagacaccagcctagcctggctctgccccgcagacggtctgtgtgctgtttgaaaataaatcttagtgttcaaaacaaaatgaaacaaaaaaaaaatgataaaaactctcagaaaa

SEQ ID NO: 112138 - DNA, 2272 bp, Homo sapiens
  Payload ID: 1966
  Gene Symbol: BIN1
  Gene Name: bridging integrator 1
  Uniprot ID: O00499
  ENST ID: ENST00000393041
  CDS Start-End: 346-1773
cgcgcccctccctcctcgcggacctggcggtgccggcgcccggagtggccctttaaaaggcagcttattgtccggagggggcgggcggggggcgccgaccgcggcctgaggcccggcccctcccctctccctccctctgtccccgcgtcgctcgctggctagctcgctggctcgctcgcccgtccggcgcacgctccgcctccgtcagttggctccgctgtcgggtgcgcggcgtggagcggcagccggtctggacgcgcggccggggctgggggctgggagcgcggcgcgcaagatctccccgcgcgagagcggcccctgccaccgggcgaggcctgcgccgcgatggcagagatgggcagtaaaggggtgacggcgggaaagatcgccagcaacgtgcagaagaagctcacccgcgcgcaggagaaggttctccagaagctggggaaggcagatgagaccaaggatgagcagtttgagcagtgcgtccagaatttcaacaagcagctgacggagggcacccggctgcagaaggatctccggacctacctggcctccgtcaaagccatgcacgaggcttccaagaagctgaatgagtgtctgcaggaggtgtatgagcccgattggcccggcagggatgaggcaaacaagatcgcagagaacaacgacctgctgtggatggattaccaccagaagctggtggaccaggcgctgctgaccatggacacgtacctgggccagttccccgacatcaagtcacgcattgccaagcgggggcgcaagctggtggactacgacagtgcccggcaccactacgagtcccttcaaactgccaaaaagaaggatgaagccaaaattgccaaggccgaggaggagctcatcaaagcccagaaggtgtttgaggagatgaatgtggatctgcaggaggagctgccgtccctgtggaacagccgcgtaggtttctacgtcaacacgttccagagcatcgcgggcctggaggaaaacttccacaaggagatgagcaagctcaaccagaacctcaatgatgtgctggtcggcctggagaagcaacacgggagcaacaccttcacggtcaaggcccagcccagtgacaacgcgcctgcaaaagggaacaagagcccttcgcctccagatggctcccctgccgccacccccgagatcagagtcaaccacgagccagagccggccggcggggccacgcccggggccaccctccccaagtccccatctcagcccacagagagtccagccggcagcctgccttccggggagcccagcgctgccgagggcacctttgctgtgtcctggcccagccagacggccgagccggggcctgcccaaccagcagaggcctcggaggtggcgggtgggacccaacctgcggctggagcccaggagccaggggagacggcggcaagtgaagcagcctccagctctcttcctgctgtcgtggtggagaccttcccagcaactgtgaatggcaccgtggagggcggcagtggggccgggcgcttggacctgcccccaggtttcatgttcaaggtacaggcccagcacgactacacggccactgacacagacgagctgcagctcaaggctggtgatgtggtgctggtgatccccttccagaaccctgaagagcaggatgaaggctggctcatgggcgtgaaggagagcgactggaaccagcacaaggagctggagaagtgccgtggcgtcttccccgagaacttcactgagagggtcccatgacggcggggcccaggcagcctccgggcgtgtgaagaacacctcctcccgaaaaatgtgtggttcttttttttgttttgttttcgtttttcatcttttgaagagcaaagggaaatcaagaggagacccccaggcagaggggcgttctcccaaagattaggtcgttttccaaagagccgcgtcccggcaagtccggcggaattcaccagtgttcctgaagctgctgtgtcctctagttgagtttctggcgcccctgcctgtgcccgcatgtgtgcctggccgcagggcggggctgggggctgccgagccaccatgcttgcctgaagcttcggccgcgccacccgggcaagggtcctcttttcctggcagctgctgtgggtggggcccagacaccagcctagcctggctctgccccgcagacggtctgtgtgctgtttgaaaataaatcttagtgttcaaaacaaaatgaaacaaaaaaaaaatgataaaaactctcagaaaa

SEQ ID NO: 112139 - DNA, 2143 bp, Homo sapiens
  Payload ID: 1966
  Gene Symbol: BIN1
  Gene Name: bridging integrator 1
  Uniprot ID: O00499
  ENST ID: ENST00000409400
  CDS Start-End: 336-1655
cctcctcgcggacctggcggtgccggcgcccggagtggccctttaaaaggcagcttattgtccggagggggcgggcggggggcgccgaccgcggcctgaggcccggcccctcccctctccctccctctgtccccgcgtcgctcgctggctagctcgctggctcgctcgcccgtccggcgcacgctccgcctccgtcagttggctccgctgtcgggtgcgcggcgtggagcggcagccggtctggacgcgcggccggggctgggggctgggagcgcggcgcgcaagatctccccgcgcgagagcggcccctgccaccgggcgaggcctgcgccgcgatggcagagatgggcagtaaaggggtgacggcgggaaagatcgccagcaacgtgcagaagaagctcacccgcgcgcaggagaaggttctccagaagctggggaaggcagatgagaccaaggatgagcagtttgagcagtgcgtccagaatttcaacaagcagctgacggagggcacccggctgcagaaggatctccggacctacctggcctccgtcaaagccatgcacgaggcttccaagaagctgaatgagtgtctgcaggaggtgtatgagcccgattggcccggcagggatgaggcaaacaagatcgcagagaacaacgacctgctgtggatggattaccaccagaagctggtggaccaggcgctgctgaccatggacacgtacctgggccagttccccgacatcaagtcacgcattgccaagcgggggcgcaagctggtggactacgacagtgcccggcaccactacgagtcccttcaaactgccaaaaagaaggatgaagccaaaattgccaaggccgaggaggagctcatcaaagcccagaaggtgtttgaggagatgaatgtggatctgcaggaggagctgccgtccctgtggaacagccgcgtaggtttctacgtcaacacgttccagagcatcgcgggcctggaggaaaacttccacaaggagatgagcaagctcaaccagaacctcaatgatgtgctggtcggcctggagaagcaacacgggagcaacaccttcacggtcaaggcccagcccagtgacaacgcgcctgcaaaagggaacaagagcccttcgcctccagatggctcccctgccgccacccccgagatcagagtcaaccacgagccagagccggccggcggggccacgcccggggccaccctccccaagtccccatctcagccagcagaggcctcggaggtggcgggtgggacccaacctgcggctggagcccaggagccaggggagacggcggcaagtgaagcagcctccagctctcttcctgctgtcgtggtggagaccttcccagcaactgtgaatggcaccgtggagggcggcagtggggccgggcgcttggacctgcccccaggtttcatgttcaaggtacaggcccagcacgactacacggccactgacacagacgagctgcagctcaaggctggtgatgtggtgctggtgatccccttccagaaccctgaagagcaggatgaaggctggctcatgggcgtgaaggagagcgactggaaccagcacaaggagctggagaagtgccgtggcgtcttccccgagaacttcactgagagggtcccatgacggcggggcccaggcagcctccgggcgtgtgaagaacacctcctcccgaaaaatgtgtggttcttttttttgttttgttttcgtttttcatcttttgaagagcaaagggaaatcaagaggagacccccaggcagaggggcgttctcccaaagattaggtcgttttccaaagagccgcgtcccggcaagtccggcggaattcaccagtgttcctgaagctgctgtgtcctctagttgagtttctggcgcccctgcctgtgcccgcatgtgtgcctggccgcagggcggggctgggggctgccgagccaccatgcttgcctgaagcttcggccgcgccacccgggcaagggtcctcttttcctggcagctgctgtgggtggggcccagacaccagcctagcctggctctgccccgcagacggtctgtgtgctgtttgaaaataaatcttagtgttcaaaacaaaatgaaacaaaaaaaaaatgataaaaa

SEQ ID NO: 112140 - DNA, 2115 bp, Homo sapiens
  Payload ID: 1967
  Gene Symbol: BIN2
  Gene Name: bridging integrator 2
  ENST ID: ENST00000452142
  CDS Start-End: 1-1654
agaaaaccacagggcgcggggccagggcggcggcccccagggagttggcaggatggcagagggcaaggcaggcggcgcggccggcctcttcgccaagcaggtgcagaagaagtttagcagggcccaggagaaggtgctgcagaaattggggaaagctgtagaaaccaaagatgaacgatttgaacaaagcgctagcaacttctaccaacaacaggcagaaggccacaagctgtacaaggacctgaagaacttccttagtgcagtcaaagtgatgcatgaaagttcaaaaagagtgtcagaaaccctgcaggagatctacagcagcgagtgggacggtcatgaggagctgaaggccatcgtatgggagagaattgccaagcggggtcggaaactcgtggactatgacagtgcccgacaccacctggaggcagtgcagaatgccaagaagaaagatgaggccaagactgccaaggcagaggaagagttcaacaaagcccagactgtgtttgaagatctgaaccaagaactactagaggagctgcctattctttataatagtcgtattggctgctatgtgaccatcttccaaaacatttccaacttgagggatgtcttctacagggaaatgagcaagctgaaccacaatctctacgaggtgatgagcaaactggagaagcaacattccaataaagtctttgtggtgaagggactgtcaagcagcagcaggcgctctttagtcatttctcccccagttcgaacagctacagtctccagtcctcttacctcacctactagtccctctacactttccttgaagagtgagagtgaatctgtctcagcaactgaagatctggcacctgatgcagcccaaggggaagacaattctgagatcaaggagctcttagaagaggaggaaatagagaaggaaggatctgaagcaagctcctctgaggaagatgagcctctaccagcctgcaatggccccgcccaggcccagccctctcctaccactgaaagggccaagtcccaggaggaagttctccccagctccacaactccatcaccaggcggagccctgagcccttcagggcagccttcatcatctgccacagaagtagtcctccgaacccgcaccgcaagtgaaggatctgaacaaccaaagaagagagcctctatccagaggacctcagcaccccctagtaggcctcctccacccagagccactgcaagccccaggccctcctcagggaacataccttccagccctacagcctctggagggggttcacccaccagccctagggcctccttggggactgggactgcaagtcctaggacctccctagaggtctctcctaatccagaaccaccagagaagccagtaagaactcctgaggccaaagaaaatgaaaacatccacaatcagaaccctgaagaactttgtacttcccccaccttaatgacatctcaggttgcttcagagcctggagaggcaaagaagatggaagacaaggaaaaggataataagcttatctcagctaactcctcggagggccaagaccagcttcaagtctccatggtaccagaaaacaacaacctcacagcacctgaacctcaagaagaggtatccacaagtgaaaatccacaactctgaagagaaactaccaagactcctcctgccccaaacctcgccagagaagctcttcaaccagagggtataggtcagagggatataagagccagcatccatccctgggttctcagtaggaatgctggtgctgtctaaagacctggcattaatggaggcggaggagcagccttacgggagggatggagggaggcaggctggggagaagagaacattagactcagggaatatttaattctggttttagcattattagaataagactttatacattaactaaagtggagctttaatcactataaaaagcaaaagtatctatagacacagacacttgcctatacagagacataaccacacacactcagaggatagtgaacaaatctgtctttgacttacgacccattttgcaagacttaaagccggaagaacacattttcagattgttaaataaagtctgattctgacta

SEQ ID NO: 112141 - DNA, 1990 bp, Homo sapiens
  Payload ID: 1967
  Gene Symbol: BIN2
  Gene Name: bridging integrator 2
  ENST ID: ENST00000544402
  CDS Start-End: 154-1773
ctgtttctctctttcaagcccggctcgggtgtcctgcctgctttctgcactctatccctaccagttccaggcttagagcctacctggagcaagaaacgcagtgtacatggcggcttcgcatgcatactcagagaacctaaacgtgttttcgatatggtgctgcagaaattggggaaagctgtagaaaccaaagatgaacgatttgaacaaagcgctagcaacttctaccaacaacaggcagaaggccacaagctgtacaaggacctgaagaacttccttagtgcagtcaaagtgatgcatgaaagttcaaaaagagtgtcagaaaccctgcaggagatctacagcagcgagtgggacggtcatgaggagctgaaggccatcgtatggaataatgatctcctttgggaagactacgaggagaaactggctgaccaggctgtaaggaccatggaaatctatgttgcccagttcagtgaaattaaggagagaattgccaagcggggtcggaaactcgtggactatgacagtgcccgacaccacctggaggcagtgcagaatgccaagaagaaagatgaggccaagactgccaaggcagaggaagagttcaacaaagcccagactgtgtttgaagatctgaaccaagaactactagaggagctgcctattctttataatagtcgtattggctgctatgtgaccatcttccaaaacatttccaacttgagggatgtcttctacagggaaatgagcaagctgaaccacaatctctacgaggtgatgagcaaactggagaagcaacattccaataaagtctttgtggtgaagggactgtcaagcagcagcaggcgctctttagtcatttctcccccagttcgaacagctacagtctccagtcctcttacctcacctactagtccctctacactttccttgaagagtgagagtgaatctgtctcagcaactgaagatctggcacctgatgcagcccaaggggaagacaattctgagatcaaggagctcttagaagaggaggaaatagagaaggaaggatctgaagcaagctcctctgaggaagatgagcctctaccagcctgcaatggccccgcccaggcccagccctctcctaccactgaaagggccaagtcccaggaggaagttctccccagctccacaactccatcaccaggcggagccctgagcccttcagggcagccttcatcatctgccacagaagtagtcctccgaacccgcaccgcaagtgaaggatctgaacaaccaaagaagagagcctctatccagaggacctcagcaccccctagtaggcctcctccacccagagccactgcaagccccaggccctcctcagggaacataccttccagccctacagcctctggagggggttcacccaccagccctagggcctccttggggactgggactgcaagtcctaggacctccctagaggtctctcctaatccagaaccaccagagaagccagtaagaactcctgaggccaaagaaaatgaaaacatccacaatcagaaccctgaagaactttgtacttcccccaccttaatgacatctcaggttgcttcagagcctggagaggcaaagaagatggaagacaaggaaaaggataataagcttatctcagctaactcctcggagggccaagaccagcttcaagtctccatggtaccagaaaacaacaacctcacagcacctgaacctcaagaagaggtatccacaagtgaaaatccacaactctgaagagaaactaccaagactcctcctgccccaaacctcgccagagaagctcttcaaccagagggtataggtcagagggatataagagccagcatccatccctgggttctcagtaggaatgctggtgctgtctaaagacctggcattaatggaggcggaggagcagccttacgggagggatggagggaggcaggctggggagaagagaacattagactca

SEQ ID NO: 112142 - DNA, 467 bp, Homo sapiens
  Payload ID: 1967
  Gene Symbol: BIN2
  Gene Name: bridging integrator 2
  ENST ID: ENST00000605423
  CDS Start-End: 1-220
ggcgcggggccagggcggcggcccccagggagttggcaggatggcagagggcaaggcaggcggcgcggccggcctcttcgccaagcaggtgcagaagaagtttagcagggcccaggagaaggtgctgcagaaattggggaaagctgtagaaaccaaagatgaacgatttgaacaaagcgctagcaacttctaccaacaacagtttgtttgtttgttttgagatggagtcttgctctgtcaccgaggctggagtacagtggcgtgatccgatctcagctcactgcagtcttcgcctcccaggttcaagcgatccttctacctcagcctcctgcgtagctgggactacaggcagaaggccacaagctgtacaaggacctgaagaacttccttagtgcagtcaaagtgatgcatgaaagttcaaaaagagtgtcagaaaccctgcaggagatctacagcagcgagtggga

SEQ ID NO: 112143 - DNA, 2003 bp, Homo sapiens
  Payload ID: 1967
  Gene Symbol: BIN2
  Gene Name: bridging integrator 2
  ENST ID: ENST00000604560
  CDS Start-End: 1-1609
gggagttggcaggatggcagagggcaaggcaggcggcgcggccggcctcttcgccaagcaggtgcagaagaagtttagcagggcccaggagaaggcagaaggccacaagctgtacaaggacctgaagaacttccttagtgcagtcaaagtgatgcatgaaagttcaaaaagagtgtcagaaaccctgcaggagatctacagcagcgagtgggacggtcatgaggagctgaaggccatcgtatggaataatgatctcctttgggaagactacgaggagaaactggctgaccaggctgtaaggaccatggaaatctatgttgcccagttcagtgaaattaaggagagaattgccaagcggggtcggaaactcgtggactatgacagtgcccgacaccacctggaggcagtgcagaatgccaagaagaaagatgaggccaagactgccaaggcagaggaagagttcaacaaagcccagactgtgtttgaagatctgaaccaagaactactagaggagctgcctattctttataatagtcgtattggctgctatgtgaccatcttccaaaacatttccaacttgagggatgtcttctacagggaaatgagcaagctgaaccacaatctctacgaggtgatgagcaaactggagaagcaacattccaataaagtctttgtggtgaagggactgtcaagcagcagcaggcgctctttagtcatttctcccccagttcgaacagctacagtctccagtcctcttacctcacctactagtccctctacactttccttgaagagtgagagtgaatctgtctcagcaactgaagatctggcacctgatgcagcccaaggggaagacaattctgagatcaaggagctcttagaagaggaggaaatagagaaggaaggatctgaagcaagctcctctgaggaagatgagcctctaccagcctgcaatggccccgcccaggcccagccctctcctaccactgaaagggccaagtcccaggaggaagttctccccagctccacaactccatcaccaggcggagccctgagcccttcagggcagccttcatcatctgccacagaagtagtcctccgaacccgcaccgcaagtgaaggatctgaacaaccaaagaagagagcctctatccagaggacctcagcaccccctagtaggcctcctccacccagagccactgcaagccccaggccctcctcagggaacataccttccagccctacagcctctggagggggttcacccaccagccctagggcctccttggggactgggactgcaagtcctaggacctccctagaggtctctcctaatccagaaccaccagagaagccagtaagaactcctgaggccaaagaaaatgaaaacatccacaatcagaaccctgaagaactttgtacttcccccaccttaatgacatctcagaccagcttcaagtctccatggtaccagaaaacaacaacctcacagcacctgaacctcaagaagaggtatccacaagtgaaaatccacaactctgaagagaaactaccaagactcctcctgccccaaacctcgccagagaagctcttcaaccagagggtataggtcagagggatataagagccagcatccatccctgggttctcagtaggaatgctggtgctgtctaaagacctggcattaatggaggcggaggagcagccttacgggagggatggagggaggcaggctggggagaagagaacattagactcagggaatatttaattctggttttagcattattagaataagactttatacattaactaaagtggagctttaatcactataaaaagcaaaagtatctatagacacagacacttgcctatacagagacataaccacacacactcagaggatagtgaacaaatctgtctttgacttacgacccattttgcaagacttaaagccggaagaacacattttcagattgttaaataaagtctgattctgacta

SEQ ID NO: 112144 - DNA, 2255 bp, Homo sapiens
  Payload ID: 1967
  Gene Symbol: BIN2
  Gene Name: bridging integrator 2
  ENST ID: ENST00000615107
  CDS Start-End: 1-1794
atgcgaggcatgccgggagcccgcacttcctcctcgggggcctcagaaaaccacagggcgcggggccagggcggcggcccccagggagttggcaggatggcagagggcaaggcaggcggcgcggccggcctcttcgccaagcaggtgcagaagaagtttagcagggcccaggagaaggtgctgcagaaattggggaaagctgtagaaaccaaagatgaacgatttgaacaaagcgctagcaacttctaccaacaacaggcagaaggccacaagctgtacaaggacctgaagaacttccttagtgcagtcaaagtgatgcatgaaagttcaaaaagagtgtcagaaaccctgcaggagatctacagcagcgagtgggacggtcatgaggagctgaaggccatcgtatggaataatgatctcctttgggaagactacgaggagaaactggctgaccaggctgtaaggaccatggaaatctatgttgcccagttcagtgaaattaaggagagaattgccaagcggggtcggaaactcgtggactatgacagtgcccgacaccacctggaggcagtgcagaatgccaagaagaaagatgaggccaagactgccaaggcagaggaagagttcaacaaagcccagactgtgtttgaagatctgaaccaagaactactagaggagctgcctattctttataatagtcgtattggctgctatgtgaccatcttccaaaacatttccaacttgagggatgtcttctacagggaaatgagcaagctgaaccacaatctctacgaggtgatgagcaaactggagaagcaacattccaataaagtctttgtggtgaagggactgtcaagcagcagcaggcgctctttagtcatttctcccccagttcgaacagctacagtctccagtcctcttacctcacctactagtccctctacactttccttgaagagtgagagtgaatctgtctcagcaactgaagatctggcacctgatgcagcccaaggggaagacaattctgagatcaaggagctcttagaagaggaggaaatagagaaggaaggatctgaagcaagctcctctgaggaagatgagcctctaccagcctgcaatggccccgcccaggcccagccctctcctaccactgaaagggccaagtcccaggaggaagttctccccagctccacaactccatcaccaggcggagccctgagcccttcagggcagccttcatcatctgccacagaagtagtcctccgaacccgcaccgcaagtgaaggatctgaacaaccaaagaagagagcctctatccagaggacctcagcaccccctagtaggcctcctccacccagagccactgcaagccccaggccctcctcagggaacataccttccagccctacagcctctggagggggttcacccaccagccctagggcctccttggggactgggactgcaagtcctaggacctccctagaggtctctcctaatccagaaccaccagagaagccagtaagaactcctgaggccaaagaaaatgaaaacatccacaatcagaaccctgaagaactttgtacttcccccaccttaatgacatctcaggttgcttcagagcctggagaggcaaagaagatggaagacaaggaaaaggataataagcttatctcagctaactcctcggagggccaagaccagcttcaagtctccatggtaccagaaaacaacaacctcacagcacctgaacctcaagaagaggtatccacaagtgaaaatccacaactctgaagagaaactaccaagactcctcctgccccaaacctcgccagagaagctcttcaaccagagggtataggtcagagggatataagagccagcatccatccctgggttctcagtaggaatgctggtgctgtctaaagacctggcattaatggaggcggaggagcagccttacgggagggatggagggaggcaggctggggagaagagaacattagactcagggaatatttaattctggttttagcattattagaataagactttatacattaactaaagtggagctttaatcactataaaaagcaaaagtatctatagacacagacacttgcctatacagagacataaccacacacactcagaggatagtgaacaaatctgtctttgacttacgacccattttgcaagacttaaagccggaagaacacattttcagattgttaaataaagtctgattctgacta

SEQ ID NO: 112145 - DNA, 1835 bp, Homo sapiens
  Payload ID: 1968
  Gene Symbol: BIN3
  Gene Name: bridging integrator 3
  Uniprot ID: Q9NQY0
  ENST ID: ENST00000276416
  CDS Start-End: 70-831
aatccggaagtgaccctagagaaacgagttgtggctgaggaccccggcggcagacgcaggttcgggaccatgagctggattccttttaagattgggcagcccaagaaacagattgtgcccaaaacagtggagagagactttgaaagggagtatggaaaacttcagcagctggaagagcagacccggaggctgcagaaagacatgaagaagagcaccgacgcagacctggccatgtcaaaatctgccgtgaagatatccttggacttactctccaatcccctctgtgagcaagaccaggaccttctgaacatggtgacggccctggacacggccatgaagcggatggatgccttcaatcaggaaaaggtgaaccagatccagaagactgtgatcgagcccttaaaaaagttcggcagtgtcttcccgagcctcaacatggctgtgaagaggcgggaacaggccttgcaggactacaggaggctgcaggccaaggtggagaagtatgaggaaaaggagaagacggggccagtgctggccaagctccaccaggcacgagaggagctgcggcctgtgcgggaggactttgaagccaagaacaggcagctgctggaggagatgccgcgcttctacggcagccgcctcgactacttccagcccagctttgagtccctcatccgagctcaggttgtgtactactcggaaatgcacaagatctttggagacctgtcccatcagcttgaccagccaggccactccgatgagcagcgggagcgggagaacgaggccaaactcagtgagctccgggccctctccattgtggccgatgactgaatccccgtcactcttggaggactcctgtgacgtggtcagcctcattcatccttgcccttctcagggctagctgctcctctcacaggctggggacagaggtggccctggttcacttgccggccctttgcaatgaatgactcttcctgagcctggcaccaggagccctaggcaggccgccgtctccccactcacagccccagcaggtaagcagtgtagacaaacccttggggcttttttatttggagaaccgtccagcatgcatcctggcccacggcctgagcaagctgcagcccttctgaggccatgggcttcgttggctaagttgggggtcttagccttgcatgcgttgtgggcatcaaatctacctccaaaagacccatcctggggagccctctggcccctcgttgccttttcacttcaaaacctcttttttctgggagaggccctgaaccctgtgcgggagagctggtcctccagccctggcaggccctcagccagcttcccagcaagacaaagggcacccttgtggctttgggacctaagtggttggggttcccgaggtcactgaggactggtacctcgggaacgcaagctgtcagtggaactgtcccacaagaattcacaggtctcaaagcaggaacagtgggtttgtgtctcacctgagtatctggaattttattttttcaagtaaaattttcaatgaaacgtccacatagtattgtgctgtaacttaggcgagcagaggaaaccccttcctgggcctgctgccctccacggagcagcagcaccctccagcaggcagcccagcatgccaggggtgtgtgcgcacctccccggccctggcccaccttctggagcgaactgcaccgtggtccagcagaggcgctgggtgggagggcacgcgggcaagcctaggagagtaggaagagctgtggaggacacactctcagtttgtttttgactttggtttatttaaaaaacaagccaaaaaaaaaaaaaaaaaa

SEQ ID NO: 112146 - DNA, 1340 bp, Homo sapiens
  Payload ID: 1968
  Gene Symbol: BIN3
  Gene Name: bridging integrator 3
  ENST ID: ENST00000399977
  CDS Start-End: 76-693
ggattccttttaagattgggcagcccaagaaacagattgtgcccaaaacagtggagagagactttgaaagggagtatggaaaacttcagcaccatgtcaaaatctgccgtgaagatatccttggacttactctccaatcccctctgtgagcaagaccaggaccttctgaacatggtgacggccctggacacggccatgaagcggatggatgccttcaatcaggaaaaggtgaaccagatccagaagactgtgatcgagcccttaaaaaagttcggcagtgtcttcccgagcctcaacatggctgtgaagaggcgggaacaggccttgcaggactacaggaggctgcaggccaaggtggagaagtatgaggaaaaggagaagacggggccagtgctggccaagctccaccaggcacgagaggagctgcggcctgtgcgggaggactttgaagccaagaacaggcagctgctggaggagatgccgcgcttctacggcagccgcctcgactacttccagcccagctttgagtccctcatccgagctcaggttgtgtactactcggaaatgcacaagatctttggagacctgtcccatcagcttgaccagccaggccactccgatgagcagcgggagcgggagaacgaggccaaactcagtgagctccgggccctctccattgtggccgatgactgaatccccgtcactcttggaggactcctgtgacgtggtcagcctcattcatccttgcccttctcagggctagctgctcctctcacaggctggggacagaggtggccctggttcacttgccggccctttgcaatgaatgactcttcctgagcctggcaccaggagccctaggcaggccgccgtctccccactcacagccccagcaggtaagcagtgtagacaaacccttggggcttttttatttggagaaccgtccagcatgcatcctggcccacggcctgagcaagctgcagcccttctgaggccatgggcttcgttggctaagttgggggtcttagccttgcatgcgttgtgggcatcaaatctacctccaaaagacccatcctggggagccctctggcccctcgttgccttttcacttcaaaacctcttttttctgggagaggccctgaaccctgtgcgggagagctggtcctccagccctggcaggccctcagccagcttcccagcaagacaaagggcacccttgtggctttgggacctaagtggttggggttcccgaggtcactgaggactggtacctcgggaacgcaagctgtcagtggaactgtcccacaagaattcacaggtctcaaagcaggaacagtggg

SEQ ID NO: 112147 - DNA, 321 bp, Homo sapiens
  Payload ID: 1968
  Gene Symbol: BIN3
  Gene Name: bridging integrator 3
  ENST ID: ENST00000522268
  CDS Start-End: 98-181
gcttacgtcacttcctggagactggttgaatccggaagtgaccctagagaaacgagttgtggctgaggaccccggcggcagacgcaggttcgggaccatgagctggattccttttaagattgggcagcccaagaaacagattgtgcccaaaacagtgagtaactcgattgttttgctgtgagattcagttctgtatcacatggcctttgcataagaatcaaagctttgaatcaacacatcttggggctgggaagacagcaacctgggccttcttcctgcttatgcggatctagaacctcacatagactgaggcttagaggg

SEQ ID NO: 112148 - DNA, 775 bp, Homo sapiens
  Payload ID: 1968
  Gene Symbol: BIN3
  Gene Name: bridging integrator 3
  ENST ID: ENST00000520292
  CDS Start-End: 72-521
tgaatccggaagtgaccctagagaaacgagttgtggctgaggaccccggcggcagacgcaggttcgggaccatgagctggattccttttaagattgggcagcccaagaaacagattgtgcccaaaacagtggagagagactttgaaagggagtatggaaaacttcagcagctggaagagcagacccggaggctgcagaaagacatgaagaagagcaccgacgcagacctggccatgtcaaaatctgccgtgaagatatccttggacttactctccaatcccctctgtgagcaagaccaggaccttctgaacatggtgacggccctggacacggccatgaagcggatggatgccttcaatcaggaaaaggtgaaccagatccagaagactgtgatcgagcccttaaaaaagaggaaccaactcttctggtcctgggtcacctccgaatggccacagagtcatgagctccctgggctgcgcagcctgatcctggacactgcagggctctggcttgcctggtagacgccccctgccattgcaccgagggccagccctccagcagcagcagcgagagcctcaggagagcactgctcctggtcactagaggacacatgatccacaaagacgaggccggtgtggacctgcagcgttgcatcgtccactgctgctctctctgagggccactcctctgagtctcccacgcggtcccttctagtcacagtggaggtcctcagggcattttcctgaagcagctggttggaactttggcggttcca

SEQ ID NO: 112149 - DNA, 1431 bp, Homo sapiens
  Payload ID: 1968
  Gene Symbol: BIN3
  Gene Name: bridging integrator 3
  Uniprot ID: Q9NQY0
  ENST ID: ENST00000519513
  CDS Start-End: 122-721
aagtgaccctagagaaacgagttgtggctgaggaccccggcggcagacgcaggttcgggaccatgagctggattccttttaagattgggcagcccaagaaacagattgtgcccaaaacaccatgtcaaaatctgccgtgaagatatccttggacttactctccaatcccctctgtgagcaagaccaggaccttctgaacatggtgacggccctggacacggccatgaagcggatggatgccttcaatcaggaaaaggtgaaccagatccagaagactgtgatcgagcccttaaaaaagttcggcagtgtcttcccgagcctcaacatggctgtgaagaggcgggaacaggccttgcaggactacaggaggctgcaggccaaggtggagaagtatgaggaaaaggagaagacggggccagtgctggccaagctccaccaggcacgagaggagctgcggcctgtgcgggaggactttgaagccaagaacaggcagctgctggaggagatgccgcgcttctacggcagccgcctcgactacttccagcccagctttgagtccctcatccgagctcaggttgtgtactactcggaaatgcacaagatctttggagacctgtcccatcagcttgaccagccaggccactccgatgagcagcgggagcgggagaacgaggccaaactcagtgagctccgggccctctccattgtggccgatgactgaatccccgtcactcttggaggactcctgtgacgtggtcagcctcattcatccttgcccttctcagggctagctgctcctctcacaggctggggacagaggtggccctggttcacttgccggccctttgcaatgaatgactcttcctgagcctggcaccaggagccctaggcaggccgccgtctccccactcacagccccagcaggtaagcagtgtagacaaacccttggggcttttttatttggagaaccgtccagcatgcatcctggcccacggcctgagcaagctgcagcccttctgaggccatgggcttcgttggctaagttgggggtcttagccttgcatgcgttgtgggcatcaaatctacctccaaaagacccatcctggggagccctctggcccctcgttgccttttcacttcaaaacctcttttttctgggagaggccctgaaccctgtgcgggagagctggtcctccagccctggcaggccctcagccagcttcccagcaagacaaagggcacccttgtggctttgggacctaagtggttggggttcccgaggtcactgaggactggtacctcgggaacgcaagctgtcagtggaactgtcccacaagaattcacaggtctcaaagcaggaacagtgggtttgtgtctcacctgagtatctggaattttattttttcaagtaaaattttcaatgaaacgtcc

SEQ ID NO: 112150 - DNA, 659 bp, Homo sapiens
  Payload ID: 1968
  Gene Symbol: BIN3
  Gene Name: bridging integrator 3
  ENST ID: ENST00000522687
  CDS Start-End: 75-266
ggttgaatccggaagtgaccctagagaaacgagttgtggctgaggaccccggcggcagacgcaggttcgggaccatgagctggattccttttaagattgggcagcccaagaaacagattgtgcccaaaacagtggagagagactttgaaagggagtatggaaaacttcagcagctggaagagcagacccggaggctgcagaaagacatgaagaagagcaccgacgcagacctggctcctaagcctcagccagttactgatgtgtaaacacacctttcctacaaagcactgatcacaaaaggaaagcgttccttccctgggagccgccgtcaccaccaccatgcccggccatgtcaaaatctgccgtgaagatatccttggacttactctccaatcccctctgtgagcaagaccaggaccttctgaacatggtgacggccctggacacggccatgaagcggatggatgccttcaatcaggaaaaggtgaaccagatccagaagactgtgatcgagcccttaaaaaagttcggcagtgtcttcccgagcctcaacatggctgtgaagaggcgggaacaggccttgcaggactacaggaggctgcaggccaaggtggagaagtatgaggaaaaggagaagacggggccagtgctggccaagc

SEQ ID NO: 112151 - DNA, 1472 bp, Homo sapiens
  Payload ID: 1969
  Gene Symbol: BABAM1
  Gene Name: BRISC and BRCA1 A complex member 1
  Uniprot ID: Q9NWV8
  ENST ID: ENST00000359435
  CDS Start-End: 194-1183
tctgcttgttctgcagcccgctgaactacatttcccaggaggcgtcggggctgcgccgtacaacttccggctgtaaagatggcggcttcctagtgagtcggcggctgatttagaaggaggttcaggctacggtgagccgaaggggaggattctggcttcccctgtccgtgttccatctagccacacaggagccatggaagtggcagagcccagcagccccactgaagaggaggaggaggaagaggagcactcggcagagcctcggccccgcactcgctccaatcctgaaggggctgaggaccgggcagtaggggcacaggccagcgtgggcagccgcagcgagggtgagggtgaggccgccagtgctgatgatgggagcctcaacacttcaggagccggccctaagtcctggcaggtgcccccgccagcccctgaggtccaaattcggacaccaagggtcaactgtccagagaaagtgattatctgcctggacctgtcagaggaaatgtcactgccaaagctggagtcgttcaacggctccaaaaccaacgccctcaatgtctcccagaagatgattgagatgttcgtgcggacaaaacacaagatcgacaaaagccacgagtttgcactggtggtggtgaacgatgacacggcctggctgtctggcctgacctccgacccccgcgagctctgtagctgcctctatgatctggagacggcctcctgttccaccttcaatctggaaggacttttcagcctcatccagcagaaaactgagcttccggtcacagagaacgtgcagacgattcccccgccatatgtggtccgcaccatccttgtctacagccgtccaccttgccagccccagttctccttgacggagcccatgaagaaaatgttccagtgcccatatttcttctttgacgttgtttacatccacaatggcactgaggagaaggaggaggagatgagttggaaggatatgtttgccttcatgggcagcctggataccaagggtaccagctacaagtatgaggtggcactggctgggccagccctggagttgcacaactgcatggcgaaactgttggcccaccccctgcagcggccttgccagagccatgcttcctacagcctgctggaggaggaggatgaagccattgaggttgaggccactgtctgaaccatccctgtacatctgcaccttcttgtgcaaggaagtccttggcctaaagccttggttctcaaactgggttccttgggacctccggggtgggggggttccaggaggcacgtagggtaccttgcagggtcctaggagggaaacccaggattccaggagggatcccaggaactgtgggcacccattttctgtgtctcccagcccatttccactcctagtttgtcatggataatttttgttcttccctgtgtgatttttgccatcaaaataaaaatttgagactcgttaa

SEQ ID NO: 112152 - DNA, 930 bp, Homo sapiens
  Payload ID: 1969
  Gene Symbol: BABAM1
  Gene Name: BRISC and BRCA1 A complex member 1
  ENST ID: ENST00000447614
  CDS Start-End: 166-930
agtttctgtctctgcttgttctgcagcccgctgaactacatttcccaggaggcgtcggggctgcgccgtacaacttccggctgtaaagatggcggcttcctagtgagtcggcggctgatttagaaggaggttcaggctacggtgagccgaagccacacaggagccatggaagtggcagagcccagcagccccactgaagaggaggaggaggaagaggagcactcggcagagcctcggccccgcactcgctccaatcctgaaggggctgaggaccgggcagtaggggcacaggccagcgtgggcagccgcagcgagggtgagggtgaggccgccagtgctgatgatgggagcctcaacacttcaggagccggccctaagtcctggcaggtgcccccgccagcccctgaggtccaaattcggacaccaagggtcaactgtccagagaaagtgattatctgcctggacctgtcagaggaaatgtcactgccaaagctggagtcgttcaacggccagcagaaaactgagcttccggtcacagagaacgtgcagacgattcccccgccatatgtggtccgcaccatccttgtctacagccgtccaccttgccagccccagttctccttgacggagcccatgaagaaaatgttccagtgcccatatttcttctttgacgttgtttacatccacaatggcactgaggagaaggaggaggagatgagttggaaggatatgtttgccttcatgggcagcctggataccaagggtaccagctacaagtatgaggtggcactggctgggccagccctggagttgcacaactgcatggcgaaactgttggcccaccccctgcagcggccttgccagagccatgcttcctacagcctgctggaggaggaggatgaagccattgaggttgaggccactgtctga

SEQ ID NO: 112153 - DNA, 966 bp, Homo sapiens
  Payload ID: 1969
  Gene Symbol: BABAM1
  Gene Name: BRISC and BRCA1 A complex member 1
  ENST ID: ENST00000595632
  CDS Start-End: 78-842
gaggttcaggctacggtgagccgaaggggaggattctggcttcccctgtccgtgttccatctagccacacaggagccatggaagtggcagagcccagcagccccactgaagaggaggaggaggaagaggagcactcggcagagcctcggccccgcactcgctccaatcctgaaggggctgaggaccgggcagtaggggcacaggccagcgtgggcagccgcagcgagggtgagggtgaggccgccagtgctgatgatgggagcctcaacacttcaggagccggccctaagtcctggcaggtgcccccgccagcccctgaggtccaaattcggacaccaagggtcaactgtccagagaaagtgattatctgcctggacctgtcagaggaaatgtcactgccaaagctggagtcgttcaacggccagcagaaaactgagcttccggtcacagagaacgtgcagacgattcccccgccatatgtggtccgcaccatccttgtctacagccgtccaccttgccagccccagttctccttgacggagcccatgaagaaaatgttccagtgcccatatttcttctttgacgttgtttacatccacaatggcactgaggagaaggaggaggagatgagttggaaggatatgtttgccttcatgggcagcctggataccaagggtaccagctacaagtatgaggtggcactggctgggccagccctggagttgcacaactgcatggcgaaactgttggcccaccccctgcagcggccttgccagagccatgcttcctacagcctgctggaggaggaggatgaagccattgaggttgaggccactgtctgaaccatccctgtacatctgcaccttcttgtgcaaggaagtccttggcctaaagccttggttctcaaactgggttccttgggacctccggggtgggggggttccaggaggcacgtagggtaccttg

SEQ ID NO: 112154 - DNA, 1004 bp, Homo sapiens
  Payload ID: 1969
  Gene Symbol: BABAM1
  Gene Name: BRISC and BRCA1 A complex member 1
  ENST ID: ENST00000594247
  CDS Start-End: 166-492
agtttctgtctctgcttgttctgcagcccgctgaactacatttcccaggaggcgtcggggctgcgccgtacaacttccggctgtaaagatggcggcttcctagtgagtcggcggctgatttagaaggaggttcaggctacggtgagccgaagccacacaggagccatggaagtggcagagcccagcagccccactgaagaggaggaggaggaagaggagcactcggcagagcctcggccccgcactcgctccaatcctgaaggggctgaggaccgggcagtaggggcacaggccagcgtgggcagccgcagcgagggtgagggtgaggccgccagtgctgatgatgggagcctcaacacttcaggagccggccctaagtcctggcaggtgcccccgccagcccctgaggtccaaattcggacaccaagggtcaactgtccagagaaagtgctccaaaaccaacgccctcaatgtctcccagaagatgattgagatgttcgtgcggacaaaacacaagatcgacaaaagccacgagtttgcactggtggtggtgaacgatgacacggcctggctgtctggcctgacctccgacccccgcgagctctgtagctgcctctatgatctggagacggcctcctgttccaccttcaatctggaaggacttttcagcctcatccagcagaaaactgagcttccggtcacagagaacgtgcagacgattcccccgccatatgtggtccgcaccatccttgtctacagccgtccaccttgccagccccagttctccttgacggagcccatgaagaaaatgttccagtgcccatatttcttctttgacgttgtttacatccacaatggcactgaggagaaggaggaggagatgagttggaaggctggagtgtagtggcatgatctcggctcactgcaacctctgcctcccgggttcaagcaattctcctgtgtcagcctcccgagtagctggggttacaggctggagtgcagtg

SEQ ID NO: 112155 - DNA, 534 bp, Homo sapiens
  Payload ID: 1969
  Gene Symbol: BABAM1
  Gene Name: BRISC and BRCA1 A complex member 1
  ENST ID: ENST00000598567
  CDS Start-End: 1-293
acacttcaggagccggccctaagtcctggcaggtgcccccgccagcccctgaggtccaaattcggacaccaagggtcaactgtccagagaaagtgattatctgcctggacctgtcagaggaaatgtcactgccaaagctggagtcgttcaacggctccaaaaccaacgccctcaatgtctcccagaagatgattgagatgttcgtgcggacaaaacacaagatcgacaaaagccactgtctgaaccatccctgtacatctgcaccttcttgtgcaaggaagtccttggcctaaagccttggttctcaaactgggttccttgggacctccggggtgggggggttccaggaggcacgtagggtaccttgcagggtcctaggagggaaacccaggattccaggagggatcccaggaactgtgggcacccattttctgtgtctcccagcccatttccactcctagtttgtcatggataatttttgttcttccctgtgtgatttttgccatcaaaataaaaatttgagactcgttaacc

SEQ ID NO: 112156 - DNA, 690 bp, Homo sapiens
  Payload ID: 1969
  Gene Symbol: BABAM1
  Gene Name: BRISC and BRCA1 A complex member 1
  ENST ID: ENST00000601232
  CDS Start-End: 1-99
cccctgcagaaaatgttccagtgcccatatttcttctttgacgttgtttacatccacaatggcactgaggagaaggaggaggagatgagttggaagtagagacggggtttcaccatgttggccagactggtcttgaactcctgatctcaggtgatctgcctgcttcagcctcccaaagcgctgggattacaggatatgtttgccttcatgggcagcctggataccaagggtaccagctacaagtatgaggtggcactggctgggccagccctggagttgcacaactgcatggcgaaactgttggcccaccccctgcagcggccttgccagagccatgcttcctacagcctgctggaggaggaggatgaagccattgaggttgaggccactgtctgaaccatccctgtacatctgcaccttcttgtgcaaggaagtccttggcctaaagccttggttctcaaactgggttccttgggacctccggggtgggggggttccaggaggcacgtagggtaccttgcagggtcctaggagggaaacccaggattccaggagggatcccaggaactgtgggcacccattttctgtgtctcccagcccatttccactcctagtttgtcatggataatttttgttcttccctgtgtgatttttgccatcaaaataaaaatttgagactcgttaaccgaa

SEQ ID NO: 112157 - DNA, 1366 bp, Homo sapiens
  Payload ID: 1969
  Gene Symbol: BABAM1
  Gene Name: BRISC and BRCA1 A complex member 1
  Uniprot ID: Q9NWV8
  ENST ID: ENST00000601043
  CDS Start-End: 88-1077
gtacaacttccggctgtaaagatggcggcttcctagtgagtcggcggctgatttagaaggaggttcaggctacgccacacaggagccatggaagtggcagagcccagcagccccactgaagaggaggaggaggaagaggagcactcggcagagcctcggccccgcactcgctccaatcctgaaggggctgaggaccgggcagtaggggcacaggccagcgtgggcagccgcagcgagggtgagggtgaggccgccagtgctgatgatgggagcctcaacacttcaggagccggccctaagtcctggcaggtgcccccgccagcccctgaggtccaaattcggacaccaagggtcaactgtccagagaaagtgattatctgcctggacctgtcagaggaaatgtcactgccaaagctggagtcgttcaacggctccaaaaccaacgccctcaatgtctcccagaagatgattgagatgttcgtgcggacaaaacacaagatcgacaaaagccacgagtttgcactggtggtggtgaacgatgacacggcctggctgtctggcctgacctccgacccccgcgagctctgtagctgcctctatgatctggagacggcctcctgttccaccttcaatctggaaggacttttcagcctcatccagcagaaaactgagcttccggtcacagagaacgtgcagacgattcccccgccatatgtggtccgcaccatccttgtctacagccgtccaccttgccagccccagttctccttgacggagcccatgaagaaaatgttccagtgcccatatttcttctttgacgttgtttacatccacaatggcactgaggagaaggaggaggagatgagttggaaggatatgtttgccttcatgggcagcctggataccaagggtaccagctacaagtatgaggtggcactggctgggccagccctggagttgcacaactgcatggcgaaactgttggcccaccccctgcagcggccttgccagagccatgcttcctacagcctgctggaggaggaggatgaagccattgaggttgaggccactgtctgaaccatccctgtacatctgcaccttcttgtgcaaggaagtccttggcctaaagccttggttctcaaactgggttccttgggacctccggggtgggggggttccaggaggcacgtagggtaccttgcagggtcctaggagggaaacccaggattccaggagggatcccaggaactgtgggcacccattttctgtgtctcccagcccatttccactcctagtttgtcatggataatttttgttcttccctgtgtgatttttgccatcaaaataaaaatttgagactcgttaa

SEQ ID NO: 112158 - DNA, 799 bp, Homo sapiens
  Payload ID: 1969
  Gene Symbol: BABAM1
  Gene Name: BRISC and BRCA1 A complex member 1
  ENST ID: ENST00000602066
  CDS Start-End: 123-799
tcccaaagtgctgggattacaggcatgagccaccgtgcccgaccgtaaccaaatgtttttaaaactccaaggggaggattctggcttcccctgtccgtgttccatctagccacacaggagccatggaagtggcagagcccagcagccccactgaagaggaggaggaggaagaggagcactcggcagagcctcggccccgcactcgctccaatcctgaaggggctgaggaccgggcagtaggggcacaggccagcgtgggcagccgcagcgagggtgagggtgaggccgccagtgctgatgatgggagcctcaacacttcaggagccggccctaagtcctggcaggtgcccccgccagcccctgaggtccaaattcggacaccaagggtcaactgtccagagaaagtgattatctgcctggacctgtcagaggaaatgtcactgccaaagctggagtcgttcaacggctccaaaaccaacgccctcaatgtctcccagaagatgattgagatgttcgtgcggacaaaacacaagatcgacaaaagccacgagtttgcactggtggtggtgaacgatgacacggcctggctgtctggcctgacctccgacccccgcgagctctgtagctgcctctatgatctggagacggcctcctgttccaccttcaatctggaaggacttttcagcctcatccagcagaaaactgagcttccggtcacagagaacgtgcagacgattcccccgccatatgtggtccgcaccatccttgtctacagccgtccaccttgccagccccagtt

SEQ ID NO: 112159 - DNA, 1470 bp, Homo sapiens
  Payload ID: 1969
  Gene Symbol: BABAM1
  Gene Name: BRISC and BRCA1 A complex member 1
  Uniprot ID: Q9NWV8
  ENST ID: ENST00000598188
  CDS Start-End: 192-1181
tttccaagttctttctagcctcaaccagtttctgtctctgcttgttctgcagcccgctgaactacatttcccaggaggcgtcggggctgcgccgtacaacttccggctgtaaagatggcggcttcctagtgagtcggcggctgatttagaaggaggttcaggctacggtgagccgaagccacacaggagccatggaagtggcagagcccagcagccccactgaagaggaggaggaggaagaggagcactcggcagagcctcggccccgcactcgctccaatcctgaaggggctgaggaccgggcagtaggggcacaggccagcgtgggcagccgcagcgagggtgagggtgaggccgccagtgctgatgatgggagcctcaacacttcaggagccggccctaagtcctggcaggtgcccccgccagcccctgaggtccaaattcggacaccaagggtcaactgtccagagaaagtgattatctgcctggacctgtcagaggaaatgtcactgccaaagctggagtcgttcaacggctccaaaaccaacgccctcaatgtctcccagaagatgattgagatgttcgtgcggacaaaacacaagatcgacaaaagccacgagtttgcactggtggtggtgaacgatgacacggcctggctgtctggcctgacctccgacccccgcgagctctgtagctgcctctatgatctggagacggcctcctgttccaccttcaatctggaaggacttttcagcctcatccagcagaaaactgagcttccggtcacagagaacgtgcagacgattcccccgccatatgtggtccgcaccatccttgtctacagccgtccaccttgccagccccagttctccttgacggagcccatgaagaaaatgttccagtgcccatatttcttctttgacgttgtttacatccacaatggcactgaggagaaggaggaggagatgagttggaaggatatgtttgccttcatgggcagcctggataccaagggtaccagctacaagtatgaggtggcactggctgggccagccctggagttgcacaactgcatggcgaaactgttggcccaccccctgcagcggccttgccagagccatgcttcctacagcctgctggaggaggaggatgaagccattgaggttgaggccactgtctgaaccatccctgtacatctgcaccttcttgtgcaaggaagtccttggcctaaagccttggttctcaaactgggttccttgggacctccggggtgggggggttccaggaggcacgtagggtaccttgcagggtcctaggagggaaacccaggattccaggagggatcccaggaactgtgggcacccattttctgtgtctcccagcccatttccactcctagtttgtcatggataatttttgttcttccctgtgtgatttttgccatcaaaataaaaatttgagactcgttaa

SEQ ID NO: 112160 - DNA, 725 bp, Homo sapiens
  Payload ID: 1969
  Gene Symbol: BABAM1
  Gene Name: BRISC and BRCA1 A complex member 1
  ENST ID: ENST00000596335
  CDS Start-End: 71-725
cttcctagtgagtcggcggctgatttagaaggaggttcaggctacggtgagccgaagccacacaggagccatggaagtggcagagcccagcagccccactgaagaggaggaggaggaagaggagcactcggcagagcctcggccccgcactcgctccaatcctgaaggggctgaggaccgggcagtaggggcacaggccagcgtgggcagccgcagcgagggtgagggtgaggccgccagtgctgatgatgggagcctcaacacttcaggagccggccctaagtcctggcaggtgcccccgccagcccctgaggtccaaattcggacaccaagggtcaactgtccagagaaagtgattatctgcctggacctgtcagaggaaatgtcactgccaaagctggagtcgttcaacggctccaaaaccaacgccctcaatgtctcccagaagatgattgagatgttcgtgcggacaaaacacaagatcgacaaaagccacgagtttgcactggtggtggtgaacgatgacacggcctggctgtctggcctgacctccgacccccgcgagctctgtagctgcctctatgatctggagacggcctcctgttccaccttcaccttctccttagcacccccaccagatctggaaggacttttcagcctcatccagcagaaaactgagcttccggtcacagagaacgtgcagacgattcccccgccatatgtgg

SEQ ID NO: 112161 - DNA, 648 bp, Homo sapiens
  Payload ID: 1969
  Gene Symbol: BABAM1
  Gene Name: BRISC and BRCA1 A complex member 1
  ENST ID: ENST00000601436
  CDS Start-End: 68-648
cctagtgagtcggcggctgatttagaaggaggttcaggctacggtgagccgaagccacacaggagccatggaagtggcagagcccagcagccccactgaagaggaggaggaggaagaggagcactcggcagagcctcggccccgcactcgctccaatcctgaaggggctgaggaccgggcagtaggggcacaggccagcgtgggcagccgcagcgagggtgagggtgaggccgccagtgctgatgatgggagcctcaacacttcaggagccggccctaagtcctggcaggtgcccccgccagcccctgaggtccaaattcggacaccaagggtcaactgtccagagaaagtgattatctgcctggacctgtcagaggaaatgtcactgccaaagctggagtcgttcaacggctccaaaaccaacgccctcaatgtctcccagaagatgattgagatgttcgtgcggacaaaacacaagatcgacaaaagccacgagtttgcactggtggtggtgaacgatgacacggcctggctgtctggcctgacctccgacccccgcgagctctgtagctgcctctatgatctggagacggcctcctgttccaccttcacacccccaccagatctggaaggacttttcagcctcat

SEQ ID NO: 112162 - DNA, 782 bp, Homo sapiens
  Payload ID: 1969
  Gene Symbol: BABAM1
  Gene Name: BRISC and BRCA1 A complex member 1
  ENST ID: ENST00000601938
  CDS Start-End: 71-782
agctgggattatccgcatgcgccaccacgcccggctaattttgtatttttagttgagacggggtttctccatgttggtcaggctggtctcgaacttccaacctcaggggaggattctggcttcccctgtccgtgttccatctagccacacaggagccatggaagtggcagagcccagcagccccactgaagaggaggaggaggaagaggagcactcggcagagcctcggccccgcactcgctccaatcctgaaggggctgaggaccgggcagtaggggcacaggccagcgtgggcagccgcagcgagggtgagggtgaggccgccagtgctgatgatgggagcctcaacacttcaggagccggccctaagtcctggcaggtgcccccgccagcccctgaggtccaaattcggacaccaagggtcaactgtccagagaaagtgattatctgcctggacctgtcagaggaaatgtcactgccaaagctggagtcgttcaacggctccaaaaccaacgccctcaatgtctcccagaagatgattgagatgttcgtgcggacaaaacacaagatcgacaaaagccacgagtttgcactggtggtggtgaacgatgacacggcctggctgtctggcctgacctccgacccccgcgagctctgtagctgcctctatgatctggagacggcctcctgttccaccttcaatctggaaggacttttcagcctcatccagcagaaaactgagcttccggtcacagagaacgtgcagacgattcccccgccat

SEQ ID NO: 112163 - DNA, 731 bp, Homo sapiens
  Payload ID: 1969
  Gene Symbol: BABAM1
  Gene Name: BRISC and BRCA1 A complex member 1
  ENST ID: ENST00000599474
  CDS Start-End: 132-731
tgcgccgtacaacttccggctgtaaagatggcggcttcctagtgagtcggcggctgatttagaaggaggttcaggctacggggaggattctggcttcccctgtccgtgttccatctagccacacaggagccatggaagtggcagagcccagcagccccactgaagaggaggaggaggaagaggagcactcggcagagcctcggccccgcactcgctccaatcctgaaggggctgaggaccgggcagtaggggcacaggccagcgtgggcagccgcagcgagggtgagggtgaggccgccagtgctgatgatgggagcctcaacacttcaggagccggccctaagtcctggcaggtgcccccgccagcccctgaggtccaaattcggacaccaagggtcaactgtccagagaaagtgattatctgcctggacctgtcagaggaaatgtcactgccaaagctggagtcgttcaacggctccaaaaccaacgccctcaatgtctcccagaagatgattgagatgttcgtgcggacaaaacacaagatcgacaaaagccacgagtttgcactggtggtggtgaacgatgacacggcctggctgtctggcctgacctccgacccccgcgagctctgtagctgcctctatgatctggagacggcctcctgttccaccttcaatctggaaggacttttcagcctcatccagcagaaaactgagcttccggtcacagag

SEQ ID NO: 112164 - DNA, 634 bp, Homo sapiens
  Payload ID: 1969
  Gene Symbol: BABAM1
  Gene Name: BRISC and BRCA1 A complex member 1
  ENST ID: ENST00000599057
  CDS Start-End: 91-634
gtacaacttccggctgtaaagatggcggcttcctagtgagtcggcggctgatttagaaggaggttcaggctacggtgagccgaaggagccatggaagtggcagagcccagcagccccactgaagaggaggaggaggaagaggagcactcggcagagcctcggccccgcactcgctccaatcctgaaggggctgaggaccgggcagtaggggcacaggccagcgtgggcagccgcagcgagggtgagggtgaggccgccagtgctgatgatgggagcctcaacacttcaggagccggccctaagtcctggcaggtgcccccgccagcccctgaggtccaaattcggacaccaagggtcaactgtccagagaaagtgattatctgcctggacctgtcagaggaaatgtcactgccaaagctggagtcgttcaacggctccaaaaccaacgccctcaatgtctcccagaagatgattgagatgttcgtgcggacaaaacacaagatcgacaaaagccacgagtttgcactggtggtggtgaacgatgacacggcctggctgtctggcctgacctccgacccccgcgagctctgtagctgcctctatgatctggagacggcctcctgttccaccttca

SEQ ID NO: 112165 - DNA, 513 bp, Homo sapiens
  Payload ID: 1969
  Gene Symbol: BABAM1
  Gene Name: BRISC and BRCA1 A complex member 1
  ENST ID: ENST00000601171
  CDS Start-End: 85-267
tgtaaagatggcggcttcctagtgagtcggcggctgatttagaaggaggttcaggctacggtgagccgaagccacacaggagccatggaagtggcagagcccagcagccccactgaagaggaggaggaggaagaggagcactcggcagagcctcggccccgcactcgctccaatcctgaaggggctgaggaccgggcagtaggggcacaggccagccccctgaggtccaaattcggacaccaagggtcaactgtccagagaaagtgattatctgcctggacctgtcagaggaaatgtcactgccaaagctggagtcgttcaacggctccaaaaccaacgccctcaatgtctcccagaagatgattgagatgttcgtgcggacaaaacacaagatcgacaaaagccacgagtttgcactggtggtggtgaacgatgacacggcctggctgtctggcctgacctccgacccccgcgagctctgtagctgcctctatgatctggagacggcctcct

SEQ ID NO: 112166 - DNA, 4124 bp, Homo sapiens
  Payload ID: 1970
  Gene Symbol: BROX
  Gene Name: BRO1 domain and CAAX motif containing
  Uniprot ID: Q5VW32
  ENST ID: ENST00000340934
  CDS Start-End: 407-1642
gaggccgccccactgcgccgagggccgccatcgctattgcggcattctccctcggctccggaggtaggggcaactcttctcttcctgtctgggaaaaagaccatagctcaaaaggaaggccgagggagaagttagaaagggatgatgaacgaagcgttttgaggggactgcaacgccgcggcaatacccgcccctgagctgcgcgcactaccgcctcggtagctatcatggccgccgggtcacgtgactccggcttggcgccgtcctggttttccgtcaccctggttctgtagtctcggttctccgactccctctttttctcgcttgtggactccgatatattgcccttcttcccttagaagaactgctgaaccgactctgagaaatttgaaaacatctggagaaaatgacccattggtttcataggaacccattaaaagccacagctcctgtgtcttttaattactatggtgtagtcactggcccttctgcttcaaaaatatgcaatgacttgaggtcatccagggcacgactccttgaactgttcactgatttgagctgtaatccagaaatgatgaagaatgcagcagattcatatttctcacttttacaaggtttcataaattctttggatgaatctacccaagaaagcaagttacgatatattcaaaatttcaagtggactgatacattgcaaggacaggttccaagtgcccagcaggatgctgtttttgaattaatttccatgggatttaatgtagctttatggtataccaaatatgcttcaagactggctggaaaagaaaatataacagaagatgaagcaaaagaagttcatcgaagcctaaagattgcagctgggatttttaaacatttaaaggaaagtcatctcccaaaactcattacacctgcggaaaaaggaagagatttagagtcacgactcatagaagcatacgttattcaatgtcaggctgaagctcaagaagtaacaattgctcgagcaattgaactaaaacatgctcctggactaattgctgcactggcgtatgaaacagccaatttctatcaaaaagctgatcatactttatccagtttggagcctgcatattctgccaaatggagaaaatatcttcacttgaagatgtgtttctacacagcttatgcttactgttaccatggtgagactttattggctagtgataaatgcggtgaagcaatcaggtctctccaagaagcagaaaaattgtatgcaaaggcagaagcactgtgtaaagaatatggagaaaccaaaggacctggaccaacagtcaaaccttcaggacatctgttctttaggaaacttggaaaccttgtgaagaacaccctagaaaaatgtcagagagaaaatggatttatttactttcaaaaaattccaacagaagccccacagctggaactcaaagcaaattatggtctcgtagagcctatacctttcgaatttcctcctacaagtgttcagtggacaccagaaacattggctgcatttgatctcaccaaaagacccaaggatgacagtactaaacccaaaccagaagaagaagtgaaacctgtgaaagaaccagacatcaaacctcaaaaggacactgggtgctacatctcctaaaatacaacttgcacttagaatttctctagcagtaaataagataaaccacagaatttcagttcttatttctcaaaatgatttctctgaagcttgtagaataactattatattcagagggttatctgccttcagcttacttgttcttaatttttaatacagcggagatgtttcttgctttgttttcagactctcctttttaatcaggacaacatttgaaagattttattgtgcctctaaagggtatatttgggggttgggtctttttgttaaactctggatagtaataagtttcaggtcagtataggcccgaatcatgtggtttcaggtatgtttttcttttttctttttcttttttttttttctttttttttttttttttttttgaggtggagtctccctctgttgcccaggctggagtgcagtggcatgatctcggctcactgcaaccctccacctcctgaattaaagtgattctcctgcctcagcctcccgagtagctgggattacaggcacgcaccactacacccagataatttttgtatttttagtagagacgtgatttcaccatgttggccaggctggtctcgaactcctgacctcagctgatctgcccgccttggcctcccaaagtgctgggattacaggcgtgatccactgcacctggcctcaggtatgtttttctatctacacacaaaaagtttattttccttcctcttatttgatatcagaagaatgacaggaatcagtttttaacagagatagtttttccgtttctccattgtgttaatcagagcgcagacttacattctcagtcatttatcttttctggtggagaataaaaagtcacttatagttaaagatcagaaaattatcacaccaaatccattacatatgttagaatcaataatttactcaaaaatcagcttttataggtatgttggcaccttatccaagaacttatccctgttccagtacccctgtgcttcattcagtatcagtaaccctgcaatgatttttacaaatatctttttctagtgggttttttacttagaggaaagaactttgtaatagctcttaatgtttatatataagagaagacagaatggaaaatgttttttgaagtcaaatattgcatgatgtaaagaaaaaactttaaacttaaatgagtaggttgtcctgaattacactggtaactctctacttctttattaaagaagttatagtaagatgcctttgttacctgatttcagtgtacattgtttttatgtggttttctgataatgtcctgtcagaattgtattggtttaggccaaaggccatagcaaaaacatagagaacaaatatgatcttaaaaatagattgtaacattttaaacaattagtttagtaatttgggaaatagtggatgcataatactttaacagaagtcacacatctgtaggtttatcttttgattattctcctgaggcattagatagtttttctattataagtgacagattgactcacttaatataaataagtagcatacactaaaagcttactatgtgccagatactgtgctggacacttacatagataagccattgaatccacacagcagccctgtaagaaataagtaaaatctgcataaagtgttgaaataggaatatacatttcattatgaaaaatgaatagattatgcctatctgaatcaatattgcattcaaataagtgattacttaaatcatatatcatagtttacactccttaaaaaaaggtacataaattcagtgaggtttttttcttaacatacagaagtactaaatactgcttgcagtataatattgatattggaagctgcagtttccagaataagtggagtaataactaaacagacatttaattttatttcaatatctatggaaaaaacacttattaaatctccctgtattttatgttgtctttattacagaatcacttgtctgtttgttgtgtgccacttactgacaaaactttaaacagtacttgatgccagctctctactctgtggctgtgggacctgtttcttttaggtacttgtgcttattaatctacttactaaattttcacattgacatttttggggatgatactaccatatacgaaatggaaaatgtaatatgctcagtgcttctgtaaaatgcagcaatactggtattactttacatcagtaggcatctttgacatgagcatataaatattttgttgactcagcaaaggtgacactttgtgactaaagtatcccattatatataatgttttttgaaatgttggaaattttggggaattatcaaatgtatagaagttgcatgaaggttatagagaggtgtaactgtttgttaactattacatggatttcatactaggcagtgacaactaacatgttacttcaactaaaagtgtataatgggttgtctttttatttatgaaaataaaagtaattttacttacaatttcattga

SEQ ID NO: 112167 - DNA, 709 bp, Homo sapiens
  Payload ID: 1970
  Gene Symbol: BROX
  Gene Name: BRO1 domain and CAAX motif containing
  ENST ID: ENST00000426638
  CDS Start-End: 65-709
gggtggtaaacaggaagtgggcgctcagagctcgggggcggcgctcagaaaacatctggagaaaatgacccattggtttcataggaacccattaaaagccacagctcctgtgtcttttaattactatggtgtagtcactggcccttctgcttcaaaaatatgcaatgacttgaggtcatccagggcacgactccttgaactgttcactgatttgagctgtaatccagaaatgatgaagaatgcagcagattcatatttctcacttttacaaggtttcataaattctttggatgaatctacccaagaaagcaagttacgatatattcaaaatttcaagtggactgatacattgcaaggacaggttccaagtgcccagcaggatgctgtttttgaattaatttccatgggatttaatgtagctttatggtataccaaatatgcttcaagactggctggaaaagaaaatataacagaagatgaagcaaaagaagttcatcgaagcctaaagattgcagctgggatttttaaacatttaaaggaaagtcatctcccaaaactcattacacctgcggaaaaaggaagagatttagagtcacgactcatagaagcatacgttattcaatgtcaggctgaagctcaagaagtaacaattgctcgagcaattgaactaaaacatgctcctggactaattgctgcactggcgtatgaa

SEQ ID NO: 112168 - DNA, 3670 bp, Homo sapiens
  Payload ID: 1970
  Gene Symbol: BROX
  Gene Name: BRO1 domain and CAAX motif containing
  ENST ID: ENST00000537020
  CDS Start-End: 113-1129
gtcgccgcccgctgcctcgaacgggactgggcacgggaggaagaggctgggtggtaaacaggaagtgggcgctcagagctcgggggcggcgctcagaaaacatctggagaaaatgacccattggtttcataggaacccattaaaagccacagctcctgtgtcttttaattactatggtgtagtcactggcccttctgcttcaaaaatatgcaatgacttgaggtcatccagggcacgactccttgaactgttcactgatttgagctgtaatccagaaatgatgaagaatgcagcagattcatatttctcacttttacaaggtttcataaattctttggatgaatctacccaagaaagcaagttacgatatattcaaaatttcaagtggactgatacattgcaaggacaggttccaagtgcccagcaggatgctgtttttgaattaatttccatgggatttaatgtagctttatggtataccaaatatgcttcaagactggctggaaaagaaaatataacagaagatgaagcaaaagaagttcatcgaagcctaaagattgcagctgggatttttaaacatttaaaggaaagtcatctcccaaaactcattacacctgcggaaaaaggaagagatttagagtcacgactcatagaagcatacgttattcaatgtcaggctgaagctcaagaagtaacaattgctcgagcaattgaactaaaacatgctcctggactaattgctgcactggcgtatgaaacagccaatttctatcaaaaagctgatcatactttatccagtttggagcctgcatattctgccaaatggagaaaatatcttcacttgaagatgtgtttctacacagcttatgcttactgttaccatggtgagactttattggctagtgataaatgcggtgaagcaatcaggtctctccaagaagcagaaaaattgtatgcaaaggcagaagcactgtgtaaagaatatggagaaaccaaaggacctggaccaacagtcaaaccttcaggacatctgttctttaggaaacttggaaaccttgtgaagaacaccctagaaaaatgtcagagagaaaatggatttatactaaacccaaaccagaagaagaagtgaaacctgtgaaagaaccagacatcaaacctcaaaaggacactgggtgctacatctcctaaaatacaacttgcacttagaatttctctagcagtaaataagataaaccacagaatttcagttcttatttctcaaaatgatttctctgaagcttgtagaataactattatattcagagggttatctgccttcagcttacttgttcttaatttttaatacagcggagatgtttcttgctttgttttcagactctcctttttaatcaggacaacatttgaaagattttattgtgcctctaaagggtatatttgggggttgggtctttttgttaaactctggatagtaataagtttcaggtcagtataggcccgaatcatgtggtttcaggtatgtttttcttttttctttttcttttttttttttctttttttttttttttttttttgaggtggagtctccctctgttgcccaggctggagtgcagtggcatgatctcggctcactgcaaccctccacctcctgaattaaagtgattctcctgcctcagcctcccgagtagctgggattacaggcacgcaccactacacccagataatttttgtatttttagtagagacgtgatttcaccatgttggccaggctggtctcgaactcctgacctcagctgatctgcccgccttggcctcccaaagtgctgggattacaggcgtgatccactgcacctggcctcaggtatgtttttctatctacacacaaaaagtttattttccttcctcttatttgatatcagaagaatgacaggaatcagtttttaacagagatagtttttccgtttctccattgtgttaatcagagcgcagacttacattctcagtcatttatcttttctggtggagaataaaaagtcacttatagttaaagatcagaaaattatcacaccaaatccattacatatgttagaatcaataatttactcaaaaatcagcttttataggtatgttggcaccttatccaagaacttatccctgttccagtacccctgtgcttcattcagtatcagtaaccctgcaatgatttttacaaatatctttttctagtgggttttttacttagaggaaagaactttgtaatagctcttaatgtttatatataagagaagacagaatggaaaatgttttttgaagtcaaatattgcatgatgtaaagaaaaaactttaaacttaaatgagtaggttgtcctgaattacactggtaactctctacttctttattaaagaagttatagtaagatgcctttgttacctgatttcagtgtacattgtttttatgtggttttctgataatgtcctgtcagaattgtattggtttaggccaaaggccatagcaaaaacatagagaacaaatatgatcttaaaaatagattgtaacattttaaacaattagtttagtaatttgggaaatagtggatgcataatactttaacagaagtcacacatctgtaggtttatcttttgattattctcctgaggcattagatagtttttctattataagtgacagattgactcacttaatataaataagtagcatacactaaaagcttactatgtgccagatactgtgctggacacttacatagataagccattgaatccacacagcagccctgtaagaaataagtaaaatctgcataaagtgttgaaataggaatatacatttcattatgaaaaatgaatagattatgcctatctgaatcaatattgcattcaaataagtgattacttaaatcatatatcatagtttacactccttaaaaaaaggtacataaattcagtgaggtttttttcttaacatacagaagtactaaatactgcttgcagtataatattgatattggaagctgcagtttccagaataagtggagtaataactaaacagacatttaattttatttcaatatctatggaaaaaacacttattaaatctccctgtattttatgttgtctttattacagaatcacttgtctgtttgttgtgtgccacttactgacaaaactttaaacagtacttgatgccagctctctactctgtggctgtgggacctgtttcttttaggtacttgtgcttattaatctacttactaaattttcacattgacatttttggggatgatactaccatatacgaaatggaaaatgtaatatgctcagtgcttctgtaaaatgcagcaatactggtattactttacatcagtaggcatctttgacatgagcatataaatattttgttgactcagcaaaggtgacactttgtgactaaagtatcccattatatataatgttttttgaaatgttggaaattttggggaattatcaaatgtatagaagttgcatgaaggttatagagaggtgtaactgtttgttaactattacatggatttcatactaggcagtgacaactaacatgttacttcaactaaaagtgtataatgggttgtctttttatttatgaaaataaaagtaattttacttacaatttcattga

SEQ ID NO: 112169 - DNA, 3734 bp, Homo sapiens
  Payload ID: 1970
  Gene Symbol: BROX
  Gene Name: BRO1 domain and CAAX motif containing
  Uniprot ID: Q5VW32
  ENST ID: ENST00000539697
  CDS Start-End: 113-1252
gtcgccgcccgctgcctcgaacgggactgggcacgggaggaagaggctgggtggtaaacaggaagtgggcgctcagagctcgggggcggcgctcagaaaacatctggagaaaatgacccattggtttcataggaacccattaaaagccacagctcctgtgtcttttaattactatggtgtagtcactggcccttctgcttcaaaaatatgcaatgacttgaggtcatccagggcacgactccttgaactgttcactgatttgagctgtaatccagaaatgatgaagaatgcagcagattcatatttctcacttttacaaggtttcataaattctttggatgaatctacccaagaaagcaagttacgatatattcaaaatttcaagtggactgatacattgcaaggacaggttccaagtataacagaagatgaagcaaaagaagttcatcgaagcctaaagattgcagctgggatttttaaacatttaaaggaaagtcatctcccaaaactcattacacctgcggaaaaaggaagagatttagagtcacgactcatagaagcatacgttattcaatgtcaggctgaagctcaagaagtaacaattgctcgagcaattgaactaaaacatgctcctggactaattgctgcactggcgtatgaaacagccaatttctatcaaaaagctgatcatactttatccagtttggagcctgcatattctgccaaatggagaaaatatcttcacttgaagatgtgtttctacacagcttatgcttactgttaccatggtgagactttattggctagtgataaatgcggtgaagcaatcaggtctctccaagaagcagaaaaattgtatgcaaaggcagaagcactgtgtaaagaatatggagaaaccaaaggacctggaccaacagtcaaaccttcaggacatctgttctttaggaaacttggaaaccttgtgaagaacaccctagaaaaatgtcagagagaaaatggatttatttactttcaaaaaattccaacagaagccccacagctggaactcaaagcaaattatggtctcgtagagcctatacctttcgaatttcctcctacaagtgttcagtggacaccagaaacattggctgcatttgatctcaccaaaagacccaaggatgacagtactaaacccaaaccagaagaagaagtgaaacctgtgaaagaaccagacatcaaacctcaaaaggacactgggtgctacatctcctaaaatacaacttgcacttagaatttctctagcagtaaataagataaaccacagaatttcagttcttatttctcaaaatgatttctctgaagcttgtagaataactattatattcagagggttatctgccttcagcttacttgttcttaatttttaatacagcggagatgtttcttgctttgttttcagactctcctttttaatcaggacaacatttgaaagattttattgtgcctctaaagggtatatttgggggttgggtctttttgttaaactctggatagtaataagtttcaggtcagtataggcccgaatcatgtggtttcaggtatgtttttcttttttctttttcttttttttttttctttttttttttttttttttttgaggtggagtctccctctgttgcccaggctggagtgcagtggcatgatctcggctcactgcaaccctccacctcctgaattaaagtgattctcctgcctcagcctcccgagtagctgggattacaggcacgcaccactacacccagataatttttgtatttttagtagagacgtgatttcaccatgttggccaggctggtctcgaactcctgacctcagctgatctgcccgccttggcctcccaaagtgctgggattacaggcgtgatccactgcacctggcctcaggtatgtttttctatctacacacaaaaagtttattttccttcctcttatttgatatcagaagaatgacaggaatcagtttttaacagagatagtttttccgtttctccattgtgttaatcagagcgcagacttacattctcagtcatttatcttttctggtggagaataaaaagtcacttatagttaaagatcagaaaattatcacaccaaatccattacatatgttagaatcaataatttactcaaaaatcagcttttataggtatgttggcaccttatccaagaacttatccctgttccagtacccctgtgcttcattcagtatcagtaaccctgcaatgatttttacaaatatctttttctagtgggttttttacttagaggaaagaactttgtaatagctcttaatgtttatatataagagaagacagaatggaaaatgttttttgaagtcaaatattgcatgatgtaaagaaaaaactttaaacttaaatgagtaggttgtcctgaattacactggtaactctctacttctttattaaagaagttatagtaagatgcctttgttacctgatttcagtgtacattgtttttatgtggttttctgataatgtcctgtcagaattgtattggtttaggccaaaggccatagcaaaaacatagagaacaaatatgatcttaaaaatagattgtaacattttaaacaattagtttagtaatttgggaaatagtggatgcataatactttaacagaagtcacacatctgtaggtttatcttttgattattctcctgaggcattagatagtttttctattataagtgacagattgactcacttaatataaataagtagcatacactaaaagcttactatgtgccagatactgtgctggacacttacatagataagccattgaatccacacagcagccctgtaagaaataagtaaaatctgcataaagtgttgaaataggaatatacatttcattatgaaaaatgaatagattatgcctatctgaatcaatattgcattcaaataagtgattacttaaatcatatatcatagtttacactccttaaaaaaaggtacataaattcagtgaggtttttttcttaacatacagaagtactaaatactgcttgcagtataatattgatattggaagctgcagtttccagaataagtggagtaataactaaacagacatttaattttatttcaatatctatggaaaaaacacttattaaatctccctgtattttatgttgtctttattacagaatcacttgtctgtttgttgtgtgccacttactgacaaaactttaaacagtacttgatgccagctctctactctgtggctgtgggacctgtttcttttaggtacttgtgcttattaatctacttactaaattttcacattgacatttttggggatgatactaccatatacgaaatggaaaatgtaatatgctcagtgcttctgtaaaatgcagcaatactggtattactttacatcagtaggcatctttgacatgagcatataaatattttgttgactcagcaaaggtgacactttgtgactaaagtatcccattatatataatgttttttgaaatgttggaaattttggggaattatcaaatgtatagaagttgcatgaaggttatagagaggtgtaactgtttgttaactattacatggatttcatactaggcagtgacaactaacatgttacttcaactaaaagtgtataatgggttgtctttttatttatgaaaataaaagtaattttacttacaatttcattga

SEQ ID NO: 112170 - DNA, 4028 bp, Homo sapiens
  Payload ID: 1970
  Gene Symbol: BROX
  Gene Name: BRO1 domain and CAAX motif containing
  Uniprot ID: Q5VW32
  ENST ID: ENST00000612948
  CDS Start-End: 407-1546
gaggccgccccactgcgccgagggccgccatcgctattgcggcattctccctcggctccggaggtaggggcaactcttctcttcctgtctgggaaaaagaccatagctcaaaaggaaggccgagggagaagttagaaagggatgatgaacgaagcgttttgaggggactgcaacgccgcggcaatacccgcccctgagctgcgcgcactaccgcctcggtagctatcatggccgccgggtcacgtgactccggcttggcgccgtcctggttttccgtcaccctggttctgtagtctcggttctccgactccctctttttctcgcttgtggactccgatatattgcccttcttcccttagaagaactgctgaaccgactctgagaaatttgaaaacatctggagaaaatgacccattggtttcataggaacccattaaaagccacagctcctgtgtcttttaattactatggtgtagtcactggcccttctgcttcaaaaatatgcaatgacttgaggtcatccagggcacgactccttgaactgttcactgatttgagctgtaatccagaaatgatgaagaatgcagcagattcatatttctcacttttacaaggtttcataaattctttggatgaatctacccaagaaagcaagttacgatatattcaaaatttcaagtggactgatacattgcaaggacaggttccaagtataacagaagatgaagcaaaagaagttcatcgaagcctaaagattgcagctgggatttttaaacatttaaaggaaagtcatctcccaaaactcattacacctgcggaaaaaggaagagatttagagtcacgactcatagaagcatacgttattcaatgtcaggctgaagctcaagaagtaacaattgctcgagcaattgaactaaaacatgctcctggactaattgctgcactggcgtatgaaacagccaatttctatcaaaaagctgatcatactttatccagtttggagcctgcatattctgccaaatggagaaaatatcttcacttgaagatgtgtttctacacagcttatgcttactgttaccatggtgagactttattggctagtgataaatgcggtgaagcaatcaggtctctccaagaagcagaaaaattgtatgcaaaggcagaagcactgtgtaaagaatatggagaaaccaaaggacctggaccaacagtcaaaccttcaggacatctgttctttaggaaacttggaaaccttgtgaagaacaccctagaaaaatgtcagagagaaaatggatttatttactttcaaaaaattccaacagaagccccacagctggaactcaaagcaaattatggtctcgtagagcctatacctttcgaatttcctcctacaagtgttcagtggacaccagaaacattggctgcatttgatctcaccaaaagacccaaggatgacagtactaaacccaaaccagaagaagaagtgaaacctgtgaaagaaccagacatcaaacctcaaaaggacactgggtgctacatctcctaaaatacaacttgcacttagaatttctctagcagtaaataagataaaccacagaatttcagttcttatttctcaaaatgatttctctgaagcttgtagaataactattatattcagagggttatctgccttcagcttacttgttcttaatttttaatacagcggagatgtttcttgctttgttttcagactctcctttttaatcaggacaacatttgaaagattttattgtgcctctaaagggtatatttgggggttgggtctttttgttaaactctggatagtaataagtttcaggtcagtataggcccgaatcatgtggtttcaggtatgtttttcttttttctttttcttttttttttttctttttttttttttttttttttgaggtggagtctccctctgttgcccaggctggagtgcagtggcatgatctcggctcactgcaaccctccacctcctgaattaaagtgattctcctgcctcagcctcccgagtagctgggattacaggcacgcaccactacacccagataatttttgtatttttagtagagacgtgatttcaccatgttggccaggctggtctcgaactcctgacctcagctgatctgcccgccttggcctcccaaagtgctgggattacaggcgtgatccactgcacctggcctcaggtatgtttttctatctacacacaaaaagtttattttccttcctcttatttgatatcagaagaatgacaggaatcagtttttaacagagatagtttttccgtttctccattgtgttaatcagagcgcagacttacattctcagtcatttatcttttctggtggagaataaaaagtcacttatagttaaagatcagaaaattatcacaccaaatccattacatatgttagaatcaataatttactcaaaaatcagcttttataggtatgttggcaccttatccaagaacttatccctgttccagtacccctgtgcttcattcagtatcagtaaccctgcaatgatttttacaaatatctttttctagtgggttttttacttagaggaaagaactttgtaatagctcttaatgtttatatataagagaagacagaatggaaaatgttttttgaagtcaaatattgcatgatgtaaagaaaaaactttaaacttaaatgagtaggttgtcctgaattacactggtaactctctacttctttattaaagaagttatagtaagatgcctttgttacctgatttcagtgtacattgtttttatgtggttttctgataatgtcctgtcagaattgtattggtttaggccaaaggccatagcaaaaacatagagaacaaatatgatcttaaaaatagattgtaacattttaaacaattagtttagtaatttgggaaatagtggatgcataatactttaacagaagtcacacatctgtaggtttatcttttgattattctcctgaggcattagatagtttttctattataagtgacagattgactcacttaatataaataagtagcatacactaaaagcttactatgtgccagatactgtgctggacacttacatagataagccattgaatccacacagcagccctgtaagaaataagtaaaatctgcataaagtgttgaaataggaatatacatttcattatgaaaaatgaatagattatgcctatctgaatcaatattgcattcaaataagtgattacttaaatcatatatcatagtttacactccttaaaaaaaggtacataaattcagtgaggtttttttcttaacatacagaagtactaaatactgcttgcagtataatattgatattggaagctgcagtttccagaataagtggagtaataactaaacagacatttaattttatttcaatatctatggaaaaaacacttattaaatctccctgtattttatgttgtctttattacagaatcacttgtctgtttgttgtgtgccacttactgacaaaactttaaacagtacttgatgccagctctctactctgtggctgtgggacctgtttcttttaggtacttgtgcttattaatctacttactaaattttcacattgacatttttggggatgatactaccatatacgaaatggaaaatgtaatatgctcagtgcttctgtaaaatgcagcaatactggtattactttacatcagtaggcatctttgacatgagcatataaatattttgttgactcagcaaaggtgacactttgtgactaaagtatcccattatatataatgttttttgaaatgttggaaattttggggaattatcaaatgtatagaagttgcatgaaggttatagagaggtgtaactgtttgttaactattacatggatttcatactaggcagtgacaactaacatgttacttcaactaaaagtgtataatgggttgtctttttatttatgaaaataaaagtaattttacttacaatttcattga

SEQ ID NO: 112171 - DNA, 4526 bp, Homo sapiens
  Payload ID: 1971
  Gene Symbol: BAHD1
  Gene Name: bromo adjacent homology domain containing 1
  Uniprot ID: Q8TBE0
  ENST ID: ENST00000416165
  CDS Start-End: 72-2414
cagcccggccggggcctgcgggcgcccagagccgcgccgtccgcgccgcccgttctggttggaagtactccatgacacacactcggagaaagtcccttcccatgctgagttcgggcctcactggccgccgagagcccctgcagatggaagacagcaacatggagcagggggttgagggtgtggagccaggcatgcccgagagcccaggtcacctcacagggcgccgcaagaattacccacttcgtaagcgcccattggttcctgagaagcccaaggcctgcaaagtgctgctgactcgcctggagaatgtggccggtccccggagtgcagatgaggctgatgagctaccgcctgacctgcccaagccccccagcccggccccatccagtgaagaccctggccttgcccagccccgcaagcggcgcctggcctccctcaatgctgaagctctcaataacctgctgctggagcgagaggacaccagcagcctggcaggcacccgccgcagtcgagcaggggatccccaccgcagccgtgaccgtgatcgtgctactgggggctggtcctcctccaagaagcggccccggctgggggaccttggaggaggaagtcgggacctgtctccagagccagcacccgatgaaggtccccgccgagatggagacccagctcccaagagactggctagcctgaacgcagctgctttcctaaaactgagccaggagcgggagctacccctgcggctgcctcgtgcccatgcagaagtagatgggcgctccactgagcccccagcacccaaggccccgaggccaaagtggcccaaggtcaatggcaagaactatcccaaggcttggcagggggccagctctggggaggctgcaggcccacctggctggcaaggctgccctgatgaaccatggccatctgcaactccttgtgggccatccgtccagccatctcatcagcccctgagcaaggctctggagagccctttggggctgcgccctcacctgcccctgctgatgggtggacaggcggctctgaagccggagcctgggcgcccaggcgaggagtcacctgcccctaagcaggaactgcatcagccctctttccccacacctcagctgtcgccgctgccgatgcctggcaaccccgccgactacaatggcctgtgtgttgggcctgagctcactgcactaggcagcttctacctgtactgtggccaagaggggctgcagtgtgggggctactcgccctgccccatgcttcctgagggcaagctgtccccagtggctgcacctcacgaggaggggctcctcttagctccgagctcagtgccctcaggcacccctttccagcaccctccctggggctcctctcgctactgctctagcgaggacactggagtgaatggctacagcatctgcggagtgttgcccctgtctgttacccacgctggcactacctgtggcggctgcccatacaaaatgccttttgcagcagaaggctgcagatccctgggccagttggaatttcctctcccggaagctggccacccagcctcacccgcccacccactcctggggtgccctgtacccagtgtgccacctgcagcagagcccgtcccccatcttcagacacccacctcggagccccagacagtagcccgtgcgtgccctcagagcgccaaacctcccagcggttctaagtcaggtctgcgcacaggctccagctgcaggcacactgcaaggagcaaggctgcccgcaggcctagccaccccaagcagccacgtgtccagcgcccacgccctcgccgccgccgtcgccgccgcactaatggctgggtacctgttggggctgcgtgtgagaaggctgtgtatgtcttggatgagccggagccagccatccgaaagagctaccaggcggtagagcggcatggggagacaatccgagtccgggacaccgtccttctcaaatcaggcccacgaaagacctccacaccttatgtggccaagatctctgccctctgggagaaccccgagtcaggagagctgatgatgagcctcctgtggtattacagacctgagcacttacagggaggccgcagtcccagcatgcacgagcccttgcagaatgaagtgtttgcatcgcgacatcaggaccagaacagtgtggcctgcattgaggagaagtgctatgtgctgacttttgccgagtactgcaggttctgtgccatggccaagcgccgaggtgaaggcctccccagccgaaagacagcactggttcccccctctgcagactattccaccccaccccaccgcacagtgccagaggacacggaccctgagctggtgttcctttgccgccatgtctatgacttccgccacgggcgcatccttaagaacccccagtagcctcctcatgcccatgctggggctacccatgggcaagtggggctcggggtagggggcactgcttgaagcacagcacttggttagggggccacagaggcctaagtttgctggcctgtggttttcttgggggggagggcaggggcccctgtgggttctgggctccaggggagggagctggggaggccagggtataagaaaagcatcagaactctcagcttggcccaaggtaccttctgtggttcccctgggtggagatttccgaaaagtagtcttctctgaggctgggccaagcctgagggaaatggggccctaggagggtgggggcgggaaggaggggcaaggtctttcaggaaccagacccaacaggcccttctgtagcctcccccttgccctcaaagggggagtgggggccagctttacctcacccactgtgacccgccgcttccccttcagcctgggaccaggctttcctagatcccagcacagctctgagcttgttcctttgaggcatagagagccagagtctggcttccagagcattgacttcctcttcctagacttgaggccttttctctggctttcctcctttgccctgcagtagcaactggtgctgggacaagttgacccacctctcacagtcatgggtgtggcccacttgtgggagtctcctgtccacctcccagagacggccacccagcgggtctggcttcccagaaagttaactgatgattgtggggtttgtcatatctgggagggaagatgggtgctgggagagggttgggggcagggggcaaggaaaattgctacctgatttgttgaagatttttcctcttgccttacacatggaggttccaggaaacctcttgcagaacttcacacgtgattcttcaagccacacccacctgaaatcaaaccaaaggagtgctgtggctccccttgccctgccaccctttccctagtcttttgtagattgcactaatttacatcctagcaagaatcaacactgtatcagtccacggacctgctgagctgcagccacttgctctaggagctaaggacttgcattttcagtttgttcctgttgcccagaggccctgttctcacctcatgctgctccccagagtagactaacaggctcagtcccctgttgtccttgtggagactaggccttggccctggccctgagactctgtgagggggctggagcagcctggttatttcctatctgtaccaaagaggagtatggtgggagagggagtggagtgcagtgtggcttgggcctggtgctgggaacctgctagctgagcacttccacaagggcatacccctgggggcaggggctggggctgagaactgcagccctgggtcttcccttagggaggaagggcagatgaacccagcaggcttaggaggtggcactgggtgaggacagctgggcaggggctgcagagggaggtggaaatgaaccctgagggctcccccaacttgccatgccctgtcccttagtagatgagttgctcctgattggtcattgggtttgggtgaggcctggaggcttcagaggtgaatttatgcttgggaagcctgatcccaaacctgaagggaagggacttggatctccttatattgaataagctgtttggaggaaggtgtctgtctgggaggatggggcagtaaatgaggttggcagagtggcagtgggggctctgcagagccagccttggagcctgctcattctgggcccttgctgccaaggagcccagcctcacctagcaggaaaggagatgaaggccctcctcccaggaggtagggtcttggctgccccgaacttaaatgcttttgaaatctcttagatgtggaaatattttttcgaacctgaaaatgcagctggtagaatttcaatggaagcataatccatgtaaaatatattttagttgatattttgtaaaatgcactttttgtgtgtgttgatcctggtttcccagatctgtatttcagtgtttacaagggaggaaggacctttcctcacctcccttttgacagagattagaagtacttctttaagaaaaaaataaatttgagaaattgtattgatttagaaaaggatcgttt

SEQ ID NO: 112172 - DNA, 4432 bp, Homo sapiens
  Payload ID: 1971
  Gene Symbol: BAHD1
  Gene Name: bromo adjacent homology domain containing 1
  Uniprot ID: Q8TBE0
  ENST ID: ENST00000560846
  CDS Start-End: 1-2334
atgacacacactcggagaaagtcccttcccatgctgagttcgggcctcactggccgccgagagcccctgcagatggaagacagcaacatggagcagggggttgagggtgtggagccaggcatgcccgagagcccaggtcacctcacagggcgccgcaagaattacccacttcgtaagcgcccattggttcctgagaagcccaaggcctgcaaagtgctgctgactcgcctggagaatgtggccggtccccggagtgcagatgaggctgatgagctaccgcctgacctgcccaagccccccagcccggccccatccagtgaagaccctggccttgcccagccccgcaagcggcgcctggcctccctcaatgctgaagctctcaataacctgctgctggagcgagaggacaccagcagcctggcaggcacccgccgcagtcgagcaggggatccccaccgcagccgtgaccgtgatcgtgctactgggggctggtcctcctccaagaagcggccccggctgggggaccttggaggaggaagtcgggacctgtctccagagccagcacccgatgaaggtccccgccgagatggagacccagctcccaagagactggctagcctgaacgcagctgctttcctaaaactgagccaggagcgggagctacccctgcggctgcctcgtgcccatgcagaagtagatgggcgctccactgagcccccagcacccaaggccccgaggccaaagtggcccaaggtcaatggcaagaactatcccaaggcttggcagggggccagctctggggaggctgcaggcccacctggctggcaaggctgccctgatgaaccatggccatctgcaactccttgtgggccatccgtccagccatctcatcagcccctgagcaaggctctggagagccctttggggctgcgccctcacctgcccctgctgatgggtggacaggcggctctgaagccggagcctgggcgcccaggcgaggagtcacctgcccctaagcaggaactgcatcagccctctttccccacacctcagctgtcgccgctgccgatgcctggcaaccccgccgactacaatggcctgtgtgttgggcctgagctcactgcactaggcagcttctacctgtactgtggccaagaggggctgcagtgtgggggctactcgccctgccccatgcttcctgagggcaagctgtccccagtggctgcacctcacgaggaggggctcctcttagctccgagctcagtgccctcaggcacccctttccagcaccctccctggggctcctctcgctactgctctagcgaggacactggagtgaatggctacagcatctgcggagtgttgcccctgtctgttacccacgctggcactacctgtggcggctgcccatacaaaatgccttttgcagcagaaggctgcagatccctgggccagttggaatttcctctcccggaagctggccacccagcctcacccgcccacccactcctggggtgccctgtacccagtgtgccacctgcagcagagcccgtcccccatcttcagacacccacctcggagccccagacagtagcccgtgcgtgccctcagagcgccaaacctcccagcggttctaagtcaggtctgcgcacaggctccagctgcaggcacactgcaaggagcaaggctgcccgcaggcctagccaccccaagcagccacgtgtccagcgcccacgccctcgccgccgccgtcgccgccgcactaatggctgggtacctgttggggctgcgtgtgagaaggctgtgtatgtcttggatgagccggagccagccatccgaaagagctaccaggcggtagagcggcatggggagacaatccgagtccgggacaccgtccttctcaaatcaggcccacgaaagacctccacaccttatgtggccaagatctctgccctctgggagaaccccgagtcaggagagctgatgatgagcctcctgtggtattacagacctgagcacttacagggaggccgcagtcccagcatgcacgagaatgaagtgtttgcatcgcgacatcaggaccagaacagtgtggcctgcattgaggagaagtgctatgtgctgacttttgccgagtactgcaggttctgtgccatggccaagcgccgaggtgaaggcctccccagccgaaagacagcactggttcccccctctgcagactattccaccccaccccaccgcacagtgccagaggacacggaccctgagctggtgttcctttgccgccatgtctatgacttccgccacgggcgcatccttaagaacccccagtagcctcctcatgcccatgctggggctacccatgggcaagtggggctcggggtagggggcactgcttgaagcacagcacttggttagggggccacagaggcctaagtttgctggcctgtggttttcttgggggggagggcaggggcccctgtgggttctgggctccaggggagggagctggggaggccagggtataagaaaagcatcagaactctcagcttggcccaaggtaccttctgtggttcccctgggtggagatttccgaaaagtagtcttctctgaggctgggccaagcctgagggaaatggggccctaggagggtgggggcgggaaggaggggcaaggtctttcaggaaccagacccaacaggcccttctgtagcctcccccttgccctcaaagggggagtgggggccagctttacctcacccactgtgacccgccgcttccccttcagcctgggaccaggctttcctagatcccagcacagctctgagcttgttcctttgaggcatagagagccagagtctggcttccagagcattgacttcctcttcctagacttgaggccttttctctggctttcctcctttgccctgcagtagcaactggtgctgggacaagttgacccacctctcacagtcatgggtgtggcccacttgtgggagtctcctgtccacctcccagagacggccacccagcgggtctggcttcccagaaagttaactgatgattgtggggtttgtcatatctgggagggaagatgggtgctgggagagggttgggggcagggggcaaggaaaattgctacctgatttgttgaagatttttcctcttgccttacacatggaggttccaggaaacctcttgcagaacttcacacgtgattcttcaagccacacccacctgaaatcaaaccaaaggagtgctgtggctccccttgccctgccaccctttccctagtcttttgtagattgcactaatttacatcctagcaagaatcaacactgtatcagtccacggacctgctgagctgcagccacttgctctaggagctaaggacttgcattttcagtttgttcctgttgcccagaggccctgttctcacctcatgctgctccccagagtagactaacaggctcagtcccctgttgtccttgtggagactaggccttggccctggccctgagactctgtgagggggctggagcagcctggttatttcctatctgtaccaaagaggagtatggtgggagagggagtggagtgcagtgtggcttgggcctggtgctgggaacctgctagctgagcacttccacaagggcatacccctgggggcaggggctggggctgagaactgcagccctgggtcttcccttagggaggaagggcagatgaacccagcaggcttaggaggtggcactgggtgaggacagctgggcaggggctgcagagggaggtggaaatgaaccctgagggctcccccaacttgccatgccctgtcccttagtagatgagttgctcctgattggtcattgggtttgggtgaggcctggaggcttcagaggtgaatttatgcttgggaagcctgatcccaaacctgaagggaagggacttggatctccttatattgaataagctgtttggaggaaggtgtctgtctgggaggatggggcagtaaatgaggttggcagagtggcagtgggggctctgcagagccagccttggagcctgctcattctgggcccttgctgccaaggagcccagcctcacctagcaggaaaggagatgaaggccctcctcccaggaggtagggtcttggctgccccgaacttaaatgcttttgaaatctcttagatgtggaaatattttttcgaacctgaaaatgcagctggtagaatttcaatggaagcataatccatgtaaaatatattttagttgatattttgtaaaatgcactttttgtgtgtgttgatcctggtttcccagatctgtatttcagtgtttacaagggaggaaggacctttcctcacctcccttttgacagagattagaagtacttctttaagaaaaaaataaatttgagaaattgtattgattta

SEQ ID NO: 112173 - DNA, 4698 bp, Homo sapiens
  Payload ID: 1971
  Gene Symbol: BAHD1
  Gene Name: bromo adjacent homology domain containing 1
  Uniprot ID: Q8TBE0
  ENST ID: ENST00000561234
  CDS Start-End: 260-2599
tttctcgagaacctactgtgtgcatatcccgggcttagtgaagtcctaggcgggctctggcaccaccaggtgcccaagacacagctccttcccgcacctaacagggacttcccatctctctctgtgcccttagcctgctgtgcccacccaccccactgaccccgcgagcgtgctcgggcttgggagggcacgtctgtgggggtgagagacggagccacagcatttggtgactagggggaagccaggttggaagtactccatgacacacactcggagaaagtcccttcccatgctgagttcgggcctcactggccgccgagagcccctgcagatggaagacagcaacatggagcagggggttgagggtgtggagccaggcatgcccgagagcccaggtcacctcacagggcgccgcaagaattacccacttcgtaagcgcccattggttcctgagaagcccaaggcctgcaaagtgctgctgactcgcctggagaatgtggccggtccccggagtgcagatgaggctgatgagctaccgcctgacctgcccaagccccccagcccggccccatccagtgaagaccctggccttgcccagccccgcaagcggcgcctggcctccctcaatgctgaagctctcaataacctgctgctggagcgagaggacaccagcagcctggcaggcacccgccgcagtcgagcaggggatccccaccgcagccgtgaccgtgatcgtgctactgggggctggtcctcctccaagaagcggccccggctgggggaccttggaggaggaagtcgggacctgtctccagagccagcacccgatgaaggtccccgccgagatggagacccagctcccaagagactggctagcctgaacgcagctgctttcctaaaactgagccaggagcgggagctacccctgcggctgcctcgtgcccatgcagaagtagatgggcgctccactgagcccccagcacccaaggccccgaggccaaagtggcccaaggtcaatggcaagaactatcccaaggcttggcagggggccagctctggggaggctgcaggcccacctggctggcaaggctgccctgatgaaccatggccatctgcaactccttgtgggccatccgtccagccatctcatcagcccctgagcaaggctctggagagccctttggggctgcgccctcacctgcccctgctgatgggtggacaggcggctctgaagccggagcctgggcgcccaggcgaggagtcacctgcccctaagcaggaactgcatcagccctctttccccacacctcagctgtcgccgctgccgatgcctggcaaccccgccgactacaatggcctgtgtgttgggcctgagctcactgcactaggcagcttctacctgtactgtggccaagaggggctgcagtgtgggggctactcgccctgccccatgcttcctgagggcaagctgtccccagtggctgcacctcacgaggaggggctcctcttagctccgagctcagtgccctcaggcacccctttccagcaccctccctggggctcctctcgctactgctctagcgaggacactggagtgaatggctacagcatctgcggagtgttgcccctgtctgttacccacgctggcactacctgtggcggctgcccatacaaaatgccttttgcagcaggctgcagatccctgggccagttggaatttcctctcccggaagctggccacccagcctcacccgcccacccactcctggggtgccctgtacccagtgtgccacctgcagcagagcccgtcccccatcttcagacacccacctcggagccccagacagtagcccgtgcgtgccctcagagcgccaaacctcccagcggttctaagtcaggtctgcgcacaggctccagctgcaggcacactgcaaggagcaaggctgcccgcaggcctagccaccccaagcagccacgtgtccagcgcccacgccctcgccgccgccgtcgccgccgcactaatggctgggtacctgttggggctgcgtgtgagaaggctgtgtatgtcttggatgagccggagccagccatccgaaagagctaccaggcggtagagcggcatggggagacaatccgagtccgggacaccgtccttctcaaatcaggcccacgaaagacctccacaccttatgtggccaagatctctgccctctgggagaaccccgagtcaggagagctgatgatgagcctcctgtggtattacagacctgagcacttacagggaggccgcagtcccagcatgcacgagcccttgcagaatgaagtgtttgcatcgcgacatcaggaccagaacagtgtggcctgcattgaggagaagtgctatgtgctgacttttgccgagtactgcaggttctgtgccatggccaagcgccgaggtgaaggcctccccagccgaaagacagcactggttcccccctctgcagactattccaccccaccccaccgcacagtgccagaggacacggaccctgagctggtgttcctttgccgccatgtctatgacttccgccacgggcgcatccttaagaacccccagtagcctcctcatgcccatgctggggctacccatgggcaagtggggctcggggtagggggcactgcttgaagcacagcacttggttagggggccacagaggcctaagtttgctggcctgtggttttcttgggggggagggcaggggcccctgtgggttctgggctccaggggagggagctggggaggccagggtataagaaaagcatcagaactctcagcttggcccaaggtaccttctgtggttcccctgggtggagatttccgaaaagtagtcttctctgaggctgggccaagcctgagggaaatggggccctaggagggtgggggcgggaaggaggggcaaggtctttcaggaaccagacccaacaggcccttctgtagcctcccccttgccctcaaagggggagtgggggccagctttacctcacccactgtgacccgccgcttccccttcagcctgggaccaggctttcctagatcccagcacagctctgagcttgttcctttgaggcatagagagccagagtctggcttccagagcattgacttcctcttcctagacttgaggccttttctctggctttcctcctttgccctgcagtagcaactggtgctgggacaagttgacccacctctcacagtcatgggtgtggcccacttgtgggagtctcctgtccacctcccagagacggccacccagcgggtctggcttcccagaaagttaactgatgattgtggggtttgtcatatctgggagggaagatgggtgctgggagagggttgggggcagggggcaaggaaaattgctacctgatttgttgaagatttttcctcttgccttacacatggaggttccaggaaacctcttgcagaacttcacacgtgattcttcaagccacacccacctgaaatcaaaccaaaggagtgctgtggctccccttgccctgccaccctttccctagtcttttgtagattgcactaatttacatcctagcaagaatcaacactgtatcagtccacggacctgctgagctgcagccacttgctctaggagctaaggacttgcattttcagtttgttcctgttgcccagaggccctgttctcacctcatgctgctccccagagtagactaacaggctcagtcccctgttgtccttgtggagactaggccttggccctggccctgagactctgtgagggggctggagcagcctggttatttcctatctgtaccaaagaggagtatggtgggagagggagtggagtgcagtgtggcttgggcctggtgctgggaacctgctagctgagcacttccacaagggcatacccctgggggcaggggctggggctgagaactgcagccctgggtcttcccttagggaggaagggcagatgaacccagcaggcttaggaggtggcactgggtgaggacagctgggcaggggctgcagagggaggtggaaatgaaccctgagggctcccccaacttgccatgccctgtcccttagtagatgagttgctcctgattggtcattgggtttgggtgaggcctggaggcttcagaggtgaatttatgcttgggaagcctgatcccaaacctgaagggaagggacttggatctccttatattgaataagctgtttggaggaaggtgtctgtctgggaggatggggcagtaaatgaggttggcagagtggcagtgggggctctgcagagccagccttggagcctgctcattctgggcccttgctgccaaggagcccagcctcacctagcaggaaaggagatgaaggccctcctcccaggaggtagggtcttggctgccccgaacttaaatgcttttgaaatctcttagatgtggaaatattttttcgaacctgaaaatgcagctggtagaatttcaatggaagcataatccatgtaaaatatattttagttgatattttgtaaaatgcactttttgtgtgtgttgatcctggtttcccagatctgtatttcagtgtttacaagggaggaaggacctttcctcacctcccttttgacagagattagaagtacttctttaagaaaaaaataaatttgagaaattgtattgatttag

SEQ ID NO: 112174 - DNA, 5920 bp, Homo sapiens
  Payload ID: 1972
  Gene Symbol: BAZ1A
  Gene Name: bromodomain adjacent to zinc finger domain, 1A
  Uniprot ID: Q9NRL2
  ENST ID: ENST00000358716
  CDS Start-End: 569-5143
cttttcccatcgtgtagtcaagagtctgtgccagacttgaaggctttactttgttagccatgtgtttatgaacccccagcgctttccctagatcttttggctgataatctcaaacatggaggatgcttctgaatcttcacgaggggttgctccattaattaataatgtagttctcccaggctctccgctgtctcttcctgtatcagtgacaggctgtaaaagtcatcgagtagccaataaaaaggtagaagcgaggagtgaaaagctcctcccaacagctcttcctccttcagagccgaaagtagatcagaaacttcccaggagctccgagaggcggggaagtggcggtgggacgcaattccccgcgcggagtcgggcagtggcagcgggagaagcggcagccaggggcgcggcggggccggagagaggcggtcccctgggaggacggggtctcccctcgttgcctttgtagtggagaaggtggacaagtggcagtcggcgtgatcgcagggaagcggggccggcgcgggcggccgagggtccaggcgagcccgcgggcggacgggagatgccgctgctacaccgaaagccgtttgtgagacagaagccgcccgcggacctgcggcccgacgaggaagttttctactgtaaagtcaccaacgagatcttccgccactacgatgacttttttgaacgaaccattctgtgcaacagccttgtgtggagttgtgctgtgacgggtagacctggactgacgtatcaggaagcacttgagtcagaaaaaaaagcaagacagaatcttcagagttttccagaaccactaattattccagttttatacttgaccagccttacccatcgttcgcgcttacatgaaatttgtgatgatatctttgcatatgtcaaggatcgatattttgtcgaagaaactgtggaagtcattaggaacaatggtgcaaggttgcagtgtaggattttggaagtcctccctccatcacatcaaaatggttttgctaatggacatgttaacagtgtggatggagaaactattatcatcagtgatagtgatgattcagaaacacaaagctgttcttttcaaaatgggaagaaaaaagatgcaattgatcccttactattcaagtataaagtgcaacccactaaaaaagaattacatgagtctgctattgttaaagcaacacaaatcagccggagaaaacacctattttctcgtgataaactaaagctttttctgaagcaacactgtgaaccacaagatggagtcattaaaataaaggcatcatctctttcaacgtataaaatagcagaacaagatttttcttatttcttccctgatgatccacccacatttatcttcagtcctgctaacagacgaagagggagacctcccaaacgaatacatattagtcaagaggacaatgttgctaataaacagactcttgcaagttataggagcaaagctactaaagaaagagataaacttttgaaacaagaagaaatgaagtcactggcttttgaaaaggctaaattaaaaagagaaaaagcagatgccctagaagcgaagaaaaaagaaaaagaagataaagagaaaaagagggaagaattgaaaaaaattgttgaagaagagagactaaagaaaaaagaagaaaaagagaggcttaaagtagaaagagaaaaggaaagagagaagttacgtgaagaaaagcgaaagtatgtggaatacttaaaacagtggagtaaacctagagaagatatggaatgtgatgaccttaaggaacttccagaaccaacaccagtgaaaactagactacctcctgaaatctttggtgatgctctgatggttttggagttccttaatgcatttggggaactttttgatcttcaagatgagtttcctgatggagtaaccctagaagtattagaggaagctcttgtaggaaatgacagtgaaggcccactgtgtgaattgctttttttcttcctgactgcaatcttccaggcaatagctgaagaagaagaggaagtagccaaagagcaactaactgatgctgacaccaaaggctgcagtttgaaaagtttggatcttgatagctgcactctttcagaaatcctcagactgcacatcttagcttcaggtgctgatgtaacatcagcaaatgcaaagtatagatatcaaaaacgaggaggatttgatgctacagatgatgcttgtatggagcttcgtttgagcaatcccagtctagtgaagaaactgtcaagcacctcagtgtatgatttgacaccaggagaaaaaatgaagatactccatgctctctgtggaaagctactgaccctagtttcaactagggattttattgaagattatgttgatatattacgacaggcaaagcaggagttccgggaattaaaagcagaacaacatcgaaaagagagggaagaagcagctgccagaattcgtaaaaggaaggaagaaaaacttaaggagcaagaacaaaaaatgaaagagaaacaagaaaaactgaaagaagatgagcaaagaaattcaacggcagatatatctattggggaggaagaaagggaagattttgatactagcattgagagcaaagacacagagcaaaaggaattagatcaagatatggtcactgaagatgaagatgacccaggatcacataaaagaggcagaagggggaaaagaggacaaaatggatttaaagaatttacaaggcaagaacagatcaactgtgtaacaagagagcctcttactgctgatgaggaagaagcattaaaacaggaacaccaacgaaaagagaaagagctcttagaaaaaatccaaagtgccatagcctgtaccaatatctttcccttgggtcgcgaccgcatgtatagacgatactggattttcccttctattcctggactctttattgaagaggattattctggtcttactgaagacatgctgttgcctagaccttcatcatttcagaataatgtacagtctcaagatcctcaggtatccactaaaactggagagcctttgatgtctgaatctacctccaacattgaccaaggtccacgtgaccattctgtgcagctgccaaaaccagtgcataagccaaatcggtggtgcttttacagttcttgtgaacagctagaccagcttattgaagctcttaattctagaggacatagagaaagtgccttaaaagaaactttgttacaagagaaaagcagaatatgtgcacagctagcccgtttttctgaagagaaatttcatttttcagacaaacctcagcctgatagcaaaccaacatatagtcggggaagatcttccaatgcatatgatccatctcagatgtgtgcagaaaagcaacttgaactaaggctgagagattttcttttagatattgaagatagaatctaccaaggaacattaggagccatcaaggttacagatcgacatatctggagatcagcattagaaagtggacggtatgagctgttaagtgaggaaaacaaggaaaatgggataattaaaactgtgaatgaagacgtagaagagatggaaattgatgaacaaacaaaggtcatagtaaaagacagacttttggggataaaaacagaaactccaagtactgtatcaacaaatgcaagtacaccacaatcagtgagcagtgtggttcattatctggcaatggcactctttcaaatagagcagggcattgagcggcgttttctgaaagctccacttgatgccagtgacagtgggcgttcttataaaacagttctggaccgttggagagagtctctcctttcttctgctagtctatcccaagtttttcttcacctatccaccttggatcgtagcgtgatatggtctaaatctatactgaatgcgcgttgcaagatatgtcgaaagaaaggcgatgctgaaaacatggttctttgtgatggctgtgataggggtcatcatacctactgtgttcgaccaaagctcaagactgtgcctgaaggagactggttttgtccagaatgtcgaccaaagcaacgttctagaagactctcctctagacagagaccatccttggaaagtgatgaagatgtggaagacagtatgggaggtgaggatgatgaagttgatggcgatgaagaagaaggtcaaagtgaggaggaagagtatgaggtagaacaagatgaagatgactctcaagaagaggaagaagtcagcctacccaaacgaggaagaccacaagttagattgccagttaaaacaagagggaaacttagctcttctttctcaagtcgtggccaacaacaagaacctggaagatacccttcaaggagtcagcagagcacacccaaaacaactgtttcttctaaaactggtagaagcctaagaaagataaactctgctcctcctacagaaacaaaatctttaagaattgccagtcgttctactcgccacagtcatggcccactgcaagcagatgtatttgtggaattgcttagtcctcgtagaaaacgcagaggcaggaaaagtgctaataatacaccagaaaatagtcccaacttccctaacttcagagtcattgccacaaagtcaagtgaacagtcaagatctgtaaatattgcttcaaaactttctctccaagagagtgaatccaaaagaagatgcagaaaaagacaatctccagagccatcgcctgtgacactgggtcgaaggagttctggccgacagggaggagttcatgaattgtctgcttttgaacaacttgttgtagaattggtacgacatgatgacagctggccttttttgaaacttgtttctaaaatccaggtcccagactactatgacatcatcaaaaagcccattgccttaaatataattcgtgaaaaagtgaataagtgtgaatataaattagcatctgagtttattgatgacattgagttaatgttttcgaactgctttgaatacaaccctcgtaacacaagtgaagcaaaagctggaactaggcttcaagcattttttcatattcaggctcaaaagcttggactccacgtcacacccagtaatgtggaccaagttagcacaccaccggctgcgaaaaagtcacgaatctgactttgtccttctaaaggatatatttgaagaaaaacaaattgttcatgaaaatggaacattaaatcatgctgtataaagcaataacaattgattgaccacatgaaagtgtggcctgcactatattctcaattttaatattaagcactcaggagaatgtaggaaagatatcctttgctacagttttgttcagtatctaataagtttgatagatgtattggatacagtactggtttacagaggtttttgtacatttttgagatcattcatgtgtccagagatcttggaaaatattttttcacccacgatttattttgttattgatgatttttttttaaagtggtggtattaagggagagttatctacatggatgagtcttccgctatagcacagtttagaaaaggtgtttatgtcttaattaattgtttgagtacattctttcaacactacacatgaatgaatccaatcttataaccttgaagtgctgtaccagtgctggctgcaggtattaagtccaagtttattaactagatatttatttagtattgagagtaatttgtgaatttgttttgtatttataaaatttatacctgaaaaatgttccttaatgttttaaaccttttactgtgtttttattcctctaacttccttaatgatcaatcaaaaaaagtaacaccctccctttttcctgacagttctttcagctttacagaactgtattataagtttctatgtataactttttaactgtacaaataaaataacattttttcaaataa

SEQ ID NO: 112175 - DNA, 6010 bp, Homo sapiens
  Payload ID: 1972
  Gene Symbol: BAZ1A
  Gene Name: bromodomain adjacent to zinc finger domain, 1A
  Uniprot ID: Q9NRL2
  ENST ID: ENST00000360310
  CDS Start-End: 569-5239
cttttcccatcgtgtagtcaagagtctgtgccagacttgaaggctttactttgttagccatgtgtttatgaacccccagcgctttccctagatcttttggctgataatctcaaacatggaggatgcttctgaatcttcacgaggggttgctccattaattaataatgtagttctcccaggctctccgctgtctcttcctgtatcagtgacaggctgtaaaagtcatcgagtagccaataaaaaggtagaagcgaggagtgaaaagctcctcccaacagctcttcctccttcagagccgaaagtagatcagaaacttcccaggagctccgagaggcggggaagtggcggtgggacgcaattccccgcgcggagtcgggcagtggcagcgggagaagcggcagccaggggcgcggcggggccggagagaggcggtcccctgggaggacggggtctcccctcgttgcctttgtagtggagaaggtggacaagtggcagtcggcgtgatcgcagggaagcggggccggcgcgggcggccgagggtccaggcgagcccgcgggcggacgggagatgccgctgctacaccgaaagccgtttgtgagacagaagccgcccgcggacctgcggcccgacgaggaagttttctactgtaaagtcaccaacgagatcttccgccactacgatgacttttttgaacgaaccattctgtgcaacagccttgtgtggagttgtgctgtgacgggtagacctggactgacgtatcaggaagcacttgagtcagaaaaaaaagcaagacagaatcttcagagttttccagaaccactaattattccagttttatacttgaccagccttacccatcgttcgcgcttacatgaaatttgtgatgatatctttgcatatgtcaaggatcgatattttgtcgaagaaactgtggaagtcattaggaacaatggtgcaaggttgcagtgtaggattttggaagtcctccctccatcacatcaaaatggttttgctaatggacatgttaacagtgtggatggagaaactattatcatcagtgatagtgatgattcagaaacacaaagctgttcttttcaaaatgggaagaaaaaagatgcaattgatcccttactattcaagtataaagtgcaacccactaaaaaagaattacatgagtctgctattgttaaagcaacacaaatcagccggagaaaacacctattttctcgtgataaactaaagctttttctgaagcaacactgtgaaccacaagatggagtcattaaaataaaggcatcatctctttcaacgtataaaatagcagaacaagatttttcttatttcttccctgatgatccacccacatttatcttcagtcctgctaacagacgaagagggagacctcccaaacgaatacatattagtcaagaggacaatgttgctaataaacagactcttgcaagttataggagcaaagctactaaagaaagagataaacttttgaaacaagaagaaatgaagtcactggcttttgaaaaggctaaattaaaaagagaaaaagcagatgccctagaagcgaagaaaaaagaaaaagaagataaagagaaaaagagggaagaattgaaaaaaattgttgaagaagagagactaaagaaaaaagaagaaaaagagaggcttaaagtagaaagagaaaaggaaagagagaagttacgtgaagaaaagcgaaagtatgtggaatacttaaaacagtggagtaaacctagagaagatatggaatgtgatgaccttaaggaacttccagaaccaacaccagtgaaaactagactacctcctgaaatctttggtgatgctctgatggttttggagttccttaatgcatttggggaactttttgatcttcaagatgagtttcctgatggagtaaccctagaagtattagaggaagctcttgtaggaaatgacagtgaaggcccactgtgtgaattgctttttttcttcctgactgcaatcttccaggcaatagctgaagaagaagaggaagtagccaaagagcaactaactgatgctgacaccaaagatttaacagaggctttggatgaagatgcagaccccacaaaatctgcactgtctgcagttgcatctttggcagctgcatggccacagttacaccagggctgcagtttgaaaagtttggatcttgatagctgcactctttcagaaatcctcagactgcacatcttagcttcaggtgctgatgtaacatcagcaaatgcaaagtatagatatcaaaaacgaggaggatttgatgctacagatgatgcttgtatggagcttcgtttgagcaatcccagtctagtgaagaaactgtcaagcacctcagtgtatgatttgacaccaggagaaaaaatgaagatactccatgctctctgtggaaagctactgaccctagtttcaactagggattttattgaagattatgttgatatattacgacaggcaaagcaggagttccgggaattaaaagcagaacaacatcgaaaagagagggaagaagcagctgccagaattcgtaaaaggaaggaagaaaaacttaaggagcaagaacaaaaaatgaaagagaaacaagaaaaactgaaagaagatgagcaaagaaattcaacggcagatatatctattggggaggaagaaagggaagattttgatactagcattgagagcaaagacacagagcaaaaggaattagatcaagatatggtcactgaagatgaagatgacccaggatcacataaaagaggcagaagggggaaaagaggacaaaatggatttaaagaatttacaaggcaagaacagatcaactgtgtaacaagagagcctcttactgctgatgaggaagaagcattaaaacaggaacaccaacgaaaagagaaagagctcttagaaaaaatccaaagtgccatagcctgtaccaatatctttcccttgggtcgcgaccgcatgtatagacgatactggattttcccttctattcctggactctttattgaagaggattattctggtcttactgaagacatgctgttgcctagaccttcatcatttcagaataatgtacagtctcaagatcctcaggtatccactaaaactggagagcctttgatgtctgaatctacctccaacattgaccaaggtccacgtgaccattctgtgcagctgccaaaaccagtgcataagccaaatcggtggtgcttttacagttcttgtgaacagctagaccagcttattgaagctcttaattctagaggacatagagaaagtgccttaaaagaaactttgttacaagagaaaagcagaatatgtgcacagctagcccgtttttctgaagagaaatttcatttttcagacaaacctcagcctgatagcaaaccaacatatagtcggggaagatcttccaatgcatatgatccatctcagatgtgtgcagaaaagcaacttgaactaaggctgagagattttcttttagatattgaagatagaatctaccaaggaacattaggagccatcaaggttacagatcgacatatctggagatcagcattagaaagtggacggtatgagctgttaagtgaggaaaacaaggaaaatgggataattaaaactgtgaatgaagacgtagaagagatggaaattgatgaacaaacaaaggtcatagtaaaagacagacttttggggataaaaacagaaactccaagtactgtatcaacaaatgcaagtacaccacaatcagtgagcagtgtggttcattatctggcaatggcactctttcaaatagagcagggcattgagcggcgttttctgaaagctccacttgatgccagtgacagtgggcgttcttataaaacagttctggaccgttggagagagtctctcctttcttctgctagtctatcccaagtttttcttcacctatccaccttggatcgtagcgtgatatggtctaaatctatactgaatgcgcgttgcaagatatgtcgaaagaaaggcgatgctgaaaacatggttctttgtgatggctgtgataggggtcatcatacctactgtgttcgaccaaagctcaagactgtgcctgaaggagactggttttgtccagaatgtcgaccaaagcaacgttctagaagactctcctctagacagagaccatccttggaaagtgatgaagatgtggaagacagtatgggaggtgaggatgatgaagttgatggcgatgaagaagaaggtcaaagtgaggaggaagagtatgaggtagaacaagatgaagatgactctcaagaagaggaagaagtcagcctacccaaacgaggaagaccacaagttagattgccagttaaaacaagagggaaacttagctcttctttctcaagtcgtggccaacaacaagaacctggaagatacccttcaaggagtcagcagagcacacccaaaacaactgtttcttctaaaactggtagaagcctaagaaagataaactctgctcctcctacagaaacaaaatctttaagaattgccagtcgttctactcgccacagtcatggcccactgcaagcagatgtatttgtggaattgcttagtcctcgtagaaaacgcagaggcaggaaaagtgctaataatacaccagaaaatagtcccaacttccctaacttcagagtcattgccacaaagtcaagtgaacagtcaagatctgtaaatattgcttcaaaactttctctccaagagagtgaatccaaaagaagatgcagaaaaagacaatctccagagccatcgcctgtgacactgggtcgaaggagttctggccgacagggaggagttcatgaattgtctgcttttgaacaacttgttgtagaattggtacgacatgatgacagctggccttttttgaaacttgtttctaaaatccaggtcccagactactatgacatcatcaaaaagcccattgccttaaatataattcgtgaaaaagtgaataagtgtgaatataaattagcatctgagtttattgatgacattgagttaatgttttcgaactgctttgaatacaaccctcgtaacacaagtgaagcaaaagctggaactaggcttcaagcattttttcatattcaggctcaaaagcttggactccacgtcacacccagtaatgtggaccaagttagcacaccaccggctgcgaaaaagtcacgaatctgactttgtccttctaaaggatatatttgaagaaaaacaaattgttcatgaaaatggaacattaaatcatgctgtataaagcaataacaattgattgaccacatgaaagtgtggcctgcactatattctcaattttaatattaagcactcaggagaatgtaggaaagatatcctttgctacagttttgttcagtatctaataagtttgatagatgtattggatacagtactggtttacagaggtttttgtacatttttgagatcattcatgtgtccagagatcttggaaaatattttttcacccacgatttattttgttattgatgatttttttttaaagtggtggtattaagggagagttatctacatggatgagtcttccgctatagcacagtttagaaaaggtgtttatgtcttaattaattgtttgagtacattctttcaacactacacatgaatgaatccaatcttataaccttgaagtgctgtaccagtgctggctgcaggtattaagtccaagtttattaactagatatttatttagtattgagagtaatttgtgaatttgttttgtatttataaaatttatacctgaaaaatgttccttaatgttttaaaccttttactgtgtttttattcctctaacttccttaatgatcaatcaaaaaaagtaacaccctccctttttcctgacagttctttcagctttacagaactgtattataagtttctatgtataactttttaactgtacaaataaaataacattttttc

SEQ ID NO: 112176 - DNA, 5775 bp, Homo sapiens
  Payload ID: 1972
  Gene Symbol: BAZ1A
  Gene Name: bromodomain adjacent to zinc finger domain, 1A
  Uniprot ID: Q9NRL2
  ENST ID: ENST00000382422
  CDS Start-End: 329-4999
cccgcactgccccccgcggcggggcgtcctgccccattgtgaggcggcggcaggacgagaggaggtagggcgcgctcggggggcaggggcggcggcggctccgctcgctcgacacccgggcagcggcaggaacgaactcggctccggtagcggccgcggcgcgtcagtcacacaaaaggcagccgagcttctcccagcgcgcggaccggcccacgctgccgccgagggctccccaccttaccggctttcctttccctccaattttgatagggaagcggggccggcgcgggcggccgagggtccaggcgagcccgcgggcggacgggagatgccgctgctacaccgaaagccgtttgtgagacagaagccgcccgcggacctgcggcccgacgaggaagttttctactgtaaagtcaccaacgagatcttccgccactacgatgacttttttgaacgaaccattctgtgcaacagccttgtgtggagttgtgctgtgacgggtagacctggactgacgtatcaggaagcacttgagtcagaaaaaaaagcaagacagaatcttcagagttttccagaaccactaattattccagttttatacttgaccagccttacccatcgttcgcgcttacatgaaatttgtgatgatatctttgcatatgtcaaggatcgatattttgtcgaagaaactgtggaagtcattaggaacaatggtgcaaggttgcagtgtaggattttggaagtcctccctccatcacatcaaaatggttttgctaatggacatgttaacagtgtggatggagaaactattatcatcagtgatagtgatgattcagaaacacaaagctgttcttttcaaaatgggaagaaaaaagatgcaattgatcccttactattcaagtataaagtgcaacccactaaaaaagaattacatgagtctgctattgttaaagcaacacaaatcagccggagaaaacacctattttctcgtgataaactaaagctttttctgaagcaacactgtgaaccacaagatggagtcattaaaataaaggcatcatctctttcaacgtataaaatagcagaacaagatttttcttatttcttccctgatgatccacccacatttatcttcagtcctgctaacagacgaagagggagacctcccaaacgaatacatattagtcaagaggacaatgttgctaataaacagactcttgcaagttataggagcaaagctactaaagaaagagataaacttttgaaacaagaagaaatgaagtcactggcttttgaaaaggctaaattaaaaagagaaaaagcagatgccctagaagcgaagaaaaaagaaaaagaagataaagagaaaaagagggaagaattgaaaaaaattgttgaagaagagagactaaagaaaaaagaagaaaaagagaggcttaaagtagaaagagaaaaggaaagagagaagttacgtgaagaaaagcgaaagtatgtggaatacttaaaacagtggagtaaacctagagaagatatggaatgtgatgaccttaaggaacttccagaaccaacaccagtgaaaactagactacctcctgaaatctttggtgatgctctgatggttttggagttccttaatgcatttggggaactttttgatcttcaagatgagtttcctgatggagtaaccctagaagtattagaggaagctcttgtaggaaatgacagtgaaggcccactgtgtgaattgctttttttcttcctgactgcaatcttccaggcaatagctgaagaagaagaggaagtagccaaagagcaactaactgatgctgacaccaaagatttaacagaggctttggatgaagatgcagaccccacaaaatctgcactgtctgcagttgcatctttggcagctgcatggccacagttacaccagggctgcagtttgaaaagtttggatcttgatagctgcactctttcagaaatcctcagactgcacatcttagcttcaggtgctgatgtaacatcagcaaatgcaaagtatagatatcaaaaacgaggaggatttgatgctacagatgatgcttgtatggagcttcgtttgagcaatcccagtctagtgaagaaactgtcaagcacctcagtgtatgatttgacaccaggagaaaaaatgaagatactccatgctctctgtggaaagctactgaccctagtttcaactagggattttattgaagattatgttgatatattacgacaggcaaagcaggagttccgggaattaaaagcagaacaacatcgaaaagagagggaagaagcagctgccagaattcgtaaaaggaaggaagaaaaacttaaggagcaagaacaaaaaatgaaagagaaacaagaaaaactgaaagaagatgagcaaagaaattcaacggcagatatatctattggggaggaagaaagggaagattttgatactagcattgagagcaaagacacagagcaaaaggaattagatcaagatatggtcactgaagatgaagatgacccaggatcacataaaagaggcagaagggggaaaagaggacaaaatggatttaaagaatttacaaggcaagaacagatcaactgtgtaacaagagagcctcttactgctgatgaggaagaagcattaaaacaggaacaccaacgaaaagagaaagagctcttagaaaaaatccaaagtgccatagcctgtaccaatatctttcccttgggtcgcgaccgcatgtatagacgatactggattttcccttctattcctggactctttattgaagaggattattctggtcttactgaagacatgctgttgcctagaccttcatcatttcagaataatgtacagtctcaagatcctcaggtatccactaaaactggagagcctttgatgtctgaatctacctccaacattgaccaaggtccacgtgaccattctgtgcagctgccaaaaccagtgcataagccaaatcggtggtgcttttacagttcttgtgaacagctagaccagcttattgaagctcttaattctagaggacatagagaaagtgccttaaaagaaactttgttacaagagaaaagcagaatatgtgcacagctagcccgtttttctgaagagaaatttcatttttcagacaaacctcagcctgatagcaaaccaacatatagtcggggaagatcttccaatgcatatgatccatctcagatgtgtgcagaaaagcaacttgaactaaggctgagagattttcttttagatattgaagatagaatctaccaaggaacattaggagccatcaaggttacagatcgacatatctggagatcagcattagaaagtggacggtatgagctgttaagtgaggaaaacaaggaaaatgggataattaaaactgtgaatgaagacgtagaagagatggaaattgatgaacaaacaaaggtcatagtaaaagacagacttttggggataaaaacagaaactccaagtactgtatcaacaaatgcaagtacaccacaatcagtgagcagtgtggttcattatctggcaatggcactctttcaaatagagcagggcattgagcggcgttttctgaaagctccacttgatgccagtgacagtgggcgttcttataaaacagttctggaccgttggagagagtctctcctttcttctgctagtctatcccaagtttttcttcacctatccaccttggatcgtagcgtgatatggtctaaatctatactgaatgcgcgttgcaagatatgtcgaaagaaaggcgatgctgaaaacatggttctttgtgatggctgtgataggggtcatcatacctactgtgttcgaccaaagctcaagactgtgcctgaaggagactggttttgtccagaatgtcgaccaaagcaacgttctagaagactctcctctagacagagaccatccttggaaagtgatgaagatgtggaagacagtatgggaggtgaggatgatgaagttgatggcgatgaagaagaaggtcaaagtgaggaggaagagtatgaggtagaacaagatgaagatgactctcaagaagaggaagaagtcagcctacccaaacgaggaagaccacaagttagattgccagttaaaacaagagggaaacttagctcttctttctcaagtcgtggccaacaacaagaacctggaagatacccttcaaggagtcagcagagcacacccaaaacaactgtttcttctaaaactggtagaagcctaagaaagataaactctgctcctcctacagaaacaaaatctttaagaattgccagtcgttctactcgccacagtcatggcccactgcaagcagatgtatttgtggaattgcttagtcctcgtagaaaacgcagaggcaggaaaagtgctaataatacaccagaaaatagtcccaacttccctaacttcagagtcattgccacaaagtcaagtgaacagtcaagatctgtaaatattgcttcaaaactttctctccaagagagtgaatccaaaagaagatgcagaaaaagacaatctccagagccatcgcctgtgacactgggtcgaaggagttctggccgacagggaggagttcatgaattgtctgcttttgaacaacttgttgtagaattggtacgacatgatgacagctggccttttttgaaacttgtttctaaaatccaggtcccagactactatgacatcatcaaaaagcccattgccttaaatataattcgtgaaaaagtgaataagtgtgaatataaattagcatctgagtttattgatgacattgagttaatgttttcgaactgctttgaatacaaccctcgtaacacaagtgaagcaaaagctggaactaggcttcaagcattttttcatattcaggctcaaaagcttggactccacgtcacacccagtaatgtggaccaagttagcacaccaccggctgcgaaaaagtcacgaatctgactttgtccttctaaaggatatatttgaagaaaaacaaattgttcatgaaaatggaacattaaatcatgctgtataaagcaataacaattgattgaccacatgaaagtgtggcctgcactatattctcaattttaatattaagcactcaggagaatgtaggaaagatatcctttgctacagttttgttcagtatctaataagtttgatagatgtattggatacagtactggtttacagaggtttttgtacatttttgagatcattcatgtgtccagagatcttggaaaatattttttcacccacgatttattttgttattgatgatttttttttaaagtggtggtattaagggagagttatctacatggatgagtcttccgctatagcacagtttagaaaaggtgtttatgtcttaattaattgtttgagtacattctttcaacactacacatgaatgaatccaatcttataaccttgaagtgctgtaccagtgctggctgcaggtattaagtccaagtttattaactagatatttatttagtattgagagtaatttgtgaatttgttttgtatttataaaatttatacctgaaaaatgttccttaatgttttaaaccttttactgtgtttttattcctctaacttccttaatgatcaatcaaaaaaagtaacaccctccctttttcctgacagttctttcagctttacagaactgtattataagtttctatgtataactttttaactgtacaaataaaataacattttttcaaata

SEQ ID NO: 112177 - DNA, 579 bp, Homo sapiens
  Payload ID: 1972
  Gene Symbol: BAZ1A
  Gene Name: bromodomain adjacent to zinc finger domain, 1A
  ENST ID: ENST00000555331
  CDS Start-End: 1-37
cagaaaaagacaatctccaggtcccagactactatgacatcatcaaaaagcccattgccttaaatataattcgtgaaaaagtgaataagtgtgaatataaattagcatctgagtttattgatgacattgagttaatgttttcgaactgctttgaatacaaccctcgtaacacaagtgaagcaaaagctggaactaggcttcaagcattttttcatattcaggctcaaaagcttggactccacgtcacacccagtaatgtggaccaagttagcacaccaccggctgcgaaaaagtcacgaatctgactttgtccttctaaaggatatatttgaagaaaaacaaattgttcatgaaaatggaacattaaatcatgctgtataaagcaataacaattgattgaccacatgaaagtgtggcctgcactatattctcaattttaatattaagcactcaggagaatgtaggaaagatatcctttgctacagttttgttcagtatctaataagtttgatagatgtattggatacagtactggtttacagaggtttttgtacatttttgagatcattcatgtgtcca

SEQ ID NO: 112178 - DNA, 540 bp, Homo sapiens
  Payload ID: 1972
  Gene Symbol: BAZ1A
  Gene Name: bromodomain adjacent to zinc finger domain, 1A
  ENST ID: ENST00000554865
  CDS Start-End: 1-229
acttttggggataaaaacagaaactccaagtactgtatcaacaaatgcaagtacaccacaatcagtgagcagtgtggttcattatctggcaatggcactctttcaaatagagcagggcattgagcggcgttttctgaaagctccacttggtaaaacagaaattaataaggatcaaaagggagatagaaaaaaaaaaggacaagaaaaagagagaggaagatctatctagtgtgagagatgatgccagtgacagtgggcgttcttataaaacagttctggaccgttggagagagtctctcctttcttctgctagtctatcccaagtttttcttcacctatccaccttggatcgtagcgtgatatggtctaaatctatactgaatgcgcgttgcaagatatgtcgaaagaaaggcgatgctgaaaacatggttctttgtgatggctgtgataggggtcatcatacctactgtgttcgaccaaagctcaagactgtgcctgaaggagactggttttgtccagaatgtcgaccaaagcaacgtt

SEQ ID NO: 112179 - DNA, 445 bp, Homo sapiens
  Payload ID: 1972
  Gene Symbol: BAZ1A
  Gene Name: bromodomain adjacent to zinc finger domain, 1A
  ENST ID: ENST00000553573
  CDS Start-End: 1-233
catatgtcaaggatcgatattttgtcgaagaaactgtggaagtcattaggaacaatggtgcaaggttgcagtgtaggattttggaagtcctccctccatcacatcaaaatggttttgctaatggacatgttaacagtgtggatggagaaactattatcatcagtgatagtgatgattcagaaacacaaagctgttcttttcaaaatgggtttcccctgttaacagccaaataatgaagttgatctacaatcacaaattctctggaatctgaactaaattgatagacagtcctgactcagacagtcactagttttccatctgattttagtagccagatgtgccaggtataggaagaaaaaagatgcaattgatcccttactattcaagtataaagtgcaacccactaaaaaagaattacatgagtctgctattgttaaagcaacac

SEQ ID NO: 112180 - DNA, 673 bp, Homo sapiens
  Payload ID: 1972
  Gene Symbol: BAZ1A
  Gene Name: bromodomain adjacent to zinc finger domain, 1A
  ENST ID: ENST00000556314
  CDS Start-End: 1-656
atagctgcactctttcagaaatcctcagactgcacatcttagcttcaggtgctgatgtaacatcagcaaatgcaaagtatagatatcaaaaacgaggaggatttgatgctacagatgatgcttgtatggagcttcgtttgagcaatcccagtctagtgaagaaactgtcaagcacctcagtgtatgatttgacaccaggagaaaaaatgaagatactccatgctctctgtggaaagctactgaccctagtttcaactagggattttattgaagattatgttgatatattacgacaggcaaagcaggagttccgggaattaaaagcagaacaacatcgaaaagagagggaagaagcagctgccagaattcgtaaaaggaaggaagaaaaacttaaggagcaagaacaaaaaatgaaagagaaacaagaaaaactgaaagaagatgagcaaagaaattcaacggcagatatatctattggggaggaagaaagggaagattttgatactagcattgagagcaaagacacagagcaaaaggaattagatcaagatatggtcactgaagatgaagatgacccaggatcacataaaagaggcagaaggggtaatactgaaatttctttagggcattcttgtgtatttgtttttaaccaataaagcactttattaattca

SEQ ID NO: 112181 - DNA, 6102 bp, Homo sapiens
  Payload ID: 1973
  Gene Symbol: BAZ1B
  Gene Name: bromodomain adjacent to zinc finger domain, 1B
  Uniprot ID: Q9UIG0
  ENST ID: ENST00000339594
  CDS Start-End: 340-4791
cgggggaggaggggaatctcccgccatttttcaataatttcctccggtgctgctgaggaggagtcgtgactgccggccgccgggacccgaagcggaggtcggcggggggctgctgggaggcgcggcggtgtgcgcgggagctctgcgccgtggcgttccgctccatgactgtcgcgcggccgcgccggcggtgagggagccggagttcgcgccgccctctcacccctcccttcccccaccccacccccgggcgcctggcgctcgctccgggccgcggggcctagtgctgcgccgcggggccggccccagcagccgccagtccccaccgccgccgccgcgatggcgccgctcctgggccgcaagcccttcccgctggtgaagccgttgcccggagaggagccgctcttcaccatcccgcacactcaggaggccttccgcacccgggaagagtatgaagcccgcttggaaaggtacagtgagcgcatttggacgtgcaagagtactggaagcagtcagctaacacacaaggaagcctgggaggaagaacaggaagttgctgagcttttgaaggaggagtttcctgcctggtatgagaagcttgttctggaaatggttcaccataacacagcctccttagagaagttagtagatactgcttggttggagatcatgaccaaatatgctgtgggagaagagtgtgacttcgaggttgggaaggagaaaatgctcaaggtgaagattgtgaagattcatcctttggagaaagtggatgaagaggccactgagaagaaatctgatggtgcctgtgattctccatcaagtgacaaagagaactccagtcagattgctcaggaccatcagaagaaggagacagttgtgaaagaggatgaaggaaggagagagagtattaatgacagagcacgtagatcgccacgaaaacttcctacttcattaaaaaaaggagaaaggaaatgggctcctccaaaatttctgcctcacaaatatgatgtgaaactacaaaatgaagataagatcatcagtaacgtgccagcagacagcttgattcgtacagagcgcccaccaaataaggagatagttcgatactttatacggcataatgcattacgagctggtactggtgaaaatgcaccttgggtcgtagaagatgaattggtgaagaaatactctctgcccagcaagttcagtgactttttacttgatccatacaagtatatgactctcaacccttctactaagaggaagaatactggatccccagacaggaagccctcaaagaaatccaagacagacaactcttctcttagttcaccactaaatcctaagttatggtgtcacgtacacttgaagaagtcattgagtggctcgccactcaaagtgaagaactcaaagaattccaaatctcctgaagaacatctagaagaaatgatgaagatgatgtcgcccaataagctgcacactaactttcacattcctaaaaaaggcccacctgccaagaaaccagggaagcacagtgacaagcctttgaaggcaaagggcagaagcaaaggcatcctgaatggacagaaatccacagggaattccaaatctcccaaaaaaggactgaagactcctaaaaccaaaatgaagcagatgactttgttggatatggccaaaggcacgcagaagatgacacgagccccacggaattctgggggtacacctaggacctctagtaaacctcataaacatctgcctcctgcagccctacacctcattgcatactacaaagaaaacaaagacagggaggacaagaggagcgccctgtcctgtgttatctccaaaacagctcgtcttctctctagtgaagatagagctcgtctcccagaagaattgcgaagtcttgttcaaaaacgctatgaacttctagagcacaaaaagaggtgggcttctatgtctgaagaacaacggaaagaatatttgaaaaagaaacgggaggagctgaaaaagaagttgaaggaaaaagccaaagaacgaagagagaaagaaatgcttgagagattagaaaaacagaagcggtatgaggaccaagagttaactggcaaaaaccttccagcattcagattggtggatacccctgaagggctgcccaacacgctgtttggggatgtggccatggtggtggaattcttgagctgttattctgggctacttttaccagatgctcagtatcctattactgctgtgtcccttatggaagccttgagtgcagataagggtggctttttataccttaacagggtgttggtcatcctcttacagaccctcctacaagatgagatagcagaagactatggtgaattgggaatgaagctgtcggaaatccccttgactctgcattctgtttcagagctggtgcggctctgcttgcgcagatctgatgttcaggaggaaagcgagggctcagacacagatgacaataaagattcagctgcatttgaggataatgaggtacaagatgagttcctagaaaagctggagacctctgaattttttgagctgacgtcagaggagaagctacagatcttgacagcactgtgccaccggatcctcatgacatactcagtgcaagaccacatggagaccagacagcagatgtctgcagagttgtggaaggaacggcttgctgtgttgaaggaagaaaatgataagaagagagcagagaaacagaaacggaaagaaatggaagccaaaaataaagaaaatggaaaagttgagaatgggttaggcaaaactgataggaaaaaagaaattgtgaagtttgagccccaagtagatacagaagctgaagacatgattagtgctgtgaagagcagaaggttgcttgccattcaagctaagaaggaacgggaaatccaggaaagagaaatgaaagtgaaactggaacgccaagctgaagaagaacgaatacggaagcacaaagcagctgctgagaaagctttccaggaagggattgccaaggccaaactagtcatgcgcaggactcctattggcacagatcgaaaccataatagatactggctcttctcagatgaagttccaggattattcattgaaaaaggctgggtacatgacagcattgactaccgattcaaccatcactgcaaagaccacacagtctctggtgatgaggattactgtcctcgcagtaagaaagcaaacttaggtaaaaatgcaagcatgaacacacaacatggaacagcaacagaagttgctgtagagacaaccacacccaaacaaggacagaacctatggtttttatgtgatagtcaaaaggagctggatgagttgctaaactgtcttcaccctcagggaataagagaaagtcaacttaaagagagactagagaagaggtaccaggacattattcactctattcatctagcacggaagccaaatttgggtctaaaatcttgtgatggcaaccaggagcttttaaacttccttcgtagtgatctcattgaagttgcaacaaggttacaaaaaggaggacttggatatgtggaagaaacatcagaatttgaagcccgggtcatttcattagagaaattgaaggattttggtgagtgtgtgattgcccttcaggccagtgtcataaagaaatttctccaaggcttcatggctcccaagcaaaagagaagaaaactccaaagtgaagattcagcaaaaactgaggaagtggatgaagagaagaaaatggtagaggaagcaaaggttgcatctgcactggagaaatggaagacagcaatccgggaagctcagactttctccaggatgcacgtgctgcttgggatgcttgatgcctgtatcaagtgggatatgtccgcagaaaatgctaggtgcaaagtttgtcgaaagaaaggtgaggatgacaaattgatcttgtgtgatgagtgtaataaagccttccacctgttttgtctgaggccggccctctatgaagtaccagatggtgagtggcagtgcccagcttgccagcccgctactgccaggcgcaactcccgtggcaggaactatactgaagagtctgcttctgaggacagtgaagatgatgagagtgatgaagaggaggaggaggaagaagaggaggaggaggaagaagattatgaggtggctggtttgcgattgagacctcgaaagaccatccggggcaagcacagcgtcatcccccctgcagcaaggtcaggccggcgcccgggtaagaagccacactctaccaggaggtctcagcccaaggcaccacctgtggatgatgctgaggtggatgagctggtgcttcagaccaagcggagctcccggaggcaaagcctggagctgcagaagtgtgaagagatcctccacaagatcgtgaagtaccgcttcagctggcccttcagggagcctgtgaccagagatgaggccgaggactactatgatgtgatcacgcaccccatggactttcagacagtgcagaacaaatgttcctgtgggagctaccgctctgtgcaggagtttcttactgacatgaagcaagtgtttaccaatgctgaggtttacaactgccgtggcagccatgtgctaagctgcatggtgaagacagaacagtgtctagtggctctgttgcataaacaccttcctggccacccatatgtccgcaggaagcgcaagaagtttcctgataggcttgctgaagatgaaggggacagtgagccagaggccgttggacagtccaggggacgaagacagaagaagtagagaggcagggccgtggtgacagtatcagtgagtgccatacagaattgtgtattcaccagcatcatgaaacagttgtggtcttttgagttgatcttggcagagtaaagggacgtgtcctggagccattcctgaatctccccttctttgtgacagctcctcccacccccccaaaaaataaaaaaaccacaaaaaacaaaaaaacaaaactaaggcacttcacttagagactggagtcctgcttataatcatgcatataacctttactttgatggatctggccagaggggtgttggagcccagcccacccacataccagtcaagctcttaggggagcagaagaaaagcaggaagaatttaaatgtttaattttttttttaaattgacttttctagttattaaaagttgcttgtttcagcagtgatattgtataaagaacatcttgtaagatactcctgacatcttgctttagcacatgtacagtacagtttctatgataatgtgtttgctctaacttccctggcttctccttcagcccatccactctcctctagagcagttgggttggaggctcattgaggcaagcagcaacattggagggggagcagggcagtgctgtgtctgctgcctcccatgcccgttctgacctcagccttggaactcctcaagaacctgaagattccagtggtcagtgtcggtggggggtgggaggagagagcggcagagaagctctgagagccccttcccccacaacaaatctagctctagttgttatatttaggcaaaactttgtagtcttctttcccttttatgatggattttgataaaagtacaaaacagggtttttcttttttatcacctttgaatttggaaattttgagcacccaagctcttctgtacctatttaaagtccaccaaggggactgcagctcctagaacatgagaatcaagcctcttaattttaaactgcggaatgtggcctctgcttcctccgtcctcctgcccaaggacgacgaggattgctccagggctgctgggtagtttaccgtcccttctataggcatggagttggcactgacatcacagcttcataaccccaccaccgccagcttcccctgcctcctacatccagtctgttcttgttcatagtgagaatcctgtgttcccacttcagtgacacctgaattgtttgttgttgttttttttttttattgtcttcaaagaggaagggccccattaaagggtgaacttgtaataaattggaatttcaaataaacctcatgtacttgtgtttataaagaagaaaccactctg

SEQ ID NO: 112182 - DNA, 5428 bp, Homo sapiens
  Payload ID: 1973
  Gene Symbol: BAZ1B
  Gene Name: bromodomain adjacent to zinc finger domain, 1B
  Uniprot ID: Q9UIG0
  ENST ID: ENST00000404251
  CDS Start-End: 346-4797
cgggcccgggggaggaggggaatctcccgccatttttcaataatttcctccggtgctgctgaggaggagtcgtgactgccggccgccgggacccgaagcggaggtcggcggggggctgctgggaggcgcggcggtgtgcgcgggagctctgcgccgtggcgttccgctccatgactgtcgcgcggccgcgccggcggtgagggagccggagttcgcgccgccctctcacccctcccttcccccaccccacccccgggcgcctggcgctcgctccgggccgcggggcctagtgctgcgccgcggggccggccccagcagccgccagtccccaccgccgccgccgcgatggcgccgctcctgggccgcaagcccttcccgctggtgaagccgttgcccggagaggagccgctcttcaccatcccgcacactcaggaggccttccgcacccgggaagagtatgaagcccgcttggaaaggtacagtgagcgcatttggacgtgcaagagtactggaagcagtcagctaacacacaaggaagcctgggaggaagaacaggaagttgctgagcttttgaaggaggagtttcctgcctggtatgagaagcttgttctggaaatggttcaccataacacagcctccttagagaagttagtagatactgcttggttggagatcatgaccaaatatgctgtgggagaagagtgtgacttcgaggttgggaaggagaaaatgctcaaggtgaagattgtgaagattcatcctttggagaaagtggatgaagaggccactgagaagaaatctgatggtgcctgtgattctccatcaagtgacaaagagaactccagtcagattgctcaggaccatcagaagaaggagacagttgtgaaagaggatgaaggaaggagagagagtattaatgacagagcacgtagatcgccacgaaaacttcctacttcattaaaaaaaggagaaaggaaatgggctcctccaaaatttctgcctcacaaatatgatgtgaaactacaaaatgaagataagatcatcagtaacgtgccagcagacagcttgattcgtacagagcgcccaccaaataaggagatagttcgatactttatacggcataatgcattacgagctggtactggtgaaaatgcaccttgggtcgtagaagatgaattggtgaagaaatactctctgcccagcaagttcagtgactttttacttgatccatacaagtatatgactctcaacccttctactaagaggaagaatactggatccccagacaggaagccctcaaagaaatccaagacagacaactcttctcttagttcaccactaaatcctaagttatggtgtcacgtacacttgaagaagtcattgagtggctcgccactcaaagtgaagaactcaaagaattccaaatctcctgaagaacatctagaagaaatgatgaagatgatgtcgcccaataagctgcacactaactttcacattcctaaaaaaggcccacctgccaagaaaccagggaagcacagtgacaagcctttgaaggcaaagggcagaagcaaaggcatcctgaatggacagaaatccacagggaattccaaatctcccaaaaaaggactgaagactcctaaaaccaaaatgaagcagatgactttgttggatatggccaaaggcacgcagaagatgacacgagccccacggaattctgggggtacacctaggacctctagtaaacctcataaacatctgcctcctgcagccctacacctcattgcatactacaaagaaaacaaagacagggaggacaagaggagcgccctgtcctgtgttatctccaaaacagctcgtcttctctctagtgaagatagagctcgtctcccagaagaattgcgaagtcttgttcaaaaacgctatgaacttctagagcacaaaaagaggtgggcttctatgtctgaagaacaacggaaagaatatttgaaaaagaaacgggaggagctgaaaaagaagttgaaggaaaaagccaaagaacgaagagagaaagaaatgcttgagagattagaaaaacagaagcggtatgaggaccaagagttaactggcaaaaaccttccagcattcagattggtggatacccctgaagggctgcccaacacgctgtttggggatgtggccatggtggtggaattcttgagctgttattctgggctacttttaccagatgctcagtatcctattactgctgtgtcccttatggaagccttgagtgcagataagggtggctttttataccttaacagggtgttggtcatcctcttacagaccctcctacaagatgagatagcagaagactatggtgaattgggaatgaagctgtcggaaatccccttgactctgcattctgtttcagagctggtgcggctctgcttgcgcagatctgatgttcaggaggaaagcgagggctcagacacagatgacaataaagattcagctgcatttgaggataatgaggtacaagatgagttcctagaaaagctggagacctctgaattttttgagctgacgtcagaggagaagctacagatcttgacagcactgtgccaccggatcctcatgacatactcagtgcaagaccacatggagaccagacagcagatgtctgcagagttgtggaaggaacggcttgctgtgttgaaggaagaaaatgataagaagagagcagagaaacagaaacggaaagaaatggaagccaaaaataaagaaaatggaaaagttgagaatgggttaggcaaaactgataggaaaaaagaaattgtgaagtttgagccccaagtagatacagaagctgaagacatgattagtgctgtgaagagcagaaggttgcttgccattcaagctaagaaggaacgggaaatccaggaaagagaaatgaaagtgaaactggaacgccaagctgaagaagaacgaatacggaagcacaaagcagctgctgagaaagctttccaggaagggattgccaaggccaaactagtcatgcgcaggactcctattggcacagatcgaaaccataatagatactggctcttctcagatgaagttccaggattattcattgaaaaaggctgggtacatgacagcattgactaccgattcaaccatcactgcaaagaccacacagtctctggtgatgaggattactgtcctcgcagtaagaaagcaaacttaggtaaaaatgcaagcatgaacacacaacatggaacagcaacagaagttgctgtagagacaaccacacccaaacaaggacagaacctatggtttttatgtgatagtcaaaaggagctggatgagttgctaaactgtcttcaccctcagggaataagagaaagtcaacttaaagagagactagagaagaggtaccaggacattattcactctattcatctagcacggaagccaaatttgggtctaaaatcttgtgatggcaaccaggagcttttaaacttccttcgtagtgatctcattgaagttgcaacaaggttacaaaaaggaggacttggatatgtggaagaaacatcagaatttgaagcccgggtcatttcattagagaaattgaaggattttggtgagtgtgtgattgcccttcaggccagtgtcataaagaaatttctccaaggcttcatggctcccaagcaaaagagaagaaaactccaaagtgaagattcagcaaaaactgaggaagtggatgaagagaagaaaatggtagaggaagcaaaggttgcatctgcactggagaaatggaagacagcaatccgggaagctcagactttctccaggatgcacgtgctgcttgggatgcttgatgcctgtatcaagtgggatatgtccgcagaaaatgctaggtgcaaagtttgtcgaaagaaaggtgaggatgacaaattgatcttgtgtgatgagtgtaataaagccttccacctgttttgtctgaggccggccctctatgaagtaccagatggtgagtggcagtgcccagcttgccagcccgctactgccaggcgcaactcccgtggcaggaactatactgaagagtctgcttctgaggacagtgaagatgatgagagtgatgaagaggaggaggaggaagaagaggaggaggaggaagaagattatgaggtggctggtttgcgattgagacctcgaaagaccatccggggcaagcacagcgtcatcccccctgcagcaaggtcaggccggcgcccgggtaagaagccacactctaccaggaggtctcagcccaaggcaccacctgtggatgatgctgaggtggatgagctggtgcttcagaccaagcggagctcccggaggcaaagcctggagctgcagaagtgtgaagagatcctccacaagatcgtgaagtaccgcttcagctggcccttcagggagcctgtgaccagagatgaggccgaggactactatgatgtgatcacgcaccccatggactttcagacagtgcagaacaaatgttcctgtgggagctaccgctctgtgcaggagtttcttactgacatgaagcaagtgtttaccaatgctgaggtttacaactgccgtggcagccatgtgctaagctgcatggtgaagacagaacagtgtctagtggctctgttgcataaacaccttcctggccacccatatgtccgcaggaagcgcaagaagtttcctgataggcttgctgaagatgaaggggacagtgagccagaggccgttggacagtccaggggacgaagacagaagaagtagagaggcagggccgtggtaagggagctgaggtggggggacagctagggagggtgggagggaggcgagcgaggaagaccaagaacctggaagagatcacagggagtccagaaacgcctgtcatcccaagcttatgctgtttttctaaaagctctttatggggcttgatattgggttggtggtctttgtccagaaatatgaagggacaaagagggccataaccctcccttctgagagtttccaggaggagtccgagggtctagcttttctggtgaagccagttcctgttcctgccttctttcctaagggcctgctcgctctggcttccaccacagtgccaagcccctctggtctccaggggagggattgctgtgttacatagcaggatcggggtaatcaggccaacaggggagatggtggcgatttttcttttttaatctgtatttattatacagtcttgtttctttaagcccatactctgtctcttcccccgtcttcctctcaggtgacagtatcagtgagtgccatacagaattgtgtattcaccagcatcatgaaacagttgtggtcttttgagttgatcttggcagagtaaagggacgtgtcctggagccattcctgaatctccccttct

SEQ ID NO: 112183 - DNA, 8831 bp, Homo sapiens
  Payload ID: 1974
  Gene Symbol: BAZ2A
  Gene Name: bromodomain adjacent to zinc finger domain, 2A
  ENST ID: ENST00000379441
  CDS Start-End: 182-5809
gggacatcaccctacagcagttcaggctgtgtggttcgcaggaagcatacactggctttttgattcttgctagttcccagctcacagtttgggaggatccaacaccaacctttacgtgaagtggaggcccaaggacagtgaggagctgggtggtcccagcctggagctgtgccagcctgacatggaaatggaggcaaacgaccattttaactttactggccttccccctgcacctgctgcctcaggactgaaaccctctccttcctcaggggagggcctctacactaacgggtctcccatgaacttcccccagcaagggaaaagtttgaatggggatgtgaatgttaatggcttatctactgtatctcacactactacttcagggattttgaactctgctccccactcctccagcacctcacacctccatcaccccagcgtggcctacgactgtctctggaactactcacagtacccatctgccaatcctggcagcaacctcaaggacccaccccttctctcccagttctcggggggacaatacccactcaacggcatccttgggggcagccggcaaccttcatccccaagtcataacactaaccttcgggctgggagccaagagttctgggccaacggtacccagagtcccatggggcttaactttgattcacaagaactgtatgattcctttcctgaccagaattttgaggaggtaggcagtggtatccatcctgatgaggcagcagaaaaggagatgacttcagttgtggcagagaatggcactggcttggtaggcagcttggagctggaagaagagcagccagaactgaagatgtgtggctacaatggctctgtcccttctgtggaatcgttacaccaagaggtctcagtcctggtccctgaccccacagtgagctgtttagatgatccttcacatcttcctgatcaactggaagacactccaatcctcagtgaagactctctggagcccttcaactctctggcaccagagccagtgagtggaggactatatggtattgatgacacggagctgatgggtgcagaggacaagctgcctcttgaggacagccctgtgatttctgcccttgattgcccttccctcaataatgctactgccttcagtctcctggcagatgatagtcaaacatcaacctctatctttgccagtcccacctctccacctgtcctaggggagtctgtcctgcaagataacagctttgacctgaataatggtagtgacgctgaacaggaagaaatggaaactcaatcttcagacttcccaccatccctgacccagccagctcctgatcagtcatccactattcagctacatccagcaacctcaccagcagtctcgccaacaacctccccagcagtctccctagtggtttctccagcagcctccccagaaatctctccagaagtttgtcccgcagcttctacagttgtctctccagcagtcttctcagtggtctctccagcttcctcagcagtcctcccagcagtctccttagaagtcccgttgacggcttcagtgacatccccaaaagcctctcccgtaacttccccagcagctgcctttccaacagcctccccagcaaataaggatgtcagcagctttctagaaaccactgctgacgtggaagagatcactggagaaggactcactgcttctggtagtggtgatgtcatgaggagacgtattgctaccccagaagaagttcgtcttcccctccaacatgggtggcggagagaggtgcgcatcaagaagggcagccaccgatggcagggggagacctggtattatggcccctgtgggaagaggatgaagcaatttccagaagtgatcaagtacctgagccgcaacgtggtacacagtgtccgccgagagcacttcagcttcagtccccgtatgcctgttggagatttctttgaagaaagagacacgccagagggcttgcagtgggtgcagctctcagcagaggagatcccgtcgaggattcaggcaattactggcaaacggggtcgacctcgaaacactgagaaggctaagactaaggaagtccccaaggtgaaacggggtcgaggtcggccacctaaggtcaaaatcactgagctattgaacaagacagacaaccgccccctaaagaaactggaggcccaagaaacattgaatgaggaggataaagcaaagattgctaaaagcaagaagaagatgaggcagaaggttcaacggggagagtgtcagactactatccaagggcaggccagaaataagcggaaacaagagaccaagagcttaaagcagaaggaagctaagaagaaatccaaggctgagaaagaaaaaggaaagacaaagcaggaaaaactgaaggaaaaagtcaagagggaaaagaaggagaaggtaaaaatgaaggaaaaggaggaggtgaccaaagccaagccagcctgtaaagcagataagaccctggccacacagaggcgcttggaggaacggcagaggcagcagatgatcttggaggaaatgaagaagccgacagaggatatgtgtctgactgaccaccagcccctgcctgacttctcacgagtccctggtctgacattgcccagtggagccttctcagactgcttgaccattgtggagttcctgcatagctttggcaaggtgctgggctttgatcctgccaaagatgtgcctagcctgggggtcctgcaggagggactcctgtgtcaaggtgacagcttgggtgaggtgcaagacctgctggtcaggctgctgaaggctgcactccatgatcctggctttccctcctactgtcagtccctaaagatcttgggggagaaggtgtctgagatcccactgacaagagacaatgtgtcagagatcctgcgctgcttccttatggcatatggagtagagccagccctctgtgaccgcctgcgcacccagccttttcaggcccagccaccccagcagaaggctgctgtcctggccttccttgtgcatgagctcaatggctccaccctcatcatcaatgagattgacaagactctggagagtatgtccagctacaggaaaaacaagtggattgttgaaggccggctccggaggctgaaaactgttctggccaagcgaactgggcggtctgaagtagagatggaagggccagaggaatgcctgggacggaggcgcagttctcggatcatggaggagaccagtggcatggaagaagaggaagaagaggagtctatagcagctgtccctggccgcaggggtcgaagagatggagaggttgatgccacagcatctagcatcccagagctagagcgccagatagaaaaactcagcaagcgtcagcttttctttcgcaaaaagctgcttcactcatcccagatgcttcgggcggtctccctgggtcaggaccgctacagacgtcgctactgggtattgccgtatttggctggtatctttgtagaaggaacagaggggaacttagttcctgaggaggtgataaagaaggaaactgactccttaaaagtggcagcccatgcgtcactcaaccctgccctcttctctatgaagatggagttagctggctccaacaccactgccagttctcctgcccgggcccgaggccgacctcgaaaaactaagcccgggtctatgcaacctaggcatcttaagtcccctgtcaggggtcaggattcagaacagccccaggcccagcttcagcctgaggctcagcttcatgctcctgcccagccccagcctcagcttcagcttcagcttcagtcccataaggggttcctggagcaagaaggctcccctttgtcactgggtcagagccagcatgacctcagccagtcagccttcctgtcttggctgagccagactcagagccatagctccctgttgagcagctcagtcctcacacctgatagcagtccgggaaaactagacccagctccatcacaacccccggaggagccagagcctgatgaggcagaatccagccctgatcctcaagcactctggtttaacatctcagcccagatgccctgcaatgctgcccccacaccgccccctgcagtttctgaggaccaacccactccctcccctcagcagcttgcctcctccaagccaatgaatagacctagtgctgccaacccttgttctccagtgcagttctcttccacgcccttggctgggttggcccctaagaggcgagcaggagaccctggagaaatgccacagagtcccacagggctgggacagcccaaacggagagggagacctcccagtaagttcttcaaacagatggaacagcgttacctaacccagctgacagcccagcctgtcccacctgagatgtgctcaggctggtggtggatacgagatcctgagatgttggatgccatgctcaaggccctacacccccgaggtatccgggagaaggcacttcacaaacaccttaacaagcacagggacttcttgcaggaagtctgcctgcggccctcagctgaccccatctttgagcccaggcaactacctgcctttcaagaagggattatgagctggtcccccaaagagaagacatacgagacagacctagcagtgcttcaatgggtagaggagctggagcagcgggttatcatgtctgatctgcagattcggggctggacatgtcctagcccagactctacccgtgaagacttggcctactgtgagcacctctccgactcccaggaggatatcacctggcgaggtcggggcagggagggactggcacctcagcgtaaaactaccaaccctttggacctggctgtgatgcggctggctgccctggaacagaatgtagaacggcggtacctgcgggagcccctctggccaactcatgaggttgtgctggagaaggccctgcttagcacacctaatggtgcccctgagggcaccactacagagatatcatatgagatcacccctcgcattcgtgtctggcgccagaccctcgagcggtgccggagcgcagcccaggtgtgcttgtgcctgggccagctggagaggtccattgcctgggagaagtctgtcaacaaagtgacatgtctagtctgccggaagggtgacaatgatgagtttcttctgctttgtgatgggtgtgaccgtggctgccacatttactgccatcgtcccaagatggaggctgtcccagaaggagattggttctgtactgtctgtttggctcagcaggtggagggagaattcactcagaagcctggtttcccaaagcgtggccagaagcggaaaagtggttattcgctgaacttctcagagggtgatggccgccgacgccgggtactgttgaggggccgagaaagcccagcagcagggcctcggtactcggaagaagggctctccccctccaagcggcggcgactctctatgcggaaccaccacagtgatctcacattttgcgagattatcctgatggagatggagtcccatgatgcagcctggcctttcctagagcctgtgaacccacgtttggtgagtgggtaccggcgcatcatcaaaaatcctatggatttttccaccatgcgggagcggctgctcaggggagggtacaccagctcagaggagtttgcggctgatgccctcctggtatttgacaactgccagactttcaacgaggatgactctgaagtaggcaaggctgggcacatcatgcgccgcttcttcgagagccgctgggaggagttttatcagggaaaacaggccaatctgtgaggcaagggaggtggggagtcaccttgtggcatctccccccaccttccaaacaaaaacctgccattttcacctgctgatgctgccctgggtccagactcaagtcagatacaaccctgatttttgaccttgcccttggcagtgccccacatcctcttattcctacatccctttctcccttccctcctcttgctcctcaagtaagaggtgcagagatgaggtccttctggactaaaagccaaaaaaagaaagaaaaaaataatttttcttttctgttttatttgctaattaaaaatggggagggggaaagtcgtccctacttcctcctccctgcttcctctcctcccctgtacgtgccccagcattctggggttatttaacaatagcaatagttctagtgaatgtgtgaaaccaagaaacactctgtactgtgtgcggacccgcagtgacggccagtaaagtggacttaactcccaagtgtgtcgcgccggacaccgggccctggacatgctgcttccatgttcagtcccttccctgcttctcgctgtctttcttttcccacctcccaccccccagttttcagattttctctcatccaataatgtaaaactatcgtgtacgggttcctccctccttttctcttctcccaaatcttttcccttcaaaggaaaaaaaaatgttcagaggtccctgtcttctgtccccatcttcctgccgatagctatcccctgtatgatgttggatgctcctcacatgctgagtttccagccttttctgaaactcagtagctggggagagggcagggaggcttcctgggccttccagcctccttccccacctccttcccaaaccctcttgggaactcctcagggacaactactgctgagtttgggtgcaccctaagatggaggccaggtagcaatggggccggcctcagagagagcgctgtgtgtgtgtgtgtgtgtgtgtgtgtgtgtgtgtgtcggcctcagagcgcgctgtgtgtgtgtgtgtgtgtgtcagcctcagagcgcgcgctgtgtgtgtgtgtgtgtgtgcgtgcttgtgaccctgtattgtttgataggatccattcagtttccccaagtacctgttttcattcccatttttcccattgtttaaaaccatcacttttttgtctttgggaaaccacaggaacaatttctctggagacaaggctgtgtctctctcctggtcatttttgttccagcctcttcagactgtgcaatctttcagcaggaactccctctcttctcggtagctttgaatcttaagcttctacgggagagtggtagaactggatcatttcctaatcccatttagttgtgcttttcttcatttacttcataccccaggaccccttccccagcagcagagaccctggagcacaggagagtagggaggaggggttctgggtccatcactgccctacatgtgactatgtccaagttaagcccccaacacgagaggaaagctgctgactcccagctatagccatgggcacttggccccctgcttttcctgctcagcagagcccctcccttcagagattacgggtacttgcactggggaggtggctgctggctggcccaagcagagagctgaggcatccaagaaatgttccattggggggtgggggtgccaggtgaggtggagcattccttgtattctggcagcactgaagagccactgaagggggtaggggcagtgtaggtcctggggcagcccctttattcctttatgccccttctccctcatagcctatttctaaagtcgccttttctgtcagataaacctcaaaacttttaattttatttgagatttttttttgcttttaagaggtggattgaagaatatttgaattgactttatattatgcataaatatttatattttatctaaataactgcgctgtaacaaactttgtgttagacagttgaaactgttagagttgggggctctgctttttccccctggcaattttcccctggtataagatgtgctagattaatttcattgtgaggtggatgggggagtgaaattgtgaggtggatgggggagtgaaatctccatggttcctgctttgtgttcctctcccagctccatctctttccctagggaccaggcactcatatggcggggtggggtcctagcctcagtttgaagaagtgggggctggagcggggttgggggtggtagggatagggcatgatcaaaggggccatttcttgcttttctttcctcatcttcactgcccccttgagctaggtggattttctcttcatgacaagagtatttggtagggaaagcaggtttaaaataaaaagacaacccaccccctgcccttttgcttccctcccatcagtctggttgacaggaagaaaccacaccatcaacaccaacaagtttctgtgttccttttacagcaaaagggactttttatataaccaaatgtggtgttttagtgactttttgataatgtacagttttttgtgaatttaaatttatttctttctatatttttaggaccaatctcatttttaataaggttaaaaagaaaaaaaaagtctagcgaaaaaactcctgtttttgccatgtgatgttccacaagtgcagctgtagaaaagtgcttgtcagttgttgaataaaaaaaaccacatttgatagagattcaaaagactctgtgtattcatcttcccttctacacacctgagggggagacggcgttgggataggtatgactggcttaagagaccacaggcaagggaacaacaggggctcctgttccataccctctgtgtggatggaaagggtcattagtgctcctgcctaaatgtctggctgagttgctggagcaaagggggattcagtgcatccaggtcctgccttgtgagatgtggccccagcttcctaagctgccacctctgtgttcctgtcatagcaaatatgggaccatcaccagcttaccacttcccactcacggataagacaccaagacgtagac

SEQ ID NO: 112184 - DNA, 8600 bp, Homo sapiens
  Payload ID: 1974
  Gene Symbol: BAZ2A
  Gene Name: bromodomain adjacent to zinc finger domain, 2A
  Uniprot ID: Q9UIF9
  ENST ID: ENST00000551812
  CDS Start-End: 195-5912
agtctgtcacacagggacatcaccctacagcagttcaggctgtgtggttcgcaggaagcatacactggctttttgattcttgctagttcccagctcacagtttgggaggatccaacaccaacctttacgtgaagtggaggcccaaggacagtgaggagctgggtggtcccagcctggagctgtgccagcctgacatggaaatggaggcaaacgaccattttaactttactggccttccccctgcacctgctgcctcaggactgaaaccctctccttcctcaggggagggcctctacactaacgggtctcccatgaacttcccccagcaagggaaaagtttgaatggggatgtgaatgttaatggcttatctactgtatctcacactactacttcagggattttgaactctgctccccactcctccagcacctcacacctccatcaccccagcgtggcctacgactgtctctggaactactcacagtacccatctgccaatcctggcagcaacctcaaggacccaccccttctctcccagttctcggggggacaatacccactcaacggcatccttgggggcagccggcaaccttcatccccaagtcataacactaaccttcgggctgggagccaagagttctgggccaacggtacccagagtcccatggggcttaactttgattcacaagaactgtatgattcctttcctgaccagaattttgaggtgatgcccaatggaccccctagttttttcacctccccacagacttctcctatgttgggatctagcattcaaacctttgcaccctcccaggaggtaggcagtggtatccatcctgatgaggcagcagaaaaggagatgacttcagttgtggcagagaatggcactggcttggtaggcagcttggagctggaagaagagcagccagaactgaagatgtgtggctacaatggctctgtcccttctgtggaatcgttacaccaagaggtctcagtcctggtccctgaccccacagtgagctgtttagatgatccttcacatcttcctgatcaactggaagacactccaatcctcagtgaagactctctggagcccttcaactctctggcaccagagccagtgagtggaggactatatggtattgatgacacggagctgatgggtgcagaggacaagctgcctcttgaggacagccctgtgatttctgcccttgattgcccttccctcaataatgctactgccttcagtctcctggcagatgatagtcaaacatcaacctctatctttgccagtcccacctctccacctgtcctaggggagtctgtcctgcaagataacagctttgacctgaataatggtagtgacgctgaacaggaagaaatggaaactcaatcttcagacttcccaccatccctgacccagccagctcctgatcagtcatccactattcagctacatccagcaacctcaccagcagtctcgccaacaacctccccagcagtctccctagtggtttctccagcagcctccccagaaatctctccagaagtttgtcccgcagcttctacagttgtctctccagcagtcttctcagtggtctctccagcttcctcagcagtcctcccagcagtctccttagaagtcccgttgacggcttcagtgacatccccaaaagcctctcccgtaacttccccagcagctgcctttccaacagcctccccagcaaataaggatgtcagcagctttctagaaaccactgctgacgtggaagagatcactggagaaggactcactgcttctggtagtggtgatgtcatgaggagacgtattgctaccccagaagaagttcgtcttcccctccaacatgggtggcggagagaggtgcgcatcaagaagggcagccaccgatggcagggggagacctggtattatggcccctgtgggaagaggatgaagcaatttccagaagtgatcaagtacctgagccgcaacgtggtacacagtgtccgccgagagcacttcagcttcagtccccgtatgcctgttggagatttctttgaagaaagagacacgccagagggcttgcagtgggtgcagctctcagcagaggagatcccgtcgaggattcaggcaattactggcaaacggggtcgacctcgaaacactgagaaggctaagactaaggaagtccccaaggtgaaacggggtcgaggtcggccacctaaggtcaaaatcactgagctattgaacaagacagacaaccgccccctaaagaaactggaggcccaagaaacattgaatgaggaggataaagcaaagattgctaaaagcaagaagaagatgaggcagaaggttcaacggggagagtgtcagactactatccaagggcaggccagaaataagcggaaacaagagaccaagagcttaaagcagaaggaagctaagaagaaatccaaggctgagaaagaaaaaggaaagacaaagcaggaaaaactgaaggaaaaagtcaagagggaaaagaaggagaaggtaaaaatgaaggaaaaggaggaggtgaccaaagccaagccagcctgtaaagcagataagaccctggccacacagaggcgcttggaggaacggcagaggcagcagatgatcttggaggaaatgaagaagccgacagaggatatgtgtctgactgaccaccagcccctgcctgacttctcacgagtccctggtctgacattgcccagtggagccttctcagactgcttgaccattgtggagttcctgcatagctttggcaaggtgctgggctttgatcctgccaaagatgtgcctagcctgggggtcctgcaggagggactcctgtgtcaaggtgacagcttgggtgaggtgcaagacctgctggtcaggctgctgaaggctgcactccatgatcctggctttccctcctactgtcagtccctaaagatcttgggggagaaggtgtctgagatcccactgacaagagacaatgtgtcagagatcctgcgctgcttccttatggcatatggagtagagccagccctctgtgaccgcctgcgcacccagccttttcaggcccagccaccccagcagaaggctgctgtcctggccttccttgtgcatgagctcaatggctccaccctcatcatcaatgagattgacaagactctggagagtatgtccagctacaggaaaaacaagtggattgttgaaggccggctccggaggctgaaaactgttctggccaagcgaactgggcggtctgaagtagagatggaagggccagaggaatgcctgggacggaggcgcagttctcggatcatggaggagaccagtggcatggaagaagaggaagaagaggagtctatagcagctgtccctggccgcaggggtcgaagagatggagaggttgatgccacagcatctagcatcccagagctagagcgccagatagaaaaactcagcaagcgtcagcttttctttcgcaaaaagctgcttcactcatcccagatgcttcgggcggtctccctgggtcaggaccgctacagacgtcgctactgggtattgccgtatttggctggtatctttgtagaaggaacagaggggaacttagttcctgaggaggtgataaagaaggaaactgactccttaaaagtggcagcccatgcgtcactcaaccctgccctcttctctatgaagatggagttagctggctccaacaccactgccagttctcctgcccgggcccgaggccgacctcgaaaaactaagcccgggtctatgcaacctaggcatcttaagtcccctgtcaggggtcaggattcagaacagccccaggcccagcttcagcctgaggctcagcttcatgctcctgcccagccccagcctcagcttcagcttcagcttcagtcccataaggggttcctggagcaagaaggctcccctttgtcactgggtcagagccagcatgacctcagccagtcagccttcctgtcttggctgagccagactcagagccatagctccctgttgagcagctcagtcctcacacctgatagcagtccgggaaaactagacccagctccatcacaacccccggaggagccagagcctgatgaggcagaatccagccctgatcctcaagcactctggtttaacatctcagcccagatgccctgcaatgctgcccccacaccgccccctgcagtttctgaggaccaacccactccctcccctcagcagcttgcctcctccaagccaatgaatagacctagtgctgccaacccttgttctccagtgcagttctcttccacgcccttggctgggttggcccctaagaggcgagcaggagaccctggagaaatgccacagagtcccacagggctgggacagcccaaacggagagggagacctcccagtaagttcttcaaacagatggaacagcgttacctaacccagctgacagcccagcctgtcccacctgagatgtgctcaggctggtggtggatacgagatcctgagatgttggatgccatgctcaaggccctacacccccgaggtatccgggagaaggcacttcacaaacaccttaacaagcacagggacttcttgcaggaagtctgcctgcggccctcagctgaccccatctttgagcccaggcaactacctgcctttcaagaagggattatgagctggtcccccaaagagaagacatacgagacagacctagcagtgcttcaatgggtagaggagctggagcagcgggttatcatgtctgatctgcagattcggggctggacatgtcctagcccagactctacccgtgaagacttggcctactgtgagcacctctccgactcccaggaggatatcacctggcgaggtcggggcagggagggactggcacctcagcgtaaaactaccaaccctttggacctggctgtgatgcggctggctgccctggaacagaatgtagaacggcggtacctgcgggagcccctctggccaactcatgaggttgtgctggagaaggccctgcttagcacacctaatggtgcccctgagggcaccactacagagatatcatatgagatcacccctcgcattcgtgtctggcgccagaccctcgagcggtgccggagcgcagcccaggtgtgcttgtgcctgggccagctggagaggtccattgcctgggagaagtctgtcaacaaagtgacatgtctagtctgccggaagggtgacaatgatgagtttcttctgctttgtgatgggtgtgaccgtggctgccacatttactgccatcgtcccaagatggaggctgtcccagaaggagattggttctgtactgtctgtttggctcagcaggtggagggagaattcactcagaagcctggtttcccaaagcgtggccagaagcggaaaagtggttattcgctgaacttctcagagggtgatggccgccgacgccgggtactgttgaggggccgagaaagcccagcagcagggcctcggtactcggaagaagggctctccccctccaagcggcggcgactctctatgcggaaccaccacagtgatctcacattttgcgagattatcctgatggagatggagtcccatgatgcagcctggcctttcctagagcctgtgaacccacgtttggtgagtgggtaccggcgcatcatcaaaaatcctatggatttttccaccatgcgggagcggctgctcaggggagggtacaccagctcagaggagtttgcggctgatgccctcctggtatttgacaactgccagactttcaacgaggatgactctgaagtaggcaaggctgggcacatcatgcgccgcttcttcgagagccgctgggaggagttttatcagggaaaacaggccaatctgtgaggcaagggaggtggggagtcaccttgtggcatctccccccaccttccaaacaaaaacctgccattttcacctgctgatgctgccctgggtccagactcaagtcagatacaaccctgatttttgaccttgcccttggcagtgccccacatcctcttattcctacatccctttctcccttccctcctcttgctcctcaagtaagaggtgcagagatgaggtccttctggactaaaagccaaaaaaagaaagaaaaaaataatttttcttttctgttttatttgctaattaaaaatggggagggggaaagtcgtccctacttcctcctccctgcttcctctcctcccctgtacgtgccccagcattctggggttatttaacaatagcaatagttctagtgaatgtgtgaaaccaagaaacactctgtactgtgtgcggacccgcagtgacggccagtaaagtggacttaactcccaagtgtgtcgcgccggacaccgggccctggacatgctgcttccatgttcagtcccttccctgcttctcgctgtctttcttttcccacctcccaccccccagttttcagattttctctcatccaataatgtaaaactatcgtgtacgggttcctccctccttttctcttctcccaaatcttttcccttcaaaggaaaaaaaaatgttcagaggtccctgtcttctgtccccatcttcctgccgatagctatcccctgtatgatgttggatgctcctcacatgctgagtttccagccttttctgaaactcagtagctggggagagggcagggaggcttcctgggccttccagcctccttccccacctccttcccaaaccctcttgggaactcctcagggacaactactgctgagtttgggtgcaccctaagatggaggccaggtagcaatggggccggcctcagagagagcgctgtgtgtgtgtgtgtgtgtgtgtgtgtgtgtgtgtgtcggcctcagagcgcgctgtgtgtgtgtgtgtgtgtgtcagcctcagagcgcgcgctgtgtgtgtgtgtgtgtgtgcgtgcttgtgaccctgtattgtttgataggatccattcagtttccccaagtacctgttttcattcccatttttcccattgtttaaaaccatcacttttttgtctttgggaaaccacaggaacaatttctctggagacaaggctgtgtctctctcctggtcatttttgttccagcctcttcagactgtgcaatctttcagcaggaactccctctcttctcggtagctttgaatcttaagcttctacgggagagtggtagaactggatcatttcctaatcccatttagttgtgcttttcttcatttacttcataccccaggaccccttccccagcagcagagaccctggagcacaggagagtagggaggaggggttctgggtccatcactgccctacatgtgactatgtccaagttaagcccccaacacgagaggaaagctgctgactcccagctatagccatgggcacttggccccctgcttttcctgctcagcagagcccctcccttcagagattacgggtacttgcactggggaggtggctgctggctggcccaagcagagagctgaggcatccaagaaatgttccattggggggtgggggtgccaggtgaggtggagcattccttgtattctggcagcactgaagagccactgaagggggtaggggcagtgtaggtcctggggcagcccctttattcctttatgccccttctccctcatagcctatttctaaagtcgccttttctgtcagataaacctcaaaacttttaattttatttgagatttttttttgcttttaagaggtggattgaagaatatttgaattgactttatattatgcataaatatttatattttatctaaataactgcgctgtaacaaactttgtgttagacagttgaaactgttagagttgggggctctgctttttccccctggcaattttcccctggtataagatgtgctagattaatttcattgtgaggtggatgggggagtgaaattgtgaggtggatgggggagtgaaatctccatggttcctgctttgtgttcctctcccagctccatctctttccctagggaccaggcactcatatggcggggtggggtcctagcctcagtttgaagaagtgggggctggagcggggttgggggtggtagggatagggcatgatcaaaggggccatttcttgcttttctttcctcatcttcactgcccccttgagctaggtggattttctcttcatgacaagagtatttggtagggaaagcaggtttaaaataaaaagacaacccaccccctgcccttttgcttccctcccatcagtctggttgacaggaagaaaccacaccatcaacaccaacaagtttctgtgttccttttacagcaaaagggactttttatataaccaaatgtggtgttttagtgactttttgataatgtacagttttttgtgaatttaaatttatttctttctatatttttaggaccaatctcatttttaataaggttaaaaagaaaaaaaaagtctagcgaaaaaactcctgtttttgccatgtgatgttccacaagtgcagctgtagaaaagtgcttgtcagttgttgaataaaaaaaaccacatttgatagaga

SEQ ID NO: 112185 - DNA, 577 bp, Homo sapiens
  Payload ID: 1974
  Gene Symbol: BAZ2A
  Gene Name: bromodomain adjacent to zinc finger domain, 2A
  ENST ID: ENST00000549506
  CDS Start-End: 230-577
acactggctttttgattcttgctagttcccagctcacagtttgggaggatccaacaccaacctttacgtgaagtggaggcccaaggacagtgaggagctgggtggtcccagcctggagctgtgccagcctgacatgggaatctttcctttccggtgaccagggccctgcagatgtcgccaggaaagtggtgatccaggcaggaccaggctgcactgaagggacagagaaatggaggcaaacgaccattttaactttactggccttccccctgcacctgctgcctcaggactgaaaccctctccttcctcaggggagggcctctacactaacgggtctcccatgaacttcccccagcaagggaaaagtttgaatggggatgtgaatgttaatggcttatctactgtatctcacactactacttcagggattttgaactctgctccccactcctccagcacctcacacctccatcaccccagcgtggcctacgactgtctctggaactactcacagtacccatctgccaatcctggcagcaacctcaaggacccaccccttctctcccagttctcgggg

SEQ ID NO: 112186 - DNA, 484 bp, Homo sapiens
  Payload ID: 1974
  Gene Symbol: BAZ2A
  Gene Name: bromodomain adjacent to zinc finger domain, 2A
  ENST ID: ENST00000547453
  CDS Start-End: 1-484
caatgctgcccccacaccgccccctgcagtttctgaggaccaacccactccctcccctcagcagcttgcctcctccaagccaatgaatagacctagtgctgccaacccttgttctccagtgcagttctcttccacgcccttggctgggttggcccctaagaggcgagcaggagaccctggagaaatgccacagagtcccacagggctgggacagcccaaacggagagggagacctcccaagatgtgctcaggctggtggtggatacgagatcctgagatgttggatgccatgctcaaggccctacacccccgaggtatccgggagaaggcacttcacaaacaccttaacaagcacagggacttcttgcaggaagtctgcctgcggccctcagctgaccccatctttgagcccaggcaactacctgcctttcaagaagggattatgagctggtcccccaaagagaagacatacgagacagaccta

SEQ ID NO: 112187 - DNA, 849 bp, Homo sapiens
  Payload ID: 1974
  Gene Symbol: BAZ2A
  Gene Name: bromodomain adjacent to zinc finger domain, 2A
  ENST ID: ENST00000551996
  CDS Start-End: 1-833
tcctggcagatgatagtcaaacatcaacctctatctttgccagtcccacctctccacctgtcctaggggagtctgtcctgcaagataacagctttgacctgaataatggtagtgacgctgaacaggaagaaatggaaactcaatcttcagacttcccaccatccctgacccagccagctcctgatcagtcatccactattcagctacatccagcaacctcaccagcagtctcgccaacaacctccccagcagtctccctagtggtttctccagcagcctccccagaaatctctccagaagtttgtcccgcagcttctacagttgtctctccagcagtcttctcagtggtctctccagcttcctcagcagtcctcccagcagtctccttagaagtcccgttgacggcttcagtgacatccccaaaagcctctcccgtaacttccccagcagctgcctttccaacagcctccccagcaaataaggatgtcagcagctttctagaaaccactgctgacgtggaagagatcactggagaaggactcactgcttctggtagtggtgatgtcatgaggagacgtattgctaccccagaagaagttcgtcttcccctccaacatggggcccatgtgcttctctggcaggtggcggagagaggtgcgcatcaagaagggcagccaccgatggcagggggagacctggtattatggcccctgtgggaagaggatgaagcaatttccagaagtgatcaagtacctgagccgcaacgtggtacacagtgtccgccgagagcacttcagcttcagtccccgtatgcctgttggagatttctttgaagaaagagacacgcca

SEQ ID NO: 112188 - DNA, 6050 bp, Homo sapiens
  Payload ID: 1974
  Gene Symbol: BAZ2A
  Gene Name: bromodomain adjacent to zinc finger domain, 2A
  ENST ID: ENST00000549884
  CDS Start-End: 90-5801
gttctggcgcccggagcgcggccatgtgaaccgcttgtaccccggggagagacgagccccgagcccggctggacgccgctgcctcagaaatggaggcaaacgaccattttaactttactggccttccccctgcacctgctgcctcaggactgaaaccctctccttcctcaggggagggcctctacactaacgggtctcccatgaacttcccccagcaagggaaaagtttgaatggggatgtgaatgttaatggcttatctactgtatctcacactactacttcagggattttgaactctgctccccactcctccagcacctcacacctccatcaccccagcgtggcctacgactgtctctggaactactcacagtacccatctgccaatcctggcagcaacctcaaggacccaccccttctctcccagttctcggggggacaatacccactcaacggcatccttgggggcagccggcaaccttcatccccaagtcataacactaaccttcgggctgggagccaagagttctgggccaacggtacccagagtcccatggggcttaactttgattcacaagaactgtatgattcctttcctgaccagaattttgaggtgatgcccaatggaccccctagttttttcacctccccacagacttctcctatgttgggatctagcattcaaacctttgcaccctcccaggaggtaggcagtggtatccatcctgatgaggcagcagaaaaggagatgacttcagttgtggcagagaatggcactggcttggtaggcagcttggagctggaagaagagcagccagaactgaagatgtgtggctacaatggctctgtcccttctgtggaatcgttacaccaagaggtctcagtcctggtccctgaccccacagtgagctgtttagatgatccttcacatcttcctgatcaactggaagacactccaatcctcagtgaagactctctggagcccttcaactctctggcaccagagccagtgagtggaggactatatggtattgatgacacggagctgatgggtgcagaggacaagctgcctcttgaggacagccctgtgatttctgcccttgattgcccttccctcaataatgctactgccttcagtctcctggcagatgatagtcaaacatcaacctctatctttgccagtcccacctctccacctgtcctaggggagtctgtcctgcaagataacagctttgacctgaataatggtagtgacgctgaacaggaagaaatggaaactcaatcttcagacttcccaccatccctgacccagccagctcctgatcagtcatccactattcagctacatccagcaacctcaccagcagtctcgccaacaacctccccagcagtctccctagtggtttctccagcagcctccccagaaatctctccagaagtttgtcccgcagcttctacagttgtctctccagcagtcttctcagtggtctctccagcttcctcagcagtcctcccagcagtctccttagaagtcccgttgacggcttcagtgacatccccaaaagcctctcccgtaacttccccagcagctgcctttccaacagcctccccagcaaataaggatgtcagcagctttctagaaaccactgctgacgtggaagagatcactggagaaggactcactgcttctggtagtggtgatgtcatgaggagacgtattgctaccccagaagaagttcgtcttcccctccaacatgggtggcggagagaggtgcgcatcaagaagggcagccaccgatggcagggggagacctggtattatggcccctgtgggaagaggatgaagcaatttccagaagtgatcaagtacctgagccgcaacgtggtacacagtgtccgccgagagcacttcagcttcagtccccgtatgcctgttggagatttctttgaagaaagagacacgccagagggcttgcagtgggtgcagctctcagcagaggagatcccgtcgaggattcaggcaattactggcaaacggggtcgacctcgaaacactgagaaggctaagactaaggaagtccccaaggtgaaacggggtcgaggtcggccacctaaggtcaaaatcactgagctattgaacaagacagacaaccgccccctaaagaaactggaggcccaagaaacattgaatgaggaggataaagcaaagattgctaaaagcaagaagaagatgaggcagaaggttcaacggggagagtgtcagactactatccaagggcaggccagaaataagcggaaacaagagaccaagagcttaaagcagaaggaagctaagaagaaatccaaggctgagaaagaaaaaggaaagacaaagcaggaaaaactgaaggaaaaagtcaagagggaaaagaaggagaaggtaaaaatgaaggaaaaggaggaggtgaccaaagccaagccagcctgtaaagcagataagaccctggccacacagaggcgcttggaggaacggcagaggcagcagatgatcttggaggaaatgaagaagccgacagaggatatgtgtctgactgaccaccagcccctgcctgacttctcacgagtccctggtctgacattgcccagtggagccttctcagactgcttgaccattgtggagttcctgcatagctttggcaaggtgctgggctttgatcctgccaaagatgtgcctagcctgggggtcctgcaggagggactcctgtgtcaaggtgacagcttgggtgaggtgcaagacctgctggtcaggctgctgaaggctgcactccatgatcctggctttccctcctactgtcagtccctaaagatcttgggggagaaggtgtctgagatcccactgacaagagacaatgtgtcagagatcctgcgctgcttccttatggcatatggagtagagccagccctctgtgaccgcctgcgcacccagccttttcaggcccagccaccccagcagaaggctgctgtcctggccttccttgtgcatgagctcaatggctccaccctcatcatcaatgagattgacaagactctggagagtatgtccagctacaggaaaaacaagtggattgttgaaggccggctccggaggctgaaaactgttctggccaagcgaactgggcggtctgaagtagagatggaagggccagaggaatgcctgggacggaggcgcagttctcggatcatggaggagaccagtggcatggaagaagaggaagaagaggagtctatagcagctgtccctggccgcaggggtcgaagagatggagaggttgatgccacagcatctagcatcccagagctagagcgccagatagaaaaactcagcaagcgtcagcttttctttcgcaaaaagctgcttcactcatcccagatgcttcgggcggtctccctgggtcaggaccgctacagacgtcgctactgggtattgccgtatttggctggtatctttgtagaaggaacagaggggaacttagttcctgaggaggtgataaagaaggaaactgactccttaaaagtggcagcccatgcgtcactcaaccctgccctcttctctatgaagatggagttagctggctccaacaccactgccagttctcctgcccgggcccgaggccgacctcgaaaaactaagcccgggtctatgcaacctaggcatcttaagtcccctgtcaggggtcaggattcagaacagccccaggcccagcttcagcctgaggctcagcttcatgctcctgcccagccccagcctcagcttcagcttcagcttcagtcccataaggggttcctggagcaagaaggctcccctttgtcactgggtcagagccagcatgacctcagccagtcagccttcctgtcttggctgagccagactcagagccatagctccctgttgagcagctcagtcctcacacctgatagcagtccgggaaaactagacccagctccatcacaacccccggaggagccagagcctgatgaggcagaatccagccctgatcctcaagcactctggtttaacatctcagcccagatgccctgcaatgctgcccccacaccgccccctgcagtttctgaggaccaacccactccctcccctcagcagcttgcctcctccaagccaatgaatagacctagtgctgccaacccttgttctccagtgcagttctcttccacgcccttggctgggttggcccctaagaggcgagcaggagaccctggagaaatgccacagagtcccacagggctgggacagcccaaacggagagggagacctcccagtaagttcttcaaacagatggaacagcgttacctaacccagctgacagcccagcctgtcccacctgagatgtgctcaggctggtggtggatacgagatcctgagatgttggatgccatgctcaaggccctacacccccgaggtatccgggagaaggcacttcacaaacaccttaacaagcacagggacttcttgcaggaagtctgcctgcggccctcagctgaccccatctttgagcccaggcaactacctgcctttcaagaagggattatgagctggtcccccaaagagaagacatacgagacagacctagcagtgcttcaatgggtagaggagctggagcagcgggttatcatgtctgatctgcagattcggggctggacatgtcctagcccagactctacccgtgaagacttggcctactgtgagcacctctccgactcccaggaggatatcacctggcgaggtcggggcagggagggactggcacctcagcgtaaaactaccaaccctttggacctggctgtgatgcggctggctgccctggaacagaatgtagaacggcggtacctgcgggagcccctctggccaactcatgaggttgtgctggagaaggccctgcttagcacacctaatggtgcccctgagggcaccactacagagatatcatatgagatcacccctcgcattcgtgtctggcgccagaccctcgagcggtgccggagcgcagcccaggtgtgcttgtgcctgggccagctggagaggtccattgcctgggagaagtctgtcaacaaagtgacatgtctagtctgccggaagggtgacaatgatgagtttcttctgctttgtgatgggtgtgaccgtggctgccacatttactgccatcgtcccaagatggaggctgtcccagaaggagattggttctgtactgtctgtttggctcagcaggtggagggagaattcactcagaagcctggtttcccaaagcgtggccagaagcggaaaagtggttattcgctgaacttctcagagggtgatggccgccgacgccgggtactgttgaggggccgagaaagcccagcagcagggcctcggtactcggaagaagggctctccccctccaagcggcggcgactctctatgcggaaccaccacagtgatctcacattttgcgagattatcctgatggagatggagtcccatgatgcagcctggcctttcctagagcctgtgaacccacgtttggtgagtgggtaccggcgcatcatcaaaaatcctatggatttttccaccatgcgggagcggctgctcaggggagggtacaccagctcagaggagtttgcggctgatgccctcctggtatttgacaactgccagactttcaacgaggatgactctgaagtaggcaaggctgggcacatcatgcgccgcttcttcgagagccgctgggaggagttttatcagggaaaacaggccaatctgtgaggcaagggaggtggggagtcaccttgtggcatctccccccaccttccaaacaaaaacctgccattttcacctgctgatgctgccctgggtccagactcaagtcagatacaaccctgatttttgaccttgcccttggcagtgccccacatcctcttattcctacatccctttctcccttccctcctcttgctcctcaagtaagaggtgcagagatgaggtccttctggactaaaagccaaaaaaagaaag

SEQ ID NO: 112189 - DNA, 2773 bp, Homo sapiens
  Payload ID: 1974
  Gene Symbol: BAZ2A
  Gene Name: bromodomain adjacent to zinc finger domain, 2A
  ENST ID: ENST00000549787
  CDS Start-End: 1-2514
gtccctggccgcaggggtcgaagagatggagaggttgatgccacagcatctagcatcccagagctagagcgccagatagaaaaactcagcaagcgtcagcttttctttcgcaaaaagctgcttcactcatcccagatgcttcgggcggtctccctgggtcaggaccgctacagacgtcgctactgggtattgccgtatttggctggtatctttgtagaaggaacagaggggaacttagttcctgaggaggtgataaagaaggaaactgactccttaaaagtggcagcccatgcgtcactcaaccctgccctcttctctatgaagatggagttagctggctccaacaccactgccagttctcctgcccgggcccgaggccgacctcgaaaaactaagcccgggtctatgcaacctaggcatcttaagtcccctgtcaggggtcaggattcagaacagccccaggcccagcttcagcctgaggctcagcttcatgctcctgcccagccccagcctcagcttcagcttcagcttcagtcccataaggggttcctggagcaagaaggctcccctttgtcactgggtcagagccagcatgacctcagccagtcagccttcctgtcttggctgagccagactcagagccatagctccctgttgagcagctcagtcctcacacctgatagcagtccgggaaaactagacccagctccatcacaacccccggaggagccagagcctgatgaggcagaatccagccctgatcctcaagcactctggtttaacatctcagcccagatgccctgcaatgctgcccccacaccgccccctgcagtttctgaggaccaacccactccctcccctcagcagcttgcctcctccaagccaatgaatagacctagtgctgccaacccttgttctccagtgcagttctcttccacgcccttggctgggttggcccctaagaggcgagcaggagaccctggagaaatgccacagagtcccacagggctgggacagcccaaacggagagggagacctcccagtaagttcttcaaacagatggaacagcgttacctaacccagctgacagcccagcctgtcccacctggctggtggtggatacgagatcctgagatgttggatgccatgctcaaggccctacacccccgaggtatccgggagaaggcacttcacaaacaccttaacaagcacagggacttcttgcaggaagtctgcctgcggccctcagctgaccccatctttgagcccaggcaactacctgcctttcaagaagggattatgagctggtcccccaaagagaagacatacgagacagacctagcagtgcttcaatgggtagaggagctggagcagcgggttatcatgtctgatctgcagattcggggctggacatgtcctagcccagactctacccgtgaagacttggcctactgtgagcacctctccgactcccaggaggatatcacctggcgaggtcggggcagggagggactggcacctcagcgtaaaactaccaaccctttggacctggctgtgatgcggctggctgccctggaacagaatgtagaacggcggtacctgcgggagcccctctggccaactcatgaggttgtgctggagaaggccctgcttagcacacctaatggtgcccctgagggcaccactacagagatatcatatgagatcacccctcgcattcgtgtctggcgccagaccctcgagcggtgccggagcgcagcccaggtgtgcttgtgcctgggccagctggagaggtccattgcctgggagaagtctgtcaacaaagtgacatgtctagtctgccggaagggtgacaatgatgagtttcttctgctttgtgatgggtgtgaccgtggctgccacatttactgccatcgtcccaagatggaggctgtcccagaaggagattggttctgtactgtctgtttggctcagcaggtggagggagaattcactcagaagcctggtttcccaaagcgtggccagaagcggaaaagtggttattcgctgaacttctcagagggtgatggccgccgacgccgggtactgttgaggggccgagaaagcccagcagcagggcctcggtactcggaagaagggctctccccctccaagcggcggcgactctctatgcggaaccaccacagtgatctcacattttgcgagattatcctgatggagatggagtcccatgatgcagcctggcctttcctagagcctgtgaacccacgtttggtgagtgggtaccggcgcatcatcaaaaatcctatggatttttccaccatgcgggagcggctgctcaggggagggtacaccagctcagaggagtttgcggctgatgccctcctggtatttgacaactgccagactttcaacgaggatgactctgaagtaggcaaggctgggcacatcatgcgccgcttcttcgagagccgctgggaggagttttatcagggaaaacaggccaatctgtgaggcaagggaggtggggagtcaccttgtggcatctccccccaccttccaaacaaaaacctgccattttcacctgctgatgctgccctgggtccagactcaagtcagatacaaccctgatttttgaccttgcccttggcagtgccccacatcctcttattcctacatccctttctcccttccctcctcttgctcctcaagtaagaggtgcagagatgaggtccttctggactaaaagccaaaaaaagaaagaaaaaaataa

SEQ ID NO: 112190 - DNA, 614 bp, Homo sapiens
  Payload ID: 1974
  Gene Symbol: BAZ2A
  Gene Name: bromodomain adjacent to zinc finger domain, 2A
  ENST ID: ENST00000547650
  CDS Start-End: 1-614
gatggcagggggagacctggtattatggcccctgtgggaagaggatgaagcaatttccagaagtgatcaagtacctgagccgcaacgtggtacacagtgtccgccgagagcacttcagcttcagtccccgtatgcctgttggagatttctttgaagaaagagacacgccagagtgggtgcagctctcagcagaggagatcccgtcgaggattcaggcaattactggcaaacggggtcgacctcgaaacactgagaaggctaagactaaggaagtccccaaggtgaaacggggtcgaggtcggccacctaaggtcaaaatcactgagctattgaacaagacagacaaccgccccctaaagaaactggaggcccaagaaacattgaatgaggaggataaagcaaagattgctaaaagcaagaagaagatgaggcagaaggttcaacggggagagtgtcagactactatccaagggcaggccagaaataagcggaaacaagagaccaagagcttaaagcagaaggaagctaagaagaaatccaaggctgagaaagaaaaaggaaagacaaagcaggaaaaactgaaggaaaaagtcaagagggaaaagaaggagaag

SEQ ID NO: 112191 - DNA, 722 bp, Homo sapiens
  Payload ID: 1974
  Gene Symbol: BAZ2A
  Gene Name: bromodomain adjacent to zinc finger domain, 2A
  ENST ID: ENST00000546695
  CDS Start-End: 328-722
tctcgggccccgcggttgagccgcgtccccctcccccttcccgaaccccggaccccagaccccctccccagcgggcgtctccacccgttctggcgcccggagcgcggccatgtgaaccgcttgtaccccggggagagacgagccccgagcccggctggacgccgctgcctcaggtttgtggggtctgtggccaggggcctgagggggagggagccccgctttcatccgaggcttccctcggggaacagaagctccagagccggcttgagccttgccggggcgggaagccgacgggagcttatttcctgcgaggatccaacccgagaaatggaggcaaacgaccattttaactttactggccttccccctgcacctgctgcctcaggactgaaaccctctccttcctcaggggagggcctctacactaacgggtctcccatgaacttcccccagcaagggaaaagtttgaatggggatgtgaatgttaatggcttatctactgtatctcacactactacttcagggattttgaactctgctccccactcctccagcacctcacacctccatcaccccagcgtggcctacgactgtctctggaactactcacagtacccatctgccaatcctggcagcaacctcaaggacccaccccttctctcccagttctcggggggacaatacccactcaacggcatccttgggggcagccggcaaccttc

SEQ ID NO: 112192 - DNA, 631 bp, Homo sapiens
  Payload ID: 1975
  Gene Symbol: BAZ2B
  Gene Name: bromodomain adjacent to zinc finger domain, 2B
  ENST ID: ENST00000294905
  CDS Start-End: 1-631
aatacagcaaatcagaatggaaaaagaacttcgagctcagcaaattctagaggctaaaaagaaaaagaaggaagaagcggcaaatgccaaattattggaggccgagaaacgaataaaggaaaaagaaatgagaagacaacaagctgttcttctgaaacatcaggagttggagaggcatagactagatatggaacgagagcgaaggcgacaacacatgatgcttatgaaagctatggaagctcgtaaaaaagcagaagaaaaagagcggttgaaacaagaaaaacgtgatgagaaaagattaaataaagagcgtaaactagagcagcgaagattagaattagaaatggcaaaggaactaaagaagcctaatgaagacatgtgcttagcagaccaaaagcctttgccagagttgcctcgtattccaggacttgttctctctggaagtacattttcagactgtctcatggtggtgcagttcttacgaaactttggtaaagttttgggctttgatgtgaatattgatgttccaaacctgagtgttcttcaagagggattgctaaatataggggacagcatgggtgaagtacaagacttgcttgtgaggctcctctcagctgctgtatgtgatcca

SEQ ID NO: 112193 - DNA, 2364 bp, Homo sapiens
  Payload ID: 1975
  Gene Symbol: BAZ2B
  Gene Name: bromodomain adjacent to zinc finger domain, 2B
  ENST ID: ENST00000343439
  CDS Start-End: 298-2229
ggtacacccacagccttagccgcacatccccaactagcatcttttccagaatggtggcgaacaactgatgctcatactcgtacaggagcaaccttctttccaccattactgggaattccaccactatttgctcccccagcccagaatcatgattcttcttcattccattcaaggacttcgggaaaaagtaatcgaaatggtcccgaaaaaggtgtaaatgggtcaataaatggaagtaatacatcatctgtaattggtatcaacacatctgtactatccactactgcttcaagttccatgggacaaactaaaagtacaagctcaggtggaggaaatcgaaaatgtaatcaggaacaaagcaaaaaccagcctttggatgctagagttgacaaaatcaaagataagaaaccaaggaagaaagcaatggaaagttctagcaacagtgatagtgattcaggcacatcatcagacacctcaagtgaaggcattagtagcagtgattcagatgatctagaagaagatgaagaagaagaagatcaaagtattgaagaaagtgaagatgatgattctgattcagagagtgaagcacaacataaaagtaacaaccaggtgctattacatggtatttcagacccaaaagcagatggacagaaagcaactgaaaaagcccaggaaaaaagaatacaccagccattacctcttgcgtctgaatcccagactcactcattccaatcccagcagaagcagcctcaggttttgtcacagcagcttccatttattttccaaagctctcaggcaaaggaggaatctgtgaacaaacacaccagtgtaatacagtctacgggattggtgtccaatgtgaaacctttatctttggtaaatcaagccaaaaaggaaacttacatgaaactcatagttccttctcctgatgttcttaaagcagggaataaaaatacctctgaagaatctagtttattgaccagtgaattgagatccaaacgggaacaatataaacaggcattcccatcacagttaaagaaacaagagtcatcgaagagcctgaagaaggttattgcagctttgtcaaatccaaaagcaacctctagttcaccagcacatccaaaacaaacattagaaaacaaccacccaaatccattcttgacaaatgcacttttaggtaatcaccaaccaaatggagttattcaaagtgtcattcaagaagctcctctagcacttactaccaaaactaaaatgcagagcaagattaatgaaaacattgctgctgcaagtagcacccctttttcctcacctgtaaatctgagtacaagtgggagaagaacccctggcaatcagacacctgtaatgccctctgcctctcccatcctgcatagtcaagggaaggaaaaagcagttagcaataatgtaaacccagtaaaaacacagcatcactcccatcctgcaaaatctttagtggaacaattcagaggaacagattcagacattcccagtagtaaagattctgaagattcaaatgaggatgaagaggaagatgatgaagaagaagatgaggaagatgatgaagatgatgaatctgatgacagccaatcaggcacttccaaaagaagaagagtaacagatgaacgtgaactgcgtattccattggaatatggctggcagagagagacaagaataagaaactttggagggcgccttcaaggagaagtagcatattatgctccatgtggaaagaaacttaggcagtaccctgaagtaataaagtatctcagcagaaatggaataatggatatctcaagggacaatttcagcttcagtgcaaaaataagagtgggtgacttctatgaagccagagatggaccgcagggaatgcagtggtgtcttttgaaagaagaggatgtcattcctcgtatcagggcaatggaaggtcgtagaggaagaccaccaaatccagatagacaacgagcaagagaggaatccaggatgagacgtcggaaaggtcgacctccaaatgttggcaatgctgaattcctagataacgcagatgcaaagttgctaagaaaactgcaagctcaagaaatagccaggcaagcagcacaaataaagcttttgagaaaacttcaaaagcaggaacaggctcgggttgctaaagaagccaaaaaacaacaagcaataatgctgctgaggagaagcggaagcaaaaagaacagataaagattatgaaacagcaggaaaaaattaagagaatacagcaaatcagaatggaaaaagaacttcgagctcagcaaattctagaggctaaaaagaaaaagaaggaagaagcggcaaatgccaaattattggaggccg

SEQ ID NO: 112194 - DNA, 8058 bp, Homo sapiens
  Payload ID: 1975
  Gene Symbol: BAZ2B
  Gene Name: bromodomain adjacent to zinc finger domain, 2B
  Uniprot ID: Q9UIF8
  ENST ID: ENST00000392782
  CDS Start-End: 374-6772
gaagccttgttggttgacgtcacttggttcatgaagccttcgcctagaagtgaagctgctgaacaaaccttgagaagaatcatctcctgcttcaatctgctgctggataggaactaatcagagagagagaggcggaagacggagaaggagggagtcgaaggctttcccgatcacaaatctcacctccactacaactctctttatacttttcttgcagaaataataatagaaataaggaggtggtggggtttccaaaaatcttaaccttcaaccatctggggaaaaggcaaaaatcccatctaccgcaactctcagttcgagagtaaaggtttcccaacagtgatgtcacaagattgaccacattgatcacaatatggagtctggagaacggttaccatcctcagcagcctcctctactacaccaacttcatcttcgacaccttctgtggcttcagtagtttcaaaaggtggcctttccactggagttgcttcacttagctctacaatcaacccatgtggacatttattcagaacagctggggatcaaccgtttaacctgtccacagtgtcgagtgccttcccaatggtcagccacccagtctttggtctacattcagccagctcagggcattcagaatttggtggtttggggacacttggtacacccacagccttagccgcacatccccaactagcatcttttccagaatggtggcgaacaactgatgctcatactcgtacaggagcaaccttctttccaccattactgggaattccaccactatttgctcccccagcccagaatcatgattcttcttcattccattcaaggacttcgggaaaaagtaatcgaaatggtcccgaaaaaggtgtaaatgggtcaataaatggaagtaatacatcatctgtaattggtatcaacacatctgtactatccactactgcttcaagttccatgggacaaactaaaagtacaagctcaggtggaggaaatcgaaaatgtaatcaggaacaaagcaaaaaccagcctttggatgctagagttgacaaaatcaaagataagaaaccaaggaagaaagcaatggaaagttctagcaacagtgatagtgattcaggcacatcatcagacacctcaagtgaaggcattagtagcagtgattcagatgatctagaagaagatgaagaagaagaagatcaaagtattgaagaaagtgaagatgatgattctgattcagagagtgaagcacaacataaaagtaacaaccaggtgctattacatggtatttcagacccaaaagcagatggacagaaagcaactgaaaaagcccaggaaaaaagaatacaccagccattacctcttgcgtctgaatcccagactcactcattccaatcccagcagaagcagcctcaggttttgtcacagcagcttccatttattttccaaagctctcaggcaaaggaggaatctgtgaacaaacacaccagtgtaatacagtctacgggattggtgtccaatgtgaaacctttatctttggtaaatcaagccaaaaaggaaacttacatgaaactcatagttccttctcctgatgttcttaaagcagggaataaaaatacctctgaagaatctagtttattgaccagtgaattgagatccaaacgggaacaatataaacaggcattcccatcacagttaaagaaacaagagtcatcgaagagcctgaagaaggttattgcagctttgtcaaatccaaaagcaacctctagttcaccagcacatccaaaacaaacattagaaaacaaccacccaaatccattcttgacaaatgcacttttaggtaatcaccaaccaaatggagttattcaaagtgtcattcaagaagctcctctagcacttactaccaaaactaaaatgcagagcaagattaatgaaaacattgctgctgcaagtagcacccctttttcctcacctgtaaatctgagtacaagtgggagaagaacccctggcaatcagacacctgtaatgccctctgcctctcccatcctgcatagtcaagggaaggaaaaagcagttagcaataatgtaaacccagtaaaaacacagcatcactcccatcctgcaaaatctttagtggaacaattcagaggaacagattcagacattcccagtagtaaagattctgaagattcaaatgaggatgaagaggaagatgatgaagaagaagatgaggaagatgatgaagatgatgaatctgatgacagccaatcagaatcagatagtaattcagaatcagatacagaaggatcagaagaagaagatgatgatgataaagaccaagatgaatcagatagtgatactgaaggagagaaaacttcaatgaaactgaataaaacaacttcctctgtcaaaagcccttccatgagtctcacaggtcactcaacacctcgtaacctccacatagcaaaagccccaggctctgctcctgctgccttatgttctgaatcccagtcacctgcttttcttggtacatcttcttccacacttacttcaagcccacactctggcacttccaaaagaagaagagtaacagatgaacgtgaactgcgtattccattggaatatggctggcagagagagacaagaataagaaactttggagggcgccttcaaggagaagtagcatattatgctccatgtggaaagaaacttaggcagtaccctgaagtaataaagggaatgcagtggtgtcttttgaaagaagaggatgtcattcctcgtatcagggcaatggaaggtcgtagaggaagaccaccaaatccagatagacaacgagcaagagaggaatccaggatgagacgtcggaaaggtcgacctccaaatgttggcaatgctgaattcctagataacgcagatgcaaagttgctaagaaaactgcaagctcaagaaatagccaggcaagcagcacaaataaagcttttgagaaaacttcaaaagcaggaacaggctcgggttgctaaagaagccaaaaaacaacaagcaataatggctgctgaggagaagcggaagcaaaaagaacagataaagattatgaaacagcaggaaaaaattaagagaatacagcaaatcagaatggaaaaagaacttcgagctcagcaaattctagaggctaaaaagaaaaagaaggaagaagcggcaaatgccaaattattggaggccgagaaacgaataaaggaaaaagaaatgagaagacaacaagctgttcttctgaaacatcaggaacgagagcgaaggcgacaacacatgatgcttatgaaagctatggaagctcgtaaaaaagcagaagaaaaagagcggttgaaacaagaaaaacgtgatgagaaaagattaaataaagagcgtaaactagagcagcgaagattagaattagaaatggcaaaggaactaaagaagcctaatgaagacatgtgcttagcagaccaaaagcctttgccagagttgcctcgtattccaggacttgttctctctggaagtacattttcagactgtctcatggtggtgcagttcttacgaaactttggtaaagttttgggctttgatgtgaatattgatgttccaaacctgagtgttcttcaagagggattgctaaatataggggacagcatgggtgaagtacaagacttgcttgtgaggctcctctcagctgctgtatgtgatccaggtctaataacaggatacaaggctaaaacagctcttggagaacatttgctgaatgttggtgtgaatcgagacaatgtttccgagattttacagatatttatggaagcccactgtggacaaactgagcttactgaaagtctgaagaccaaagcttttcaggctcacactccagcacagaaagcttcagtcctggctttcctgatcaatgaactggcatgcagcaagagtgtggtcagtgaaatcgacaagaacattgattatatgtcaaacttgaggagagataaatgggtggtagaaggtaaactccgcaagctcagaatcattcatgctaagaaaacaggcaaaagagacacttcaggtggcattgatctgggagaagagcagcatcccttgggcacacccactccaggacgcaagcgaagaaggaagggaggagacagtgattatgacgatgatgatgacgatgacagtgatgaccaaggggatgaagatgatgaggatgaagaagataaagaagacaaaaaaggaaaaaagactgatatctgtgaagatgaggatgaaggtgaccaagcagcaagtgttgaagagctggaaaaacagattgaaaaactgagtaaacaacagagtcagtacagaaggaagctctttgatgcgtctcactcattgcgttcagtgatgtttggccaagatcgttacagacgccggtactggattcttccccaatgtggggggatttttgtagaaggcatggagagtggtgaaggactagaagaaattgcaaaagaaagagaaaaactgaaaaaggcagaaagtgtccagatcaaagaagaaatgtttgagacttctggggacagtttaaattgttcaaatacagatcactgtgaacaaaaggaagatcttaaagaaaaagataacacaaatctattccttcagaaacctggctctttttccaaattaagcaagcttttggaagtagctaagatgcctcctgagtcagaggttatgacccccaaaccaaatgctggtgcaaatgggtgcacgttgtcttatcagaacagtggaaaacattcactgggcagcgttcagtcaacagcaacgcaaagcaatgtggaaaaggcagactctaataatctgtttaatactggttcaagtggtccagggaagttctacagtcctctccccaatgaccagttactaaaaacgctgactgaaaagaatagacaatggtttagtcttttgccacgaacaccctgtgatgacacttcacttactcatgccgatatgtcaactgcttctttggtgactcctcagtctcagccaccatctaagtcaccttcacctaccccagctcctcttggatcttctgctcagaatcctgttggcttaaatccatttgctttatcacctcttcaggtgaaaggtggagtatctatgatgggacttcagttttgtggatggcccactggtgtggttacttctaatattccatttacatcatctgtacctagtctaggatcggggttagggttatcagaaggaaatggtaattcattcttgacttccaatgttgcttcaagtaaaagtgaatctccagtaccacagaatgaaaaggccacttcagctcaacctgcagctgttgaagtagcaaaaccagtagattttcctagtccaaaacctattccagaagaaatgcagtttggttggtggagaattattgacccagaggacctaaaagctttgctcaaagtgctgcatctcagaggaataagagaaaaggcattacaaaaacaaattcagaaacatttggattatattactcaagcctgcctcaagaataaggatgttgctattattgaactgaatgaaaatgaagaaaaccaagtaactcgagatattgtggagaactggtcagtagaagaacaagcaatggaaatggatttgagtgtccttcaacaggtagaagatctagaaaggagagttgcatcagcaagtttgcaagtgaagggttggatgtgtccagagcctgcatcagaaagggaggacttggtatattttgaacataaatcatttactaaattgtgcaaggagcatgatggagaatttactggcgaagacgaaagcagtgcacatgcactagaacggaagagtgacaaccccctagatatagctgtaaccaggctggctgatttggagcggaacattgaaagaagaattgaagaggatattgctccagggctcagggtatggagaagggcattatcagaagctcgcagtgctgcacaggtagctctgtgcattcagcaattacagaaatcaatagcatgggaaaaatcaattatgaaagtttactgccaaatctgtcgaaagggagataatgaagaactgcttcttctttgtgatggctgtgacaaaggctgtcatacctactgccatagacccaagattacaacaatcccagatggagactggttttgtccagcttgcattgctaaggcaagtggtcaaactctaaaaatcaaaaaacttcatgtcaaaggaaaaaagactaatgagtcaaagaaaggcaagaaggtaactttaacaggagatactgaagatgaagactctgcatctacaagtagttcactaaaaagaggaaacaaagacctcaagaaaagaaaaatggaggaaaacacttctattaacttgtcaaaacaagaaagttttacttcagttaagaaacctaaaagagatgactccaaggacctagctctttgcagtatgattctgactgaaatggaaactcatgaggatgcatggccttttctacttcctgtaaacttgaaacttgttcctggttataagaaagttattaagaagcctatggatttttccacaattagagagaaactaagtagtggacagtatccaaaccttgaaacctttgctctagatgtcaggcttgtttttgacaactgtgaaacatttaatgaagatgattctgatataggcagagctggccacaatatgaggaagtattttgaaaaaaagtggacagatactttcaaagtgagctgaagttataataatctctttatttttttccttctaaacaaggacaaatgagaccagcaatgtgaactgtatttacataaacgtgcaaggcacatacataatgactttctttttccttaagtataaaaaaaaagtatcagaagaatgataccatttttaaaggcttcattcctacaacaaccaaggccctcggttattggtttgtgtgatttatcagctaatttaggtagaacagggaagcacacccaaagaattttcaaaggaaagggtgttatagtgcaatagcaattaaaatatatcaaatcgcactgaatactcaacaccagagctctaatgtgggaaatggttctcctttccctctcaataaatatctatttttcatttttttactttgtagtttattttttagtgaatgtatttaattttatgaattatttatgattaaaccacatccagaatcttcgttttctgtgaaaaggaagaactagaaaattgctttaaatcttgaaaatacaaggaatgttttaaaatataaaacaaagccaagttaaactgtttacactgatgtgctataaaagcaccaaaaagaaactttactgtagagttacaagtacatttatatatatatgttgctgcatcacttgtgtagttaaattgtatttcaaaacagtgaaaaaattgacatgtatatactgttcattcttgtttatattaagtcttgttttaaatatgtattatgtgtatatattgtttgcagacattattgttcatgccttagaggattgtagcattttattttcgtctgaaggtaatgatagctatacagtctgtacagtaattatcctctaccaacactgtggcgtctccttaatcttggtagtgcctgcctttgaaacagggtgtaggggatattagttttccatttttctattttgttatataattttaagccaccagggcctaaattaaagtataatcatttgtatccatgtggaataaaattgtgacaatttcctacgcacacagtattttttcatagaaacatttccctcccatttgccttgcctcagaaataaatttaaaagacgtttgtaaccactgtgttttatctactgtgtgttgtggtggcctgttggaggcaaatagatcagattttttttgtacctacgtaagagtacttgaagttttatttaaaataaaatgttgtggaaaaggtagcattctttttttaggagtgttatttttcactatgtgtggcacggatacaataaaagacttttacaaactaa

SEQ ID NO: 112195 - DNA, 8289 bp, Homo sapiens
  Payload ID: 1975
  Gene Symbol: BAZ2B
  Gene Name: bromodomain adjacent to zinc finger domain, 2B
  Uniprot ID: Q9UIF8
  ENST ID: ENST00000392783
  CDS Start-End: 497-7003
tcccttggctcctttaggagctgataggtcatttattattggaactgaaatggtataaacaattctctctctttttttcccttgttaacagcaactttcattgttagagagaggagagagagagaagccttgttggttgacgtcacttggttcatgaagccttcgcctagaagtgaagctgctgaacaaaccttgagaagaatcatctcctgcttcaatctgctgctggataggaactaatcagagagagagaggcggaagacggagaaggagggagtcgaaggctttcccgatcacaaatctcacctccactacaactctctttatacttttcttgcagaaataataatagaaataaggaggtggtggggtttccaaaaatcttaaccttcaaccatctggggaaaaggcaaaaatcccatctaccgcaactctcagttcgagagtaaaggtttcccaacagtgatgtcacaagattgaccacattgatcacaatatggagtctggagaacggttaccatcctcagcagcctcctctactacaccaacttcatcttcgacaccttctgtggcttcagtagtttcaaaaggtggcctttccactggagttgcttcacttagctctacaatcaacccatgtggacatttattcagaacagctggggatcaaccgtttaacctgtccacagtgtcgagtgccttcccaatggtcagccacccagtctttggtctacattcagccagctcagggcattcagaatttggtggtttggggacacttggtacacccacagccttagccgcacatccccaactagcatcttttccaggtgcagaatggtggcgaacaactgatgctcatactcgtacaggagcaaccttctttccaccattactgggaattccaccactatttgctcccccagcccagaatcatgattcttcttcattccattcaaggacttcgggaaaaagtaatcgaaatggtcccgaaaaaggtgtaaatgggtcaataaatggaagtaatacatcatctgtaattggtatcaacacatctgtactatccactactgcttcaagttccatgggacaaactaaaagtacaagctcaggtggaggaaatcgaaaatgtaatcaggaacaaagcaaaaaccagcctttggatgctagagttgacaaaatcaaagataagaaaccaaggaagaaagcaatggaaagttctagcaacagtgatagtgattcaggcacatcatcagacacctcaagtgaaggcattagtagcagtgattcagatgatctagaagaagatgaagaagaagaagatcaaagtattgaagaaagtgaagatgatgattctgattcagagagtgaagcacaacataaaagtaacaaccaggtgctattacatggtatttcagacccaaaagcagatggacagaaagcaactgaaaaagcccaggaaaaaagaatacaccagccattacctcttgcgtctgaatcccagactcactcattccaatcccagcagaagcagcctcaggttttgtcacagcagcttccatttattttccaaagctctcaggcaaaggaggaatctgtgaacaaacacaccagtgtaatacagtctacgggattggtgtccaatgtgaaacctttatctttggtaaatcaagccaaaaaggaaacttacatgaaactcatagttccttctcctgatgttcttaaagcagggaataaaaatacctctgaagaatctagtttattgaccagtgaattgagatccaaacgggaacaatataaacaggcattcccatcacagttaaagaaacaagagtcatcgaagagcctgaagaaggttattgcagctttgtcaaatccaaaagcaacctctagttcaccagcacatccaaaacaaacattagaaaacaaccacccaaatccattcttgacaaatgcacttttaggtaatcaccaaccaaatggagttattcaaagtgtcattcaagaagctcctctagcacttactaccaaaactaaaatgcagagcaagattaatgaaaacattgctgctgcaagtagcacccctttttcctcacctgtaaatctgagtacaagtgggagaagaacccctggcaatcagacacctgtaatgccctctgcctctcccatcctgcatagtcaagggaaggaaaaagcagttagcaataatgtaaacccagtaaaaacacagcatcactcccatcctgcaaaatctttagtggaacaattcagaggaacagattcagacattcccagtagtaaagattctgaagattcaaatgaggatgaagaggaagatgatgaagaagaagatgaggaagatgatgaagatgatgaatctgatgacagccaatcagaatcagatagtaattcagaatcagatacagaaggatcagaagaagaagatgatgatgataaagaccaagatgaatcagatagtgatactgaaggagagaaaacttcaatgaaactgaataaaacaacttcctctgtcaaaagcccttccatgagtctcacaggtcactcaacacctcgtaacctccacatagcaaaagccccaggctctgctcctgctgccttatgttctgaatcccagtcacctgcttttcttggtacatcttcttccacacttacttcaagcccacactctggcacttccaaaagaagaagagtaacagatgaacgtgaactgcgtattccattggaatatggctggcagagagagacaagaataagaaactttggagggcgccttcaaggagaagtagcatattatgctccatgtggaaagaaacttaggcagtaccctgaagtaataaagtatctcagcagaaatggaataatggatatctcaagggacaatttcagcttcagtgcaaaaataagagtgggtgacttctatgaagccagagatggaccgcagggaatgcagtggtgtcttttgaaagaagaggatgtcattcctcgtatcagggcaatggaaggtcgtagaggaagaccaccaaatccagatagacaacgagcaagagaggaatccaggatgagacgtcggaaaggtcgacctccaaatgttggcaatgctgaattcctagataacgcagatgcaaagttgctaagaaaactgcaagctcaagaaatagccaggcaagcagcacaaataaagcttttgagaaaacttcaaaagcaggaacaggctcgggttgctaaagaagccaaaaaacaacaagcaataatggctgctgaggagaagcggaagcaaaaagaacagataaagattatgaaacagcaggaaaaaattaagagaatacagcaaatcagaatggaaaaagaacttcgagctcagcaaattctagaggctaaaaagaaaaagaaggaagaagcggcaaatgccaaattattggaggccgagaaacgaataaaggaaaaagaaatgagaagacaacaagctgttcttctgaaacatcaggaacgagagcgaaggcgacaacacatgatgcttatgaaagctatggaagctcgtaaaaaagcagaagaaaaagagcggttgaaacaagaaaaacgtgatgagaaaagattaaataaagagcgtaaactagagcagcgaagattagaattagaaatggcaaaggaactaaagaagcctaatgaagacatgtgcttagcagaccaaaagcctttgccagagttgcctcgtattccaggacttgttctctctggaagtacattttcagactgtctcatggtggtgcagttcttacgaaactttggtaaagttttgggctttgatgtgaatattgatgttccaaacctgagtgttcttcaagagggattgctaaatataggggacagcatgggtgaagtacaagacttgcttgtgaggctcctctcagctgctgtatgtgatccaggtctaataacaggatacaaggctaaaacagctcttggagaacatttgctgaatgttggtgtgaatcgagacaatgtttccgagattttacagatatttatggaagcccactgtggacaaactgagcttactgaaagtctgaagaccaaagcttttcaggctcacactccagcacagaaagcttcagtcctggctttcctgatcaatgaactggcatgcagcaagagtgtggtcagtgaaatcgacaagaacattgattatatgtcaaacttgaggagagataaatgggtggtagaaggtaaactccgcaagctcagaatcattcatgctaagaaaacaggcaaaagagacacttcaggtggcattgatctgggagaagagcagcatcccttgggcacacccactccaggacgcaagcgaagaaggaagggaggagacagtgattatgacgatgatgatgacgatgacagtgatgaccaaggggatgaagatgatgaggatgaagaagataaagaagacaaaaaaggaaaaaagactgatatctgtgaagatgaggatgaaggtgaccaagcagcaagtgttgaagagctggaaaaacagattgaaaaactgagtaaacaacagagtcagtacagaaggaagctctttgatgcgtctcactcattgcgttcagtgatgtttggccaagatcgttacagacgccggtactggattcttccccaatgtggggggatttttgtagaaggcatggagagtggtgaaggactagaagaaattgcaaaagaaagagaaaaactgaaaaaggcagaaagtgtccagatcaaagaagaaatgtttgagacttctggggacagtttaaattgttcaaatacagatcactgtgaacaaaaggaagatcttaaagaaaaagataacacaaatctattccttcagaaacctggctctttttccaaattaagcaagcttttggaagtagctaagatgcctcctgagtcagaggttatgacccccaaaccaaatgctggtgcaaatgggtgcacgttgtcttatcagaacagtggaaaacattcactgggcagcgttcagtcaacagcaacgcaaagcaatgtggaaaaggcagactctaataatctgtttaatactggttcaagtggtccagggaagttctacagtcctctccccaatgaccagttactaaaaacgctgactgaaaagaatagacaatggtttagtcttttgccacgaacaccctgtgatgacacttcacttactcatgccgatatgtcaactgcttctttggtgactcctcagtctcagccaccatctaagtcaccttcacctaccccagctcctcttggatcttctgctcagaatcctgttggcttaaatccatttgctttatcacctcttcaggtgaaaggtggagtatctatgatgggacttcagttttgtggatggcccactggtgtggttacttctaatattccatttacatcatctgtacctagtctaggatcggggttagggttatcagaaggaaatggtaattcattcttgacttccaatgttgcttcaagtaaaagtgaatctccagtaccacagaatgaaaaggccacttcagctcaacctgcagctgttgaagtagcaaaaccagtagattttcctagtccaaaacctattccagaagaaatgcagtttggttggtggagaattattgacccagaggacctaaaagctttgctcaaagtgctgcatctcagaggaataagagaaaaggcattacaaaaacaaattcagaaacatttggattatattactcaagcctgcctcaagaataaggatgttgctattattgaactgaatgaaaatgaagaaaaccaagtaactcgagatattgtggagaactggtcagtagaagaacaagcaatggaaatggatttgagtgtccttcaacaggtagaagatctagaaaggagagttgcatcagcaagtttgcaagtgaagggttggatgtgtccagagcctgcatcagaaagggaggacttggtatattttgaacataaatcatttactaaattgtgcaaggagcatgatggagaatttactggcgaagacgaaagcagtgcacatgcactagaacggaagagtgacaaccccctagatatagctgtaaccaggctggctgatttggagcggaacattgaaagaagaattgaagaggatattgctccagggctcagggtatggagaagggcattatcagaagctcgcagtgctgcacaggtagctctgtgcattcagcaattacagaaatcaatagcatgggaaaaatcaattatgaaagtttactgccaaatctgtcgaaagggagataatgaagaactgcttcttctttgtgatggctgtgacaaaggctgtcatacctactgccatagacccaagattacaacaatcccagatggagactggttttgtccagcttgcattgctaaggcaagtggtcaaactctaaaaatcaaaaaacttcatgtcaaaggaaaaaagactaatgagtcaaagaaaggcaagaaggtaactttaacaggagatactgaagatgaagactctgcatctacaagtagttcactaaaaagaggaaacaaagacctcaagaaaagaaaaatggaggaaaacacttctattaacttgtcaaaacaagaaagttttacttcagttaagaaacctaaaagagatgactccaaggacctagctctttgcagtatgattctgactgaaatggaaactcatgaggatgcatggccttttctacttcctgtaaacttgaaacttgttcctggttataagaaagttattaagaagcctatggatttttccacaattagagagaaactaagtagtggacagtatccaaaccttgaaacctttgctctagatgtcaggcttgtttttgacaactgtgaaacatttaatgaagatgattctgatataggcagagctggccacaatatgaggaagtattttgaaaaaaagtggacagatactttcaaagtgagctgaagttataataatctctttatttttttccttctaaacaaggacaaatgagaccagcaatgtgaactgtatttacataaacgtgcaaggcacatacataatgactttctttttccttaagtataaaaaaaaagtatcagaagaatgataccatttttaaaggcttcattcctacaacaaccaaggccctcggttattggtttgtgtgatttatcagctaatttaggtagaacagggaagcacacccaaagaattttcaaaggaaagggtgttatagtgcaatagcaattaaaatatatcaaatcgcactgaatactcaacaccagagctctaatgtgggaaatggttctcctttccctctcaataaatatctatttttcatttttttactttgtagtttattttttagtgaatgtatttaattttatgaattatttatgattaaaccacatccagaatcttcgttttctgtgaaaaggaagaactagaaaattgctttaaatcttgaaaatacaaggaatgttttaaaatataaaacaaagccaagttaaactgtttacactgatgtgctataaaagcaccaaaaagaaactttactgtagagttacaagtacatttatatatatatgttgctgcatcacttgtgtagttaaattgtatttcaaaacagtgaaaaaattgacatgtatatactgttcattcttgtttatattaagtcttgttttaaatatgtattatgtgtatatattgtttgcagacattattgttcatgccttagaggattgtagcattttattttcgtctgaaggtaatgatagctatacagtctgtacagtaattatcctctaccaacactgtggcgtctccttaatcttggtagtgcctgcctttgaaacagggtgtaggggatattagttttccatttttctattttgttatataattttaagccaccagggcctaaattaaagtataatcatttgtatccatgtggaataaaattgtgacaatttcctacgcacacagtattttttcatagaaacatttccctcccatttgccttgcctcagaaataaatttaaaagacgtttgtaaccactgtgttttatctactgtgtgttgtggtggcctgttggaggcaaatagatcagattttttttgtacctacgtaagagtacttgaagttttatttaaaataaaatgttgtggaaaaggtagcattctttttttaggagtgttatttttcactatgtgtggcacggatacaataaaagacttttacaaactaa

SEQ ID NO: 112196 - DNA, 580 bp, Homo sapiens
  Payload ID: 1975
  Gene Symbol: BAZ2B
  Gene Name: bromodomain adjacent to zinc finger domain, 2B
  ENST ID: ENST00000441143
  CDS Start-End: 1-580
caataatgtaaacccagtaaaaacacagcatcactcccatcctgcaaaatctttagtggaacaattcagaggaacagattcagacattcccagtagtaaagattctgaagattcaaatgaggatgaagaggaagatgatgaagaagaagatgaggaagatgatgaagatgatgaatctgatgacagccaatcaggcacttccaaaagaagaagagtaacagatgaacgtgaactgcgtattccattggaatatggctggcagagagagacaagaataagaaactttggagggcgccttcaaggagaagtagcatattatgctccatgtggaaagaaacttaggcagtaccctgaagtaataaagtatctcagcagaaatggaataatggatatctcaagggacaatttcagcttcagtgcaaaaataagagtgggtgacttctatgaagccagagatggaccgcagggaatgcagtggtgtcttttgaaagaagaggatgtcattcctcgtatcagggcaatggaaggtcgtagaggaagaccaccaaatccagatagacaacgagcaagagaggaatcc

SEQ ID NO: 112197 - DNA, 537 bp, Homo sapiens
  Payload ID: 1975
  Gene Symbol: BAZ2B
  Gene Name: bromodomain adjacent to zinc finger domain, 2B
  ENST ID: ENST00000426648
  CDS Start-End: 1-537
gtggagaactggtcagtagaagaacaagcaatggaaatggatttgagtgtccttcaacaggtagaagatctagaaaggagagttgcatcagcaagtttgcaagtgaagggttggatgtgtccagagcctgcatcagaaagggaggacttggtatattttgaacataaatcatttactaaattgtgcaaggagcatgatggagaatttactggcgaagacgaaagcagtgcacatgcactagaacggaagagtgacaaccccctagatatagctgtaaccaggctggctgatttggagcggaacattgaaagaaggtatctgaagagccccttaagtaccaccattcagatcaaactggataatgtgggcacagttactgtccctgctcctgcaccatccgttagtggtgatggtgacggaattgaagaggatattgctccagggctcagggtatggagaagggcattatcagaagctcgcagtgctgcacaggtagctctgtgcattcagcaattacagaaatcaatagcatgggaa

SEQ ID NO: 112198 - DNA, 640 bp, Homo sapiens
  Payload ID: 1975
  Gene Symbol: BAZ2B
  Gene Name: bromodomain adjacent to zinc finger domain, 2B
  ENST ID: ENST00000437839
  CDS Start-End: 213-640
ccggcttgggcctctagctctcccgtgtgtagctggaggctctgagtttactgaagatgagcgggggtgggggtggggcaggtgggattgggaaaagatctggatacctgggaaggtctatgtcagcacgcagaaggtttgaggagcattgcttctcatacagtaaggtttcccaacagtgatgtcacaagattgaccacattgatcacaatatggagtctggagaacggttaccatcctcagcagcctcctctactacaccaacttcatcttcgacaccttctgtggcttcagtagtttcaaaaggtggcctttccactggagttgcttcacttagctctacaatcaacccatgtggacatttattcagaacagctggggatcaaccgtttaacctgtccacagtgtcgagtgccttcccaatggtcagccacccagtctttggtctacattcagccagctcagggcattcagaatttggtggtttggggacacttggtacacccacagccttagccgcacatccccaactagcatcttttccaggtgcagaatggtggcgaacaactgatgctcatactcgtacaggagcaaccttctttccaccattactgggaattccaccactatttgctccccc

SEQ ID NO: 112199 - DNA, 594 bp, Homo sapiens
  Payload ID: 1975
  Gene Symbol: BAZ2B
  Gene Name: bromodomain adjacent to zinc finger domain, 2B
  ENST ID: ENST00000541068
  CDS Start-End: 310-594
aaaccttgagaagaatcatctcctgcttcaatctgctgctggataggaactaatcagagagagagaggcggaagacggagaaggagggagtcgaaggctttcccgatcacaaatctcacctccactacaactctctttatacttttcttgcagaaataataatagaaataaggaggtggtggggtttccaaaaatcttaaccttcaaccatctggggaaaaggcaaaaatcccatctaccgcaactctcagttcgagagtaaaggtttcccaacagtgatgtcacaagattgaccacattgatcacaatatggagtctggagaacggttaccatcctcagcagcctcctctactacaccaacttcatcttcgacaccttctgtggcttcagtagtttcaaaaggtggcctttccactggagttgcttcacttagctctacaatcaacccatgtggtgtaaatgggtcaataaatggaagtaatacatcatctgtaattggtatcaacacatctgtactatccactactgcttcaagttccatgggacaaactaaaagtacaagctcaggtggaggaaatcgaaaatgtaatcag

SEQ ID NO: 112200 - DNA, 4736 bp, Homo sapiens
  Payload ID: 1976
  Gene Symbol: BRPF1
  Gene Name: bromodomain and PHD finger containing, 1
  Uniprot ID: P55201
  ENST ID: ENST00000383829
  CDS Start-End: 405-4067
gacgccgtcgccgccgctgctgccgccgccgctgccacagcctttgccgccacggtctccgccgccgctgtcctcgcgctgcctctgggagcctccattgttccagcagcgcccggtcccgagaccgggcatcttgggggctcgcgaaacgggcggcggccgacggagttgagaccccagggcgccggcgggaccaggagcggcaggggtcagctcaggaatcccggggagccgggaccaaagcgtggggcggcagggggccggggtggcgaggtctacggtctccggagttggggctcccccttcccggcccgactttccccgccgacctccccaagtggggtcggagccccggcgggcgcccccggcgatgagcccggactcgaggtggccgatgtgacagcatgggggtggactttgatgtgaagactttctgccacaacttgcgggcgactaagccaccatacgagtgcccggtggagacctgccgaaaggtctacaagagttacagtggtattgagtaccacctgtaccactatgaccacgacaacccaccacccccacaacaaactccactccgcaagcacaagaaaaaggggcgccagtcacgcccagccaacaagcagtcacccagcccctcagaggtctcacagtcaccaggccgtgaggtgatgagctatgcacaggcccagcgcatggtggaggtggacttgcatggccgcgtccaccgcatcagcatctttgacaacctggatgtggtgtcagaggatgaggaagcccccgaggaggcccctgagaatggcagcaacaaggagaacactgagacaccagctgctactcccaagtcaggcaaacataagaacaaggagaagcgcaaggactccaaccatcaccaccaccacaatgtttctgcgagcaccactcccaagctgccagaggtggtctatcgggagctggaacaggacacccctgatgccccaccccggccaacttcctattaccggtacatcgagaagtctgcagaggagctggacgaggaagtagagtatgacatggacgaggaggactacatctggctggatatcatgaatgagcgtcggaagacagagggtgtaagtcccatcccgcaggagatctttgagtacctaatggaccgactggagaaggagtcgtactttgagagtcataataaaggcgaccctaatgcgctagtggacgaggatgctgtttgctgtatctgcaatgatggtgagtgccagaacagcaatgtcatcctcttctgtgacatgtgcaacctggccgtgcaccaggagtgctacggtgtcccctatatccctgagggccagtggctgtgccgccgttgcctgcagtcaccctctcgtgctgtggattgtgccctgtgccccaacaagggcggtgccttcaagcagacagatgacgggcgctgggcccatgtggtgtgtgccttgtggatccctgaggtctgcttcgccaacacggtcttcctagagcctattgacagcattgagcacatcccaccagctcgctggaagctcacctgctacatttgcaaacaacggggctcaggggcctgcatccagtgccacaaggccaactgttacacagctttccatgtgacatgcgcccagcaggctggcctttacatgaagatggagcctgtgcgggagacaggcgccaacggcacctctttcagtgtccgcaagacagcctactgcgacatccacacgcctccaggttcagcacgccgactgcctgccctgtcccacagcgagggtgaggaggatgaagatgaggaggaggatgagggtaagggctggagctcagagaaagtcaagaaggccaaggccaagtcccggatcaaaatgaagaaggcacggaagatcctggcagagaagcgggcagcagcacctgtggtgtcagtgccctgcatcccaccacacaggcttagtaaaatcaccaaccgcctgaccatccaaaggaagagccagttcatgcagaggctgcacagctactggacactgaagcggcagtcacggaatggggtcccattgctacgtcgcctgcagacacacctgcaatctcagaggaactgtgaccaagttgggagagattctgaggataagaactgggcccttaaagaacagctcaagtcctggcagcggctccggcatgacttggagcgagctcggctgctcgtggaattgatccgcaagcgggaaaaactcaaaagggagacgatcaaggttcagcagattgccatggagatgcagctgactcctttcctcatcctccttcgcaaaaccttggagcagctccaagagaaggacacaggcaacatcttcagcgagccggtccctctgtctgaggtaaccgaattggacgaagtacctgactacctagaccacatcaaaaagcccatggactttttcaccatgaagcagaacttggaggcttaccgctacctgaattttgatgattttgaggaggacttcaacctcatcgtcagcaactgcctcaagtataacgccaaggacaccatcttctaccgggcagcagtgcggcttcgtgagcagggtggtgctgtgctccgccaggcccggcgccaggcagaaaaaatgggcattgactttgagacgggcatgcatatcccccacagcctggctggagatgaggccacacaccacactgaagatgcagccgaggaagagcggctggtcttgctggagaaccagaagcacctgccagtggaagaacagctaaagctgcttctggagcggctggacgaagtgaatgccagcaagcagagtgtgggccgctcacggcgtgcaaagatgatcaagaaagagatgacggcactgcggcggaagcttgcccatcagcgagagacgggacgtgatggccctgagcggcatggcccctcgagccggggtagtctgacaccccacccggcagcctgtgacaaggatgggcagacagatagtgcggcagaggagagcagcagccaggagacaagcaaaggcctgggtcccaacatgtcctcaacccccgcacatgaggtgggcaggagaacctcagttctgttctccaaaaagaacccgaagacagctggaccgcccaagaggccgggccggccccccaaaaaccgggagagccagatgacccccagccacggaggcagtcctgtggggcccccccagctccccatcatgagttccctgcgtcagcgcaagcggggtaggagcccccggcccagttcgagctcagacagcgacagtgataagtccacagaagaccccccaatggacttaccagccaatggcttcagcggtggaaaccaaccagtgaagaagagtttcttggtataccgtaatgactgcagccttccccggagcagctcagactctgagtccagcagcagtagcagtagcagcgctgcttcagaccggaccagcacaacgccctcaaaacaaggccggggcaaaccctccttctctcggggcactttcccagaggacagcagtgaggatacctcaggcactgagaatgaggcctactccgtgggcactggccgcggcgtgggccacagcatggtaaggaagagtctgggccggggagctggctggctgtcagaggatgaggactccccgctggatgctctggacctcgtgtgggccaaatgccgaggctatccatcatacccagctctgatcattgatccaaagatgccccgagaaggtatgttccaccatggggttcccatccctgtgcccccactggaggtgctgaaacttggggagcagatgacccaggaagcccgagagcatctctacctcgtcctcttctttgacaacaaacgaacctggcagtggctgcccaggaccaagctggttcctctgggtgtgaaccaggacctagacaaggagaagatgctggagggccgcaagtccaacatccgcaagtcagtacagatcgcctaccacagggctctgcagcaccgcagcaaggtgcaaggcgagcagagcagtgagaccagcgatagtgattgatactgctcaacacagcccaacctatagtgccctgtgacttctctcctcccctttgctcactgtcctggagtggcaccggcctctgcactgactcatttctggtcttggggccagtctcaggggaagctgggtgggggaggtccctcctgccctaagtgcagctggactgtacagaacactccaagggccaatggcagttcagcgcaaggagagggagggcccacaggtcagaaaaagctccagagacctcacagcattgtagggcggggtggtgggccaaagttaggacactgcgtaaaacaggccatcccaccacctctacctgctcatgccaggagaatccataactgcctagaggcctggggcccctaccggtcgtgaggtgagtgggcatctgtccagcctggaagaggggcactaggtgactccctcccctgctgttgtaaatactgtaattatcggagaatttaaattattctcatttgtaactgcgtttccgggtcgcgccagagtcatttggtactaaaaaaaaaaaaaaaaaagactgggggctgtccccatttcccttctctttcccatagattcccccacctttcaaactggtttgtatttatttcaaaggaagaaaatatattgattcttagaaaataaactgtcaatttagaattc

SEQ ID NO: 112201 - DNA, 4712 bp, Homo sapiens
  Payload ID: 1976
  Gene Symbol: BRPF1
  Gene Name: bromodomain and PHD finger containing, 1
  Uniprot ID: P55201
  ENST ID: ENST00000424362
  CDS Start-End: 405-4046
gacgccgtcgccgccgctgctgccgccgccgctgccacagcctttgccgccacggtctccgccgccgctgtcctcgcgctgcctctgggagcctccattgttccagcagcgcccggtcccgagaccgggcatcttgggggctcgcgaaacgggcggcggccgacggagttgagaccccagggcgccggcgggaccaggagcggcaggggtcagctcaggaatcccggggagccgggaccaaagcgtggggcggcagggggccggggtggcgaggtctacggtctccggagttggggctcccccttcccggcccgactttccccgccgacctccccaagtggggtcggagccccggcgggcgcccccggcgatgagcccggactcgaggtggccgatgtgacagcatgggggtggactttgatgtgaagactttctgccacaacttgcgggcgactaagccaccatacgagtgcccggtggagacctgccgaaaggtctacaagagttacagtggtattgagtaccacctgtaccactatgaccacgacaacccaccacccccacaacaaactccactccgcaagcacaagaaaaaggggcgccagtcacgcccagccaacaagcagtcacccagcccctcagaggtctcacagtcaccaggccgtgaggtgatgagctatgcacaggcccagcgcatggtggaggtggacttgcatggccgcgtccaccgcatcagcatctttgacaacctggatgtggtgtcagaggatgaggaagcccccgaggaggcccctgagaatggcagcaacaaggagaacactgagacaccagctgctactcccaagtcaggcaaacataagaacaaggagaagcgcaaggactccaaccatcaccaccaccacaatgtttctgcgagcaccactcccaagctgccagaggtggtctatcgggagctggaacaggacacccctgatgccccaccccggccaacttcctattaccggtacatcgagaagtctgcagaggagctggacgaggaagtagagtatgacatggacgaggaggactacatctggctggatatcatgaatgagcgtcggaagacagagggtgtaagtcccatcccgcaggagatctttgagtacctaatggaccgactggagaaggagtcgtactttgagagtcataataaaggcgaccctaatgcgctagtggacgaggatgctgtttgctgtatctgcaatgatggtgagtgccagaacagcaatgtcatcctcttctgtgacatgtgcaacctggccgtgcaccaggagtgctacggtgtcccctatatccctgagggccagtggctgtgccgccgttgcctgcagtcaccctctcgtgctgtggattgtgccctgtgccccaacaagggcggtgccttcaagcagacagatgacgggcgctgggcccatgtggtgtgtgccttgtggatccctgaggtctgcttcgccaacacggtcttcctagagcctattgacagcattgagcacatcccaccagctcgctggaagctcacctgctacatttgcaaacaacggggctcaggggcctgcatccagtgccacaaggccaactgttacacagctttccatgtgacatgcgcccagcaggctggcctttacatgaagatggagcctgtgcgggagacaggcgccaacggcacctctttcagtgtccgcaagacagcctactgcgacatccacacgcctccaggttcagcacgccgactgcctgccctgtcccacagcgagggtgaggaggatgaagatgaggaggaggatgagggtaagggctggagctcagagaaagtcaagaaggccaaggccaagtcccggatcaaaatgaagaaggcacggaagatcctggcagagaagcgggcagcagcacctgtggtgtcagtgccctgcatcccaccacacaggcttagtaaaatcaccaaccgcctgaccatccaaaggaagagccagttcatgcagaggctgcacagctactggacactgaagcggcagtcacggaatggggtcccattgctacgtcgcctgcagacacacctgcaatctcagaggaactgtgaccaagttgggagagattctgaggataagaactgggcccttaaagaacagctcaagtcctggcagcggctccggcatgacttggagcgagctcggctgctcgtggaattgatccgcaagcgggaaaaactcaaaagggagacgatcaaggttcagcagattgccatggagatgcagctgactcctttcctcatcctccttcgcaaaaccttggagcagctccaagagaaggacacaggcaacatcttcagcgagccggtccctctgtctgaggtacctgactacctagaccacatcaaaaagcccatggactttttcaccatgaagcagaacttggaggcttaccgctacctgaattttgatgattttgaggaggacttcaacctcatcgtcagcaactgcctcaagtataacgccaaggacaccatcttctaccgggcagcagtgcggcttcgtgagcagggtggtgctgtgctccgccaggcccggcgccaggcagaaaaaatgggcattgactttgagacgggcatgcatatcccccacagcctggctggagatgaggccacacaccacactgaagatgccgaggaagagcggctggtcttgctggagaaccagaagcacctgccagtggaagaacagctaaagctgcttctggagcggctggacgaagtgaatgccagcaagcagagtgtgggccgctcacggcgtgcaaagatgatcaagaaagagatgacggcactgcggcggaagcttgcccatcagcgagagacgggacgtgatggccctgagcggcatggcccctcgagccggggtagtctgacaccccacccggcagcctgtgacaaggatgggcagacagatagtgcggcagaggagagcagcagccaggagacaagcaaaggcctgggtcccaacatgtcctcaacccccgcacatgaggtgggcaggagaacctcagttctgttctccaaaaagaacccgaagacagctggaccgcccaagaggccgggccggccccccaaaaaccgggagagccagatgacccccagccacggaggcagtcctgtggggcccccccagctccccatcatgagttccctgcgtcagcgcaagcggggtaggagcccccggcccagttcgagctcagacagcgacagtgataagtccacagaagaccccccaatggacttaccagccaatggcttcagcggtggaaaccaaccagtgaagaagagtttcttggtataccgtaatgactgcagccttccccggagcagctcagactctgagtccagcagcagtagcagtagcagcgctgcttcagaccggaccagcacaacgccctcaaaacaaggccggggcaaaccctccttctctcggggcactttcccagaggacagcagtgaggatacctcaggcactgagaatgaggcctactccgtgggcactggccgcggcgtgggccacagcatggtaaggaagagtctgggccggggagctggctggctgtcagaggatgaggactccccgctggatgctctggacctcgtgtgggccaaatgccgaggctatccatcatacccagctctgatcattgatccaaagatgccccgagaaggtatgttccaccatggggttcccatccctgtgcccccactggaggtgctgaaacttggggagcagatgacccaggaagcccgagagcatctctacctcgtcctcttctttgacaacaaacgaacctggcagtggctgcccaggaccaagctggttcctctgggtgtgaaccaggacctagacaaggagaagatgctggagggccgcaagtccaacatccgcaagtcagtacagatcgcctaccacagggctctgcagcaccgcagcaaggtgcaaggcgagcagagcagtgagaccagcgatagtgattgatactgctcaacacagcccaacctatagtgccctgtgacttctctcctcccctttgctcactgtcctggagtggcaccggcctctgcactgactcatttctggtcttggggccagtctcaggggaagctgggtgggggaggtccctcctgccctaagtgcagctggactgtacagaacactccaagggccaatggcagttcagcgcaaggagagggagggcccacaggtcagaaaaagctccagagacctcacagcattgtagggcggggtggtgggccaaagttaggacactgcgtaaaacaggccatcccaccacctctacctgctcatgccaggagaatccataactgcctagaggcctggggcccctaccggtcgtgaggtgagtgggcatctgtccagcctggaagaggggcactaggtgactccctcccctgctgttgtaaatactgtaattatcggagaatttaaattattctcatttgtaactgcgtttccgggtcgcgccagagtcatttggtactaaaaaaaaaaaaaaaaaagactgggggctgtccccatttcccttctctttcccatagattcccccacctttcaaactggtttgtatttatttcaaaggaagaaaatatattgattcttagaaaataaactgtcaatttagaa

SEQ ID NO: 112202 - DNA, 4304 bp, Homo sapiens
  Payload ID: 1976
  Gene Symbol: BRPF1
  Gene Name: bromodomain and PHD finger containing, 1
  Uniprot ID: P55201
  ENST ID: ENST00000433861
  CDS Start-End: 421-3780
acgtttaccctgcgcagacgccgtcgccgccgctgctgccgccgccgctgccacagcctttgccgccacggtctccgccgccgctgtcctcgcgctgcctctgggagcctccattgttccagcagcgcccggtcccgagaccgggcatcttgggggctcgcgaaacgggcggcggccgacggagttgagaccccagggcgccggcgggaccaggagcggcaggggtcagctcaggaatcccggggagccgggaccaaagcgtggggcggcagggggccggggtggcgaggtctacggtctccggagttggggctcccccttcccggcccgactttccccgccgacctccccaagtggggtcggagccccggcgggcgcccccggcgatgagcccggactcgaggtggccgatgtgacagcatgggggtggactttgatgtgaagactttctgccacaacttgcgggcgactaagccaccatacgagtgcccggtggagacctgccgaaaggtctacaagagttacagtggtattgagtaccacctgtaccactatgaccacgacaacccaccacccccacaacaaactccactccgcaagcacaagaaaaaggggcgccagtcacgcccagccaacaagcagtcacccagcccctcagaggtctcacagtcaccaggccgtgaggtgatgagctatgcacaggcccagcgcatggtggaggtggacttgcatggccgcgtccaccgcatcagcatctttgacaacctggatgtggtgtcagaggatgaggaagcccccgaggaggcccctgagaatggcagcaacaaggagaacactgagacaccagctgctactcccaagtcaggcaaacataagaacaaggagaagcgcaaggactccaaccatcaccaccaccacaatgtttctgcgagcaccactcccaagctgccagaggtggtctatcgggagctggaacaggacacccctgatgccccaccccggccaacttcctattaccggtacatcgagaagtctgcagaggagctggacgaggaagtagagtatgacatggacgaggaggactacatctggctggatatcatgaatgagcgtcggaagacagagggtgtaagtcccatcccgcaggagatctttgagtacctaatggaccgactggagaaggagtcgtactttgagagtcataataaaggcgaccctaatgcgctagtggacgaggatgctgtttgctgtatctgcaatgatggtgagtgccagaacagcaatgtcatcctcttctgtgacatgtgcaacctggccgtgcaccaggagtgctacggtgtcccctatatccctgagggccagtggctgtgccgccgttgcctgcagtcaccctctcgtgctgtggattgtgccctgtgccccaacaagggcggtgccttcaagcagacagatgacgggcgctgggcccatgtggtgtgtgccttgtggatccctgaggtctgcttcgccaacacggtcttcctagagcctattgacagcattgagcacatcccaccagctcgctggaagctcacctgctacatttgcaaacaacggggctcaggggcctgcatccagtgccacaaggccaactgttacacagctttccatgtgacatgcgcccagcaggctggcctttacatgaagatggagcctgtgcgggagacaggcgccaacggcacctctttcagtgtccgcaagacagcctactgcgacatccacacgcctccaggttcagcacgccgactgcctgccctgtcccacagcgagggtgaggaggatgaagatgaggaggaggatgagggtaagggctggagctcagagaaagtcaagaaggccaaggccaagtcccggatcaaaatgaagaaggcacggaagatcctggcagagaagcgggcagcagcacctgtggtgtcagtgccctgcatcccaccacacaggcttagtaaaatcaccaaccgcctgaccatccaaaggaagagccagttcatgcagaggctgcacagctactggacactgaagcggcagtcacggaatggggtcccattgctacgtcgcctgcagacacacctgcaatctcagaggaactgtgaccaagttgggagagattctgaggataagaactgggcccttaaagaacagctcaagtcctggcagcggctccggcatgacttggagcgagctcggctgctcgtggaattgatccgcaagcgggaaaaactcaaaagggagacgatcaaggttcagcagattgccatggagatgcagctgactcctttcctcatcctccttcgcaaaaccttggagcagctccaagagaaggacacaggcaacatcttcagcgagccggtccctctgtctgaggtacctgactacctagaccacatcaaaaagcccatggactttttcaccatgaagcagaacttggaggcttaccgctacctgaattttgatgattttgaggaggacttcaacctcatcgtcagcaactgcctcaagtataacgccaaggacaccatcttctaccgggcagcagtgcggcttcgtgagcagggtggtgctgtgctccgccaggcccggcgccaggcagaaaaaatgggcattgactttgagacgggcatgcatatcccccacagcctggctggagatgaggccacacaccacactgaagatgcagccgaggaagagcggctggtcttgctggagaaccagaagcacctgccagtggaagaacagctaaagctgcttctggagcggctggacgaagtgaatgccagcaagcagagtgtgggccgctcacggcgtgcaaagatgatcaagaaagagatgacggcactgcggcggaagcttgcccatcagcgagagacgggacgtgatggccctgagcggcatggcccctcgagccggggtagtctgacaccccacccggcagcctgtgacaaggatgggcagacagatagtgcggcagaggagagcagcagccaggagacaagcaaagacttaccagccaatggcttcagcggtggaaaccaaccagtgaagaagagtttcttggtataccgtaatgactgcagccttccccggagcagctcagactctgagtccagcagcagtagcagtagcagcgctgcttcagaccggaccagcacaacgccctcaaaacaaggccggggcaaaccctccttctctcggggcactttcccagaggacagcagtgaggatacctcaggcactgagaatgaggcctactccgtgggcactggccgcggcgtgggccacagcatggtaaggaagagtctgggccggggagctggctggctgtcagaggatgaggactccccgctggatgctctggacctcgtgtgggccaaatgccgaggctatccatcatacccagctctgatcattgatccaaagatgccccgagaaggtatgttccaccatggggttcccatccctgtgcccccactggaggtgctgaaacttggggagcagatgacccaggaagcccgagagcatctctacctcgtcctcttctttgacaacaaacgaacctggcagtggctgcccaggaccaagctggttcctctgggtgtgaaccaggacctagacaaggagaagatgctggagggccgcaagtccaacatccgcaagtcagtacagatcgcctaccacagggctctgcagcaccgcagcaaggtgcaaggcgagcagagcagtgagaccagcgatagtgattgatactgctcaacacagcccaacctatagtgccctgtgacttctctcctcccctttgctcactgtcctggagtggcaccggcctctgcactgactcatttctggtcttggggccagtctcaggggaagctgggtgggggaggtccctcctgccctaagtgcagctggactgtacagaacactccaagggccaatggcagttcagcgcaaggagagggagggcccacaggtcagaaaaagctccagagacctcacagcattgtagggcggggtggtgggccaaagttaggacactgcgtaaaacaggccatcccaccacctctacctgctcatgccaggagaatccataactgcctagaggcctggggcccctaccggtcgtgaggtgagtgggcatctgtccagcctggaagaggggcactaggtgactccctcccctgctgttgtaaatactgtaattatcggagaatttaaattattctcatttgtaactgcgtttccgggtcgcgccagagtcatttggtact

SEQ ID NO: 112203 - DNA, 534 bp, Homo sapiens
  Payload ID: 1976
  Gene Symbol: BRPF1
  Gene Name: bromodomain and PHD finger containing, 1
  ENST ID: ENST00000426583
  CDS Start-End: 219-534
agatgcagccgccattctccttgggccctccccacgggctttctggtctaagttctcgtctccctcgcctgtgcctctgctgccgggttccaaggggagattgctgattcgctgtgctactttgggaaccattcacccgggacccagcttggaaagaggagagcttgtttgtgcttcggttggtttatgtttaaagacacagccgcagatgtgacagcatgggggtggactttgatgtgaagactttctgccacaacttgcgggcgactaagccaccatacgagtgcccggtggagacctgccgaaaggtctacaagagttacagtggtattgagtaccacctgtaccactatgaccacgacaacccaccacccccacaacaaactccactccgcaagcacaagaaaaaggggcgccagtcacgcccagccaacaagcagtcacccagcccctcagaggtctcacagtcaccaggccgtgaggtgatgagctatgcacaggcccagcgcatggtggaggtggacttgcatggcc

SEQ ID NO: 112204 - DNA, 4308 bp, Homo sapiens
  Payload ID: 1976
  Gene Symbol: BRPF1
  Gene Name: bromodomain and PHD finger containing, 1
  Uniprot ID: P55201
  ENST ID: ENST00000457855
  CDS Start-End: 12-3656
gatgtgacagcatgggggtggactttgatgtgaagactttctgccacaacttgcgggcgactaagccaccatacgagtgcccggtggagacctgccgaaaggtctacaagagttacagtggtattgagtaccacctgtaccactatgaccacgacaacccaccacccccacaacaaactccactccgcaagcacaagaaaaaggggcgccagtcacgcccagccaacaagcagtcacccagcccctcagaggtctcacagtcaccaggccgtgaggtgatgagctatgcacaggcccagcgcatggtggaggtggacttgcatggccgcgtccaccgcatcagcatctttgacaacctggatgtggtgtcagaggatgaggaagcccccgaggaggcccctgagaatggcagcaacaaggagaacactgagacaccagctgctactcccaagtcaggcaaacataagaacaaggagaagcgcaaggactccaaccatcaccaccaccacaatgtttctgcgagcaccactcccaagctgccagaggtggtctatcgggagctggaacaggacacccctgatgccccaccccggccaacttcctattaccggtacatcgagaagtctgcagaggagctggacgaggaagtagagtatgacatggacgaggaggactacatctggctggatatcatgaatgagcgtcggaagacagagggtgtaagtcccatcccgcaggagatctttgagtacctaatggaccgactggagaaggagtcgtactttgagagtcataataaaggcgaccctaatgcgctagtggacgaggatgctgtttgctgtatctgcaatgatggtgagtgccagaacagcaatgtcatcctcttctgtgacatgtgcaacctggccgtgcaccaggagtgctacggtgtcccctatatccctgagggccagtggctgtgccgccgttgcctgcagtcaccctctcgtgctgtggattgtgccctgtgccccaacaagggcggtgccttcaagcagacagatgacgggcgctgggcccatgtggtgtgtgccttgtggatccctgaggtctgcttcgccaacacggtcttcctagagcctattgacagcattgagcacatcccaccagctcgctggaagctcacctgctacatttgcaaacaacggggctcaggggcctgcatccagtgccacaaggccaactgttacacagctttccatgtgacatgcgcccagcaggctggcctttacatgaagatggagcctgtgcgggagacaggcgccaacggcacctctttcagtgtccgcaagacagcctactgcgacatccacacgcctccaggttcagcacgccgactgcctgccctgtcccacagcgagggtgaggaggatgaagatgaggaggaggatgagggtaagggctggagctcagagaaagtcaagaaggccaaggccaagtcccggatcaaaatgaagaaggcacggaagatcctggcagagaagcgggcagcagcacctgtggtgtcagtgccctgcatcccaccacacaggcttagtaaaatcaccaaccgcctgaccatccaaaggaagagccagttcatgcagaggctgcacagctactggacactgaagcggcagtcacggaatggggtcccattgctacgtcgcctgcagacacacctgcaatctcagaggaactgtgaccaagttgggagagattctgaggataagaactgggcccttaaagaacagctcaagtcctggcagcggctccggcatgacttggagcgagctcggctgctcgtggaattgatccgcaagcgggaaaaactcaaaagggagacgatcaaggttcagcagattgccatggagatgcagctgactcctttcctcatcctccttcgcaaaaccttggagcagctccaagagaaggacacaggcaacatcttcagcgagccggtccctctgtctgaggtacctgactacctagaccacatcaaaaagcccatggactttttcaccatgaagcagaacttggaggcttaccgctacctgaattttgatgattttgaggaggacttcaacctcatcgtcagcaactgcctcaagtataacgccaaggacaccatcttctaccgggcagcagtgcggcttcgtgagcagggtggtgctgtgctccgccaggcccggcgccaggcagaaaaaatgggcattgactttgagacgggcatgcatatcccccacagcctggctggagatgaggccacacaccacactgaagatgcagccgaggaagagcggctggtcttgctggagaaccagaagcacctgccagtggaagaacagctaaagctgcttctggagcggctggacgaagtgaatgccagcaagcagagtgtgggccgctcacggcgtgcaaagatgatcaagaaagagatgacggcactgcggcggaagcttgcccatcagcgagagacgggacgtgatggccctgagcggcatggcccctcgagccggggtagtctgacaccccacccggcagcctgtgacaaggatgggcagacagatagtgcggcagaggagagcagcagccaggagacaagcaaaggcctgggtcccaacatgtcctcaacccccgcacatgaggtgggcaggagaacctcagttctgttctccaaaaagaacccgaagacagctggaccgcccaagaggccgggccggccccccaaaaaccgggagagccagatgacccccagccacggaggcagtcctgtggggcccccccagctccccatcatgagttccctgcgtcagcgcaagcggggtaggagcccccggcccagttcgagctcagacagcgacagtgataagtccacagaagaccccccaatggacttaccagccaatggcttcagcggtggaaaccaaccagtgaagaagagtttcttggtataccgtaatgactgcagccttccccggagcagctcagactctgagtccagcagcagtagcagtagcagcgctgcttcagaccggaccagcacaacgccctcaaaacaaggccggggcaaaccctccttctctcggggcactttcccagaggacagcagtgaggatacctcaggcactgagaatgaggcctactccgtgggcactggccgcggcgtgggccacagcatggtaaggaagagtctgggccggggagctggctggctgtcagaggatgaggactccccgctggatgctctggacctcgtgtgggccaaatgccgaggctatccatcatacccagctctgatcattgatccaaagatgccccgagaaggtatgttccaccatggggttcccatccctgtgcccccactggaggtgctgaaacttggggagcagatgacccaggaagcccgagagcatctctacctcgtcctcttctttgacaacaaacgaacctggcagtggctgcccaggaccaagctggttcctctgggtgtgaaccaggacctagacaaggagaagatgctggagggccgcaagtccaacatccgcaagtcagtacagatcgcctaccacagggctctgcagcaccgcagcaaggtgcaaggcgagcagagcagtgagaccagcgatagtgattgatactgctcaacacagcccaacctatagtgccctgtgacttctctcctcccctttgctcactgtcctggagtggcaccggcctctgcactgactcatttctggtcttggggccagtctcaggggaagctgggtgggggaggtccctcctgccctaagtgcagctggactgtacagaacactccaagggccaatggcagttcagcgcaaggagagggagggcccacaggtcagaaaaagctccagagacctcacagcattgtagggcggggtggtgggccaaagttaggacactgcgtaaaacaggccatcccaccacctctacctgctcatgccaggagaatccataactgcctagaggcctggggcccctaccggtcgtgaggtgagtgggcatctgtccagcctggaagaggggcactaggtgactccctcccctgctgttgtaaatactgtaattatcggagaatttaaattattctcatttgtaactgcgtttccgggtcgcgccagagtcatttggtactaaaaaaaaaaaaaaaaaagactgggggctgtccccatttcccttctctttcccatagattcccccacctttcaaactggtttgtatttatttcaaaggaagaaaatatattgattcttagaaaataaa

SEQ ID NO: 112205 - DNA, 860 bp, Homo sapiens
  Payload ID: 1976
  Gene Symbol: BRPF1
  Gene Name: bromodomain and PHD finger containing, 1
  ENST ID: ENST00000420291
  CDS Start-End: 560-860
ttgccgccacggtctccgccgccgctgtcctcgcgctgcctctgggagcctccattgttccagcagcgcccggtcccgagaccgggcatcttgggggctcgcgaaacgggcggcggccgacggagttgagaccccagggcgccggcgggaccaggagcggcaggggtcagctcaggaatcccggggagccgggaccaaagcgtggggcggcagggggccggggtggcgaggtctacggtctccggagttggggctcccccttcccggcccgactttccccgccgacctccccaagtggggtcggagccccggcgggcgcccccggcgatgagcccggactcgaggtggccgtacatctcctacccagtaccagggccaggctccccataaagacctcaaaagtaaatgaattctttctgtgatccagtgatttctgcaggagtccaacgctaaagcattagccacccacccattcagctttctacatggccttcatcccatctgagctctcagtctggtgatcccctcattcagctattcgttcaacagatgtgacagcatgggggtggactttgatgtgaagactttctgccacaacttgcgggcgactaagccaccatacgagtgcccggtggagacctgccgaaaggtctacaagagttacagtggtattgagtaccacctgtaccactatgaccacgacaacccaccacccccacaacaaactccactccgcaagcacaagaaaaaggggcgccagtcacgcccagccaacaagcagtcacccagcccctcagaggtctcacagtcaccaggccgtgaggtgatgagctatgcacaggcccagcgcatggtggagg

SEQ ID NO: 112206 - DNA, 4820 bp, Homo sapiens
  Payload ID: 1977
  Gene Symbol: BRPF3
  Gene Name: bromodomain and PHD finger containing, 3
  Uniprot ID: Q9ULD4
  ENST ID: ENST00000339717
  CDS Start-End: 32-2839
ctgaggcctgtcccctcagttcccaggtgccatgaggaagcctcgtcggaagtcccggcagaatgccgagggccggcgttccccgtccccctacagtctcaagtgctcacccacccgggagaccctgacatatgcccaggcccagcggattgtcgaggtagacattgatggacgcctgcatcgtatcagcatctatgacccactcaaaatcattactgaagatgagctaactgcccaggatatcaccgaatgcaatagtaacaaggaaaacagtgaacagcctcagttccctggcaagtccaagaaaccctcatccaagggcaaaaagaaggaatcctgctccaagcatgcatctggtacttccttccacctcccacagcccagcttccgtatggtggactcaggcatccagccagaagcacccccgctgcctgctgcctactaccgctacattgagaagccacctgaagacctggatgcagaggtagagtatgacatggatgaggaggaccttgcctggctggacatggtgaatgaaaaacggcgagtagatgggcacagtttggtgtctgcagatacctttgagctgctggtagaccggcttgagaaagagtcatacttggagagtcgcagcagtggggcccaacagtcactcatcgatgaagacgctttctgctgtgtgtgcctggatgatgaatgtcacaatagcaatgttattctcttctgtgacatctgcaacctggctgtacaccaggagtgctatggcgtcccatacatccctgagggccagtggctatgccgctgctgcctgcagtctccctcccggcctgtggattgcatcctttgccccaataagggtggcgccttcaaacagaccagtgatgggcactgggcccatgtggtgtgtgccatctggatccctgaagtctgctttgctaacaccgtgttcttggaacctattgagggcattgacaatatcccgcctgcccgctggaaactaacctgctatatctgcaagcagaaagggctaggtgcagccatccagtgccataaggtgaactgctacacagcattccatgtgacatgtgcacagcgggctgggctcttcatgaagattgagcccatgcgcgaaaccagcctcaatggcaccatctttacagtgcgcaagactgcctactgtgaggcccactcgccaccaggtgcggccactgctaggaggaagggcgactcccctagaagcatcagtgagactggcgatgaggaagggctgaaggagggtgatggagaggaggaagaagaggaagaggtggaggaagaagagcaggaagctcaaggcggggtgagtggctccctcaagggagtgcccaagaaaagcaagatgagtttgaagcagaagatcaagaaggagccagaggaagcaggccaagacacaccctccactctccccatgcttgctgtcccacagataccctcttacaggttgaacaagatctgtagtggtctctcctttcagaggaaaaaccagtttatgcagcggcttcacaattattggctgttgaagcggcaggcacggaatggtgtccctcttatccggcgcttgcactcccatctgcagtcccaaagaaacgctgagcagcgagagcaggatgagaagacaagtgcagtgaaggaggagctgaagtattggcagaagctccggcatgacttggagcgggcgcggctgctgattgagctgattcggaagagagagaagctcaaacgagagcaggtcaaagtccagcaggctgccatggagctggagctgatgccattcaatgttctgttgaggacaacactggacctgctgcaggagaaggatcctgcacacatcttcgcagaaccagtcaacttgagtgaggttccagattacctggaattcatatccaagccaatggatttttctactatgaggcggaagctggagtcccacctgtaccgcaccttggaggagtttgaggaggactttaaccttatagttaccaactgcatgaagtataatgctaaagacacaattttccaccgagcagctgtccgcctgcgggacctgggaggggccatcctacggcacgcccggcggcaggcagagaacatcggctatgaccccgagaggggcactcacctgcccgagtcacccaaattggaagacttttaccgcttctcctgggaagacggcatgaccaacggctttggaaaacacaccgaaagcgggtctgactctgaatgtagtttgggtctcagtggtggactggcatttgaagcttgcagtggtctgacgccccccaaacgcagccgtgggaagccagccctgtctcgagtgcccttcctggaaggtgtgaacggagactctgactacaatggctcaggcagaagcctcctgctgccctttgaagaccgcggagacctggagcccttggagctggtgtgggccaagtgccgaggctacccctcctaccctgccttgatcatcgatcccaagatgccccgggagggcctcctgcacaatggcgttcccatccctgtccccccgctggacgtgctgaagctgggagagcagaaacaggcagaggctggagagaagctcttccttgtcctcttctttgacaacaagcgcacctggcagtggcttccaagggacaaagtcctgcccttgggtgtggaagacaccgtggacaagctcaagatgctggaaggccgcaagaccagcatccgcaagtcagtgcaggtggcctatgaccgtgcgatgatccacctgagcagagtccgggggccccactccttcgtcacttccagctacctgtaagggcagggctgggcctgcatccgcttgccctgcctccatcccgcagggcacagagaagcctcttctgcccctgccagatgtatggccggcagcttccccctctcatggtaggccagggactgggctttctccccactaagggcaaggccccagttttgaccaatcgcatggttctcctggcaggcctgctgtgtgccaaaaactcccacccaaggtccctcaggggatatttcactgaagaaccagttagaagtagaaacagctgtggggcttgggcccagcttaggagattgcccagatggcaagaggtcctgggctccttcttgaggggctgcctggcccgctccatcctactcccactaactacacctcagggcgggtgaggttccgacactgatcccagagatgccgtggatacgccagggtcccagggggaatctccccaagctcacactctctcccgcttatcgcctattctcacacctcttctcggtcccatcttctgcacccattgcccagtcttgctttctctttcccatattccttttctttttctcttgtgccaaactgacagaaaccgtcaccacactggtctttttctttaatgtctcattccccttgaggccagctgctatgccaggtggtgtctctgccaggctcctcaggcccagacagaggccagcccacaacctatgaccccctcccccaggacaccacctcccacccacagaccttccctttagctgttgacacaacttcccagctctgcaagtgtgccccctggatcaaggcgggtcccctcttgtttttttctttgctgccacgaggtggtccaagccttcagggtgggctcctatcaggctgggtgtgcgagtgtccatctgtccacatggatgtcgagggtggtttgtgtggagctgtgctcgtcagctgggtctgccctcttcccccttttctccttcttctctcctcatggactttttctgcaattgcagtcttaagcttcactctccaccacctggatggcatggcgcctgccaccaaacatcttcctggcctgcgctctgccctgccctgcctagcctctgctactcccacttcccaactccagggaatgcattacttttatttcaaaccctctgcctccttccttctttctcttcaaccccctccccaccttcaccttctcaaaaatggaaggaaaaaaaaactgtgaatggggaatgctgactgacaaaccaacacaactttcagaggcttcagtgtctgttctctggacatttcttttcacctcctgagcaccaaagtcgcagggccagttgcaggccgctgattgccatgttgatttttaacctgatattctttttaattgttttaaatttttcataggggagttttggacaaaacagtcactggggagatcactgccatttttacacacttgactttttaaaaatacaaccaaccaaccaccacaacttcttatacatttgggacatgagccagagtttaaaagggaaccaacaaaacactataacttaaaaggatggggttttggattttgtataataataaaaacaatacagcatatggctagggaaggacatggtgtatataattgtaaaatactgttctaaattattcaggcctatagtttccattactggagtcctccattgtgtggccacacagtgtcgttgatttaaaggagccagtgcttcccctctccccaggtagttggtcagctgtggactctgtgacctttgtctaaacctgtgttgtaagatcttgggacttcctctctttctatgtctatctcttccccccaacactttctcttcttagtctctctctttatttttcaatctctgaatattttagtctctctctgagtctcattttttaaaatgctcttttagaacgggaaacggctcagatcctgctgtggcacggggcctatgtgtctctgtcgcgtctgctg

SEQ ID NO: 112207 - DNA, 6052 bp, Homo sapiens
  Payload ID: 1977
  Gene Symbol: BRPF3
  Gene Name: bromodomain and PHD finger containing, 3
  Uniprot ID: Q9ULD4
  ENST ID: ENST00000357641
  CDS Start-End: 254-3871
gtggcggcagcggcagcagcggcggctccattccccctcctcccccgggagcggcggcggcggccgggccggggccccagcgcgggccgggagggggcacggcggaggccacggaggcaggcgcgggagaagaccgcgctccgcttcccgggccgcgccgacctgctcggcggcctgcccgcccgcgcccaggggccccgaacggtggggccgggcaggcggctgaggcctgtcccctcagttcccaggtgccatgaggaagcctcgtcggaagtcccggcagaatgccgagggccggcgttccccgtccccctacagtctcaagtgctcacccacccgggagaccctgacatatgcccaggcccagcggattgtcgaggtagacattgatggacgcctgcatcgtatcagcatctatgacccactcaaaatcattactgaagatgagctaactgcccaggatatcaccgaatgcaatagtaacaaggaaaacagtgaacagcctcagttccctggcaagtccaagaaaccctcatccaagggcaaaaagaaggaatcctgctccaagcatgcatctggtacttccttccacctcccacagcccagcttccgtatggtggactcaggcatccagccagaagcacccccgctgcctgctgcctactaccgctacattgagaagccacctgaagacctggatgcagaggtagagtatgacatggatgaggaggaccttgcctggctggacatggtgaatgaaaaacggcgagtagatgggcacagtttggtgtctgcagatacctttgagctgctggtagaccggcttgagaaagagtcatacttggagagtcgcagcagtggggcccaacagtcactcatcgatgaagacgctttctgctgtgtgtgcctggatgatgaatgtcacaatagcaatgttattctcttctgtgacatctgcaacctggctgtacaccaggagtgctatggcgtcccatacatccctgagggccagtggctatgccgctgctgcctgcagtctccctcccggcctgtggattgcatcctttgccccaataagggtggcgccttcaaacagaccagtgatgggcactgggcccatgtggtgtgtgccatctggatccctgaagtctgctttgctaacaccgtgttcttggaacctattgagggcattgacaatatcccgcctgcccgctggaaactaacctgctatatctgcaagcagaaagggctaggtgcagccatccagtgccataaggtgaactgctacacagcattccatgtgacatgtgcacagcgggctgggctcttcatgaagattgagcccatgcgcgaaaccagcctcaatggcaccatctttacagtgcgcaagactgcctactgtgaggcccactcgccaccaggtgcggccactgctaggaggaagggcgactcccctagaagcatcagtgagactggcgatgaggaagggctgaaggagggtgatggagaggaggaagaagaggaagaggtggaggaagaagagcaggaagctcaaggcggggtgagtggctccctcaagggagtgcccaagaaaagcaagatgagtttgaagcagaagatcaagaaggagccagaggaagcaggccaagacacaccctccactctccccatgcttgctgtcccacagataccctcttacaggttgaacaagatctgtagtggtctctcctttcagaggaaaaaccagtttatgcagcggcttcacaattattggctgttgaagcggcaggcacggaatggtgtccctcttatccggcgcttgcactcccatctgcagtcccaaagaaacgctgagcagcgagagcaggatgagaagacaagtgcagtgaaggaggagctgaagtattggcagaagctccggcatgacttggagcgggcgcggctgctgattgagctgattcggaagagagagaagctcaaacgagagcaggtcaaagtccagcaggctgccatggagctggagctgatgccattcaatgttctgttgaggacaacactggacctgctgcaggagaaggatcctgcacacatcttcgcagaaccagtcaacttgagtgaggttccagattacctggaattcatatccaagccaatggatttttctactatgaggcggaagctggagtcccacctgtaccgcaccttggaggagtttgaggaggactttaaccttatagttaccaactgcatgaagtataatgctaaagacacaattttccaccgagcagctgtccgcctgcgggacctgggaggggccatcctacggcacgcccggcggcaggcagagaacatcggctatgaccccgagaggggcactcacctgcccgagtcacccaaattggaagacttttaccgcttctcctgggaagacgtggacaacatcctcatcccagagaaccgggcccatttgtccccagaggtgcagctgaaggagctgctggagaaactggacctggtgagcgccatgcggtccagtggggcccgcacccgtcgtgtccgcctgctacgccgggagatcaatgcccttcggcagaagctggcacagccaccaccaccacagccaccatcactcaacaagacagtatccaatggggagctgccagcagggccccagggggatgcagctgtgctggagcaggccttgcaggaggagccagaagacgatggggacagagatgactccaaactgcctcctccgccaaccctggagcccactgggcctgcaccttccttgtctgagcaagaatcccccccggagccccctactctgaaacccattaatgatagcaaacctccaagcaggttcctaaagcccagaaaggtggaagaagatgagctcttggaaaaatcaccactgcagctagggaatgagcctttgcaacgcttgctcagtgacaatggcatcaacagactatccctcatggcccctgacaccccggccggtaccccacttagtggtgtgggtcgccgcacatcagtcctcttcaagaaggccaagaatggggttaagctacagagaagcccagacagggtcctggagaatggcgaggaccatggtgtggcaggctctcctgcctctccagccagcatcgaggaagagcgccactcccggaagcggccaaggagcaggagctgtagtgagagcgaaggggagaggtccccccagcaggaggaagagacaggcatgaccaacggctttggaaaacacaccgaaagcgggtctgactctgaatgtagtttgggtctcagtggtggactggcatttgaagcttgcagtggtctgacgccccccaaacgcagccgtgggaagccagccctgtctcgagtgcccttcctggaaggtgtgaacggagactctgactacaatggctcaggcagaagcctcctgctgccctttgaagaccgcggagacctggagcccttggagctggtgtgggccaagtgccgaggctacccctcctaccctgccttgatcatcgatcccaagatgccccgggagggcctcctgcacaatggcgttcccatccctgtccccccgctggacgtgctgaagctgggagagcagaaacaggcagaggctggagagaagctcttccttgtcctcttctttgacaacaagcgcacctggcagtggcttccaagggacaaagtcctgcccttgggtgtggaagacaccgtggacaagctcaagatgctggaaggccgcaagaccagcatccgcaagtcagtgcaggtggcctatgaccgtgcgatgatccacctgagcagagtccgggggccccactccttcgtcacttccagctacctgtaagggcagggctgggcctgcatccgcttgccctgcctccatcccgcagggcacagagaagcctcttctgcccctgccagatgtatggccggcagcttccccctctcatggtaggccagggactgggctttctccccactaagggcaaggccccagttttgaccaatcgcatggttctcctggcaggcctgctgtgtgccaaaaactcccacccaaggtccctcaggggatatttcactgaagaaccagttagaagtagaaacagctgtggggcttgggcccagcttaggagattgcccagatggcaagaggtcctgggctccttcttgaggggctgcctggcccgctccatcctactcccactaactacacctcagggcgggtgaggttccgacactgatcccagagatgccgtggatacgccagggtcccagggggaatctccccaagctcacactctctcccgcttatcgcctattctcacacctcttctcggtcccatcttctgcacccattgcccagtcttgctttctctttcccatattccttttctttttctcttgtgccaaactgacagaaaccgtcaccacactggtctttttctttaatgtctcattccccttgaggccagctgctatgccaggtggtgtctctgccaggctcctcaggcccagacagaggccagcccacaacctatgaccccctcccccaggacaccacctcccacccacagaccttccctttagctgttgacacaacttcccagctctgcaagtgtgccccctggatcaaggcgggtcccctcttgtttttttctttgctgccacgaggtggtccaagccttcagggtgggctcctatcaggctgggtgtgcgagtgtccatctgtccacatggatgtcgagggtggtttgtgtggagctgtgctcgtcagctgggtctgccctcttcccccttttctccttcttctctcctcatggactttttctgcaattgcagtcttaagcttcactctccaccacctggatggcatggcgcctgccaccaaacatcttcctggcctgcgctctgccctgccctgcctagcctctgctactcccacttcccaactccagggaatgcattacttttatttcaaaccctctgcctccttccttctttctcttcaaccccctccccaccttcaccttctcaaaaatggaaggaaaaaaaaactgtgaatggggaatgctgactgacaaaccaacacaactttcagaggcttcagtgtctgttctctggacatttcttttcacctcctgagcaccaaagtcgcagggccagttgcaggccgctgattgccatgttgatttttaacctgatattctttttaattgttttaaatttttcataggggagttttggacaaaacagtcactggggagatcactgccatttttacacacttgactttttaaaaatacaaccaaccaaccaccacaacttcttatacatttgggacatgagccagagtttaaaagggaaccaacaaaacactataacttaaaaggatggggttttggattttgtataataataaaaacaatacagcatatggctagggaaggacatggtgtatataattgtaaaatactgttctaaattattcaggcctatagtttccattactggagtcctccattgtgtggccacacagtgtcgttgatttaaaggagccagtgcttcccctctccccaggtagttggtcagctgtggactctgtgacctttgtctaaacctgtgttgtaagatcttgggacttcctctctttctatgtctatctcttccccccaacactttctcttcttagtctctctctttatttttcaatctctgaatattttagtctctctctgagtctcattttttaaaatgctcttttagaacgggaaacggctcagatcctgctgtggcacggggcctatgtgtctctgtcgcgtctgctgtgaagcacatgatgctctatttattgtagagagtgactttatttgctttctagaattgtttataacagatggtataagagaggtaataaacagagaaaaatctatgcttgtaaagaatacaaaagttaattttacctactataatatgactgtctgaaacttattttctctctgagaaataaatgttctaatgggcagta

SEQ ID NO: 112208 - DNA, 414 bp, Homo sapiens
  Payload ID: 1977
  Gene Symbol: BRPF3
  Gene Name: bromodomain and PHD finger containing, 3
  ENST ID: ENST00000446974
  CDS Start-End: 129-414
ggactccacgtcaggctgtctctggtgcgctcgcccctcccctctgaggagatgttatttccctcctttcttctccgaggggtcaagattcttctggaagaggcctgtcccctcagttcccaggtgccatgaggaagcctcgtcggaagtcccggcagaatgccgagggccggcgttccccgtccccctacagtctcaagtgctcacccacccgggagaccctgacatatgcccaggcccagcggattgtcgaggtagacattgatggacgcctgcatcgtatcagcatctatgacccactcaaaatcattactgaagatgagctaactgcccaggatatcaccgaatgcaatagtaacaaggaaaacagtgaacagcctcagttccctggcaagtccaagaaaccctcatcca

SEQ ID NO: 112209 - DNA, 5380 bp, Homo sapiens
  Payload ID: 1977
  Gene Symbol: BRPF3
  Gene Name: bromodomain and PHD finger containing, 3
  ENST ID: ENST00000441123
  CDS Start-End: 1-1798
ccgggagaccctgacatatgcccaggcccagcggattgtcgaggtagacattgatggacgcctgcatcgtatcagcatctatgacccactcaaaatcattactgaagatgagctaactgcccaggatatcaccgaatgcaatagtaacaaggaaaacagtgaacagcctcagttccctggcaagtccaagaaaccctcatccaagggcaaaaagaaggaatcctgctccaagcatgcatctggtacttccttccacctcccacagcccagcttccgtatggtggactcaggcatccagccagaagcacccccgctgcctgctgcctactaccgctacattgagaagccacctgaagacctggatgcagaggtagagtatgacatggatgaggaggaccttgcctggctggacatggtgaatgaaaaacggcgagtagatgggcacagtttggtgtctgcagatacctttgagctgctggtagaccggcttgagaaagagtcatacttggagagtcgcagcagtggggcccaacagtcactcatcgatgaagacgctttctgctgtgtgtgcctggatgatgaatgtcacaatagcaatgttattctcttctgtgacatctgcaacctggctgtacaccaggagtgctatggcgtcccatacatccctgagggccagtggctatgccgctgctgcctgcagtctccctcccggcctgtggattgcatcctttgccccaataagggtggcgccttcaaacagaccagtgatgggcactgggcccatgtggtgtgtgccatctggatccctgaagtctgctttgctaacaccgtgttcttggaacctattgagggcattgacaatatcccgcctgcccgctggaaactaacctgctatatctgcaagcagaaagggctaggtgcagccatccagtgccataaggtgaactgctacacagcattccatgtgacatgtgcacagcgggctgggctcttcatgaagattgagcccatgcgcgaaaccagcctcaatggcaccatctttacagtgcgcaagactgcctactgtgaggcccactcgccaccaggtgcggccactgctaggaggaagggcgactcccctagaagcatcagtgagactggcgatgaggaagggctgaaggagggtgatggagaggaggaagaagaggaagaggtggaggaagaagagcaggaagctcaaggcggggtgagtggctccctcaagggagtgcccaagaaaagcaagatgagtttgaagcagaagatcaagaaggagccagaggaagcaggccaagacacaccctccactctccccatgcttgctgtcccacagataccctcttacaggttgaacaagatctgtagtggtctctcctttcagaggaaaaaccagtttatgcagcggcttcacaattattggctgttgaagcggcaggcacggaatggtgtccctcttatccggcgcttgcactcccatctgcagtcccaaagaaacgctgagcagcgagagcaggatgagaagacaagtgcagtgaaggaggagctgaagtattggcagaagctccggcatgacttggagcgggcgcggctgctgattgagctgattcggaagagagagaagctcaaacgagagcaggtcaaagtccagcaggctgccatggagctggagctgatgccattcaatgttctgttgaggacaacactggacctgctgcaggagaaggatcctgcacacatcttcgcagaaccagtcaacttgagtgaggttttatatgtttaggttccagattacctggaattcatatccaagccaatggatttttctactatgaggcggaagctggagtcccacctgtaccgcaccttggaggagtttgaggaggactttaaccttatagttaccaactgcatgaagtataatgctaaagacacaattttccaccgagcagctgtccgcctgcgggacctgggaggggccatcctacggcacgcccggcggcaggcagagaacatcggctatgaccccgagaggggcactcacctgcccgagtcacccaaattggaagacttttaccgcttctcctgggaagacgtggacaacatcctcatcccagagaaccgggcccatttgtccccagaggtgcagctgaaggagctgctggagaaactggacctggtgagcgccatgcggtccagtggggcccgcacccgtcgtgtccgcctgctacgccgggagatcaatgcccttcggcagaagctggcacagccaccaccaccacagccaccatcactcaacaagacagtatccaatggggagctgccagcagggccccagggggatgcagctgtgctggagcaggccttgcaggaggagccagaagacgatggggacagagatgactccaaactgcctcctccgccaaccctggagcccactgggcctgcaccttccttgtctgagcaagaatcccccccggagccccctactctgaaacccattaatgatagcaaacctccaagcaggttcctaaagcccagaaaggtggaagaagatgagctcttggaaaaatcaccactgcagctagggaatgagcctttgcaacgcttgctcagtgacaatggcatcaacagactatccctcatggcccctgacaccccggccggtaccccacttagtggtgtgggtcgccgcacatcagtcctcttcaagaaggccaagaatggggttaagctacagagaagcccagacagggtcctggagaatggcgaggaccatggtgtggcaggctctcctgcctctccagccagcatcgaggaagagcgccactcccggaagcggccaaggagcaggagctgtagtgagagcgaaggggagaggtccccccagcaggaggaagagacaggcatgaccaacggctttggaaaacacaccgaaagcgggtctgactctgaatgtagtttgggtctcagtggtggactggcatttgaagcttgcaggcagtggcttccaagggacaaagtcctgcccttgggtgtggaagacaccgtggacaagctcaagatgctggaaggccgcaagaccagcatccgcaagtcagtgcaggtggcctatgaccgtgcgatgatccacctgagcagagtccgggggccccactccttcgtcacttccagctacctgtaagggcagggctgggcctgcatccgcttgccctgcctccatcccgcagggcacagagaagcctcttctgcccctgccagatgtatggccggcagcttccccctctcatggtaggccagggactgggctttctccccactaagggcaaggccccagttttgaccaatcgcatggttctcctggcaggcctgctgtgtgccaaaaactcccacccaaggtccctcaggggatatttcactgaagaaccagttagaagtagaaacagctgtggggcttgggcccagcttaggagattgcccagatggcaagaggtcctgggctccttcttgaggggctgcctggcccgctccatcctactcccactaactacacctcagggcgggtgaggttccgacactgatcccagagatgccgtggatacgccagggtcccagggggaatctccccaagctcacactctctcccgcttatcgcctattctcacacctcttctcggtcccatcttctgcacccattgcccagtcttgctttctctttcccatattccttttctttttctcttgtgccaaactgacagaaaccgtcaccacactggtctttttctttaatgtctcattccccttgaggccagctgctatgccaggtggtgtctctgccaggctcctcaggcccagacagaggccagcccacaacctatgaccccctcccccaggacaccacctcccacccacagaccttccctttagctgttgacacaacttcccagctctgcaagtgtgccccctggatcaaggcgggtcccctcttgtttttttctttgctgccacgaggtggtccaagccttcagggtgggctcctatcaggctgggtgtgcgagtgtccatctgtccacatggatgtcgagggtggtttgtgtggagctgtgctcgtcagctgggtctgccctcttcccccttttctccttcttctctcctcatggactttttctgcaattgcagtcttaagcttcactctccaccacctggatggcatggcgcctgccaccaaacatcttcctggcctgcgctctgccctgccctgcctagcctctgctactcccacttcccaactccagggaatgcattacttttatttcaaaccctctgcctccttccttctttctcttcaaccccctccccaccttcaccttctcaaaaatggaaggaaaaaaaaactgtgaatggggaatgctgactgacaaaccaacacaactttcagaggcttcagtgtctgttctctggacatttcttttcacctcctgagcaccaaagtcgcagggccagttgcaggccgctgattgccatgttgatttttaacctgatattctttttaattgttttaaatttttcataggggagttttggacaaaacagtcactggggagatcactgccatttttacacacttgactttttaaaaatacaaccaaccaaccaccacaacttcttatacatttgggacatgagccagagtttaaaagggaaccaacaaaacactataacttaaaaggatggggttttggattttgtataataataaaaacaatacagcatatggctagggaaggacatggtgtatataattgtaaaatactgttctaaattattcaggcctatagtttccattactggagtcctccattgtgtggccacacagtgtcgttgatttaaaggagccagtgcttcccctctccccaggtagttggtcagctgtggactctgtgacctttgtctaaacctgtgttgtaagatcttgggacttcctctctttctatgtctatctcttccccccaacactttctcttcttagtctctctctttatttttcaatctctgaatattttagtctctctctgagtctcattttttaaaatgctcttttagaacgggaaacggctcagatcctgctgtggcacggggcctatgtgtctctgtcgcgtctgctgtgaagcacatgatgctctatttattgtagagagtgactttatttgctttctagaattgtttataacagatggtataagagaggtaataaacagagaaaaatctatgcttgtaaagaatacaaaagttaattttacctactataatatgactgtctgaaacttattttctctctgagaaataaatgttctaatgggcagta

SEQ ID NO: 112210 - DNA, 3329 bp, Homo sapiens
  Payload ID: 1977
  Gene Symbol: BRPF3
  Gene Name: bromodomain and PHD finger containing, 3
  ENST ID: ENST00000441730
  CDS Start-End: 1-739
accatcactcaacaagacagtatccaatggggagctgccagcagggccccagggggatgcagctgtgctggagcaggccttgcaggaggagccagaagacgatggggacagagatgactccaaactgcctcctccgccaaccctggagcccactgggcctgcaccttccttgtctgagcaagaatcccccccggagccccctactctgaaacccattaatgatagcaaacctccaagcaggttcctaaagcccagaaaggtggaagaagatgagctcttggaaaaatcaccactgcagctagggaatgagcctttgcaacgcttgctcagtgacaatggcatcaacagactatccctcatggcccctgacaccccggccggtaccccacttagtggtgtgggtcgccgcacatcagtcctcttcaagaaggccaagaatggggttaagctacagagaagcccagacagggtcctggagaatggcgaggaccatggtgtggcaggctctcctgcctctccagccagcatcgaggaagagcgccactcccggaagcggccaaggagcaggagctgtagtgagagcgaaggggagaggtccccccagcaggaggaagagacaggcatgaccaacggctttggaaaacacaccgaaagcgggtctgactctgaatgtagtttgggtctcagtggtggactggcatttgaagcttgcaggcagaagcctcctgctgccctttgaagaccgcggagacctggagcccttggagctggtgtgggccaagtgccgaggctacccctcctaccctgccttgatcatcgatcccaagatgccccgggagggcctcctgcacaatggcgttcccatccctgtccccccgctggacgtgctgaagctgggagagcagaaacaggcagaggctggagagaagctcttccttgtcctcttctttgacaacaagcgcacctggcagtggcttccaagggacaaagtcctgcccttgggtgtggaagacaccgtggacaagctcaagatgctggaaggccgcaagaccagcatccgcaagtcagtgcaggtggcctatgaccgtgcgatgatccacctgagcagagtccgggggccccactccttcgtcacttccagctacctgtaagggcagggctgggcctgcatccgcttgccctgcctccatcccgcagggcacagagaagcctcttctgcccctgccagatgtatggccggcagcttccccctctcatggtaggccagggactgggctttctccccactaagggcaaggccccagttttgaccaatcgcatggttctcctggcaggcctgctgtgtgccaaaaactcccacccaaggtccctcaggggatatttcactgaagaaccagttagaagtagaaacagctgtggggcttgggcccagcttaggagattgcccagatggcaagaggtcctgggctccttcttgaggggctgcctggcccgctccatcctactcccactaactacacctcagggcgggtgaggttccgacactgatcccagagatgccgtggatacgccagggtcccagggggaatctccccaagctcacactctctcccgcttatcgcctattctcacacctcttctcggtcccatcttctgcacccattgcccagtcttgctttctctttcccatattccttttctttttctcttgtgccaaactgacagaaaccgtcaccacactggtctttttctttaatgtctcattccccttgaggccagctgctatgccaggtggtgtctctgccaggctcctcaggcccagacagaggccagcccacaacctatgaccccctcccccaggacaccacctcccacccacagaccttccctttagctgttgacacaacttcccagctctgcaagtgtgccccctggatcaaggcgggtcccctcttgtttttttctttgctgccacgaggtggtccaagccttcagggtgggctcctatcaggctgggtgtgcgagtgtccatctgtccacatggatgtcgagggtggtttgtgtggagctgtgctcgtcagctgggtctgccctcttcccccttttctccttcttctctcctcatggactttttctgcaattgcagtcttaagcttcactctccaccacctggatggcatggcgcctgccaccaaacatcttcctggcctgcgctctgccctgccctgcctagcctctgctactcccacttcccaactccagggaatgcattacttttatttcaaaccctctgcctccttccttctttctcttcaaccccctccccaccttcaccttctcaaaaatggaaggaaaaaaaaactgtgaatggggaatgctgactgacaaaccaacacaactttcagaggcttcagtgtctgttctctggacatttcttttcacctcctgagcaccaaagtcgcagggccagttgcaggccgctgattgccatgttgatttttaacctgatattctttttaattgttttaaatttttcataggggagttttggacaaaacagtcactggggagatcactgccatttttacacacttgactttttaaaaatacaaccaaccaaccaccacaacttcttatacatttgggacatgagccagagtttaaaagggaaccaacaaaacactataacttaaaaggatggggttttggattttgtataataataaaaacaatacagcatatggctagggaaggacatggtgtatataattgtaaaatactgttctaaattattcaggcctatagtttccattactggagtcctccattgtgtggccacacagtgtcgttgatttaaaggagccagtgcttcccctctccccaggtagttggtcagctgtggactctgtgacctttgtctaaacctgtgttgtaagatcttgggacttcctctctttctatgtctatctcttccccccaacactttctcttcttagtctctctctttatttttcaatctctgaatattttagtctctctctgagtctcattttttaaaatgctcttttagaacgggaaacggctcagatcctgctgtggcacggggcctatgtgtctctgtcgcgtctgctgtgaagcacatgatgctctatttattgtagagagtgactttatttgctttctagaattgtttataacagatggtataagagaggtaataaacagagaaaaatctatgcttgtaaagaatacaaaagttaattttacctactataatatgactgtctgaaacttattttctctctgagaaataaatgttctaatgggca

SEQ ID NO: 112211 - DNA, 582 bp, Homo sapiens
  Payload ID: 1977
  Gene Symbol: BRPF3
  Gene Name: bromodomain and PHD finger containing, 3
  ENST ID: ENST00000454960
  CDS Start-End: 196-582
atttccctcctttcttctccgaggggtcaagattcttctggaagaggtgcccccttaaaggagcaggagccttggctggggtcctccttgtctcctgagtatcttgtgtgaggtgcaggggatacagtctaattgcagaagctcctcattcttcggggacctggatggggcctgtcccctcagttcccaggtgccatgaggaagcctcgtcggaagtcccggcagaatgccgagggccggcgttccccgtccccctacagtctcaagtgctcacccacccgggagaccctgacatatgcccaggcccagcggattgtcgaggtagacattgatggacgcctgcatcgtatcagcatctatgacccactcaaaatcattactgaagatgagctaactgcccaggatatcaccgaatgcaatagtaacaaggaaaacagtgaacagcctcagttccctggcaagtccaagaaaccctcatccaagggcaaaaagaaggaatcctgctccaagcatgcatctggtacttccttccacctcccacagcccagcttccgtatggtggactcaggcatccagccagaa

SEQ ID NO: 112212 - DNA, 4816 bp, Homo sapiens
  Payload ID: 1977
  Gene Symbol: BRPF3
  Gene Name: bromodomain and PHD finger containing, 3
  ENST ID: ENST00000449261
  CDS Start-End: 32-2497
ctgaggcctgtcccctcagttcccaggtgccatgaggaagcctcgtcggaagtcccggcagaatgccgagggccggcgttccccgtccccctacagtctcaagtgctcacccacccgggagaccctgacatatgcccaggcccagcggattgtcgaggtagacattgatggacgcctgcatcgtatcagcatctatgacccactcaaaatcattactgaagatgagctaactgcccaggatatcaccgaatgcaatagtaacaaggaaaacagtgaacagcctcagttccctggcaagtccaagaaaccctcatccaagggcaaaaagaaggaatcctgctccaagcatgcatctggtacttccttccacctcccacagcccagcttccgtatggtggactcaggcatccagccagaagcacccccgctgcctgctgcctactaccgctacattgagaagccacctgaagacctggatgcagaggtagagtatgacatggatgaggaggaccttgcctggctggacatggtgaatgaaaaacggcgagtagatgggcacagtttggtgtctgcagatacctttgagctgctggtagaccggcttgagaaagagtcatacttggagagtcgcagcagtggggcccaacagtcactcatcgatgaagacgctttctgctgtgtgtgcctggatgatgaatgtcacaatagcaatgttattctcttctgtgacatctgcaacctggctgtacaccaggagtgctatggcgtcccatacatccctgagggccagtggctatgccgctgctgcctgcagtctccctcccggcctgtggattgcatcctttgccccaataagggtggcgccttcaaacagaccagtgatgggcactgggcccatgtggtgtgtgccatctggatccctgaagtctgctttgctaacaccgtgttcttggaacctattgagggcattgacaatatcccgcctgcccgctggaaactaacctgctatatctgcaagcagaaagggctaggtgcagccatccagtgccataaggtgaactgctacacagcattccatgtgacatgtgcacagcgggctgggctcttcatgaagattgagcccatgcgcgaaaccagcctcaatggcaccatctttacagtgcgcaagactgcctactgtgaggcccactcgccaccaggtgcggccactgctaggaggaagggcgactcccctagaagcatcagtgagactggcgatgaggaagggctgaaggagggtgatggagaggaggaagaagaggaagaggtggaggaagaagagcaggaagctcaaggcggggtgagtggctccctcaagggagtgcccaagaaaagcaagatgagtttgaagcagaagatcaagaaggagccagaggaagcaggccaagacacaccctccactctccccatgcttgctgtcccacagataccctcttacaggttgaacaagatctgtagtggtctctcctttcagaggaaaaaccagtttatgcagcggcttcacaattattggctgttgaagcggcaggcacggaatggtgtccctcttatccggcgcttgcactcccatctgcagtcccaaagaaacgctgagcagcgagagcaggatgagaagacaagtgcagtgaaggaggagctgaagtattggcagaagctccggcatgacttggagcgggcgcggctgctgattgagctgattcggaagagagagaagctcaaacgagagcaggtcaaagtccagcaggctgccatggagctggagctgatgccattcaatgttctgttgaggacaacactggacctgctgcaggagaaggatcctgcacacatcttcgcagaaccagtcaacttgagtgaggttccagattacctggaattcatatccaagccaatggatttttctactatgaggcggaagctggagtcccacctgtaccgcaccttggaggagtttgaggaggactttaaccttatagttaccaactgcatgaagtataatgctaaagacacaattttccaccgagcagctgtccgcctgcgggacctgggaggggccatcctacggcacgcccggcggcaggcagagaacatcggctatgaccccgagaggggcactcacctgcccgagtcacccaaattggaagacttttaccgcttctcctgggaagacggcatgaccaacggctttggaaaacacaccgaaagcgggtctgactctgaatgtagtttgggtctcagtggtggactggcatttgaagcttgcagtggtctgacgccccccaaacgcagccgtgggaagccagccctgtctcgagtgcccttcctggaaggtgtgaacggagactctgactacaatggctcagaagcctcctgctgccctttgaagaccgcggagacctggagcccttggagctggtgtgggccaagtgccgaggctacccctcctaccctgccttgatcatcgatcccaagatgccccgggagggcctcctgcacaatggcgttcccatccctgtccccccgctggacgtgctgaagctgggagagcagaaacaggcagaggctggagagaagctcttccttgtcctcttctttgacaacaagcgcacctggcagtggcttccaagggacaaagtcctgcccttgggtgtggaagacaccgtggacaagctcaagatgctggaaggccgcaagaccagcatccgcaagtcagtgcaggtggcctatgaccgtgcgatgatccacctgagcagagtccgggggccccactccttcgtcacttccagctacctgtaagggcagggctgggcctgcatccgcttgccctgcctccatcccgcagggcacagagaagcctcttctgcccctgccagatgtatggccggcagcttccccctctcatggtaggccagggactgggctttctccccactaagggcaaggccccagttttgaccaatcgcatggttctcctggcaggcctgctgtgtgccaaaaactcccacccaaggtccctcaggggatatttcactgaagaaccagttagaagtagaaacagctgtggggcttgggcccagcttaggagattgcccagatggcaagaggtcctgggctccttcttgaggggctgcctggcccgctccatcctactcccactaactacacctcagggcgggtgaggttccgacactgatcccagagatgccgtggatacgccagggtcccagggggaatctccccaagctcacactctctcccgcttatcgcctattctcacacctcttctcggtcccatcttctgcacccattgcccagtcttgctttctctttcccatattccttttctttttctcttgtgccaaactgacagaaaccgtcaccacactggtctttttctttaatgtctcattccccttgaggccagctgctatgccaggtggtgtctctgccaggctcctcaggcccagacagaggccagcccacaacctatgaccccctcccccaggacaccacctcccacccacagaccttccctttagctgttgacacaacttcccagctctgcaagtgtgccccctggatcaaggcgggtcccctcttgtttttttctttgctgccacgaggtggtccaagccttcagggtgggctcctatcaggctgggtgtgcgagtgtccatctgtccacatggatgtcgagggtggtttgtgtggagctgtgctcgtcagctgggtctgccctcttcccccttttctccttcttctctcctcatggactttttctgcaattgcagtcttaagcttcactctccaccacctggatggcatggcgcctgccaccaaacatcttcctggcctgcgctctgccctgccctgcctagcctctgctactcccacttcccaactccagggaatgcattacttttatttcaaaccctctgcctccttccttctttctcttcaaccccctccccaccttcaccttctcaaaaatggaaggaaaaaaaaactgtgaatggggaatgctgactgacaaaccaacacaactttcagaggcttcagtgtctgttctctggacatttcttttcacctcctgagcaccaaagtcgcagggccagttgcaggccgctgattgccatgttgatttttaacctgatattctttttaattgttttaaatttttcataggggagttttggacaaaacagtcactggggagatcactgccatttttacacacttgactttttaaaaatacaaccaaccaaccaccacaacttcttatacatttgggacatgagccagagtttaaaagggaaccaacaaaacactataacttaaaaggatggggttttggattttgtataataataaaaacaatacagcatatggctagggaaggacatggtgtatataattgtaaaatactgttctaaattattcaggcctatagtttccattactggagtcctccattgtgtggccacacagtgtcgttgatttaaaggagccagtgcttcccctctccccaggtagttggtcagctgtggactctgtgacctttgtctaaacctgtgttgtaagatcttgggacttcctctctttctatgtctatctcttccccccaacactttctcttcttagtctctctctttatttttcaatctctgaatattttagtctctctctgagtctcattttttaaaatgctcttttagaacgggaaacggctcagatcctgctgtggcacggggcctatgtgtctctgtcgcgtctgctg

SEQ ID NO: 112213 - DNA, 437 bp, Homo sapiens
  Payload ID: 1977
  Gene Symbol: BRPF3
  Gene Name: bromodomain and PHD finger containing, 3
  ENST ID: ENST00000527657
  CDS Start-End: 159-437
ttcttttggaggattaggactgcaaggcaagaggtggaaaagcaaatgaaataactcatgctgaatctgagctgcttaactttactgtccttttcaagcctttctctgaggtgaggtatttggccattttattctgtcttcctgtataaggttcagaaatgaaccaggtctggataggatgcacaggctgtaatctgggctgcccactgaccttgtctttcacttccgtgtgcctctactcaaggttgaacaagatctgtagtggtctctcctttcagaggaaaaaccagtttatgcagcggcttcacaattattggctgttgaagcggcaggcacggaatggtgtccctcttatccggcgcttgcactcccatctgcagtcccaaagaaacgctgagcagcgagagcaggatgagaagacaagtgcagtgaaggag

SEQ ID NO: 112214 - DNA, 4628 bp, Homo sapiens
  Payload ID: 1977
  Gene Symbol: BRPF3
  Gene Name: bromodomain and PHD finger containing, 3
  Uniprot ID: Q9ULD4
  ENST ID: ENST00000534694
  CDS Start-End: 32-2647
ctgaggcctgtcccctcagttcccaggtgccatgaggaagcctcgtcggaagtcccggcagaatgccgagggccggcgttccccgtccccctacagtctcaagtgctcacccacccgggagaccctgacatatgcccaggcccagcggattgtcgaggtagacattgatggacgcctgcatcgtatcagcatctatgacccactcaaaatcattactgaagatgagctaactgcccaggatatcaccgaatgcaatagtaacaaggaaaacagtgaacagcctcagttccctggcaagtccaagaaaccctcatccaagggcaaaaagaaggaatcctgctccaagcatgcatctggtacttccttccacctcccacagcccagcttccgtatggtggactcaggcatccagccagaagcacccccgctgcctgctgcctactaccgctacattgagaagccacctgaagacctggatgcagaggtagagtatgacatggatgaggaggaccttgcctggctggacatggtgaatgaaaaacggcgagtagatgggcacagtttggtgtctgcagatacctttgagctgctggtagaccggcttgagaaagagtcatacttggagagtcgcagcagtggggcccaacagtcactcatcgatgaagacgctttctgctgtgtgtgcctggatgatgaatgtcacaatagcaatgttattctcttctgtgacatctgcaacctggctgtacaccaggagtgctatggcgtcccatacatccctgagggccagtggctatgccgctgctgcctgcagtctccctcccggcctgtggattgcatcctttgccccaataagggtggcgccttcaaacagaccagtgatgggcactgggcccatgtggtgtgtgccatctggatccctgaagtctgctttgctaacaccgtgttcttggaacctattgagggcattgacaatatcccgcctgcccgctggaaactaacctgctatatctgcaagcagaaagggctaggtgcagccatccagtgccataaggtgaactgctacacagcattccatgtgacatgtgcacagcgggctgggctcttcatgaagattgagcccatgcgcgaaaccagcctcaatggcaccatctttacagtgcgcaagactgcctactgtgaggcccactcgccaccaggtgcggccactgctaggaggaagggcgactcccctagaagcatcagtgagactggcgatgaggaagggctgaaggagggtgatggagaggaggaagaagaggaagaggtggaggaagaagagcaggaagctcaaggcggggtgagtggctccctcaagggagtgcccaagaaaagcaagatgagtttgaagcagaagatcaagaaggagccagaggaagcaggccaagacacaccctccactctccccatgcttgctgtcccacagataccctcttacaggttgaacaagatctgtagtggtctctcctttcagaggaaaaaccagtttatgcagcggcttcacaattattggctgttgaagcggcaggcacggaatggtgtccctcttatccggcgcttgcactcccatctgcagtcccaaagaaacgctgagcagcgagagcaggatgagaagacaagtgcagtgaaggaggagctgaagtattggcagaagctccggcatgacttggagcgggcgcggctgctgattgagctgattcggaagagagagaagctcaaacgagagcaggtcaaagtccagcaggctgccatggagctggagctgatgccattcaatgttctgttgaggacaacactggacctgctgcaggagaaggatcctgcacacatcttcgcagaaccagtcaacttgagtgaggttccagattacctggaattcatatccaagccaatggatttttctactatgaggcggaagctggagtcccacctgtaccgcaccttggaggagtttgaggaggactttaaccttatagttaccaactgcatgaagtataatgctaaagacacaattttccaccgagcagctgtccgcctgcgggacctgggaggggccatcctacggcacgcccggcggcaggcagagaacatcggctatgaccccgagaggggcactcacctgcccgagtcacccaaattggaagacttttaccgcttctcctgggaagacggcagaagcctcctgctgccctttgaagaccgcggagacctggagcccttggagctggtgtgggccaagtgccgaggctacccctcctaccctgccttgatcatcgatcccaagatgccccgggagggcctcctgcacaatggcgttcccatccctgtccccccgctggacgtgctgaagctgggagagcagaaacaggcagaggctggagagaagctcttccttgtcctcttctttgacaacaagcgcacctggcagtggcttccaagggacaaagtcctgcccttgggtgtggaagacaccgtggacaagctcaagatgctggaaggccgcaagaccagcatccgcaagtcagtgcaggtggcctatgaccgtgcgatgatccacctgagcagagtccgggggccccactccttcgtcacttccagctacctgtaagggcagggctgggcctgcatccgcttgccctgcctccatcccgcagggcacagagaagcctcttctgcccctgccagatgtatggccggcagcttccccctctcatggtaggccagggactgggctttctccccactaagggcaaggccccagttttgaccaatcgcatggttctcctggcaggcctgctgtgtgccaaaaactcccacccaaggtccctcaggggatatttcactgaagaaccagttagaagtagaaacagctgtggggcttgggcccagcttaggagattgcccagatggcaagaggtcctgggctccttcttgaggggctgcctggcccgctccatcctactcccactaactacacctcagggcgggtgaggttccgacactgatcccagagatgccgtggatacgccagggtcccagggggaatctccccaagctcacactctctcccgcttatcgcctattctcacacctcttctcggtcccatcttctgcacccattgcccagtcttgctttctctttcccatattccttttctttttctcttgtgccaaactgacagaaaccgtcaccacactggtctttttctttaatgtctcattccccttgaggccagctgctatgccaggtggtgtctctgccaggctcctcaggcccagacagaggccagcccacaacctatgaccccctcccccaggacaccacctcccacccacagaccttccctttagctgttgacacaacttcccagctctgcaagtgtgccccctggatcaaggcgggtcccctcttgtttttttctttgctgccacgaggtggtccaagccttcagggtgggctcctatcaggctgggtgtgcgagtgtccatctgtccacatggatgtcgagggtggtttgtgtggagctgtgctcgtcagctgggtctgccctcttcccccttttctccttcttctctcctcatggactttttctgcaattgcagtcttaagcttcactctccaccacctggatggcatggcgcctgccaccaaacatcttcctggcctgcgctctgccctgccctgcctagcctctgctactcccacttcccaactccagggaatgcattacttttatttcaaaccctctgcctccttccttctttctcttcaaccccctccccaccttcaccttctcaaaaatggaaggaaaaaaaaactgtgaatggggaatgctgactgacaaaccaacacaactttcagaggcttcagtgtctgttctctggacatttcttttcacctcctgagcaccaaagtcgcagggccagttgcaggccgctgattgccatgttgatttttaacctgatattctttttaattgttttaaatttttcataggggagttttggacaaaacagtcactggggagatcactgccatttttacacacttgactttttaaaaatacaaccaaccaaccaccacaacttcttatacatttgggacatgagccagagtttaaaagggaaccaacaaaacactataacttaaaaggatggggttttggattttgtataataataaaaacaatacagcatatggctagggaaggacatggtgtatataattgtaaaatactgttctaaattattcaggcctatagtttccattactggagtcctccattgtgtggccacacagtgtcgttgatttaaaggagccagtgcttcccctctccccaggtagttggtcagctgtggactctgtgacctttgtctaaacctgtgttgtaagatcttgggacttcctctctttctatgtctatctcttccccccaacactttctcttcttagtctctctctttatttttcaatctctgaatattttagtctctctctgagtctcattttttaaaatgctcttttagaacgggaaacggctcagatcctgctgtggcacggggcctatgtgtctctgtcgcgtctgctg

SEQ ID NO: 112215 - DNA, 4254 bp, Homo sapiens
  Payload ID: 1977
  Gene Symbol: BRPF3
  Gene Name: bromodomain and PHD finger containing, 3
  ENST ID: ENST00000534400
  CDS Start-End: 27-3347
gcctgtcccctcagttcccaggtgccatgaggaagcctcgtcggaagtcccggcagaatgccgagggccggcgttccccgtccccctacagtctcaagtgctcacccacccgggagaccctgacatatgcccaggcccagcggattgtcgaggtagacattgatggacgcctgcatcgtatcagcatctatgacccactcaaaatcattactgaagatgagctaactgcccaggatatcaccgaatgcaatagtaacaaggaaaacagtgaacagcctcagttccctggcaagtccaagaaaccctcatccaagggcaaaaagaaggaatcctgctccaagcatgcatctggtacttccttccacctcccacagcccagcttccgtatggtggactcaggcatccagccagaagcacccccgctgcctgctgcctactaccgctacattgagaagccacctgaagacctggatgcagaggtagagtatgacatggatgaggaggaccttgcctggctggacatggtgaatgaaaaacggcgagtagatgggcacagtttggtgtctgcagatacctttgagctgctggtagaccggcttgagaaagagtcatacttggagagtcgcagcagtggggcccaacagtcactcatcgatgaagacgctttctgctgtgtgtgcctggatgatgaatgtcacaatagcaatgttattctcttctgtgacatctgcaacctggctgtacaccaggagtgctatggcgtcccatacatccctgagggccagtggctatgccgctgctgcctgcagtctccctcccggcctgtggattgcatcctttgccccaataagggtggcgccttcaaacagaccagtgatgggcactgggcccatgtggtgtgtgccatctggatccctgaagtctgctttgctaacaccgtgttcttggaacctattgagggcattgacaatatcccgcctgcccgctggaaactaacctgctatatctgcaagcagaaagggctaggtgcagccatccagtgccataaggtgaactgctacacagcattccatgtgacatgtgcacagcgggctgggctcttcatgaagattgagcccatgcgcgaaaccagcctcaatggcaccatctttacagtgcgcaagactgcctactgtgaggcccactcgccaccaggtgcggccactgctaggaggaagggcgactcccctagaagcatcagtgagactggcgatgaggaagggctgaaggagggtgatggagaggaggaagaagaggaagaggtggaggaagaagagcaggaagctcaaggcggggtgagtggctccctcaagggagtgcccaagaaaagcaagatgagtttgaagcagaagatcaagaaggagccagaggaagcaggccaagacacaccctccactctccccatgcttgctgtcccacagataccctcttacaggttgaacaagatctgtagtggtctctcctttcagaggaaaaaccagtttatgcagcggcttcacaattattggctgttgaagcggcaggcacggaatggtgtccctcttatccggcgcttgcactcccatctgcagtcccaaagaaacgctgagcagcgagagcaggatgagaagacaagtgcagtgaaggaggagctgaagtattggcagaagctccggcatgacttggagcgggcgcggctgctgattgagctgattcggaagagagagaagctcaaacgagagcaggtcaaagtccagcaggctgccatggagctggagctgatgccattcaatgttctgttgaggacaacactggacctgctgcaggagaaggatcctgcacacatcttcgcagaaccagtcaacttgagtgaggttccagattacctggaattcatatccaagccaatggatttttctactatgaggcggaagctggagtcccacctgtaccgcaccttggaggagtttgaggaggactttaaccttatagttaccaactgcatgaagtataatgctaaagacacaattttccaccgagcagctgtccgcctgcgggacctgggaggggccatcctacggcacgcccggcggcaggcagagaacatcggctatgaccccgagaggggcactcacctgcccgagtcacccaaattggaagacttttaccgcttctcctgggaagacgtggacaacatcctcatcccagagaaccgggcccatttgtccccagaggtgcagctgaaggagctgctggagaaactggacctggtgagcgccatgcggtccagtggggcccgcacccgtcgtgtccgcctgctacgccgggagatcaatgcccttcggcagaagctggcacagccaccaccaccacagccaccatcactcaacaagacagtatccaatggggagctgccagcagggccccagggggatgcagctgtgctggagcaggccttgcaggaggagccagaagacgatggggacagagatgactccaaactgcctcctccgccaaccctggagcccactgggcctgcaccttccttgtctgagcaagaatcccccccggagccccctactctgaaacccattaatgatagcaaacctccaagcaggttcctaaagcccagaaaggtggaagaagatgagctcttggaaaaatcaccactgcagctagggaatgagcctttgcaacgcttgctcagtgacaatggcatcaacagactatccctcatggcccctgacaccccggccggtaccccacttagtggtgtgggtcgccgcacatcagtcctcttcaagaaggccaagaatggggttaagctacagagaagcccagacagggtcctggagaatggcgaggaccatggtgtggcaggctctcctgcctctccagccagcatcgaggaagagcgccactcccggaagcggccaaggagcaggagctgtagtgagagcgaaggggagaggtccccccagcaggaggaagagacaggcatgaccaacggctttggaaaacacaccgaaagcgggtctgactctgaatgtagtttgggtctcagtggtggactggcatttgaagcttgcagtggtctgacgccccccaaacgcagccgtgggaagccagccctgtctcgagtgcccttcctggaaggtgtgaacggagactctgactacaatggctcagatcatcgatcccaagatgccccgggagggcctcctgcacaatggcgttcccatccctgtccccccgctggacgtgctgaagctgggagagcagaaacaggcagaggctggagagaagctcttccttgtcctcttctttgacaacaagcgcacctggcagtggcttccaagggacaaagtcctgcccttgggtgtggaagacaccgtggacaagctcaagatgctggaaggccgcaagaccagcatccgcaagtcagtgcaggtggcctatgaccgtgcgatgatccacctgagcagagtccgggggccccactccttcgtcacttccagctacctgtaagggcagggctgggcctgcatccgcttgccctgcctccatcccgcagggcacagagaagcctcttctgcccctgccagatgtatggccggcagcttccccctctcatggtaggccagggactgggctttctccccactaagggcaaggccccagttttgaccaatcgcatggttctcctggcaggcctgctgtgtgccaaaaactcccacccaaggtccctcaggggatatttcactgaagaaccagttagaagtagaaacagctgtggggcttgggcccagcttaggagattgcccagatggcaagaggtcctgggctccttcttgaggggctgcctggcccgctccatcctactcccactaactacacctcagggcgggtgaggttccgacactgatcccagagatgccgtggatacgccagggtcccagggggaatctccccaagctcacactctctcccgcttatcgcctattctcacacctcttctcggtcccatcttctgcacccattgcccagtcttgctttctctttcccatattccttttctttttctcttgtgccaaactgacagaaaccgtcaccacactggtctttttctttaatgtctcattccccttgaggccagctgctatgccaggtggtgtctctgccaggctcctcaggcccagacagaggccagcccacaacctatgaccccctccccca

SEQ ID NO: 112216 - DNA, 4077 bp, Homo sapiens
  Payload ID: 1977
  Gene Symbol: BRPF3
  Gene Name: bromodomain and PHD finger containing, 3
  ENST ID: ENST00000532330
  CDS Start-End: 27-1907
gcctgtcccctcagttcccaggtgccatgaggaagcctcgtcggaagtcccggcagaatgccgagggccggcgttccccgtccccctacagtctcaagtgctcacccacccgggagaccctgacatatgcccaggcccagcggattgtcgaggtagacattgatggacgcctgcatcgtatcagcatctatgacccactcaaaatcattactgaagatgagctaactgcccaggatatcaccgaatgcaatagtaacaaggaaaacagtgaacagcctcagttccctggcaagtccaagaaaccctcatccaagggcaaaaagaaggaatcctgctccaagcatgcatctggtacttccttccacctcccacagcccagcttccgtatggtggactcaggcatccagccagaagcacccccgctgcctgctgcctactaccgctacattgagaagccacctgaagacctggatgcagaggtagagtatgacatggatgaggaggaccttgcctggctggacatggtgaatgaaaaacggcgagtagatgggcacagtttggtgtctgcagatacctttgagctgctggtagaccggcttgagaaagagtcatacttggagagtcgcagcagtggggcccaacagtcactcatcgatgaagacgctttctgctgtgtgtgcctggatgatgaatgtcacaatagcaatgttattctcttctgtgacatctgcaacctggctgtacaccaggagtgctatggcgtcccatacatccctgagggccagtggctatgccgctgctgcctgcagtctccctcccggcctgtggattgcatcctttgccccaataagggtggcgccttcaaacagaccagtgatgggcactgggcccatgtggtgtgtgccatctggatccctgaagtctgctttgctaacaccgtgttcttggaacctattgagggcattgacaatatcccgcctgcccgctggaaactaacctgctatatctgcaagcagaaagggctaggtgcagccatccagtgccataaggtgaactgctacacagcattccatgtgacatgtgcacagcgggctgggctcttcatgaagattgagcccatgcgcgaaaccagcctcaatggcaccatctttacagtgcgcaagactgcctactgtgaggcccactcgccaccaggtgcggccactgctaggaggaagggcgactcccctagaagcatcagtgagactggcgatgaggaagggctgaaggagggtgatggagaggaggaagaagaggaagaggtggaggaagaagagcaggaagctcaaggcggggtgagtggctccctcaagggagtgcccaagaaaagcaagatgagtttgaagcagaagatcaagaaggagccagaggaagcaggccaagacacaccctccactctccccatgcttgctgtcccacagataccctcttacaggttgaacaagatctgtagtggtctctcctttcagaggaaaaaccagtttatgcagcggcttcacaattattggctgttgaagcggcaggcacggaatggtgtccctcttatccggcgcttgcactcccatctgcagtcccaaagaaacgctgagcagcgagagcaggatgagaagacaagtgcagtgaaggaggagctgaagtattggcagaagctccggcatgacttggagcgggcgcggctgctgattgagctgattcggaagagagagaagctcaaacgagagcaggtcaaagtccagcaggctgccatggagctggagctgatgccattcaatgttctgttgaggacaacactggacctgctgcaggagaaggatcctgcacacatcttcgcagaaccagtcaacttgagtgaggttttatatgtttaggttccagattacctggaattcatatccaagccaatggatttttctactatgaggcggaagctggagtcccacctgtaccgcaccttggaggagtttgaggaggactttaaccttatagttaccaactgcatgaagtataatgctaaagacacaattttccaccgagcagctgtccgcctgcgggacctgggaggggccatcctacggcacgcccggcggcaggcagagaacatcggctatgaccccgagaggggcactcacctgcccgagtcacccaaattggaagacttttaccgcttctcctgggaagacgtggacaacatcctcatcccagagaaccgggcccatttgtccccagaggtgcagctgaaggagctgctggagaaactggacctggtgagcgccatgcggtccagtggggcccgcacccgtcgtgtccgcctgctacgccgggagatcaatgcccttcggcagaagctggcacagccaccaccaccacagccaccatcactcaacaagacagtatccaatggggagctgccagcagggccccagggggatgcagctgtgctggagcaggccttgcaggaggagccagaagacgatggggacagagatgactccaaactgcctcctccgccaaccctggagcccactgggcctgcaccttccttgtctgagcaagaatcccccccggagccccctactctgaaacccattaatgatagcaaacctccaagcaggttcctaaagcccagaaaggtggaagaagatgagctcttggaaaaatcaccactgcagctagggaatgagcctttgcaacgcttgctcagtgacaatggcatcaacagactatccctcatggcccctgacaccccggccggtaccccacttagtggtgtgggtcgccgcacatcagtcctcttcaagaaggccaagaatggggttaagctacagagaagcccagacagggtcctggagaatggcgaggaccatggtgtggcaggctctcctgcctctccagccagcatcgaggaagagcgccactcccggaagcggccaaggagcaggagctgtagtgagagcgaaggggagaggtccccccagcaggaggaagagacagatcatcgatcccaagatgccccgggagggcctcctgcacaatggcgttcccatccctgtccccccgctggacgtgctgaagctgggagagcagaaacaggcagaggctggagagaagctcttccttgtcctcttctttgacaacaagcgcacctggcagtggcttccaagggacaaagtcctgcccttgggtgtggaagacaccgtggacaagctcaagatgctggaaggccgcaagaccagcatccgcaagtcagtgcaggtggcctatgaccgtgcgatgatccacctgagcagagtccgggggccccactccttcgtcacttccagctacctgtaagggcagggctgggcctgcatccgcttgccctgcctccatcccgcagggcacagagaagcctcttctgcccctgccagatgtatggccggcagcttccccctctcatggtaggccagggactgggctttctccccactaagggcaaggccccagttttgaccaatcgcatggttctcctggcaggcctgctgtgtgccaaaaactcccacccaaggtccctcaggggatatttcactgaagaaccagttagaagtagaaacagctgtggggcttgggcccagcttaggagattgcccagatggcaagaggtcctgggctccttcttgaggggctgcctggcccgctccatcctactcccactaactacacctcagggcgggtgaggttccgacactgatcccagagatgccgtggatacgccagggtcccagggggaatctccccaagctcacactctctcccgcttatcgcctattctcacacctcttctcggtcccatcttctgcacccattgcccagtcttgctttctctttcccatattccttttctttttctcttgtgccaaactgacagaaaccgtcaccacactggtctttttctttaatgtctcattccccttgaggccagctgctatgccaggtggtgtctctgccaggctcctcaggcccagacagaggccagcccacaacctatgaccccctccccca

SEQ ID NO: 112217 - DNA, 10141 bp, Homo sapiens
  Payload ID: 1978
  Gene Symbol: BRWD1
  Gene Name: bromodomain and WD repeat domain containing 1
  Uniprot ID: Q9NSI6
  ENST ID: ENST00000333229
  CDS Start-End: 329-7291
aggtctttgcctccgcgtcactttctcctcatcgagtccccggaggcagagagctgagcgaggttcgcctccccgggcgggacacgagctccggtcctctcttggcgcaaacccccgccccccgcggagggactacttttcgtctcccgcggaggaactacttcctcccccgcggaggcgtcggtccaggcggcgcgcacggtatggcggcggcggcggcggcggcggcgcgcgcctgagaagaggggacgccagcccggtcaggcctcggcgcggcctacacgctccgctcgctcgctcgctcccgcctcccgccccgcgcccggccatggcggagccgtcgtccgcccgacgcccggtgcctctcatcgagtcggagctgtacttccttatcgcccggtacctatcggcgggcccgtgtcggagagcggcccaggtgctggtgcaggagctggagcagtaccagttgttgccgaagagattggactgggagggcaacgagcacaacaggagctacgaggagttggtcttgtccaataagcatgtggctcctgatcatcttttgcaaatctgccagcgcatcggtcctatgttggataaagaaattccacccagtatttcaagagtcacttctttacttggtgcaggaaggcagtctttgctacgtacagcaaaagactgcaggcacacagtttggaagggctctgcctttgctgctcttcatagaggaagacctcctgaaatgccagtgaattatggttccccaccaaatcttgtggagatacatcgaggaaaacaactcacagggtgttccacttttagtacagcatttccaggaactatgtatcagcatataaaaatgcacagaaggattctcggacatctatctgctgtttactgtgtagcatttgataggacaggacatagaatctttacaggttcagatgactgtttggtaaagatttggtcaacacataatggccgcttgttatctacattaagaggtcattctgcagaaatttcagatatggcagtaaactatgagaatacaatgattgctgcggggagctgtgataaaattattagagtgtggtgcttgagaacttgtgccccagttgctgtgctccaaggacacacaggatcaattacatctttacagtttagcccgatggccaaaggctctcaaagatacatggtttccactggtgctgatgggacagtttgcttttggcaatgggatttagaatccttaaaatttagcccacgtcccctgaagttcactgaaaagcctaggccaggcgttcaaatgctttgttcttcttttagtgttggtggtatgtttttagccacaggtagtactgatcatgtaatcagaatgtattttttgggttttgaagcacccgaaaaaatcgcagaacttgaaagccacactgataaagtagatagtatccaattttgtaacaatggtgatcggttcctaagtggtagcagagatggaacagcacggatttggagatttgagcagttagaatggaggagcattttattggatatggctaccagaatctcaggggacttatcttccgaagaggaaaggtttatgaaacctaaagtaacaatgatagcttggaatcaaaatgatagcattgttgtcacagctgtgaatgatcatgtcctcaaagtgtggaattcttacactggacaactgcttcataacttaatgggacatgctgatgaagtatttgttctggagacacatccctttgattccagaattatgttatctgcaggacatgatggcagcatatttatatgggatattacaaaaggtaccaagatgaaacattattttaatatgattgaaggacaaggacatggagctgtgtttgactgtaagttttcacaggatggacagcattttgcctgtacagattctcatgggcaccttctgatatttggttttggatgcagcaaaccatatgaaaagattcctgatcagatgttcttccatactgactatcgaccacttattagagattctaataattatgtcttagatgagcaaactcagcaggctcctcatcttatgcctccaccattcttggtagatgtagatggaaatcctcatccaaccaagtatcagagattagtaccaggccgagaaaattctgcagatgaacatttgattccacagctgggctatgtggcaacaagtgatggagaggtgattgaacaaattataagcctgcaaaccaatgataatgatgaacgcagcccagaatcgagtattcttgatggaatgataagacagttgcagcagcagcaagatcagagaatgggagcagatcaggatactattccaagaggactttcaaatggtgaagaaacaccccggagaggttttagaaggctgagcttagacattcagtcccctccaaatattggtctgcgtcgtagtggacaagttgaaggtgttcgtcagatgcatcaaaacgctccacgcagtcagattgctacagaacgtgacctgcaggcttggaaacgaagagtggttgtaccagaggtaccactaggcatatttaggaagctggaagacttccgattagagaaaggtgaagaggaaagaaatctttatataataggaagaaaaagaaagactcttcagctctcacataagtcggattcagtggttttggtatcacagtctagacaaaggacatgtaggcgtaaatatccaaattatggtagaagaaatcgtagctggcgtgagttatcttctggaaatgagtcttcaagctctgtaagacatgagacttcctgtgatcagagtgaaggttctggttcttcagaagaggatgaatggagaagtgacagaaaaagtgagagttacagcgaaagttcaagtgactcttcatctagatattccgattggacagctgatgcgggcatcaatttgcagcctcctttaagaacatcatgtcgtcgacgaattactcgattttgtagtagttcagaagatgaaatatctactgagaatttatctcctccaaaaagaagacgaaagagaaagaaagaaaataagcctaagaaggagaatttgcggaggatgactccagcagagcttgcaaatatggagcatttatatgaatttcaccctccagtttggattactgacaccacacttagaaaatctccttttgttcctcaaatgggtgatgaggtaatatattttcgacagggtcatgaagcttatattgaggctgtaagaagaaataatatttatgaactgaaccctaataaggagccatggagaaaaatggatcttagggatcaagaattggttaaaatagttggaatacgatatgaagttgggccccctacactctgttgcctaaaactagcatttatagatccagcaactggaaaacttatggacaaatctttctctattagatatcatgatatgccagatgttattgactttcttgtattgcgtcaattttatgatgaagcaagacagaggaattggcagtcttgtgacagattccgctctattattgatgatgcttggtggtttggaacagtgttaagtcaagagccatatcaaccacagtatcctgatagtcatttccagtgttatattgttaggtgggataatactgaaattgaaaaacttagcccatgggacatggaaccaattcctgataatgttgatccacctgaagaattaggagctagtatttctgtcacaacagatgagctagagaaattgctctataaaccacaagctggtgaatggggtcagaaatcaagagatgaagaatgtgatagaattatcagtggtatagatcaacttttgaatcttgatatagcagcagcttttgcaggccctgttgatttgtgtacatacccgaagtactgtactgtagtagcttatccaaccgatctttacacaattcgaatgagacttgttaatcgattttacaggaggctgtctgcgttagtttgggaagtcagatatatagaacataatgccagaacatttaacgaacctgagagtgtaattgcaagatcagctaaaaagataactgaccaacttttaaaatttatcaagaatcaacactgtacaaatatctcagaactttctaacacatctgaaaatgatgagcaaaatgctgaggatttggatgatagtgatcttcctaaaacatcttctggaaggaggagagtccatgatgggaaaaaaagcatcagagctacgaactatgttgaaagcaactggaagaaacagtgtaaggaactagtgaacttaatttttcagtgtgaagattctgaaccatttagacaacctgttgatttggttgaatatccagactacagagatattatagataccccaatggattttggaacagtaagggaaactctagatgcgggaaattatgacagccctttggagttttgcaaagacatccggctgatatttagcaatgcaaaagcgtatacaccaaacaaaagatcaaagatttatagtatgaccttgagattatctgccttatttgaagaaaaaatgaagaaaatctcttctgattttaaaattggtcaaaaattcaatgaaaaacttcgaagaagccagaggttcaagcaacggcaaaattgtaaaggtgacagtcagcctaacaaaagtatcagaaacctcaagccgaagaggttaaaatctcagacaaaaataattcctgagttggtaggttctcctacccagtctacctcaagtaggacagcttatcttggaacccacaagacaagtgctggtatctcttcaggtgttacttctggtgactcttcagattcagcagaatcatcagaaaggaggaaaagaaatagacctataacaaatggttctacattatctgaaagtgaagtggaagattctttagctacctctttgtcatcgtcagcttccagtagttctgaggaaagcaaagagagttccagagctcgtgaatcctcctcacgcagtgggctatccagaagcagcaatctcagggtaaccagaactagagctgctcaaagaaaaactggtcccgtttcattagcaaatggatgtggcagaaaagccactcgaaagagagtctatttaagtgattctgataacaattcattggagactggtgaaattctaaaagccagagctggaaataaccgaaaagtcttaaggaagtgtgctgctgtggctgccaataaaataaagctaatgagtgatgtagaagagaattctagctctgaaagtgtctgttctggtcggaagctgcctcaccgcaatgcttctgctgtagctagaaaaaagttattacataattctgaagatgaacagagcttaaagtcagaaattgaagaagaggagctaaaagatgaaaatcaactattaccagtgtccagttctcacactgcccagagcaatgttgatgaatctgaaaacagagactcagagtcagaaagtgatttgcgggtagcccggaaaaattggcatgctaatggttacaagtcccatactccagcaccttcaaagacaaaatttcttaaaatagagtcttctgaggaagactctaaaagtcatgattcagatcatgcatgtaacagaactgctggcccatcaacgtctgtgcagaaacttaaggcagagagcatctcagaggaagcagattctgaaccaggaagatctggtggtaggaaatacaatacatttcacaagaatgcgagtttctttaaaaaaaccaagattctgagtgactcagaagactctgaatctgaagagcaagatagagaagatgggaaatgtcataaaatggaaatgaacccaatttcaggaaatctgaactgtgaccctattgctatgtcccagtgttcctcagatcatggatgtgaaactgatttagattcagatgatgacaaaatagaaaaaccaaacaattttatgaaagattctgcatcacaagacaatggactaagcagaaaaatttccaggaaaagggtctgttccagtgactcagacagtagtttacaggtggttaagaaatcatcaaaagccagaacaggtctcctgaggattactcgaagatgtgcagctacggctgccaataagatcaagctcatgagtgatgtagaagatgtcagtttagaaaatgtgcacactagaagcaaaaatggaaggaaaaaacctctccatcttgcttgtactacagctaagaagaaattgagtgattgtgaaggaagtgtacattgtgaagtaccaagtgaacagtatgcctgtgaaggcaagccacctgatcctgactccgaaggtagtacaaaagtgcttagtcaggctctaaatggagactcagactctgaagatatgttgaattcagaacacaagcacaggcataccaatattcacaaaatagatgcaccttctaaaagaaaaagttcctctgttacatcttcaggagaagattcaaaaagtcatattccagggagtgagactgataggacattttcttcagagtcaaccttggcacaaaaagctactgcagagaataattttgaagtggaactgaattatgggctgcgcaggtggaatggcagaagactcaggacctatggaaaggctccttttagtaagacaaaagtgattcatgattcacaggaaacagcagagaaggaagtaaaaaggaagagatcgcatcctgaattggaaaatgtgaaaatctctgaaacaactgggaattcaaagtttagacctgatactagttccaaatcatcagatttgggatctgtaactgaatcagatattgactgtactgataatacaaaaaccaaaaggaggaaaacgaaaggaaaagcaaaagtagttagaaaagaatttgttcctagagacagagaacccaatacaaaagtgagaacatgtatgcataatcagaaggatgcagtgcagatgcctagtgaaactctgaaagcaaaaatggtacctgagaaagttccccgcagatgtgctactgttgctgcaaataaaataaagataatgagtaatctaaaagaaacgatctcaggaccagaaaatgtctggattaggaagagtagcagaaaactgccccatcgaaatgcttctgctgcggctaagaaaaaattactgaatgtttataaagaggatgatacaaccataaattctgaaagtgaaaaagagctagaagatattaatagaaaaatgctttttttaagggggttcagatcctggaaagaaaatgcacaatagtgactatgagaatgtagaagtggcatctgaaaacaattggtacacaagtaaactggcagttacattctgctcccagctctaaaattactcccttattggcatctttggaggaattttctaaaagccataatccagtgggttcctcccagtcagctcttgtacagacatgtgctctggggaattctgaggaggaaataaattgcagagtctgtaggtggagaggtggaaagaaaagacaaatggcctgctataagactactattcctttccagaatgcaaggccttgaagacatgattccttagaggaagaatataatgggaagtgtacaggctaggaagaacttgaagtgaacaaatttcaaaatcttaacctgatgctaattttcagggttctccattacagtgtaaaaattcagaccacgacaactatggtgtcatgaggaaaaaaaatcaggcatttttccaaaggaagtgctaatgggcctatttgacttctgagtgaagcaaaaactacccagatccattccctacaattcacatccccaaaggtcaaaaacaaactaggaggacctgggaatttcagctggagatactgattattgagttctgaagtagagtgttggaaataggcaattagagaaagtccattgatgtcattttgtttataatattgcagttcatactgaatgaccacttgatatgactaattcagggaatatatatttttctatgaaagctatgaatgttactatcacggcttttccttatttttacttgtatgtagcagcatttacagaaatgccaaaaatgtgcctcattaagaggcaggtcttaatcagttagataaaaataaaatgtatagcttaagatcaaaacagtcatatttttagatacagtgaaatcttttatgtttctctacagcaccttaaaaattagaacttgaatactttgagtaaacttactacaatctcatcccaacaaactttaatggtagcatgtttggcctatttcattgtggcctgtactaggattagaaaatttggtcgtggtataacaaagaagtgtatttacaataggatttaatttgttgttaatatgtatttgttgaaattaaaattgccagattaaatgaatatactgtcgcatctttttaacatagtaacgtgttactggaaaaattaagttgttgaaagtaagttgttttcccatttaaaaatatctgaatatatgatttgcatgtgtaaatctgaaaaactaaactacagaaacctagggttttctatttcttttttaagtcaaatgcatttttttttttttgttatacagatgaaccaagtgtctaaaatacttgagaaatttgtggttgcatgtctgttttaaaaaaaaggctttttgttttttagcataagccagaatattctaacctactaagtctgtgtcctttgctccttttgtagtatactttcatctaaattactgatccccaatatgttgatacacaggtgagaaagggaagaattcctaataaactgctattacttttaggtgcatggggtttgatttttgagctctaatgaaatgcttaaacttctttccagttcaaattttacacttaatttataatatttattgagtatattatgtcctcaacaagtaactataaaatgaaatacttaactcggtgaagactattttatgcaaagtttttttttttttttttttttttttttagcaatttcagtgtaatgaaagaatttaagctttgaatttataatttgctgtggtggggttaatttctgtcagtatttgagattgtattatcagtcttgcataatgaaatccttttttggctaagtatttaattcgaacatatttgcctttttaaaaagtgcttggcctaaacttattgtaactgcatgaaataagcatttgcttaaaacttaacattgtaaaattgttctctctgaaatgtgtgcagaatttaaatcatggccaaatgtattactattaccctatttacagtaatttgctttgcagaaaatatttcttcatcatggaactgtgaaatcaaattgaagatcttactggtaaaaatgacaaattaacaaaaggactaagacaagtggtgcccaaacaacctttttattctgcagttccatcatcataatagaccagttaacccaggagtcctaatgttttaaaacatcattgtggtgatcttgtttattctatctcactaaggatatccagtttcctaagctcttactggctagcaatttcgtcttaattttattgctaaatgttcaaattttgcttccaaactcactttatttttgcagatgtgtacatctgctaagtactaattttatgtaaatgattttgttgattatctttccacatcttaaaatgtttctaacagctttgagattttatctcaacaggctctctctgaccccaaagtagtacttaccttcgtgactactgacaaagtcacaaaatgcaggcgatgtcatgtatttcggtacaactaaatctaggaaacggttttttcattgcattactgcatattttcattttcatttaaattatgtcccctttttctcttgcttgaaacagtgctcctcgaactttgtcttccagcacattttaaagagaaccaattaaagaacaatcacacattctgcttattaaaggctatttaaaaagaaacattttgtattagaaaatggccaactttaaaacactattttttacactcataaaaatgttttttaaatcgccttgacaatcatcagcttttgaaatgtgaattcctattgccagagtaaaggtctcgtttttataccacca

SEQ ID NO: 112218 - DNA, 2495 bp, Homo sapiens
  Payload ID: 1978
  Gene Symbol: BRWD1
  Gene Name: bromodomain and WD repeat domain containing 1
  Uniprot ID: Q9NSI6
  ENST ID: ENST00000341322
  CDS Start-End: 152-514
gcgtcggtccaggcggcgcgcacggtatggcggcggcggcggcggcggcggcgcgcgcctgagaagaggggacgccagcccggtcaggcctcggcgcggcctacacgctccgctcgctcgctcgctcccgcctcccgccccgcgcccggccatggcggagccgtcgtccgcccgacgcccggtgcctctcatcgagtcggagctgtacttccttatcgcccggtacctatcggcgggcccgtgtcggagagcggcccaggtgctggtgcaggagctggagcagtaccagttgttgccgaagagattggactgggagggcaacgagcacaacaggagctacgaggagttggtcttgtccaataagcatgtggctcctgatcatcttttgcaaatctgccagcgcatcggtcctatgttggataaagaaattccacccagtatttcaagagtcacttctttacttggtgcaggaaggcagtctttgctacgtacagcaaaaggtaccttaatttgaagaagtgttctgctttgtattaatagcctaataattattataattgtgaagtaatgtaagcattgtggaagaaaggtgataatgtaactataaatcatgctgtggactataaaattctctgcatttagcatagaacattgaattttattacataagtgtttaatgggtccttctgcattaaaaagttgataaagatatagatgttaagctaaaaagcttgaatttattctgagatgttgtttgaggttttatcaatgtgagttcttaattttccattttgtagctcactcataacttcattgaatgtaattgtatgtgtctaataaactctttaaatgctagaggtatttcatttgatatttagcttctgaaagccctttgttataaagggaagtgattttctaaatttggtagcagcttgaaaacaagcaccacaaatgtaaaactgcatggttctttttttactaatttaatttttttgccaagttatgtgctagcaaaatgtttgaaattgctattctttttctgttagcttggtatatatgacttagactaagtatatgtatgtgatataatatatgtgtacatgtggctaaactgctaatgggcaaagattgttggttcttctgatgctgagtatacatcaagttcatcccatgattattttttattacgagctattgctgatgtgatgctactcttagctgcaccaccagtataaagcttaactgagaaagaacacccctccctcttagttccgtgccagactggtttgttagctttagttgtttcttagtgctctagccatgtcaccctgtggcactaatcaggacactgtttatattcttcctcttctgtgtccctattcactttgtaattattctattttagctggttatatggtagttaattggtagcctgttttcctttgttttctttacttgtgtcaagctccatgtcgttgttttgtgatgagcagtgatttagaactggccagaccttagaagagtcttcagcaagctgccctagggtaggggcgtattctctgtttgttttgtactggtaccccaggaggatgccttgtaactgctctttggtcatgatagtggtaatgaatccattcatgtaaaatgcaatatgtctgttagtttggggcacccgaggctcagtagaggtttagtatgatgccttccctttcttctttgagttatgaagaaactaatttctggcacagtgtgactgcttcaaacctatgttctgctgctatctcctatagaggagggcagacttttttttcttagtgcatttgctggtaggtcaaggagggatggactttgaattagtgttcagagtcacagatcctacgtatgtgctcttcagtagaggattttctgtgatcctacaatgaagggaaagctatataatttattggtacttcctaaagatagagactaaagtcatggtagtattggccaaattaattttaaaactgaacaagtcatgaattttcatataaatcaaagaactttttccttataaaagcttccatttttgaaaagttggatcagttgtaagacctttcatctttagtattgtatgatataattctacattgaaaaataaacacttggcattaaatgggacttggagtcaaaagatctggttttatggtccatcttttaccaatcatttgctgtggatctctttaaaggtcctggaacctttgagcctcagttacctcacttgtaaattggcaaaaatacctacctcacagggttgttgtgaggattcaatgagctaatgtatgttgaaagcactttgtgaattgtaaagtgctacacaaatgttagttgttgttgctgctgtatctgagatgtcttaattttctttttcttcagaaatagtctaataaacctccagggcttttctgttaaagtatactagttggtaaaatgttgaataaacagtttattacaatata

SEQ ID NO: 112219 - DNA, 12929 bp, Homo sapiens
  Payload ID: 1978
  Gene Symbol: BRWD1
  Gene Name: bromodomain and WD repeat domain containing 1
  Uniprot ID: Q9NSI6
  ENST ID: ENST00000342449
  CDS Start-End: 80-6889
cgccagcccggtcaggcctcggcgcggcctacacgctccgctcgctcgctcgctcccgcctcccgccccgcgcccggccatggcggagccgtcgtccgcccgacgcccggtgcctctcatcgagtcggagctgtacttccttatcgcccggtacctatcggcgggcccgtgtcggagagcggcccaggtgctggtgcaggagctggagcagtaccagttgttgccgaagagattggactgggagggcaacgagcacaacaggagctacgaggagttggtcttgtccaataagcatgtggctcctgatcatcttttgcaaatctgccagcgcatcggtcctatgttggataaagaaattccacccagtatttcaagagtcacttctttacttggtgcaggaaggcagtctttgctacgtacagcaaaagactgcaggcacacagtttggaagggctctgcctttgctgctcttcatagaggaagacctcctgaaatgccagtgaattatggttccccaccaaatcttgtggagatacatcgaggaaaacaactcacagggtgttccacttttagtacagcatttccaggaactatgtatcagcatataaaaatgcacagaaggattctcggacatctatctgctgtttactgtgtagcatttgataggacaggacatagaatctttacaggttcagatgactgtttggtaaagatttggtcaacacataatggccgcttgttatctacattaagaggtcattctgcagaaatttcagatatggcagtaaactatgagaatacaatgattgctgcggggagctgtgataaaattattagagtgtggtgcttgagaacttgtgccccagttgctgtgctccaaggacacacaggatcaattacatctttacagtttagcccgatggccaaaggctctcaaagatacatggtttccactggtgctgatgggacagtttgcttttggcaatgggatttagaatccttaaaatttagcccacgtcccctgaagttcactgaaaagcctaggccaggcgttcaaatgctttgttcttcttttagtgttggtggtatgtttttagccacaggtagtactgatcatgtaatcagaatgtattttttgggttttgaagcacccgaaaaaatcgcagaacttgaaagccacactgataaagtagatagtatccaattttgtaacaatggtgatcggttcctaagtggtagcagagatggaacagcacggatttggagatttgagcagttagaatggaggagcattttattggatatggctaccagaatctcaggggacttatcttccgaagaggaaaggtttatgaaacctaaagtaacaatgatagcttggaatcaaaatgatagcattgttgtcacagctgtgaatgatcatgtcctcaaagtgtggaattcttacactggacaactgcttcataacttaatgggacatgctgatgaagtatttgttctggagacacatccctttgattccagaattatgttatctgcaggacatgatggcagcatatttatatgggatattacaaaaggtaccaagatgaaacattattttaatatgattgaaggacaaggacatggagctgtgtttgactgtaagttttcacaggatggacagcattttgcctgtacagattctcatgggcaccttctgatatttggttttggatgcagcaaaccatatgaaaagattcctgatcagatgttcttccatactgactatcgaccacttattagagattctaataattatgtcttagatgagcaaactcagcaggctcctcatcttatgcctccaccattcttggtagatgtagatggaaatcctcatccaaccaagtatcagagattagtaccaggccgagaaaattctgcagatgaacatttgattccacagctgggctatgtggcaacaagtgatggagaggtgattgaacaaattataagcctgcaaaccaatgataatgatgaacgcagcccagaatcgagtattcttgatggaatgataagacagttgcagcagcagcaagatcagagaatgggagcagatcaggatactattccaagaggactttcaaatggtgaagaaacaccccggagaggttttagaaggctgagcttagacattcagtcccctccaaatattggtctgcgtcgtagtggacaagttgaaggtgttcgtcagatgcatcaaaacgctccacgcagtcagattgctacagaacgtgacctgcaggcttggaaacgaagagtggttgtaccagaggtaccactaggcatatttaggaagctggaagacttccgattagagaaaggtgaagaggaaagaaatctttatataataggaagaaaaagaaagactcttcagctctcacataagtcggattcagtggttttggtatcacagtctagacaaaggacatgtaggcgtaaatatccaaattatggtagaagaaatcgtagctggcgtgagttatcttctggaaatgagtcttcaagctctgtaagacatgagacttcctgtgatcagagtgaaggttctggttcttcagaagaggatgaatggagaagtgacagaaaaagtgagagttacagcgaaagttcaagtgactcttcatctagatattccgattggacagctgatgcgggcatcaatttgcagcctcctttaagaacatcatgtcgtcgacgaattactcgattttgtagtagttcagaagatgaaatatctactgagaatttatctcctccaaaaagaagacgaaagagaaagaaagaaaataagcctaagaaggagaatttgcggaggatgactccagcagagcttgcaaatatggagcatttatatgaatttcaccctccagtttggattactgacaccacacttagaaaatctccttttgttcctcaaatgggtgatgaggtaatatattttcgacagggtcatgaagcttatattgaggctgtaagaagaaataatatttatgaactgaaccctaataaggagccatggagaaaaatggatcttagggatcaagaattggttaaaatagttggaatacgatatgaagttgggccccctacactctgttgcctaaaactagcatttatagatccagcaactggaaaacttatggacaaatctttctctattagatatcatgatatgccagatgttattgactttcttgtattgcgtcaattttatgatgaagcaagacagaggaattggcagtcttgtgacagattccgctctattattgatgatgcttggtggtttggaacagtgttaagtcaagagccatatcaaccacagtatcctgatagtcatttccagtgttatattgttaggtgggataatactgaaattgaaaaacttagcccatgggacatggaaccaattcctgataatgttgatccacctgaagaattaggagctagtatttctgtcacaacagatgagctagagaaattgctctataaaccacaagctggtgaatggggtcagaaatcaagagatgaagaatgtgatagaattatcagtggtatagatcaacttttgaatcttgatatagcagcagcttttgcaggccctgttgatttgtgtacatacccgaagtactgtactgtagtagcttatccaaccgatctttacacaattcgaatgagacttgttaatcgattttacaggaggctgtctgcgttagtttgggaagtcagatatatagaacataatgccagaacatttaacgaacctgagagtgtaattgcaagatcagctaaaaagataactgaccaacttttaaaatttatcaagaatcaacactgtacaaatatctcagaactttctaacacatctgaaaatgatgagcaaaatgctgaggatttggatgatagtgatcttcctaaaacatcttctggaaggaggagagtccatgatgggaaaaaaagcatcagagctacgaactatgttgaaagcaactggaagaaacagtgtaaggaactagtgaacttaatttttcagtgtgaagattctgaaccatttagacaacctgttgatttggttgaatatccagactacagagatattatagataccccaatggattttggaacagtaagggaaactctagatgcgggaaattatgacagccctttggagttttgcaaagacatccggctgatatttagcaatgcaaaagcgtatacaccaaacaaaagatcaaagatttatagtatgaccttgagattatctgccttatttgaagaaaaaatgaagaaaatctcttctgattttaaaattggtcaaaaattcaatgaaaaacttcgaagaagccagaggttcaagcaacggcaaaattgtaaaggtgacagtcagcctaacaaaagtatcagaaacctcaagccgaagaggttaaaatctcagacaaaaataattcctgagttggtaggttctcctacccagtctacctcaagtaggacagcttatcttggaacccacaagacaagtgctggtatctcttcaggtgttacttctggtgactcttcagattcagcagaatcatcagaaaggaggaaaagaaatagacctataacaaatggttctacattatctgaaagtgaagtggaagattctttagctacctctttgtcatcgtcagcttccagtagttctgaggaaagcaaagagagttccagagctcgtgaatcctcctcacgcagtgggctatccagaagcagcaatctcagggtaaccagaactagagctgctcaaagaaaaactggtcccgtttcattagcaaatggatgtggcagaaaagccactcgaaagagagtctatttaagtgattctgataacaattcattggagactggtgaaattctaaaagccagagctggaaataaccgaaaagtcttaaggaagtgtgctgctgtggctgccaataaaataaagctaatgagtgatgtagaagagaattctagctctgaaagtgtctgttctggtcggaagctgcctcaccgcaatgcttctgctgtagctagaaaaaagttattacataattctgaagatgaacagagcttaaagtcagaaattgaagaagaggagctaaaagatgaaaatcaactattaccagtgtccagttctcacactgcccagagcaatgttgatgaatctgaaaacagagactcagagtcagaaagtgatttgcgggtagcccggaaaaattggcatgctaatggttacaagtcccatactccagcaccttcaaagacaaaatttcttaaaatagagtcttctgaggaagactctaaaagtcatgattcagatcatgcatgtaacagaactgctggcccatcaacgtctgtgcagaaacttaaggcagagagcatctcagaggaagcagattctgaaccaggaagatctggtggtaggaaatacaatacatttcacaagaatgcgagtttctttaaaaaaaccaagattctgagtgactcagaagactctgaatctgaagagcaagatagagaagatgggaaatgtcataaaatggaaatgaacccaatttcaggaaatctgaactgtgaccctattgctatgtcccagtgttcctcagatcatggatgtgaaactgatttagattcagatgatgacaaaatagaaaaaccaaacaattttatgaaagattctgcatcacaagacaatggactaagcagaaaaatttccaggaaaagggtctgttccagtgactcagacagtagtttacaggtggttaagaaatcatcaaaagccagaacaggtctcctgaggattactcgaagatgtgcagctacggctgccaataagatcaagctcatgagtgatgtagaagatgtcagtttagaaaatgtgcacactagaagcaaaaatggaaggaaaaaacctctccatcttgcttgtactacagctaagaagaaattgagtgattgtgaaggaagtgtacattgtgaagtaccaagtgaacagtatgcctgtgaaggcaagccacctgatcctgactccgaaggtagtacaaaagtgcttagtcaggctctaaatggagactcagactctgaagatatgttgaattcagaacacaagcacaggcataccaatattcacaaaatagatgcaccttctaaaagaaaaagttcctctgttacatcttcaggagaagattcaaaaagtcatattccagggagtgagactgataggacattttcttcagagtcaaccttggcacaaaaagctactgcagagaataattttgaagtggaactgaattatgggctgcgcaggtggaatggcagaagactcaggacctatggaaaggctccttttagtaagacaaaagtgattcatgattcacaggaaacagcagagaaggaagtaaaaaggaagagatcgcatcctgaattggaaaatgtgaaaatctctgaaacaactgggaattcaaagtttagacctgatactagttccaaatcatcagatttgggatctgtaactgaatcagatattgactgtactgataatacaaaaaccaaaaggaggaaaacgaaaggaaaagcaaaagtagttagaaaaggtaaaacttttacagctaacatatctaaaactgtgagacgtcaaagacaaagcaaacgccctaggttaagtgtggatgataatgactgggaggatttggactatgcaaaatctaaaagagttcttcgacgttcaaaaataaaaacgagaaatcagggtagaaggactgtgagataccatgatggggatgatgacagaagtttagaaaatgtgttagatttcaatggttgcaccttatgaccttgagggaaagccagttcatttaagaggaaatggactggcatttatggtgaaagctggctgttaaaattatttttttgtcttacaattcagggaatatatttatatttttctatgaaaagttatgaatgtgactaaatcatgactgttatttttatttgcacttgctggtctttgtagcagcattcagcacaggtgccaaaatatgcttcattttgggggcagatctattttgacagtatttgactacatatagcaagagtttgaaatatgttaaacactagacatcctggttatcaaaaccaatgagcattactttcatggcagcaagtgtcatgcagttattttctgaatttgtcaaagaggcagtagtttctaacccctgttctatagtagttacaacaatttcacaacctatgtttacagattcttcataaatacatgcatactgacactataatcatgggaggtgtaaccatgattagtaggcgaggtacctaccacttttttttttttcttcccctggctacttgagtagaatgcattataccagatctggtcactttcattgaaatggtttctaattttcttcccaagtgctgttgggtttttttcttcttaaggaaaacgttgtcacttttatgttataaacttgaatttataaagtgctggtaaattatttttaatgatttgagtgcatgttttaaacctctaggaccagagcatagtcagagcattttcttttaaattgtgcactaacaaaatgctatataatctgtcttctgtccaagatctcctggtttccattgtaagggatttaaccaaaatcttgctcttccataatcttactctgtgaaatagaggaattcgtgtgccttagatttagaagtgtgttctttaatagagtgtacagggctaaaagagtatttaagttaatatgtaggtttcccccatctgtattccaattgtagaggtgagttttgttaagagtacaattgcaaatcttatctatataggaaaatagctaaatgtcattctccatctctttgttttagtttactgcttccatgtgcaatcctaagcattctttgctggggcaactaaatgtatctttattagtgacttctagtccaaatataagaaactgtcatgttttgtgggaaaataattttataatccatttaaagtgaaagtttatcacacaaatagtacacttattttctaaccaaatacttgataggttatgctactccagtgtagatggccattcctaacttgtttgtgcctgaagatggacttgattcaaatggtttacatatttagtgggtaagggatatgttacagtaccccacctgtaagttatttattagccctaattgtgtttgatttcagacaaaattaacccttttctcctgtgtatctttgaagtggcagataaggtgaagcatcagactggtatcaatattagacaatgttatttattagccctaattgtgtttggtttcagacaaaaccttttctcctgtgtatctttgaagtggcagacaaggcgaagcatcagactggtattaatgttagagaatgttctgaagtgttcctattttgtagttatctattccatttgacatagtagaaggtacattttctttctactctgatgcatggggaaggatgtttttggacattatcaactgagataggtgggaaacctcctctcatttgtggcttagagagctatcaccatttcagaactatgatgcttttcttctcagaacttgtgttaagtagatagtaaacagattgattcatgataattgtccttgactaagactgaaaagactaatgggatgccttttactttgctaattttaaaaactggtgatagatgtcaaatccattaatttatttaaactcttcttaaccttctcttttataatctgttctcaggttttaactccatgtttaccatcatttgcaaaaaggtaccaaaaaaatccataaataaatatggaatacattcataagtacatacattcttttggtataaaacaatattttgacagtttaggcttcattaatagaactattctgattatttggactgcattaattggtcattgactggccatccaattaccattttttctttcagtccaaaatagttagacccttgcatacagaagtggtattttggtttttaatcagatttggtttcatcagaagcagcaagaatggacctgatgtctttaaaagcatagccgacaatggtagcttctcaagttatgaaataaaactgagagataatggagaaaataatttttatgggtttttttggttatggtgctattcctaaggttaactttgaatatgtgacacacacactcctaagtacctttaaggaaaattaataaatcattaatagttaaaatgtttacattgagcactagaacatgtttggccttttttttctacgttatgcaaaatgcccagggatttaatgcacaggtgtactttaatgtttagggtcagtttgtagtattcttgagaaaaagataaagggttataatttgaatgtgaactgatccagaaataagtgctgtacctttccactgcacttgaagttcaacttaatggtgtatgtgaaaaacaaaaactactttggttgtgtatgtccaaagtcctatggttttattcatttatggttttacaggctttgaagtactcagatttgatttttgctttcttggaaagactcactttaccaagcatataaaggaaaaatgatttcaaacattgacaagatagatgagtgttaacaaagctttcttttttcgtgtcctccttatttaaaaaggtatacttacaatgtgaagtaacttatgaataaaaggaaaagtttatcccatattcaaataattcctaaggtcagcctccctttttgtaagtggcaaatatctgattaaatcatttctcagtttattaatccttggaaacaatgatatagcagttactcacagcttgtaaattacaacagaaaggttcctttcaaatagtagagctgcacctaaagaggaaattgggtttataagaaaatggaggcaaagaacttaagttttaagaaaaagcacttcaaaacagaagggcaaatggaaaaggggaatataaaacaaaccaataaaaataccatctgagggtgttactgtccaaaagtaaagaataagatgcatcactaagccctttgcactcgttatgacctcgtaagtaaaaattatcacttagaataaggggtgcacactacattccctctgtcttctagacttttttttttgtagaagaatcagaaaacaatttactaacctccctgtttgatattaaaaataggaagaattttaatattttctgttagtacaagttgaacttgattgtgccaactgaaaccccagaggtttgtatatcagtagaatgcaagaacattgttaaaggtgcttacgatcttttttgttttcctttccactccattgtatcaattttttgagtaacttttaaatggctagaaaatggtctttttgctttgcccttttaaagctgaaataaccagctccattcttttcatgaatagtaagttgatatatttatttatcaggtatcttgcagttgtcaccaaatactgtagttttcttatgttgtatggaaattatagttcaattattttaatgtgatagagtgcaacaagtcattgtagaacttttcacctgttaatgttgaagttatacctctgaatttctgctgtggatatcaaggaaataataaagcagaaaccccaagaaatttgcaacttaacagtttgagactgtctcttatcctagtatttgggaagagaaggaataaatttgtcaaaactaggtgagaaaatagagcattgtgggaaaaactgagtccaactagattagcaaatgttaattcctagctcaaactgtgaatagtaaggattgaaaagtaaagtatgtaatgctaagggctgtgttgtcttttcttacgattttaagttttaaaggctgttaaattacagagatgttgcccaaggatacatggggattctcaaaagtaagagatttttacctttttcataatctgccaagctggttcctaatatattgttaaattggtagaaaaatatctttaaattggtgtctgctcaagaattgcttttctagatttgatggagggagggggagagtcacatcatttggattctaccaatctgcaggctctatctttggcaacatgtaaataattagactatacatctgtttctcaagtatggcaagaccaatagtttgaatttaattatcaatgctatggtatactttctggtcatattttagttatgtcagttttaaggtaagttttttcatttattaaagcccttaaatgagattttagactgccaaagagaagaggcagtccaattgacctaactgaaatgagatgaccagtatatagagcctagatggactgtagcagctctacccctttgttttacaaggtaaatcattttaaaaattaccttttttgatcagtgggtaaaagttaaagggatctttaatttttgatatattcaagttaattttctaaatgtgaatcagtccttggactgcaactatatattcacctacaaaatcccaatcaaaaaattacatgagcctgtcaagcagatctttagttttccacttcacataagatcgttaatgttctaaattaatctattcatttagatgatttttgtcagttcttaaatgggatataataaatttagcattttcatcttaacaagcaaaagagttaaaaaacaaaacaaaacactactccaagccaaatacattctagctggttaattccagacttgtcccaagtggttccccaacctcttttccactggtaatttcttttcatgcaggcagaatataggggtgcgagcgctgtgagttttacatatgagcttggataggggaactgaagcgagtcaggagccctgctggaaaaggggtttgccattggattgtctgtggcctggtttctttccagtagtacagtaatagggtagattgaaaacaagtatttacttctgattctgcctgcatttagtgtgaaatgctcttaaggtattgcttctaaaaagcaaattaagcagttaagtataaagtccctgaattcatatttcaaaataaggcttttatgagatttttattaaaaattgcaatagccatcacaaatctgagtttttctaggggtgagagaaaactgtattgtgatgagctagattagttgtagttccagaataagaacaaaaattcagagttgtgtggtgcccatcattgagtaaatgaaccctaaaaatgaataagctaatgaactagttcatggaattatttctgatggtcttttgacctgatgctgccatactgcagtgttaccagctccccctagaaaacggaactgtttaaaaacacagcaagttacagaaaccattttattctacagccattggggtacttcagtttatgggatgtttttggaaacttctgctttgggagggatgaagatcattgataaatgttatttgctttctgagttttggggtcatttcattgcttatcaatgaagggcagacagaggagagaatatctcaagtcttttctgataaaaggcttgcttgagggagcttataacttgcacctagagggtttacccactttgtggatttgatttatccaccaaccacagcaaccaataatgtcaagattctaggagtttatgaaagaggctagtatgttttcattttgagtcagacattcttttctcattctcaaatctgttttaaatgctccaattttaaaaatgccaatgaaaattttataatgcttctgtagtaaccatatgcagtttactttgaatttaggaaaacagttttgtatgatgaaatattgtgcagaatctgtaaataaggtagcttaaaaattaaaaaaaagtctaattagaa

SEQ ID NO: 112220 - DNA, 7605 bp, Homo sapiens
  Payload ID: 1978
  Gene Symbol: BRWD1
  Gene Name: bromodomain and WD repeat domain containing 1
  Uniprot ID: Q9NSI6
  ENST ID: ENST00000380800
  CDS Start-End: 100-6699
gcgcgcctgagaagaggggacgccagcccggtcaggcctcggcgcggcctacacgctccgctcgctcgctcgctcccgcctcccgccccgcgcccggccatggcggagccgtcgtccgcccgacgcccggtgcctctcatcgagtcggagctgtacttccttatcgcccggtacctatcggcgggcccgtgtcggagagcggcccaggtgctggtgcaggagctggagcagtaccagttgttgccgaagagattggactgggagggcaacgagcacaacaggagctacgaggagttggtcttgtccaataagcatgtggctcctgatcatcttttgcaaatctgccagcgcatcggtcctatgttggataaagaaattccacccagtatttcaagagtcacttctttacttggtgcaggaaggcagtctttgctacgtacagcaaaagactgcaggcacacagtttggaagggctctgcctttgctgctcttcatagaggaagacctcctgaaatgccagtgaattatggttccccaccaaatcttgtggagatacatcgaggaaaacaactcacagggtgttccacttttagtacagcatttccaggaactatgtatcagcatataaaaatgcacagaaggattctcggacatctatctgctgtttactgtgtagcatttgataggacaggacatagaatctttacaggttcagatgactgtttggtaaagatttggtcaacacataatggccgcttgttatctacattaagaggtcattctgcagaaatttcagatatggcagtaaactatgagaatacaatgattgctgcggggagctgtgataaaattattagagtgtggtgcttgagaacttgtgccccagttgctgtgctccaaggacacacaggatcaattacatctttacagtttagcccgatggccaaaggctctcaaagatacatggtttccactggtgctgatgggacagtttgcttttggcaatgggatttagaatccttaaaatttagcccacgtcccctgaagttcactgaaaagcctaggccaggcgttcaaatgctttgttcttcttttagtgttggtggtatgtttttagccacaggtagtactgatcatgtaatcagaatgtattttttgggttttgaagcacccgaaaaaatcgcagaacttgaaagccacactgataaagtagatagtatccaattttgtaacaatggtgatcggttcctaagtggtagcagagatggaacagcacggatttggagatttgagcagttagaatggaggagcattttattggatatggctaccagaatctcaggggacttatcttccgaagaggaaaggtttatgaaacctaaagtaacaatgatagcttggaatcaaaatgatagcattgttgtcacagctgtgaatgatcatgtcctcaaagtgtggaattcttacactggacaactgcttcataacttaatgggacatgctgatgaagtatttgttctggagacacatccctttgattccagaattatgttatctgcaggacatgatggcagcatatttatatgggatattacaaaaggtaccaagatgaaacattattttaatatgattgaaggacaaggacatggagctgtgtttgactgtaagttttcacaggatggacagcattttgcctgtacagattctcatgggcaccttctgatatttggttttggatgcagcaaaccatatgaaaagattcctgatcagatgttcttccatactgactatcgaccacttattagagattctaataattatgtcttagatgagcaaactcagcaggctcctcatcttatgcctccaccattcttggtagatgtagatggaaatcctcatccaaccaagtatcagagattagtaccaggccgagaaaattctgcagatgaacatttgattccacagctgggctatgtggcaacaagtgatggagaggtgattgaacaaattataagcctgcaaaccaatgataatgatgaacgcagcccagaatcgagtattcttgatggaatgataagacagttgcagcagcagcaagatcagagaatgggagcagatcaggatactattccaagaggactttcaaatggtgaagaaacaccccggagaggttttagaaggctgagcttagacattcagtcccctccaaatattggtctgcgtcgtagtggacaagttgaaggtgttcgtcagatgcatcaaaacgctccacgcagtcagattgctacagaacgtgacctgcaggcttggaaacgaagagtggttgtaccagaggtaccactaggcatatttaggaagctggaagacttccgattagagaaaggtgaagaggaaagaaatctttatataataggaagaaaaagaaagactcttcagctctcacataagtcggattcagtggttttggtatcacagtctagacaaaggacatgtaggcgtaaatatccaaattatggtagaagaaatcgtagctggcgtgagttatcttctggaaatgagtcttcaagctctgtaagacatgagacttcctgtgatcagagtgaaggttctggttcttcagaagaggatgaatggagaagtgacagaaaaagtgagagttacagcgaaagttcaagtgactcttcatctagatattccgattggacagctgatgcgggcatcaatttgcagcctcctttaagaacatcatgtcgtcgacgaattactcgattttgtagtagttcagaagatgaaatatctactgagaatttatctcctccaaaaagaagacgaaagagaaagaaagaaaataagcctaagaaggagaatttgcggaggatgactccagcagagcttgcaaatatggagcatttatatgaatttcaccctccagtttggattactgacaccacacttagaaaatctccttttgttcctcaaatgggtgatgaggtaatatattttcgacagggtcatgaagcttatattgaggctgtaagaagaaataatatttatgaactgaaccctaataaggagccatggagaaaaatggatcttagggatcaagaattggttaaaatagttggaatacgatatgaagttgggccccctacactctgttgcctaaaactagcatttatagatccagcaactggaaaacttatggacaaatctttctctattagatatcatgatatgccagatgttattgactttcttgtattgcgtcaattttatgatgaagcaagacagaggaattggcagtcttgtgacagattccgctctattattgatgatgcttggtggtttggaacagtgttaagtcaagagccatatcaaccacagtatcctgatagtcatttccagtgttatattgttaggtgggataatactgaaattgaaaaacttagcccatgggacatggaaccaattcctgataatgttgatccacctgaagaattaggagctagtatttctgtcacaacagatgagctagagaaattgctctataaaccacaagctggtgaatggggtcagaaatcaagagatgaagaatgtgatagaattatcagtggtatagatcaacttttgaatcttgatatagcagcagcttttgcaggccctgttgatttgtgtacatacccgaagtactgtactgtagtagcttatccaaccgatctttacacaattcgaatgagacttgttaatcgattttacaggaggctgtctgcgttagtttgggaagtcagatatatagaacataatgccagaacatttaacgaacctgagagtgtaattgcaagatcagctaaaaagataactgaccaacttttaaaatttatcaagaatcaacactgtacaaatatctcagaactttctaacacatctgaaaatgatgagcaaaatgctgaggatttggatgatagtgatcttcctaaaacatcttctggaaggaggagagtccatgatgggaaaaaaagcatcagagctacgaactatgttgaaagcaactggaagaaacagtgtaaggaactagtgaacttaatttttcagtgtgaagattctgaaccatttagacaacctgttgatttggttgaatatccagactacagagatattatagataccccaatggattttggaacagtaagggaaactctagatgcgggaaattatgacagccctttggagttttgcaaagacatccggctgatatttagcaatgcaaaagcgtatacaccaaacaaaagatcaaagatttatagtatgaccttgagattatctgccttatttgaagaaaaaatgaagaaaatctcttctgattttaaaattggtcaaaaattcaatgaaaaacttcgaagaagccagaggttcaagcaacggcaaaattgtaaaggtgacagtcagcctaacaaaagtatcagaaacctcaagccgaagaggttaaaatctcagacaaaaataattcctgagttggtaggttctcctacccagtctacctcaagtaggacagcttatcttggaacccacaagacaagtgctggtatctcttcaggtgttacttctggtgactcttcagattcagcagaatcatcagaaaggaggaaaagaaatagacctataacaaatggttctacattatctgaaagtgaagtggaagattctttagctacctctttgtcatcgtcagcttccagtagttctgaggaaagcaaagagagttccagagctcgtgaatcctcctcacgcagtgggctatccagaagcagcaatctcagggtaaccagaactagagctgctcaaagaaaaactggtcccgtttcattagcaaatggatgtggcagaaaagccactcgaaagagagtctatttaagtgattctgataacaattcattggagactggtgaaattctaaaagccagagctggaaataaccgaaaagtcttaaggaagtgtgctgctgtggctgccaataaaataaagctaatgagtgatgtagaagagaattctagctctgaaagtgtctgttctggtcggaagctgcctcaccgcaatgcttctgctgtagctagaaaaaagttattacataattctgaagatgaacagagcttaaagtcagaaattgaagaagaggagctaaaagatgaaaatcaactattaccagtgtccagttctcacactgcccagagcaatgttgatgaatctgaaaacagagactcagagtcagaaagtgatttgcgggtagcccggaaaaattggcatgctaatggttacaagtcccatactccagcaccttcaaagacaaaatttcttaaaatagagtcttctgaggaagactctaaaagtcatgattcagatcatgcatgtaacagaactgctggcccatcaacgtctgtgcagaaacttaaggcagagagcatctcagaggaagcagattctgaaccaggaagatctggtggtaggaaatacaatacatttcacaagaatgcgagtttctttaaaaaaaccaagattctgagtgactcagaagactctgaatctgaagagcaagatagagaagatgggaaatgtcataaaatggaaatgaacccaatttcaggaaatctgaactgtgaccctattgctatgtcccagtgttcctcagatcatggatgtgaaactgatttagattcagatgatgacaaaatagaaaaaccaaacaattttatgaaagattctgcatcacaagacaatggactaagcagaaaaatttccaggaaaagggtctgttccagtgactcagacagtagtttacaggtggttaagaaatcatcaaaagccagaacaggtctcctgaggattactcgaagatgtgcagctacggctgccaataagatcaagctcatgagtgatgtagaagatgtcagtttagaaaatgtgcacactagaagcaaaaatggaaggaaaaaacctctccatcttgcttgtactacagctaagaagaaattgagtgattgtgaaggaagtgtacattgtgaagtaccaagtgaacagtatgcctgtgaaggcaagccacctgatcctgactccgaaggtagtacaaaagtgcttagtcaggctctaaatggagactcagactctgaagatatgttgaattcagaacacaagcacaggcataccaatattcacaaaatagatgcaccttctaaaagaaaaagttcctctgttacatcttcaggagaagattcaaaaagtcatattccagggagtgagactgataggacattttcttcagagtcaaccttggcacaaaaagctactgcagagaataattttgaagtggaactgaattatgggctgcgcaggtggaatggcagaagactcaggacctatggaaaggctccttttagtaagacaaaagtgattcatgattcacaggaaacagcagagaaggaagtaaaaaggaagagatcgcatcctgaattggaaaatgtgaaaatctctgaaacaactgggaattcaaagtttagacctgatactagttccaaatcatcagatttgggatctgtaactgaatcagatattgactgtactgataatacaaaaaccaaaaggaggaaaacgaaaggaaaagcaaaagtagttagaaaagacaaaaccttttctcctgtgtatctttgaagtggcagacaaggcgaagcatcagactggtattaatgttagagaatgttctgaagtgttcctattttgtagttatctattccatttgacatagtagaaggtacattttctttctactctgatgcatggggaaggatgtttttggacattatcaactgagataggtgggaaacctcctctcatttgtggcttagagagctatcaccatttcagaactatgatgcttttcttctcagaacttgtgttaagtagatagtaaacagattgattcatgataattgtccttgactaagactgaaaagactaatgggatgccttttactttgctaattttaaaaactggtgatagatgtcaaatccattaatttatttaaactcttcttaaccttctcttttataatctgttctcaggttttaactccatgtttaccatcatttgcaaaaaggtaccaaaaaaatccataaataaatatggaatacattcataagtacatacattcttttggtataaaacaatattttgacagtttaggcttcattaatagaactattctgattatttggactgcattaattggtcattgactggccatccaattaccattttttctttcagtccaaaatagttagacccttgcatacagaagtggtattttggtttttaatcagatttggtttcatcagaagcagcaagaatggacctgatgtctttaaaagcatagccgacaatggtagcttctcaagttatgaaataaaactgagagataatggagaaaataatttttatgggtttttttggttatggtgctattcctaaggttaactttgaatatgtgacacacacactcctaagtacctttaaggaaaattaataaatcattaatagttaaaatgtttacattgagc

SEQ ID NO: 112221 - DNA, 1644 bp, Homo sapiens
  Payload ID: 1978
  Gene Symbol: BRWD1
  Gene Name: bromodomain and WD repeat domain containing 1
  ENST ID: ENST00000455867
  CDS Start-End: 1-1644
ggtttccactggtgctgatgggacagtttgcttttggcaatgggatttagaatccttaaaatttagcccacgtcccctgaagttcactgaaaagcctaggccaggcgttcaaatgctttgttcttcttttagtgttggtggtatgtttttagccacaggtagtactgatcatgtaatcagaatgtattttttgggttttgaagcacccgaaaaaatcgcagaacttgaaagccacactgataaagtagatagtatccaattttgtaacaatggtgatcggttcctaagtggtagcagagatggaacagcacggatttggagatttgagcagttagaatggaggagcattttattggatatggctaccagaatctcaggggacttatcttccgaagaggaaaggtttatgaaacctaaagtaacaatgatagcttggaatcaaaatgatagcattgttgtcacagctgtgaatgatcatgtcctcaaagtgtggaattcttacactggacaactgcttcataacttaatgggacatgctgatgaagtatttgttctggagacacatccctttgattccagaattatgttatctgcaggacatgatggcagcatatttatatgggatattacaaaaggtaccaagatgaaacattattttaatatgattgaaggacaaggacatggagctgtgtttgactgtaagttttcacaggatggacagcattttgcctgtacagattctcatgggcaccttctgatatttggttttggatgcagcaaaccatatgaaaagattcctgatcagatgttcttccatactgactatcgaccacttattagagattctaataattatgtcttagatgagcaaactcagcaggctcctcatcttatgcctccaccattcttggtagatgtagatggaaatcctcatccaaccaagtatcagagattagtaccaggccgagaaaattctgcagatgaacatttgattccacagctgggctatgtggcaacaagtgatggagaggtgattgaacaaattataagcctgcaaaccaatgataatgatgaacgcagcccagaatcgagtattcttgatggaatgataagacagttgcagcagcagcaagatcagagaatgggagcagatcaggatactattccaagaggactttcaaatggtgaagaaacaccccggagaggttttagaaggctgagcttagacattcagtcccctccaaatattggtctgcgtcgtagtggacaagttgaaggtgttcgtcagatgcatcaaaacgctccacgcagtcagattgctacagaacgtgacctgcaggcttggaaacgaagagtggttgtaccagaggtaccactaggcatatttaggaagctggaagacttccgattagagaaaggtgaagaggaaagaaatctttatataataggaagaaaaagaaagactcttcagctctcacataaggagacttcctgtgatcagagtgaaggttctggttcttcagaagaggatgaatggagaagtgacagaaaaagtgagagttacagcgaaagttcaagtgactcttcatctagatattccgattggacagctgatgcgggcatcaatttgcagcctcctttaag

SEQ ID NO: 112222 - DNA, 1682 bp, Homo sapiens
  Payload ID: 1978
  Gene Symbol: BRWD1
  Gene Name: bromodomain and WD repeat domain containing 1
  ENST ID: ENST00000445245
  CDS Start-End: 1-706
ggtttccactggtgctgatgggacagtttgcttttggcaatgggatttagaatccttaaaatttagcccacgtcccctgaagttcactgaaaagcctaggccaggcgttcaaatgctttgttcttcttttagtgttggtggtatgtttttagccacaggtagtactgatcatgtaatcagaatgtattttttgggttttgaagcacccgaaaaaatcgcagaacttgaaagccacactgataaagtagatagtatccaattttgtaacaatggtgatcggttcctaagtggtagcagagatggaacagcacggatttggagatttgagcagttagaatggaggagcattttattggatatggctaccagaatctcaggggacttatcttccgaagaggaaaggtttatgaaacctaaagtaacaatgatagcttggaatcaaaatgatagcattgttgtcacagctgtgaatgatcatgtcctcaaagtgtggaattcttacactggacaactgcttcataacttaatgggacatgctgatgaagtatttgttctggagacacatccctttgattccagaattatgttatctgcaggacatgatggcagcatatttatatgggatattacaaaaggtaccaagatgaaacattattttaatatgattgaaggacaaggacatggagctgtgtttgactattcctgatcagatgttcttccatactgactatcgaccacttattagagattctaataattatgtcttagatgagcaaactcagcaggctcctcatcttatgcctccaccattcttggtagatgtagatggaaatcctcatccaaccaagtatcagagattagtaccaggccgagaaaattctgcagatgaacatttgattccacagctgggctatgtggcaacaagtgatggagaggtgattgaacaaattataagcctgcaaaccaatgataatgatgaacgcagcccagaatcgagtattcttgatggaatgataagacagttgcagcagcagcaagatcagagaatgggagcagatcaggatactattccaagaggactttcaaatggtgaagaaacaccccggagaggttttagaaggctgagcttagacattcagtcccctccaaatattggtctgcgtcgtagtggacaagttgaaggtgttcgtcagatgcatcaaaacgctccacgcagtcagattgctacagaacgtgacctgcaggcttggaaacgaagagtggttgtaccagaggtaccactaggcatatttaggaagctggaagacttccgattagagaaaggtgaagaggaaagaaatctttatataataggaagaaaaagaaagactcttcagctctcacataagtcggattcagtggttttggtatcacagtctagacaaaggacatgtaggcgtaaatatccaaattatggtagaagaaatcgtagctggcgtgagttatcttctggaaatgagtcttcaagctctgtaagacatgagacttcctgtgatcagagtgaaggttctggttcttcagaagaggatgaatggagaagtgacagaaaaagtgagagttacagcgaaagttcaagtgactcttcatctagatattccgattggacagctgatgcgggcatcaatttgcagcctcctttaaga

SEQ ID NO: 112223 - DNA, 4990 bp, Homo sapiens
  Payload ID: 1978
  Gene Symbol: BRWD1
  Gene Name: bromodomain and WD repeat domain containing 1
  ENST ID: ENST00000446924
  CDS Start-End: 1-1923
catgggcaccttctgatatttggttttggatgcagcaaaccatatgaaaagattcctgatcagatgttcttccatactgactatcgaccacttattagagattctaataattatgtcttagatgagcaaactcagcaggctcctcatcttatgcctccaccattcttggtagatgtagatggaaatcctcatccaaccaagtatcagagattagtaccaggccgagaaaattctgcagatgaacatttgattccacagctgggctatgtggcaacaagtgatggagaggtgattgaacaaattataagcctgcaaaccaatgataatgatgaacgcagcccagaatcgagtattcttgatggaatgataagacagttgcagcagcagcaagatcagagaatgggagcagatcaggatactattccaagaggactttcaaatggtgaagaaacaccccggagaggttttagaaggctgagcttagacattcagtcccctccaaatattggtctgcgtcgtagtggacaagttgaaggtgttcgtcagatgcatcaaaacgctccacgcagtcagattgctacagaacgtgacctgcaggcttggaaacgaagagtggttgtaccagaggtaccactaggcatatttaggaagctggaagacttccgattagagaaaggtgaagaggaaagaaatctttatataataggaagaaaaagaaagactcttcagctctcacataagtcggattcagtggttttggtatcacagtctagacaaaggacatgtaggcgtaaatatccaaattatggtagaagaaatcgtagctggcgtgagttatcttctggaaatgagtcttcaagctctgtaagacatgagacttcctgtgatcagagtgaaggttctggttcttcagaagaggatgaatggagaagtgacagaaaaagtgagagttacagcgaaagttcaagtgactcttcatctagatattccgattggacagctgatgcgggcatcaatttgcagcctcctttaagaacatcatgtcgtcgacgaattactcgattttgtagtagttcagaagatgaaatatctactgagaatttatctcctccaaaaagaagacgaaagagaaagaaagaaaataagcctaagaaggagaatttgcggaggatgactccagcagagcttgcaaatatggagcatttatatgaatttcaccctccagtttggattactgacaccacacttagaaaatctccttttgttcctcaaatgggtgatgaggtaatatattttcgacagggtcatgaagcttatattgaggctgtaagaagaaataatatttatgaactgaaccctaataaggagccatggagaaaaatggatcttagggatcaagaattggttaaaatagttggaatacgatatgaagttgggccccctacactctgttgcctaaaactagcatttatagatccagcaactggaaaacttatggacaaatctttctctattagatatcatgatatgccagatgttattgactttcttgtattgcgtcaattttatgatgaagcaagacagaggaattggcagtcttgtgacagattccgctctattattgatgatgcttggtggtttggaacagtgttaagtcaagagccatatcaaccacagtatcctgatagtcatttccagtgttatattgttaggtgggataatactgaaattgaaaaacttagcccatgggacatggaaccaattcctgataatgttgatccacctgaagaattaggagctagtatttctgtcacaacagatgagctagagaaattgctctataaaccacaagctggtgaatggggtcagaaatcaagagatgaagaatgtgatagaattatcagtggaggctgtctgcgttagtttgggaagtcagatatatagaacataatgccagaacatttaacgaacctgagagtgtaattgcaagatcagctaaaaagataactgaccaacttttaaaatttatcaagaatcaacactgtacaaatatctcagaactttctaacacatctgaaaatgatgagcaaaatgctgaggatttggatgatagtgatcttcctaaaacatcttctggaaggaggagagtccatgatgggaaaaaaagcatcagagctacgaactatgttgaaagcaactggaagaaacagtgtaaggaactagtgaacttaatttttcagtgtgaagattctgaaccatttagacaacctgttgatttggttgaatatccagactacagagatattatagataccccaatggattttggaacagtaagggaaactctagatgcgggaaattatgacagccctttggagttttgcaaagacatccggctgatatttagcaatgcaaaagcgtatacaccaaacaaaagatcaaagatttatagtatgaccttgagattatctgccttatttgaagaaaaaatgaagaaaatctcttctgattttaaaattggtcaaaaattcaatgaaaaacttcgaagaagccagaggttcaagcaacggcaaaattgtaaaggtgacagtcagcctaacaaaagtatcagaaacctcaagccgaagaggttaaaatctcagacaaaaataattcctgagttggtaggttctcctacccagtctacctcaagtaggacagcttatcttggaacccacaagacaagtgctggtatctcttcaggtgttacttctggtgactcttcagattcagcagaatcatcagaaaggaggaaaagaaatagacctataacaaatggttctacattatctgaaagtgaagtggaagattctttagctacctctttgtcatcgtcagcttccagtagttctgaggaaagcaaagagagttccagagctcgtgaatcctcctcacgcagtgggctatccagaagcagcaatctcagggtaaccagaactagagctgctcaaagaaaaactggtcccgtttcattagcaaatggatgtggcagaaaagccactcgaaagagagtctatttaagtgattctgataacaattcattggagactggtgaaattctaaaagccagagctggaaataaccgaaaagtcttaaggaagtgtgctgctgtggctgccaataaaataaagctaatgagtgatgtagaagagaattctagctctgaaagtgtctgttctggtcggaagctgcctcaccgcaatgcttctgctgtagctagaaaaaagttattacataattctgaagatgaacagagcttaaagtcagaaattgaagaagaggagctaaaagatgaaaatcaactattaccagtgtccagttctcacactgcccagagcaatgttgatgaatctgaaaacagagactcagagtcagaaagtgatttgcgggtagcccggaaaaattggcatgctaatggttacaagtcccatactccagcaccttcaaagacaaaatttcttaaaatagagtcttctgaggaagactctaaaagtcatgattcagatcatgcatgtaacagaactgctggcccatcaacgtctgtgcagaaacttaaggcagagagcatctcagaggaagcagattctgaaccaggaagatctggtggtaggaaatacaatacatttcacaagaatgcgagtttctttaaaaaaaccaagattctgagtgactcagaagactctgaatctgaagagcaagatagagaagatgggaaatgtcataaaatggaaatgaacccaatttcaggaaatctgaactgtgaccctattgctatgtcccagtgttcctcagatcatggatgtgaaactgatttagattcagatgatgacaaaatagaaaaaccaaacaattttatgaaagattctgcatcacaagacaatggactaagcagaaaaatttccaggaaaagggtctgttccagtgactcagacagtagtttacaggtggttaagaaatcatcaaaagccagaacaggtctcctgaggattactcgaagatgtgcagctacggctgccaataagatcaagctcatgagtgatgtagaagatgtcagtttagaaaatgtgcacactagaagcaaaaatggaaggaaaaaacctctccatcttgcttgtactacagctaagaagaaattgagtgattgtgaaggaagtgtacattgtgaagtaccaagtgaacagtatgcctgtgaaggcaagccacctgatcctgactccgaaggtagtacaaaagtgcttagtcaggctctaaatggagactcagactctgaagatatgttgaattcagaacacaagcacaggcataccaatattcacaaaatagatgcaccttctaaaagaaaaagttcctctgttacatcttcaggagaagattcaaaaagtcatattccagggagtgagactgataggacattttcttcagagtcaaccttggcacaaaaagctactgcagagaataattttgaagtggaactgaattatgggctgcgcaggtggaatggcagaagactcaggacctatggaaaggctccttttagtaagacaaaagtgattcatgattcacaggaaacagcagagaaggaagtaaaaaggaagagatcgcatcctgaattggaaaatgtgaaaatctctgaaacaactgggaattcaaagtttagacctgatactagttccaaatcatcagatttgggatctgtaactgaatcagatattgactgtactgataatacaaaaaccaaaaggaggaaaacgaaaggaaaagcaaaagtagttagaaaagaatttgttcctagagacagagaacccaatacaaaagtgagaacatgtatgcataatcagaaggatgcagtgcagatgcctagtgaaactctgaaagcaaaaatggtacctgagaaagttccccgcagatgtgctactgttgctgcaaataaaataaagataatgagtaatct

SEQ ID NO: 112224 - DNA, 1656 bp, Homo sapiens
  Payload ID: 1978
  Gene Symbol: BRWD1
  Gene Name: bromodomain and WD repeat domain containing 1
  ENST ID: ENST00000430093
  CDS Start-End: 1-799
ggtttccactggtgctgatgggacagtttgcttttggcaatgggatttagaatccttaaaatttagcccacgtcccctgaagttcactgaaaagcctaggccaggcgttcaaatgctttgttcttcttttagtgttggtggtatgtttttagccacaggtagtactgatcatgtaatcagaatgtattttttgggttttgaagcacccgaaaaaatcgcagaacttgaaagccacactgataaagtagatagtatccaattttgtaacaatggtgatcggttcctaagtggtagcagagatggaacagcacggatttggagatttgagcagttagaatggaggagcattttattggatatggctaccagaatctcaggggacttatcttccgaagaggaaaggtttatgaaacctaaagtaacaatgatagcttggaatcaaaatgatagcattgttgtcacagctgtgaatgatcatgtcctcaaagtgtggaattcttacactggacaactgcttcataacttaatgggacatgctgatgaagtatttgttctggagacacatccctttgattccagaattatgttatctgcaggacatgatggcagcatatttatatgggatattacaaaaggtaccaagatgaaacattattttaatatgattgaaggacaaggacatggagctgtgtttgactgtaagttttcacaggatggacagcattttgcctgtacagattctcatgggcaccttctgatatttggttttggatgcagcaaaccatatgaaaagatgtagatggaaatcctcatccaaccaagtatcagagattagtaccaggccgagaaaattctgcagatgaacatttgattccacagctgggctatgtggcaacaagtgatggagaggtgattgaacaaattataagcctgcaaaccaatgataatgatgaacgcagcccagaatcgagtattcttgatggaatgataagacagttgcagcagcagcaagatcagagaatgggagcagatcaggatactattccaagaggactttcaaatggtgaagaaacaccccggagaggttttagaaggctgagcttagacattcagtcccctccaaatattggtctgcgtcgtagtggacaagttgaaggtgttcgtcagatgcatcaaaacgctccacgcagtcagattgctacagaacgtgacctgcaggcttggaaacgaagagtggttgtaccagaggtaccactaggcatatttaggaagctggaagacttccgattagagaaaggtgaagaggaaagaaatctttatataataggaagaaaaagaaagactcttcagctctcacataagtcggattcagtggttttggtatcacagtctagacaaaggacatgtaggcgtaaatatccaaattatggtagaagaaatcgtagctggcgtgagttatcttctggaaatgagtcttcaagctctgtaagacatgagacttcctgtgatcagagtgaaggttctggttcttcagaagaggatgaatggagaagtgacagaaaaagtgagagttacagcgaaagttcaagtgactcttcatctagatattccgattggacagctgatgcgggcatcaatttgcagcctcctttaaga

SEQ ID NO: 112225 - DNA, 1593 bp, Homo sapiens
  Payload ID: 1978
  Gene Symbol: BRWD1
  Gene Name: bromodomain and WD repeat domain containing 1
  ENST ID: ENST00000445668
  CDS Start-End: 1-1228
ggtttccactggtgctgatgggacagtttgcttttggcaatgggatttagaatccttaaaatttagcccacgtcccctgaagttcactgaaaagcctaggccaggcgttcaaatgctttgttcttcttttagtgttggtggtatgtttttagccacaggtagtactgatcatgtaatcagaatgtattttttgggttttgaagcacccgaaaaaatcgcagaacttgaaagccacactgataaagtagatagtatccaattttgtaacaatggtgatcggttcctaagtggtagcagagatggaacagcacggatttggagatttgagcagttagaatggaggagcattttattggatatggctaccagaatctcaggggacttatcttccgaagaggaaaggtttatgaaacctaaagtaacaatgatagcttggaatcaaaatgatagcattgttgtcacagctgtgaatgatcatgtcctcaaagtgtggaattcttacactggacaactgcttcataacttaatgggacatgctgatgaagtatttgttctggagacacatccctttgattccagaattatgttatctgcaggacatgatggcagcatatttatatgggatattacaaaaggtaccaagatgaaacattattttaatatgattgaaggacaaggacatggagctgtgtttgactgtaagttttcacaggatggacagcattttgcctgtacagattctcatgggcaccttctgatatttggttttggatgcagcaaaccatatgaaaagattcctgatcagatgttcttccatactgactatcgaccacttattagagattctaataattatgtcttagatgagcaaactcagcaggctcctcatcttatgcctccaccattcttggtagatgtagatggaaatcctcatccaaccaagtatcagagattagtaccaggccgagaaaattctgcagatgaacatttgattccacagctgggctatgtggcaacaagtgatggagaggtgattgaacaaattataagcctgcaaaccaatgataatgatgaacgcagcccagaatcgagtattcttgatggaatgataagacagttgcagcagcagcaagatcagagaatgggagcagatcaggatactattccaagaggactttcaaatggtgaagaaacaccccggagaggaagctggaagacttccgattagagaaaggtgaagaggaaagaaatctttatataataggaagaaaaagaaagactcttcagctctcacataagtcggattcagtggttttggtatcacagtctagacaaaggacatgtaggcgtaaatatccaaattatggtagaagaaatcgtagctggcgtgagttatcttctggaaatgagtcttcaagctctgtaagacatgagacttcctgtgatcagagtgaaggttctggttcttcagaagaggatgaatggagaagtgacagaaaaagtgagagttacagcgaaagttcaagtgactcttcatctagatattccgattggacagctgatgcgggcatcaatttgcagcctcctttaaga

SEQ ID NO: 112226 - DNA, 1756 bp, Homo sapiens
  Payload ID: 1978
  Gene Symbol: BRWD1
  Gene Name: bromodomain and WD repeat domain containing 1
  ENST ID: ENST00000412604
  CDS Start-End: 1-1402
ggtttccactggtgctgatgggacagtttgcttttggcaatgggatttagaatccttaaaatttagcccacgtcccctgaagttcactgaaaagcctaggccaggcgttcaaatgctttgttcttcttttagtgttggtggtatgtttttagccacaggtagtactgatcatgtaatcagaatgtattttttgggttttgaagcacccgaaaaaatcgcagaacttgaaagccacactgataaagtagatagtatccaattttgtaacaatggtgatcggttcctaagtggtagcagagatggaacagcacggatttggagatttgagcagttagaatggaggagcattttattggatatggctaccagaatctcaggggacttatcttccgaagaggaaaggtttatgaaacctaaagtaacaatgatagcttggaatcaaaatgatagcattgttgtcacagctgtgaatgatcatgtcctcaaagtgtggaattcttacactggacaactgcttcataacttaatgggacatgctgatgaagtatttgttctggagacacatccctttgattccagaattatgttatctgcaggacatgatggcagcatatttatatgggatattacaaaaggtaccaagatgaaacattattttaatatgattgaaggacaaggacatggagctgtgtttgactgtaagttttcacaggatggacagcattttgcctgtacagattctcatgggcaccttctgatatttggttttggatgcagcaaaccatatgaaaagattcctgatcagatgttcttccatactgactatcgaccacttattagagattctaataattatgtcttagatgagcaaactcagcaggctcctcatcttatgcctccaccattcttggtagatgtagatggaaatcctcatccaaccaagtatcagagattagtaccaggccgagaaaattctgcagatgaacatttgattccacagctgggctatgtggcaacaagtgatggagaggtgattgaacaaattataagcctgcaaaccaatgataatgatgaacgcagcccagaatcgagtattcttgatggaatgataagacagttgcagcagcagcaagatcagagaatgggagcagatcaggatactattccaagaggactttcaaatggtgaagaaacaccccggagaggttttagaaggctgagcttagacattcagtcccctccaaatattggtctgcgtcgtagtggacaagttgaaggtgttcgtcagatgcatcaaaacgctccacgcagtcagattgctacagaacgtgacctgcaggcttggaaacgaagagtggttgtaccagaggaagctggaagacttccgattagagaaaggtgaagaggaaagaaatctttatataataggaagaaaaagaaagactcttcagctctcacataagtcggattcagtggttttggtatcacagtctagacaaaggacatgtaggcgtaaatatccaaattatggtagaagaaatcgtagctggcgtgagttatcttctggaaatgagtcttcaagctctgtaagacatgagacttcctgtgatcagagtgaaggttctggttcttcagaagaggatgaatggagaagtgacagaaaaagtgagagttacagcgaaagttcaagtgactcttcatctagatattccgattggacagctgatgcgggcatcaatttgcagcctcctttaag

SEQ ID NO: 112227 - DNA, 1356 bp, Homo sapiens
  Payload ID: 1978
  Gene Symbol: BRWD1
  Gene Name: bromodomain and WD repeat domain containing 1
  ENST ID: ENST00000424441
  CDS Start-End: 1-1356
gccccctacactctgttgcctaaaactagcatttatagatccagcaactggaaaacttatggacaaatctttctctattagatatcatgatatgccagatgttattgactttcttgtattgcgtcaattttatgatgaagcaagacagaggaattggcagtcttgtgacagattccgctctattattgatgatgcttggtggtttggaacagtgttaagtcaagagccatatcaaccacagtatcctgatagtcatttccagtgttatattgttaggtgggataatactgaaattgaaaaacttagcccatgggacatggaaccaattcctgataatgttgatccacctgaagaattaggagctagtatttctgtcacaacagatgagctagagaaattgctctataaaccacaagctggtgaatggggtcagaaatcaagagatgaagaatgtgatagaattatcagtggtatagatcaacttttgaatcttgatatagcagcagcttttgcaggccctgttgatttgtgtacatacccgaagtactgtactgtagtagcttatccaaccgatctttacacaattcgaatgagacttgttaatcgattttacaggaggctgtctgcgttagtttgggaagtcagatatatagaacataatgccagaacatttaacgaacctgagagtgtaattgcaagatcagctaaaaagataactgaccaacttttaaaatttatcaagaatcaacactgtacaaatatctcagaactttctaacacatctgaaaatgatgagcaaaatgctgaggatttggatgatagtgatcttcctaaaacatcttctggaaggaggagagactacagagatattatagataccccaatggattttggaacagtaagggaaactctagatgcgggaaattatgacagccctttggagttttgcaaagacatccggctgatatttagcaatgcaaaagcgtatacaccaaacaaaagatcaaagatttatagtatgaccttgagattatctgccttatttgaagaaaaaatgaagaaaatctcttctgattttaaaattggtcaaaaattcaatgaaaaacttcgaagaagccagaggttcaagcaacggcaaaattgtaaaggtgacagtcagcctaacaaaagtatcagaaacctcaagccgaagaggttaaaatctcagacaaaaataattcctgagttggtaggttctcctacccagtctacctcaagtaggacagcttatcttggaacccacaagacaagtgctggtatctcttcaggtgttacttctggtgactcttcagattcagcagaatcatcagaaaggag

SEQ ID NO: 112228 - DNA, 11381 bp, Homo sapiens
  Payload ID: 1979
  Gene Symbol: BRWD3
  Gene Name: bromodomain and WD repeat domain containing 3
  Uniprot ID: Q6RI45
  ENST ID: ENST00000373275
  CDS Start-End: 218-5626
ctctccttcctcctccgcctcctcagctcttgggctagaatatctatgggtcgaaacgtgatgcgatgaattcgagagagagcgaaactaggacgaggagtgcggcggaagcggcgggactcccgggcatgggggcttcaccacaatagaggcagcgcccccacccgcccccgccagcccctccggagcgaagcccccaaaccccctcgggaaaaggatggcggcagcacctacccagatcgaagccgagctgtattacctgatcgctaggttcttgcagtctggaccctgcaacaaatccgctcaggtgctagtgcaggagctcgaggagcatcagctgattccgcgccgcttagattgggaggggaaagagcaccgaagaagcttcgaggatctggtggcagcaaatgcacacattcctccagactacctccttaaaatttgtgagagaattggtcctttactagataaagagatccctcagagtgttcctggggtacagacattattaggtgttggtcggcagtctctgctacgggatgccaaagactgtaagagtacactatggaatgggtctgcttttgcggctctgcatagaggcagacctccagaactacctgtaaattatgtgaaacctccaaatgtggtgaatatcacctctgccaggcaattaaccggctgtagtcgctttggtcatattttcccttcatctgcttaccagcacattaagatgcataagagaattctggggcacttgtcatctgtctactgtgtagcatttgaccgaagcgggagaagaatttttacaggttcagatgactgtttagtaaaaatttgggctacagatgatggacgccttcttgctacacttcgtggacactctgctgaaatttctgacatggctgttaactatgaaaacactcttattgctgcaggcagctgtgataaggtagtaagagtatggtgtcttcgaacttgtgcacccgttgcagtccttcagggccattcagcttctattacttccatacagttttgtccatcaactaaaggcacaaacagatacctcacttctactggtgctgatggaacaatctgtttctggcaatggcatgtaaaaacaatgaagtttagagatcgcccggtgaaatttactgagagatccagacctggagtccagatatcttgttcatctttcagttctggtggtatgttcattacaactggtagtactgaccatgtgattagaatatattatttgggttctgaggttcctgagaaaattgctgaattagagtcacatacggataaagttgttgctgttcagttctgtaacaatggagacagtttaagatttgttagtggaagtcgagatggaacggcaagaatttggcagtatcagcaacaagaatggaagagtatagtgctagacatggctactaaaatgactggcaataatttgccatctggagaagacaagatcactaaacttaaggtgactatggtggcctgggatcgctatgataccacagttattactgcagtgaacaattttcttttgaaagtgtggaattctatcacaggacagcttcttcatacattatctggacatgatgatgaagtattcgttctagaagcccatccatttgatcaaaggatcatactttcagcaggtcatgatgggaacatttttatttgggaccttgaccgggggaccaaaattcggaattactttaacatgattgaaggccaaggccatggtgcggtgtttgattgtaaattttcaccagatggaaaccattttgcctgcacagattctcatggacatttgctgctttttggttttggatgcagtaaatactacgaaaagattccagatcagatgttcttccacacggattatcgtcctcttattcgtgatgccaataactatgtattggatgaacaaacccaacaagctcctcacctcatgcctcctccatttttggtggatgttgatggaaatcctcatcccacaaaattccaacggttggtaccaggacgggaaaattgtaaagatgaacagcttataccacagctgggatatgtggctaatggtgatggtgaggtagtagaacaggtaattgggcagcaaaccaatgaccaagatgagagcattcttgatggaataatcagggagctgcagagagaacaagacctgagactaattaatgaaggagatgttccacatttaccagttaatagagcatactctgttaatggtgctctgagaagtccaaacatggacatatcttcttccccaaacatcaggcttcgaagacatagtagtcaaattgaaggtgttagacaaatgcataacaatgctcctcggagccagatggccactgaaagagatctcatggcgtggagcagaagagtggtggtcaatgaactaaataatggggttagtagggtacaggaagaatgtcgaactgcaaaaggtgacatagaaatcagtctttatacagttgaaaagaagaaaaagccatcttacactactcaaaggaatgattatgagcctagctgtgggcgttctttacgcaggacacagcgcaaacgtcagcatacttaccaaacacggtccaacatagagcataattcacaggcatcatgtcaaaattcaggtgtacaggaagactcagacagttcttcagaggaagatgaaactgttggcacaagtgacgcttcggtagaggatcctgttgttgaatggcaaagtgaaagttcttccagtgactcatcaagtgaatattctgattggacagcagatgctggaataaatttacaacccccaaaaagacaaaccagacagacaacacgtaaaatatgcagcagctctgatgaggaaaatttgaagtccctagaagaaaggcagaagaaacctaagcagactagaaagaagaaaggaggactggtttctatagcaggtgagcctaatgaagaatggtttgcccctcagtggatcttggatactataccccgacgttccccatttgtcccacaaatgggagatgagcttatctattttaggcaaggacatgaagcttatgttcgggctgtaaggaaatcgaaaatatacagtgttaatttacaaaaacagccatggaacaaaatggatctcagggagcaagagtttgttaagattgtaggaatcaaatatgaggttggcccacccacactgtgctgcttgaagcttgcatttctggacccaatttcaggcaaaatgactggagaatctttttccattaagtatcatgacatgccggatgtcattgacttccttgtgctacatcagttttataatgaagccaaagaaaggaactggcagattggtgatagattccgcagtataatagatgacgcctggtggtttgggactgtggagagtcagcagccttttcaaccagagtatcctgatagttctttccagtgttacagtgttcactgggacaataatgagagagaaaagatgagcccatgggatatggagccaattccagaaggaactgcctttccagatgaagttggtgctggtgttcctgtctcccaggaagaattgactgctttgctatacaaaccccaggaaggagagtggggggctcattccagagacgaagaatgtgaacgggttattcagggcatcaaccaccttctttccctggattttgccagcccttttgctgttccagtggatctcagtgcctaccccttgtattgtactgtagttgcttatccaactgacctcaataccatcaggcggagacttgaaaatcgcttttacaggagaatatcagcattaatgtgggaggtacgctatattgaacataatgccaggactttcaatgagccagacagtcctatagttaaagcagctaaaattgtaactgatgtcttacttcgatttattggggatcagagctgtactgatatactggatacttataataaaattaaagcagaagaacgaaacagtactgatgcagaggaggatacagaaattgttgatttagattcagacggtcctggtacttcatctggaagaaaggtcaaatgccgaggcagaagacagtctttaaagtgtaatcctgatgcttggaaaaaacaatgcaaggaactattgagcctcatttatgaacgtgaagactcggagccatttcgacagccagctgatcttctttcttacccaggtcatcaggagcaagagggagaatcctcagagtctgttgttccagaaagacaacaagattcatctctttctgaggattatcaagatgttatagatactcctgtggacttcagcactgtgaaagaaactttggaagcaggaaactatggtagtcctctggaattttataaggatgttcgccaaatattcaacaactccaaagcttatacctctaataaaaagtcaaggatctatagcatgatgctgcgattatctgccttatttgaaagtcatatcaaaaatatcatctctgaatataagtcagcaatccagagtcagaagaggagaaggccacggtacagaaaacgtctaagaagcagcagcagttcattatctagtagtggagcacctagtccaaaagggaagcagaaacaaatgaagttgcagcctaaaaatgaccagaatacctcagtatctcatgccaggactagctctcctttctcatctcctgtttcagatgctgctgaagggctttcactatatctacttgatgatgagccagatgggccattttcttcatcgagcttcggtggatatagccgaagtggaaatagccatgacccagggaaagccaaatcatttcggaatagagttttgccagttaaacaagatcactcccttgatggaccccttacaaatggtgatggcagagagccccggacaggaatcaagagaaaactacttagtgcatcagaagaagatgaaaacatgggaggagaagataaagagaaaaaagaaacaaaagagaaatctcatttatccacctcagagagtggagagttaggatccagtttaagttctgaaagtacctgtggttctgactctgactctgaatcaacttccagaacagatcaagattacgtagatggagaccatgattatagcaaattcatacaaaccagacctaaaagaaaactcagaaagcaacatggcaatggaaaaagaaattggaagaccagaggcacaggaggaagaggcagatggggaagatggggtagatggagtagaggaggcagaggaagaggaggcaggggacgagggagtcgaggaagaggtggaggtggcactagggggaggggaagagggagaggaggaagaggtgcttctagaggagctaccagagccaaacgagcacgtattgcagatgatgaatttgataccatgttttcaggacgtttcagtagactgcctcgaattaaaacaagaaaccaaggcaggaggactgttttatataatgatgattctgataatgacaattttgtgtccactgaggatcctctgaatcttggtacatccagatcaggcagagtgcgtaaaatgacagaaaaagccagggttagccatctcatgggatggaattattaacagttaataaatttagaataacttaaaaaattcaatggccttctactgcagggaatttaccaggaaatctacaaagcaagttgtgtggggacttctgcttcctttcacattggtgcttttccatttatgccagtatacatttgtttcaagacttttgatctccacacttcatttgttcaaataagccttactcattaggccttaaattaaaagaaattctgcccacacacacacaaacacatacacacacatacacacacacagacacacacacacgaaacacaacacagacactacagatttactacattaaaggagcattcagcttcttaagagtagcatgacatttttatctcaatagaatagccctcttttgcttttgtatcacagaagtatagcaccttcttacagagttttatatagtttgtttttgccattttgattcctatacccagtaataataacttttgcacaatacaccaatcctaaaggcagctattaaatgtttacagtttctatattgtaagagcgatctggattattttactcttcccaggccaaactttcatgacttgtactgaactgaagtatatatttatactacagttttttggggggtggggggatcttgatatgcttttcattgatttgcataattcacgttaaaggtgagaaagggttggtgccttgtaaatatgtagcagatcttcgtggtgtgttctgatgtgtgcattaactttattaaaaaagaatacttgaggtatcaatctagacaaggtgccaaatgcaaaagtttcccgcatcaatttttttcctatcacattttattgcattaatagaatttgtgtagcttaaataacttaaacatttgaaaaatcctcatccacaaagaacaacttctttgaacagtagctcagctacctcttaactacaactactggaaacattaaggaaaatagatgctgttattccttactgactaaggagaaatagaacaagcttagtaggaatgaataccccataagttataagctgagaggttgttaataattgtattggctctcaaattaataattgtaattaacaaagtttcataaatatagtatgctctaccaccttaggctttcttagaacatatttgtgtaagtagacttgggctactgcttatatatttctgctccacttaccatttaacagctgtgagttgctggttttcatttgaatcttaaaatttaacaaagcacctggtttgatttggaatgttttggctagctagtattatgaatcaacttatagattctgctcatatcattccaaagggttcttctgttctagtctttcaggaaagaaccttattgcactgcacactcatgttgtgaatcattattttatagataaaaaacatctttaaaaacccttattgtcttgtttacagcagtagagtgcacatggttccataagtgagcttgagttccaaggtcagttttactccccaaatttaatattacagatttgttcatttgttagatacttacatttctgaggtaagagggataatagcaatttctgtttctgtaacagcaaatttgttgcacttagatcaggctcatgggataaaacagacttcttagtatatacctagctatcccaggatatttcttaagctaatgtgtttgtctcatgctttcaatcatttcatgcatctgaaaacccttaagtgcagaggaaggcgtacacacataaaactttgcttttttggtagggtcggcagtagggttattcttggactaacatctttaagcagttttcacttgcagtggaaatgatgttcaggctttaagagaaagtattgtgaattgttaatggcactaacttctgttactagacagcagaccaagctatttttttgttgtagtctttttttcactaaaccaaaactacttctggttgtaactcagctgccactttaaaccatagtagagattcaaaacgttcctatttgaaactacatttgatttttgctaaaatgtgctgtttcggttatttatctcttgggcatttagactaaattgtgcctgtattcctgaaatcaataatactttggcttatcctgatctaagtaacatagttacttaaattcctggatatacccaaatatggatcacatgtatcattttagtttgaaattttttgttgacattcttctatgaagagctgacctcttgaaatgtagaagaattgacatttgtgtgattttggctatctggagctttatttataatttattttgaaaaataaaaatgccacatttatttcccaaatgtcaagattttctagaattagataattagaataataaggctgaagacattttaaagcatattttatatgtagtgaaatactgtgaaaatattagtgaacagcattttgctgtaatgtttatttcagttattaagatttaaagagttagtcatcagggtatgttagataaacatagttatcatttattaaacaaacagataattttctgtttgcatgcaaattattttaataagtgtgaaaataaaagtttggaagatagtatttttacttttatatctggacttttttttcccccaatttacactttgctttcttgtaataccacctcctgtgaatgtgttgtaattagtatcacattgattactttatcattttaatttctttgaggccctttaaacctacgtaaaatctgggtccagccatagcaaagcaagtacaaaatgaacaaagaattttgaagaaaagcctaaatcttaaattgctaagaaaaaacactgttatatttaggcccgtgagagcatatacatgtataaacctaatcctatgctagatatgaatagtcagtgagctgtaatatttctcataaatgctaataatgtttaaattcccagctttaagatcttagtgtgtgtatatatttataaaatctgaattgtgtgtttcttctatggcttactgtgtgtttctctttcagcaataggatgctctctaaaacattcactagcctactagcctacttactaaatttttgtatatgtgtgtttgtgcacttgtatgtgtgtaaagttttttccccaacttgacacaccttatctcagacattcaaaaaaagagaacattttgtatggaggacagtctgccaactttttgcctctctacagctcttagcctgtatatttactgcttgatcattcattatgccttctagataaccagtccaggttttgtcatatacctgtgtccctctattctttttatttccctttttaattttttttcttttttttccctccccagaaatcaggcttgtgttggaattcttctctataatactttgtttcccgcagatgcaaagtaacaaagtaactgagtaaaattagaaatctcattctgcacaactgtgcgctcagatatttaactcagccttctaatacttttaagtacgtttctgttatttatctttttgttgtttttgttttaatcccatagattgtcatcagacaataatagagtgattgagagagaaagatataaatgccacttctaactttttgataaaacttttttgagcatttttcaaaaatttgtatgtttgtggtaatggggaattaaacaccttttacagctgatgtatgttggaaatcattttatgtacatttaccaactggtacttatcttcaagttggaattttcacatccataaaagggagacttgcatcatatataattttcagtatactttgctgtccagccttttaaacaattacagtaacattttgagttctgtgatgaatagttctaggggaagggatggaactttcgacatgtaaagtccattgttttaaatgctaaccccatccccaatatttttgtggaacgtgaggctttatgaaaggtttatcagaaatagaatattctaaagtcacttttatggcttatttcaaaaactagtgtgaaagtattttcatgcttttttgtttctcatcttttagcaaagcttctttaccaagttttgattaaattgcaatataaaattaagttttttcacggtgctatattttgtggaatatgggtagcactcaggtttctttcttttttcttttctccttccttcttccttcattccttcattcctccctcccccctccctccctccctctcttccttccctccttccttccttcctcacctcggcctcccaaagtgctgggattacaggcatgagccaccgtgcccggcctatatacccttattcttgattatttcttttttcatcttttcaatcctgcttacttttatcctcacttttctttctgccatgaaaactgcacctaatttaccacacttaagattggcaatttttgattcattgatgggagaagtacagtagaaaggccctgcagtttagaattaagttgtgtttgtttatttacatgtatgcccatttcttctaaattaaatctagaatgtgagactttgacatataaaagcatgataagtattttcttaaaaaataagactattgatacataatgaaaccaccattggtaattgaattttaaaatgatatgcaaaaatatttagaaatccagttgggaaatgtgtttttgcatatgtcaccagatacacattaggcagtactacaaatgttaattcttaaacaatactgtggtgatggcaatcagtaatttatttctttgtcctgtaacttatcattcttgtcttttgtaatgtcttacacagtattaacataactgtaccttttttttgttcttggtatccatacattttaagatggaaaatcagttcatagttgatatgatattgtatatgggcaaaatgtccgttaaactaaaattcagtaaaaaaggtaatataaactggcttgatttataaaagatgttttgtttggcagttatcagtcattataagcaattatcttcaaagacaaaaaaactggactaatttgttgccattctttatgggatgtttacaataaaattccaagttgtttggaatcaattgcactcttgctgctttatgccttaatttatgtaccagagaaaaattaaccagaagaaagaaatatggagttacctattcagctttagagattgtaacatgtaactcttaggtctttcttgtttctttgtcatagaatattttattactattactttttaatctgagaaactaggatgcttcttcctatcaaagaaaaggttttgttttttgttttcatcttagacattgcaaatattctttgggtcacttttaggataataaatatgatgtttacactttaaatgtgggctgcttggtgcattcaataacagcctgcaaagcatttgtcaacattttgttttgcagagcttttcaaaatgaatagatctctaacatatttatgacttacaacttttaacagctgagttatatgtacctgacattttaaaatgtatagtaagattacctacattgtaaatggtgctttaattcagtgtaagtgtaggagagagagaagtgaggtgagatgatctgaatgctctaacaggaacattcataactatatagttacccagaatttgtctcccagtggcaaacattccactaggttcaagataaataagctggccaaagactggactgtatctttgatatatatatactgtgtattttgtgtatttagaataaaaaaaatgcatttaggaaaaaa

SEQ ID NO: 112229 - DNA, 4614 bp, Homo sapiens
  Payload ID: 1980
  Gene Symbol: BRD1
  Gene Name: bromodomain containing 1
  Uniprot ID: O95696
  ENST ID: ENST00000216267
  CDS Start-End: 488-3664
atccgataggaccaggtagccactgagcatgcctgtctggtgggcatagcctctgtgcctggtggggtccagccctgtatgtggacttcctgggggaccgcctgcatgctgggaaagtcctgcaactgtgggctctgggccggacccctcctccttggggagcgttgctgtggtctccgcagcctgttggtgtggtctgagaggggactggtgtgtggtggtagggacgcaggtgctcaggagggctcctcaggctgcctctctgcctgttactgctgctccctccctggtcctggggactcgctcaggcctggatgtgtggttttggacaccttggaaagaggttagctgtgagttttgctttgattgggctttgagctgctgagctagatctgtccaagcatgcttttgtggttttctcgagtctttggtcaccctgcgtagaattacctttacttttgccttcattttaggtaatcattaccaaatgaggaggaaaggacgatgtcatcgaggctctgcagcgaggcatccttcttccccatgcagtgttaaacactcccctacgcgagaaacgctgacctacgctcaagctcaaaggatggtagagatagaaattgaagggcgcttgcacaggatcagtatttttgatcccctggagatcatattggaagatgacctcactgctcaagagatgagtgagtgcaacagcaacaaggaaaacagcgagcggcctcctgtctgcttaagaactaagcgtcacaaaaacaacagagtcaaaaagaaaaacgaggccctccccagcgcccacggcacgccggcctcggccagtgccctcccggagcccaaggtgcgcatcgtggagtacagccctccgtccgcccccaggaggcctcctgtgtactacaagttcatcgagaagtcggccgaggaactggacaacgaggtggagtatgacatggacgaggaggactatgcctggctggagatcgtcaatgagaagcgcaagggcgactgcgtccccgccgtgtcgcagagcatgtttgagttcctgatggaccgcttcgagaaggagtcgcactgcgagaaccagaagcagggcgagcagcagtctctgatcgacgaggacgccgtgtgctgcatctgcatggacggggagtgtcagaacagcaacgtgatcctcttctgcgacatgtgcaacctggccgtgcaccaggagtgctacggggtgccctacatccccgagggccagtggctctgccgccactgcctgcagtcgcgggcccggcccgccgactgtgtgctgtgccccaacaagggtggtgccttcaaaaagacagatgacgaccgctggggtcacgtggtgtgtgccctgtggatcccagaggtcggctttgccaacacggtgttcatcgagcccatcgatggggtgaggaacatccctccagcccggtggaaactgacatgctacctctgtaagcagaagggcgtgggtgcctgcatccagtgccacaaagcaaactgctacacagcattccatgtgacgtgtgcccagaaggctggcctgtacatgaaaatggagcccgtgaaggaactgactggcggtggcaccaccttctccgtcagaaagaccgcttactgtgatgtccacacgcctccaggctgcacccggaggcctctgaatatttacggggatgtcgaaatgaaaaatggcgtctgtcgaaaagagagctcggttaaaacggtcaggtccacatccaaggtcaggaagaaggcaaaaaaggctaagaaagctctggctgagccctgcgcggtcctgccgaccgtgtgcgctccttatattcccccgcagaggttaaataggattgcgaatcaggtggccattcagcggaagaagcagtttgtggagcgagcccacagctactggctgctcaagcggctgtccaggaacggggcccccctgctgcggcggctgcagtccagcctgcagtctcagcgaagctcacagcagagagaaaatgatgaggagatgaaggctgccaaagagaagctgaagtactggcagcggctgcggcacgacctggagcgcgctcgcctgctgatcgagctgctgcgcaagcgggagaagctcaagcgtgagcaggtgaaggtggagcaggtcgccatggagctgcggctgaccccgctgacggtgctgctgcgctcagtgctggaccagctgcaagacaaggaccccgccaggatatttgcgcagcccgtgagtctgaaggaggtaccagattatttggatcacattaaacatcccatggactttgccacaatgaggaaacggttagaagctcaagggtataaaaacctccatgagtttgaggaggattttgatctcattatagataactgcatgaagtacaatgccagggacaccgtgttctatagagccgcggtgaggctgcgcgatcagggaggtgttgttctgaggcaggcccggcgcgaggtggacagcatcggcttggaagaggcctcggggatgcacctgcctgagcggcctgctgcggcaccgcggcggcctttctcctgggaagacgtggacaggttgctggaccccgccaacagagcccacctgggcctggaggagcagctgagagagctgctggacatgctcgacctcacctgcgctatgaagtccagcggctcccggagcaagcgggcaaagctgctcaaaaaggaaattgcccttctccgaaacaagctgagccagcagcacagccagcccctgcccacggggccaggcttggaaggcttcgaagaggacggagctgcgctggggccggaggcgggcgaggaagtccttccgaggttggagactcttctgcagccaaggaaaaggtcgcggagcacatgcggagactccgaggtggaggaggagtccccaggaaagcgcctggacgcaggtctcaccaacggctttgggggtgcgaggagcgagcaggagccgggcggcggcctggggaggaaggccacaccccgacgacgctgtgcctccgagtccagcatctcctccagcaacagcccgctctgcgactcgagctttaatgcgcccaaatgtgggcggggcaaaccggctcttgtgcgacggcacacgctggaggaccgcagtgagctgatctcctgcatcgagaatgggaactacgccaaggcggccaggatcgcagccgaagtcggccagagcagcatgtggatctccactgatgccgccgcctcggtgctggagcctctgaaggtggtgtgggccaagtgcagcggctacccctcctacccggcactgatcatcgaccccaagatgccccgtgtgcctggccaccacaacggcgtcaccatcccggccccacccctggacgtgctgaagattggggagcacatgcagaccaagtctgatgagaagctgttcctcgttctcttttttgataataagagaagttggcagtggcttcctaagtccaaaatggttccccttggtattgacgaaactatagacaagttaaagatgatggaagggaggaattccagcatccggaaggccgtgcggatcgcttttgaccgcgccatgaaccacctgagccgcgtccacggggagccgaccagcgacctcagtgacattgactgacggcccggccgccagcgcgggtcttgtccatagtgttgataagctgtacatgtttgtatattgttcaaaacttaacttattctgatttttagttatagctctttaattctttttccccggggaggggggaggttttatttccaagttttctaggaacccatctccgtctgggcgctgtgagtggggtgggcacgtccgggcagcccagtgcgtctgtcgcacgtccccaggccgtgctgctggcgtcactttctttgatatgtagctttttcttaaagacttttgaatgtttaataattttgtaaatcatgctctttacacagagtaccacttatttaataagacgggatgtaaatttacaatgacaaatgtgtattttaagaaagaaaatgacattattttgaatggtactttgtggaaagaggggagaataaagttatgctgtgtacatcacttgcagatcaccaaaaacactccgctgcccgtgaccgccggtgggtgtgtccccgctcccgtcgtcccgcccacctcaaaccccgcaggtgtgcctcccagcggattatttattgtagaaagtgtattcatttgctttataatgaaaaatacatttgcaaaggtatattgatatgcatttttatacaggcacataaaaattcaacttggcttgggagcagaatgcattgcattgtataaatgactctggcctgtgtgtactttgattttataacttgtaatcttttgtttacaatgaggggctttctgtaacttgttttaatttagaacactttggtagcaatagaaactttggatacatttttgtatggtacctgtgatgtatatagaattagtactttatttttatttttaagaggtaaagcattatgttggggaaagtagggtgggtttccaaatttgcattttttatattaaaaataaagtcaagatttgga

SEQ ID NO: 112230 - DNA, 4312 bp, Homo sapiens
  Payload ID: 1980
  Gene Symbol: BRD1
  Gene Name: bromodomain containing 1
  Uniprot ID: O95696
  ENST ID: ENST00000404034
  CDS Start-End: 186-3362
caatctagtttcaacatacaatgaggatttctgtctgatacagagaaagatacccagtgtctggagggtctgtcttaagaagtgctcttgaagtctgctgggatttcctttcgggactcacagagggaagcctgctccctgagggctttttctcaggcccaatagatcagggtaatcattaccaaatgaggaggaaaggacgatgtcatcgaggctctgcagcgaggcatccttcttccccatgcagtgttaaacactcccctacgcgagaaacgctgacctacgctcaagctcaaaggatggtagagatagaaattgaagggcgcttgcacaggatcagtatttttgatcccctggagatcatattggaagatgacctcactgctcaagagatgagtgagtgcaacagcaacaaggaaaacagcgagcggcctcctgtctgcttaagaactaagcgtcacaaaaacaacagagtcaaaaagaaaaacgaggccctccccagcgcccacggcacgccggcctcggccagtgccctcccggagcccaaggtgcgcatcgtggagtacagccctccgtccgcccccaggaggcctcctgtgtactacaagttcatcgagaagtcggccgaggaactggacaacgaggtggagtatgacatggacgaggaggactatgcctggctggagatcgtcaatgagaagcgcaagggcgactgcgtccccgccgtgtcgcagagcatgtttgagttcctgatggaccgcttcgagaaggagtcgcactgcgagaaccagaagcagggcgagcagcagtctctgatcgacgaggacgccgtgtgctgcatctgcatggacggggagtgtcagaacagcaacgtgatcctcttctgcgacatgtgcaacctggccgtgcaccaggagtgctacggggtgccctacatccccgagggccagtggctctgccgccactgcctgcagtcgcgggcccggcccgccgactgtgtgctgtgccccaacaagggtggtgccttcaaaaagacagatgacgaccgctggggtcacgtggtgtgtgccctgtggatcccagaggtcggctttgccaacacggtgttcatcgagcccatcgatggggtgaggaacatccctccagcccggtggaaactgacatgctacctctgtaagcagaagggcgtgggtgcctgcatccagtgccacaaagcaaactgctacacagcattccatgtgacgtgtgcccagaaggctggcctgtacatgaaaatggagcccgtgaaggaactgactggcggtggcaccaccttctccgtcagaaagaccgcttactgtgatgtccacacgcctccaggctgcacccggaggcctctgaatatttacggggatgtcgaaatgaaaaatggcgtctgtcgaaaagagagctcggttaaaacggtcaggtccacatccaaggtcaggaagaaggcaaaaaaggctaagaaagctctggctgagccctgcgcggtcctgccgaccgtgtgcgctccttatattcccccgcagaggttaaataggattgcgaatcaggtggccattcagcggaagaagcagtttgtggagcgagcccacagctactggctgctcaagcggctgtccaggaacggggcccccctgctgcggcggctgcagtccagcctgcagtctcagcgaagctcacagcagagagaaaatgatgaggagatgaaggctgccaaagagaagctgaagtactggcagcggctgcggcacgacctggagcgcgctcgcctgctgatcgagctgctgcgcaagcgggagaagctcaagcgtgagcaggtgaaggtggagcaggtcgccatggagctgcggctgaccccgctgacggtgctgctgcgctcagtgctggaccagctgcaagacaaggaccccgccaggatatttgcgcagcccgtgagtctgaaggaggtaccagattatttggatcacattaaacatcccatggactttgccacaatgaggaaacggttagaagctcaagggtataaaaacctccatgagtttgaggaggattttgatctcattatagataactgcatgaagtacaatgccagggacaccgtgttctatagagccgcggtgaggctgcgcgatcagggaggtgttgttctgaggcaggcccggcgcgaggtggacagcatcggcttggaagaggcctcggggatgcacctgcctgagcggcctgctgcggcaccgcggcggcctttctcctgggaagacgtggacaggttgctggaccccgccaacagagcccacctgggcctggaggagcagctgagagagctgctggacatgctcgacctcacctgcgctatgaagtccagcggctcccggagcaagcgggcaaagctgctcaaaaaggaaattgcccttctccgaaacaagctgagccagcagcacagccagcccctgcccacggggccaggcttggaaggcttcgaagaggacggagctgcgctggggccggaggcgggcgaggaagtccttccgaggttggagactcttctgcagccaaggaaaaggtcgcggagcacatgcggagactccgaggtggaggaggagtccccaggaaagcgcctggacgcaggtctcaccaacggctttgggggtgcgaggagcgagcaggagccgggcggcggcctggggaggaaggccacaccccgacgacgctgtgcctccgagtccagcatctcctccagcaacagcccgctctgcgactcgagctttaatgcgcccaaatgtgggcggggcaaaccggctcttgtgcgacggcacacgctggaggaccgcagtgagctgatctcctgcatcgagaatgggaactacgccaaggcggccaggatcgcagccgaagtcggccagagcagcatgtggatctccactgatgccgccgcctcggtgctggagcctctgaaggtggtgtgggccaagtgcagcggctacccctcctacccggcactgatcatcgaccccaagatgccccgtgtgcctggccaccacaacggcgtcaccatcccggccccacccctggacgtgctgaagattggggagcacatgcagaccaagtctgatgagaagctgttcctcgttctcttttttgataataagagaagttggcagtggcttcctaagtccaaaatggttccccttggtattgacgaaactatagacaagttaaagatgatggaagggaggaattccagcatccggaaggccgtgcggatcgcttttgaccgcgccatgaaccacctgagccgcgtccacggggagccgaccagcgacctcagtgacattgactgacggcccggccgccagcgcgggtcttgtccatagtgttgataagctgtacatgtttgtatattgttcaaaacttaacttattctgatttttagttatagctctttaattctttttccccggggaggggggaggttttatttccaagttttctaggaacccatctccgtctgggcgctgtgagtggggtgggcacgtccgggcagcccagtgcgtctgtcgcacgtccccaggccgtgctgctggcgtcactttctttgatatgtagctttttcttaaagacttttgaatgtttaataattttgtaaatcatgctctttacacagagtaccacttatttaataagacgggatgtaaatttacaatgacaaatgtgtattttaagaaagaaaatgacattattttgaatggtactttgtggaaagaggggagaataaagttatgctgtgtacatcacttgcagatcaccaaaaacactccgctgcccgtgaccgccggtgggtgtgtccccgctcccgtcgtcccgcccacctcaaaccccgcaggtgtgcctcccagcggattatttattgtagaaagtgtattcatttgctttataatgaaaaatacatttgcaaaggtatattgatatgcatttttatacaggcacataaaaattcaacttggcttgggagcagaatgcattgcattgtataaatgactctggcctgtgtgtactttgattttataacttgtaatcttttgtttacaatgaggggctttctgtaacttgttttaatttagaacactttggtagcaatagaaactttggatacatttttgtatggtacctgtgatgtatatagaattagtactttatttttatttttaagaggtaaagcattatgttggggaaagtagggtgggtttccaaatttgcattttttatattaaaaataaagtcaagatttgga

SEQ ID NO: 112231 - DNA, 4550 bp, Homo sapiens
  Payload ID: 1980
  Gene Symbol: BRD1
  Gene Name: bromodomain containing 1
  Uniprot ID: O95696
  ENST ID: ENST00000404760
  CDS Start-End: 31-3600
ccgcggcgccccgaaggtaatcattaccaaatgaggaggaaaggacgatgtcatcgaggctctgcagcgaggcatccttcttccccatgcagtgttaaacactcccctacgcgagaaacgctgacctacgctcaagctcaaaggatggtagagatagaaattgaagggcgcttgcacaggatcagtatttttgatcccctggagatcatattggaagatgacctcactgctcaagagatgagtgagtgcaacagcaacaaggaaaacagcgagcggcctcctgtctgcttaagaactaagcgtcacaaaaacaacagagtcaaaaagaaaaacgaggccctccccagcgcccacggcacgccggcctcggccagtgccctcccggagcccaaggtgcgcatcgtggagtacagccctccgtccgcccccaggaggcctcctgtgtactacaagttcatcgagaagtcggccgaggaactggacaacgaggtggagtatgacatggacgaggaggactatgcctggctggagatcgtcaatgagaagcgcaagggcgactgcgtccccgccgtgtcgcagagcatgtttgagttcctgatggaccgcttcgagaaggagtcgcactgcgagaaccagaagcagggcgagcagcagtctctgatcgacgaggacgccgtgtgctgcatctgcatggacggggagtgtcagaacagcaacgtgatcctcttctgcgacatgtgcaacctggccgtgcaccaggagtgctacggggtgccctacatccccgagggccagtggctctgccgccactgcctgcagtcgcgggcccggcccgccgactgtgtgctgtgccccaacaagggtggtgccttcaaaaagacagatgacgaccgctggggtcacgtggtgtgtgccctgtggatcccagaggtcggctttgccaacacggtgttcatcgagcccatcgatggggtgaggaacatccctccagcccggtggaaactgacatgctacctctgtaagcagaagggcgtgggtgcctgcatccagtgccacaaagcaaactgctacacagcattccatgtgacgtgtgcccagaaggctggcctgtacatgaaaatggagcccgtgaaggaactgactggcggtggcaccaccttctccgtcagaaagaccgcttactgtgatgtccacacgcctccaggctgcacccggaggcctctgaatatttacggggatgtcgaaatgaaaaatggcgtctgtcgaaaagagagctcggttaaaacggtcaggtccacatccaaggtcaggaagaaggcaaaaaaggctaagaaagctctggctgagccctgcgcggtcctgccgaccgtgtgcgctccttatattcccccgcagaggttaaataggattgcgaatcaggtggccattcagcggaagaagcagtttgtggagcgagcccacagctactggctgctcaagcggctgtccaggaacggggcccccctgctgcggcggctgcagtccagcctgcagtctcagcgaagctcacagcagagagaaaatgatgaggagatgaaggctgccaaagagaagctgaagtactggcagcggctgcggcacgacctggagcgcgctcgcctgctgatcgagctgctgcgcaagcgggagaagctcaagcgtgagcaggtgaaggtggagcaggtcgccatggagctgcggctgaccccgctgacggtgctgctgcgctcagtgctggaccagctgcaagacaaggaccccgccaggatatttgcgcagcccgtgagtctgaaggaggtaccagattatttggatcacattaaacatcccatggactttgccacaatgaggaaacggttagaagctcaagggtataaaaacctccatgagtttgaggaggattttgatctcattatagataactgcatgaagtacaatgccagggacaccgtgttctatagagccgcggtgaggctgcgcgatcagggaggtgttgttctgaggcaggcccggcgcgaggtggacagcatcggcttggaagaggcctcggggatgcacctgcctgagcggcctgctgcggcaccgcggcggcctttctcctgggaagacgtggacaggttgctggaccccgccaacagagcccacctgggcctggaggagcagctgagagagctgctggacatgctcgacctcacctgcgctatgaagtccagcggctcccggagcaagcgggcaaagctgctcaaaaaggaaattgcccttctccgaaacaagctgagccagcagcacagccagcccctgcccacggggccaggcttggaaggcttcgaagaggacggagctgcgctggggccggaggcgggcgaggaaggagataaatctccccctaaacttgaaccatcagatgcattacctcttccttcaaactcggagactaattcagaaccaccaaccctcaaaccagtagaactcaacccagagcagagtaaacttttcaaaagagtcacatttgataatgaatcacatagcgcttgcactcagagcgcactggtaagcggacgccctccagagcccacccgcgccagtagtggcgatgtgccggcggcggcggcctccgcggtggcggagccagcaagcgatgtaaacagacgcacttctgttctcttctgcaaatcgaaaagtgtaagccccccaaagtctgccaagaacactgaaacccagccaacttctcctcagctagggaccaaaacctttttgtctgtagtccttccgaggttggagactcttctgcagccaaggaaaaggtcgcggagcacatgcggagactccgaggtggaggaggagtccccaggaaagcgcctggacgcaggtctcaccaacggctttgggggtgcgaggagcgagcaggagccgggcggcggcctggggaggaaggccacaccccgacgacgctgtgcctccgagtccagcatctcctccagcaacagcccgctctgcgactcgagctttaatgcgcccaaatgtgggcggggcaaaccggctcttgtgcgacggcacacgctggaggaccgcagtgagctgatctcctgcatcgagaatgggaactacgccaaggcggccaggatcgcagccgaagtcggccagagcagcatgtggatctccactgatgccgccgcctcggtgctggagcctctgaaggtggtgtgggccaagtgcagcggctacccctcctacccggcactgatcatcgaccccaagatgccccgtgtgcctggccaccacaacggcgtcaccatcccggccccacccctggacgtgctgaagattggggagcacatgcagaccaagtctgatgagaagctgttcctcgttctcttttttgataataagagaagttggcagtggcttcctaagtccaaaatggttccccttggtattgacgaaactatagacaagttaaagatgatggaagggaggaattccagcatccggaaggccgtgcggatcgcttttgaccgcgccatgaaccacctgagccgcgtccacggggagccgaccagcgacctcagtgacattgactgacggcccggccgccagcgcgggtcttgtccatagtgttgataagctgtacatgtttgtatattgttcaaaacttaacttattctgatttttagttatagctctttaattctttttccccggggaggggggaggttttatttccaagttttctaggaacccatctccgtctgggcgctgtgagtggggtgggcacgtccgggcagcccagtgcgtctgtcgcacgtccccaggccgtgctgctggcgtcactttctttgatatgtagctttttcttaaagacttttgaatgtttaataattttgtaaatcatgctctttacacagagtaccacttatttaataagacgggatgtaaatttacaatgacaaatgtgtattttaagaaagaaaatgacattattttgaatggtactttgtggaaagaggggagaataaagttatgctgtgtacatcacttgcagatcaccaaaaacactccgctgcccgtgaccgccggtgggtgtgtccccgctcccgtcgtcccgcccacctcaaaccccgcaggtgtgcctcccagcggattatttattgtagaaagtgtattcatttgctttataatgaaaaatacatttgcaaaggtatattgatatgcatttttatacaggcacataaaaattcaacttggcttgggagcagaatgcattgcattgtataaatgactctggcctgtgtgtactttgattttataacttgtaatcttttgtttacaatgaggggctttctgtaacttgttttaatttagaacactttggtagcaatagaaactttggatacatttttgtatggtacctgtgatgtatatagaattagtactttatttttatttttaagaggtaaagcattatgttggggaaagtagggtgggtttccaaatttgcattttttatattaaaaataaagtcaagatttgga

SEQ ID NO: 112232 - DNA, 3051 bp, Homo sapiens
  Payload ID: 1980
  Gene Symbol: BRD1
  Gene Name: bromodomain containing 1
  ENST ID: ENST00000438393
  CDS Start-End: 1-1530
gaactgactggcggtggcaccaccttctccgtcagaaagaccgcttactgtgatgtccacacgcctccaggctgcacccggaggcctctgaatatttacggggatgtcgaaatgaaaaatggcgtctgtcgaaaagagagctcggttaaaacggtcaggtccacatccaaggtcaggaagaaggcaaaaaaggctaagaaagctctggctgagccctgcgcggtcctgccgaccgtgtgcgctccttatattcccccgcagaggttaaataggattgcgaatcaggtggccattcagcggaagaagcagtttgtggagcgagcccacagctactggctgctcaagcggctgtccaggaacggggcccccctgctgcggcggctgcagtccagcctgcagtctcagcgaagctcacagcagagagaaaatgatgaggagatgaaggctgccaaagagaagctgaagtactggcagcggctgcggcacgacctggagcgcgctcgcctgctgatcgagctgctgcgcaagcgggagaagctcaagcgtgagcaggtgaaggtggagcaggtcgccatggagctgcggctgaccccgctgacggtgctgctgcgctcagtgctggaccagctgcaagacaaggaccccgccaggatatttgcgcagcccgtgagtctgaaggaggtaccagattatttggatcacattaaacatcccatggactttgccacaatgaggaaacggttagaagctcaagggtataaaaacctccatgagtttgaggaggattttgatctcattatagataactgcatgaagtacaatgccagggacaccgtgttctatagagccgcggtgaggctgcgcgatcagggaggtgttgttctgaggcaggcccggcgcgaggtggacagcatcggcttggaagaggcctcggggatgcacctgcctgagcggcctgctgcggcaccgcggcggcctttctcctgggaagacgtggacaggttgctggaccccgccaacagagcccacctgggcctggaggagcagctgagagagctgctggacatgctcgacctcacctgcgctatgaagtccagcggctcccggagcaagcgggcaaagctgctcaaaaaggaaattgcccttctccgaaacaagctgagccagcagcacagccagcccctgcccacggggccaggcttggaaggcttcgaagaggacggagctgcgctggggccggaggcgggcgaggaagctagggaccaaaacctttttgtctgtagtccttccgaggttggagactcttctgcagccaaggaaaaggtcgcggagcacatgcggagactccgaggtggaggaggagtccccaggaaagcgcctggacgcaggtctcaccaacggctttgggggtgcgaggagcgagcaggagccgggcggcggcctggggaggaaggccacaccccgacgacgctgtgcctccgagtccagcatctcctccagcaacagcccgctctgcgactcgagctttaatgcgcccaaatgtgggcggggcaaaccggctcttgtgcgacggcacacgctggaggaccgcagtgagctgatctcctgcatcgagaatgggaactacgccaaggcggccaggatcgcagccgaagtcggccagagcagcatgtggatctccactgatgccgccgcctcggtgctggagcctctgaaggtggtgtgggccaagtgcagcggctacccctcctacccggcactgatcatcgaccccaagatgccccgtgtgcctggccaccacaacggcgtcaccatcccggccccacccctggacgtgctgaagattggggagcacatgcagaccaagtctgatgagaagctgttcctcgttctcttttttgataataagagaagttggcagtggcttcctaagtccaaaatggttccccttggtattgacgaaactatagacaagttaaagatgatggaagggaggaattccagcatccggaaggccgtgcggatcgcttttgaccgcgccatgaaccacctgagccgcgtccacggggagccgaccagcgacctcagtgacattgactgacggcccggccgccagcgcgggtcttgtccatagtgttgataagctgtacatgtttgtatattgttcaaaacttaacttattctgatttttagttatagctctttaattctttttccccggggaggggggaggttttatttccaagttttctaggaacccatctccgtctgggcgctgtgagtggggtgggcacgtccgggcagcccagtgcgtctgtcgcacgtccccaggccgtgctgctggcgtcactttctttgatatgtagctttttcttaaagacttttgaatgtttaataattttgtaaatcatgctctttacacagagtaccacttatttaataagacgggatgtaaatttacaatgacaaatgtgtattttaagaaagaaaatgacattattttgaatggtactttgtggaaagaggggagaataaagttatgctgtgtacatcacttgcagatcaccaaaaacactccgctgcccgtgaccgccggtgggtgtgtccccgctcccgtcgtcccgcccacctcaaaccccgcaggtgtgcctcccagcggattatttattgtagaaagtgtattcatttgctttataatgaaaaatacatttgcaaaggtatattgatatgcatttttatacaggcacataaaaattcaacttggcttgggagcagaatgcattgcattgtataaatgactctggcctgtgtgtactttgattttataacttgtaatcttttgtttacaatgaggggctttctgtaacttgttttaatttagaacactttggtagcaatagaaactttggatacatttttgtatggtacctgtgatgtatatagaattagtactttatttttatttttaagaggtaaagcattatgttggggaaagtagggtgggtttccaaatttgcattttttatattaaaaataaagtcaagatttgga

SEQ ID NO: 112233 - DNA, 4997 bp, Homo sapiens
  Payload ID: 1980
  Gene Symbol: BRD1
  Gene Name: bromodomain containing 1
  Uniprot ID: O95696
  ENST ID: ENST00000457780
  CDS Start-End: 488-4057
atccgataggaccaggtagccactgagcatgcctgtctggtgggcatagcctctgtgcctggtggggtccagccctgtatgtggacttcctgggggaccgcctgcatgctgggaaagtcctgcaactgtgggctctgggccggacccctcctccttggggagcgttgctgtggtctccgcagcctgttggtgtggtctgagaggggactggtgtgtggtggtagggacgcaggtgctcaggagggctcctcaggctgcctctctgcctgttactgctgctccctccctggtcctggggactcgctcaggcctggatgtgtggttttggacaccttggaaagaggttagctgtgagttttgctttgattgggctttgagctgctgagctagatctgtccaagcatgcttttgtggttttctcgagtctttggtcaccctgcgtagaattacctttacttttgccttcattttaggtaatcattaccaaatgaggaggaaaggacgatgtcatcgaggctctgcagcgaggcatccttcttccccatgcagtgttaaacactcccctacgcgagaaacgctgacctacgctcaagctcaaaggatggtagagatagaaattgaagggcgcttgcacaggatcagtatttttgatcccctggagatcatattggaagatgacctcactgctcaagagatgagtgagtgcaacagcaacaaggaaaacagcgagcggcctcctgtctgcttaagaactaagcgtcacaaaaacaacagagtcaaaaagaaaaacgaggccctccccagcgcccacggcacgccggcctcggccagtgccctcccggagcccaaggtgcgcatcgtggagtacagccctccgtccgcccccaggaggcctcctgtgtactacaagttcatcgagaagtcggccgaggaactggacaacgaggtggagtatgacatggacgaggaggactatgcctggctggagatcgtcaatgagaagcgcaagggcgactgcgtccccgccgtgtcgcagagcatgtttgagttcctgatggaccgcttcgagaaggagtcgcactgcgagaaccagaagcagggcgagcagcagtctctgatcgacgaggacgccgtgtgctgcatctgcatggacggggagtgtcagaacagcaacgtgatcctcttctgcgacatgtgcaacctggccgtgcaccaggagtgctacggggtgccctacatccccgagggccagtggctctgccgccactgcctgcagtcgcgggcccggcccgccgactgtgtgctgtgccccaacaagggtggtgccttcaaaaagacagatgacgaccgctggggtcacgtggtgtgtgccctgtggatcccagaggtcggctttgccaacacggtgttcatcgagcccatcgatggggtgaggaacatccctccagcccggtggaaactgacatgctacctctgtaagcagaagggcgtgggtgcctgcatccagtgccacaaagcaaactgctacacagcattccatgtgacgtgtgcccagaaggctggcctgtacatgaaaatggagcccgtgaaggaactgactggcggtggcaccaccttctccgtcagaaagaccgcttactgtgatgtccacacgcctccaggctgcacccggaggcctctgaatatttacggggatgtcgaaatgaaaaatggcgtctgtcgaaaagagagctcggttaaaacggtcaggtccacatccaaggtcaggaagaaggcaaaaaaggctaagaaagctctggctgagccctgcgcggtcctgccgaccgtgtgcgctccttatattcccccgcagaggttaaataggattgcgaatcaggtggccattcagcggaagaagcagtttgtggagcgagcccacagctactggctgctcaagcggctgtccaggaacggggcccccctgctgcggcggctgcagtccagcctgcagtctcagcgaagctcacagcagagagaaaatgatgaggagatgaaggctgccaaagagaagctgaagtactggcagcggctgcggcacgacctggagcgcgctcgcctgctgatcgagctgctgcgcaagcgggagaagctcaagcgtgagcaggtgaaggtggagcaggtcgccatggagctgcggctgaccccgctgacggtgctgctgcgctcagtgctggaccagctgcaagacaaggaccccgccaggatatttgcgcagcccgtgagtctgaaggaggtaccagattatttggatcacattaaacatcccatggactttgccacaatgaggaaacggttagaagctcaagggtataaaaacctccatgagtttgaggaggattttgatctcattatagataactgcatgaagtacaatgccagggacaccgtgttctatagagccgcggtgaggctgcgcgatcagggaggtgttgttctgaggcaggcccggcgcgaggtggacagcatcggcttggaagaggcctcggggatgcacctgcctgagcggcctgctgcggcaccgcggcggcctttctcctgggaagacgtggacaggttgctggaccccgccaacagagcccacctgggcctggaggagcagctgagagagctgctggacatgctcgacctcacctgcgctatgaagtccagcggctcccggagcaagcgggcaaagctgctcaaaaaggaaattgcccttctccgaaacaagctgagccagcagcacagccagcccctgcccacggggccaggcttggaaggcttcgaagaggacggagctgcgctggggccggaggcgggcgaggaaggagataaatctccccctaaacttgaaccatcagatgcattacctcttccttcaaactcggagactaattcagaaccaccaaccctcaaaccagtagaactcaacccagagcagagtaaacttttcaaaagagtcacatttgataatgaatcacatagcgcttgcactcagagcgcactggtaagcggacgccctccagagcccacccgcgccagtagtggcgatgtgccggcggcggcggcctccgcggtggcggagccagcaagcgatgtaaacagacgcacttctgttctcttctgcaaatcgaaaagtgtaagccccccaaagtctgccaagaacactgaaacccagccaacttctcctcagctagggaccaaaacctttttgtctgtagtccttccgaggttggagactcttctgcagccaaggaaaaggtcgcggagcacatgcggagactccgaggtggaggaggagtccccaggaaagcgcctggacgcaggtctcaccaacggctttgggggtgcgaggagcgagcaggagccgggcggcggcctggggaggaaggccacaccccgacgacgctgtgcctccgagtccagcatctcctccagcaacagcccgctctgcgactcgagctttaatgcgcccaaatgtgggcggggcaaaccggctcttgtgcgacggcacacgctggaggaccgcagtgagctgatctcctgcatcgagaatgggaactacgccaaggcggccaggatcgcagccgaagtcggccagagcagcatgtggatctccactgatgccgccgcctcggtgctggagcctctgaaggtggtgtgggccaagtgcagcggctacccctcctacccggcactgatcatcgaccccaagatgccccgtgtgcctggccaccacaacggcgtcaccatcccggccccacccctggacgtgctgaagattggggagcacatgcagaccaagtctgatgagaagctgttcctcgttctcttttttgataataagagaagttggcagtggcttcctaagtccaaaatggttccccttggtattgacgaaactatagacaagttaaagatgatggaagggaggaattccagcatccggaaggccgtgcggatcgcttttgaccgcgccatgaaccacctgagccgcgtccacggggagccgaccagcgacctcagtgacattgactgacggcccggccgccagcgcgggtcttgtccatagtgttgataagctgtacatgtttgtatattgttcaaaacttaacttattctgatttttagttatagctctttaattctttttccccggggaggggggaggttttatttccaagttttctaggaacccatctccgtctgggcgctgtgagtggggtgggcacgtccgggcagcccagtgcgtctgtcgcacgtccccaggccgtgctgctggcgtcactttctttgatatgtagctttttcttaaagacttttgaatgtttaataattttgtaaatcatgctctttacacagagtaccacttatttaataagacgggatgtaaatttacaatgacaaatgtgtattttaagaaagaaaatgacattattttgaatggtactttgtggaaagaggggagaataaagttatgctgtgtacatcacttgcagatcaccaaaaacactccgctgcccgtgaccgccggtgggtgtgtccccgctcccgtcgtcccgcccacctcaaaccccgcaggtgtgcctcccagcggattatttattgtagaaagtgtattcatttgctttataatgaaaaatacatttgcaaaggtatattgatatgcatttttatacaggcacataaaaattcaacttggcttgggagcagaatgcattgcattgtataaatgactctggcctgtgtgtactttgattttataacttgtaatcttttgtttacaatgaggggctttctgtaacttgttttaatttagaacactttggtagcaatagaaactttggatacatttttgtatggtacctgtgatgtatatagaattagtactttatttttatttttaagaggtaaagcattatgttggggaaagtagggtgggtttccaaatttgcattttttatattaaaaataaagtc

SEQ ID NO: 112234 - DNA, 4894 bp, Homo sapiens
  Payload ID: 1981
  Gene Symbol: BRD2
  Gene Name: bromodomain containing 2
  Uniprot ID: P25440
  ENST ID: ENST00000374825
  CDS Start-End: 1702-4107
ggactgcgggataggaagctggggatatggacaagcagcagcgttatagcgctctgggtttcgggacataggcctgggccatgcggcccccttggccccttggcgcgacccccaggaacgttcggaaagctggtcctcgtggctgggggaaaggcggggggtgggggggaagcgggcacgtgaccccggtcagccaatctgggtgctgctgacgtggccgcgcggccccgatgctctccccacccccccagcccgttcgggaagggaggggctgggggctacgccccctcccccagcacggcttcgttttctgggggggggttgacaccccggattacataccccgtaccaagccgagggcaactttggaggccccctggaaggctttaggatccagattcttcgctgctgctgccttaccgccgagaaccaccacccgccaggcgtcttgcggccacacccctggcgggttcaggcaggctacgcccacgcgacccctcccgtttccctgctttggccaatggaggagctacgaatggcacgacctgctcgagcttggcagtctccagttgggctgtgcatggaagcttgggaagactttgttggaaggggaggcggggagagagtgctggaggctctggggcgatggcttccgcacctcttccaaccaccctctttccctggagtcggcggaccacagctcagccaattggcttggagatgtggcgggttgccacttccctgtgggtctctgcggcactcttctgcctggtgactgacaccttggaaatgaagtttatgacgtcatcgttgcggctggccaatagaaaaagctcccgcggagaggtgttccttccccttcgactcagcttcttcacccgcgtgagcgagcgcgcgcgcgcggagggggtggggaaaagctcaagcagggtggcgcgcatgagcggcgaagctcctcctccccgcctatatataaagggctggcgcggggctcggcggcgccatttcgtgctggagtggagcagcctctagaacgagctggaggattctgcctaccgatacagagccttcgagtcgtccggggccgccattacaatccacctccatccgcttggaaatggccttcgtcccggcctatgactggtcccagcgggcagtacagaccccctagaagcccctggagctcccctttttcgggccccgcccaatcctcggagtctgtccaccccctctactccgccctcaagaggatttcaaagatggaggcggcggctccctaaaccacttttcgtgttcatccgcctccatccgagatcgaaacgggacctcgtcggccccgtaggggcccgacaagaagagggaatccctgcagaccaacagcgggctatattgacgacggtgtctgagatcggggaccgtcttttgaagagtcagtccctccttagttgcccgcctcagctgaggccgccgccattttcttgctgtccgccgtctgcagagcgcgccaagctgcccggagctctccgagaggccccaaagagactgctttcgtgccggccaggcagggggtttgtcgcctggaggcccaagaggaacggcctccccccaacttagcgggttatgctggaccgggcggtgaggggaaccgaggccacccggactttccgcggctgagggcagcgccggttccttgcggtcaagatgctgcaaaacgtgactccccacaataagctccctggggaagggaatgcagggttgctggggctgggcccagaagcagcagcaccagggaagaggattcgaaaaccctctctcttgtatgagggctttgagagccccacaatggcttcggtgcctgctttgcaacttacccctgccaacccaccacccccggaggtgtccaatcccaaaaagccaggacgagttaccaaccagctgcaatacctacacaaggtagtgatgaaggctctgtggaaacatcagttcgcatggccattccggcagcctgtggatgctgtcaaactgggtctaccggattatcacaaaattataaaacagcctatggacatgggtactattaagaggagacttgaaaacaattattattgggctgcttcagagtgtatgcaagattttaataccatgttcaccaactgttacatttacaacaagcccactgatgatattgtcctaatggcacaaacgctggaaaagatattcctacagaaggttgcatcaatgccacaagaagaacaagagctggtagtgaccatccctaagaacagccacaagaagggggccaagttggcagcgctccagggcagtgttaccagtgcccatcaggtgcctgccgtctcttctgtgtcacacacagccctgtatactcctccacctgagatacctaccactgtcctcaacattccccacccatcagtcatttcctctccacttctcaagtccttgcactctgctggacccccgctccttgctgttactgcagctcctccagcccagccccttgccaagaaaaaaggcgtaaagcggaaagcagatactaccacccctacacctacagccatcttggctcctggttctccagctagccctcctgggagtcttgagcctaaggcagcacggcttccccctatgcgtagagagagtggtcgccccatcaagcccccacgcaaagacttgcctgactctcagcaacaacaccagagctctaagaaaggaaagctttcagaacagttaaaacattgcaatggcattttgaaggagttactctctaagaagcatgctgcctatgcttggcctttctataaaccagtggatgcttctgcacttggcctgcatgactaccatgacatcattaagcaccccatggacctcagcactgtcaagcggaagatggagaaccgtgattaccgggatgcacaggagtttgctgctgatgtacggcttatgttctccaactgctataagtacaatcccccagatcacgatgttgtggcaatggcacgaaagctacaggatgtatttgagttccgttatgccaagatgccagatgaaccactagaaccagggcctttaccagtctctactgccatgccccctggcttggccaaatcgtcttcagagtcctccagtgaggaaagtagcagtgagagctcctctgaggaagaggaggaggaagatgaggaggacgaggaggaagaagagagtgaaagctcagactcagaggaagaaagggctcatcgcttagcagaactacaggaacagcttcgggcagtacatgaacaactggctgctctgtcccagggtccaatatccaagcccaagaggaaaagagagaaaaaagagaaaaagaagaaacggaaggcagagaagcatcgaggccgagctggggccgatgaagatgacaaggggcctagggcaccccgcccacctcaacctaagaagtccaagaaagcaagtggcagtgggggtggcagtgctgctttaggcccttctggctttggaccttctggaggaagtggcaccaagctccccaaaaaggccacaaagacagccccacctgccctgcctacaggttatgattcagaggaggaggaagagagcaggcccatgagttacgatgagaagcggcagctgagcctggacatcaacaaattacctggggagaagctgggccgagttgtgcatataatccaagccagggagccctctttacgtgattcaaacccagaagagattgagattgattttgaaacactcaagccatccacacttagagagcttgagcgctatgtcctttcctgcctacgtaagaaaccccggaagccctacaccattaagaagcctgtgggaaagacaaaggaggaactggctttggagaaaaagcgggaattagaaaagcggttacaagatgtcagcggacagctcaattctactaaaaagccccccaagaaagcgaatgagaaaacagagtcatcctctgcacagcaagtagcagtgtcacgccttagcgcttccagctccagctcagattccagctcctcctcttcctcgtcgtcgtcttcagacaccagtgattcagactcaggctaaggggtcaggccagatggggcaggaaggctccgcaggaccggacccctagaccaccctgccccacctgccccttccccctttgctgtgacacttcttcatctcacccccccccgcccccctctaggagagctggctctgcagtgggggagggatgcagggacatttactgaaggagggacatggacaaaacaacattgaattcccagccccattggggagtgatctcttggacacagagcccccattcaaaatggggcagggcaagggtgggagtgtgcaaagccctgatctggagttacctgaggccacagctgccctattcacttctaagggccctgttttgagattgtttgttctaatttattttaagctaggtaaggctggggggagggtggggccgtggtcccctcagcctccatggggagggaagaagggggagctctttttttacgttgatttttttttttctactctgttttccctttttccttccgctccatttggggccctgggggtttcagtcatctccccatttggtcccctggactgtctttgttgattctaacttgtaaataaagaaaatattattcaagttttgagttaccttaatatttgcttttgtagtgtttcaaaaggaacatcataagaattgtcttgataattttgagggaaatattactgcagtgagaaaaggcaatagctaacctataattggattgtcttaatttttaaaccagtaggcttttgctgtgtttttaataaagtaaatatgacttttgtaaattga

SEQ ID NO: 112235 - DNA, 4807 bp, Homo sapiens
  Payload ID: 1981
  Gene Symbol: BRD2
  Gene Name: bromodomain containing 2
  Uniprot ID: P25440
  ENST ID: ENST00000374831
  CDS Start-End: 1615-4020
ggagggggagggctagtctgagccgcagccgccgcctcctccgctcgccctcctccctggcgctgaccgatggaccagccgctccgtggggaggactccggaccctggtgggggggcgggggggttctttcgcccccgtggcggagggcccctgagaggcggatacgggtgtgcctttgggggtgatgtggcgtgtggggggaaaggtccgagctcgcctggagggggagggtttttcccttaagtcatccctcccaggacttgctttttctgctctgagccggacgccggaatggagtttgaggaagagattcttcgctgctgctgccttaccgccgagaaccaccacccgccaggcgtcttgcggccacacccctggcgggttcaggcaggctacgcccacgcgacccctcccgtttccctgctttggccaatggaggagctacgaatggcacgacctgctcgagcttggcagtctccagttgggctgtgcatggaagcttgggaagactttgttggaaggggaggcggggagagagtgctggaggctctggggcgatggcttccgcacctcttccaaccaccctctttccctggagtcggcggaccacagctcagccaattggcttggagatgtggcgggttgccacttccctgtgggtctctgcggcactcttctgcctggtgactgacaccttggaaatgaagtttatgacgtcatcgttgcggctggccaatagaaaaagctcccgcggagaggtgttccttccccttcgactcagcttcttcacccgcgtgagcgagcgcgcgcgcgcggagggggtggggaaaagctcaagcagggtggcgcgcatgagcggcgaagctcctcctccccgcctatatataaagggctggcgcggggctcggcggcgccatttcgtgctggagtggagcagcctctagaacgagctggaggattctgcctaccgatacagagccttcgagtcgtccggggccgccattacaatccacctccatccgcttggaaatggccttcgtcccggcctatgactggtcccagcgggcagtacagaccccctagaagcccctggagctcccctttttcgggccccgcccaatcctcggagtctgtccaccccctctactccgccctcaagaggatttcaaagatggaggcggcggctccctaaaccacttttcgtgttcatccgcctccatccgagatcgaaacgggacctcgtcggccccgtaggggcccgacaagaagagggaatccctgcagaccaacagcgggctatattgacgacggtgtctgagatcggggaccgtcttttgaagagtcagtccctccttagttgcccgcctcagctgaggccgccgccattttcttgctgtccgccgtctgcagagcgcgccaagctgcccggagctctccgagaggccccaaagagactgctttcgtgccggccaggcagggggtttgtcgcctggaggcccaagaggaacggcctccccccaacttagcgggttatgctggaccgggcggtgaggggaaccgaggccacccggactttccgcggctgagggcagcgccggttccttgcggtcaagatgctgcaaaacgtgactccccacaataagctccctggggaagggaatgcagggttgctggggctgggcccagaagcagcagcaccagggaagaggattcgaaaaccctctctcttgtatgagggctttgagagccccacaatggcttcggtgcctgctttgcaacttacccctgccaacccaccacccccggaggtgtccaatcccaaaaagccaggacgagttaccaaccagctgcaatacctacacaaggtagtgatgaaggctctgtggaaacatcagttcgcatggccattccggcagcctgtggatgctgtcaaactgggtctaccggattatcacaaaattataaaacagcctatggacatgggtactattaagaggagacttgaaaacaattattattgggctgcttcagagtgtatgcaagattttaataccatgttcaccaactgttacatttacaacaagcccactgatgatattgtcctaatggcacaaacgctggaaaagatattcctacagaaggttgcatcaatgccacaagaagaacaagagctggtagtgaccatccctaagaacagccacaagaagggggccaagttggcagcgctccagggcagtgttaccagtgcccatcaggtgcctgccgtctcttctgtgtcacacacagccctgtatactcctccacctgagatacctaccactgtcctcaacattccccacccatcagtcatttcctctccacttctcaagtccttgcactctgctggacccccgctccttgctgttactgcagctcctccagcccagccccttgccaagaaaaaaggcgtaaagcggaaagcagatactaccacccctacacctacagccatcttggctcctggttctccagctagccctcctgggagtcttgagcctaaggcagcacggcttccccctatgcgtagagagagtggtcgccccatcaagcccccacgcaaagacttgcctgactctcagcaacaacaccagagctctaagaaaggaaagctttcagaacagttaaaacattgcaatggcattttgaaggagttactctctaagaagcatgctgcctatgcttggcctttctataaaccagtggatgcttctgcacttggcctgcatgactaccatgacatcattaagcaccccatggacctcagcactgtcaagcggaagatggagaaccgtgattaccgggatgcacaggagtttgctgctgatgtacggcttatgttctccaactgctataagtacaatcccccagatcacgatgttgtggcaatggcacgaaagctacaggatgtatttgagttccgttatgccaagatgccagatgaaccactagaaccagggcctttaccagtctctactgccatgccccctggcttggccaaatcgtcttcagagtcctccagtgaggaaagtagcagtgagagctcctctgaggaagaggaggaggaagatgaggaggacgaggaggaagaagagagtgaaagctcagactcagaggaagaaagggctcatcgcttagcagaactacaggaacagcttcgggcagtacatgaacaactggctgctctgtcccagggtccaatatccaagcccaagaggaaaagagagaaaaaagagaaaaagaagaaacggaaggcagagaagcatcgaggccgagctggggccgatgaagatgacaaggggcctagggcaccccgcccacctcaacctaagaagtccaagaaagcaagtggcagtgggggtggcagtgctgctttaggcccttctggctttggaccttctggaggaagtggcaccaagctccccaaaaaggccacaaagacagccccacctgccctgcctacaggttatgattcagaggaggaggaagagagcaggcccatgagttacgatgagaagcggcagctgagcctggacatcaacaaattacctggggagaagctgggccgagttgtgcatataatccaagccagggagccctctttacgtgattcaaacccagaagagattgagattgattttgaaacactcaagccatccacacttagagagcttgagcgctatgtcctttcctgcctacgtaagaaaccccggaagccctacaccattaagaagcctgtgggaaagacaaaggaggaactggctttggagaaaaagcgggaattagaaaagcggttacaagatgtcagcggacagctcaattctactaaaaagccccccaagaaagcgaatgagaaaacagagtcatcctctgcacagcaagtagcagtgtcacgccttagcgcttccagctccagctcagattccagctcctcctcttcctcgtcgtcgtcttcagacaccagtgattcagactcaggctaaggggtcaggccagatggggcaggaaggctccgcaggaccggacccctagaccaccctgccccacctgccccttccccctttgctgtgacacttcttcatctcacccccccccgcccccctctaggagagctggctctgcagtgggggagggatgcagggacatttactgaaggagggacatggacaaaacaacattgaattcccagccccattggggagtgatctcttggacacagagcccccattcaaaatggggcagggcaagggtgggagtgtgcaaagccctgatctggagttacctgaggccacagctgccctattcacttctaagggccctgttttgagattgtttgttctaatttattttaagctaggtaaggctggggggagggtggggccgtggtcccctcagcctccatggggagggaagaagggggagctctttttttacgttgatttttttttttctactctgttttccctttttccttccgctccatttggggccctgggggtttcagtcatctccccatttggtcccctggactgtctttgttgattctaacttgtaaataaagaaaatattattcaagttttgagttaccttaatatttgcttttgtagtgtttcaaaaggaacatcataagaattgtcttgataattttgagggaaatattactgcagtgagaaaaggcaatagctaacctataattggattgtcttaatttttaaaccagtaggcttttgctgtgtttttaataaagtaaatatgacttttgtaaattga

SEQ ID NO: 112236 - DNA, 4807 bp, Homo sapiens
  Payload ID: 1981
  Gene Symbol: BRD2
  Gene Name: bromodomain containing 2
  Uniprot ID: P25440
  ENST ID: ENST00000383108
  CDS Start-End: 1615-4020
ggagggggagggctagtctgagccgcagccgccgcctcctccgctcgccctcctccctggcgctgaccgatggaccagccgctccgtggggaggactccggaccctggtgggggggcgggggggttctttcgcccccgtggcggagggcccctgagaggcggatacgggtgtgcctttgggggtgatgtggcgtgtggggggaaaggtccgagctcgcctggagggggagggtttttcccttaagtcatccctcccaggacttgctttttctgctctgagccggacgccggaatggagtttgaggaagagattcttcgctgctgctgccttaccgccgagaaccaccacccgccaggcgtcttgcggccacacccctggcgggttcaggcaggctacgcccacgcgacccctcccgtttccctgctttggccaatggaggagctacgaatggcacgacctgctcgagcttggcagtctccagttgggctgtgcatggaagcttgggaagactttgttggaaggggaggcggggagagagtgctggaggctctggggcgatggcttccgcacctcttccaaccaccctctttccctggagtcggcggaccacagctcagccaattggcttggagatgtggcgggttgccacttccctgtgggtctctgcggcactcttctgcctggtgactgacaccttggaaatgaagtttatgacgtcatcgttgcggctggccaatagaaaaagctcccgcggagaggtgttccttccccttcgactcagcttcttcacccgcgtgagcgagcgcgcgcgcgcggagggggtggggaaaatctcaagcagggtggcgcgcatgagcggcgaagctcctcctccccgcctatatataaagggctggcgcggggctcggcggcgccatttcgtgctggagtggagcagcctctagaacgagctggaggattctgcctaccgatacagagccttcgagtcgtccggggccgccattacaatccacctccatccgcttggaaatggccttcgtcccggcctatgactggtcccagcgggcagtacagaccccctagaagcccctggagctcccctttttcgggccccgcccaatcctcggagtctgtccaccccctctactccgccctcaagaggatttcaaagatggaggcggcggctccctaaaccacttttcgtgttcatccgcctccatccgagatcgaaacgggacctcgtcggccccgtaggggcccgacaagaagagggaatccctgcagaccaacagcgggctatattgacgacggtgtctgagatcggggaccgtcttttgaagagtcagtccctccttagttgcccgcctcagctgaggccgccgccattttcttgctgtccgccgtctgcagagcgcgccaagctgcccggagctctccgagaggccccaaagagactgctttcgtgccggccaggcagggggtttgtcgcctggaggcccaagaggaacggcctccccccaacttagcgggttatgctggaccgggcggtgaggggaaccgaggccacccggactttccgcggctgagggcagcgccggttccttgcggtcaagatgctgcaaaacgtgactccccacaataagctccctggggaagggaatgcagggttgctggggctgggcccagaagcagcagcaccagggaagaggattcgaaaaccctctctcttgtatgagggctttgagagccccacaatggcttcggtgcctgctttgcaacttacccctgccaacccaccacccccggaggtgtccaatcccaaaaagccaggacgagttaccaaccagctgcaatacctacacaaggtagtgatgaaggctctgtggaaacatcagttcgcatggccattccggcagcctgtggatgctgtcaaactgggtctaccggattatcacaaaattataaaacagcctatggacatgggtactattaagaggagacttgaaaacaattattattgggctgcttcagagtgtatgcaagattttaataccatgttcaccaactgttacatttacaacaagcccactgatgatattgtcctaatggcacaaacgctggaaaagatattcctacagaaggttgcatcaatgccacaagaagaacaagagctggtagtgaccatccctaagaacagccacaagaagggggccaagttggcagcgctccagggcagtgttaccagtgcccatcaggtgcctgccgtctcttctgtgtcacacacagccctctatactcctccacctgagatacctaccactgtcctcaacattccccacccatcagtcatttcctctccacttctcaagtccttgcactctgctggacccccgctccttgctgttactgcagctcctccagcccagccccttgccaagaaaaaaggcgtaaagcggaaagcagatactaccacccctacacctacagccatcttggctcctggttctccagctagccctcctgggagtcttgagcctaaggcagcacggcttccccctatgcgtagagagagtggtcgccccatcaagcccccacgcaaagacttgcctgactctcagcaacaacaccagagctctaagaaaggaaagctttcagaacagttaaaacattgcaatggcattttgaaggagttactctctaagaagcatgctgcctatgcttggcctttctataaaccagtggatgcttctgcacttggcctgcatgactaccatgacatcattaagcaccccatggacctcagcactgtcaagcggaagatggagaaccgtgattaccgggatgcacaggagtttgctgctgatgtacggcttatgttctccaactgctataagtacaatcccccagatcacgatgttgtggcaatggcacgaaagctacaggatgtatttgagttccgttatgccaagatgccagatgaaccactagaaccagggcctttaccagtctctactgccatgccccctggcttggccaaatcgtcttcagagtcctccagtgaggaaagtagcagtgagagctcctctgaggaagaggaggaggaagatgaggaggacgaggaggaagaagagagtgaaagctcagactcagaggaagaaagggctcatcgcttagcagaactacaggaacagcttcgggcagtacatgaacaactggctgctctgtcccagggtccaatatccaagcccaagaggaaaagagagaaaaaagagaaaaagaagaaacggaaggcagagaagcatcgaggccgagctggggccgatgaagatgacaaggggcctagggcaccccgcccacctcaacctaagaagtccaagaaagcaagtggcagtgggggtggcagtgctgctttaggcccttctggctttggaccttctggaggaagtggcaccaagctccccaaaaaggccacaaagacagccccacctgccctgcctacaggttatgattcagaggaggaggaagagagcaggcccatgagttacgatgagaagcggcagctgagcctggacatcaacaaattacctggggagaagctgggccgagttgtgcatataatccaagccagggagccctctttacgtgattcaaacccagaagagattgagattgattttgaaacactcaagccatccacacttagagagcttgagcgctatgtcctttcctgcctacgtaagaaaccccggaagccctacaccattaagaagcctgtgggaaagacaaaggaggaactggctttggagaaaaagcgggaattagaaaagcggttacaagatgtcagcggacagctcaattctactaaaaagccccccaagaaagcgaatgagaaaacagagtcatcctctgcacagcaagtagcagtgtcacgccttagcgcttccagctctagctcagattccagctcctcctcttcctcgtcgtcgtcttcagacaccagtgattcagactcaggctaaggggtcaggccagatggggcaggaaggctccgcaggaccggacccctagaccaccctgccccacctgccccttccccctttgctgtgacacttcttcatctcacccccccctgcccccctctaggagagctggctctgcagtgggggagggatgcagggacatttactgaaggagggacatggacaaaacaacattgaattcccagccccattggggagtgatctcttggacacagagcccccattcaaaatggggcagggcaagggtgggagtgtgcaaagccctgatctggagttacctgaggccatagctgccctattcacttctaagggccctgttttgagattgtttgttctaatttattttaagctaggtaaggctggggggagggtggggccgtggtcccctcagcctccatggggagggaagaagggggagctctttttttacgttgatttttttttttctactctgttttccctttttccttccgctccatttggggccctgggggtttcagtcatctccccatttggtcccctggactgtctttgttgattctaacttgtaaataaagaaaatattattcaagttttgagttaccttaatatttgcttttgtagtgtttcaaaaggaacatcataagaattgtcttgataattttgagggaaatattactgcagtgagaaaaggcaatagctaacctataattggattgtcttaatttttaaaccagtaggcttttgctgtgtttttaataaagtaaatatgacttttgtaaattga

SEQ ID NO: 112237 - DNA, 3467 bp, Homo sapiens
  Payload ID: 1981
  Gene Symbol: BRD2
  Gene Name: bromodomain containing 2
  Uniprot ID: P25440
  ENST ID: ENST00000395287
  CDS Start-End: 170-2680
cccaaagagactgctttcgtgccggccaggcagggggtttgtcgcctggaggcccaagaggaacggcctccccccaacttagcgggttatgctggaccgggcggtgaggggaaccgaggccacccggactttccgcggctgagggcagcgccggttccttgcggtcaagatgctgcaaaacgtgactccccacaataagctccctggggaagggaatgcagggttgctggggctgggcccagaagcagcagcaccagggaagaggattcgaaaaccctctctcttgtatgagggctttgagagccccacaatggcttcggtgcctgctttgcaacttacccctgccaacccaccacccccggaggtgtccaatcccaaaaagccaggacgagttaccaaccagctgcaatacctacacaaggtagtgatgaaggctctgtggaaacatcagttcgcatggccattccggcagcctgtggatgctgtcaaactgggtctaccggattatcacaaaattataaaacagcctatggacatgggtactattaagaggagacttgaaaacaattattattgggctgcttcagagtgtatgcaagattttaataccatgttcaccaactgttacatttacaacaagcccactgatgatattgtcctaatggcacaaacgctggaaaagatattcctacagaaggttgcatcaatgccacaagaagaacaagagctggtagtgaccatccctaagaacagccacaagaagggggccaagttggcagcgctccagggcagtgttaccagtgcccatcaggtgcctgccgtctcttctgtgtcacacacagccctgtatactcctccacctgagatacctaccactgtcctcaacattccccacccatcagtcatttcctctccacttctcaagtccttgcactctgctggacccccgctccttgctgttactgcagctcctccagcccagccccttgccaagaaaaaaggcgtaaagcggaaagcagatactaccacccctacacctacagccatcttggctcctggttctccagctagccctcctgggagtcttgagcctaaggcagcacggcttccccctatgcgtagagagagtggtcgccccatcaagcccccacgcaaagacttgcctgactctcagcaacaacaccagagctctaagaaaggaaagctttcagaacagttaaaacattgcaatggcattttgaaggagttactctctaagaagcatgctgcctatgcttggcctttctataaaccagtggatgcttctgcacttggcctgcatgactaccatgacatcattaagcaccccatggacctcagcactgtcaagcggaagatggagaaccgtgattaccgggatgcacaggagtttgctgctgatgtacggcttatgttctccaactgctataagtacaatcccccagatcacgatgttgtggcaatggcacgaaagctacaggatgtatttgagttccgttatgccaagatgccagatgaaccactagaaccagggcctttaccagtctctactgccatgccccctggcttggccaaatcgtcttcagagtcctccagtgaggaaagtagcagtgagagctcctctgaggaagaggaggaggaagatgaggaggacgaggaggaagaagagagtgaaagctcagactcagaggaagaaagggctcatcgcttagcagaactacaggaacagcttcgggcagtacatgaacaactggctgctctgtcccagggtccaatatccaagcccaagaggaaaagagagaaaaaagagaaaaagaagaaacggaaggcagagaagcatcgaggccgagctggggccgatgaagatgacaaggggcctagggcaccccgcccacctcaacctaagaagtccaagaaagcaagtggcagtgggggtggcagtgctgctttaggcccttctggctttggaccttctggaggaagtggcaccaaactccaggctggagtgcagtggcgtgatctcggcttactgcaacctccacttctcgggttcaagcgattctcctgcctcagcctcccaagtagccaggattacaggctccccaaaaaggccacaaagacagccccacctgccctgcctacaggttatgattcagaggaggaggaagagagcaggcccatgagttacgatgagaagcggcagctgagcctggacatcaacaaattacctggggagaagctgggccgagttgtgcatataatccaagccagggagccctctttacgtgattcaaacccagaagagattgagattgattttgaaacactcaagccatccacacttagagagcttgagcgctatgtcctttcctgcctacgtaagaaaccccggaagccctacaccattaagaagcctgtgggaaagacaaaggaggaactggctttggagaaaaagcgggaattagaaaagcggttacaagatgtcagcggacagctcaattctactaaaaagccccccaagaaagcgaatgagaaaacagagtcatcctctgcacagcaagtagcagtgtcacgccttagcgcttccagctccagctcagattccagctcctcctcttcctcgtcgtcgtcttcagacaccagtgattcagactcaggctaaggggtcaggccagatggggcaggaaggctccgcaggaccggacccctagaccaccctgccccacctgccccttccccctttgctgtgacacttcttcatctcacccccccccgcccccctctaggagagctggctctgcagtgggggagggatgcagggacatttactgaaggagggacatggacaaaacaacattgaattcccagccccattggggagtgatctcttggacacagagcccccattcaaaatggggcagggcaagggtgggagtgtgcaaagccctgatctggagttacctgaggccacagctgccctattcacttctaagggccctgttttgagattgtttgttctaatttattttaagctaggtaaggctggggggagggtggggccgtggtcccctcagcctccatggggagggaagaagggggagctctttttttacgttgatttttttttttctactctgttttccctttttccttccgctccatttggggccctgggggtttcagtcatctccccatttggtcccctggactgtctttgttgattctaacttgtaaataaagaaaatattattcaagttttgagttaccttaatatttgcttttgtagtgtttcaaaaggaacatcataagaattgtcttgataattttgagggaaatattactgcagtgagaaaaggcaatagctaacctataattggattgtcttaatttttaaaccagtaggcttttgctgtgtttttaataaagtaaatatgacttttgtaaattga

SEQ ID NO: 112238 - DNA, 3467 bp, Homo sapiens
  Payload ID: 1981
  Gene Symbol: BRD2
  Gene Name: bromodomain containing 2
  Uniprot ID: P25440
  ENST ID: ENST00000399527
  CDS Start-End: 170-2680
cccaaagagactgctttcgtgccggccaggcagggggtttgtcgcctggaggcccaagaggaacggcctccccccaacttagcgggttatgctggaccgggcggtgaggggaaccgaggccacccggactttccgcggctgagggcagcgccggttccttgcggtcaagatgctgcaaaacgtgactccccacaataagctccctggggaagggaatgcagggttgctggggctgggcccagaagcagcagcaccagggaaaaggattcgaaaaccctctctcttgtatgagggctttgagagccccacaatggcttcggtgcctgctttgcaacttacccctgccaacccaccacccccggaggtgtccaatcccaaaaagccaggacgagttaccaaccagctgcaatacctacacaaggtagtgatgaaggctctgtggaaacatcagttcgcatggccattccggcagcctgtggatgctgtcaaactgggtctaccggattatcacaaaattataaaacagcctatggacatgggtactattaagaggagacttgaaaacaattattattgggctgcttcagagtgtatgcaagattttaataccatgttcaccaactgttacatttacaacaagcccactgatgatattgtcctaatggcacaaacgctggaaaagatattcctacagaaggttgcatcaatgccacaagaagaacaagagctggtagtgaccatccctaagaacagccacaagaagggggccaagttggcagcgctccagggcagtgttaccagtgcccatcaggtgcctgccgtctcttctgtgtcacacacagccctgtatactcctccacctgagatacctaccactgtcctcaacattccccacccatcagtcatttcctctccacttctcaagtccttgcactctgctggacccccgctccttgctgttactgcagctcctccagcccagccccttgccaagaaaaaaggcgtaaagcggaaagcagatactaccacccctacacctacagccatcttggctcctggttctccagctagccctcctgggagtcttgagcctaaggcagcacggcttccccctatgcgtagagagagtggtcgccccatcaagcccccacgcaaagacttgcctgactctcagcaacaacaccagagctctaagaaaggaaagctttcagaacagttaaaacattgcaatggcattttgaaggagttactctctaagaagcatgctgcctatgcttggcctttctataaaccagtggatgcttctgcacttggcctgcatgactaccatgacatcattaagcaccccatggacctcagcactgtcaagcggaagatggagaaccgtgattaccgggatgcacaggagtttgctgctgatgtacggcttatgttctccaactgctataagtacaatcccccagatcacgatgttgtggcaatggcacgaaagctacaggatgtatttgagttccgttatgccaagatgccagatgaaccactagaaccagggcctttaccagtctctactgccatgccccctggcttggccaaatcgtcttcagagtcctccagtgaggaaagtagcagtgagagctcctctgaggaagaggaggaggaagatgaggaggacgaggaggaagaagagagtgaaagctcagactcagaggaagaaagggctcatcgcttagcagaactacaggaacagcttcgggcagtacatgaacaactggctgctctgtcccagggtccaatatccaagcccaagaggaaaagagagaaaaaagagaaaaagaagaaacggaaggcagagaagcatcgaggccgagctggggccgatgaagatgacaaggggcctagggcaccccgcccacctcaacctaagaagtccaagaaagcaagtggcagtgggggtggcagtgctgctttaggcccttctggctttggaccttctggaggaagtggcaccaaactccaggctggagtgcagtggcgtgatctcggcttactgcaacctccacttctcgggttcaagcgattctcctgcctcagcctcccaagtagccaggattacaggctccccaaaaaggccacaaagacagccccacctgccctgcctacaggttatgattcagaggaggaggaagagagcaggcccatgagttacgatgagaagcggcagctgagcctggacatcaacaaattacctggggagaagctgggccgagttgtgcatataatccaagccagggagccctctttacgtgattcaaacccagaagagattgagattgattttgaaacactcaagccatccacacttagagagcttgagcgctatgtcctttcctgcctacgtaagaaaccccggaagccctacaccattaagaagcctgtgggaaagacaaaggaggaactggctttggagaaaaagcgggaattagaaaagcggttacaagatgtcagcggacagctcaattctactaaaaagccccccaagaaagcgaatgagaaaacagagtcatcctctgcacagcaagtagcagtgtcacgccttagcgcttccagctccagctcagattccagctcctcctcttcctcgtcgtcgtcttcagacaccagtgattcagactcaggctaaggggtcaggccagatggggcaggaaggctccgcaggaccggacccctagaccaccctgccccacctgccccttccccctttgctgtgacacttcttcatctcacccccccctgcccccctctaggagagctggctctgcagtgggggagggatgcagggacatttactgaaggagggacatggacaaaacaacattgaattcccagccccattggggagtgatctcttggacacagagcccccattcaaaatggggcagggcaagggtgggagtgtgcaaagccctgatctggagttacctgaggccatagctgccctattcacttctaagggccctgttttgagattgtttgttctaatttattttaagctaggtaaggctggggggagggtggggccgtggtcccctcagcctccatggggagggaagaagggggagctctttttttacgttgatttttttttttctactctgttttccctttttccttccgctccatttggggccctgggggtttcagtcatctccccatttggtcccctggactgtctttgttgattctaacttgtaaataaagaaaatattattcaagttttgagttaccttaatatttgcttttgtagtgtttcaaaaggaacatcataagaattgtcttgataattttgagggaaatattactgcagtgagaaaaggcaatagctaacctataattggattgtcttaatttttaaaccagtaggcttttgctgtgtttttaataaagtaaatatgacttttgtaaattga

SEQ ID NO: 112239 - DNA, 4807 bp, Homo sapiens
  Payload ID: 1981
  Gene Symbol: BRD2
  Gene Name: bromodomain containing 2
  Uniprot ID: P25440
  ENST ID: ENST00000399528
  CDS Start-End: 1615-4020
ggagggggagggctagtctgagccgcagccgccgcctcctccgctcgccctcctccctggcgctgaccgatggaccagccgctccgtggggaggactccggaccctggtgggggggcgggggggttctttcgcccccgtggcggagggcccctgagaggcggatacgggtgtgcctttgggggtgatgtggcgtgtggggggaaaggtccgagctcgcctggagggggagggtttttcccttaagtcatccctcccaggacttgctttttctgctctgagccggacgccggaatggagtttgaggaagagattcttcgctgctgctgccttaccgccgagaaccaccacccgccaggcgtcttgcggccacacccctggcgggttcaggcaggctacgcccacgcgacccctcccgtttccctgctttggccaatggaggagctacgaatggcacgacctgctcgagcttggcagtctccagttgggctgtgcatggaagcttgggaagactttgttggaaggggaggcggggagagagtgctggaggctctggggcgatggcttccgcacctcttccaaccaccctctttccctggagtcggcggaccacagctcagccaattggcttggagatgtggcgggttgccacttccctgtgggtctctgcggcactcttctgcctggtgactgacaccttggaaatgaagtttatgacgtcatcgttgcggctggccaatagaaaaagctcccgcggagaggtgttccttccccttcgactcagcttcttcacccgcgtgagcgagcgcgcgcgcgcggagggggtggggaaaatctcaagcagggtggcgcgcatgagcggcgaagctcctcctccccgcctatatataaagggctggcgcggggctcggcggcgccatttcgtgctggagtggagcagcctctagaacgagctggaggattctgcctaccgatacagagccttcgagtcgtccggggccgccattacaatccacctccatccgcttggaaatggccttcgtcccggcctatgactggtcccagcgggcagtacagaccccctagaagcccctggagctcccctttttcgggccccgcccaatcctcggagtctgtccaccccctctactccgccctcaagaggatttcaaagatggaggcggcggctccctaaaccacttttcgtgttcatccgcctccatccgagatcgaaacgggacctcgtcggccccgtaggggcccgacaagaagagggaatccctgcagaccaacagcgggctatattgacgacggtgtctgagatcggggaccgtcttttgaagagtcagtccctccttagttgcccgcctcagctgaggccgccgccattttcttgctgtccgccgtctgcagagcgcgccaagctgcccggagctctccgagaggccccaaagagactgctttcgtgccggccaggcagggggtttgtcgcctggaggcccaagaggaacggcctccccccaacttagcgggttatgctggaccgggcggtgaggggaaccgaggccacccggactttccgcggctgagggcagcgccggttccttgcggtcaagatgctgcaaaacgtgactccccacaataagctccctggggaagggaatgcagggttgctggggctgggcccagaagcagcagcaccagggaaaaggattcgaaaaccctctctcttgtatgagggctttgagagccccacaatggcttcggtgcctgctttgcaacttacccctgccaacccaccacccccggaggtgtccaatcccaaaaagccaggacgagttaccaaccagctgcaatacctacacaaggtagtgatgaaggctctgtggaaacatcagttcgcatggccattccggcagcctgtggatgctgtcaaactgggtctaccggattatcacaaaattataaaacagcctatggacatgggtactattaagaggagacttgaaaacaattattattgggctgcttcagagtgtatgcaagattttaataccatgttcaccaactgttacatttacaacaagcccactgatgatattgtcctaatggcacaaacgctggaaaagatattcctacagaaggttgcatcaatgccacaagaagaacaagagctggtagtgaccatccctaagaacagccacaagaagggggccaagttggcagcgctccagggcagtgttaccagtgcccatcaggtgcctgccgtctcttctgtgtcacacacagccctgtatactcctccacctgagatacctaccactgtcctcaacattccccacccatcagtcatttcctctccacttctcaagtccttgcactctgctggacccccgctccttgctgttactgcagctcctccagcccagccccttgccaagaaaaaaggcgtaaagcggaaagcagatactaccacccctacacctacagccatcttggctcctggttctccagctagccctcctgggagtcttgagcctaaggcagcacggcttccccctatgcgtagagagagtggtcgccccatcaagcccccacgcaaagacttgcctgactctcagcaacaacaccagagctctaagaaaggaaagctttcagaacagttaaaacattgcaatggcattttgaaggagttactctctaagaagcatgctgcctatgcttggcctttctataaaccagtggatgcttctgcacttggcctgcatgactaccatgacatcattaagcaccccatggacctcagcactgtcaagcggaagatggagaaccgtgattaccgggatgcacaggagtttgctgctgatgtacggcttatgttctccaactgctataagtacaatcccccagatcacgatgttgtggcaatggcacgaaagctacaggatgtatttgagttccgttatgccaagatgccagatgaaccactagaaccagggcctttaccagtctctactgccatgccccctggcttggccaaatcgtcttcagagtcctccagtgaggaaagtagcagtgagagctcctctgaggaagaggaggaggaagatgaggaggacgaggaggaagaagagagtgaaagctcagactcagaggaagaaagggctcatcgcttagcagaactacaggaacagcttcgggcagtacatgaacaactggctgctctgtcccagggtccaatatccaagcccaagaggaaaagagagaaaaaagagaaaaagaagaaacggaaggcagagaagcatcgaggccgagctggggccgatgaagatgacaaggggcctagggcaccccgcccacctcaacctaagaagtccaagaaagcaagtggcagtgggggtggcagtgctgctttaggcccttctggctttggaccttctggaggaagtggcaccaagctccccaaaaaggccacaaagacagccccacctgccctgcctacaggttatgattcagaggaggaggaagagagcaggcccatgagttacgatgagaagcggcagctgagcctggacatcaacaaattacctggggagaagctgggccgagttgtgcatataatccaagccagggagccctctttacgtgattcaaacccagaagagattgagattgattttgaaacactcaagccatccacacttagagagcttgagcgctatgtcctttcctgcctacgtaagaaaccccggaagccctacaccattaagaagcctgtgggaaagacaaaggaggaactggctttggagaaaaagcgggaattagaaaagcggttacaagatgtcagcggacagctcaattctactaaaaagccccccaagaaagcgaatgagaaaacagagtcatcctctgcacagcaagtagcagtgtcacgccttagcgcttccagctccagctcagattccagctcctcctcttcctcgtcgtcgtcttcagacaccagtgattcagactcaggctaaggggtcaggccagatggggcaggaaggctccgcaggaccggacccctagaccaccctgccccacctgccccttccccctttgctgtgacacttcttcatctcacccccccctgcccccctctaggagagctggctctgcagtgggggagggatgcagggacatttactgaaggagggacatggacaaaacaacattgaattcccagccccattggggagtgatctcttggacacagagcccccattcaaaatggggcagggcaagggtgggagtgtgcaaagccctgatctggagttacctgaggccatagctgccctattcacttctaagggccctgttttgagattgtttgttctaatttattttaagctaggtaaggctggggggagggtggggccgtggtcccctcagcctccatggggagggaagaagggggagctctttttttacgttgatttttttttttctactctgttttccctttttccttccgctccatttggggccctgggggtttcagtcatctccccatttggtcccctggactgtctttgttgattctaacttgtaaataaagaaaatattattcaagttttgagttaccttaatatttgcttttgtagtgtttcaaaaggaacatcataagaattgtcttgataattttgagggaaatattactgcagtgagaaaaggcaatagctaacctataattggattgtcttaatttttaaaccagtaggcttttgctgtgtttttaataaagtaaatatgacttttgtaaattga

SEQ ID NO: 112240 - DNA, 4894 bp, Homo sapiens
  Payload ID: 1981
  Gene Symbol: BRD2
  Gene Name: bromodomain containing 2
  Uniprot ID: P25440
  ENST ID: ENST00000399529
  CDS Start-End: 1702-4107
ggactgcgggataggaagctggggatatggacaagcagcagcgttatagcgctctgggtttcgggacataggcctgggccatgcggcccccttggccccttggcgcgacccccaggaacgttcggaaagctggtcctcgtggctgggggaaaggcggggggtgggggggaagcgggcacgtgaccccggtcagccaatctgggtgctgctgacgtggccgcgcggccccgatgctctccccacccccccagcccgttcgggaagggaggggctgggggctacgccccctcccccagcacggcttcgttttctgggggggggttgacaccccggattacataccccgtaccaagccgagggcaactttggaggccccctggaaggctttaggatccagattcttcgctgctgctgccttaccgccgagaaccaccacccgccaggcgtcttgcggccacacccctggcgggttcaggcaggctacgcccacgcgacccctcccgtttccctgctttggccaatggaggagctacgaatggcacgacctgctcgagcttggcagtctccagttgggctgtgcatggaagcttgggaagactttgttggaaggggaggcggggagagagtgctggaggctctggggcgatggcttccgcacctcttccaaccaccctctttccctggagtcggcggaccacagctcagccaattggcttggagatgtggcgggttgccacttccctgtgggtctctgcggcactcttctgcctggtgactgacaccttggaaatgaagtttatgacgtcatcgttgcggctggccaatagaaaaagctcccgcggagaggtgttccttccccttcgactcagcttcttcacccgcgtgagcgagcgcgcgcgcgcggagggggtggggaaaatctcaagcagggtggcgcgcatgagcggcgaagctcctcctccccgcctatatataaagggctggcgcggggctcggcggcgccatttcgtgctggagtggagcagcctctagaacgagctggaggattctgcctaccgatacagagccttcgagtcgtccggggccgccattacaatccacctccatccgcttggaaatggccttcgtcccggcctatgactggtcccagcgggcagtacagaccccctagaagcccctggagctcccctttttcgggccccgcccaatcctcggagtctgtccaccccctctactccgccctcaagaggatttcaaagatggaggcggcggctccctaaaccacttttcgtgttcatccgcctccatccgagatcgaaacgggacctcgtcggccccgtaggggcccgacaagaagagggaatccctgcagaccaacagcgggctatattgacgacggtgtctgagatcggggaccgtcttttgaagagtcagtccctccttagttgcccgcctcagctgaggccgccgccattttcttgctgtccgccgtctgcagagcgcgccaagctgcccggagctctccgagaggccccaaagagactgctttcgtgccggccaggcagggggtttgtcgcctggaggcccaagaggaacggcctccccccaacttagcgggttatgctggaccgggcggtgaggggaaccgaggccacccggactttccgcggctgagggcagcgccggttccttgcggtcaagatgctgcaaaacgtgactccccacaataagctccctggggaagggaatgcagggttgctggggctgggcccagaagcagcagcaccagggaaaaggattcgaaaaccctctctcttgtatgagggctttgagagccccacaatggcttcggtgcctgctttgcaacttacccctgccaacccaccacccccggaggtgtccaatcccaaaaagccaggacgagttaccaaccagctgcaatacctacacaaggtagtgatgaaggctctgtggaaacatcagttcgcatggccattccggcagcctgtggatgctgtcaaactgggtctaccggattatcacaaaattataaaacagcctatggacatgggtactattaagaggagacttgaaaacaattattattgggctgcttcagagtgtatgcaagattttaataccatgttcaccaactgttacatttacaacaagcccactgatgatattgtcctaatggcacaaacgctggaaaagatattcctacagaaggttgcatcaatgccacaagaagaacaagagctggtagtgaccatccctaagaacagccacaagaagggggccaagttggcagcgctccagggcagtgttaccagtgcccatcaggtgcctgccgtctcttctgtgtcacacacagccctgtatactcctccacctgagatacctaccactgtcctcaacattccccacccatcagtcatttcctctccacttctcaagtccttgcactctgctggacccccgctccttgctgttactgcagctcctccagcccagccccttgccaagaaaaaaggcgtaaagcggaaagcagatactaccacccctacacctacagccatcttggctcctggttctccagctagccctcctgggagtcttgagcctaaggcagcacggcttccccctatgcgtagagagagtggtcgccccatcaagcccccacgcaaagacttgcctgactctcagcaacaacaccagagctctaagaaaggaaagctttcagaacagttaaaacattgcaatggcattttgaaggagttactctctaagaagcatgctgcctatgcttggcctttctataaaccagtggatgcttctgcacttggcctgcatgactaccatgacatcattaagcaccccatggacctcagcactgtcaagcggaagatggagaaccgtgattaccgggatgcacaggagtttgctgctgatgtacggcttatgttctccaactgctataagtacaatcccccagatcacgatgttgtggcaatggcacgaaagctacaggatgtatttgagttccgttatgccaagatgccagatgaaccactagaaccagggcctttaccagtctctactgccatgccccctggcttggccaaatcgtcttcagagtcctccagtgaggaaagtagcagtgagagctcctctgaggaagaggaggaggaagatgaggaggacgaggaggaagaagagagtgaaagctcagactcagaggaagaaagggctcatcgcttagcagaactacaggaacagcttcgggcagtacatgaacaactggctgctctgtcccagggtccaatatccaagcccaagaggaaaagagagaaaaaagagaaaaagaagaaacggaaggcagagaagcatcgaggccgagctggggccgatgaagatgacaaggggcctagggcaccccgcccacctcaacctaagaagtccaagaaagcaagtggcagtgggggtggcagtgctgctttaggcccttctggctttggaccttctggaggaagtggcaccaagctccccaaaaaggccacaaagacagccccacctgccctgcctacaggttatgattcagaggaggaggaagagagcaggcccatgagttacgatgagaagcggcagctgagcctggacatcaacaaattacctggggagaagctgggccgagttgtgcatataatccaagccagggagccctctttacgtgattcaaacccagaagagattgagattgattttgaaacactcaagccatccacacttagagagcttgagcgctatgtcctttcctgcctacgtaagaaaccccggaagccctacaccattaagaagcctgtgggaaagacaaaggaggaactggctttggagaaaaagcgggaattagaaaagcggttacaagatgtcagcggacagctcaattctactaaaaagccccccaagaaagcgaatgagaaaacagagtcatcctctgcacagcaagtagcagtgtcacgccttagcgcttccagctccagctcagattccagctcctcctcttcctcgtcgtcgtcttcagacaccagtgattcagactcaggctaaggggtcaggccagatggggcaggaaggctccgcaggaccggacccctagaccaccctgccccacctgccccttccccctttgctgtgacacttcttcatctcacccccccctgcccccctctaggagagctggctctgcagtgggggagggatgcagggacatttactgaaggagggacatggacaaaacaacattgaattcccagccccattggggagtgatctcttggacacagagcccccattcaaaatggggcagggcaagggtgggagtgtgcaaagccctgatctggagttacctgaggccatagctgccctattcacttctaagggccctgttttgagattgtttgttctaatttattttaagctaggtaaggctggggggagggtggggccgtggtcccctcagcctccatggggagggaagaagggggagctctttttttacgttgatttttttttttctactctgttttccctttttccttccgctccatttggggccctgggggtttcagtcatctccccatttggtcccctggactgtctttgttgattctaacttgtaaataaagaaaatattattcaagttttgagttaccttaatatttgcttttgtagtgtttcaaaaggaacatcataagaattgtcttgataattttgagggaaatattactgcagtgagaaaaggcaatagctaacctataattggattgtcttaatttttaaaccagtaggcttttgctgtgtttttaataaagtaaatatgacttttgtaaattga

SEQ ID NO: 112241 - DNA, 3455 bp, Homo sapiens
  Payload ID: 1981
  Gene Symbol: BRD2
  Gene Name: bromodomain containing 2
  ENST ID: ENST00000424160
  CDS Start-End: 1615-3455
ggagggggagggctagtctgagccgcagccgccgcctcctccgctcgccctcctccctggcgctgaccgatggaccagccgctccgtggggaggactccggaccctggtgggggggcgggggggttctttcgcccccgtggcggagggcccctgagaggcggatacgggtgtgcctttgggggtgatgtggcgtgtggggggaaaggtccgagctcgcctggagggggagggtttttcccttaagtcatccctcccaggacttgctttttctgctctgagccggacgccggaatggagtttgaggaagagattcttcgctgctgctgccttaccgccgagaaccaccacccgccaggcgtcttgcggccacacccctggcgggttcaggcaggctacgcccacgcgacccctcccgtttccctgctttggccaatggaggagctacgaatggcacgacctgctcgagcttggcagtctccagttgggctgtgcatggaagcttgggaagactttgttggaaggggaggcggggagagagtgctggaggctctggggcgatggcttccgcacctcttccaaccaccctctttccctggagtcggcggaccacagctcagccaattggcttggagatgtggcgggttgccacttccctgtgggtctctgcggcactcttctgcctggtgactgacaccttggaaatgaagtttatgacgtcatcgttgcggctggccaatagaaaaagctcccgcggagaggtgttccttccccttcgactcagcttcttcacccgcgtgagcgagcgcgcgcgcgcggagggggtggggaaaatctcaagcagggtggcgcgcatgagcggcgaagctcctcctccccgcctatatataaagggctggcgcggggctcggcggcgccatttcgtgctggagtggagcagcctctagaacgagctggaggattctgcctaccgatacagagccttcgagtcgtccggggccgccattacaatccacctccatccgcttggaaatggccttcgtcccggcctatgactggtcccagcgggcagtacagaccccctagaagcccctggagctcccctttttcgggccccgcccaatcctcggagtctgtccaccccctctactccgccctcaagaggatttcaaagatggaggcggcggctccctaaaccacttttcgtgttcatccgcctccatccgagatcgaaacgggacctcgtcggccccgtaggggcccgacaagaagagggaatccctgcagaccaacagcgggctatattgacgacggtgtctgagatcggggaccgtcttttgaagagtcagtccctccttagttgcccgcctcagctgaggccgccgccattttcttgctgtccgccgtctgcagagcgcgccaagctgcccggagctctccgagaggccccaaagagactgctttcgtgccggccaggcagggggtttgtcgcctggaggcccaagaggaacggcctccccccaacttagcgggttatgctggaccgggcggtgaggggaaccgaggccacccggactttccgcggctgagggcagcgccggttccttgcggtcaagatgctgcaaaacgtgactccccacaataagctccctggggaagggaatgcagggttgctggggctgggcccagaagcagcagcaccagggaagaggattcgaaaaccctctctcttgtatgagggctttgagagccccacaatggcttcggtgcctgctttgcaacttacccctgccaacccaccacccccggaggtgtccaatcccaaaaagccaggacgagttaccaaccagctgcaatacctacacaaggtagtgatgaaggctctgtggaaacatcagttcgcatggccattccggcagcctgtggatgctgtcaaactgggtctaccggattatcacaaaattataaaacagcctatggacatgggtactattaagaggagacttgaaaacaattattattgggctgcttcagagtgtatgcaagattttaataccatgttcaccaactgttacatttacaacaagcccactgatgatattgtcctaatggcacaaacgctggaaaagatattcctacagaaggttgcatcaatgccacaagaagaacaagagctggtagtgaccatccctaagaacagccacaagaagggggccaagttggcagcgctccagggcagtgttaccagtgcccatcaggtgcctgccgtctcttctgtgtcacacacagccctctatactcctccacctgagatacctaccactgtcctcaacattccccacccatcagtcatttcctctccacttctcaagtccttgcactctgctggacccccgctccttgctgttactgcagctcctccagcccagccccttgccaagaaaaaaggcgtaaagcggaaagcagatactaccacccctacacctacagccatcttggctcctggttctccagctagccctcctgggagtcttgagcctaaggcagcacggcttccccctatgcgtagagagagtggtcgccccatcaagcccccacgcaaagacttgcctgactctcagcaacaacaccagagctctaagaaaggaaagctttcagaacagttaaaacattgcaatggcattttgaaggagttactctctaagaagcatgctgcctatgcttggcctttctataaaccagtggatgcttctgcacttggcctgcatgactaccatgacatcattaagcaccccatggacctcagcactgtcaagcggaagatggagaaccgtgattaccgggatgcacaggagtttgctgctgatgtacggcttatgttctccaactgctataagtacaatcccccagatcacgatgttgtggcaatggcacgaaagctacaggatgtatttgagttccgttatgccaagatgccagatgaaccactagaaccagggcctttaccagtctctactgccatgccccctggcttggccaaatcgtcttcagagtcctccagtgaggaaagtagcagtgagagctcctctgaggaagaggaggaggaagatgaggaggacgaggaggaagaagagagtgaaagctcagactcagaggaagaaagggctcatcgcttagcagaactacaggaacagcttcgggcagtacatgaacaactggctgctctgtcccagggtccaatatccaagcccaagaggaaaagagagaaaaaagagaaaaagaagaaacggaaggcagagaagcatcgaggccgagctggggccgatgaagatgacaaggggcctagggcaccccgcccacctcaacctaagaagtccaagaaagcaagtggcagtgggggtggcagtgctgctttaggcccttctggctttggaccttctggaggaagtggcaccaa

SEQ ID NO: 112242 - DNA, 1773 bp, Homo sapiens
  Payload ID: 1981
  Gene Symbol: BRD2
  Gene Name: bromodomain containing 2
  ENST ID: ENST00000452539
  CDS Start-End: 1-985
ggccaaatcgtcttcagagtcctccagtgaggaaagtagcagtgagagctcctctgaggaagaggaggaggaagatgaggacgaggaggaagaagagagtgaaagctcagactcagaggaagaaagggctcatcgcttagcagaactacaggaacagcttcgggcagtacatgaacaactggctgctctgtcccagggtccaatatccaagcccaagaggaaaagagagaaaaaagagaaaaagaagaaacggaaggcagagaagcatcgaggccgagctggggccgatgaagatgacaaggggcctagggcaccccgcccacctcaacctaagaagtccaagaaagcaagtggcagtgggggtggcagtgctgctttaggcccttctggctttggaccttctggaggaagtggcaccaagctccccaaaaaggccacaaagacagccccacctgccctgcctacaggttatgattcagaggaggaggaagagagcaggcccatgagttacgatgagaagcggcagctgagcctggacatcaacaaattacctggggagaagctgggccgagttgtgcatataatccaagccagggagccctctttacgtgattcaaacccagaagagattgagattgattttgaaacactcaagccatccacacttagagagcttgagcgctatgtcctttcctgcctacgtaagaaaccccggaagccctacaccattaagaagcctgtgggaaagacaaaggaggaactggctttggagaaaaagcgggaattagaaaagcggttacaagatgtcagcggacagctcaattctactaaaaagccccccaagaaagcgaatgagaaaacagagtcatcctctgcacagcaagtagcagtgtcacgccttagcgcttccagctccagctcagattccagctcctcctcttcctcgtcgtcgtcttcagacaccagtgattcagactcaggctaaggggtcaggccagatggggcaggaaggctccgcaggaccggacccctagaccaccctgccccacctgccccttccccctttgctgtgacacttcttcatctcaccccccccccgcccccctctaggagagctggctctgcagtgggggagggatgcagggacatttactgaaggagggacatggacaaaacaacattgaattcccagccccattggggagtgatctcttggacacagagcccccattcaaaatggggcagggcaagggtgggagtgtgcaaagccctgatctggagttacctgaggccatagctgccctattcacttctaagggccctgttttgagattgtttgttctaatttattttaagctaggtaaggctggggggagggtggggccgtggtcccctcagcctccatggggagggaagaagggggagctctttttttacgttgatttttttttttctactctgttttccctttttccttccgctccatttggggccctgggggtttcagtcatctccccatttggtcccctggactgtctttgttgattctaacttgtaaataaagaaaatattattcaagttttgagttaccttaatatttgcttttgtagtgtttcaaaaggaacatcataagaattgtcttgataattttgagggaaatattactgcagtgagaaaaggcaatagctaacctataattggattgtcttaatttttaaaccagtaggcttttgctgtgtttttaataaagtaaatatgacttttgtaaattga

SEQ ID NO: 112243 - DNA, 4894 bp, Homo sapiens
  Payload ID: 1981
  Gene Symbol: BRD2
  Gene Name: bromodomain containing 2
  Uniprot ID: P25440
  ENST ID: ENST00000414731
  CDS Start-End: 1702-4107
ggactgcgggataggaagctggggatatggacaagcagcagcgttatagcgctctgggtttcgggacataggcctgggccatgcggcccccttggccccttggcgcgacccccaggaacgttcggaaagctggtcctcgtggctgggggaaaggcggggggtgggggggaagcgggcacgtgaccccggtcagccaatctgggtgctgctgacgtggccgcgcggccccgatgctctccccacccccccagcccgttcgggaagggaggggctgggggctacgccccctcccccagcacggcttcgttttctgggggggggttgacaccccggattacataccccgtaccaagccgagggcaactttggaggccccctggaaggctttaggatccagattcttcgctgctgctgccttaccgccgagaaccaccacccgccaggcgtcttgcggccacacccctggcgggttcaggcaggctacgcccacgcgacccctcccgtttccctgctttggccaatggaggagctacgaatggcacgacctgctcgagcttggcagtctccagttgggctgtgcatggaagcttgggaagactttgttggaaggggaggcggggagagagtgctggaggctctggggcgatggcttccgcacctcttccaaccaccctctttccctggagtcggcggaccacagctcagccaattggcttggagatgtggcgggttgccacttccctgtgggtctctgcggcactcttctgcctggtgactgacaccttggaaatgaagtttatgacgtcatcgttgcggctggccaatagaaaaagctcccgcggagaggtgttccttccccttcgactcagcttcttcacccgcgtgagcgagcgcgcgcgcgcggagggggtggggaaaatctcaagcagggtggcgcgcatgagcggcgaagctcctcctccccgcctatatataaagggctggcgcggggctcggcggcgccatttcgtgctggagtggagcagcctctagaacgagctggaggattctgcctaccgatacagagccttcgagtcgtccggggccgccattacaatccacctccatccgcttggaaatggccttcgtcccggcctatgactggtcccagcgggcagtacagaccccctagaagcccctggagctcccctttttcgggccccgcccaatcctcggagtctgtccaccccctctactccgccctcaagaggatttcaaagatggaggcggcggctccctaaaccacttttcgtgttcatccgcctccatccgagatcgaaacgggacctcgtcggccccgtaggggcccgacaagaagagggaatccctgcagaccaacagcgggctatattgacgacggtgtctgagatcggggaccgtcttttgaagagtcagtccctccttagttgcccgcctcagctgaggccgccgccattttcttgctgtccgccgtctgcagagcgcgccaagctgcccggagctctccgagaggccccaaagagactgctttcgtgccggccaggcagggggtttgtcgcctggaggcccaagaggaacggcctccccccaacttagcgggttatgctggaccgggcggtgaggggaaccgaggccacccggactttccgcggctgagggcagcgccggttccttgcggtcaagatgctgcaaaacgtgactccccacaataagctccctggggaagggaatgcagggttgctggggctgggcccagaagcagcagcaccagggaaaaggattcgaaaaccctctctcttgtatgagggctttgagagccccacaatggcttcggtgcctgctttgcaacttacccctgccaacccaccacccccggaggtgtccaatcccaaaaagccaggacgagttaccaaccagctgcaatacctacacaaggtagtgatgaaggctctgtggaaacatcagttcgcatggccattccggcagcctgtggatgctgtcaaactgggtctaccggattatcacaaaattataaaacagcctatggacatgggtactattaagaggagacttgaaaacaattattattgggctgcttcagagtgtatgcaagattttaataccatgttcaccaactgttacatttacaacaagcccactgatgatattgtcctaatggcacaaacgctggaaaagatattcctacagaaggttgcatcaatgccacaagaagaacaagagctggtagtgaccatccctaagaacagccacaagaagggggccaagttggcagcgctccagggcagtgttaccagtgcccatcaggtgcctgccgtctcttctgtgtcacacacagccctgtatactcctccacctgagatacctaccactgtcttcaacattccccacccatcagtcatttcctctccacttctcaagtccttgcactctgctggacccccgctccttgctgttactgcagctcctccagcccagccccttgccaagaaaaaaggcgtaaagcggaaagcagatactaccacccctacacctacagccatcttggctcctggttctccagctagccctcctgggagtcttgagcctaaggcagcacggcttccccctatgcgtagagagagtggtcgccccatcaagcccccacgcaaagacttgcctgactctcagcaacaacaccagagctctaagaaaggaaagctttcagaacagttaaaacattgcaatggcattttgaaggagttactctctaagaagcatgctgcctatgcttggcctttctataaaccagtggatgcttctgcacttggcctgcatgactaccatgacatcattaagcaccccatggacctcagcactgtcaagcggaagatggagaaccgtgattaccgggatgcacaggagtttgctgctgatgtacggcttatgttctccaactgctataagtacaatcccccagatcacgatgttgtggcaatggcacgaaagctacaggatgtatttgagttccgttatgccaagatgccagatgaaccactagaaccagggcctttaccagtctctactgccatgccccctggcttggccaaatcgtcttcagagtcctccagtgaggaaagtagcagtgagagctcctctgaggaagaggaggaggaagatgaggaggacgaggaggaagaagagagtgaaagctcagactcagaggaagaaagggctcatcgcttagcagaactacaggaacagcttcgggcagtacatgaacaactggctgctctgtcccagggtccaatatccaagcccaagaggaaaagagagaaaaaagagaaaaagaagaaacggaaggcagagaagcatcgaggccgagctggggccgatgaagatgacaaggggcctagggcaccccgcccacctcaacctaagaagtccaagaaagcaagtggcagtgggggtggcagtgctgctttaggcccttccggctttggaccttctggaggaagtggcaccaagctccccaaaaaggccacaaagacagccccacctgccctgcctacaggttatgattcagaggaggaggaagagagcaggcccatgagttacgatgagaagcggcagctgagcctggacatcaacaaattacctggggagaagctgggccgagttgtgcatataatccaagccagggagccctctttacgtgattcaaacccagaagagattgagattgattttgaaacactcaagccatccacacttagagagcttgagcgctatgtcctttcctgcctacgtaagaaaccccggaagccctacaccattaagaagcctgtgggaaagacaaaggaggaactggctttggagaaaaagcgggaattagaaaagcggttacaagatgtcagcggacagctcaattctactaaaaagccccccaagaaagcgaatgagaaaacagagtcatcctctgcacagcaagtagcagtgtcacgccttagcgcttccagctccagctcagattccagctcctcctcttcctcgtcgtcgtcttcagacaccagtgattcagactcaggctaaggggtcaggccagatggggcaggaaggctccgcaggaccggacccctagaccaccctgccccacctgccccttccccctttgctgtgacacttcttcatctcacccccccctgcccccctctaggagagctggctctgcagtgggggagggatgcagggacatttactgaaggagggacatggacaaaacaacattgaattcccagccccattggggagtgatctcttggacacagagcccccattcaaaatggggcagggcaagggtgggagtgtgcaaagccctgatctggagttacctgaggccatagctgccctattcacttctaagggccctgttttgagattgtttgttctaatttattttaagctaggtaaggctggggggagggtggggccgtggtcccctcagcctccatggggagggaagaagggggagctctttttttacgttgatttttttttttctactctgttttccctttttccttccgctccatttggggccctgggggtttcagtcatctccccatttggtcccctggactgtctttgttgattctaacttgtaaataaagaaaatattattcaagttttgagttaccttaatatttgcttttgtagtgtttcaaaaggaacatcataagaattgtcttgataattttgagggaaatattactgcagtgagaaaaggcaatagctaacctataattggattgtcttaatttttaaaccagtaggcttttgctgtgtttttaataaagtaaatatgacttttgtaaattga

SEQ ID NO: 112244 - DNA, 887 bp, Homo sapiens
  Payload ID: 1981
  Gene Symbol: BRD2
  Gene Name: bromodomain containing 2
  ENST ID: ENST00000412535
  CDS Start-End: 1-887
ttcgtcccctgggggtacagcagccgggagccaggctccctggggaagggaatgcagggttgctggggctgggcccagaagcagcagcaccagggaagaggattcgaaaaccctctctcttgtatgagggctttgagagccccacaatggcttcggtgcctgctttgcaacttacccctgccaacccaccacccccggaggtgtccaatcccaaaaagccaggacgagttaccaaccagctgcaatacctacacaaggtagtgatgaaggctctgtggaaacatcagttcgcatggccattccggcagcctgtggatgctgtcaaactgggtctaccggattatcacaaaattataaaacagcctatggacatgggtactattaagaggagacttgaaaacaattattattgggctgcttcagagtgtatgcaagattttaataccatgttcaccaactgttacatttacaacaagcccactgatgatattgtcctaatggcacaaacgctggaaaagatattcctacagaaggttgcatcaatgccacaagaagaacaagagctggtagtgaccatccctaagaacagccacaagaagggggccaagttggcagcgctccagggcagtgttaccagtgcccatcaggtgcctgccgtctcttctgtgtcacacacagccctctatactcctccacctgagatacctaccactgtcctcaacattccccacccatcagtcatttcctctccacttctcaagtccttgcactctgctggacccccgctccttgctgttactgcagctcctccagcccagccccttgccaagaaaaaaggcgtaaagcggaaagcagatactaccacccctacacctacagccatcttg

SEQ ID NO: 112245 - DNA, 1773 bp, Homo sapiens; identical to SEQ ID NO: 112242
  Payload ID: 1981
  Gene Symbol: BRD2
  Gene Name: bromodomain containing 2
  ENST ID: ENST00000447730
  CDS Start-End: 1-985

SEQ ID NO: 112246 - DNA, 4807 bp, Homo sapiens
  Payload ID: 1981
  Gene Symbol: BRD2
  Gene Name: bromodomain containing 2
  Uniprot ID: P25440
  ENST ID: ENST00000449118
  CDS Start-End: 1615-4020
ggagggggagggctagtctgagccgcagccgccgcctcctccgctcgccctcctccctggcgctgaccgatggaccagccgctccgtggggaggactccggaccctggtgggggggcgggggggttctttcgcccccgtggcggagggcccctgagaggcggatacgggtgtgcctttgggggtgatgtggcgtgtggggggaaaggtccgagctcgcctggagggggagggtttttcccttaagtcatccctcccaggacttgctttttctgctctgagccggacgccggaatggagtttgaggaagagattcttcgctgctgctgccttaccgccgagaaccaccacccgccaggcgtcttgcggccacacccctggcgggttcaggcaggctacgcccacgcgacccctcccgtttccctgctttggccaatggaggagctacgaatggcacgacctgctcgagcttggcagtctccagttgggctgtgcatggaagcttgggaagactttgttggaaggggaggcggggagagagtgctggaggctctggggcgatggcttccgcacctcttccaaccaccctctttccctggagtcggcggaccacagctcagccaattggcttggagatgtggcgggttgccacttccctgtgggtctctgcggcactcttctgcctggtgactgacaccttggaaatgaagtttatgacgtcatcgttgcggctggccaatagaaaaagctcccgcggagaggtgttccttccccttcgactcagcttcttcacccgcgtgagcgagcgcgcgcgcgcggagggggtggggaaaatctcaagcagggtggcgcgcatgagcggcgaagctcctcctccccgcctatatataaagggctggcgcggggctcggcggcgccatttcgtgctggagtggagcagcctctagaacgagctggaggattctgcctaccgatacagagccttcgagtcgtccggggccgccattacaatccacctccatccgcttggaaatggccttcgtcccggcctatgactggtcccagcgggcagtacagaccccctagaagcccctggagctcccctttttcgggccccgcccaatcctcggagtctgtccaccccctctactccgccctcaagaggatttcaaagatggaggcggcggctccctaaaccacttttcgtgttcatccgcctccatccgagatcgaaacgggacctcgtcggccccgtaggggcccgacaagaagagggaatccctgcagaccaacagcgggctatattgacgacggtgtctgagatcggggaccgtcttttgaagagtcagtccctccttagttgcccgcctcagctgaggccgccgccattttcttgctgtccgccgtctgcagagcgcgccaagctgcccggagctctccgagaggccccaaagagactgctttcgtgccggccaggcagggggtttgtcgcctggaggcccaagaggaacggcctccccccaacttagcgggttatgctggaccgggcggtgaggggaaccgaggccacccggactttccgcggctgagggcagcgccggttccttgcggtcaagatgctgcaaaacgtgactccccacaataagctccctggggaagggaatgcagggttgctggggctgggcccagaagcagcagcaccagggaaaaggattcgaaaaccctctctcttgtatgagggctttgagagccccacaatggcttcggtgcctgctttgcaacttacccctgccaacccaccacccccggaggtgtccaatcccaaaaagccaggacgagttaccaaccagctgcaatacctacacaaggtagtgatgaaggctctgtggaaacatcagttcgcatggccattccggcagcctgtggatgctgtcaaactgggtctaccggattatcacaaaattataaaacagcctatggacatgggtactattaagaggagacttgaaaacaattattattgggctgcttcagagtgtatgcaagattttaataccatgttcaccaactgttacatttacaacaagcccactgatgatattgtcctaatggcacaaacgctggaaaagatattcctacagaaggttgcatcaatgccacaagaagaacaagagctggtagtgaccatccctaagaacagccacaagaagggggccaagttggcagcgctccagggcagtgttaccagtgcccatcaggtgcctgccgtctcttctgtgtcacacacagccctgtatactcctccacctgagatacctaccactgtcttcaacattccccacccatcagtcatttcctctccacttctcaagtccttgcactctgctggacccccgctccttgctgttactgcagctcctccagcccagccccttgccaagaaaaaaggcgtaaagcggaaagcagatactaccacccctacacctacagccatcttggctcctggttctccagctagccctcctgggagtcttgagcctaaggcagcacggcttccccctatgcgtagagagagtggtcgccccatcaagcccccacgcaaagacttgcctgactctcagcaacaacaccagagctctaagaaaggaaagctttcagaacagttaaaacattgcaatggcattttgaaggagttactctctaagaagcatgctgcctatgcttggcctttctataaaccagtggatgcttctgcacttggcctgcatgactaccatgacatcattaagcaccccatggacctcagcactgtcaagcggaagatggagaaccgtgattaccgggatgcacaggagtttgctgctgatgtacggcttatgttctccaactgctataagtacaatcccccagatcacgatgttgtggcaatggcacgaaagctacaggatgtatttgagttccgttatgccaagatgccagatgaaccactagaaccagggcctttaccagtctctactgccatgccccctggcttggccaaatcgtcttcagagtcctccagtgaggaaagtagcagtgagagctcctctgaggaagaggaggaggaagatgaggaggacgaggaggaagaagagagtgaaagctcagactcagaggaagaaagggctcatcgcttagcagaactacaggaacagcttcgggcagtacatgaacaactggctgctctgtcccagggtccaatatccaagcccaagaggaaaagagagaaaaaagagaaaaagaagaaacggaaggcagagaagcatcgaggccgagctggggccgatgaagatgacaaggggcctagggcaccccgcccacctcaacctaagaagtccaagaaagcaagtggcagtgggggtggcagtgctgctttaggcccttccggctttggaccttctggaggaagtggcaccaagctccccaaaaaggccacaaagacagccccacctgccctgcctacaggttatgattcagaggaggaggaagagagcaggcccatgagttacgatgagaagcggcagctgagcctggacatcaacaaattacctggggagaagctgggccgagttgtgcatataatccaagccagggagccctctttacgtgattcaaacccagaagagattgagattgattttgaaacactcaagccatccacacttagagagcttgagcgctatgtcctttcctgcctacgtaagaaaccccggaagccctacaccattaagaagcctgtgggaaagacaaaggaggaactggctttggagaaaaagcgggaattagaaaagcggttacaagatgtcagcggacagctcaattctactaaaaagccccccaagaaagcgaatgagaaaacagagtcatcctctgcacagcaagtagcagtgtcacgccttagcgcttccagctccagctcagattccagctcctcctcttcctcgtcgtcgtcttcagacaccagtgattcagactcaggctaaggggtcaggccagatggggcaggaaggctccgcaggaccggacccctagaccaccctgccccacctgccccttccccctttgctgtgacacttcttcatctcacccccccctgcccccctctaggagagctggctctgcagtgggggagggatgcagggacatttactgaaggagggacatggacaaaacaacattgaattcccagccccattggggagtgatctcttggacacagagcccccattcaaaatggggcagggcaagggtgggagtgtgcaaagccctgatctggagttacctgaggccatagctgccctattcacttctaagggccctgttttgagattgtttgttctaatttattttaagctaggtaaggctggggggagggtggggccgtggtcccctcagcctccatggggagggaagaagggggagctctttttttacgttgatttttttttttctactctgttttccctttttccttccgctccatttggggccctgggggtttcagtcatctccccatttggtcccctggactgtctttgttgattctaacttgtaaataaagaaaatattattcaagttttgagttaccttaatatttgcttttgtagtgtttcaaaaggaacatcataagaattgtcttgataattttgagggaaatattactgcagtgagaaaaggcaatagctaacctataattggattgtcttaatttttaaaccagtaggcttttgctgtgtttttaataaagtaaatatgacttttgtaaattga

SEQ ID NO: 112247 - DNA, 3542 bp, Homo sapiens
  Payload ID: 1981
  Gene Symbol: BRD2
  Gene Name: bromodomain containing 2
  ENST ID: ENST00000416727
  CDS Start-End: 1702-3542
ggaccgcgggataggaagctggggatatggacaagcagcagcgttatagcgctctgggtttcgggacataggcctgggccatgcggcccccttggccccttggcgcgacccccaggaacgttcggaaagctggtcctcgtggctgggggaaaggcggggggtgggggggaagcgggcacgtgaccccggtcagccaatctgggtgctgctgacgtggccgcgcggccccgatgctctccccacccccccagcccgttcgggaagggaggggctgggggctacgccccctcccccagcacggcttcgttttctgggggggggttgacaccccggattacataccccgtaccaagccgagggcaactttggaggccccctggaaggctttaggatccagattcttcgctgctgctgccttaccgccgagaaccaccacccgccaggcgtcttgcggccacacccctggcgggttcaggcaggctacgcccacgcgacccctcccgtttccctgctttggccaatggaggagctacgaatggcacgacctgctcgagcttggcagtctccagttgggctgtgcatggaagcttgggaagactttgttggaaggggaggcggggagagagtgctggaggctctggggcgatggcttccgcacctcttccaaccaccctctttccctggagtcggcggaccacagctcagccaattggcttggagatgtggcgggttgccacttccctgtgggtctctgcggcactcttctgcctggtgactgacaccttggaaatgaagtttatgacgtcatcgttgcggctggccaatagaaaaagctcccgcggagaggtgttccttccccttcgactcagcttcttcacccgcgtgagcgagcgcgcgcgcgcggagggggtggggaaaatctcaagcagggtggcgcgcatgagcggcgaagctcctcctccccgcctatatataaagggctggcgcggggctcggcggcgccatttcgtgctggagtggagcagcctctagaacgagctggaggattctgcctaccgatacagagccttcgagtcgtccggggccgccattacaatccacctccatccgcttggaaatggccttcgtcccggcctatgactggtcccagcgggcagtacagaccccctagaagcccctggagctcccctttttcgggccccgcccaatcctcggagtctgtccaccccctctactccgccctcaagaggatttcaaagatggaggcggcggctccctaaaccacttttcgtgttcatccgcctccatccgagatcgaaacgggacctcgtcggccccgtaggggcccgacaagaagagggaatccctgcagaccaacagcgggctatattgacgacggtgtctgagatcggggaccgtcttttgaagagtcagtccctccttagttgcccgcctcagctgaggccgccgccattttcttgctgtccgccgtctgcagagcgcgccaagctgcccggagctctccgagaggccccaaagagactgctttcgtgccggccaggcagggggtttgtcgcctggaggcccaagaggaacggcctccccccaacttagcgggttatgctggaccgggcggtgaggggaaccgaggccacccggactttccgcggctgagggcagcgccggttccttgcggtcaagatgctgcaaaacgtgactccccacaataagctccctggggaagggaatgcagggttgctggggctgggcccagaagcagcagcaccagggaagaggattcgaaaaccctctctcttgtatgagggctttgagagccccacaatggcttcggtgcctgctttgcaacttacccctgccaacccaccacccccggaggtgtccaatcccaaaaagccaggacgagttaccaaccagctgcaatacctacacaaggtagtgatgaaggctctgtggaaacatcagttcgcatggccattccggcagcctgtggatgctgtcaaactgggtctaccggattatcacaaaattataaaacagcctatggacatgggtactattaagaggagacttgaaaacaattattattgggctgcttcagagtgtatgcaagattttaataccatgttcaccaactgttacatttacaacaagcccactgatgatattgtcctaatggcacaaacgctggaaaagatattcctacagaaggttgcatcaatgccacaagaagaacaagagctggtagtgaccatccctaagaacagccacaagaagggggccaagttggcagcgctccagggcagtgttaccagtgcccatcaggtgcctgccgtctcttctgtgtcacacacagccctctatactcctccacctgagatacctaccactgtcctcaacattccccacccatcagtcatttcctctccacttctcaagtccttgcactctgctggacccccgctccttgctgttactgcagctcctccagcccagccccttgccaagaaaaaaggcgtaaagcggaaagcagatactaccacccctacacctacagccatcttggctcctggttctccagctagccctcctgggagtcttgagcctaaggcagcacggcttccccctatgcgtagagagagtggtcgccccatcaagcccccacgcaaagacttgcctgactctcagcaacaacaccagagctctaagaaaggaaagctttcagaacagttaaaacattgcaatggcattttgaaggagttactctctaagaagcatgctgcctatgcttggcctttctataaaccagtggatgcttctgcacttggcctgcatgactaccatgacatcattaagcaccccatggacctcagcactgtcaagcggaagatggagaaccgtgattaccgggatgcacaggagtttgctgctgatgtacggcttatgttctccaactgctataagtacaatcccccagatcacgatgttgtggcaatggcacgaaagctacaggatgtatttgagttccgttatgccaagatgccagatgaaccactagaaccagggcctttaccagtctctactgccatgccccctggcttggccaaatcgtcttcagagtcctccagtgaggaaagtagcagtgagagctcctctgaggaagaggaggaggaagatgaggaggacgaggaggaagaagagagtgaaagctcagactcagaggaagaaagggctcatcgcttagcagaactacaggaacagcttcgggcagtacatgaacaactggctgctctgtcccagggtccaatatccaagcccaagaggaaaagagagaaaaaagagaaaaagaagaaacggaaggcagagaagcatcgaggccgagctggggccgatgaagatgacaaggggcctagggcaccccgcccacctcaacctaagaagtccaagaaagcaagtggcagtgggggtggcagtgctgctttaggcccttctggctttggaccttctggaggaagtggcaccaa

SEQ ID NO: 112248 - DNA, 3210 bp, Homo sapiens
  Payload ID: 1981
  Gene Symbol: BRD2
  Gene Name: bromodomain containing 2
  ENST ID: ENST00000427021
  CDS Start-End: 1-2423
ggaacggtggtggcggctcggctactgctcgtggaggggaatacaggctccctggggaagggaatgcagggttgctggggctgggcccagaagcagcagcaccagggaaaaggattcgaaaaccctctctcttgtatgagggctttgagagccccacaatggcttcggtgcctgctttgcaacttacccctgccaacccaccacccccggaggtgtccaatcccaaaaagccaggacgagttaccaaccagctgcaatacctacacaaggtagtgatgaaggctctgtggaaacatcagttcgcatggccattccggcagcctgtggatgctgtcaaactgggtctaccggattatcacaaaattataaaacagcctatggacatgggtactattaagaggagacttgaaaacaattattattgggctgcttcagagtgtatgcaagattttaataccatgttcaccaactgttacatttacaacaagcccactgatgatattgtcctaatggcacaaacgctggaaaagatattcctacagaaggttgcatcaatgccacaagaagaacaagagctggtagtgaccatccctaagaacagccacaagaagggggccaagttggcagcgctccagggcagtgttaccagtgcccatcaggtgcctgccgtctcttctgtgtcacacacagccctgtatactcctccacctgagatacctaccactgtcttcaacattccccacccatcagtcatttcctctccacttctcaagtccttgcactctgctggacccccgctccttgctgttactgcagctcctccagcccagccccttgccaagaaaaaaggcgtaaagcggaaagcagatactaccacccctacacctacagccatcttggctcctggttctccagctagccctcctgggagtcttgagcctaaggcagcacggcttccccctatgcgtagagagagtggtcgccccatcaagcccccacgcaaagacttgcctgactctcagcaacaacaccagagctctaagaaaggaaagctttcagaacagttaaaacattgcaatggcattttgaaggagttactctctaagaagcatgctgcctatgcttggcctttctataaaccagtggatgcttctgcacttggcctgcatgactaccatgacatcattaagcaccccatggacctcagcactgtcaagcggaagatggagaaccgtgattaccgggatgcacaggagtttgctgctgatgtacggcttatgttctccaactgctataagtacaatcccccagatcacgatgttgtggcaatggcacgaaagctacaggatgtatttgagttccgttatgccaagatgccagatgaaccactagaaccagggcctttaccagtctctactgccatgccccctggcttggccaaatcgtcttcagagtcctccagtgaggaaagtagcagtgagagctcctctgaggaagaggaggaggaagatgaggaggacgaggaggaagaagagagtgaaagctcagactcagaggaagaaagggctcatcgcttagcagaactacaggaacagcttcgggcagtacatgaacaactggctgctctgtcccagggtccaatatccaagcccaagaggaaaagagagaaaaaagagaaaaagaagaaacggaaggcagagaagcatcgaggccgagctggggccgatgaagatgacaaggggcctagggcaccccgcccacctcaacctaagaagtccaagaaagcaagtggcagtgggggtggcagtgctgctttaggcccttccggctttggaccttctggaggaagtggcaccaagctccccaaaaaggccacaaagacagccccacctgccctgcctacaggttatgattcagaggaggaggaagagagcaggcccatgagttacgatgagaagcggcagctgagcctggacatcaacaaattacctggggagaagctgggccgagttgtgcatataatccaagccagggagccctctttacgtgattcaaacccagaagagattgagattgattttgaaacactcaagccatccacacttagagagcttgagcgctatgtcctttcctgcctacgtaagaaaccccggaagccctacaccattaagaagcctgtgggaaagacaaaggaggaactggctttggagaaaaagcgggaattagaaaagcggttacaagatgtcagcggacagctcaattctactaaaaagccccccaagaaagcgaatgagaaaacagagtcatcctctgcacagcaagtagcagtgtcacgccttagcgcttccagctccagctcagattccagctcctcctcttcctcgtcgtcgtcttcagacaccagtgattcagactcaggctaaggggtcaggccagatggggcaggaaggctccgcaggaccggacccctagaccaccctgccccacctgccccttccccctttgctgtgacacttcttcatctcacccccccctgcccccctctaggagagctggctctgcagtgggggagggatgcagggacatttactgaaggagggacatggacaaaacaacattgaattcccagccccattggggagtgatctcttggacacagagcccccattcaaaatggggcagggcaagggtgggagtgtgcaaagccctgatctggagttacctgaggccatagctgccctattcacttctaagggccctgttttgagattgtttgttctaatttattttaagctaggtaaggctggggggagggtggggccgtggtcccctcagcctccatggggagggaagaagggggagctctttttttacgttgatttttttttttctactctgttttccctttttccttccgctccatttggggccctgggggtttcagtcatctccccatttggtcccctggactgtctttgttgattctaacttgtaaataaagaaaatattattcaagttttgagttaccttaatatttgcttttgtagtgtttcaaaaggaacatcataagaattgtcttgataattttgagggaaatattactgcagtgagaaaaggcaatagctaacctataattggattgtcttaatttttaaaccagtaggcttttgctgtgtttttaataaagtaaatatgacttttgtaaattga

SEQ ID NO: 112249 - DNA, 4894 bp, Homo sapiens
  Payload ID: 1981
  Gene Symbol: BRD2
  Gene Name: bromodomain containing 2
  Uniprot ID: P25440
  ENST ID: ENST00000438194
  CDS Start-End: 1702-4107
ggaccgcgggataggaagctggggatatggacaagcagcagcgttatagcgctctgggtttcgggacataggcctgggccatgcggcccccttggccccttggcgcgacccccaggaacgttcggaaagctggtcctcgtggctgggggaaaggcggggggtgggggggaagcgggcacgtgaccccggtcagccaatctgggtgctgctgacgtggccgcgcggccccgatgctctccccacccccccagcccgttcgggaagggaggggctgggggctacgccccctcccccagcacggcttcgttttctgggggggggttgacaccccggattacataccccgtaccaagccgagggcaactttggaggccccctggaaggctttaggatccagattcttcgctgctgctgccttaccgccgagaaccaccacccgccaggcgtcttgcggccacacccctggcgggttcaggcaggctacgcccacgcgacccctcccgtttccctgctttggccaatggaggagctacgaatggcacgacctgctcgagcttggcagtctccagttgggctgtgcatggaagcttgggaagactttgttggaaggggaggcggggagagagtgctggaggctctggggcgatggcttccgcacctcttccaaccaccctctttccctggagtcggcggaccacagctcagccaattggcttggagatgtggcgggttgccacttccctgtgggtctctgcggcactcttctgcctggtgactgacaccttggaaatgaagtttatgacgtcatcgttgcggctggccaatagaaaaagctcccgcggagaggtgttccttccccttcgactcagcttcttcacccgcgtgagcgagcgcgcgcgcgcggagggggtggggaaaatctcaagcagggtggcgcgcatgagcggcgaagctcctcctccccgcctatatataaagggctggcgcggggctcggcggcgccatttcgtgctggagtggagcagcctctagaacgagctggaggattctgcctaccgatacagagccttcgagtcgtccggggccgccattacaatccacctccatccgcttggaaatggccttcgtcccggcctatgactggtcccagcgggcagtacagaccccctagaagcccctggagctcccctttttcgggccccgcccaatcctcggagtctgtccaccccctctactccgccctcaagaggatttcaaagatggaggcggcggctccctaaaccacttttcgtgttcatccgcctccatccgagatcgaaacgggacctcgtcggccccgtaggggcccgacaagaagagggaatccctgcagaccaacagcgggctatattgacgacggtgtctgagatcggggaccgtcttttgaagagtcagtccctccttagttgcccgcctcagctgaggccgccgccattttcttgctgtccgccgtctgcagagcgcgccaagctgcccggagctctccgagaggccccaaagagactgctttcgtgccggccaggcagggggtttgtcgcctggaggcccaagaggaacggcctccccccaacttagcgggttatgctggaccgggcggtgaggggaaccgaggccacccggactttccgcggctgagggcagcgccggttccttgcggtcaagatgctgcaaaacgtgactccccacaataagctccctggggaagggaatgcagggttgctggggctgggcccagaagcagcagcaccagggaagaggattcgaaaaccctctctcttgtatgagggctttgagagccccacaatggcttcggtgcctgctttgcaacttacccctgccaacccaccacccccggaggtgtccaatcccaaaaagccaggacgagttaccaaccagctgcaatacctacacaaggtagtgatgaaggctctgtggaaacatcagttcgcatggccattccggcagcctgtggatgctgtcaaactgggtctaccggattatcacaaaattataaaacagcctatggacatgggtactattaagaggagacttgaaaacaattattattgggctgcttcagagtgtatgcaagattttaataccatgttcaccaactgttacatttacaacaagcccactgatgatattgtcctaatggcacaaacgctggaaaagatattcctacagaaggttgcatcaatgccacaagaagaacaagagctggtagtgaccatccctaagaacagccacaagaagggggccaagttggcagcgctccagggcagtgttaccagtgcccatcaggtgcctgccgtctcttctgtgtcacacacagccctctatactcctccacctgagatacctaccactgtcctcaacattccccacccatcagtcatttcctctccacttctcaagtccttgcactctgctggacccccgctccttgctgttactgcagctcctccagcccagccccttgccaagaaaaaaggcgtaaagcggaaagcagatactaccacccctacacctacagccatcttggctcctggttctccagctagccctcctgggagtcttgagcctaaggcagcacggcttccccctatgcgtagagagagtggtcgccccatcaagcccccacgcaaagacttgcctgactctcagcaacaacaccagagctctaagaaaggaaagctttcagaacagttaaaacattgcaatggcattttgaaggagttactctctaagaagcatgctgcctatgcttggcctttctataaaccagtggatgcttctgcacttggcctgcatgactaccatgacatcattaagcaccccatggacctcagcactgtcaagcggaagatggagaaccgtgattaccgggatgcacaggagtttgctgctgatgtacggcttatgttctccaactgctataagtacaatcccccagatcacgatgttgtggcaatggcacgaaagctacaggatgtatttgagttccgttatgccaagatgccagatgaaccactagaaccagggcctttaccagtctctactgccatgccccctggcttggccaaatcgtcttcagagtcctccagtgaggaaagtagcagtgagagctcctctgaggaagaggaggaggaagatgaggaggacgaggaggaagaagagagtgaaagctcagactcagaggaagaaagggctcatcgcttagcagaactacaggaacagcttcgggcagtacatgaacaactggctgctctgtcccagggtccaatatccaagcccaagaggaaaagagagaaaaaagagaaaaagaagaaacggaaggcagagaagcatcgaggccgagctggggccgatgaagatgacaaggggcctagggcaccccgcccacctcaacctaagaagtccaagaaagcaagtggcagtgggggtggcagtgctgctttaggcccttctggctttggaccttctggaggaagtggcaccaagctccccaaaaaggccacaaagacagccccacctgccctgcctacaggttatgattcagaggaggaggaagagagcaggcccatgagttacgatgagaagcggcagctgagcctggacatcaacaaattacctggggagaagctgggccgagttgtgcatataatccaagccagggagccctctttacgtgattcaaacccagaagagattgagattgattttgaaacactcaagccatccacacttagagagcttgagcgctatgtcctttcctgcctacgtaagaaaccccggaagccctacaccattaagaagcctgtgggaaagacaaaggaggaactggctttggagaaaaagcgggaattagaaaagcggttacaagatgtcagcggacagctcaattctactaaaaagccccccaagaaagcgaatgagaaaacagagtcatcctctgcacagcaagtagcagtgtcacgccttagcgcttccagctctagctcagattccagctcctcctcttcctcgtcgtcgtcttcagacaccagtgattcagactcaggctaaggggtcaggccagatggggcaggaaggctccgcaggaccggacccctagaccaccctgccccacctgccccttccccctttgctgtgacacttcttcatctcacccccccctgcccccctctaggagagctggctctgcagtgggggagggatgcagggacatttactgaaggagggacatggacaaaacaacattgaattcccagccccattggggagtgatctcttggacacagagcccccattcaaaatggggcagggcaagggtgggagtgtgcaaagccctgatctggagttacctgaggccatagctgccctattcacttctaagggccctgttttgagattgtttgttctaatttattttaagctaggtaaggctggggggagggtggggccgtggtcccctcagcctccatggggagggaagaagggggagctctttttttacgttgatttttttttttctactctgttttccctttttccttccgctccatttggggccctgggggtttcagtcatctccccatttggtcccctggactgtctttgttgattctaacttgtaaataaagaaaatattattcaagttttgagttaccttaatatttgcttttgtagtgtttcaaaaggaacatcataagaattgtcttgataattttgagggaaatattactgcagtgagaaaaggcaatagctaacctataattggattgtcttaatttttaaaccagtaggcttttgctgtgtttttaataaagtaaatatgacttttgtaaattga

SEQ ID NO: 112250 - DNA, 1858 bp, Homo sapiens
  Payload ID: 1981
  Gene Symbol: BRD2
  Gene Name: bromodomain containing 2
  ENST ID: ENST00000457933
  CDS Start-End: 1-1858
ggaacggtggtggcggctcggctactgctcgtggaggggaatacaggctccctggggaagggaatgcagggttgctggggctgggcccagaagcagcagcaccagggaagaggattcgaaaaccctctctcttgtatgagggctttgagagccccacaatggcttcggtgcctgctttgcaacttacccctgccaacccaccacccccggaggtgtccaatcccaaaaagccaggacgagttaccaaccagctgcaatacctacacaaggtagtgatgaaggctctgtggaaacatcagttcgcatggccattccggcagcctgtggatgctgtcaaactgggtctaccggattatcacaaaattataaaacagcctatggacatgggtactattaagaggagacttgaaaacaattattattgggctgcttcagagtgtatgcaagattttaataccatgttcaccaactgttacatttacaacaagcccactgatgatattgtcctaatggcacaaacgctggaaaagatattcctacagaaggttgcatcaatgccacaagaagaacaagagctggtagtgaccatccctaagaacagccacaagaagggggccaagttggcagcgctccagggcagtgttaccagtgcccatcaggtgcctgccgtctcttctgtgtcacacacagccctctatactcctccacctgagatacctaccactgtcctcaacattccccacccatcagtcatttcctctccacttctcaagtccttgcactctgctggacccccgctccttgctgttactgcagctcctccagcccagccccttgccaagaaaaaaggcgtaaagcggaaagcagatactaccacccctacacctacagccatcttggctcctggttctccagctagccctcctgggagtcttgagcctaaggcagcacggcttccccctatgcgtagagagagtggtcgccccatcaagcccccacgcaaagacttgcctgactctcagcaacaacaccagagctctaagaaaggaaagctttcagaacagttaaaacattgcaatggcattttgaaggagttactctctaagaagcatgctgcctatgcttggcctttctataaaccagtggatgcttctgcacttggcctgcatgactaccatgacatcattaagcaccccatggacctcagcactgtcaagcggaagatggagaaccgtgattaccgggatgcacaggagtttgctgctgatgtacggcttatgttctccaactgctataagtacaatcccccagatcacgatgttgtggcaatggcacgaaagctacaggatgtatttgagttccgttatgccaagatgccagatgaaccactagaaccagggcctttaccagtctctactgccatgccccctggcttggccaaatcgtcttcagagtcctccagtgaggaaagtagcagtgagagctcctctgaggaagaggaggaggaagatgaggaggacgaggaggaagaagagagtgaaagctcagactcagaggaagaaagggctcatcgcttagcagaactacaggaacagcttcgggcagtacatgaacaactggctgctctgtcccagggtccaatatccaagcccaagaggaaaagagagaaaaaagagaaaaagaagaaacggaaggcagagaagcatcgaggccgagctggggccgatgaagatgacaaggggcctagggcaccccgcccacctcaacctaagaagtccaagaaagcaagtggcagtgggggtggcagtgctgctttaggcccttctggctttggaccttctggaggaagtggcaccaa

SEQ ID NO: 112251 - DNA, 1878 bp, Homo sapiens
  Payload ID: 1981
  Gene Symbol: BRD2
  Gene Name: bromodomain containing 2
  ENST ID: ENST00000442219
  CDS Start-End: 1-1090
ggccaaatcgtcttcagagtcctccagtgaggaaagtagcagtgagagctcctctgaggaagaggaggaggaagatgaggacgaggaggaagaagagagtgaaagctcagactcagaggaagaaagggctcatcgcttagcagaactacaggaacagcttcgggcagtacatgaacaactggctgctctgtcccagggtccaatatccaagcccaagaggaaaagagagaaaaaagagaaaaagaagaaacggaaggcagagaagcatcgaggccgagctggggccgatgaagatgacaaggggcctagggcaccccgcccacctcaacctaagaagtccaagaaagcaagtggcagtgggggtggcagtgctgctttaggcccttctggctttggaccttctggaggaagtggcaccaaactccaggctggagtgcagtggcgtgatctcggcttactgcaacctccacttctcgggttcaagcgattctcctgcctcagcctcccaagtagccaggattacaggctccccaaaaaggccacaaagacagccccacctgccctgcctacaggttatgattcagaggaggaggaagagagcaggcccatgagttacgatgagaagcggcagctgagcctggacatcaacaaattacctggggagaagctgggccgagttgtgcatataatccaagccagggagccctctttacgtgattcaaacccagaagagattgagattgattttgaaacactcaagccatccacacttagagagcttgagcgctatgtcctttcctgcctacgtaagaaaccccggaagccctacaccattaagaagcctgtgggaaagacaaaggaggaactggctttggagaaaaagcgggaattagaaaagcggttacaagatgtcagcggacagctcaattctactaaaaagccccccaagaaagcgaatgagaaaacagagtcatcctctgcacagcaagtagcagtgtcacgccttagcgcttccagctccagctcagattccagctcctcctcttcctcgtcgtcgtcttcagacaccagtgattcagactcaggctaaggggtcaggccagatggggcaggaaggctccgcaggaccggacccctagaccaccctgccccacctgccccttccccctttgctgtgacacttcttcatctcaccccccccccgcccccctctaggagagctggctctgcagtgggggagggatgcagggacatttactgaaggagggacatggacaaaacaacattgaattcccagccccattggggagtgatctcttggacacagagcccccattcaaaatggggcagggcaagggtgggagtgtgcaaagccctgatctggagttacctgaggccatagctgccctattcacttctaagggccctgttttgagattgtttgttctaatttattttaagctaggtaaggctggggggagggtggggccgtggtcccctcagcctccatggggagggaagaagggggagctctttttttacgttgatttttttttttctactctgttttccctttttccttccgctccatttggggccctgggggtttcagtcatctccccatttggtcccctggactgtctttgttgattctaacttgtaaataaagaaaatattattcaagttttgagttaccttaatatttgcttttgtagtgtttcaaaaggaacatcataagaattgtcttgataattttgagggaaatattactgcagtgagaaaaggcaatagctaacctataattggattgtcttaatttttaaaccagtaggcttttgctgtgtttttaataaagtaaatatgacttttgtaaattga

SEQ ID NO: 112252 - DNA, 3210 bp, Homo sapiens
  Payload ID: 1981
  Gene Symbol: BRD2
  Gene Name: bromodomain containing 2
  ENST ID: ENST00000446150
  CDS Start-End: 1-2423
ggaacggtggtggcggctcggctactgctcgtggaggggaatacaggctccctggggaagggaatgcagggttgctggggctgggcccagaagcagcagcaccagggaagaggattcgaaaaccctctctcttgtatgagggctttgagagccccacaatggcttcggtgcctgctttgcaacttacccctgccaacccaccacccccggaggtgtccaatcccaaaaagccaggacgagttaccaaccagctgcaatacctacacaaggtagtgatgaaggctctgtggaaacatcagttcgcatggccattccggcagcctgtggatgctgtcaaactgggtctaccggattatcacaaaattataaaacagcctatggacatgggtactattaagaggagacttgaaaacaattattattgggctgcttcagagtgtatgcaagattttaataccatgttcaccaactgttacatttacaacaagcccactgatgatattgtcctaatggcacaaacgctggaaaagatattcctacagaaggttgcatcaatgccacaagaagaacaagagctggtagtgaccatccctaagaacagccacaagaagggggccaagttggcagcgctccagggcagtgttaccagtgcccatcaggtgcctgccgtctcttctgtgtcacacacagccctctatactcctccacctgagatacctaccactgtcctcaacattccccacccatcagtcatttcctctccacttctcaagtccttgcactctgctggacccccgctccttgctgttactgcagctcctccagcccagccccttgccaagaaaaaaggcgtaaagcggaaagcagatactaccacccctacacctacagccatcttggctcctggttctccagctagccctcctgggagtcttgagcctaaggcagcacggcttccccctatgcgtagagagagtggtcgccccatcaagcccccacgcaaagacttgcctgactctcagcaacaacaccagagctctaagaaaggaaagctttcagaacagttaaaacattgcaatggcattttgaaggagttactctctaagaagcatgctgcctatgcttggcctttctataaaccagtggatgcttctgcacttggcctgcatgactaccatgacatcattaagcaccccatggacctcagcactgtcaagcggaagatggagaaccgtgattaccgggatgcacaggagtttgctgctgatgtacggcttatgttctccaactgctataagtacaatcccccagatcacgatgttgtggcaatggcacgaaagctacaggatgtatttgagttccgttatgccaagatgccagatgaaccactagaaccagggcctttaccagtctctactgccatgccccctggcttggccaaatcgtcttcagagtcctccagtgaggaaagtagcagtgagagctcctctgaggaagaggaggaggaagatgaggaggacgaggaggaagaagagagtgaaagctcagactcagaggaagaaagggctcatcgcttagcagaactacaggaacagcttcgggcagtacatgaacaactggctgctctgtcccagggtccaatatccaagcccaagaggaaaagagagaaaaaagagaaaaagaagaaacggaaggcagagaagcatcgaggccgagctggggccgatgaagatgacaaggggcctagggcaccccgcccacctcaacctaagaagtccaagaaagcaagtggcagtgggggtggcagtgctgctttaggcccttctggctttggaccttctggaggaagtggcaccaagctccccaaaaaggccacaaagacagccccacctgccctgcctacaggttatgattcagaggaggaggaagagagcaggcccatgagttacgatgagaagcggcagctgagcctggacatcaacaaattacctggggagaagctgggccgagttgtgcatataatccaagccagggagccctctttacgtgattcaaacccagaagagattgagattgattttgaaacactcaagccatccacacttagagagcttgagcgctatgtcctttcctgcctacgtaagaaaccccggaagccctacaccattaagaagcctgtgggaaagacaaaggaggaactggctttggagaaaaagcgggaattagaaaagcggttacaagatgtcagcggacagctcaattctactaaaaagccccccaagaaagcgaatgagaaaacagagtcatcctctgcacagcaagtagcagtgtcacgccttagcgcttccagctctagctcagattccagctcctcctcttcctcgtcgtcgtcttcagacaccagtgattcagactcaggctaaggggtcaggccagatggggcaggaaggctccgcaggaccggacccctagaccaccctgccccacctgccccttccccctttgctgtgacacttcttcatctcacccccccctgcccccctctaggagagctggctctgcagtgggggagggatgcagggacatttactgaaggagggacatggacaaaacaacattgaattcccagccccattggggagtgatctcttggacacagagcccccattcaaaatggggcagggcaagggtgggagtgtgcaaagccctgatctggagttacctgaggccatagctgccctattcacttctaagggccctgttttgagattgtttgttctaatttattttaagctaggtaaggctggggggagggtggggccgtggtcccctcagcctccatggggagggaagaagggggagctctttttttacgttgatttttttttttctactctgttttccctttttccttccgctccatttggggccctgggggtttcagtcatctccccatttggtcccctggactgtctttgttgattctaacttgtaaataaagaaaatattattcaagttttgagttaccttaatatttgcttttgtagtgtttcaaaaggaacatcataagaattgtcttgataattttgagggaaatattactgcagtgagaaaaggcaatagctaacctataattggattgtcttaatttttaaaccagtaggcttttgctgtgtttttaataaagtaaatatgacttttgtaaattga

SEQ ID NO: 112253 - DNA, 887 bp, Homo sapiens; identical to SEQ ID NO: 112244
  Payload ID: 1981
  Gene Symbol: BRD2
  Gene Name: bromodomain containing 2
  ENST ID: ENST00000429833
  CDS Start-End: 1-887

SEQ ID NO: 112254 - DNA, 3210 bp, Homo sapiens; identical to SEQ ID NO: 112252
  Payload ID: 1981
  Gene Symbol: BRD2
  Gene Name: bromodomain containing 2
  Uniprot ID: P25440
  ENST ID: ENST00000436979
  CDS Start-End: 159-2423

SEQ ID NO: 112255 - DNA, 887 bp, Homo sapiens; identical to SEQ ID NO: 112244
  Payload ID: 1981
  Gene Symbol: BRD2
  Gene Name: bromodomain containing 2
  ENST ID: ENST00000454038
  CDS Start-End: 1-887

SEQ ID NO: 112256 - DNA, 3210 bp, Homo sapiens
  Payload ID: 1981
  Gene Symbol: BRD2
  Gene Name: bromodomain containing 2
  ENST ID: ENST00000439194
  CDS Start-End: 1-2423
ggaacggtggtggcggctcggctactgctcgtggaggggaatacaggctccctggggaagggaatgcagggttgctggggctgggcccagaagcagcagcaccagggaaaaggattcgaaaaccctctctcttgtatgagggctttgagagccccacaatggcttcggtgcctgctttgcaacttacccctgccaacccaccacccccggaggtgtccaatcccaaaaagccaggacgagttaccaaccagctgcaatacctacacaaggtagtgatgaaggctctgtggaaacatcagttcgcatggccattccggcagcctgtggatgctgtcaaactgggtctaccggattatcacaaaattataaaacagcctatggacatgggtactattaagaggagacttgaaaacaattattattgggctgcttcagagtgtatgcaagattttaataccatgttcaccaactgttacatttacaacaagcccactgatgatattgtcctaatggcacaaacgctggaaaagatattcctacagaaggttgcatcaatgccacaagaagaacaagagctggtagtgaccatccctaagaacagccacaagaagggggccaagttggcagcgctccagggcagtgttaccagtgcccatcaggtgcctgccgtctcttctgtgtcacacacagccctgtatactcctccacctgagatacctaccactgtcctcaacattccccacccatcagtcatttcctctccacttctcaagtccttgcactctgctggacccccgctccttgctgttactgcagctcctccagcccagccccttgccaagaaaaaaggcgtaaagcggaaagcagatactaccacccctacacctacagccatcttggctcctggttctccagctagccctcctgggagtcttgagcctaaggcagcacggcttccccctatgcgtagagagagtggtcgccccatcaagcccccacgcaaagacttgcctgactctcagcaacaacaccagagctctaagaaaggaaagctttcagaacagttaaaacattgcaatggcattttgaaggagttactctctaagaagcatgctgcctatgcttggcctttctataaaccagtggatgcttctgcacttggcctgcatgactaccatgacatcattaagcaccccatggacctcagcactgtcaagcggaagatggagaaccgtgattaccgggatgcacaggagtttgctgctgatgtacggcttatgttctccaactgctataagtacaatcccccagatcacgatgttgtggcaatggcacgaaagctacaggatgtatttgagttccgttatgccaagatgccagatgaaccactagaaccagggcctttaccagtctctactgccatgccccctggcttggccaaatcgtcttcagagtcctccagtgaggaaagtagcagtgagagctcctctgaggaagaggaggaggaagatgaggaggacgaggaggaagaagagagtgaaagctcagactcagaggaagaaagggctcatcgcttagcagaactacaggaacagcttcgggcagtacatgaacaactggctgctctgtcccagggtccaatatccaagcccaagaggaaaagagagaaaaaagagaaaaagaagaaacggaaggcagagaagcatcgaggccgagctggggccgatgaagatgacaaggggcctagggcaccccgcccacctcaacctaagaagtccaagaaagcaagtggcagtgggggtggcagtgctgctttaggcccttctggctttggaccttctggaggaagtggcaccaagctccccaaaaaggccacaaagacagccccacctgccctgcctacaggttatgattcagaggaggaggaagagagcaggcccatgagttacgatgagaagcggcagctgagcctggacatcaacaaattacctggggagaagctgggccgagttgtgcatataatccaagccagggagccctctttacgtgattcaaacccagaagagattgagattgattttgaaacactcaagccatccacacttagagagcttgagcgctatgtcctttcctgcctacgtaagaaaccccggaagccctacaccattaagaagcctgtgggaaagacaaaggaggaactggctttggagaaaaagcgggaattagaaaagcggttacaagatgtcagcggacagctcaattctactaaaaagccccccaagaaagcgaatgagaaaacagagtcatcctctgcacagcaagtagcagtgtcacgccttagcgcttccagctccagctcagattccagctcctcctcttcctcgtcgtcgtcttcagacaccagtgattcagactcaggctaaggggtcaggccagatggggcaggaaggctccgcaggaccggacccctagaccaccctgccccacctgccccttccccctttgctgtgacacttcttcatctcacccccccctgcccccctctaggagagctggctctgcagtgggggagggatgcagggacatttactgaaggagggacatggacaaaacaacattgaattcccagccccattggggagtgatctcttggacacagagcccccattcaaaatggggcagggcaagggtgggagtgtgcaaagccctgatctggagttacctgaggccatagctgccctattcacttctaagggccctgttttgagattgtttgttctaatttattttaagctaggtaaggctggggggagggtggggccgtggtcccctcagcctccatggggagggaagaagggggagctctttttttacgttgatttttttttttctactctgttttccctttttccttccgctccatttggggccctgggggtttcagtcatctccccatttggtcccctggactgtctttgttgattctaacttgtaaataaagaaaatattattcaagttttgagttaccttaatatttgcttttgtagtgtttcaaaaggaacatcataagaattgtcttgataattttgagggaaatattactgcagtgagaaaaggcaatagctaacctataattggattgtcttaatttttaaaccagtaggcttttgctgtgtttttaataaagtaaatatgacttttgtaaattga

SEQ ID NO: 112257 - DNA, 3210 bp, Homo sapiens
  Payload ID: 1981
  Gene Symbol: BRD2
  Gene Name: bromodomain containing 2
  Uniprot ID: P25440
  ENST ID: ENST00000449085
  CDS Start-End: 159-2423
ggaacggtggtggcggctcggctactgctcgtggaggggaatacaggctccctggggaagggaatgcagggttgctggggctgggcccagaagcagcagcaccagggaagaggattcgaaaaccctctctcttgtatgagggctttgagagccccacaatggcttcggtgcctgctttgcaacttacccctgccaacccaccacccccggaggtgtccaatcccaaaaagccaggacgagttaccaaccagctgcaatacctacacaaggtagtgatgaaggctctgtggaaacatcagttcgcatggccattccggcagcctgtggatgctgtcaaactgggtctaccggattatcacaaaattataaaacagcctatggacatgggtactattaagaggagacttgaaaacaattattattgggctgcttcagagtgtatgcaagattttaataccatgttcaccaactgttacatttacaacaagcccactgatgatattgtcctaatggcacaaacgctggaaaagatattcctacagaaggttgcatcaatgccacaagaagaacaagagctggtagtgaccatccctaagaacagccacaagaagggggccaagttggcagcgctccagggcagtgttaccagtgcccatcaggtgcctgccgtctcttctgtgtcacacacagccctgtatactcctccacctgagatacctaccactgtcctcaacattccccacccatcagtcatttcctctccacttctcaagtccttgcactctgctggacccccgctccttgctgttactgcagctcctccagcccagccccttgccaagaaaaaaggcgtaaagcggaaagcagatactaccacccctacacctacagccatcttggctcctggttctccagctagccctcctgggagtcttgagcctaaggcagcacggcttccccctatgcgtagagagagtggtcgccccatcaagcccccacgcaaagacttgcctgactctcagcaacaacaccagagctctaagaaaggaaagctttcagaacagttaaaacattgcaatggcattttgaaggagttactctctaagaagcatgctgcctatgcttggcctttctataaaccagtggatgcttctgcacttggcctgcatgactaccatgacatcattaagcaccccatggacctcagcactgtcaagcggaagatggagaaccgtgattaccgggatgcacaggagtttgctgctgatgtacggcttatgttctccaactgctataagtacaatcccccagatcacgatgttgtggcaatggcacgaaagctacaggatgtatttgagttccgttatgccaagatgccagatgaaccactagaaccagggcctttaccagtctctactgccatgccccctggcttggccaaatcgtcttcagagtcctccagtgaggaaagtagcagtgagagctcctctgaggaagaggaggaggaagatgaggaggacgaggaggaagaagagagtgaaagctcagactcagaggaagaaagggctcatcgcttagcagaactacaggaacagcttcgggcagtacatgaacaactggctgctctgtcccagggtccaatatccaagcccaagaggaaaagagagaaaaaagagaaaaagaagaaacggaaggcagagaagcatcgaggccgagctggggccgatgaagatgacaaggggcctagggcaccccgcccacctcaacctaagaagtccaagaaagcaagtggcagtgggggtggcagtgctgctttaggcccttctggctttggaccttctggaggaagtggcaccaagctccccaaaaaggccacaaagacagccccacctgccctgcctacaggttatgattcagaggaggaggaagagagcaggcccatgagttacgatgagaagcggcagctgagcctggacatcaacaaattacctggggagaagctgggccgagttgtgcatataatccaagccagggagccctctttacgtgattcaaacccagaagagattgagattgattttgaaacactcaagccatccacacttagagagcttgagcgctatgtcctttcctgcctacgtaagaaaccccggaagccctacaccattaagaagcctgtgggaaagacaaaggaggaactggctttggagaaaaagcgggaattagaaaagcggttacaagatgtcagcggacagctcaattctactaaaaagccccccaagaaagcgaatgagaaaacagagtcatcctctgcacagcaagtagcagtgtcacgccttagcgcttccagctccagctcagattccagctcctcctcttcctcgtcgtcgtcttcagacaccagtgattcagactcaggctaaggggtcaggccagatggggcaggaaggctccgcaggaccggacccctagaccaccctgccccacctgccccttccccctttgctgtgacacttcttcatctcacccccccccgcccccctctaggagagctggctctgcagtgggggagggatgcagggacatttactgaaggagggacatggacaaaacaacattgaattcccagccccattggggagtgatctcttggacacagagcccccattcaaaatggggcagggcaagggtgggagtgtgcaaagccctgatctggagttacctgaggccacagctgccctattcacttctaagggccctgttttgagattgtttgttctaatttattttaagctaggtaaggctggggggagggtggggccgtggtcccctcagcctccatggggagggaagaagggggagctctttttttacgttgatttttttttttctactctgttttccctttttccttccgctccatttggggccctgggggtttcagtcatctccccatttggtcccctggactgtctttgttgattctaacttgtaaataaagaaaatattattcaagttttgagttaccttaatatttgcttttgtagtgtttcaaaaggaacatcataagaattgtcttgataattttgagggaaatattactgcagtgagaaaaggcaatagctaacctataattggattgtcttaatttttaaaccagtaggcttttgctgtgtttttaataaagtaaatatgacttttgtaaattga

SEQ ID NO: 112258 - DNA, 3210 bp, Homo sapiens; identical to SEQ ID NO: 112257
  Payload ID: 1981
  Gene Symbol: BRD2
  Gene Name: bromodomain containing 2
  ENST ID: ENST00000449025
  CDS Start-End: 1-2423

SEQ ID NO: 112259 - DNA, 3467 bp, Homo sapiens
  Payload ID: 1981
  Gene Symbol: BRD2
  Gene Name: bromodomain containing 2
  Uniprot ID: P25440
  ENST ID: ENST00000442863
  CDS Start-End: 170-2680
cccaaagagactgctttcgtgccggccaggcagggggtttgtcgcctggaggcccaagaggaacggcctccccccaacttagcgggttatgctggaccgggcggtgaggggaaccgaggccacccggactttccgcggctgagggcagcgccggttccttgcggtcaagatgctgcaaaacgtgactccccacaataagctccctggggaagggaatgcagggttgctggggctgggcccagaagcagcagcaccagggaagaggattcgaaaaccctctctcttgtatgagggctttgagagccccacaatggcttcggtgcctgctttgcaacttacccctgccaacccaccacccccggaggtgtccaatcccaaaaagccaggacgagttaccaaccagctgcaatacctacacaaggtagtgatgaaggctctgtggaaacatcagttcgcatggccattccggcagcctgtggatgctgtcaaactgggtctaccggattatcacaaaattataaaacagcctatggacatgggtactattaagaggagacttgaaaacaattattattgggctgcttcagagtgtatgcaagattttaataccatgttcaccaactgttacatttacaacaagcccactgatgatattgtcctaatggcacaaacgctggaaaagatattcctacagaaggttgcatcaatgccacaagaagaacaagagctggtagtgaccatccctaagaacagccacaagaagggggccaagttggcagcgctccagggcagtgttaccagtgcccatcaggtgcctgccgtctcttctgtgtcacacacagccctctatactcctccacctgagatacctaccactgtcctcaacattccccacccatcagtcatttcctctccacttctcaagtccttgcactctgctggacccccgctccttgctgttactgcagctcctccagcccagccccttgccaagaaaaaaggcgtaaagcggaaagcagatactaccacccctacacctacagccatcttggctcctggttctccagctagccctcctgggagtcttgagcctaaggcagcacggcttccccctatgcgtagagagagtggtcgccccatcaagcccccacgcaaagacttgcctgactctcagcaacaacaccagagctctaagaaaggaaagctttcagaacagttaaaacattgcaatggcattttgaaggagttactctctaagaagcatgctgcctatgcttggcctttctataaaccagtggatgcttctgcacttggcctgcatgactaccatgacatcattaagcaccccatggacctcagcactgtcaagcggaagatggagaaccgtgattaccgggatgcacaggagtttgctgctgatgtacggcttatgttctccaactgctataagtacaatcccccagatcacgatgttgtggcaatggcacgaaagctacaggatgtatttgagttccgttatgccaagatgccagatgaaccactagaaccagggcctttaccagtctctactgccatgccccctggcttggccaaatcgtcttcagagtcctccagtgaggaaagtagcagtgagagctcctctgaggaagaggaggaggaagatgaggaggacgaggaggaagaagagagtgaaagctcagactcagaggaagaaagggctcatcgcttagcagaactacaggaacagcttcgggcagtacatgaacaactggctgctctgtcccagggtccaatatccaagcccaagaggaaaagagagaaaaaagagaaaaagaagaaacggaaggcagagaagcatcgaggccgagctggggccgatgaagatgacaaggggcctagggcaccccgcccacctcaacctaagaagtccaagaaagcaagtggcagtgggggtggcagtgctgctttaggcccttctggctttggaccttctggaggaagtggcaccaaactccaggctggagtgcagtggcgtgatctcggcttactgcaacctccacttctcgggttcaagcgattctcctgcctcagcctcccaagtagccaggattacaggctccccaaaaaggccacaaagacagccccacctgccctgcctacaggttatgattcagaggaggaggaagagagcaggcccatgagttacgatgagaagcggcagctgagcctggacatcaacaaattacctggggagaagctgggccgagttgtgcatataatccaagccagggagccctctttacgtgattcaaacccagaagagattgagattgattttgaaacactcaagccatccacacttagagagcttgagcgctatgtcctttcctgcctacgtaagaaaccccggaagccctacaccattaagaagcctgtgggaaagacaaaggaggaactggctttggagaaaaagcgggaattagaaaagcggttacaagatgtcagcggacagctcaattctactaaaaagccccccaagaaagcgaatgagaaaacagagtcatcctctgcacagcaagtagcagtgtcacgccttagcgcttccagctctagctcagattccagctcctcctcttcctcgtcgtcgtcttcagacaccagtgattcagactcaggctaaggggtcaggccagatggggcaggaaggctccgcaggaccggacccctagaccaccctgccccacctgccccttccccctttgctgtgacacttcttcatctcacccccccctgcccccctctaggagagctggctctgcagtgggggagggatgcagggacatttactgaaggagggacatggacaaaacaacattgaattcccagccccattggggagtgatctcttggacacagagcccccattcaaaatggggcagggcaagggtgggagtgtgcaaagccctgatctggagttacctgaggccatagctgccctattcacttctaagggccctgttttgagattgtttgttctaatttattttaagctaggtaaggctggggggagggtggggccgtggtcccctcagcctccatggggagggaagaagggggagctctttttttacgttgatttttttttttctactctgttttccctttttccttccgctccatttggggccctgggggtttcagtcatctccccatttggtcccctggactgtctttgttgattctaacttgtaaataaagaaaatattattcaagttttgagttaccttaatatttgcttttgtagtgtttcaaaaggaacatcataagaattgtcttgataattttgagggaaatattactgcagtgagaaaaggcaatagctaacctataattggattgtcttaatttttaaaccagtaggcttttgctgtgtttttaataaagtaaatatgacttttgtaaattga

SEQ ID NO: 112260 - DNA, 887 bp, Homo sapiens
  Payload ID: 1981
  Gene Symbol: BRD2
  Gene Name: bromodomain containing 2
  ENST ID: ENST00000450284
  CDS Start-End: 1-887
ttcgtcccctgggggtacagcagccgggagccaggctccctggggaagggaatgcagggttgctggggctgggcccagaagcagcagcaccagggaaaaggattcgaaaaccctctctcttgtatgagggctttgagagccccacaatggcttcggtgcctgctttgcaacttacccctgccaacccaccacccccggaggtgtccaatcccaaaaagccaggacgagttaccaaccagctgcaatacctacacaaggtagtgatgaaggctctgtggaaacatcagttcgcatggccattccggcagcctgtggatgctgtcaaactgggtctaccggattatcacaaaattataaaacagcctatggacatgggtactattaagaggagacttgaaaacaattattattgggctgcttcagagtgtatgcaagattttaataccatgttcaccaactgttacatttacaacaagcccactgatgatattgtcctaatggcacaaacgctggaaaagatattcctacagaaggttgcatcaatgccacaagaagaacaagagctggtagtgaccatccctaagaacagccacaagaagggggccaagttggcagcgctccagggcagtgttaccagtgcccatcaggtgcctgccgtctcttctgtgtcacacacagccctgtatactcctccacctgagatacctaccactgtcctcaacattccccacccatcagtcatttcctctccacttctcaagtccttgcactctgctggacccccgctccttgctgttactgcagctcctccagcccagccccttgccaagaaaaaaggcgtaaagcggaaagcagatactaccacccctacacctacagccatcttg

SEQ ID NO: 112261 - DNA, 887 bp, Homo sapiens
  Payload ID: 1981
  Gene Symbol: BRD2
  Gene Name: bromodomain containing 2
  ENST ID: ENST00000456339
  CDS Start-End: 1-887
ttcgtcccctgggggtacagcagccgggagccaggctccctggggaagggaatgcagggttgctggggctgggcccagaagcagcagcaccagggaagaggattcgaaaaccctctctcttgtatgagggctttgagagccccacaatggcttcggtgcctgctttgcaacttacccctgccaacccaccacccccggaggtgtccaatcccaaaaagccaggacgagttaccaaccagctgcaatacctacacaaggtagtgatgaaggctctgtggaaacatcagttcgcatggccattccggcagcctgtggatgctgtcaaactgggtctaccggattatcacaaaattataaaacagcctatggacatgggtactattaagaggagacttgaaaacaattattattgggctgcttcagagtgtatgcaagattttaataccatgttcaccaactgttacatttacaacaagcccactgatgatattgtcctaatggcacaaacgctggaaaagatattcctacagaaggttgcatcaatgccacaagaagaacaagagctggtagtgaccatccctaagaacagccacaagaagggggccaagttggcagcgctccagggcagtgttaccagtgcccatcaggtgcctgccgtctcttctgtgtcacacacagccctgtatactcctccacctgagatacctaccactgtcctcaacattccccacccatcagtcatttcctctccacttctcaagtccttgcactctgctggacccccgctccttgctgttactgcagctcctccagcccagccccttgccaagaaaaaaggcgtaaagcggaaagcagatactaccacccctacacctacagccatcttg

SEQ ID NO: 112262 - DNA, 3467 bp, Homo sapiens; identical to SEQ ID NO: 112259
  Payload ID: 1981
  Gene Symbol: BRD2
  Gene Name: bromodomain containing 2
  Uniprot ID: P25440
  ENST ID: ENST00000448067
  CDS Start-End: 170-2680

SEQ ID NO: 112263 - DNA, 1773 bp, Homo sapiens; identical to SEQ ID NO: 112242
  Payload ID: 1981
  Gene Symbol: BRD2
  Gene Name: bromodomain containing 2
  ENST ID: ENST00000425016
  CDS Start-End: 1-985

SEQ ID NO: 112264 - DNA, 3467 bp, Homo sapiens
  Payload ID: 1981
  Gene Symbol: BRD2
  Gene Name: bromodomain containing 2
  ENST ID: ENST00000450320
  CDS Start-End: 170-2680
cccaaagagactgctttcgtgccggccaggcagggggtttgtcgcctggaggcccaagaggaacggcctccccccaacttagcgggttatgctggaccgggcggtgaggggaaccgaggccacccggactttccgcggctgagggcagcgccggttccttgcggtcaagatgctgcaaaacgtgactccccacaataagctccctggggaagggaatgcagggttgctggggctgggcccagaagcagcagcaccagggaaaaggattcgaaaaccctctctcttgtatgagggctttgagagccccacaatggcttcggtgcctgctttgcaacttacccctgccaacccaccacccccggaggtgtccaatcccaaaaagccaggacgagttaccaaccagctgcaatacctacacaaggtagtgatgaaggctctgtggaaacatcagttcgcatggccattccggcagcctgtggatgctgtcaaactgggtctaccggattatcacaaaattataaaacagcctatggacatgggtactattaagaggagacttgaaaacaattattattgggctgcttcagagtgtatgcaagattttaataccatgttcaccaactgttacatttacaacaagcccactgatgatattgtcctaatggcacaaacgctggaaaagatattcctacagaaggttgcatcaatgccacaagaagaacaagagctggtagtgaccatccctaagaacagccacaagaagggggccaagttggcagcgctccagggcagtgttaccagtgcccatcaggtgcctgccgtctcttctgtgtcacacacagccctgtatactcctccacctgagatacctaccactgtcttcaacattccccacccatcagtcatttcctctccacttctcaagtccttgcactctgctggacccccgctccttgctgttactgcagctcctccagcccagccccttgccaagaaaaaaggcgtaaagcggaaagcagatactaccacccctacacctacagccatcttggctcctggttctccagctagccctcctgggagtcttgagcctaaggcagcacggcttccccctatgcgtagagagagtggtcgccccatcaagcccccacgcaaagacttgcctgactctcagcaacaacaccagagctctaagaaaggaaagctttcagaacagttaaaacattgcaatggcattttgaaggagttactctctaagaagcatgctgcctatgcttggcctttctataaaccagtggatgcttctgcacttggcctgcatgactaccatgacatcattaagcaccccatggacctcagcactgtcaagcggaagatggagaaccgtgattaccgggatgcacaggagtttgctgctgatgtacggcttatgttctccaactgctataagtacaatcccccagatcacgatgttgtggcaatggcacgaaagctacaggatgtatttgagttccgttatgccaagatgccagatgaaccactagaaccagggcctttaccagtctctactgccatgccccctggcttggccaaatcgtcttcagagtcctccagtgaggaaagtagcagtgagagctcctctgaggaagaggaggaggaagatgaggaggacgaggaggaagaagagagtgaaagctcagactcagaggaagaaagggctcatcgcttagcagaactacaggaacagcttcgggcagtacatgaacaactggctgctctgtcccagggtccaatatccaagcccaagaggaaaagagagaaaaaagagaaaaagaagaaacggaaggcagagaagcatcgaggccgagctggggccgatgaagatgacaaggggcctagggcaccccgcccacctcaacctaagaagtccaagaaagcaagtggcagtgggggtggcagtgctgctttaggcccttccggctttggaccttctggaggaagtggcaccaaactccaggctggagtgcagtggcgtgatctcggcttactgcaacctccacttctcgggttcaagcgattctcctgcctcagcctcccaagtagccagaattacaggctccccaaaaaggccacaaagacagccccacctgccctgcctacaggttatgattcagaggaggaggaagagagcaggcccatgagttacgatgagaagcggcagctgagcctggacatcaacaaattacctggggagaagctgggccgagttgtgcatataatccaagccagggagccctctttacgtgattcaaacccagaagagattgagattgattttgaaacactcaagccatccacacttagagagcttgagcgctatgtcctttcctgcctacgtaagaaaccccggaagccctacaccattaagaagcctgtgggaaagacaaaggaggaactggctttggagaaaaagcgggaattagaaaagcggttacaagatgtcagcggacagctcaattctactaaaaagccccccaagaaagcgaatgagaaaacagagtcatcctctgcacagcaagtagcagtgtcacgccttagcgcttccagctccagctcagattccagctcctcctcttcctcgtcgtcgtcttcagacaccagtgattcagactcaggctaaggggtcaggccagatggggcaggaaggctccgcaggaccggacccctagaccaccctgccccacctgccccttccccctttgctgtgacacttcttcatctcacccccccctgcccccctctaggagagctggctctgcagtgggggagggatgcagggacatttactgaaggagggacatggacaaaacaacattgaattcccagccccattggggagtgatctcttggacacagagcccccattcaaaatggggcagggcaagggtgggagtgtgcaaagccctgatctggagttacctgaggccatagctgccctattcacttctaagggccctgttttgagattgtttgttctaatttattttaagctaggtaaggctggggggagggtggggccgtggtcccctcagcctccatggggagggaagaagggggagctctttttttacgttgatttttttttttctactctgttttccctttttccttccgctccatttggggccctgggggtttcagtcatctccccatttggtcccctggactgtctttgttgattctaacttgtaaataaagaaaatattattcaagttttgagttaccttaatatttgcttttgtagtgtttcaaaaggaacatcataagaattgtcttgataattttgagggaaatattactgcagtgagaaaaggcaatagctaacctataattggattgtcttaatttttaaaccagtaggcttttgctgtgtttttaataaagtaaatatgacttttgtaaattga

SEQ ID NO: 112265 - DNA, 2115 bp, Homo sapiens
  Payload ID: 1981
  Gene Symbol: BRD2
  Gene Name: bromodomain containing 2
  ENST ID: ENST00000425201
  CDS Start-End: 170-2115
cccaaagagactgctttcgtgccggccaggcagggggtttgtcgcctggaggcccaagaggaacggcctccccccaacttagcgggttatgctggaccgggcggtgaggggaaccgaggccacccggactttccgcggctgagggcagcgccggttccttgcggtcaagatgctgcaaaacgtgactccccacaataagctccctggggaagggaatgcagggttgctggggctgggcccagaagcagcagcaccagggaagaggattcgaaaaccctctctcttgtatgagggctttgagagccccacaatggcttcggtgcctgctttgcaacttacccctgccaacccaccacccccggaggtgtccaatcccaaaaagccaggacgagttaccaaccagctgcaatacctacacaaggtagtgatgaaggctctgtggaaacatcagttcgcatggccattccggcagcctgtggatgctgtcaaactgggtctaccggattatcacaaaattataaaacagcctatggacatgggtactattaagaggagacttgaaaacaattattattgggctgcttcagagtgtatgcaagattttaataccatgttcaccaactgttacatttacaacaagcccactgatgatattgtcctaatggcacaaacgctggaaaagatattcctacagaaggttgcatcaatgccacaagaagaacaagagctggtagtgaccatccctaagaacagccacaagaagggggccaagttggcagcgctccagggcagtgttaccagtgcccatcaggtgcctgccgtctcttctgtgtcacacacagccctctatactcctccacctgagatacctaccactgtcctcaacattccccacccatcagtcatttcctctccacttctcaagtccttgcactctgctggacccccgctccttgctgttactgcagctcctccagcccagccccttgccaagaaaaaaggcgtaaagcggaaagcagatactaccacccctacacctacagccatcttggctcctggttctccagctagccctcctgggagtcttgagcctaaggcagcacggcttccccctatgcgtagagagagtggtcgccccatcaagcccccacgcaaagacttgcctgactctcagcaacaacaccagagctctaagaaaggaaagctttcagaacagttaaaacattgcaatggcattttgaaggagttactctctaagaagcatgctgcctatgcttggcctttctataaaccagtggatgcttctgcacttggcctgcatgactaccatgacatcattaagcaccccatggacctcagcactgtcaagcggaagatggagaaccgtgattaccgggatgcacaggagtttgctgctgatgtacggcttatgttctccaactgctataagtacaatcccccagatcacgatgttgtggcaatggcacgaaagctacaggatgtatttgagttccgttatgccaagatgccagatgaaccactagaaccagggcctttaccagtctctactgccatgccccctggcttggccaaatcgtcttcagagtcctccagtgaggaaagtagcagtgagagctcctctgaggaagaggaggaggaagatgaggaggacgaggaggaagaagagagtgaaagctcagactcagaggaagaaagggctcatcgcttagcagaactacaggaacagcttcgggcagtacatgaacaactggctgctctgtcccagggtccaatatccaagcccaagaggaaaagagagaaaaaagagaaaaagaagaaacggaaggcagagaagcatcgaggccgagctggggccgatgaagatgacaaggggcctagggcaccccgcccacctcaacctaagaagtccaagaaagcaagtggcagtgggggtggcagtgctgctttaggcccttctggctttggaccttctggaggaagtggcaccaaactccaggctggagtgcagtggcgtgatctcggcttactgcaacctccacttctcgggttcaagcgattctcctgcctcagcctcccaagtagccaggattacag

SEQ ID NO: 112266 - DNA, 887 bp, Homo sapiens
  Payload ID: 1981
  Gene Symbol: BRD2
  Gene Name: bromodomain containing 2
  ENST ID: ENST00000433783
  CDS Start-End: 1-887
ttcgtcccctgggggtacagcagccgggagccaggctccctggggaagggaatgcagggttgctggggctgggcccagaagcagcagcaccagggaaaaggattcgaaaaccctctctcttgtatgagggctttgagagccccacaatggcttcggtgcctgctttgcaacttacccctgccaacccaccacccccggaggtgtccaatcccaaaaagccaggacgagttaccaaccagctgcaatacctacacaaggtagtgatgaaggctctgtggaaacatcagttcgcatggccattccggcagcctgtggatgctgtcaaactgggtctaccggattatcacaaaattataaaacagcctatggacatgggtactattaagaggagacttgaaaacaattattattgggctgcttcagagtgtatgcaagattttaataccatgttcaccaactgttacatttacaacaagcccactgatgatattgtcctaatggcacaaacgctggaaaagatattcctacagaaggttgcatcaatgccacaagaagaacaagagctggtagtgaccatccctaagaacagccacaagaagggggccaagttggcagcgctccagggcagtgttaccagtgcccatcaggtgcctgccgtctcttctgtgtcacacacagccctgtatactcctccacctgagatacctaccactgtcttcaacattccccacccatcagtcatttcctctccacttctcaagtccttgcactctgctggacccccgctccttgctgttactgcagctcctccagcccagccccttgccaagaaaaaaggcgtaaagcggaaagcagatactaccacccctacacctacagccatcttg

SEQ ID NO: 112267 - DNA, 1773 bp, Homo sapiens; identical to SEQ ID NO: 112242
  Payload ID: 1981
  Gene Symbol: BRD2
  Gene Name: bromodomain containing 2
  ENST ID: ENST00000518754
  CDS Start-End: 1-985

SEQ ID NO: 112268 - DNA, 3482 bp, Homo sapiens
  Payload ID: 1981
  Gene Symbol: BRD2
  Gene Name: bromodomain containing 2
  ENST ID: ENST00000477920
  CDS Start-End: 1550-1993
accgatggaccagccgctccgtggggaggactccggaccctggtgggggggcgggggggttctttcgcccccgtggcggagggcccctgagaggcggatacgggtgtgcctttgggggtgatgtggcgtgtggggggaaaggtccgagctcgcctggagggggagggtttttcccttaagtcatccctcccaggacttgctttttctgctctgagccggacgccggaatggagtttgaggaagagattcttcgctgctgctgccttaccgccgagaaccaccacccgccaggcgtcttgcggccacacccctggcgggttcaggcaggctacgcccacgcgacccctcccgtttccctgctttggccaatggaggagctacgaatggcacgacctgctcgagcttggcagtctccagttgggctgtgcatggaagcttgggaagactttgttggaaggggaggcggggagagagtgctggaggctctggggcgatggcttccgcacctcttccaaccaccctctttccctggagtcggcggaccacagctcagccaattggcttggagatgtggcgggttgccacttccctgtgggtctctgcggcactcttctgcctggtgactgacaccttggaaatgaagtttatgacgtcatcgttgcggctggccaatagaaaaagctcccgcggagaggtgttccttccccttcgactcagcttcttcacccgcgtgagcgagcgcgcgcgcgcggagggggtggggaaaatctcaagcagggtggcgcgcatgagcggcgaagctcctcctccccgcctatatataaagggctggcgcggggctcggcggcgccatttcgtgctggagtggagcagcctctagaacgagctggaggattctgcctaccgatacagagccttcgagtcgtccggggccgccattacaatccacctccatccgcttggaaatggccttcgtcccggcctatgactggtcccagcgggcagtacagaccccctagaagcccctggagctcccctttttcgggccccgcccaatcctcggagtctgtccaccccctctactccgccctcaagaggatttcaaagatggaggcggcggctccctaaaccacttttcgtgttcatccgcctccatccgagatcgaaacgggacctcgtcggccccgtaggggcccgacaagaagagggaatccctgcagaccaacagcgggctatattgacgacggtgtctgagatcggggaccgtcttttgaagagtcagtccctccttagttgcccgcctcagctgaggccgccgccattttcttgctgtccgccgtctgcagagcgcgccaagctgcccggagctctccgagaggccccaaagagactgctttcgtgccggccaggcagggggtttgtcgcctggaggcccaagaggaacggcctccccccaacttagcgggttatgctggaccgggcggtgaggggaaccgaggccacccggactttccgcggctgagggcagcgccggttccttgcggtcaagatgctgcaaaacgtgactccccacaataagctccctggggaagggaatgcagggttgctggggctgggcccagaagcagcagcaccagggaagaggattcgaaaaccctctctcttgtatgagggctttgagagccccacaatggcttcggtgcctgctttgcaacttacccctgccaacccaccacccccggaggtgtccaatcccaaaaagccaggacgagttaccaaccagctgcaatacctacacaaggtagtgatgaaggctctgtggaaacatcagttcgcatggccattccggcagcctgtggatgctgtcaaactgggtctaccgattcccacctcgggttgggagaggaccacggtggccaaaattcttagcttcttcctttccctcatgcagcccatggatagccagccccagaggattatcacaaaattataaaacagcctatggacatgggtactattaagaggagacttgaaaacaattattattgggctgcttcagagtgtatgcaagattttaataccatgttcaccaactgttacatttacaacaagcccactgatgatattgtcctaatggcacaaacgctggaaaagatattcctacagaaggttgcatcaatgccacaagaagaacaagagctggtagtgaccatccctaagaacagccacaagaagggggccaagttggcagcgctccagggcagtgttaccagtgcccatcaggtgcctgccgtctcttctgtgtcacacacagccctctatactcctccacctgagatacctaccactgtcctcaacattccccacccatcagtcatttcctctccacttctcaagtccttgcactctgctggacccccgctccttgctgttactgcagctcctccagcccagccccttgccaagaaaaaaggcgtaaagcggaaagcagatactaccacccctacacctacagccatcttggctcctggttctccagctagccctcctgggagtcttgagcctaaggcagcacggcttccccctatgcgtagagagagtggtcgccccatcaagcccccacgcaaagacttgcctgactctcagcaacaacaccagagctctaagaaaggaaagctttcagaacagttaaaacattgcaatggcattttgaaggagttactctctaagaagcatgctgcctatgcttggcctttctataaaccagtggatgcttctgcacttggcctgcatgactaccatgacatcattaagcaccccatggacctcagcactgtcaagcggaagatggagaaccgtgattaccgggatgcacaggagtttgctgctgatgtacggcttatgttctccaactgctataagtacaatcccccagatcacgatgttgtggcaatggcacgaaagctacaggatgtatttgagttccgttatgccaagatgccagatgaaccactagaaccagggcctttaccagtctctactgccatgccccctggcttggccaaatcgtcttcagagtcctccagtgaggaaagtagcagtgagagctcctctgaggaagaggaggaggaagatgaggaggacgaggaggaagaagagagtgaaagctcagactcagaggaagaaagggctcatcgcttagcagaactacaggaacagcttcgggcagtacatgaacaactggctgctctgtcccagggtccaatatccaagcccaagaggaaaagagagaaaaaagagaaaaagaagaaacggaaggcagagaagcatcgaggccgagctggggccgatgaagatgacaaggggcctagggcaccccgcccacctcaacctaagaagtccaagaaagcaagtggcagtgggggtggcagtgctgctttaggcccttctggctttggaccttctggaggaagtggcaccaa

SEQ ID NO: 112269 - DNA, 4834 bp, Homo sapiens
  Payload ID: 1981
  Gene Symbol: BRD2
  Gene Name: bromodomain containing 2
  ENST ID: ENST00000482914
  CDS Start-End: 1550-1993
accgatggaccagccgctccgtggggaggactccggaccctggtgggggggcgggggggttctttcgcccccgtggcggagggcccctgagaggcggatacgggtgtgcctttgggggtgatgtggcgtgtggggggaaaggtccgagctcgcctggagggggagggtttttcccttaagtcatccctcccaggacttgctttttctgctctgagccggacgccggaatggagtttgaggaagagattcttcgctgctgctgccttaccgccgagaaccaccacccgccaggcgtcttgcggccacacccctggcgggttcaggcaggctacgcccacgcgacccctcccgtttccctgctttggccaatggaggagctacgaatggcacgacctgctcgagcttggcagtctccagttgggctgtgcatggaagcttgggaagactttgttggaaggggaggcggggagagagtgctggaggctctggggcgatggcttccgcacctcttccaaccaccctctttccctggagtcggcggaccacagctcagccaattggcttggagatgtggcgggttgccacttccctgtgggtctctgcggcactcttctgcctggtgactgacaccttggaaatgaagtttatgacgtcatcgttgcggctggccaatagaaaaagctcccgcggagaggtgttccttccccttcgactcagcttcttcacccgcgtgagcgagcgcgcgcgcgcggagggggtggggaaaagctcaagcagggtggcgcgcatgagcggcgaagctcctcctccccgcctatatataaagggctggcgcggggctcggcggcgccatttcgtgctggagtggagcagcctctagaacgagctggaggattctgcctaccgatacagagccttcgagtcgtccggggccgccattacaatccacctccatccgcttggaaatggccttcgtcccggcctatgactggtcccagcgggcagtacagaccccctagaagcccctggagctcccctttttcgggccccgcccaatcctcggagtctgtccaccccctctactccgccctcaagaggatttcaaagatggaggcggcggctccctaaaccacttttcgtgttcatccgcctccatccgagatcgaaacgggacctcgtcggccccgtaggggcccgacaagaagagggaatccctgcagaccaacagcgggctatattgacgacggtgtctgagatcggggaccgtcttttgaagagtcagtccctccttagttgcccgcctcagctgaggccgccgccattttcttgctgtccgccgtctgcagagcgcgccaagctgcccggagctctccgagaggccccaaagagactgctttcgtgccggccaggcagggggtttgtcgcctggaggcccaagaggaacggcctccccccaacttagcgggttatgctggaccgggcggtgaggggaaccgaggccacccggactttccgcggctgagggcagcgccggttccttgcggtcaagatgctgcaaaacgtgactccccacaataagctccctggggaagggaatgcagggttgctggggctgggcccagaagcagcagcaccagggaagaggattcgaaaaccctctctcttgtatgagggctttgagagccccacaatggcttcggtgcctgctttgcaacttacccctgccaacccaccacccccggaggtgtccaatcccaaaaagccaggacgagttaccaaccagctgcaatacctacacaaggtagtgatgaaggctctgtggaaacatcagttcgcatggccattccggcagcctgtggatgctgtcaaactgggtctaccgattcccacctcgggttgggagaggaccacggtggccaaaattcttagcttcttcctttccctcatgcagcccatggatagccagccccagaggattatcacaaaattataaaacagcctatggacatgggtactattaagaggagacttgaaaacaattattattgggctgcttcagagtgtatgcaagattttaataccatgttcaccaactgttacatttacaacaagcccactgatgatattgtcctaatggcacaaacgctggaaaagatattcctacagaaggttgcatcaatgccacaagaagaacaagagctggtagtgaccatccctaagaacagccacaagaagggggccaagttggcagcgctccagggcagtgttaccagtgcccatcaggtgcctgccgtctcttctgtgtcacacacagccctgtatactcctccacctgagatacctaccactgtcctcaacattccccacccatcagtcatttcctctccacttctcaagtccttgcactctgctggacccccgctccttgctgttactgcagctcctccagcccagccccttgccaagaaaaaaggcgtaaagcggaaagcagatactaccacccctacacctacagccatcttggctcctggttctccagctagccctcctgggagtcttgagcctaaggcagcacggcttccccctatgcgtagagagagtggtcgccccatcaagcccccacgcaaagacttgcctgactctcagcaacaacaccagagctctaagaaaggaaagctttcagaacagttaaaacattgcaatggcattttgaaggagttactctctaagaagcatgctgcctatgcttggcctttctataaaccagtggatgcttctgcacttggcctgcatgactaccatgacatcattaagcaccccatggacctcagcactgtcaagcggaagatggagaaccgtgattaccgggatgcacaggagtttgctgctgatgtacggcttatgttctccaactgctataagtacaatcccccagatcacgatgttgtggcaatggcacgaaagctacaggatgtatttgagttccgttatgccaagatgccagatgaaccactagaaccagggcctttaccagtctctactgccatgccccctggcttggccaaatcgtcttcagagtcctccagtgaggaaagtagcagtgagagctcctctgaggaagaggaggaggaagatgaggaggacgaggaggaagaagagagtgaaagctcagactcagaggaagaaagggctcatcgcttagcagaactacaggaacagcttcgggcagtacatgaacaactggctgctctgtcccagggtccaatatccaagcccaagaggaaaagagagaaaaaagagaaaaagaagaaacggaaggcagagaagcatcgaggccgagctggggccgatgaagatgacaaggggcctagggcaccccgcccacctcaacctaagaagtccaagaaagcaagtggcagtgggggtggcagtgctgctttaggcccttctggctttggaccttctggaggaagtggcaccaagctccccaaaaaggccacaaagacagccccacctgccctgcctacaggttatgattcagaggaggaggaagagagcaggcccatgagttacgatgagaagcggcagctgagcctggacatcaacaaattacctggggagaagctgggccgagttgtgcatataatccaagccagggagccctctttacgtgattcaaacccagaagagattgagattgattttgaaacactcaagccatccacacttagagagcttgagcgctatgtcctttcctgcctacgtaagaaaccccggaagccctacaccattaagaagcctgtgggaaagacaaaggaggaactggctttggagaaaaagcgggaattagaaaagcggttacaagatgtcagcggacagctcaattctactaaaaagccccccaagaaagcgaatgagaaaacagagtcatcctctgcacagcaagtagcagtgtcacgccttagcgcttccagctccagctcagattccagctcctcctcttcctcgtcgtcgtcttcagacaccagtgattcagactcaggctaaggggtcaggccagatggggcaggaaggctccgcaggaccggacccctagaccaccctgccccacctgccccttccccctttgctgtgacacttcttcatctcacccccccccgcccccctctaggagagctggctctgcagtgggggagggatgcagggacatttactgaaggagggacatggacaaaacaacattgaattcccagccccattggggagtgatctcttggacacagagcccccattcaaaatggggcagggcaagggtgggagtgtgcaaagccctgatctggagttacctgaggccacagctgccctattcacttctaagggccctgttttgagattgtttgttctaatttattttaagctaggtaaggctggggggagggtggggccgtggtcccctcagcctccatggggagggaagaagggggagctctttttttacgttgatttttttttttctactctgttttccctttttccttccgctccatttggggccctgggggtttcagtcatctccccatttggtcccctggactgtctttgttgattctaacttgtaaataaagaaaatattattcaagttttgagttaccttaatatttgcttttgtagtgtttcaaaaggaacatcataagaattgtcttgataattttgagggaaatattactgcagtgagaaaaggcaatagctaacctataattggattgtcttaatttttaaaccagtaggcttttgctgtgtttttaataaagtaaatatgacttttgtaaattga

SEQ ID NO: 112270 - DNA, 667 bp, Homo sapiens
  Payload ID: 1981
  Gene Symbol: BRD2
  Gene Name: bromodomain containing 2
  ENST ID: ENST00000496177
  CDS Start-End: 1-413
gcgtaaagcggaaagcagatactaccacccctacacctacagccatcttggctcctggttctccagctagccctcctgggagtcttgagcctaaggcagcacggcttccccctatgcgtagagagagtggtcgccccatcaagcccccacgcaaagacttgcctgactctcagcaacaacaccagagctctaagaaaggaaagctttcagaacagttaaaacattgcaatggcattttgaaggagttactctctaagaagcatgctgcctatgcttggcctttctataaaccagtggatgcttctgcacttggcctgcatgactaccatgacatcattaagcaccccatggacctcagcactgtcaagcttctgatgctgcctccttctgcagcggaagatggagaaccgtgattaccgggatgcacaggagtttgctgctgatgtacggcttatgttctccaactgctataagtacaatcccccagatcacgatgttgtggcaatggcacgaaagctacaggatgtatttgagttccgttatgccaagatgccagatgaaccactagaaccagggcctttaccagtctctactgccatgccccctggcttggccaaatcgtcttcagagtcctccagtgaggaaagtagcagtgagagctcctctg

SEQ ID NO: 112271 - DNA, 667 bp, Homo sapiens; identical to SEQ ID NO: 112270
  Payload ID: 1981
  Gene Symbol: BRD2
  Gene Name: bromodomain containing 2
  ENST ID: ENST00000481259
  CDS Start-End: 1-413

SEQ ID NO: 112272 - DNA, 4834 bp, Homo sapiens
  Payload ID: 1981
  Gene Symbol: BRD2
  Gene Name: bromodomain containing 2
  ENST ID: ENST00000479699
  CDS Start-End: 1550-1993
accgatggaccagccgctccgtggggaggactccggaccctggtgggggggcgggggggttctttcgcccccgtggcggagggcccctgagaggcggatacgggtgtgcctttgggggtgatgtggcgtgtggggggaaaggtccgagctcgcctggagggggagggtttttcccttaagtcatccctcccaggacttgctttttctgctctgagccggacgccggaatggagtttgaggaagagattcttcgctgctgctgccttaccgccgagaaccaccacccgccaggcgtcttgcggccacacccctggcgggttcaggcaggctacgcccacgcgacccctcccgtttccctgctttggccaatggaggagctacgaatggcacgacctgctcgagcttggcagtctccagttgggctgtgcatggaagcttgggaagactttgttggaaggggaggcggggagagagtgctggaggctctggggcgatggcttccgcacctcttccaaccaccctctttccctggagtcggcggaccacagctcagccaattggcttggagatgtggcgggttgccacttccctgtgggtctctgcggcactcttctgcctggtgactgacaccttggaaatgaagtttatgacgtcatcgttgcggctggccaatagaaaaagctcccgcggagaggtgttccttccccttcgactcagcttcttcacccgcgtgagcgagcgcgcgcgcgcggagggggtggggaaaatctcaagcagggtggcgcgcatgagcggcgaagctcctcctccccgcctatatataaagggctggcgcggggctcggcggcgccatttcgtgctggagtggagcagcctctagaacgagctggaggattctgcctaccgatacagagccttcgagtcgtccggggccgccattacaatccacctccatccgcttggaaatggccttcgtcccggcctatgactggtcccagcgggcagtacagaccccctagaagcccctggagctcccctttttcgggccccgcccaatcctcggagtctgtccaccccctctactccgccctcaagaggatttcaaagatggaggcggcggctccctaaaccacttttcgtgttcatccgcctccatccgagatcgaaacgggacctcgtcggccccgtaggggcccgacaagaagagggaatccctgcagaccaacagcgggctatattgacgacggtgtctgagatcggggaccgtcttttgaagagtcagtccctccttagttgcccgcctcagctgaggccgccgccattttcttgctgtccgccgtctgcagagcgcgccaagctgcccggagctctccgagaggccccaaagagactgctttcgtgccggccaggcagggggtttgtcgcctggaggcccaagaggaacggcctccccccaacttagcgggttatgctggaccgggcggtgaggggaaccgaggccacccggactttccgcggctgagggcagcgccggttccttgcggtcaagatgctgcaaaacgtgactccccacaataagctccctggggaagggaatgcagggttgctggggctgggcccagaagcagcagcaccagggaaaaggattcgaaaaccctctctcttgtatgagggctttgagagccccacaatggcttcggtgcctgctttgcaacttacccctgccaacccaccacccccggaggtgtccaatcccaaaaagccaggacgagttaccaaccagctgcaatacctacacaaggtagtgatgaaggctctgtggaaacatcagttcgcatggccattccggcagcctgtggatgctgtcaaactgggtctaccgattcccacctcgggttgggagaggaccacggtggccaaaattcttagcttcttcctttccctcatgcagcccatggatagccagccccagaggattatcacaaaattataaaacagcctatggacatgggtactattaagaggagacttgaaaacaattattattgggctgcttcagagtgtatgcaagattttaataccatgttcaccaactgttacatttacaacaagcccactgatgatattgtcctaatggcacaaacgctggaaaagatattcctacagaaggttgcatcaatgccacaagaagaacaagagctggtagtgaccatccctaagaacagccacaagaagggggccaagttggcagcgctccagggcagtgttaccagtgcccatcaggtgcctgccgtctcttctgtgtcacacacagccctgtatactcctccacctgagatacctaccactgtcttcaacattccccacccatcagtcatttcctctccacttctcaagtccttgcactctgctggacccccgctccttgctgttactgcagctcctccagcccagccccttgccaagaaaaaaggcgtaaagcggaaagcagatactaccacccctacacctacagccatcttggctcctggttctccagctagccctcctgggagtcttgagcctaaggcagcacggcttccccctatgcgtagagagagtggtcgccccatcaagcccccacgcaaagacttgcctgactctcagcaacaacaccagagctctaagaaaggaaagctttcagaacagttaaaacattgcaatggcattttgaaggagttactctctaagaagcatgctgcctatgcttggcctttctataaaccagtggatgcttctgcacttggcctgcatgactaccatgacatcattaagcaccccatggacctcagcactgtcaagcggaagatggagaaccgtgattaccgggatgcacaggagtttgctgctgatgtacggcttatgttctccaactgctataagtacaatcccccagatcacgatgttgtggcaatggcacgaaagctacaggatgtatttgagttccgttatgccaagatgccagatgaaccactagaaccagggcctttaccagtctctactgccatgccccctggcttggccaaatcgtcttcagagtcctccagtgaggaaagtagcagtgagagctcctctgaggaagaggaggaggaagatgaggaggacgaggaggaagaagagagtgaaagctcagactcagaggaagaaagggctcatcgcttagcagaactacaggaacagcttcgggcagtacatgaacaactggctgctctgtcccagggtccaatatccaagcccaagaggaaaagagagaaaaaagagaaaaagaagaaacggaaggcagagaagcatcgaggccgagctggggccgatgaagatgacaaggggcctagggcaccccgcccacctcaacctaagaagtccaagaaagcaagtggcagtgggggtggcagtgctgctttaggcccttccggctttggaccttctggaggaagtggcaccaagctccccaaaaaggccacaaagacagccccacctgccctgcctacaggttatgattcagaggaggaggaagagagcaggcccatgagttacgatgagaagcggcagctgagcctggacatcaacaaattacctggggagaagctgggccgagttgtgcatataatccaagccagggagccctctttacgtgattcaaacccagaagagattgagattgattttgaaacactcaagccatccacacttagagagcttgagcgctatgtcctttcctgcctacgtaagaaaccccggaagccctacaccattaagaagcctgtgggaaagacaaaggaggaactggctttggagaaaaagcgggaattagaaaagcggttacaagatgtcagcggacagctcaattctactaaaaagccccccaagaaagcgaatgagaaaacagagtcatcctctgcacagcaagtagcagtgtcacgccttagcgcttccagctccagctcagattccagctcctcctcttcctcgtcgtcgtcttcagacaccagtgattcagactcaggctaaggggtcaggccagatggggcaggaaggctccgcaggaccggacccctagaccaccctgccccacctgccccttccccctttgctgtgacacttcttcatctcacccccccctgcccccctctaggagagctggctctgcagtgggggagggatgcagggacatttactgaaggagggacatggacaaaacaacattgaattcccagccccattggggagtgatctcttggacacagagcccccattcaaaatggggcagggcaagggtgggagtgtgcaaagccctgatctggagttacctgaggccatagctgccctattcacttctaagggccctgttttgagattgtttgttctaatttattttaagctaggtaaggctggggggagggtggggccgtggtcccctcagcctccatggggagggaagaagggggagctctttttttacgttgatttttttttttctactctgttttccctttttccttccgctccatttggggccctgggggtttcagtcatctccccatttggtcccctggactgtctttgttgattctaacttgtaaataaagaaaatattattcaagttttgagttaccttaatatttgcttttgtagtgtttcaaaaggaacatcataagaattgtcttgataattttgagggaaatattactgcagtgagaaaaggcaatagctaacctataattggattgtcttaatttttaaaccagtaggcttttgctgtgtttttaataaagtaaatatgacttttgtaaattga

SEQ ID NO: 112273 - DNA, 4834 bp, Homo sapiens
  Payload ID: 1981
  Gene Symbol: BRD2
  Gene Name: bromodomain containing 2
  ENST ID: ENST00000493063
  CDS Start-End: 1550-1993
accgatggaccagccgctccgtggggaggactccggaccctggtgggggggcgggggggttctttcgcccccgtggcggagggcccctgagaggcggatacgggtgtgcctttgggggtgatgtggcgtgtggggggaaaggtccgagctcgcctggagggggagggtttttcccttaagtcatccctcccaggacttgctttttctgctctgagccggacgccggaatggagtttgaggaagagattcttcgctgctgctgccttaccgccgagaaccaccacccgccaggcgtcttgcggccacacccctggcgggttcaggcaggctacgcccacgcgacccctcccgtttccctgctttggccaatggaggagctacgaatggcacgacctgctcgagcttggcagtctccagttgggctgtgcatggaagcttgggaagactttgttggaaggggaggcggggagagagtgctggaggctctggggcgatggcttccgcacctcttccaaccaccctctttccctggagtcggcggaccacagctcagccaattggcttggagatgtggcgggttgccacttccctgtgggtctctgcggcactcttctgcctggtgactgacaccttggaaatgaagtttatgacgtcatcgttgcggctggccaatagaaaaagctcccgcggagaggtgttccttccccttcgactcagcttcttcacccgcgtgagcgagcgcgcgcgcgcggagggggtggggaaaatctcaagcagggtggcgcgcatgagcggcgaagctcctcctccccgcctatatataaagggctggcgcggggctcggcggcgccatttcgtgctggagtggagcagcctctagaacgagctggaggattctgcctaccgatacagagccttcgagtcgtccggggccgccattacaatccacctccatccgcttggaaatggccttcgtcccggcctatgactggtcccagcgggcagtacagaccccctagaagcccctggagctcccctttttcgggccccgcccaatcctcggagtctgtccaccccctctactccgccctcaagaggatttcaaagatggaggcggcggctccctaaaccacttttcgtgttcatccgcctccatccgagatcgaaacgggacctcgtcggccccgtaggggcccgacaagaagagggaatccctgcagaccaacagcgggctatattgacgacggtgtctgagatcggggaccgtcttttgaagagtcagtccctccttagttgcccgcctcagctgaggccgccgccattttcttgctgtccgccgtctgcagagcgcgccaagctgcccggagctctccgagaggccccaaagagactgctttcgtgccggccaggcagggggtttgtcgcctggaggcccaagaggaacggcctccccccaacttagcgggttatgctggaccgggcggtgaggggaaccgaggccacccggactttccgcggctgagggcagcgccggttccttgcggtcaagatgctgcaaaacgtgactccccacaataagctccctggggaagggaatgcagggttgctggggctgggcccagaagcagcagcaccagggaagaggattcgaaaaccctctctcttgtatgagggctttgagagccccacaatggcttcggtgcctgctttgcaacttacccctgccaacccaccacccccggaggtgtccaatcccaaaaagccaggacgagttaccaaccagctgcaatacctacacaaggtagtgatgaaggctctgtggaaacatcagttcgcatggccattccggcagcctgtggatgctgtcaaactgggtctaccgattcccacctcgggttgggagaggaccacggtggccaaaattcttagcttcttcctttccctcatgcagcccatggatagccagccccagaggattatcacaaaattataaaacagcctatggacatgggtactattaagaggagacttgaaaacaattattattgggctgcttcagagtgtatgcaagattttaataccatgttcaccaactgttacatttacaacaagcccactgatgatattgtcctaatggcacaaacgctggaaaagatattcctacagaaggttgcatcaatgccacaagaagaacaagagctggtagtgaccatccctaagaacagccacaagaagggggccaagttggcagcgctccagggcagtgttaccagtgcccatcaggtgcctgccgtctcttctgtgtcacacacagccctctatactcctccacctgagatacctaccactgtcctcaacattccccacccatcagtcatttcctctccacttctcaagtccttgcactctgctggacccccgctccttgctgttactgcagctcctccagcccagccccttgccaagaaaaaaggcgtaaagcggaaagcagatactaccacccctacacctacagccatcttggctcctggttctccagctagccctcctgggagtcttgagcctaaggcagcacggcttccccctatgcgtagagagagtggtcgccccatcaagcccccacgcaaagacttgcctgactctcagcaacaacaccagagctctaagaaaggaaagctttcagaacagttaaaacattgcaatggcattttgaaggagttactctctaagaagcatgctgcctatgcttggcctttctataaaccagtggatgcttctgcacttggcctgcatgactaccatgacatcattaagcaccccatggacctcagcactgtcaagcggaagatggagaaccgtgattaccgggatgcacaggagtttgctgctgatgtacggcttatgttctccaactgctataagtacaatcccccagatcacgatgttgtggcaatggcacgaaagctacaggatgtatttgagttccgttatgccaagatgccagatgaaccactagaaccagggcctttaccagtctctactgccatgccccctggcttggccaaatcgtcttcagagtcctccagtgaggaaagtagcagtgagagctcctctgaggaagaggaggaggaagatgaggaggacgaggaggaagaagagagtgaaagctcagactcagaggaagaaagggctcatcgcttagcagaactacaggaacagcttcgggcagtacatgaacaactggctgctctgtcccagggtccaatatccaagcccaagaggaaaagagagaaaaaagagaaaaagaagaaacggaaggcagagaagcatcgaggccgagctggggccgatgaagatgacaaggggcctagggcaccccgcccacctcaacctaagaagtccaagaaagcaagtggcagtgggggtggcagtgctgctttaggcccttctggctttggaccttctggaggaagtggcaccaagctccccaaaaaggccacaaagacagccccacctgccctgcctacaggttatgattcagaggaggaggaagagagcaggcccatgagttacgatgagaagcggcagctgagcctggacatcaacaaattacctggggagaagctgggccgagttgtgcatataatccaagccagggagccctctttacgtgattcaaacccagaagagattgagattgattttgaaacactcaagccatccacacttagagagcttgagcgctatgtcctttcctgcctacgtaagaaaccccggaagccctacaccattaagaagcctgtgggaaagacaaaggaggaactggctttggagaaaaagcgggaattagaaaagcggttacaagatgtcagcggacagctcaattctactaaaaagccccccaagaaagcgaatgagaaaacagagtcatcctctgcacagcaagtagcagtgtcacgccttagcgcttccagctctagctcagattccagctcctcctcttcctcgtcgtcgtcttcagacaccagtgattcagactcaggctaaggggtcaggccagatggggcaggaaggctccgcaggaccggacccctagaccaccctgccccacctgccccttccccctttgctgtgacacttcttcatctcacccccccctgcccccctctaggagagctggctctgcagtgggggagggatgcagggacatttactgaaggagggacatggacaaaacaacattgaattcccagccccattggggagtgatctcttggacacagagcccccattcaaaatggggcagggcaagggtgggagtgtgcaaagccctgatctggagttacctgaggccatagctgccctattcacttctaagggccctgttttgagattgtttgttctaatttattttaagctaggtaaggctggggggagggtggggccgtggtcccctcagcctccatggggagggaagaagggggagctctttttttacgttgatttttttttttctactctgttttccctttttccttccgctccatttggggccctgggggtttcagtcatctccccatttggtcccctggactgtctttgttgattctaacttgtaaataaagaaaatattattcaagttttgagttaccttaatatttgcttttgtagtgtttcaaaaggaacatcataagaattgtcttgataattttgagggaaatattactgcagtgagaaaaggcaatagctaacctataattggattgtcttaatttttaaaccagtaggcttttgctgtgtttttaataaagtaaatatgacttttgtaaattga

SEQ ID NO: 112274 - DNA, 3404 bp, Homo sapiens
  Payload ID: 1981
  Gene Symbol: BRD2
  Gene Name: bromodomain containing 2
  ENST ID: ENST00000492172
  CDS Start-End: 1573-2778
gctcgccctcctccctggcgctgaccgatggaccagccgctccgtggggaggactccggaccctggtgggggggcgggggggttctttcgcccccgtggcggagggcccctgagaggcggatacgggtgtgcctttgggggtgatgtggcgtgtggggggaaaggtccgagctcgcctggagggggagggtttttcccttaagtcatccctcccaggacttgctttttctgctctgagccggacgccggaatggagtttgaggaagagattcttcgctgctgctgccttaccgccgagaaccaccacccgccaggcgtcttgcggccacacccctggcgggttcaggcaggctacgcccacgcgacccctcccgtttccctgctttggccaatggaggagctacgaatggcacgacctgctcgagcttggcagtctccagttgggctgtgcatggaagcttgggaagactttgttggaaggggaggcggggagagagtgctggaggctctggggcgatggcttccgcacctcttccaaccaccctctttccctggagtcggcggaccacagctcagccaattggcttggagatgtggcgggttgccacttccctgtgggtctctgcggcactcttctgcctggtgactgacaccttggaaatgaagtttatgacgtcatcgttgcggctggccaatagaaaaagctcccgcggagaggtgttccttccccttcgactcagcttcttcacccgcgtgagcgagcgcgcgcgcgcggagggggtggggaaaatctcaagcagggtggcgcgcatgagcggcgaagctcctcctccccgcctatatataaagggctggcgcggggctcggcggcgccatttcgtgctggagtggagcagcctctagaacgagctggaggattctgcctaccgatacagagccttcgagtcgtccggggccgccattacaatccacctccatccgcttggaaatggccttcgtcccggcctatgactggtcccagcgggcagtacagaccccctagaagcccctggagctcccctttttcgggccccgcccaatcctcggagtctgtccaccccctctactccgccctcaagaggatttcaaagatggaggcggcggctccctaaaccacttttcgtgttcatccgcctccatccgagatcgaaacgggacctcgtcggccccgtaggggcccgacaagaagagggaatccctgcagaccaacagcgggctatattgacgacggtgtctgagatcggggaccgtcttttgaagagtcagtccctccttagttgcccgcctcagctgaggccgccgccattttcttgctgtccgccgtctgcagagcgcgccaagctgcccggagctctccgagaggccccaaagagactgctttcgtgccggccaggcagggggtttgtcgcctggaggcccaagaggaacggcctccccccaacttagcgggttatgctggaccgggcggtgaggggaaccgaggccacccggactttccgcggctgagggcagcgccggttccttgcggtcaagatgctgcaaaacgtgactccccacaataagctccctggggaagggaatgcagggttgctggggctgggcccagaagcagcagcaccagggaagaggattcgaaaaccctctctcttgtatgagggctttgagagccccacaatggcttcggtgcctgctttgcaacttacccctgccaacccaccacccccggaggtgtccaatcccaaaaagccaggacgagttaccaaccagctgcaatacctacacaaggtagtgatgaaggctctgtggaaacatcagttcgcatggccattccggcagcctgtggatgctgtcaaactgggtctaccggattatcacaaaattataaaacagcctatggacatgggtactattaagaggagacttgaaaacaattattattgggctgcttcagagtgtatgcaagattttaataccatgttcaccaactgttacatttacaacaagcccactgatgatattgtcctaatggcacaaacgctggaaaagatattcctacagaaggttgcatcaatgccacaagaagaacaagagctggtagtgaccatccctaagaacagccacaagaagggggccaagttggcagcgctccagggcagtgttaccagtgcccatcaggtgcctgccgtctcttctgtgtcacacacagccctctatactcctccacctgagatacctaccactgtcctcaacattccccacccatcagtcatttcctctccacttctcaagtccttgcactctgctggacccccgctccttgctgttactgcagctcctccagcccagccccttgccaagaaaaaaggcgtaaagcggaaagcagatactaccacccctacacctacagccatcttggctcctggttctccagctagccctcctgggagtcttgagcctaaggcagcacggcttccccctatgcgtagagagagtggtcgccccatcaagcccccacgcaaagacttgcctgactctcagcaacaacaccagagctctaagaaaggaaagctttcagaacagttaaaacattgcaatggcattttgaaggagttactctctaagaagcatgctgcctatgcttggcctttctataaaccagtggatgcttctgcacttggcctgcatgactaccatgacatcattaagcaccccatggacctcagcactgtcaagacataaatatttcttcaacccacccaaattcctttgacttcaaacttgaaccccagggcacagatccttaaggtcatccccactgtgctctcaagagagggctcttcttgtggtgtctggggttggcagggaaaggtgagtcttcctgcctgtgcagcttctgatgctgcctccttctgcagcggaagatggagaaccgtgattaccgggatgcacaggagtttgctgctgatgtacggcttatgttctccaactgctataagtacaatcccccagatcacgatgttgtggcaatggcacgaaagctacaggatgtatttgagttccgttatgccaagatgccagatgaaccactagaaccagggcctttaccagtctctactgccatgccccctggcttggccaaatcgtcttcagagtcctccagtgaggaaagtagcagtgagagctcctctgaggaagaggaggaggaagatgaggaggacgaggaggaagaagagagtgaaagctcagactcagaggaagaaagggctcatcgcttagcagaactacaggaacagcttcgggcagtacatgaacaactggctgctctgtcccagggtccaatatccaagcccaagaggaaaagagag

SEQ ID NO: 112275 - DNA, 3404 bp, Homo sapiens
  Payload ID: 1981
  Gene Symbol: BRD2
  Gene Name: bromodomain containing 2
  ENST ID: ENST00000486864
  CDS Start-End: 1573-2778
gctcgccctcctccctggcgctgaccgatggaccagccgctccgtggggaggactccggaccctggtgggggggcgggggggttctttcgcccccgtggcggagggcccctgagaggcggatacgggtgtgcctttgggggtgatgtggcgtgtggggggaaaggtccgagctcgcctggagggggagggtttttcccttaagtcatccctcccaggacttgctttttctgctctgagccggacgccggaatggagtttgaggaagagattcttcgctgctgctgccttaccgccgagaaccaccacccgccaggcgtcttgcggccacacccctggcgggttcaggcaggctacgcccacgcgacccctcccgtttccctgctttggccaatggaggagctacgaatggcacgacctgctcgagcttggcagtctccagttgggctgtgcatggaagcttgggaagactttgttggaaggggaggcggggagagagtgctggaggctctggggcgatggcttccgcacctcttccaaccaccctctttccctggagtcggcggaccacagctcagccaattggcttggagatgtggcgggttgccacttccctgtgggtctctgcggcactcttctgcctggtgactgacaccttggaaatgaagtttatgacgtcatcgttgcggctggccaatagaaaaagctcccgcggagaggtgttccttccccttcgactcagcttcttcacccgcgtgagcgagcgcgcgcgcgcggagggggtggggaaaatctcaagcagggtggcgcgcatgagcggcgaagctcctcctccccgcctatatataaagggctggcgcggggctcggcggcgccatttcgtgctggagtggagcagcctctagaacgagctggaggattctgcctaccgatacagagccttcgagtcgtccggggccgccattacaatccacctccatccgcttggaaatggccttcgtcccggcctatgactggtcccagcgggcagtacagaccccctagaagcccctggagctcccctttttcgggccccgcccaatcctcggagtctgtccaccccctctactccgccctcaagaggatttcaaagatggaggcggcggctccctaaaccacttttcgtgttcatccgcctccatccgagatcgaaacgggacctcgtcggccccgtaggggcccgacaagaagagggaatccctgcagaccaacagcgggctatattgacgacggtgtctgagatcggggaccgtcttttgaagagtcagtccctccttagttgcccgcctcagctgaggccgccgccattttcttgctgtccgccgtctgcagagcgcgccaagctgcccggagctctccgagaggccccaaagagactgctttcgtgccggccaggcagggggtttgtcgcctggaggcccaagaggaacggcctccccccaacttagcgggttatgctggaccgggcggtgaggggaaccgaggccacccggactttccgcggctgagggcagcgccggttccttgcggtcaagatgctgcaaaacgtgactccccacaataagctccctggggaagggaatgcagggttgctggggctgggcccagaagcagcagcaccagggaaaaggattcgaaaaccctctctcttgtatgagggctttgagagccccacaatggcttcggtgcctgctttgcaacttacccctgccaacccaccacccccggaggtgtccaatcccaaaaagccaggacgagttaccaaccagctgcaatacctacacaaggtagtgatgaaggctctgtggaaacatcagttcgcatggccattccggcagcctgtggatgctgtcaaactgggtctaccggattatcacaaaattataaaacagcctatggacatgggtactattaagaggagacttgaaaacaattattattgggctgcttcagagtgtatgcaagattttaataccatgttcaccaactgttacatttacaacaagcccactgatgatattgtcctaatggcacaaacgctggaaaagatattcctacagaaggttgcatcaatgccacaagaagaacaagagctggtagtgaccatccctaagaacagccacaagaagggggccaagttggcagcgctccagggcagtgttaccagtgcccatcaggtgcctgccgtctcttctgtgtcacacacagccctgtatactcctccacctgagatacctaccactgtcctcaacattccccacccatcagtcatttcctctccacttctcaagtccttgcactctgctggacccccgctccttgctgttactgcagctcctccagcccagccccttgccaagaaaaaaggcgtaaagcggaaagcagatactaccacccctacacctacagccatcttggctcctggttctccagctagccctcctgggagtcttgagcctaaggcagcacggcttccccctatgcgtagagagagtggtcgccccatcaagcccccacgcaaagacttgcctgactctcagcaacaacaccagagctctaagaaaggaaagctttcagaacagttaaaacattgcaatggcattttgaaggagttactctctaagaagcatgctgcctatgcttggcctttctataaaccagtggatgcttctgcacttggcctgcatgactaccatgacatcattaagcaccccatggacctcagcactgtcaagacataaatatttcttcaacccacccaaattcctttgacttcaaacttgaaccccagggcacagatccttaaggtcatccccactgtgctctcaagagagggctcttcttgtggtgtctggggttggcagggaaaggtgagtcttcctgcctgtgcagcttctgatgctgcctccttctgcagcggaagatggagaaccgtgattaccgggatgcacaggagtttgctgctgatgtacggcttatgttctccaactgctataagtacaatcccccagatcacgatgttgtggcaatggcacgaaagctacaggatgtatttgagttccgttatgccaagatgccagatgaaccactagaaccagggcctttaccagtctctactgccatgccccctggcttggccaaatcgtcttcagagtcctccagtgaggaaagtagcagtgagagctcctctgaggaagaggaggaggaagatgaggaggacgaggaggaagaagagagtgaaagctcagactcagaggaagaaagggctcatcgcttagcagaactacaggaacagcttcgggcagtacatgaacaactggctgctctgtcccagggtccaatatccaagcccaagaggaaaagagag

SEQ ID NO: 112276 - DNA, 3404 bp, Homo sapiens
  Payload ID: 1981
  Gene Symbol: BRD2
  Gene Name: bromodomain containing 2
  ENST ID: ENST00000495733
  CDS Start-End: 1573-2778
gctcgccctcctccctggcgctgaccgatggaccagccgctccgtggggaggactccggaccctggtgggggggcgggggggttctttcgcccccgtggcggagggcccctgagaggcggatacgggtgtgcctttgggggtgatgtggcgtgtggggggaaaggtccgagctcgcctggagggggagggtttttcccttaagtcatccctcccaggacttgctttttctgctctgagccggacgccggaatggagtttgaggaagagattcttcgctgctgctgccttaccgccgagaaccaccacccgccaggcgtcttgcggccacacccctggcgggttcaggcaggctacgcccacgcgacccctcccgtttccctgctttggccaatggaggagctacgaatggcacgacctgctcgagcttggcagtctccagttgggctgtgcatggaagcttgggaagactttgttggaaggggaggcggggagagagtgctggaggctctggggcgatggcttccgcacctcttccaaccaccctctttccctggagtcggcggaccacagctcagccaattggcttggagatgtggcgggttgccacttccctgtgggtctctgcggcactcttctgcctggtgactgacaccttggaaatgaagtttatgacgtcatcgttgcggctggccaatagaaaaagctcccgcggagaggtgttccttccccttcgactcagcttcttcacccgcgtgagcgagcgcgcgcgcgcggagggggtggggaaaagctcaagcagggtggcgcgcatgagcggcgaagctcctcctccccgcctatatataaagggctggcgcggggctcggcggcgccatttcgtgctggagtggagcagcctctagaacgagctggaggattctgcctaccgatacagagccttcgagtcgtccggggccgccattacaatccacctccatccgcttggaaatggccttcgtcccggcctatgactggtcccagcgggcagtacagaccccctagaagcccctggagctcccctttttcgggccccgcccaatcctcggagtctgtccaccccctctactccgccctcaagaggatttcaaagatggaggcggcggctccctaaaccacttttcgtgttcatccgcctccatccgagatcgaaacgggacctcgtcggccccgtaggggcccgacaagaagagggaatccctgcagaccaacagcgggctatattgacgacggtgtctgagatcggggaccgtcttttgaagagtcagtccctccttagttgcccgcctcagctgaggccgccgccattttcttgctgtccgccgtctgcagagcgcgccaagctgcccggagctctccgagaggccccaaagagactgctttcgtgccggccaggcagggggtttgtcgcctggaggcccaagaggaacggcctccccccaacttagcgggttatgctggaccgggcggtgaggggaaccgaggccacccggactttccgcggctgagggcagcgccggttccttgcggtcaagatgctgcaaaacgtgactccccacaataagctccctggggaagggaatgcagggttgctggggctgggcccagaagcagcagcaccagggaagaggattcgaaaaccctctctcttgtatgagggctttgagagccccacaatggcttcggtgcctgctttgcaacttacccctgccaacccaccacccccggaggtgtccaatcccaaaaagccaggacgagttaccaaccagctgcaatacctacacaaggtagtgatgaaggctctgtggaaacatcagttcgcatggccattccggcagcctgtggatgctgtcaaactgggtctaccggattatcacaaaattataaaacagcctatggacatgggtactattaagaggagacttgaaaacaattattattgggctgcttcagagtgtatgcaagattttaataccatgttcaccaactgttacatttacaacaagcccactgatgatattgtcctaatggcacaaacgctggaaaagatattcctacagaaggttgcatcaatgccacaagaagaacaagagctggtagtgaccatccctaagaacagccacaagaagggggccaagttggcagcgctccagggcagtgttaccagtgcccatcaggtgcctgccgtctcttctgtgtcacacacagccctgtatactcctccacctgagatacctaccactgtcctcaacattccccacccatcagtcatttcctctccacttctcaagtccttgcactctgctggacccccgctccttgctgttactgcagctcctccagcccagccccttgccaagaaaaaaggcgtaaagcggaaagcagatactaccacccctacacctacagccatcttggctcctggttctccagctagccctcctgggagtcttgagcctaaggcagcacggcttccccctatgcgtagagagagtggtcgccccatcaagcccccacgcaaagacttgcctgactctcagcaacaacaccagagctctaagaaaggaaagctttcagaacagttaaaacattgcaatggcattttgaaggagttactctctaagaagcatgctgcctatgcttggcctttctataaaccagtggatgcttctgcacttggcctgcatgactaccatgacatcattaagcaccccatggacctcagcactgtcaagacataaatatttcttcaacccacccaaattcctttgacttcaaacttgaaccccagggcacagatccttaaggtcatccccactgtgctctcaagagagggctcttcttgtggtgtctggggttggcagggaaaggtgagtcttcctgcctgtgcagcttctgatgctgcctccttctgcagcggaagatggagaaccgtgattaccgggatgcacaggagtttgctgctgatgtacggcttatgttctccaactgctataagtacaatcccccagatcacgatgttgtggcaatggcacgaaagctacaggatgtatttgagttccgttatgccaagatgccagatgaaccactagaaccagggcctttaccagtctctactgccatgccccctggcttggccaaatcgtcttcagagtcctccagtgaggaaagtagcagtgagagctcctctgaggaagaggaggaggaagatgaggaggacgaggaggaagaagagagtgaaagctcagactcagaggaagaaagggctcatcgcttagcagaactacaggaacagcttcgggcagtacatgaacaactggctgctctgtcccagggtccaatatccaagcccaagaggaaaagagag

SEQ ID NO: 112277 - DNA, 4834 bp, Homo sapiens
  Payload ID: 1981
  Gene Symbol: BRD2
  Gene Name: bromodomain containing 2
  ENST ID: ENST00000477259
  CDS Start-End: 1550-1993
accgatggaccagccgctccgtggggaggactccggaccctggtgggggggcgggggggttctttcgcccccgtggcggagggcccctgagaggcggatacgggtgtgcctttgggggtgatgtggcgtgtggggggaaaggtccgagctcgcctggagggggagggtttttcccttaagtcatccctcccaggacttgctttttctgctctgagccggacgccggaatggagtttgaggaagagattcttcgctgctgctgccttaccgccgagaaccaccacccgccaggcgtcttgcggccacacccctggcgggttcaggcaggctacgcccacgcgacccctcccgtttccctgctttggccaatggaggagctacgaatggcacgacctgctcgagcttggcagtctccagttgggctgtgcatggaagcttgggaagactttgttggaaggggaggcggggagagagtgctggaggctctggggcgatggcttccgcacctcttccaaccaccctctttccctggagtcggcggaccacagctcagccaattggcttggagatgtggcgggttgccacttccctgtgggtctctgcggcactcttctgcctggtgactgacaccttggaaatgaagtttatgacgtcatcgttgcggctggccaatagaaaaagctcccgcggagaggtgttccttccccttcgactcagcttcttcacccgcgtgagcgagcgcgcgcgcgcggagggggtggggaaaatctcaagcagggtggcgcgcatgagcggcgaagctcctcctccccgcctatatataaagggctggcgcggggctcggcggcgccatttcgtgctggagtggagcagcctctagaacgagctggaggattctgcctaccgatacagagccttcgagtcgtccggggccgccattacaatccacctccatccgcttggaaatggccttcgtcccggcctatgactggtcccagcgggcagtacagaccccctagaagcccctggagctcccctttttcgggccccgcccaatcctcggagtctgtccaccccctctactccgccctcaagaggatttcaaagatggaggcggcggctccctaaaccacttttcgtgttcatccgcctccatccgagatcgaaacgggacctcgtcggccccgtaggggcccgacaagaagagggaatccctgcagaccaacagcgggctatattgacgacggtgtctgagatcggggaccgtcttttgaagagtcagtccctccttagttgcccgcctcagctgaggccgccgccattttcttgctgtccgccgtctgcagagcgcgccaagctgcccggagctctccgagaggccccaaagagactgctttcgtgccggccaggcagggggtttgtcgcctggaggcccaagaggaacggcctccccccaacttagcgggttatgctggaccgggcggtgaggggaaccgaggccacccggactttccgcggctgagggcagcgccggttccttgcggtcaagatgctgcaaaacgtgactccccacaataagctccctggggaagggaatgcagggttgctggggctgggcccagaagcagcagcaccagggaaaaggattcgaaaaccctctctcttgtatgagggctttgagagccccacaatggcttcggtgcctgctttgcaacttacccctgccaacccaccacccccggaggtgtccaatcccaaaaagccaggacgagttaccaaccagctgcaatacctacacaaggtagtgatgaaggctctgtggaaacatcagttcgcatggccattccggcagcctgtggatgctgtcaaactgggtctaccgattcccacctcgggttgggagaggaccacggtggccaaaattcttagcttcttcctttccctcatgcagcccatggatagccagccccagaggattatcacaaaattataaaacagcctatggacatgggtactattaagaggagacttgaaaacaattattattgggctgcttcagagtgtatgcaagattttaataccatgttcaccaactgttacatttacaacaagcccactgatgatattgtcctaatggcacaaacgctggaaaagatattcctacagaaggttgcatcaatgccacaagaagaacaagagctggtagtgaccatccctaagaacagccacaagaagggggccaagttggcagcgctccagggcagtgttaccagtgcccatcaggtgcctgccgtctcttctgtgtcacacacagccctgtatactcctccacctgagatacctaccactgtcctcaacattccccacccatcagtcatttcctctccacttctcaagtccttgcactctgctggacccccgctccttgctgttactgcagctcctccagcccagccccttgccaagaaaaaaggcgtaaagcggaaagcagatactaccacccctacacctacagccatcttggctcctggttctccagctagccctcctgggagtcttgagcctaaggcagcacggcttccccctatgcgtagagagagtggtcgccccatcaagcccccacgcaaagacttgcctgactctcagcaacaacaccagagctctaagaaaggaaagctttcagaacagttaaaacattgcaatggcattttgaaggagttactctctaagaagcatgctgcctatgcttggcctttctataaaccagtggatgcttctgcacttggcctgcatgactaccatgacatcattaagcaccccatggacctcagcactgtcaagcggaagatggagaaccgtgattaccgggatgcacaggagtttgctgctgatgtacggcttatgttctccaactgctataagtacaatcccccagatcacgatgttgtggcaatggcacgaaagctacaggatgtatttgagttccgttatgccaagatgccagatgaaccactagaaccagggcctttaccagtctctactgccatgccccctggcttggccaaatcgtcttcagagtcctccagtgaggaaagtagcagtgagagctcctctgaggaagaggaggaggaagatgaggaggacgaggaggaagaagagagtgaaagctcagactcagaggaagaaagggctcatcgcttagcagaactacaggaacagcttcgggcagtacatgaacaactggctgctctgtcccagggtccaatatccaagcccaagaggaaaagagagaaaaaagagaaaaagaagaaacggaaggcagagaagcatcgaggccgagctggggccgatgaagatgacaaggggcctagggcaccccgcccacctcaacctaagaagtccaagaaagcaagtggcagtgggggtggcagtgctgctttaggcccttctggctttggaccttctggaggaagtggcaccaagctccccaaaaaggccacaaagacagccccacctgccctgcctacaggttatgattcagaggaggaggaagagagcaggcccatgagttacgatgagaagcggcagctgagcctggacatcaacaaattacctggggagaagctgggccgagttgtgcatataatccaagccagggagccctctttacgtgattcaaacccagaagagattgagattgattttgaaacactcaagccatccacacttagagagcttgagcgctatgtcctttcctgcctacgtaagaaaccccggaagccctacaccattaagaagcctgtgggaaagacaaaggaggaactggctttggagaaaaagcgggaattagaaaagcggttacaagatgtcagcggacagctcaattctactaaaaagccccccaagaaagcgaatgagaaaacagagtcatcctctgcacagcaagtagcagtgtcacgccttagcgcttccagctccagctcagattccagctcctcctcttcctcgtcgtcgtcttcagacaccagtgattcagactcaggctaaggggtcaggccagatggggcaggaaggctccgcaggaccggacccctagaccaccctgccccacctgccccttccccctttgctgtgacacttcttcatctcacccccccctgcccccctctaggagagctggctctgcagtgggggagggatgcagggacatttactgaaggagggacatggacaaaacaacattgaattcccagccccattggggagtgatctcttggacacagagcccccattcaaaatggggcagggcaagggtgggagtgtgcaaagccctgatctggagttacctgaggccatagctgccctattcacttctaagggccctgttttgagattgtttgttctaatttattttaagctaggtaaggctggggggagggtggggccgtggtcccctcagcctccatggggagggaagaagggggagctctttttttacgttgatttttttttttctactctgttttccctttttccttccgctccatttggggccctgggggtttcagtcatctccccatttggtcccctggactgtctttgttgattctaacttgtaaataaagaaaatattattcaagttttgagttaccttaatatttgcttttgtagtgtttcaaaaggaacatcataagaattgtcttgataattttgagggaaatattactgcagtgagaaaaggcaatagctaacctataattggattgtcttaatttttaaaccagtaggcttttgctgtgtttttaataaagtaaatatgacttttgtaaattga

SEQ ID NO: 112278 - DNA, 4807 bp, Homo sapiens; identical to SEQ ID NO: 112236
  Payload ID: 1981
  Gene Symbol: BRD2
  Gene Name: bromodomain containing 2
  Uniprot ID: P25440
  ENST ID: ENST00000549126
  CDS Start-End: 1615-4020

SEQ ID NO: 112279 - DNA, 4893 bp, Homo sapiens
  Payload ID: 1981
  Gene Symbol: BRD2
  Gene Name: bromodomain containing 2
  Uniprot ID: P25440
  ENST ID: ENST00000552587
  CDS Start-End: 1702-4107
ggaccgcgggataggaagctggggatatggacaagcagcagcgttatagcgctctgggtttcgggacataggcctgggccatgcggcccccttggccccttggcgcgacccccaggaacgttcggaaagctggtcctcgtggctgggggaaaggcggggggtgggggggaagcgggcacgtgaccccggtcagccaatctgggtgctgctgacgtggccgcgcggccccgatgctctccccacccccccagcccgttcgggaagggaggggctgggggctacgccccctcccccagcacggcttcgttttctgggggggggttgacaccccggattacataccccgtaccaagccgagggcaactttggaggccccctggaaggctttaggatccagattcttcgctgctgctgccttaccgccgagaaccaccacccgccaggcgtcttgcggccacacccctggcgggttcaggcaggctacgcccacgcgacccctcccgtttccctgctttggccaatggaggagctacgaatggcacgacctgctcgagcttggcagtctccagttgggctgtgcatggaagcttgggaagactttgttggaaggggaggcggggagagagtgctggaggctctggggcgatggcttccgcacctcttccaaccaccctctttccctggagtcggcggaccacagctcagccaattggcttggagatgtggcgggttgccacttccctgtgggtctctgcggcactcttctgcctggtgactgacaccttggaaatgaagtttatgacgtcatcgttgcggctggccaatagaaaaagctcccgcggagaggtgttccttccccttcgactcagcttcttcacccgcgtgagcgagcgcgcgcgcgcggagggggtggggaaaatctcaagcagggtggcgcgcatgagcggcgaagctcctcctccccgcctatatataaagggctggcgcggggctcggcggcgccatttcgtgctggagtggagcagcctctagaacgagctggaggattctgcctaccgatacagagccttcgagtcgtccggggccgccattacaatccacctccatccgcttggaaatggccttcgtcccggcctatgactggtcccagcgggcagtacagaccccctagaagcccctggagctcccctttttcgggccccgcccaatcctcggagtctgtccaccccctctactccgccctcaagaggatttcaaagatggaggcggcggctccctaaaccacttttcgtgttcatccgcctccatccgagatcgaaacgggacctcgtcggccccgtaggggcccgacaagaagagggaatccctgcagaccaacagcgggctatattgacgacggtgtctgagatcggggaccgtcttttgaagagtcagtccctccttagttgcccgcctcagctgaggccgccgccattttcttgctgtccgccgtctgcagagcgcgccaagctgcccggagctctccgagaggccccaaagagactgctttcgtgccggccaggcagggggtttgtcgcctggaggcccaagaggaacggcctccccccaacttagcgggttatgctggaccgggcggtgaggggaaccgaggccacccggactttccgcggctgagggcagcgccggttccttgcggtcaagatgctgcaaaacgtgactccccacaataagctccctggggaagggaatgcagggttgctggggctgggcccagaagcagcagcaccagggaagaggattcgaaaaccctctctcttgtatgagggctttgagagccccacaatggcttcggtgcctgctttgcaacttacccctgccaacccaccacccccggaggtgtccaatcccaaaaagccaggacgagttaccaaccagctgcaatacctacacaaggtagtgatgaaggctctgtggaaacatcagttcgcatggccattccggcagcctgtggatgctgtcaaactgggtctaccggattatcacaaaattataaaacagcctatggacatgggtactattaagaggagacttgaaaacaattattattgggctgcttcagagtgtatgcaagattttaataccatgttcaccaactgttacatttacaacaagcccactgatgatattgtcctaatggcacaaacgctggaaaagatattcctacagaaggttgcatcaatgccacaagaagaacaagagctggtagtgaccatccctaagaacagccacaagaagggggccaagttggcagcgctccagggcagtgttaccagtgcccatcaggtgcctgccgtctcttctgtgtcacacacagccctctatactcctccacctgagatacctaccactgtcctcaacattccccacccatcagtcatttcctctccacttctcaagtccttgcactctgctggacccccgctccttgctgttactgcagctcctccagcccagccccttgccaagaaaaaaggcgtaaagcggaaagcagatactaccacccctacacctacagccatcttggctcctggttctccagctagccctcctgggagtcttgagcctaaggcagcacggcttccccctatgcgtagagagagtggtcgccccatcaagcccccacgcaaagacttgcctgactctcagcaacaacaccagagctctaagaaaggaaagctttcagaacagttaaaacattgcaatggcattttgaaggagttactctctaagaagcatgctgcctatgcttggcctttctataaaccagtggatgcttctgcacttggcctgcatgactaccatgacatcattaagcaccccatggacctcagcactgtcaagcggaagatggagaaccgtgattaccgggatgcacaggagtttgctgctgatgtacggcttatgttctccaactgctataagtacaatcccccagatcacgatgttgtggcaatggcacgaaagctacaggatgtatttgagttccgttatgccaagatgccagatgaaccactagaaccagggcctttaccagtctctactgccatgccccctggcttggccaaatcgtcttcagagtcctccagtgaggaaagtagcagtgagagctcctctgaggaagaggaggaggaagatgaggaggacgaggaggaagaagagagtgaaagctcagactcagaggaagaaagggctcatcgcttagcagaactacaggaacagcttcgggcagtacatgaacaactggctgctctgtcccagggtccaatatccaagcccaagaggaaaagagagaaaaaagagaaaaagaagaaacggaaggcagagaagcatcgaggccgagctggggccgatgaagatgacaaggggcctagggcaccccgcccacctcaacctaagaagtccaagaaagcaagtggcagtgggggtggcagtgctgctttaggcccttctggctttggaccttctggaggaagtggcaccaagctccccaaaaaggccacaaagacagccccacctgccctgcctacaggttatgattcagaggaggaggaagagagcaggcccatgagttacgatgagaagcggcagctgagcctggacatcaacaaattacctggggagaagctgggccgagttgtgcatataatccaagccagggagccctctttacgtgattcaaacccagaagagattgagattgattttgaaacactcaagccatccacacttagagagcttgagcgctatgtcctttcctgcctacgtaagaaaccccggaagccctacaccattaagaagcctgtgggaaagacaaaggaggaactggctttggagaaaaagcgggaattagaaaagcggttacaagatgtcagcggacagctcaattctactaaaaagccccccaagaaagcgaatgagaaaacagagtcatcctctgcacagcaagtagcagtgtcacgccttagcgcttccagctctagctcagattccagctcctcctcttcctcgtcgtcgtcttcagacaccagtgattcagactcaggctaaggggtcaggccagatggggcaggaaggctccgcaggaccggacccctagaccaccctgccccacctgccccttccccctttgctgtgacacttcttcatctcacccccccctgcccccctctaggagagctggctctgcagtgggggagggatgcagggacatttactgaaggagggacatggacaaaacaacattgaattcccagccccattggggagtgatctcttggacacagagcccccattcaaaatggggcagggcaagggtgggagtgtgcaaagccctgatctggagttacctgaggccatagctgccctattcacttctaagggccctgttttgagattgtttgttctaatttattttaagctaggtaaggctggggggagggtggggccgtggtcccctcagcctccatggggagggaagaagggggagctctttttttacgttgatttttttttttctactctgttttccctttttccttccgctccatttggggccctgggggtttcagtcatctccccatttggtcccctggactgtctttgttgattctaacttgtaaataaagaaaatattattcaagttttgagttaccttaatatttgcttttgtagtgtttcaaaaggaacatcataagaattgtcttgataattttgagggaaatattactgcagtgagaaaaggcaatagctaacctataattggattgtcttaatttttaaaccagtaggcttttgctgtgtttttaataaagtaaatatgacttttgtaaattg

SEQ ID NO: 112280 - DNA, 735 bp, Homo sapiens
  Payload ID: 1981
  Gene Symbol: BRD2
  Gene Name: bromodomain containing 2
  ENST ID: ENST00000496118
  CDS Start-End: 82-570
agatttgtccttcaaaccttttacagccaatgggagcgtggagggggggcgagcgggagagggccatggggggggaggggaatggccagcctcatgcctccgtacccattggagggcaaaggggttagggggcggtgtggccccccctattccattcgtcccctgggggtacagcagccgggagccagattcttcgctgctgctgccttaccgccgagaaccaccacccgccaggcgtcttgcggccacacccctggcgggttcaggcaggctacgcccacgcgacccctcccgtttccctgctttggccaatggaggagctacgaatggcacgacctgctcgagcttggcagtctccagttgggctgtgcatggaagcttgggaagactttgttggaaggggaggcggggagagagtgctggaggctctggggcgatggcttccgcacctcttccaaccaccctctttccctggagtcggcggaccacagctcagccaattggcttggagatgtggcgggttgccacttccctgtgggtctctgcggcactcttctgcctggtgactgacaccttggaaatgaagtttatgacgtcatcgttgcggctggccaatagaaaaagctcccgcggagaggtgttccttccccttcgactcagcttcttcacccgcgtgagcgagcgcgcgcgcgcggagggggtggggaaaagctcaagcagggtggcgcgcatgag

SEQ ID NO: 112281 - DNA, 565 bp, Homo sapiens
  Payload ID: 1981
  Gene Symbol: BRD2
  Gene Name: bromodomain containing 2
  ENST ID: ENST00000606059
  CDS Start-End: 1-478
acccccgctccttgctgttactgcagctcctccagcccagccccttgccaagaaaaaaggcgtaaagcggaaagcagatactaccacccctacacctacagccatcttggctcctggttctccagctagccctcctgggagtcttgagcctaaggcagcacggcttccccctatgcgtagagagagtggtcgccccatcaagcccccacgcaaagacttgcctgactctcagcaacaacaccagagctctaagaaaggaaagctttcagaacagttaaaacattgcaatggcattttgaaggagttactctctaagaagcatgctgcctatgcttggcctttctataaaccagtggatgcttctgcacttggcctgcatgactaccatgacatcattaagcaccccatggacctcagcactgtcaaggtacccactgcatggggcagatgggatgctcaggcagtgatgggagcctaggtgcaaaacaataagtctccttatgtgggcacacagcagtctttggttcttggcattttacttttataaaataatagtggaacagaa

SEQ ID NO: 112282 - DNA, 2338 bp, Homo sapiens
  Payload ID: 1981
  Gene Symbol: BRD2
  Gene Name: bromodomain containing 2
  ENST ID: ENST00000607833
  CDS Start-End: 683-2338
gagcagcctctagaacgagctggaggattctgcctaccgatacagagccttcgagtcgtccggggccgccattacaatccacctccatccgcttggaaatggccttcgtcccggcctatgactggtcccagcgggcagtacagaccccctagaagcccctggagctcccctttttcgggccccgcccaatcctcggagtctgtccaccccctctactccgccctcaagaggatttcaaagatggaggcggcggctccctaaaccacttttcgtgttcatccgcctccatccgagatcgaaacgggacctcgtcggccccgtaggggcccgacaagaagagggaatccctgcagaccaacagcgggctatattgacgacggtgtctgagatcggggaccgtcttttgaagagtcagtccctccttagttgcccgcctcagctgaggccgccgccattttcttgctgtccgccgtctgcagagcgcgccaagctgcccggagctctccgagaggccccaaagagactgctttcgtgccggccaggcagggggtttgtcgcctggaggcccaagaggaacggcctccccccaacttagcgggttatgctggaccgggcggtgaggggaaccgaggccacccggactttccgcggctgagggcagcgccggttccttgcggtcaagatgctgcaaaacgtgactccccacaataagctccctggggaagggaatgcagggttgctggggctgggcccagaagcagcagcaccagggaagaggattcgaaaaccctctctcttgtatgagggctttgagagccccacaatggcttcggtgcctgctttgcaacttacccctgccaacccaccacccccggaggtgtccaatcccaaaaagccaggacgagttaccaaccagctgcaatacctacacaaggtagtgatgaaggctctgtggaaacatcagttcgcatggccattccggcagcctgtggatgctgtcaaactgggtctaccggattatcacaaaattataaaacagcctatggacatgggtactattaagaggagacttgaaaacaattattattgggctgcttcagagtgtatgcaagattttaataccatgttcaccaactgttacatttacaacaagcccactgatgatattgtcctaatggcacaaacgctggaaaagatattcctacagaaggttgcatcaatgccacaagaagaacaagagctggtagtgaccatccctaagaacagccacaagaagggggccaagttggcagcgctccagggcagtgttaccagtgcccatcaggtgcctgccgtctcttctgtgtcacacacagccctgtatactcctccacctgagatacctaccactgtcctcaacattccccacccatcagtcatttcctctccacttctcaagtccttgcactctgctggacccccgctccttgctgttactgcagctcctccagcccagccccttgccaagaaaaaaggcgtaaagcggaaagcagatactaccacccctacacctacagccatcttggctcctggttctccagctagccctcctgggagtcttgagcctaaggcagcacggcttccccctatgcgtagagagagtggtcgccccatcaagcccccacgcaaagacttgcctgactctcagcaacaacaccagagctctaagaaaggaaagctttcagaacagttaaaacattgcaatggcattttgaaggagttactctctaagaagcatgctgcctatgcttggcctttctataaaccagtggatgcttctgcacttggcctgcatgactaccatgacatcattaagcaccccatggacctcagcactgtcaagcggaagatggagaaccgtgattaccgggatgcacaggagtttgctgctgatgtacggcttatgttctccaactgctataagtacaatcccccagatcacgatgttgtggcaatggcacgaaagctacaggatgtatttgagttccgttatgccaagatgccagatgaaccactagaaccagggcctttaccagtctctactgccatgccccctggcttggccaaatcgtcttcagagtcctccagtgaggaaagtagcagtgagagctcctctgaggaagaggaggaggaagatgaggaggacgaggaggaagaagagagtgaaagctcagactcagaggaagaaagggctcatcgcttagcagaactacaggaacagcttcgggcagtacatgaacaactggctgctctgtcccagggtccaatatccaagcccaagaggaaaagagagaaaaaa

SEQ ID NO: 112283 - DNA, 5652 bp, Homo sapiens
  Payload ID: 1982
  Gene Symbol: BRD3
  Gene Name: bromodomain containing 3
  Uniprot ID: Q15059
  ENST ID: ENST00000303407
  CDS Start-End: 187-2367
ccggggccggcgagccaaagaggagccggccgcgcgggccgggaggggacggccgccggagccgcgaggccaactgtcgcctggttgggcccggaaatgggacgtcgcgctttctcagggagcgtagaagcagccagggcctctccaagccgctgctgtgacagaaagtgagtgagctgccggaggatgtccaccgccacgacagtcgcccccgcggggatcccggcgaccccgggccctgtgaacccaccccccccggaggtctccaaccccagcaagcccggccgcaagaccaaccagctgcagtacatgcagaatgtggtggtgaagacgctctggaaacaccagttcgcctggcccttctaccagcccgtggacgcaatcaaattgaacctgccggattatcataaaataattaaaaacccaatggatatggggactattaagaagagactagaaaataattattattggagtgcaagcgaatgtatgcaggacttcaacaccatgtttacaaattgttacatttataacaagcccacagatgacatagtgctaatggcccaagctttagagaaaatttttctacaaaaagtggcccagatgccccaagaggaagttgaattattaccccctgctccaaagggcaaaggtcggaagccggctgcgggagcccagagcgcaggtacacagcaagtggcggccgtgtcctctgtctccccagcgaccccctttcagagcgtgccccccaccgtctcccagacgcccgtcatcgctgccacccctgtaccaaccatcactgcaaacgtcacgtcggtcccagtccccccagctgccgccccacctcctcctgccacacccatcgtccccgtggtccctcctacgccgcctgtcgtcaagaaaaagggcgtgaagcggaaagcagacacaaccactcccacgacgtcggccatcactgccagccggagtgagtcgcccccgccgttgtcagaccccaagcaggccaaagtggtggcccggcgggagagtggtggccgccccatcaagcctcccaagaaggacctggaggacggcgaggtgccccagcacgcaggcaagaagggcaagctgtcggagcacctacgctactgcgacagcatcctcagggagatgctatccaagaagcacgcggcctacgcctggcccttctacaagccagtggatgccgaggccctggagctgcacgactaccacgacatcatcaagcacccgatggacctcagcaccgtgaaaaggaagatggatggccgagagtacccagacgcacagggctttgctgctgatgtccggctgatgttctcgaattgctacaaatacaatcccccagaccacgaggttgtggccatggcccggaagctccaggacgtgtttgagatgaggtttgccaagatgccagatgagcccgtggaggcaccggcgctgcctgcccccgcggcccccatggtgagcaagggcgctgagagcagccgtagcagtgaggagagctcttcggactcaggcagctcggactcggaggaggagcgggccaccaggctggcggagctgcaggagcagctgaaggccgtgcacgagcagctggccgccctgtctcaggccccagtaaacaaaccaaagaagaagaaggagaagaaggagaaggagaagaagaagaaggacaaggagaaggagaaggagaagcacaaagtgaaggccgaggaagagaagaaggccaaggtggctccgcctgccaagcaggctcagcagaagaaggctcctgccaagaaggccaacagcacgaccacggccggcagacagctgaagaaaggcggcaagcaggcatctgcctcctacgactcagaggaagaggaggagggcctgcccatgagctacgatgaaaagcgccagcttagcctggacatcaaccggctgcccggggagaagctgggccgggtagtgcacatcatccaatctcgggagccctcgctcagggactccaaccccgacgagatagaaattgactttgagactctgaaacccaccactttgcgggaactggagagatatgtcaagtcttgtttacagaaaaagcaaaggaaaccgttctcagcaagcgggaagaaacaggcagccaagtcgaaagaggagctagctcaggaaaagaagaaggagctggaaaagcgtctgcaggatgtcagcgggcagctgagcagcagcaagaagcccgcccggaaagagaagcccggctcagcaccctcagggggcccgtccaggctcagcagcagcagctcctccgagtctgggagcagcagctccagcgggtccagctctgacagcagtgactcagaatgaactggcttcggacagaacaggacagatggatgtcgcacacgccgagactctgccgtacccctctgtggttcatattactacttctgttccatggtgtgcaggtctgcttcttaattcagtgttatgatatcttccagtttttgctttcataggtcagagatctatcttgtgtgtgcgttagacttgatgagaaggtgtgaactctgcagaaagtctcttcttcatcactgaattcagtcacttggagatgacaacttcaaatgctaacccgatgaccccagaaaaccgtgtgagattcgtaccgaagaaccttgtggaatccctttgcttaggcccaacctggtcgatagctcgagaaagaattttttccaaggaaatgtctcggatatgggtactgtatttgaaagctgttagctttgtcaacacgcattgtccttgtcatttgggccccgagctctgaccctcgtgtctgacgcggccacctctttctggaggggctgaggacagatgtgcctgcttgtggagaccaggctgggcctaagcgaagggtcatcgcagccccagcccggagcgtggagcccttggggggtggtcgggtgggatgtgcgttctccgctcgtggtgatgtcaggagctcctcggagggaacagagcggctgtgtatgcagcctgcaggtttccatacactgaagcttttacctcaactttaaaaaaaaaaaaagaagaaaagatttaaaaaaaaaaaaaaaggagactttttttgtaaggttcggcaattttctacggaagtccagcccgctgtgagtccccgcctggctagcgctgcccctgctgctgctgccgcgccacccttgggaaccacttcccgagcttatgtgtatataaatagttatttattaacatcattggtcatttttaaaaaaaagaaaataagaaaaaaccgcagaagaaatgcattcacacagtcgcagagatgcaggccttgccagtggtgtgccgggcgcgggtcctgtctggcggcggcctgtcgtctccaggtgctaactcctgccaccgcgcggtgctcacccacgtctgttcgcgcgctcgcccctgggtttgttgggttttttggtttttttctttgtggtttttttttttttttttttttgtatgaaacttggaggcttacaggtatagacagctttcagctacagcacattctaattttttattttgtttagttcttttgtattcacttctggtctctttaagactgttttaaaagaaatcaatttagggaaccccagttatataatataaactttgtaatctgagagaaaaaatgtatagtaaatctaagtcttgatttttaactttctattgtaaaaaataataatatacagagtttaatagaaggtgatgttttggttttgttttcccagaggctgccatatggtctttgagtacggggatgtcccaaactggcccaccaatgagcatggcggctccggccaggaatgccagagttagcctcccaggcttgcgggtggacatgcctgctccctgccagcctccagtggcctggccaggccctcccgagcctgtctgccctccccaggggtggaggagtctctgggccccaggaggattccctcccggagactcgcacggtgctccctgctcacgcgttgtcacagttagtccggaaatgactgaaaccaggcattctcccggacctcagcgtgggggagcctccaggcagacgctgggtatggagctgtggtgtggtctgtcctgtatggtggccagtgctttctgccagcatttctggatggatatagggactatcattagtatcctaatacacggtgattttaaaacaaccataaaattgattcagagtccactgacccttacagatgtaggtatacccttactggagagggaactctgatgaggagatgctggtaaattatcattttttaaattgctggtgagtctgacacttggtgagttttcagccagtttgttaaacttttaattaagttttgtttataataaaaatataaatggatttgaaagtttccattttttaaagttaccctcgttttcaaaggtattttctaaacagatctttaatggactatttaaaccgaatttaaggaattcacacacgacagttgacaggtcttcacgcaggctggttggtaacgtgctgccagcacagggctgggtgatacgtacaccctaagccgggggtgcctggggctggggggcgctccttgcaatgcccctccagccacagggcagtgaggtgctgcctgtgtgagccgtcgggggagcggccggctgtgggggcagcgcagcaggagcatcgtggggcctttccttctcggctggttctctgtgacggtggcgtcggctcgcctctgctcctttcatctagaaagaagccactgaccctgacagcccacggcgggtacactgagcagctgcattggtgctgtcacttttttaaggctttctgtccagacttcaacactggtttcttttcagagtttcgaaggattaatgacttcctcagcgcccttgctggcgggctgagggtgacagtcacgtccgtttcttctgtattagaaggctgcggtgattcaattagattgtcccactgctgagacctgtagggcagcttctaacatgcttttttcaaggggagaggagtagtgacaagtcgtgtgtcggaattggatttgagaacactctgaatgacccctggaggccgagggggcaggcttcgggcgtgaactgaactccagacccctctttgtgttgggcagtgtcatcttgcttacaaactgtaagacacatttttttgtgtgtttgtttttgttgttgttcttttgcagcactcacgcctctgacagtcttttgggaaagagtaacacccacatacagaatttgtcacatccagagtagcactgttccttaatactggcataatgcttccaggaagtttttcttttttatatttaaaatgttacttttctgtatgatgtgcatgcaagtttaccgtaacttttcttaaactttttagtgccgtttctagtatattcctgtaaatgtcagttactgaaaatgagtccaatgtaagtagtttagcttgtttattgcaatgctggcctcaacacaacagaataaaaatggtagaaagtactctttgatgtttctggtaatcatggacccttctcctggggcatttgttttgttttcataataaaaagcaaaaaaaaaaaaaaaaaaaaa

SEQ ID NO: 112284 - DNA, 2529 bp, Homo sapiens
  Payload ID: 1982
  Gene Symbol: BRD3
  Gene Name: bromodomain containing 3
  Uniprot ID: Q15059
  ENST ID: ENST00000371834
  CDS Start-End: 323-1993
ccaggctaattaggcgcgcggtttgtttacaaacacgggctcccggcaggtgcgcgccgccccgcccgtgcgcggccggggttcgagggtggctcccgcgggcctcggggtgcccggacgggggctgcggtgctggctgcgtgcccgcttcttccatgccgtcctggggcaccggaaaatccgccgccaggcgctgtccccgacacgggctgtcgcctggttgggcccggaaatgggacgtcgcgctttctcagggagcgtagaagcagccagggcctctccaagccgctgctgtgacagaaagtgagtgagctgccggaggatgtccaccgccacgacagtcgcccccgcggggatcccggcgaccccgggccctgtgaacccaccccccccggaggtctccaaccccagcaagcccggccgcaagaccaaccagctgcagtacatgcagaatgtggtggtgaagacgctctggaaacaccagttcgcctggcccttctaccagcccgtggacgcaatcaaattgaacctgccggattatcataaaataattaaaaacccaatggatatggggactattaagaagagactagaaaataattattattggagtgcaagcgaatgtatgcaggacttcaacaccatgtttacaaattgttacatttataacaagcccacagatgacatagtgctaatggcccaagctttagagaaaatttttctacaaaaagtggcccagatgccccaagaggaagttgaattattaccccctgctccaaagggcaaaggtcggaagccggctgcgggagcccagagcgcaggtacacagcaagtggcggccgtgtcctctgtctccccagcgaccccctttcagagcgtgccccccaccgtctcccagacgcccgtcatcgctgccacccctgtaccaaccatcactgcaaacgtcacgtcggtcccagtccccccagctgccgccccacctcctcctgccacacccatcgtccccgtggtccctcctacgccgcctgtcgtcaagaaaaagggcgtgaagcggaaagcagacacaaccactcccacgacgtcggccatcactgccagccggagtgagtcgcccccgccgttgtcagaccccaagcaggccaaagtggtggcccggcgggagagtggtggccgccccatcaagcctcccaagaaggacctggaggacggcgaggtgccccagcacgcaggcaagaagggcaagctgtcggagcacctacgctactgcgacagcatcctcagggagatgctatccaagaagcacgcggcctacgcctggcccttctacaagccagtggatgccgaggccctggagctgcacgactaccacgacatcatcaagcacccgatggacctcagcaccgtgaaaaggaagatggatggccgagagtacccagacgcacagggctttgctgctgatgtccggctgatgttctcgaattgctacaaatacaatcccccagaccacgaggttgtggccatggcccggaagctccaggacgtgtttgagatgaggtttgccaagatgccagatgagcccgtggaggcaccggcgctgcctgcccccgcggcccccatggtgagcaagggcgctgagagcagccgtagcagtgaggagagctcttcggactcaggcagctcggactcggaggaggagcgggccaccaggctggcggagctgcaggagcagctgaaggccgtgcacgagcagctggccgccctgtctcaggccccagtaaacaaaccaaagaagaagaaggagaagaaggagaaggagaagaagaagaaggacaaggagaaggagaaggagaagcacaaagtgaaggccgaggaagagaagaaggccaaggtggctccgcctgccaagcaggctcagcagaagaaggctcctgccaagaaggccaacagcacgaccacggccggcagagatcatttcttgacctgtggagtttgagacgcctatggggtgtagagaggaacgaacctctgtaattgtttcctggccaagggctggaaaccccgcagctgggagcgacttttctaaccttggattttctgccttggggcaccactttgggaagaaagcttggtcccagagagcagcctgctgttgggaggaaggggtgtgtgcagtgggctcccacggcaggtagacggagactcaacaccacgttgctctgtctcctgccccagacagctgaagaaaggcggcaagcaggcatctgcctcctacgactcagaggaagaggaggagggcctgcccatgagctacgatgaaaagcgccagcttagcctggacatcaaccggctgcccggggagaagctgggccgggtagtgcacatcatccaatctcgggagccctcgctcagggactccaaccccgacgagatagaaattgactttgagactctgaaacccaccactttgcgggaactggagagatatgtcaagtcttgtttacagaaaaagcaaaggaaaccgttctgtaa

SEQ ID NO: 112285 - DNA, 574 bp, Homo sapiens
  Payload ID: 1982
  Gene Symbol: BRD3
  Gene Name: bromodomain containing 3
  ENST ID: ENST00000371842
  CDS Start-End: 351-574
gcactccggtgtccatggctggagctgggctccttctcagtctccggtttgaaacagtggtcaggtggttggaagtgggtggcttagagggcctgatctggccaggcgtgggatcctgacggcagcataagcaggcccccatgttgagctgtgaccgtccatcctcatgcttggaggaagctggcctgcagcctgggagccttcctttgtgccctgaccacccccacatccccaaagctgtcgcctggttgggcccggaaatgggacgtcgcgctttctcagggagcgtagaagcagccagggcctctccaagccgctgctgtgacagaaagtgagtgagctgccggaggatgtccaccgccacgacagtcgcccccgcggggatcccggcgaccccgggccctgtgaacccaccccccccggaggtctccaaccccagcaagcccggccgcaagaccaaccagctgcagtacatgcagaatgtggtggtgaagacgctctggaaacaccagttcgcctggcccttctaccagcccgtggacgcaatcaaattgaacctgccggattatcataa

SEQ ID NO: 112286 - DNA, 599 bp, Homo sapiens
  Payload ID: 1982
  Gene Symbol: BRD3
  Gene Name: bromodomain containing 3
  ENST ID: ENST00000433041
  CDS Start-End: 540-599
actgcttggcctcgctcaagggcaccacctccccgcaccgtgtttgggtctgcaaacgtccgtgttgtgccggccccacttcccctggctgtgttgggcccgcaccgtggctgtccacgcatgggtcactcttcagtacattgttgtggccaagctgtcagagcccagtagcaacgagtcgaccccacgagtgggtggttggtgggcagaaggctgccagtggctgagtcccttggcacacctgcctcccagtgtgttccccaagcccccacctgggagcaagtggcatgtgcctgagctccctccaccgcccaggccttccctcccgtgcctgagagcagtggttggagagtcgttctgagctggtcgcgcttcgcctgagcagctttcccgacagcctctcacctgggtggctgggcaatggggctgtcgcctggttgggcccggaaatgggacgtcgcgctttctcagggagcgtagaagcagccagggcctctccaagccgctgctgtgacagaaagtgagtgagctgccggaggatgtccaccgccacgacagtcgcccccgcggggatcccggcgaccccgggccctgtgaac

SEQ ID NO: 112287 - DNA, 7169 bp, Homo sapiens
  Payload ID: 1983
  Gene Symbol: BRD4
  Gene Name: bromodomain containing 4
  Uniprot ID: O60885
  ENST ID: ENST00000263377
  CDS Start-End: 223-4311
attctttggaatactactgctagaagtctgacttaagacccagcttatgggccacatggcacccagctgcttctgcagagaaggcaggccactgatgggtacagcaaagtgtggtgctgctggccaagccaaagacccgtgtaggatgactgggcctctgccccttgtgggtgttgccactgtgcttgagtgcctggtgaagaatgtgatgggatcactagcatgtctgcggagagcggccctgggacgagattgagaaatctgccagtaatgggggatggactagaaacttcccaaatgtctacaacacaggcccaggcccaaccccagccagccaacgcagccagcaccaaccccccgcccccagagacctccaaccctaacaagcccaagaggcagaccaaccaactgcaatacctgctcagagtggtgctcaagacactatggaaacaccagtttgcatggcctttccagcagcctgtggatgccgtcaagctgaacctccctgattactataagatcattaaaacgcctatggatatgggaacaataaagaagcgcttggaaaacaactattactggaatgctcaggaatgtatccaggacttcaacactatgtttacaaattgttacatctacaacaagcctggagatgacatagtcttaatggcagaagctctggaaaagctcttcttgcaaaaaataaatgagctacccacagaagaaaccgagatcatgatagtccaggcaaaaggaagaggacgtgggaggaaagaaacagggacagcaaaacctggcgtttccacggtaccaaacacaactcaagcatcgactcctccgcagacccagacccctcagccgaatcctcctcctgtgcaggccacgcctcaccccttccctgccgtcaccccggacctcatcgtccagacccctgtcatgacagtggtgcctccccagccactgcagacgcccccgccagtgcccccccagccacaacccccacccgctccagctccccagcccgtacagagccacccacccatcatcgcggccaccccacagcctgtgaagacaaagaagggagtgaagaggaaagcagacaccaccacccccaccaccattgaccccattcacgagccaccctcgctgcccccggagcccaagaccaccaagctgggccagcggcgggagagcagccggcctgtgaaacctccaaagaaggacgtgcccgactctcagcagcacccagcaccagagaagagcagcaaggtctcggagcagctcaagtgctgcagcggcatcctcaaggagatgtttgccaagaagcacgccgcctacgcctggcccttctacaagcctgtggacgtggaggcactgggcctacacgactactgtgacatcatcaagcaccccatggacatgagcacaatcaagtctaaactggaggcccgtgagtaccgtgatgctcaggagtttggtgctgacgtccgattgatgttctccaactgctataagtacaaccctcctgaccatgaggtggtggccatggcccgcaagctccaggatgtgttcgaaatgcgctttgccaagatgccggacgagcctgaggagccagtggtggccgtgtcctccccggcagtgccccctcccaccaaggttgtggccccgccctcatccagcgacagcagcagcgatagctcctcggacagtgacagttcgactgatgactctgaggaggagcgagcccagcggctggctgagctccaggagcagctcaaagccgtgcacgagcagcttgcagccctctctcagccccagcagaacaaaccaaagaaaaaggagaaagacaagaaggaaaagaaaaaagaaaagcacaaaaggaaagaggaagtggaagagaataaaaaaagcaaagccaaggaacctcctcctaaaaagacgaagaaaaataatagcagcaacagcaatgtgagcaagaaggagccagcgcccatgaagagcaagccccctcccacgtatgagtcggaggaagaggacaagtgcaagcctatgtcctatgaggagaagcggcagctcagcttggacatcaacaagctccccggcgagaagctgggccgcgtggtgcacatcatccagtcacgggagccctccctgaagaattccaaccccgacgagattgaaatcgactttgagaccctgaagccgtccacactgcgtgagctggagcgctatgtcacctcctgtttgcggaagaaaaggaaacctcaagctgagaaagttgatgtgattgccggctcctccaagatgaagggcttctcgtcctcagagtcggagagctccagtgagtccagctcctctgacagcgaagactccgaaacagagatggctccgaagtcaaaaaagaaggggcaccccgggagggagcagaagaagcaccatcatcaccaccatcagcagatgcagcaggccccggctcctgtgccccagcagccgcccccgcctccccagcagcccccaccgcctccacctccgcagcagcaacagcagccgccacccccgcctcccccaccctccatgccgcagcaggcagccccggcgatgaagtcctcgcccccacccttcattgccacccaggtgcccgtcctggagccccagctcccaggcagcgtctttgaccccatcggccacttcacccagcccatcctgcacctgccgcagcctgagctgccccctcacctgccccagccgcctgagcacagcactccaccccatctcaaccagcacgcagtggtctctcctccagctttgcacaacgcactaccccagcagccatcacggcccagcaaccgagccgctgccctgcctcccaagcccgcccggcccccagccgtgtcaccagccttgacccaaacacccctgctcccacagccccccatggcccaacccccccaagtgctgctggaggatgaagagccacctgccccacccctcacctccatgcagatgcagctgtacctgcagcagctgcagaaggtgcagccccctacgccgctactcccttccgtgaaggtgcagtcccagcccccaccccccctgccgcccccaccccacccctctgtgcagcagcagctgcagcagcagccgccaccacccccaccaccccagccccagcctccaccccagcagcagcatcagccccctccacggcccgtgcacttgcagcccatgcagttttccacccacatccaacagcccccgccaccccagggccagcagcccccccatccgcccccaggccagcagccacccccgccgcagcctgccaagcctcagcaagtcatccagcaccaccattcaccccggcaccacaagtcggacccctactcaaccggtcacctccgcgaagccccctccccgcttatgatacattccccccagatgtcacagttccagagcctgacccaccagtctccaccccagcaaaacgtccagcctaagaaacaggagctgcgtgctgcctccgtggtccagccccagcccctcgtggtggtgaaggaggagaagatccactcacccatcatccgcagcgagcccttcagcccctcgctgcggccggagccccccaagcacccggagagcatcaaggcccccgtccacctgccccagcggccggaaatgaagcctgtggatgtcgggaggcctgtgatccggcccccagagcagaacgcaccgccaccaggggcccctgacaaggacaaacagaaacaggagccgaagactccagttgcgcccaaaaaggacctgaaaatcaagaacatgggctcctgggccagcctagtgcagaagcatccgaccaccccctcctccacagccaagtcatccagcgacagcttcgagcagttccgccgcgccgctcgggagaaagaggagcgtgagaaggccctgaaggctcaggccgagcacgctgagaaggagaaggagcggctgcggcaggagcgcatgaggagccgagaggacgaggatgcgctggagcaggcccggcgggcccatgaggaggcacgtcggcgccaggagcagcagcagcagcagcgccaggagcaacagcagcagcagcaacagcaagcagctgcggtggctgccgccgccaccccacaggcccagagctcccagccccagtccatgctggaccagcagagggagttggcccggaagcgggagcaggagcgaagacgccgggaagccatggcagctaccattgacatgaatttccagagtgatctattgtcaatatttgaagaaaatcttttctgagcgcacctaggtggcttctgactttgattttctggcaaaacattgactttccatagtgttaggggcggtggtggaggtgggatcagcggccaggggatgcctcagggcctggccctcctgcatgctatgcccggggcaggcctgacgggcagctgaggattgcagagcctgtctgccttacggccagtcggacagacgtcccgccacccaccacccctcacaggacgtccgctcagcacacgccttgttacgagcaagtgccggctggacccaagccctgcatccccacatgcggggcagaggcccttctctccgccaaatgtctacacagtatacacaggacatcgttgctgccgccgtgactggttttctgtccccaagaacgtgacgttcgtgatgtcctgcccgccgggagtctttccccacaccccagccatcgccgcccgctcccaggaggccagggcaggcctgcgtgggctggaggcgggcgaggccggcccaccccctcgctggcactgactttgccttgaacagaccccccgaccctcccccacaagcctttaattgagagccgctctctgtaagtgtttgcttgtgcaaaagggaatagtgccgtggaggtgtgtgtgtccatggcatccggagcgaggcgactgtcctgcgtgggtagccctcggccggggagtgaggccaccaaccaaagtcagttccttcccacctgtgtttctgtttcgtttttttttttcttttttttctatatatattttttgttgaattctattttatttttaattctctcttctcctccagacacaatggcactgcttatctccgaaatggtgtgatcgtctcctcattgagcagcggctgccaccgcgctgtgggtagtgtgtgaccgtggctgtactgtatagtgaacatagttggcatatctttgtttgaagtttgttggtgactccaccaaactggtgtgaaaaaagaaaaaagctcaaaaaaatccacaaaaagacaaaacacacaaaaaaaatcctgcctatattttactcagtttcaaactttattagtctatttttaattataaaaccagaaagctacaatttcttttctttcccctccaccccccccccccccacccatttgttggcttttttgttttttaatgtcagatctgttgagttggtttttttggttttggtttttgtttttgtttttgttttttactgagaaaggaagggccaagggatgaggtgggaaccgggccctgggggcgccacagactaaggcagagactcccctacctggcgcccagccccaaccagctggccgctcctgcccatgcttttttttttttttttttttaatttttataattggagcccctggtgaggttacgcgtgccatgagaacccactctacaccacgacgctggtgcctcagtgttggccaaactctggagtcactgactggtttgactttcatacggtgaatatgcatttggtctgtactgatcatggaataaacacatctctctttttttaatgctggcgtctccctgacatttctttgtgaaccaactgttgcctaggctaggcccaggggaccccctggaccccagaccacctctgtacaggaactactgccagggattacctagcccctctcctgtgacctgtccctgtctgccctgggcgggagccacgcagactcatagcaaccaccccaagctgaagctgtgacgcagagcccggtacccatccttgtggaccctggctgaggtggagggtgtgctctagcagaaccctggccagactccagacagtattcttcccctccaccctactccatcctgtcccccctactccatcctgtccccccactcaccaaaggacttgggccacttctcccaccttgcctgcctcaacctaactcctcctttcatttaagctcagggttaaccagatactcttagatataagtctacatcccccaaaataggatcctcaccccccatgcacatacacacacattcctgtccaagaaagcccacaggtggctgctctgcctgtgtgtccacttgtgtatgtacatgccccagccacaaggcacgggtgacgcccaagaagagcccctaagatgtaagatacaagtatataatttatatgtatgcagagacaaactgattgaaacatttctagcactgtttattctcctacatcccctctttttgacctgaaaggtcctttattgtctttggatctgccaaacctccctgtgagggtgtggttcaggcatccagccagaggtccccccacttcttcgatgtccatgcccactcaggcactttctcatataccactgtgccacttcaagtgtgacgtatttaggttctttggggtttcttccatctcatcccacccactcatttttgttccttgttttgttcagacacttccccagcctgggtccaactgctgagctggatagttttctctgcagcttcctgctgaagatttaactcagccatggccttctccacacctccctgatgggtgtctctctacctgggttgtaattagaactgggatctatttaatttctccagccatttcccaacccttcccacagtactagaaatcttagtcctataccagagtaagaggtgtgtacaagcccccactgtactgtatgcacggatcgcttggccaataattatgtcagtgaatctgagacttgtattaaacactttagacatttgtagaagggaattcgtagacttttcacttacatacgaaaggtttttttttttttttgtgcagttctcattgcaaaaataaacatttgtactgagtataaagtta

SEQ ID NO: 112288 - DNA, 3240 bp, Homo sapiens
  Payload ID: 1983
  Gene Symbol: BRD4
  Gene Name: bromodomain containing 4
  Uniprot ID: O60885
  ENST ID: ENST00000360016
  CDS Start-End: 291-2675
gacgtcagtgcgctggcggcggcggcggcggcggcggcggcggctgggctgtttgttctggtctcccgcagccgaggagccgaagcagtggcggcggcagcggctgcggcggctgccggcggtgcccgcgggcgagcgcggcctgtgagctcggcagagcggcgggcgggccccggcgccgcgcaggcagctcggggagggggcggcggcagcgggcggacggccggcgggggcggcgtgcggcctagcgtctcagagtgcctggtgaagaatgtgatgggatcactagcatgtctgcggagagcggccctgggacgagattgagaaatctgccagtaatgggggatggactagaaacttcccaaatgtctacaacacaggcccaggcccaaccccagccagccaacgcagccagcaccaaccccccgcccccagagacctccaaccctaacaagcccaagaggcagaccaaccaactgcaatacctgctcagagtggtgctcaagacactatggaaacaccagtttgcatggcctttccagcagcctgtggatgccgtcaagctgaacctccctgattactataagatcattaaaacgcctatggatatgggaacaataaagaagcgcttggaaaacaactattactggaatgctcaggaatgtatccaggacttcaacactatgtttacaaattgttacatctacaacaagcctggagatgacatagtcttaatggcagaagctctggaaaagctcttcttgcaaaaaataaatgagctacccacagaagaaaccgagatcatgatagtccaggcaaaaggaagaggacgtgggaggaaagaaacagggacagcaaaacctggcgtttccacggtaccaaacacaactcaagcatcgactcctccgcagacccagacccctcagccgaatcctcctcctgtgcaggccacgcctcaccccttccctgccgtcaccccggacctcatcgtccagacccctgtcatgacagtggtgcctccccagccactgcagacgcccccgccagtgcccccccagccacaacccccacccgctccagctccccagcccgtacagagccacccacccatcatcgcggccaccccacagcctgtgaagacaaagaagggagtgaagaggaaagcagacaccaccacccccaccaccattgaccccattcacgagccaccctcgctgcccccggagcccaagaccaccaagctgggccagcggcgggagagcagccggcctgtgaaacctccaaagaaggacgtgcccgactctcagcagcacccagcaccagagaagagcagcaaggtctcggagcagctcaagtgctgcagcggcatcctcaaggagatgtttgccaagaagcacgccgcctacgcctggcccttctacaagcctgtggacgtggaggcactgggcctacacgactactgtgacatcatcaagcaccccatggacatgagcacaatcaagtctaaactggaggcccgtgagtaccgtgatgctcaggagtttggtgctgacgtccgattgatgttctccaactgctataagtacaaccctcctgaccatgaggtggtggccatggcccgcaagctccaggatgtgttcgaaatgcgctttgccaagatgccggacgagcctgaggagccagtggtggccgtgtcctccccggcagtgccccctcccaccaaggttgtggccccgccctcatccagcgacagcagcagcgatagctcctcggacagtgacagttcgactgatgactctgaggaggagcgagcccagcggctggctgagctccaggagcagctcaaagccgtgcacgagcagcttgcagccctctctcagccccagcagaacaaaccaaagaaaaaggagaaagacaagaaggaaaagaaaaaagaaaagcacaaaaggaaagaggaagtggaagagaataaaaaaagcaaagccaaggaacctcctcctaaaaagacgaagaaaaataatagcagcaacagcaatgtgagcaagaaggagccagcgcccatgaagagcaagccccctcccacgtatgagtcggaggaagaggacaagtgcaagcctatgtcctatgaggagaagcggcagctcagcttggacatcaacaagctccccggcgagaagctgggccgcgtggtgcacatcatccagtcacgggagccctccctgaagaattccaaccccgacgagattgaaatcgactttgagaccctgaagccgtccacactgcgtgagctggagcgctatgtcacctcctgtttgcggaagaaaaggaaacctcaagctgagaaagttgatgtgattgccggctcctccaagatgaagggcttctcgtcctcagagtcggagagctccagtgagtccagctcctctgacagcgaagactccgaaacagctttctgcaccagtggagacttcgtgtccccagggccttccccgtatcacagtcacgtgcagtgcggccgcttcagggagatgcttcgctggtttctggtggatgtggagcagactgcagctggccagccgcatcgccagtctgctgctggccctgccatcacctgggccccagccattgcctacccctccccagagtgtgctcgttgctgtgttggctgctcctgaatctgccctaactccacacgcacctggacttgcgtgtccctcctgcagttctaactaacagtcccttcttttcaagccccgtgggtctgcacgttggaccctgggttccccattagagcccaccttctgagcagcagcctcagtgggaggtggaggcaggtagtgatgctgggtgccaggtgggagtggagaggggactgctctcctccaagtgtgcactttcctcattattctcaggggcgcagatgctcaggctggcgcaggggagaggctagggagggagccatggtgcccagaaggcctggcgaccagcccctgctgagagatggagctaacatcctgtgtttacggccaacggggttgccgctaggctggtgcagctgtcagtgagctggcgtgctgcagaccacctgagagctggccctagggtctcaggcagactggggagtggggatccacagtgggaaacctgtgttttggcagtagactcctgcatgttctcccacgggcctgtcccatccctgggattttattctaactagaaataaatgctaaccctcaataa

SEQ ID NO: 112289 - DNA, 4624 bp, Homo sapiens
  Payload ID: 1983
  Gene Symbol: BRD4
  Gene Name: bromodomain containing 4
  Uniprot ID: O60885
  ENST ID: ENST00000371835
  CDS Start-End: 223-2391
attctttggaatactactgctagaagtctgacttaagacccagcttatgggccacatggcacccagctgcttctgcagagaaggcaggccactgatgggtacagcaaagtgtggtgctgctggccaagccaaagacccgtgtaggatgactgggcctctgccccttgtgggtgttgccactgtgcttgagtgcctggtgaagaatgtgatgggatcactagcatgtctgcggagagcggccctgggacgagattgagaaatctgccagtaatgggggatggactagaaacttcccaaatgtctacaacacaggcccaggcccaaccccagccagccaacgcagccagcaccaaccccccgcccccagagacctccaaccctaacaagcccaagaggcagaccaaccaactgcaatacctgctcagagtggtgctcaagacactatggaaacaccagtttgcatggcctttccagcagcctgtggatgccgtcaagctgaacctccctgattactataagatcattaaaacgcctatggatatgggaacaataaagaagcgcttggaaaacaactattactggaatgctcaggaatgtatccaggacttcaacactatgtttacaaattgttacatctacaacaagcctggagatgacatagtcttaatggcagaagctctggaaaagctcttcttgcaaaaaataaatgagctacccacagaagaaaccgagatcatgatagtccaggcaaaaggaagaggacgtgggaggaaagaaacagggacagcaaaacctggcgtttccacggtaccaaacacaactcaagcatcgactcctccgcagacccagacccctcagccgaatcctcctcctgtgcaggccacgcctcaccccttccctgccgtcaccccggacctcatcgtccagacccctgtcatgacagtggtgcctccccagccactgcagacgcccccgccagtgcccccccagccacaacccccacccgctccagctccccagcccgtacagagccacccacccatcatcgcggccaccccacagcctgtgaagacaaagaagggagtgaagaggaaagcagacaccaccacccccaccaccattgaccccattcacgagccaccctcgctgcccccggagcccaagaccaccaagctgggccagcggcgggagagcagccggcctgtgaaacctccaaagaaggacgtgcccgactctcagcagcacccagcaccagagaagagcagcaaggtctcggagcagctcaagtgctgcagcggcatcctcaaggagatgtttgccaagaagcacgccgcctacgcctggcccttctacaagcctgtggacgtggaggcactgggcctacacgactactgtgacatcatcaagcaccccatggacatgagcacaatcaagtctaaactggaggcccgtgagtaccgtgatgctcaggagtttggtgctgacgtccgattgatgttctccaactgctataagtacaaccctcctgaccatgaggtggtggccatggcccgcaagctccaggatgtgttcgaaatgcgctttgccaagatgccggacgagcctgaggagccagtggtggccgtgtcctccccggcagtgccccctcccaccaaggttgtggccccgccctcatccagcgacagcagcagcgatagctcctcggacagtgacagttcgactgatgactctgaggaggagcgagcccagcggctggctgagctccaggagcagctcaaagccgtgcacgagcagcttgcagccctctctcagccccagcagaacaaaccaaagaaaaaggagaaagacaagaaggaaaagaaaaaagaaaagcacaaaaggaaagaggaagtggaagagaataaaaaaagcaaagccaaggaacctcctcctaaaaagacgaagaaaaataatagcagcaacagcaatgtgagcaagaaggagccagcgcccatgaagagcaagccccctcccacgtatgagtcggaggaagaggacaagtgcaagcctatgtcctatgaggagaagcggcagctcagcttggacatcaacaagctccccggcgagaagctgggccgcgtggtgcacatcatccagtcacgggagccctccctgaagaattccaaccccgacgagattgaaatcgactttgagaccctgaagccgtccacactgcgtgagctggagcgctatgtcacctcctgtttgcggaagaaaaggaaacctcaagctgagaaagttgatgtgattgccggctcctccaagatgaagggcttctcgtcctcagagtcggagagctccagtgagtccagctcctctgacagcgaagactccgaaacaggtcctgcctaatcattggacacggactcttaataaaacggtcttcagttccagattccttcccagcaagctatagcttaagtccattttcttccgtgaaagggacaggactccatcaagttatggaattcctcagagccctgggcctgtcccccggggtggattagtcatgtccagcagcacacgcctagtcccgccttcgggaaggctgcctgcctggccagccgcccaggcctctctgtgtaaagactgcctggctgtcctgcccagccttcctggttctctggggtcctctgggtgggtggcatctcctggagggtgatgacaatccccaacacatgcattcatgtggtgctactctgtgtgcaaagccagaccccaagtatgttttctctctttgtcccatccctctttttctgggactttggaccctaactacttccctcctgaaccttgcagtgacatcagtccaggagagctctcgttcagtgtgcggaagaacactctgacctctagagctgtcctagataaggagtgggagctttagaggcaaggcctctagaccctggaaggctcagtgaggctcttcccacagcatgcttctcactggtgccctgtaaggctcgagccaccgctgactctgagccttttggagtctttcctccttcgtctccattgttcccgtgcatttccaaaagcttaagttgcctggtgggcatttccccagtttctttggcctccgtcttctcaagtcacatagggaaagtacctcctggaaccaggctgcagtatgcaggacctgccaggcaggcactggtgaagggccttgggcctatcatccccccaaccccacctcaccccacccgcctcctctagtggggtgagtctgggctggtggaccagagagggtgtcacagaccctcagggactgccccatggacacctctgactggtgttaacagtgtgaacattttccccgtcttcagtcccttagaatgacgacagcccctggggttggggcaggcgagtgtggccacatcatccaagccctcccagagacacaaataggcttttttgctctaaaaataaataccagcccttttttggtcacaaatccagcatctcagcagaaaactgcctgacatgaaaagtcccctgaggaactgcatctgcgtttcaggggcttttcattttttctccttttttaaagtgtagattgtgggtgcttcctagaggcctgccttcttctggaactggaagtgggctatcaccatgggcaagcccttgggtgcaggctccccacctgcctgggaactctggcagctctcctcagctccttgggcttgagcagctgcaactgccccagatttgctgtggaagcaggggctagccctggcctcaccagggcctcccggggccctgcattgatgctcaggagttcctgggctgctcttgatcctttctgggcatccagcttccagttaagctctgtttgccaaacaaactattctcagctgccctttggcctgcgcctgatgtgttcctgttgcagtcccgcctgcctgagacaggagcaggcaggagagccttcatgcccagattcccacaggacaattggggagctgctggcattgtctttctgggaagattctgctttcttggaccaaatggcagcctgattaccagtgtcgggcctgcatgctgcccccgacacacgcacgcacgcgcacacacgtgtgcacatgggccatagccacaagccagctctcctccagggtcctttcaacctcgctgtccagggaccctgtccttcttgcccgtggggcttccatctggcagagaacgttcagggcttgttgaacttgaaagctcattagacttaagctgtcacctgtgcttggtgccccaggaacagccagagaggacagtgcccactcacttcttgttggcagcctcctgtgcaggaagtgccagccgggcctcgacgcaccagctggctgtgggtcctgaggaggggcgggaggcggccgctcagtgcagatggggactcctctcctctgccctgaccttaccctccattacctccttcactggagtggggctggggggtgggtggaatcagtgttttaatcggatttttaaaaaacattttatttctttgtacaattaccatcctatgtaaagatgaaatttgtgttgagttgaagattgtcatggaataaagatcacaccgtacttgaggcca

SEQ ID NO: 112290 - DNA, 892 bp, Homo sapiens
  Payload ID: 1983
  Gene Symbol: BRD4
  Gene Name: bromodomain containing 4
  ENST ID: ENST00000597315
  CDS Start-End: 189-629
gctgcggcggctgccggcggtgcccgcgggcgagcgcggcctgtgagctcggcagagcggcgggcgggccccggcgccgcgcaggcagctcggggagggggcggcggcagcgggcggacggccggcgggggcggcgtgcggcctagcgtctcagagtgcctggtgaagaatgtgatgggatcactagcatgtctgcggagagcggccctgggacgagattgagaaatctgccagtaatgggggatggactagaaacttcccaaatgtctacaacacaggcccaggcccaaccccagccagccaacgcagccagcaccaaccccccgcccccagagacctccaaccctaacaagcccaagaggcagaccaaccaactgcaatacctgctcagagtggtgctcaagacactatggaaacaccagtttgcatggcctttccagcagcctgtggatgccgtcaagctgaacctccctgattactataagatcattaaaacgcctatggatatgggaacaataaagaagcgcttggaaaacaactattactggaatgctcaggaatgtatccaggacttcaacactatgtttacaaattgttacatctacaacaagttcagaccacagatgtgattaaaatcaaccctttcaaatagaacgactctggagggagacactatacagaactcagcttttgacctctgctggtgtagtgggtaaaaatgcccagaagagatgggtagcctggagatgacatagtcttaatggcagaagctctggaaaagctcttcttgcaaaaaataaatgagctacccacagaagaaaccgagatcatgatagtccaggcaaaaggaagaggacgtgggaggaaagaaacagggacagcaaaacctggc

SEQ ID NO: 112291 - DNA, 1821 bp, Homo sapiens
  Payload ID: 1983
  Gene Symbol: BRD4
  Gene Name: bromodomain containing 4
  ENST ID: ENST00000594841
  CDS Start-End: 106-1821
ttttgttaagtgaggaggaggaggaggaggaggaagcggccgccgcggggtccgcggcgcgcccggcccggagtgcctggtgaagaatgtgatgggatcactagcatgtctgcggagagcggccctgggacgagattgagaaatctgccagtaatgggggatggactagaaacttcccaaatgtctacaacacaggcccaggcccaaccccagccagccaacgcagccagcaccaaccccccgcccccagagacctccaaccctaacaagcccaagaggcagaccaaccaactgcaatacctgctcagagtggtgctcaagacactatggaaacaccagtttgcatggcctttccagcagcctgtggatgccgtcaagctgaacctccctgattactataagatcattaaaacgcctatggatatgggaacaataaagaagcgcttggaaaacaactattactggaatgctcaggaatgtatccaggacttcaacactatgtttacaaattgttacatctacaacaagcctggagatgacatagtcttaatggcagaagctctggaaaagctcttcttgcaaaaaataaatgagctacccacagaagaaaccgagatcatgatagtccaggcaaaaggaagaggacgtgggaggaaagaaacagggacagcaaaacctggcgtttccacggtaccaaacacaactcaagcatcgactcctccgcagacccagacccctcagccgaatcctcctcctgtgcaggccacgcctcaccccttccctgccgtcaccccggacctcatcgtccagacccctgtcatgacagtggtgcctccccagccactgcagacgcccccgccagtgcccccccagccacaacccccacccgctccagctccccagcccgtacagagccacccacccatcatcgcggccaccccacagcctgtgaagacaaagaagggagtgaagaggaaagcagacaccaccacccccaccaccattgaccccattcacgagccaccctcgctgcccccggagcccaagaccaccaagctgggccagcggcgggagagcagccggcctgtgaaacctccaaagaaggacgtgcccgactctcagcagcacccagcaccagagaagagcagcaaggtctcggagcagctcaagtgctgcagcggcatcctcaaggagatgtttgccaagaagcacgccgcctacgcctggcccttctacaagcctgtggacgtggaggcactgggcctacacgactactgtgacatcatcaagcaccccatggacatgagcacaatcaagtctaaactggaggcccgtgagtaccgtgatgctcaggagtttggtgctgacgtccgattgatgttctccaactgctataagtacaaccctcctgaccatgaggtggtggccatggcccgcaagctccaggatgtgttcgaaatgcgctttgccaagatgccggacgagcctgaggagccagtggtggccgtgtcctccccggcagtgccccctcccaccaaggttgtggccccgccctcatccagcgacagcagcagcgatagctcctcggacagtgacagttcgactgatgactctgaggaggagcgagcccagcggctggctgagctccaggagcagctcaaagccgtgcacgagcagcttgcagccctctctcagccccagcagaacaaaccaaagaaaaaggagaaagacaagaaggaaaagaaaaaagaaaagcacaaaaggaaagaggaagtggaagagaataaaaaaagcaaagccaaggaacctcctcctaaaaag

SEQ ID NO: 112292 - DNA, 604 bp, Homo sapiens
  Payload ID: 1983
  Gene Symbol: BRD4
  Gene Name: bromodomain containing 4
  ENST ID: ENST00000601941
  CDS Start-End: 290-604
attttgttaagtgaggaggaggaggaggaggaggaagcggccgccgcggggtccgcggcgcgcccggcccggagatggggttccatcatgttgtccaggctcatctccaattcctgacctcaagtgacccacccttcttggcctcccgaagtgctgggattacagacgtgagccaccgtgcccggccagatgtcactttcattggttatcttcagagcctccttaaagaaactttggggtactggtagctaccagagtgcctggtgaagaatgtgatgggatcactagcatgtctgcggagagcggccctgggacgagattgagaaatctgccagtaatgggggatggactagaaacttcccaaatgtctacaacacaggcccaggcccaaccccagccagccaacgcagccagcaccaaccccccgcccccagagacctccaaccctaacaagcccaagaggcagaccaaccaactgcaatacctgctcagagtggtgctcaagacactatggaaacaccagtttgcatggcctttccagcagcctgtggatgccgtcaagctgaacctccctgattactataagatcattaaaacgcctatg

SEQ ID NO: 112293 - DNA, 726 bp, Homo sapiens
  Payload ID: 1983
  Gene Symbol: BRD4
  Gene Name: bromodomain containing 4
  ENST ID: ENST00000630599
  CDS Start-End: 286-726
cagtgcgctggcggcggcggcggcggcggcggcggcggctgggctgtttgttctggtctcccgcagccgaggagccgaagcagtggcggcggcagcggctgcggcggctgccggcggtgcccgcgggcgagcgcggcctgtgagctcggcagagcggcgggcgggccccggcgccgcgcaggcagctcggggagggggcggcggcagcgggcggacggccggcgggggcggcgtgcggcctagcgtctcagagtgcctggtgaagaatgtgatgggatcactagcatgtctgcggagagcggccctgggacgagattgagaaatctgccagtaatgggggatggactagaaacttcccaaatgtctacaacacaggcccaggcccaaccccagccagccaacgcagccagcaccaaccccccgcccccagagacctccaaccctaacaagcccaagaggcagaccaaccaactgcaatacctgctcagagtggtgctcaagacactatggaaacaccagtttgcatggcctttccagcagcctgtggatgccgtcaagctgaacctccctgattactataagatcattaaaacgcctatggatatgggaacaataaagaagcgcttggaaaacaactattactggaatgctcaggaatgtatccaggacttcaacactatgtttacaaattgttacatctacaacaagttcagaccacagatgtga

SEQ ID NO: 112294 - DNA, 5370 bp, Homo sapiens
  Payload ID: 1984
  Gene Symbol: BRD7
  Gene Name: bromodomain containing 7
  Uniprot ID: Q9NPI1
  ENST ID: ENST00000394688
  CDS Start-End: 161-2116
gagaggggcatcgcgccgcccggcgcgcgccgcccccctgcctcgcggcgcggggtctcgcgggccccgctcccgccctccgctcgcctggcccggaccggaagcggcgccgcacggcctgggcctggcgcggggggcgggcaccggggcccggtcggacatgggcaagaagcacaagaagcacaagtcggacaaacacctctacgaggagtatgtagagaagcccttgaagctggtcctcaaagtaggagggaacgaagtcaccgaactctccacgggcagctcggggcacgactccagcctcttcgaagacaaaaacgatcatgacaaacacaaggacagaaagcggaaaaagagaaagaaaggagagaagcagattccaggggaagaaaaggggagaaaacggagaagagttaaggaggataaaaagaagcgagatcgagaccgggtggagaatgaggcagaaaaagatctccagtgtcacgcccctgtgagattagacttgcctcctgagaagcctctcacaagctctttagccaaacaagaagaagtagaacagacaccccttcaagaagctttgaatcaactgatgagacaattgcagagaaaagatccaagtgctttcttttcatttcctgtgactgattttattgctcctggctactccatgatcattaaacacccaatggattttagtaccatgaaagaaaagatcaagaacaatgactatcagtccatagaagaactaaaggataacttcaaactaatgtgtactaatgccatgatttacaataaaccagagaccatttattataaagctgcaaagaagctgttgcactcaggaatgaaaattcttagccaggaaagaattcagagcctgaagcagagcatagacttcatggctgacttgcagaaaactcgaaagcagaaagatggaacagacacctcacagagtggggaggacggaggctgctggcagagagagagagaggactctggagatgccgaagcacacgccttcaagagtcccagcaaagaaaataaaaagaaagacaaagatatgcttgaagataagtttaaaagcaataatttagagagagagcaggagcagcttgaccgcatcgtgaaggaatctggaggaaagctgaccaggcggcttgtgaacagtcagtgcgaatttgaaagaagaaaaccagatggaacaacgacgttgggacttctccatcctgtggatcccattgtaggagagccaggctactgccctgtgagactgggaatgacaactggaagacttcagtctggagtgaatactttgcaggggttcaaagaggataaaaggaacaaagtcactccagtgttatatttgaattatgggccctacagttcttatgcaccgcattatgactccacatttgcaaatatcagcaaggatgattctgatttaatctattcaacctatggggaagactctgatcttccaagtgatttcagcatccatgagtttttggccacgtgccaagattatccgtatgtcatggcagatagtttactggatgttttaacaaaaggagggcattccaggaccctacaagagatggagatgtcattgcctgaagatgaaggccatactaggacacttgacacagcaaaagaaatggagattacagaagtagagccaccagggcgtttggactccagtactcaagacaggctcatagcgctgaaagcagtaacaaattttggcgttccagttgaagtttttgactctgaagaagctgaaatattccagaagaaacttgatgagaccaccagattgctcagggaactccaggaagcccagaatgaacgtttgagcaccagaccccctccgaacatgatctgtctcttgggtccctcatacagagaaatgcatcttgctgaacaagtgaccaataatcttaaagaacttgcacagcaagtaactccaggtgatatcgtaagcacgtatggagttcgaaaagcaatggggatttccattccttcccccgtcatggaaaacaactttgtggatttgacagaagacactgaagaacctaaaaagacggatgttgctgagtgtggacctggtggaagttgaggctgcctggtatttgattatatattatgtacatactttttcattcttaacttagaaatgcttttcagaagatattaaatatttgtaaattgtgtttttaattaaactttggaacagcgaatttggatgttccagaggttggacttgtattaggtaataaagctggacctgggactcgtgaggaaggaatgtgcttggggctgttgccatacctgtgcagcattctttcaaaatagtgccttccaatgcttcttccttatgtcccacagacaggatcatcactaagaagcgttcttaaaacggccccatccagtgagattttccgttatacgaacatacttgaaataattttagaatttactactgtggttctgcccctgcatacccagtgggaatgatgcccttgtatgggtaattaggcacctcccacccacccctgacaaaagcacactgggagttttatagcactgtcacatggctagtgttcttttttggttttttccgttttttaaagaaagaggagttacttagtactatagcaaagtaataagccaaataagataaactaagtcatccttgaatagatcagggaattaccagattaccaaaaggtgacatttctactttacttactgtttatctgaaatacaaaggtcaagtacccaaggagttgaactctaagtaggagaccacaagattcatggcccccttttatcagcaagctgagataaatggtgattttgctgaatcggtatagaacctgttatacacaagggaaaaaaatcaggatggagatagatagatagatagccttgttcagtgaacaaattaagtttgaaggcccttatacaatccttctataaatcacccaggcaggaagccatttgatttctattattttcctgactttgaaaattaattagtatttaggaagaacaaatagggtaaaggaaaattaattccctcaaaagacttaaaatcttatgctaaaagagtcaaattttcaagttgtttgagtctacttttaatctctagtgagttcatgaggaccacgaaaataaaataccttcagatatttgagtttttcaaattgctaatttaatgtataaaaagcagctaaacactggtactttataaaaatgaaacagcattttgaaacaaatgttacagatctataaatattcattatatagaataaaccctagttacttgcatgcaccacctcaaatcatatttctttacactgacctattatatacacaaagtatacagtggttaatgatcttctcttctgtttgtttgtttgtttgtttgttaggaaatttcctcaataagccagaaaaccttaggtattattttcacaaaagttaactcaggagaaattgtaaggaagtccttgacccatggagaaggtcactgtttgtttgtttgttagatacgtgtgtctgtcataaaacaaaatgacaccagtaattacttggtaatttaaaaacaagttcataaaaagaaaatacctgcaggtaatttttatggtcagttatattctataacctgaacactgaaaactaaaaacttttacttacaaactattattatctgagcacagcacagtgctttgctttaattggaaataaaaatgcatgagtgagtggtagtcagttatttgttaaactcccaactggggtttctgttgttactgaagaaaaaaacaaatattccaagagtacaaatatgctgacctcagagaggcccagtgcactaatgtgtttctatgttatattagcaacagaaaccttcctgacttgccaggagagcccccgccgggcagccctggtcactgctagatcttgagagcacagatttcagtatagtattcatgtgaaaccagcccttcatgtaaaaagttttggtgtgtaaaaaaggcaacttaagcgaggctaattgcccttaccagcattgttgccatgaaattcctttatacagcaagttcttctattcatactgattccacttatgtgcagcacatgagagctgccactagtctacccagcacctttgtgcaaattagaatacacctgcccttcctcgggctgataaagccacacgacacagcacaggcagacaggttcaattttcgttccctccaccgccacccccgcacttagctgtactcttaatttgcagcccggggcaactcatcccaggaccccaacaagtctggtcagtcacccaatctgcaaccctgtataatcatcttgtaaaggctcctgtatgcaagactttgtgtagaactttacggggttcatggggacacctagctaagaatccctgctatgtagggaaactgagtgcattagaaatcctggcgatgctctggtgatgaggccaccggttaagtcttccggttatgaagtccattcagaaaaagtcacgggcagtttggtcatttctcaccctgttgttacagttaggttgactttcaattccttgggaagttgaagcacagtaagacacatccccaaaacctggctttttgcatttgccttgactcacgcagtttcagagcaagaacggctcagcatttgtgagggggcgggcttcccagatccaggagcctctgcatgcacccatgcggagtagatccttctagttttgaagctctccagagttagctgtgaagactaaaggaaagaagagatgcactcacaggttgtccaagttgtctctaaacagactccattcctttctggtaagaaaagtaagatacagttgaaggacggcaggggagaacgcaaagatgtgtgagtaatcaaggaagaggtgaaaggccgcaccttactttcaaagcacctctctccagaatgcttgcctcacaagctgcctcattcaaaggcaaggctctgctgctccccgccttcttgctgtgaccacattcctcaggactctatccccacagccagctgaccccataagctgatgctagacagtagtcctccttacatgtcagtggttaaaaaggcagagcatacactggagggaagagatttatgtctagtgtctgaaaagtcattcaaaaggataaaaaccccattaatgtattcatttaaaacaaacatgccagacaaggcaaaaagtaacagtgttaattgtggtgtttttctctctacctgtttgaaaccgtttacagatgtaaaacacccctttcagcttcatttaccagaatgcctctgtgagaaatgctgtcattgccaggc

SEQ ID NO: 112295 - DNA, 2145 bp, Homo sapiens
  Payload ID: 1984
  Gene Symbol: BRD7
  Gene Name: bromodomain containing 7
  Uniprot ID: Q9NPI1
  ENST ID: ENST00000394689
  CDS Start-End: 6-1964
cggacatgggcaagaagcacaagaagcacaagtcggacaaacacctctacgaggagtatgtagagaagcccttgaagctggtcctcaaagtaggagggaacgaagtcaccgaactctccacgggcagctcggggcacgactccagcctcttcgaagacaaaaacgatcatgacaaacacaaggacagaaagcggaaaaagagaaagaaaggagagaagcagattccaggggaagaaaaggggagaaaacggagaagagttaaggaggataaaaagaagcgagatcgagaccgggtggagaatgaggcagaaaaagatctccagtgtcacgcccctgtgagattagacttgcctcctgagaagcctctcacaagctctttagccaaacaagaagaagtagaacagacaccccttcaagaagctttgaatcaactgatgagacaattgcagagaaaagatccaagtgctttcttttcatttcctgtgactgattttattgctcctggctactccatgatcattaaacacccaatggattttagtaccatgaaagaaaagatcaagaacaatgactatcagtccatagaagaactaaaggataacttcaaactaatgtgtactaatgccatgatttacaataaaccagagaccatttattataaagctgcaaagaagctgttgcactcaggaatgaaaattcttagccaggaaagaattcagagcctgaagcagagcatagacttcatggctgacttgcagaaaactcgaaagcagaaagatggaacagacacctcacagagtggggaggacggaggctgctggcagagagagagagaggactctggagatgccgaagcacacgccttcaagagtcccagcaaagaaaataaaaagaaagacaaagatatgcttgaagataagtttaaaagcaataatttagagagagagcaggagcagcttgaccgcatcgtgaaggaatctggaggaaagctgaccaggcggcttgtgaacagtcagtgcgaatttgaaagaagaaaaccagatggaacaacgacgttgggacttctccatcctgtggatcccattgtaggagagccaggctactgccctgtgagactgggaatgacaactggaagacttcagtctggagtgaatactttgcaggggttcaaagaggataaaaggaacaaagtcactccagtgttatatttgaattatgggccctacagttcttatgcaccgcattatgactccacatttgcaaatatcagcaaggatgattctgatttaatctattcaacctatggggaagactctgatcttccaagtgatttcagcatccatgagtttttggccacgtgccaagattatccgtatgtcatggcagatagtttactggatgttttaacaaaaggagggcattccaggaccctacaagagatggagatgtcattgcctgaagatgaaggccatactaggacacttgacacagcaaaagaaatggagcagattacagaagtagagccaccagggcgtttggactccagtactcaagacaggctcatagcgctgaaagcagtaacaaattttggcgttccagttgaagtttttgactctgaagaagctgaaatattccagaagaaacttgatgagaccaccagattgctcagggaactccaggaagcccagaatgaacgtttgagcaccagaccccctccgaacatgatctgtctcttgggtccctcatacagagaaatgcatcttgctgaacaagtgaccaataatcttaaagaacttgcacagcaagtaactccaggtgatatcgtaagcacgtatggagttcgaaaagcaatggggatttccattccttcccccgtcatggaaaacaactttgtggatttgacagaagacactgaagaacctaaaaagacggatgttgctgagtgtggacctggtggaagttgaggctgcctggtatttgattatatattatgtacatactttttcattcttaacttagaaatgcttttcagaagatattaaatatttgtaaattgtgtttttaattaaactttggaacagcgaatttggatgttccagaggttggacttgtattaggtaataaagctggacctgggactcgtga

SEQ ID NO: 112296 - DNA, 2580 bp, Homo sapiens
  Payload ID: 1984
  Gene Symbol: BRD7
  Gene Name: bromodomain containing 7
  ENST ID: ENST00000562383
  CDS Start-End: 1-99
ccttcccccgtcatggaaaacaactttgtggatttgacagaagacactgaagaacctaaaaagacggatgttgctgagtgtggacctggtggaagttgaggctgcctggcccaccagggagagggagtctccaatccgtgctagacagctcagcttactcccccttggtgtctagaaaaacagacctcacttgtgcgtgcccacaggccactgaggtggaagtctgttttcatcatgtgctaaagttgcctgcctggcacctcagggaacaaagatctcaaagtcagccccgaaccagtgaacattctccagctggcctggaaactgttacagaccaggcacagagcttctggcctcccctgcgcattatggctcagtggctgcttcgagccagaatctggtgcatgtgtctgagaaatcctccagtgcaggtccaaagaagccaacatgcacagccatctgcatgcctttgggattggcgtggggcggagagtcttctcctgggcttgcttcagggaaggagactggcttcccggccttttcggaatccagcaggagccctcagttcagccccagcccctgaaacttggcagtgtccgtacagacaaagtaagtcctcagctcgcctttgcctttgacgttgatcaggccacggcattcacaagagtacccgaggccctggaggatggtgcaggtctcctcggtaacctgaaaaggaagagagacctgttgtcttcagaggcgggaagaacacctgtcatggtagggacagatagagactgcccaggcatgcagtctgccttccctggagagtgtgatagctagaaccatggctgctgggtgagacagcagctcttaagtccaagtcccctcacctctggggaagatcttttccccttagtcaactgcttccccaataggtctttacctggattttcccaagttctccagtgctttccattcggctggccacattgacagtgtttccccagatgtcatactgaggttttcgggccccaatcactccagcaatcacaggcccatggtttatgcctgaagatgatgtttacagttacccaagcgtgcaggcaaagcctcaagcttctgcccttagaggaggccagagaatccataccccagcacaggatgcggggacaaaacaactagagtgaaggctgggttgcttcccagagtcactgcgttgcagtcgggcttggggtatgaggagggcattccccggccagctctttttcagactcagaagtctgggtttgatgttaacacttgtatctgctaatctctcttttaacaaagaatactttgttaaaagtattaacaaaggcctggctttgagcgcaggcccgcaactatttaggtttagtaactttgcttccttctctatattttaaggtcacctgtttacagacaataattttggttctccattttctgtagttacgtattattaaaactctcaatggtaactatatgctaactatatgcaaaacatcagaataattgtccaactgctgagcttgtcagatcagagggatttctaaaacctttcataatagatggcgaggtgcagctgtgccacacagactgggtggactggcctagaggcaggggctccccaccccgctccatcacccgggctcaccgacgcggaggcggaaggagttgaaggagtgcctgttgatgccgtccagcttactcatcagggcgatgctgaactccaccatgacaccaatgtgggcatgctgccgctccagctcctgcgggacaggctgtgggtcagatccttgcatctccagagcccccagacctagtgggccctggcgcgccactcttgttgaggatccccaccactaaaatcctggctgagccctacaagtacctgtgcccctcccccaggacgagataagggcacaccctttaagtaaggtgacaggtcacctttaagtgaggacagtcagctgaatttcacctcttgggcttgagtacctggttctcgtgccctgaggcgacgctgagccctgcagctgccatgtacgtgctgccgatggtcttgatcttctccacgccgctgaacttgggcttcagtaggagctgcaggcaagaaggaagcggtgaagcagccgccactccatagccgcagccaggctgcccctgcttctcaggaagggtgtggggttccctccacccatcgccgcctctcgcacacacgtctcatggctgccctgccagctgagcgcatgactaagcatggtgaggacatggcccttggcggctcctgctcttcctgttgtctccgtccccacactgtctccctcttcccttccatctgtgtctgcacagagcaaacacagcattatctacacaggaatgtagattctttgtctccagcaaagaattcaacccaaactgatttcctctgtttggcttggttgatagcgtgggcttagttggaaatgaagctaaggggcctgagtctaatcttagcaagctgcccatcacagagaagatgccaacgaattatttgctgcataaaacagaatgaaaaagaaatgtgtaccttta

SEQ ID NO: 112297 - DNA, 416 bp, Homo sapiens
  Payload ID: 1984
  Gene Symbol: BRD7
  Gene Name: bromodomain containing 7
  ENST ID: ENST00000569774
  CDS Start-End: 1-330
cagaagaaacttgatgagaccaccagattgctcagggaactccaggaagcccagaatgaacgtttgagcaccagaccccctccgaacatgatctgtctcttgggtccctcatacagagaaatgcatcttgctgaacaagtgaccaataatcttaaagaacttgcacagcaagtaactccaggtgatatcgtaagcacgtatggagttcgaaaagcaatggggatttccattccttcccccgtcatggaaaacaactttgtggatttgacagaagacactgaagaacctaaaaagacggatgttgctgagtgtggacctggtggaagttgaggctgcctgatgtaaaacacccctttcagcttcatttaccagaatgcctctgtgagaaatgctgtcattgccaggcccaccaggga

SEQ ID NO: 112298 - DNA, 3198 bp, Homo sapiens
  Payload ID: 1985
  Gene Symbol: BRD8
  Gene Name: bromodomain containing 8
  Uniprot ID: Q9H0E9
  ENST ID: ENST00000230901
  CDS Start-End: 17-2872
agacttcggggccaagatggcgacgggaacgggcaaacacaagctgctaagcactggccccacagagccatggtccatccgagagaagctatgtttagcatcttctgtcatgagaagtggcgatcaaaattgggtatcagttagcagagcaatcaagccctttgcagaacctggccgccctccagactggttctctcaaaaacattgtgcttcccagtactcggagcttttagagaccactgagacaccaaaacggaaacgaggtgaaaagggagaagtggtggaaactgttgaagatgttattgttcggaaattgactgctgagcgagttgaagaactaaagaaagtgataaaggaaacccaggagagatatagacggctaaagagagatgcagaactaattcaagctggacacatggacagcagactggatgagctttgcaatgacattgcaacgaaaaagaaattggaagaagaggaggctgaagtaaagaggaaggctacagatgctgcataccaggctcgtcaagcagtaaaaacacccccccggaggttacccactgtgatggttcgctctcctatagattctgcctccccaggaggtgattatccacttggggacttgactccaaccactatggaagaggctacctctggggtaacccccgggactttgccgagtaccccagtcacctcgtttcctgggattcctgacacccttcctccaggctctgcacccttagaagcccccatgaccccagtaacagatgattcaccccagaaaaagatgcttggacagaaagcaactccacccccctcccctctgctgtcagagctcttgaagaagggcagcctcctgcctactagccccagactggtcaatgagagtgaaatggctgtggcttctggccacctgaacagtacaggtgtcctcctggaggtaggcggggtccttcccatgatacatggtggggagatacagcaaacacccaatactgttgcagcctcccctgctgcatcaggtgctcccactctttcccggcttttagaagctggtcctacacagttcaccacacctcttgcttccttcactactgttgccagtgagcctccagttaaacttgtgccaccccctgtagagtctgtgtcccaagctaccattgtcatgatgcctgcgctgccagcaccatcctctgctccggctgtctccactactgaaagtgtagctccagtgagtcaacccgacaactgtgttcccatggaggctgtgggggatccacatactgtgactgtttccatggacagcagtgaaatatccatgatcatcaattctatcaaagaagagtgttttcgatcaggggtagcagaggctcctgttggatcaaaggctcccagcatagatgggaaggaagaattagatctggctgagaagatggatattgctgtgtcttacacaggtgaagagctggattttgagactgttggagacatcattgccatcattgaggacaaggtagatgatcatcctgaagtgctggatgtggcagcagtggaagcagcactgtcattttgtgaagaaaatgatgatcctcagtccctgcctggcccctgggagcatcctatccagcaggagcgggacaagccagtacctctccctgcaccagaaatgacggtcaagcaagagagactggactttgaggaaacggaaaacaagggaatacatgaactggtggacatcagggagcccagtgcagagatcaaggtggaacctgcagaaccagagccagtcatttcaggagccgaaatagtagctggagttgttccagccacaagtatggagccaccagaactcaggagtcaggacttagatgaggaactgggaagtactgcagctggagagattgttgaagcagatgttgccattgggaaaggcgatgagactccacttacaaatgtgaagacagaggcatcccctgaaagcatgttgtctccatcacatggctcaaatcccattgaagatcctttagaggcagagactcagcacaagtttgaaatgtcagactcattgaaagaagaatcagggactatttttggaagccagataaaggatgccccaggtgaggatgaggaggaagatggtgtcagtgaagcggccagcctagaggagcctaaggaagaggatcaaggagaaggctacttgtcagaaatggataatgaacctcctgtgagcgagagtgatgatggcttcagcatacacaatgctacactgcagtcacacacactggcagactccatccccagcagccctgcttcttcacagttctctgtctgtagtgaggatcaggaagctattcaggcacagaaaatttggaagaaagccatcatgcttgtatggagagctgcagctaatcataggtatgccaatgtcttcctgcagcctgttacagatgacatagcacctggctaccacagcattgtgcagaggcctatggatttgtcaactattaagaaaaacatagaaaatggactgatccgaagcacagctgaatttcagcgtgacattatgctgatgtttcagaatgctgtaatgtacaatagctcagaccatgatgtctatcacatggcagtggagatgcagcgagatgtcttggaacagatccagcaattcttggccacgcagttgattatgcaaacatccgagtctgggatcagtgctaaaagtcttcgagggagagattctacccgcaaacaggatgcttcagagaaggacagtgtcccaatgggctctcctgccttccttctctctctctttgatggaggaaccaggggacgccgctgtgccattgaagcagatatgaagatgaaaaagtgaagcctcagagttaccctctttgagccgaacctaaaataaaagtaaacaagatagagcttgggcttgcgggcccagttccagaggtggaagttacagaagaggaggtacctgggccacacgacatgagctggaaaatctctcttagagagttggagtagcacaattgcctgttttagggcagaaaccatgggctatgttaatgtcctaatgtgtagctagcagatcgtagctagtttgtattgtcttgtcaattgtacagactttttaaaaaaaacaaccaccagtgaaatgtgtgtgtatacaataaactgaaaaaaaaaactagc

SEQ ID NO: 112299 - DNA, 4388 bp, Homo sapiens
  Payload ID: 1985
  Gene Symbol: BRD8
  Gene Name: bromodomain containing 8
  Uniprot ID: Q9H0E9
  ENST ID: ENST00000254900
  CDS Start-End: 373-4080
aattccagtcgttcgcttctgcttgacctctgagttctaatgtgggtccgggttaccaactgtcgtggattcgcacttattttgcctgggattcttccaacttaacctttttccttgaaccttagacatttcttacctaagagcctaaaggaaatcttgaggcttcagcagccaactcctgtccttccttagcaacaatcttaacaggagtgcacagggtaactggtttagggtgcttgctttgtcttaaggggaaaaacgacatttcccaggaggcaccgcgaaccaacgccggtacactatttcccagaattccagggtttcggcccttccagaccgtctctcctcagggttggagacttcggggccaagatggcgacgggaacgggcaaacacaagctgctaagcactggccccacagagccatggtccatccgagagaagctatgtttagcatcttctgtcatgagaagtggcgatcaaaattgggtatcagttagcagagcaatcaagccctttgcagaacctggccgccctccagactggttctctcaaaaacattgtgcttcccagtactcggagcttttagagaccactgagacaccaaaacggaaacgaggtgaaaagggagaagtggtggaaactgttgaagatgttattgttcggaaattgactgctgagcgagttgaagaactaaagaaagtgataaaggaaacccaggagagatatagacggctaaagagagatgcagaactaattcaagctggacacatggacagcagactggatgagctttgcaatgacattgcaacgaaaaagaaattggaagaagaggaggctgaagtaaagaggaaggctacagatgctgcataccaggctcgtcaagcagtaaaaacacccccccggaggttacccactgtgatggttcgctctcctatagattctgcctccccaggaggtgattatccacttggggacttgactccaaccactatggaagaggctacctctggggtcaatgagagtgaaatggctgtggcttctggccacctgaacagtacaggtgtcctcctggaggtaggcggggtccttcccatgatacatggtggggagatacagcaaacacccaatactgttgcagcctcccctgctgcatcaggtgctcccactctttcccggcttttagaagctggtcctacacagttcaccacacctcttgcttccttcactactgttgccagtgagcctccagttaaacttgtgccaccccctgtagagtctgtgtcccaagctaccattgtcatgatgcctgcgctgccagcaccatcctctgctccggctgtctccactactgaaagtgtagctccagtgagtcaacccgacaactgtgttcccatggaggctgtgggggatccacatactgtgactgtttccatggacagcagtgaaatatccatgatcatcaattctatcaaagaagagtgttttcgatcaggggtagcagaggctcctgttggatcaaaggctcccagcatagatgggaaggaagaattagatctggctgagaagatggatattgctgtgtcttacacaggtgaagagctggattttgagactgttggagacatcattgccatcattgaggacaaggtagatgatcatcctgaagtgctggatgtggcagcagtggaagcagcactgtcattttgtgaagaaaatgatgatcctcagtccctgcctggcccctgggagcatcctatccagcaggagcgggacaagccagtacctctccctgcaccagaaatgacggtcaagcaagagagactggactttgaggaaacggaaaacaagggaatacatgaactggtggacatcagggagcccagtgcagagatcaaggtggaacctgcagaaccagagccagtcatttcaggagccgaaatagtagctggagttgttccagccacaagtatggagccaccagaactcaggagtcaggacttagatgaggaactgggaagtactgcagctggagagattgttgaagcagatgttgccattgggaaaggcgatgagactccacttacaaatgtgaagacagaggcatcccctgaaagcatgttgtctccatcacatggctcaaatcccattgaagatcctttagaggcagagactcagcacaagtttgaaatgtcagactcattgaaagaagaatcagggactatttttggaagccagataaaggatgccccaggtgaggatgaggaggaagatggtgtcagtgaagcggccagcctagaggagcctaaggaagaggatcaaggagaaggctacttgtcagaaatggataatgaacctcctgtgagcgagagtgatgatggcttcagcatacacaatgctacactgcagtcacacacactggcagactccatccccagcagccctgcttcttcacagttctctgtctgtagtgaggatcaggaagctattcaggcacagaaaatttggaagaaagccatcatgcttgtatggagagctgcagctaatcataggtatgccaatgtcttcctgcagcctgttacagatgacatagcacctggctaccacagcattgtgcagaggcctatggatttgtcaactattaagaaaaacatagaaaatggactgatccgaagcacagctgaatttcagcgtgacattatgctgatgtttcagaatgctgtaatgtacaatagctcagaccatgatgtctatcacatggcagtggagatgcagcgagatgtcttggaacagatccagcaattcttggccacgcagttgattatgcaaacatccgagtctgggatcagtgctaaaagtcttcgagggagagattctacccgcaaacaggatgcttcagagaaggacagtgtcccaatgggctctcctgccttccttctctctctctttatgggacacgagtgggtttggctggattctgaacaagatcatcccaatgactctgagttgagcaatgactgcaggtccctcttcagctcatgggactccagtctggatcttgatgtgggcaactggagggaaactgaggatccagaggctgaggaactagaggaaagcagcccggagagagaacctagtgaactgcttgttggggatggaggcagtgaggaatctcaggaagcggcaaggaaagccagccaccagaacctcctccactttctctctgaggtagcttatttaatggagcccttgtgcatcagcagcaacgaatcaagtgaaggctgctgccctccatctggtaccagacaagaaggaagggaaattaaagctagcgaaggagaaagggagctctgcagagagactgaagagctttcagctaaaggagaccccttagtagctgaaaagccactgggagaaaatggaaagccagaggtggcttcagctccctcagttatttgtacagttcagggactactcacagagagtgaagagggggaggctcagcaagaatccaaaggggaggaccagggtgaagtatatgtgtcagagatggaagaccagcccccttcaggcgagtgtgatgatgcctttaacattaaggagactcccttggtggatacacttttcagccatgctacctcctcaaagctgactgatctaagccaggatgaccctgttcaggatcatttgctatttaagaagactctcctgccagtctggaagatgattgccagtcacaggttcagcagtccatttctgaagcctgtgtcagaaaggcaggccccagggtacaaggatgtggtgaaaagacccatggacttaactagcctgaagagaaatctctctaagggtcggattcgcaccatggcccaattcctgcgagacctgatgctgatgttccaaaatgctgtaatgtacaatgactctgatcatcatgtataccatatggctgtggagatgcggcaagaagtcctggagcagattcaggtactgaatatctggttagacaaaagaaaaggctcaagtagtctggaaggagaaccagctaacccagtggatgatggaaaacctgttttctaacctggagctgctatcctgactttttctagagtttgaatctctcccggaactctgacctagagaggatcctggtacttctttgccatgtcctcattttcttttccaacaagaataataccttaactcacaaccaacgagtcaaagatgcatgtggacataatataaagaaaaaaaggggaagctgaggtttggatttatgccataaatgttgcccacatctttgttccatcggcttgatttaaagacaattccattagatcttttctaagccttttactctataaataaatgtatttacacaataggaa

SEQ ID NO: 112300 - DNA, 2982 bp, Homo sapiens
  Payload ID: 1985
  Gene Symbol: BRD8
  Gene Name: bromodomain containing 8
  ENST ID: ENST00000402931
  CDS Start-End: 20-2656
tggagacttcggggccaagatggcgacgggaacgggcaaacacaagctgctaagcactggccccacagagccatggtccatccgagagaagctatgtttagcatcttctgtcatgagaagtggcgatcaaaattgggtatcagttagcagagcaatcaagccctttgcagaacctggccgccctccagactggttctctcaaaaacattgtgcttcccagtactcggagcttttagagaccactgagacaccaaaacggaaacgaggtgaaaagggagaagtggtggaaactgttgaagatgttattgttcggaaattgactgctgagcgagttgaagaactaaagaaagtgataaaggaaacccaggagagatatagacggctaaagagagatgcagaactaattcaagctggacacatggacagcagactggatgagctttgcaatgacattgcaacgaaaaagaaattggaagaagaggaggctgaagtaaagaggaaggctacagatgctgcataccaggctcgtcaagcagtaaaaacacccccccggaggttacccactgtgatggttcgctctcctatagattctgcctccccaggaggtgattatccacttggggacttgactccaaccactatggaagaggctacctctggggtcaatgagagtgaaatggctgtggcttctggccacctgaacagtacaggtgtcctcctggaggtaggcggggtccttcccatgatacatggtggggagatacagcaaacacccaatactgttgcagcctcccctgctgcatcaggtgctcccactctttcccggcttttagaagctggtcctacacagttcaccacacctcttgcttccttcactactgttgccagtgagcctccagttaaacttgtgccaccccctgtagagtctgtgtcccaagctaccattgtcatgatgcctgcgctgccagcaccatcctctgctccggctgtctccactactgaaagtgtagctccagtgagtcaacccgacaactgtgttcccatggaggctgtgggggatccacatactgtgactgtttccatggacagcagtgaaatatccatgatcatcaattctatcaaagaagagtgttttcgatcaggggtagcagaggctcctgttggatcaaaggctcccagcatagatgggaaggaagaattagatctggctgagaagatggatattgctgtgtcttacacaggtgaagagctggattttgagactgttggagacatcattgccatcattgaggacaaggtagatgatcatcctgaagtgctggatgtggcagcagtggaagcagcactgtcattttgtgaagaaaatgatgatcctcagtccctgcctggcccctgggagcatcctatccagcaggagcgggacaagccagtacctctccctgcaccagaaatgacggtcaagcaagagagactggactttgaggaaacggaaaacaagggaatacatgaactggtggacatcagggagcccagtgcagagatcaaggtggaacctgcagaaccagagccagtcatttcaggagccgaaatagtagctggagttgttccagccacaagtatggagccaccagaactcaggagtcaggacttagatgaggaactgggaagtactgcagctggagagattgttgaagcagatgttgccattgggaaaggcgatgagactccacttacaaatgtgaagacagaggcatcccctgaaagcatgttgtctccatcacatggctcaaatcccattgaagatcctttagaggcagagactcagcacaagtttgaaatgtcagactcattgaaagaagaatcagggactatttttggaagccagataaaggatgccccaggtgaggatgaggaggaagatggtgtcagtgaagcggccagcctagaggagcctaaggaagaggatcaaggagaaggctacttgtcagaaatggataatgaacctcctgtgagcgagagtgatgatggcttcagcatacacaatgctacactgcagtcacacacactggcagactccatccccagcagccctgcttcttcacagttctctgtctgtagtgaggatcaggaagctattcaggcacagaaaatttggaagaaagccatcatgcttgtatggagagctgcagctaatcataggtatgccaatgtcttcctgcagcctgttacagatgacatagcacctggctaccacagcattgtgcagaggcctatggatttgtcaactattaagaaaaacatagaaaatggactgatccgaagcacagctgaatttcagcgtgacattatgctgatgtttcagaatgctgtaatgtacaatagctcagaccatgatgtctatcacatggcagtggagatgcagcgagatgtcttggaacagatccagcaattcttggccacgcagttgattatgcaaacatccgagtctgggatcagtgctaaaagtcttcgagggagagattctacccgcaaacaggatgcttcagagaaggacagtgtcccaatgggctctcctgccttccttctctctctctttgatggaggaaccaggggacgccgctgtgccattgaagcagatatgaagatgaaaaagtgaagcctcagagttaccctctttgagccgaacctaaaataaaagtaaacaagatagagcttgggcttgcgggcccagttccagaggtggaagttacagaagaggaggtacctgggccacacgacatgagctggaaaatctctcttagagagttggagtagcacaattgcctgttttagggcagaaaccatgggctatgttaatgtcctaatgtgtagctagcagatcgtagctagtttgtattgtcttgtcaattgtacagactttttaaaaaaaacaaccaccagtgaaatgtgtgtgtatacaataaactgaaaaaaaaaactagc

SEQ ID NO: 112301 - DNA, 1011 bp, Homo sapiens
  Payload ID: 1985
  Gene Symbol: BRD8
  Gene Name: bromodomain containing 8
  ENST ID: ENST00000427976
  CDS Start-End: 1-1011
gatcttgatgtgggcaactggagggaaactgaggatccagaggctgaggaactagaggaaagcagcccggagagagaacctagtgaactgcttgttggggatggaggcagtgaggaatctcaggaagcggcaaggaaagccagccaccagaacctcctccactttctctctgaggtagcttatttaatggagcccttgtgcatcagcagcaacgaatcaagtgaaggctgctgccctccatctggtaccagacaagaaggaagggaaattaaagctagcgaaggagaaagggagctctgcagagagactgaagagctttcagctaaaggagaccccttagtagctgaaaagccactgggagaaaatggaaagccagaggtggcttcagctccctcagttatttgtacagttcagggactactcacagagagtgaagagggggaggctcagcaagaatccaaaggggaggaccagggtgaagtatatgtgtcagagatggaagaccagcccccttcaggcgagtgtgatgatgcctttaacattaaggagactcccttggtggatacacttttcagccatgctacctcctcaaagctgactgatctaagccaggatgaccctgttcaggatcatttgctatttaagaagactctcctgccagtctggaagatgattgccagtcacaggttcagcagtccatttctgaagcctgtgtcagaaaggcaggccccagggtacaaggatgtggtgaaaagacccatggacttaactagcctgaagagaaatctctctaagggtcggattcgcaccatggcccaattcctgcgagacctgatgctgatgttccaaaatgctgtaatgtacaatgactctgatcatcatgtataccatatggctgtggagatgcggcaagaagtcctggagcagattcaggtactgtatgcagatacctgtagcctctggaatcttgatttcagaacgcctatgagaataaaggtgatttcgaggtga

SEQ ID NO: 112302 - DNA, 2967 bp, Homo sapiens
  Payload ID: 1985
  Gene Symbol: BRD8
  Gene Name: bromodomain containing 8
  Uniprot ID: Q9H0E9
  ENST ID: ENST00000411594
  CDS Start-End: 56-2656
gggtttcggcccttccagaccgtctctcctcagggttggagacttcggggccaagatggcgacgggaacgggcaaacacaagctgctaagcactggccccacagagccatggtccatccgagagaagctatgtttagcatcttctgtcatgagaagtggcgatcaaaattgggtatcagttagcagagcaatcaagccctttgcagaacctggccgccctccagactggttctctcaaaaacattgtgcttcccagtactcggagcttttagagaccactgagacaccaaaacggaaacgaggtgaaaagggagaagtggtggaaactgttgaagatgttattgttcggaaattgactgctgagcgagttgaagaactaaagaaagtgataaaggaaacccaggagagatatagacggctaaagagagatgcagaactaattcaagctggacacatggacagcagactggatgagctttgcaatgacattgcaacgaaaaagaaattggaagaagaggaggctgaagtaaagaggaaggctacagatgctgcataccaggctcgtcaagcagtaaaaacacccccccggaggttacccactgtgatggttcgctctcctatagattctgcctccccaggaggtgattatccacttggggacttgactccaaccactatggaagaggctacctctggggtaacccccgggactttgccgagtaccccagtcacctcgtttcctgggattcctgacacccttcctccaggctctgcacccttagaagcccccatgaccccagtaacagatgattcaccccagaaaaagatgcttggacagaaagcaactccacccccctcccctctgctgtcagagctcttgaagaagggcagcctcctgcctactagccccagactggtcaatgagagtgaaatggctgtggcttctggccacctgaacagtacaggtgtcctcctggaggtaggcggggtccttcccatgatacatggtggggagatacagcaaacacccaatactgttgcagcctcccctgctgcatcagtgagtcaacccgacaactgtgttcccatggaggctgtgggggatccacatactgtgactgtttccatggacagcagtgaaatatccatgatcatcaattctatcaaagaagagtgttttcgatcaggggtagcagaggctcctgttggatcaaaggctcccagcatagatgggaaggaagaattagatctggctgagaagatggatattgctgtgtcttacacaggtgaagagctggattttgagactgttggagacatcattgccatcattgaggacaaggtagatgatcatcctgaagtgctggatgtggcagcagtggaagcagcactgtcattttgtgaagaaaatgatgatcctcagtccctgcctggcccctgggagcatcctatccagcaggagcgggacaagccagtacctctccctgcaccagaaatgacggtcaagcaagagagactggactttgaggaaacggaaaacaagggaatacatgaactggtggacatcagggagcccagtgcagagatcaaggtggaacctgcagaaccagagccagtcatttcaggagccgaaatagtagctggagttgttccagccacaagtatggagccaccagaactcaggagtcaggacttagatgaggaactgggaagtactgcagctggagagattgttgaagcagatgttgccattgggaaaggcgatgagactccacttacaaatgtgaagacagaggcatcccctgaaagcatgttgtctccatcacatggctcaaatcccattgaagatcctttagaggcagagactcagcacaagtttgaaatgtcagactcattgaaagaagaatcagggactatttttggaagccagataaaggatgccccaggtgaggatgaggaggaagatggtgtcagtgaagcggccagcctagaggagcctaaggaagaggatcaaggagaaggctacttgtcagaaatggataatgaacctcctgtgagcgagagtgatgatggcttcagcatacacaatgctacactgcagtcacacacactggcagactccatccccagcagccctgcttcttcacagttctctgtctgtagtgaggatcaggaagctattcaggcacagaaaatttggaagaaagccatcatgcttgtatggagagctgcagctaatcataggtatgccaatgtcttcctgcagcctgttacagatgacatagcacctggctaccacagcattgtgcagaggcctatggatttgtcaactattaagaaaaacatagaaaatggactgatccgaagcacagctgaatttcagcgtgacattatgctgatgtttcagaatgctgtaatgtacaatagctcagaccatgatgtctatcacatggcagtggagatgcagcgagatgtcttggaacagatccagcaattcttggccacgcagttgattatgcaaacatccgagtctgggatcagtgctaaaagtcttcgagggagagattctacccgcaaacaggatgcttcagagaaggatggaggaaccaggggacgccgctgtgccattgaagcagatatgaagatgaaaaagtgaagcctcagagttaccctctttgagccgaacctaaaataaaagtaaacaagatagagcttgggcttgcgggcccagttccagaggtggaagttacagaagaggaggtacctgggccacacgacatgagctggaaaatctctcttagagagttggagtagcacaattgcctgttttagggcagaaaccatgggctatgttaatgtcctaatgtgtagctagcagatcgtagctagtttgtattgtcttgtcaattgtacagactttttaaaaaaaacaaccaccagtgaaatgtgtgtgtatacaataaactg

SEQ ID NO: 112303 - DNA, 590 bp, Homo sapiens
  Payload ID: 1985
  Gene Symbol: BRD8
  Gene Name: bromodomain containing 8
  ENST ID: ENST00000450756
  CDS Start-End: 15-218
acttcggggccaagatggcgacgggaacgggcaaacacaagctgctaagcactggccccacagagccatggtccatccgagagaagctatgtttagcatcttctgtcatgagaagtggcgatcaaaattggctggagtgcagtggcgcgatttgggctcactgcagcctcttgacttcctgggctcaagggatcctcctacctcagctgcccaagtagctgggaccacaggccgcagggtatcagttagcagagcaatcaagccctttgcagaacctggccgccctccagactggttctctcaaaaacattgtgcttcccagtactcggagcttttagagaccactgagacaccaaaacggaaacgaggtgaaaagggagaagtggtggaaactgttgaagatgttattgttcggaaattgactgctgagcgagttgaagaactaaagaaagtgataaaggaaacccaggagagatatagacggctaaagagagatgcagaactaattcaagctggacacatggacagcagactggatgagctttgcaatgacattgcaacgaaaaagaaattggaagaagaggaggctg

SEQ ID NO: 112304 - DNA, 3005 bp, Homo sapiens
  Payload ID: 1985
  Gene Symbol: BRD8
  Gene Name: bromodomain containing 8
  ENST ID: ENST00000454473
  CDS Start-End: 1-2679
ggcaaacacaagctgctaagcactggccccacagagccatggtccatccgagagaagctatgtttagcatcttctgtcatgagaagtggcgatcaaaattgggtatcagttagcagagcaatcaagccctttgcagaacctggccgccctccagactggttctctcaaaaacattgtgcttcccagtactcggagcttttagagaccactgagacaccaaaacggaaacgaggtgaaaagggagaagtggtggaaactgttgaagatgttattgttcggaaattgactgctgagcgagttgaagaactaaagaaagtgataaaggaaacccaggagagatatagacggctaaagagagatgcagaactaattcaagctggacacatggacagcagactggatgagctttgcaatgacattgcaacgaaaaagaaattggaagaagaggaggctgaagtaaagaggaaggctacagatgctgcataccaggctcgtcaagcagtaaaaacacccccccggaggttacccactgtgatggttcgctctcctatagattctgcctccccaggaggtgattatccacttggggacttgactccaaccactatggaagaggctacctctggggtaacccccgggactttgccgagtaccccagtcacctcgtttcctgggattcctgacacccttcctccaggctctgcacccttagaagcccccatgaccccagtaacagatgattcaccccagaaaaagatgcttggacagaaagcaactccacccccctcccctctgctgtcagagctcttgaagaagggcagcctcctgcctactagccccagactggtcaatgagagtgaaatggctgtggcttctggccacctgaacagtacaggtgtcctcctggaggtaggcggggtccttcccatgatacatggtggggagatacagcaaacacccaatactgttgcagcctcccctgctgcatcagagtctgtgtcccaagctaccattgtcatgatgcctgcgctgccagcaccatcctctgctccggctgtctccactactgaaagtgtagctccagtgagtcaacccgacaactgtgttcccatggaggctgtgggggatccacatactgtgactgtttccatggacagcagtgaaatatccatgatcatcaattctatcaaagaagagtgttttcgatcaggggtagcagaggctcctgttggatcaaaggctcccagcatagatgggaaggaagaattagatctggctgagaagatggatattgctgtgtcttacacaggtgaagagctggattttgagactgttggagacatcattgccatcattgaggacaaggtagatgatcatcctgaagtgctggatgtggcagcagtggaagcagcactgtcattttgtgaagaaaatgatgatcctcagtccctgcctggcccctgggagcatcctatccagcaggagcgggacaagccagtacctctccctgcaccagaaatgacggtcaagcaagagagactggactttgaggaaacggaaaacaagggaatacatgaactggtggacatcagggagcccagtgcagagatcaaggtggaacctgcagaaccagagccagtcatttcaggagccgaaatagtagctggagttgttccagccacaagtatggagccaccagaactcaggagtcaggacttagatgaggaactgggaagtactgcagctggagagattgttgaagcagatgttgccattgggaaaggcgatgagactccacttacaaatgtgaagacagaggcatcccctgaaagcatgttgtctccatcacatggctcaaatcccattgaagatcctttagaggcagagactcagcacaagtttgaaatgtcagactcattgaaagaagaatcagggactatttttggaagccagataaaggatgccccaggtgaggatgaggaggaagatggtgtcagtgaagcggccagcctagaggagcctaaggaagaggatcaaggagaaggctacttgtcagaaatggataatgaacctcctgtgagcgagagtgatgatggcttcagcatacacaatgctacactgcagtcacacacactggcagactccatccccagcagccctgcttcttcacagttctctgtctgtagtgaggatcaggaagctattcaggcacagaaaatttggaagaaagccatcatgcttgtatggagagctgcagctaatcataggtatgccaatgtcttcctgcagcctgttacagatgacatagcacctggctaccacagcattgtgcagaggcctatggatttgtcaactattaagaaaaacatagaaaatggactgatccgaagcacagctgaatttcagcgtgacattatgctgatgtttcagaatgctgtaatgtacaatagctcagaccatgatgtctatcacatggcagtggagatgcagcgagatgtcttggaacagatccagcaattcttggccacgcagttgattatgcaaacatccgagtctgggatcagtgctaaaagtcttcgagggagagattctacccgcaaacaggatgcttcagagaaggatggaggaaccaggggacgccgctgtgccattgaagcagatatgaagatgaaaaagtgaagcctcagagttaccctctttgagccgaacctaaaataaaagtaaacaagatagagcttgggcttgcgggcccagttccagaggtggaagttacagaagaggaggtacctgggccacacgacatgagctggaaaatctctcttagagagttggagtagcacaattgcctgttttagggcagaaaccatgggctatgttaatgtcctaatgtgtagctagcagatcgtagctagtttgtattgtcttgtcaattgtacagactttttaaaaaaaacaaccaccagtgaaatgtgtgtgtatacaataaactgaaaaaaaaaactagc

SEQ ID NO: 112305 - DNA, 2899 bp, Homo sapiens
  Payload ID: 1985
  Gene Symbol: BRD8
  Gene Name: bromodomain containing 8
  ENST ID: ENST00000441656
  CDS Start-End: 1-2573
aacacaagctgctaagcactggccccacagagccatggtccatccgagagaagctatgtttagcatcttctgtcatgagaagtggcgatcaaaattgggtatcagttagcagagcaatcaagccctttgcagaacctggccgccctccagactggttctctcaaaaacattgtgcttcccagtactcggagcttttagagaccactgagacaccaaaacggaaacgaggtgaaaagggagaagtggtggaaactgttgaagatgttattgttcggaaattgactgctgagcgagttgaagaactaaagaaagtgataaaggaaacccaggagagatatagacggctaaagagagatgcagaactaattcaagctggacacatggacagcagactggatgagctttgcaatgacattgcaacgaaaaagaaattggaagaagaggaggctgaagtaaagaggaaggctacagatgctgcataccaggcagtaaaaacacccccccggaggttacccactgtgatggttcgctctcctatagattctgcctccccaggaggtgattatccacttggggacttgactccaaccactatggaagaggctacctctggggtaacccccgggactttgccgagtaccccagtcacctcgtttcctgggattcctgacacccttcctccaggctctgcacccttagaagcccccatgaccccagtaacagatgattcaccccagaaaaagatgcttggacagaaagcaactccacccccctcccctctgctgtcagagctcttgaagaagggcagcctcctgcctactagccccagactggtcaatgagagtgaaatggctgtggcttctggccacctgaacagtacaggtgtcctcctggaggtaggcggggtccttcccatgatacatggtggggagatacagcaaacacccaatactgttgcagcctcccctgctgcatcagtgagtcaacccgacaactgtgttcccatggaggctgtgggggatccacatactgtgactgtttccatggacagcagtgaaatatccatgatcatcaattctatcaaagaagagtgttttcgatcaggggtagcagaggctcctgttggatcaaaggctcccagcatagatgggaaggaagaattagatctggctgagaagatggatattgctgtgtcttacacaggtgaagagctggattttgagactgttggagacatcattgccatcattgaggacaaggtagatgatcatcctgaagtgctggatgtggcagcagtggaagcagcactgtcattttgtgaagaaaatgatgatcctcagtccctgcctggcccctgggagcatcctatccagcaggagcgggacaagccagtacctctccctgcaccagaaatgacggtcaagcaagagagactggactttgaggaaacggaaaacaagggaatacatgaactggtggacatcagggagcccagtgcagagatcaaggtggaacctgcagaaccagagccagtcatttcaggagccgaaatagtagctggagttgttccagccacaagtatggagccaccagaactcaggagtcaggacttagatgaggaactgggaagtactgcagctggagagattgttgaagcagatgttgccattgggaaaggcgatgagactccacttacaaatgtgaagacagaggcatcccctgaaagcatgttgtctccatcacatggctcaaatcccattgaagatcctttagaggcagagactcagcacaagtttgaaatgtcagactcattgaaagaagaatcagggactatttttggaagccagataaaggatgccccaggtgaggatgaggaggaagatggtgtcagtgaagcggccagcctagaggagcctaaggaagaggatcaaggagaaggctacttgtcagaaatggataatgaacctcctgtgagcgagagtgatgatggcttcagcatacacaatgctacactgcagtcacacacactggcagactccatccccagcagccctgcttcttcacagttctctgtctgtagtgaggatcaggaagctattcaggcacagaaaatttggaagaaagccatcatgcttgtatggagagctgcagctaatcataggtatgccaatgtcttcctgcagcctgttacagatgacatagcacctggctaccacagcattgtgcagaggcctatggatttgtcaactattaagaaaaacatagaaaatggactgatccgaagcacagctgaatttcagcgtgacattatgctgatgtttcagaatgctgtaatgtacaatagctcagaccatgatgtctatcacatggcagtggagatgcagcgagatgtcttggaacagatccagcaattcttggccacgcagttgattatgcaaacatccgagtctgggatcagtgctaaaagtcttcgagggagagattctacccgcaaacaggatgcttcagagaaggatggaggaaccaggggacgccgctgtgccattgaagcagatatgaagatgaaaaagtgaagcctcagagttaccctctttgagccgaacctaaaataaaagtaaacaagatagagcttgggcttgcgggcccagttccagaggtggaagttacagaagaggaggtacctgggccacacgacatgagctggaaaatctctcttagagagttggagtagcacaattgcctgttttagggcagaaaccatgggctatgttaatgtcctaatgtgtagctagcagatcgtagctagtttgtattgtcttgtcaattgtacagactttttaaaaaaaacaaccaccagtgaaatgtgtgtgtatacaataaactgaaaaaaaaaactagc

SEQ ID NO: 112306 - DNA, 956 bp, Homo sapiens
  Payload ID: 1985
  Gene Symbol: BRD8
  Gene Name: bromodomain containing 8
  ENST ID: ENST00000432618
  CDS Start-End: 340-579
gttctaatgtgggtccgggttaccaactgtcgtggattcgcacttattttgcctgggattcttccaacttaacctttttccttgaaccttagacatttcttacctaagagcctaaaggaaatcttgaggcttcagcagccaactcctgtccttccttagcaacaatcttaacaggagtgcacagggtaactggtttagggtgcttgctttgtcttaaggggaaaaacgacatttcccaggaggcaccgcgaaccaacgccggtacactatttcccagaattccagggtttcggcccttccagaccgtctctcctcagggttggagacttcggggccaagatggcgacgggaacgggcaaacacaagctgctaagcactggccccacagagccatggtccatccgagagaagctatgtttagcatcttctgtcatgagaagtggcgatcaaaattgggtatcagttagcagagcaatcaagccctttgcagaacctggccgccctccagactggttctctcaaaaacattgtgcttcccagtactcggagcttttagagaccactgagacaccaaagtgagtacaaagccagacggaaacgaggtgaaaagggagaagtggtggaaactgttgaagatgttattgttcggaaattgactgctgagcgagttgaagaactaaagaaagtgataaaggaaacccaggagagatatagacggctaaagagagatgcagaactaattcaagctggacacatggacagcagactggatgagctttgcaatgacattgcaacgaaaaagaaattggaagaagaggaggctgaagtaaagaggaaggctacagatgctgcataccaggctcgtcaagcagtaaaaacacccccccggaggttacccactgtgatggttcgctctcctatagattctgcctccccaggaggtgattatccacttg

SEQ ID NO: 112307 - DNA, 2912 bp, Homo sapiens
  Payload ID: 1985
  Gene Symbol: BRD8
  Gene Name: bromodomain containing 8
  ENST ID: ENST00000418329
  CDS Start-End: 1-2586
ggcaaacacaagctgctaagcactggccccacagagccatggtccatccgagagaagctatgtttagcatcttctgtcatgagaagtggcgatcaaaattgggtatcagttagcagagcaatcaagccctttgcagaacctggccgccctccagactggttctctcaaaaacattgtgcttcccagtactcggagcttttagagaccactgagacaccaaaacggaaacgaggtgaaaagggagaagtggtggaaactgttgaagatgttattgttcggaaattgactgctgagcgagttgaagaactaaagaaagtgataaaggaaacccaggagagatatagacggctaaagagagatgcagaactaattcaagctggacacatggacagcagactggatgagctttgcaatgacattgcaacgaaaaagaaattggaagaagaggaggctgaagtaaagaggaaggctacagatgctgcataccaggctcgtcaagcagtaaaaacacccccccggaggttacccactgtgatggttcgctctcctatagattctgcctccccaggaggtgattatccacttggggacttgactccaaccactatggaagaggctacctctggggtaacccccgggactttgccgagtaccccagtcacctcgtttcctgggattcctgacacccttcctccaggctctgcacccttagaagcccccatgaccccagtaacagatgattcaccccagaaaaagatgcttggacagaaagcaactccacccccctcccctctgctgtcagagctcttgaagaagggcagcctcctgcctactagccccagactggtcaatgagagtgaaatggctgtggcttctggccacctgaacagtacaggtgtcctcctggaggtaggcggggtccttcccatgatacatggtggggagatacagcaaacacccaatactgttgcagcctcccctgctgcatcagtgagtcaacccgacaactgtgttcccatggaggctgtgggggatccacatactgtgactgtttccatggacagcagtgaaatatccatgatcatcaattctatcaaagaagagtgttttcgatcaggggtagcagaggctcctgttggatcaaaggctcccagcatagatgggaaggaagaattagatctggctgagaagatggatattgctgtgtcttacacaggtgaagagctggattttgagactgttggagacatcattgccatcattgaggacaaggtagatgatcatcctgaagtgctggatgtggcagcagtggaagcagcactgtcattttgtgaagaaaatgatgatcctcagtccctgcctggcccctgggagcatcctatccagcaggagcgggacaagccagtacctctccctgcaccagaaatgacggtcaagcaagagagactggactttgaggaaacggaaaacaagggaatacatgaactggtggacatcagggagcccagtgcagagatcaaggtggaacctgcagaaccagagccagtcatttcaggagccgaaatagtagctggagttgttccagccacaagtatggagccaccagaactcaggagtcaggacttagatgaggaactgggaagtactgcagctggagagattgttgaagcagatgttgccattgggaaaggcgatgagactccacttacaaatgtgaagacagaggcatcccctgaaagcatgttgtctccatcacatggctcaaatcccattgaagatcctttagaggcagagactcagcacaagtttgaaatgtcagactcattgaaagaagaatcagggactatttttggaagccagataaaggatgccccaggtgaggatgaggaggaagatggtgtcagtgaagcggccagcctagaggagcctaaggaagaggatcaaggagaaggctacttgtcagaaatggataatgaacctcctgtgagcgagagtgatgatggcttcagcatacacaatgctacactgcagtcacacacactggcagactccatccccagcagccctgcttcttcacagttctctgtctgtagtgaggatcaggaagctattcaggcacagaaaatttggaagaaagccatcatgcttgtatggagagctgcagctaatcataggtatgccaatgtcttcctgcagcctgttacagatgacatagcacctggctaccacagcattgtgcagaggcctatggatttgtcaactattaagaaaaacatagaaaatggactgatccgaagcacagctgaatttcagcgtgacattatgctgatgtttcagaatgctgtaatgtacaatagctcagaccatgatgtctatcacatggcagtggagatgcagcgagatgtcttggaacagatccagcaattcttggccacgcagttgattatgcaaacatccgagtctgggatcagtgctaaaagtcttcgagggagagattctacccgcaaacaggatgcttcagagaaggatggaggaaccaggggacgccgctgtgccattgaagcagatatgaagatgaaaaagtgaagcctcagagttaccctctttgagccgaacctaaaataaaagtaaacaagatagagcttgggcttgcgggcccagttccagaggtggaagttacagaagaggaggtacctgggccacacgacatgagctggaaaatctctcttagagagttggagtagcacaattgcctgttttagggcagaaaccatgggctatgttaatgtcctaatgtgtagctagcagatcgtagctagtttgtattgtcttgtcaattgtacagactttttaaaaaaaacaaccaccagtgaaatgtgtgtgtatacaataaactgaaaaaaaaaactagc

SEQ ID NO: 112308 - DNA, 561 bp, Homo sapiens
  Payload ID: 1985
  Gene Symbol: BRD8
  Gene Name: bromodomain containing 8
  ENST ID: ENST00000453824
  CDS Start-End: 1-561
aaggaaacccaggagagatatagacggctaaagagagatgcagaactaattcaagctggacacatggacagcagactggatgagctttgcaatgacattgcaacgaaaaagaaattggaagaagaggaggctgaagtaaagaggaaggctacagatgctgcataccaggctcgtcaagcagtaaaaacacccccccggaggttacccactgtgatggttcgctctcctatagattctgcctccccaggaggtgattatccacttggggacttgactccaaccactatggaagaggctacctctggggtcaatgagagtgaaatggctgtggcttctggccacctgaacagtacaggtgtcctcctggaggtaggcggggtccttcccatgatacatggtggggagatacagcaaacacccaatactgttgcagcctcccctgctgcatcagtgagtcaacccgacaactgtgttcccatggaggctgtgggggatccacatactgtgactgtttccatggacagcagtgaaatatccatgatcatcaattctatcaaagaa

SEQ ID NO: 112309 - DNA, 432 bp, Homo sapiens
  Payload ID: 1985
  Gene Symbol: BRD8
  Gene Name: bromodomain containing 8
  ENST ID: ENST00000430331
  CDS Start-End: 65-432
agaattccagggtttcggcccttccagaccgtctctcctcagggttggagacttcggggccaagatggcgacgggaacgggcaaacacaagctgctaagcactggccccacagagccatggtccatccgagagaagctatgtttagcatcttctgtcatgagaagtggcgatcaaaattgggggtggtcttactctgtcacccaggctggagtgcagtggcgcgatttgggctcactgcagcctcttgacttcctgggctcaagggatcctcctacctcagctgcccaagtagctgggaccacaggccgcagggtatcagttagcagagcaatcaagccctttgcagaacctggccgccctccagactggttctctcaaaaacattgtgcttcccagtactcggagcttttagagaccactgagacaccaaa

SEQ ID NO: 112310 - DNA, 754 bp, Homo sapiens
  Payload ID: 1985
  Gene Symbol: BRD8
  Gene Name: bromodomain containing 8
  ENST ID: ENST00000428808
  CDS Start-End: 16-135
gacttcggggccaagatggcgacgggaacgggcaaacacaagctgctaagcactggccccacagagccatggtccatccgagagaagctatgtttagcatcttctgtcatgagaagtggcgatcaaaattggtaagggtatcagttagcagagcaatcaagccctttgcagaacctggccgccctccagactggttctctcaaaaacattgtgcttcccagtactcggagcttttagagaccactgagacaccaaaacggaaacgaggtgaaaagggagaagtggtggaaactgttgaagatgttattgttcggaaattgactgctgagcgagttgaagaactaaagaaagtgataaaggaaacccaggagagatatagacggctaaagagagatgcagaactaattcaagctggacacatggacagcagactggatgagctttgcaatgacattgcaacgaaaaagaaattggaagaagaggaggctgaagtaaagaggaaggctacagatgctgcataccaggctcgtcaagcagtaaaaacacccccccggaggttacccactgtgatggttcgctctcctatagattctgcctccccaggaggtgattatccacttggggacttgactccaaccactatggaagaggctacctctggggtcaatgagagtgaaatggctgtggcttctggccacctgaacagtacaggtgtcctcctggaggtaggcggggtccttcccatgatacatgg

SEQ ID NO: 112311 - DNA, 745 bp, Homo sapiens
  Payload ID: 1985
  Gene Symbol: BRD8
  Gene Name: bromodomain containing 8
  ENST ID: ENST00000472478
  CDS Start-End: 1-109
gatcagtgctaaaagtcttcgagggagagattctacccgcaaacaggatgcttcagagaaggacagtgtcccaatgggctctcctgccttccttctctctctcttttgactctggatcccccaagcaaagcatttggctggctattgcaaggctggttaataggatcttttatctattgaagacagcaaaatattgcacaagaggaaggagctgggctgcagggagagagcagcagatggaaagaagccttctaattgtcctgatctcatggaaaaccactgtcaggaggtgctagggaactagtgccagggtcagtctgcaggaaaggcctttcttatagggaccaacagttggacaggatggaggaaccaggggacgccgctgtgccattgaagcagatatgaagatgaaaaagtgaagcctcagagttaccctctttgagccgaacctaaaataaaagtaaacaagatagagcttgggcttgcgggcccagttccagaggtggaagttacagaagaggaggtacctgggccacacgacatgagctggaaaatctctcttagagagttggagtagcacaattgcctgttttagggcagaaaccatgggctatgttaatgtcctaatgtgtagctagcagatcgtagctagtttgtattgtcttgtcaattgtacagactttttaaaaaaaacaaccaccagtgaaatgtgtgtgtatacaataaactgaaaaaaaaaactagc

SEQ ID NO: 112312 - DNA, 586 bp, Homo sapiens
  Payload ID: 1985
  Gene Symbol: BRD8
  Gene Name: bromodomain containing 8
  ENST ID: ENST00000511898
  CDS Start-End: 1-586
ggatcaaaggctcccagcatagatgggaaggaagaattagatctggctgagaagatggatattgctgtgtcttacacaggtgaagagctggattttgagactgttggagacatcattgccatcattgaggacaaggcatcccctgaaagcatgttgtctccatcacatggctcaaatcccattgaagatcctttagaggcagagactcagcacaagtttgaaatgtcagactcattgaaagaagaatcagggactatttttggaagccagataaaggatgccccaggtgaggatgaggaggaagatggtgtcagtgaagcggccagcctagaggagcctaaggaagaggatcaaggagaaggctacttgtcagaaatggataatgaacctcctgtgagcgagagtgatgatggcttcagcatacacaatgctacactgcagtcacacacactggcagactccatccccagcagccctgcttcttcacagttctctgtctgtagtgaggatcaggaagctattcaggcacagaaaatttggaagaaagccatcatgcttgtatggagagctgcagctaatcataggt

SEQ ID NO: 112313 - DNA, 1363 bp, Homo sapiens
  Payload ID: 1985
  Gene Symbol: BRD8
  Gene Name: bromodomain containing 8
  ENST ID: ENST00000506167
  CDS Start-End: 1-879
catactgtgactgtttccatggacagcagtgaaatatccatgatcatcaattctatcaaagaagagtgttttcgatcaggggtagcagaggctcctgttggatcaaaggctcccagcatagatgggaaggaagaattagatctggctgagaagatggatattgctgtgtcttacacaggtgaagagctggattttgagactgttggagacatcattgccatcattgaggacaaggtagatgatcatcctgaagtgctggatgtggcagcagtggaagcagcactgtcattttgtgaagaaaatgatgatcctcagtccctgcctggcccctgggagcatcctatccagcaggagcgggacaagccagtacctctccctgcaccagaaatgacggtcaagcaagagagactggactttgaggaaacggaaaacaagggaatacatgaactggtggacatcagggagcccagtgcagagatcaaggtggaacctgcagaaccagagccagtcatttcaggagccgaaatagtagctggagttgttccagccacaagtatggagccaccagaactcaggagtcaggacttagatgaggaactgggaagtactgcagctggagagattgttgaagcagatgttgccattgggaaaggcgatgagactccacttacaaatgtgaagacagaggcatcccctgaaagcatgttgtctccatcacatggctcaaatcccattgaagatcctttagaggcagagactcagcacaagtttgaaatgtcagactcattgaaagaagaatcagggactatttttggaagccagataaagggtcagagttactctcgagcaaggggaaagaaggaacgcctcttagcttagtcttaagatgccccaggtgaggatgaggaggaagatggtgtcagtgaagcggccagcctagaggagcctaaggaagaggatcaaggagaaggctacttgtcagaaatggataatgaacctcctgtgagcgagagtgatgatggcttcagcatacacaatgctacactgcagtcacacacactggcagactccatccccagcagccctgcttcttcacagttctctgtctgtagtgaggatcaggaagctattcaggcacagaaaatttggaagaaagccatcatgcttgtatggagagctgcagctaatcataggtatgccaatgtcttcctgcagcctgttacagatgacatagcacctggctaccacagcattgtgcagaggcctatggatttgtcaactattaagaaaaacatagaaaatggactgatccgaagcacagctgaatttcagcgtgacattatgctgatgtttcagaatgctg

SEQ ID NO: 112314 - DNA, 2876 bp, Homo sapiens
  Payload ID: 1985
  Gene Symbol: BRD8
  Gene Name: bromodomain containing 8
  ENST ID: ENST00000512140
  CDS Start-End: 17-163
agacttcggggccaagatggcgacgggaacgggcaaacacaagctgctaagcactggccccacagagccatggtccatccgagagaagctatgtttagcatcttctgtcatgagaagtggcgatcaaaattgcattgtgcttcccagtactcggagcttttagagaccactgagacaccaaaacggaaacgaggtgaaaagggagaagtggtggaaactgttgaagatgttattgttcggaaattgactgctgagcgagttgaagaactaaagaaagtgataaaggaaacccaggagagatatagacggctaaagagagatgcagaactaattcaagctggacacatggacagcagactggatgagctttgcaatgacattgcaacgaaaaagaaattggaagaagaggaggctgaagtaaagaggaaggctacagatgctgcataccaggctcgtcaagcagtaaaaacacccccccggaggttacccactgtgatggttcgctctcctatagattctgcctccccaggaggtgattatccacttggggacttgactccaaccactatggaagaggctacctctggggtcaatgagagtgaaatggctgtggcttctggccacctgaacagtacaggtgtcctcctggaggtaggcggggtccttcccatgatacatggtggggagatacagcaaacacccaatactgttgcagcctcccctgctgcatcaggtgctcccactctttcccggcttttagaagctggtcctacacagttcaccacacctcttgcttccttcactactgttgccagtgagcctccagttaaacttgtgccaccccctgtagagtctgtgtcccaagctaccattgtcatgatgcctgcgctgccagcaccatcctctgctccggctgtctccactactgaaagtgtagctccagtgagtcaacccgacaactgtgttcccatggaggctgtgggggatccacatactgtgactgtttccatggacagcagtgaaatatccatgatcatcaattctatcaaagaagagtgttttcgatcaggggtagcagaggctcctgttggatcaaaggctcccagcatagatgggaaggaagaattagatctggctgagaagatggatattgctgtgtcttacacaggtgaagagctggattttgagactgttggagacatcattgccatcattgaggacaaggtagatgatcatcctgaagtgctggatgtggcagcagtggaagcagcactgtcattttgtgaagaaaatgatgatcctcagtccctgcctggcccctgggagcatcctatccagcaggagcgggacaagccagtacctctccctgcaccagaaatgacggtcaagcaagagagactggactttgaggaaacggaaaacaagggaatacatgaactggtggacatcagggagcccagtgcagagatcaaggtggaacctgcagaaccagagccagtcatttcaggagccgaaatagtagctggagttgttccagccacaagtatggagccaccagaactcaggagtcaggacttagatgaggaactgggaagtactgcagctggagagattgttgaagcagatgttgccattgggaaaggcgatgagactccacttacaaatgtgaagacagaggcatcccctgaaagcatgttgtctccatcacatggctcaaatcccattgaagatcctttagaggcagagactcagcacaagtttgaaatgtcagactcattgaaagaagaatcagggactatttttggaagccagataaaggatgccccaggtgaggatgaggaggaagatggtgtcagtgaagcggccagcctagaggagcctaaggaagaggatcaaggagaaggctacttgtcagaaatggataatgaacctcctgtgagcgagagtgatgatggcttcagcatacacaatgctacactgcagtcacacacactggcagactccatccccagcagccctgcttcttcacagttctctgtctgtagtgaggatcaggaagctattcaggcacagaaaatttggaagaaagccatcatgcttgtatggagagctgcagctaatcataggtatgccaatgtcttcctgcagcctgttacagatgacatagcacctggctaccacagcattgtgcagaggcctatggatttgtcaactattaagaaaaacatagaaaatggactgatccgaagcacagctgaatttcagcgtgacattatgctgatgtttcagaatgctgtaatgtacaatagctcagaccatgatgtctatcacatggcagtggagatgcagcgagatgtcttggaacagatccagcaattcttggccacgcagttgattatgcaaacatccgagtctgggatcagtgctaaaagtcttcgagggagagattctacccgcaaacaggatgcttcagagaaggacagtgtcccaatgggctctcctgccttccttctctctctctttgatggaggaaccaggggacgccgctgtgccattgaagcagatatgaagatgaaaaagtgaagcctcagagttaccctctttgagccgaacctaaaataaaagtaaacaagatagagcttgggcttgcgggcccagttccagaggtggaagttacagaagaggaggtacctgggccacacgacatgagctggaaaatctctcttagagagttggagtagcacaattgcctgttttagggcagaaaccatgggctatgttaatgtcctaatgtgtagctagcagatcgtagctagtttgtattgtcttgtcaattgtacagactttttaaaaaaaacaaccaccagtgaaatgtg

SEQ ID NO: 112315 - DNA, 3477 bp, Homo sapiens
  Payload ID: 1986
  Gene Symbol: BRD9
  Gene Name: bromodomain containing 9
  ENST ID: ENST00000490814
  CDS Start-End: 46-318
gtgaagtgactgaactctcaggatccggccacgactccagttactatgatgacaggtcagaccatgagcgagagaggcacaaagaaaagaaaaagaagaagaagaagaagtccgagaaggagaagcatctggacgatgaggaaagaaggaagcgaaaggaagagaagaagcggaagcgagagagggagcactgtgacacggagggagaggctgacgactttgatcctgggaagaaggtggaggtggagccgcccccagatcggccagtccgagcgtgccggacacagccagttctcggtggaacttaaaatgctgtgagacaccagacagacagatactgtgaacttggagctctctaatgaagggataccaaagtcttgtattcaatttttttttccttaaattgtcagccgaaaatgagagcacacctattcagcaactcctggaacacttcctccgccagcttcagagaaaagatccccatggattttttgcttttcctgtcacggatgcaattgctcctggatattcaatgataataaaacatcccatggattttggcaccatgaaagacaaaattgtagctaatgaatacaagtcagttacggaatttaagggtttgctgactcacagaaacacaacagaacagacttaaaggagagtgggagaaaaggaaactcgatgagaggatcaggcagcgcctgagggtagatgttaagagcactccatgcccgaaagccctctgtattccctgcttcgggccccagtctggccattcctagcaacaaagcagatttcaagctgatgtgtgataatgcaatgacatacaataggccagataccgtgtactacaagttggcgaagaagatccttcacgcaggctttaagatgatgagcaaacaggcagctcttttgggcaatgaagatacagctgttgaggaacctgtccctgaagttgtaccagtacaagtagaaactgccaagaaatccaaaaagccgagtagagaagttatcagctgcatgtttgagcctgaagggaatgcctgcagcttgacggacagtaccgcagaggagcacgtgctggcgctggtggagcacgcagctgacgaagctcgggacaggatcaaccggttcctcccaggcggcaaggagacgttctagacccagtgtcttcagtggaaacagagcacaggctgtctgcagtctcaggcttcctagcagccctgataagagaagtagagcaatgcagatgggctatctgaagaggaacggggacgggagcctgctctacagcgtggtcaacacggccgagccggacgctgatgaggaggagacccacccggtggacttgagctcgctctccagtaagctactcccaggcttcaccacgctgggcttcaaagacgagagaagaaacaaagtcacctttctctccagtgccactactgcgctttcgatgcagaataattcagtatttggcgacttgaagtcggacgagatggagctgctctactcagcctacggagatgagacaggcgtgcagtgtgcgctgagcctgcaggagtttgtgaaggatgctgggagctacagcaagaaagtggtggacgacctcctggaccagatcacaggcggagaccactctaggacgctcttccagctgaagcagagaagaaatgttcccatgaagcctccagatgaagccaaggttggggacaccctaggagacagcagcagctctgttctggagttcatgtcgatgaagtcctatcccgacgtttctgtggatatctccatgctcagctctctggtttctttcagggcctgccatctatcacgtgatgctgtactaaagtcggatcggaatttggtgtcttattaccacggagtctgctttgtcaaccttcagatttctgttttaaagttaatgctggtcagctgtgcctgaattccaaaagaggggataatgagatgtttccctgacttctgtgagtcactctaggaaattcatagagctcaagtctggtcttctgggaaccccatttgatagctggttagtcggaagcacagaccacagcctggggctttcagttggcatcagccggtggggccatcctggagactgtgccctcacctgggaggctgccggtgcagcgcccccgagctgttctgacctccagcagcatttgtggtgcctggatccatgggtcccactgctttgcgtggtgacgttccacctgtctctgctggctctgttcaggcacttatggccgtgatttattataggggaagggtgccaacagcagcagagggacaagagtgacatccaaggaaacccagcgtgaggcccagatccactcccagcagaggcacatgggacacgcttaattcccaggagtgagctgtgacaacacacgtgaaatgcccaccagggaagcccgtcagaggcttggtgctcggggtcacagggcacccccttgccagggaaggtgaagaaggagctggaccctgacgacagccatttgaacttggatgagacgacgaagctcctgcaggacctgcacgaagcacaggcggagcgcggcggctctcggccgtcgtccaacctcagctccctgtccaacgcctccgagagggaccagcaccacctgggaagcccttctcgcctgagtgtcggggagcagccagacgtcacccacgacccctatgagtttcttcagtctccagagcctgcggcctctgccaagacctaactctagaccaccttcagctcttttattttatttttttagttttattttgcacgtgtagagtttttgtcatcagacaaggactttgatcctgtcccctttggcatgcgggaagcagccgcggggaggtaatgaattgtctgtggtatcatgtcagcagagtctccaagccccacgaaccctgaggagtggagtcatacgcgaaggccatatggccatcgtgtcagcagagagagtctctgtacacagccccgtgaaccctgaggagtggagtcatacacgaagggcgtgtggccatcgtgtcagcagagagagtctctgtacacagccccgtgaaccctgaggagtggagtcatacgcgaagggtgtgtggccaggctgcagagctgcgtgccgtttgtgtccgagcatcacgtgtggctccagcccttgtttctgccagtgtagacacctctgtctgccccactgtcctggggtcgctcttgggaggcacaggcatgggtgtgtctggcctcattctgtatcagtccagtgtgttcctgtcatagtttgtgtctcccaggcaggccatggtaggggcctcgcaggggccattggggagcacagggccaggctggggtgaggagagctcccctgttttctgtttaattgatgagcctgggaaaggagtgtgttctgcctgcccgttacagtggagcgttccgtgtccataaaacgttttctaactggg

SEQ ID NO: 112316 - DNA, 3170 bp, Homo sapiens
  Payload ID: 1986
  Gene Symbol: BRD9
  Gene Name: bromodomain containing 9
  ENST ID: ENST00000489816
  CDS Start-End: 539-811
gggcaccgggcgaggtcctggccacgagggaggggttctgggcacgcgggagggggtcctgggatttcgggcagggaaccgggcacacgtgaggggtcctgggtaggcgcttacgttcctggtagagggttctgggttcgaggctgcaagcccactcaccccggtcctggagactagggaagcatctgtgctggcttttgtgtggagctcagggagaagctgggctgccctttctcccgcctttccctccctctcccttgctcccgcagcagctccatgggtgtcagcgggcagcacgggcgcctgcaggaagtcaggcgagggtgaaccgaagtgctgggggtttctaggagggagatcgggctccggggttccaggtccctcttaatccatcttcttgaacgagtaatgtgaacaacatcccacagggcctctgattatgccgacaagcccctggagaagcctctaaagctagtcctgaaggtcggaggaagtgaagtgactgaactctcaggatccggccacgactccagttactatgatgacaggtcagaccatgagcgagagaggcacaaagaaaagaaaaagaagaagaagaagaagtccgagaaggagaagcatctggacgatgaggaaagaaggaagcgaaaggaagagaagaagcggaagcgagagagggagcactgtgacacggagggagaggctgacgactttgatcctgggaagaaggtggaggtggagccgcccccagatcggccagtccgagcgtgccggacacagccagttctcggtggaacttaaaatgctgtgagacaccagacagacagatactgtgaacttggagctctctaatgaagggataccaaagtcttgtattcaatttttttttccttaaattgtcagccgaaaatgagagcacacctattcagcaactcctggaacacttcctccgccagcttcagagaaaagatccccatggattttttgcttttcctgtcacggatgcaattgctcctggatattcaatgataataaaacatcccatggattttggcaccatgaaagacaaaattgtagctaatgaatacaagtcagttacggaatttaaggcagatttcaagctgatgtgtgataatgcaatgacatacaataggccagataccgtgtactacaagttggcgaagaagatccttcacgcaggctttaagatgatgagcaaacaggcagctcttttgggcaatgaagatacagctgttgaggaacctgtccctgaagttgtaccagtacaagtagaaactgccaagaaatccaaaaagccgagtagagaagttatcagctgcatgtttgagcctgaagggaatgcctgcagcttgacggacagtaccgcagaggagcacgtgctggcgctggtggagcacgcagctgacgaagctcgggacaggatcaaccggttcctcccaggcggcaagatgggctatctgaagaggaacggggacgggagcctgctctacagcgtggtcaacacggccgagccggacgctgatgaggaggagacccacccggtggacttgagctcgctctccagtaagctactcccaggcttcaccacgctgggcttcaaagacgagagaagaaacaaagtcacctttctctccagtgccactactgcgctttcgatgcagaataattcagtatttggcgacttgaagtcggacgagatggagctgctctactcagcctacggagatgagacaggcgtgcagtgtgcgctgagcctgcaggagtttgtgaaggatgctgggagctacagcaagaaagtggtggacgacctcctggaccagatcacaggcggagaccactctaggacgctcttccagctgaagcagagaagaaatgttcccatgaagcctccagatgaagccaaggttggggacaccctaggagacagcagcagctctgttctggagttcatgtcgatgaagtcctatcccgacgtttctgtggatatctccatgctcagctctctggggcctgccatctatcacgtgatgctgtactaaagtcggatcggaatttggtgtcttattaccacggagtctgctttgtcaaccttcagatttctgttttaaagttaatgctggtcagctgtgcctgaattccaaaagaggggataatgagggaaggtgaagaaggagctggaccctgacgacagccatttgaacttggatgagacgacgaagctcctgcaggacctgcacgaagcacaggcggagcgcggcggctctcggccgtcgtccaacctcagctccctgtccaacgcctccgagagggaccagcaccacctgggaagcccttctcgcctgagtgtcggggagcagccagacgtcacccacgacccctatgagtttcttcagtctccagagcctgcggcctctgccaagacctaactctagaccaccttcagctcttttattttatttttttagttttattttgcacgtgtagagtttttgtcatcagacaaggactttgatcctgtcccctttggcatgcgggaagcagccgcggggaggtaatgaattgtctgtggtatcatgtcagcagagtctccaagccccacgaaccctgaggagtggagtcatacgcgaaggccatatggccatcgtgtcagcagagagagtctctgtacacagccccgtgaaccctgaggagtggagtcatacacgaagggcgtgtggccatcgtgtcagcagagagagtctctgtacacagccccgtgaaccctgaggagtggagtcatacgcgaagggtgtgtggccaggctgcagagctgcgtgccgtttgtgtccgagcatcacgtgtggctccagcccttgtttctgccagtgtagacacctctgtctgccccactgtcctggggtcgctcttgggaggcacaggcatgggtgtgtctggcctcattctgtatcagtccagtgtgttcctgtcatagtttgtgtctcccaggcaggccatggtaggggcctcgcaggggccattggggagcacagggccaggctggggtgaggagagctcccctgttttctgtttaattgatgagcctgggaaaggagtgtgttctgcctgcccgttacagtggagcgttccgtgtccataaaacgttttctaac

SEQ ID NO: 112317 - DNA, 2156 bp, Homo sapiens
  Payload ID: 1986
  Gene Symbol: BRD9
  Gene Name: bromodomain containing 9
  Uniprot ID: Q9H8M2
  ENST ID: ENST00000467963
  CDS Start-End: 168-1961
ctgccgcggccccgcctcgccccgtttccggcgcggcccagcgagctcggcaacctcggcgcagcgagcgcgggcggccagccagggccagggggcggtggcggccaaggtccgaccgggtgccagctgttcccagcccccgcctcgggcccgccgccggcgccgccatgggcaagaagcacaagaagcacaaggccgagtggcgctcgtcctacgaggattatgccgacaagcccctggagaagcctctaaagctagtcctgaaggtcggaggaagtgaagtgactgaactctcaggatccggccacgactccagttactatgatgacaggtcagaccatgagcgagagaggcacaaagaaaagaaaaagaagaagaagaagaagtccgagaaggagaagcatctggacgatgaggaaagaaggaagcgaaaggaagagaagaagcggaagcgagagagggagcactgtgacacggagggagaggctgacgactttgatcctgggaagaaggtggaggtggagccgcccccagatcggccagtccgagcgtgccggacacagccagccgaaaatgagagcacacctattcagcaactcctggaacacttcctccgccagcttcagagaaaagatccccatggattttttgcttttcctgtcacggatgcaattgctcctggatattcaatgataataaaacatcccatggattttggcaccatgaaagacaaaattgtagctaatgaatacaagtcagttacggaatttaaggcagatttcaagctgatgtgtgataatgcaatgacatacaataggccagataccgtgtactacaagttggcgaagaagatccttcacgcaggctttaagatgatgagcaaacaggcagctcttttgggcaatgaagatacagctgttgaggaacctgtccctgaagttgtaccagtacaagtagaaactgccaagaaatccaaaaagccgagtagagaagttatcagctgcatgtttgagcctgaagggaatgcctgcagcttgacggacagtaccgcagaggagcacgtgctggcgctggtggagcacgcagctgacgaagctcgggacaggatcaaccggttcctcccaggcggcaagatgggctatctgaagaggaacggggacgggagcctgctctacagcgtggtcaacacggccgagccggacgctgatgaggaggagacccacccggtggacttgagctcgctctccagtaagctactcccaggcttcaccacgctgggcttcaaagacgagagaagaaacaaagtcacctttctctccagtgccactactgcgctttcgatgcagaataattcagtatttggcgacttgaagtcggacgagatggagctgctctactcagcctacggagatgagacaggcgtgcagtgtgcgctgagcctgcaggagtttgtgaaggatgctgggagctacagcaagaaagtggtggacgacctcctggaccagatcacaggcggagaccactctaggacgctcttccagctgaagcagagaagaaatgttcccatgaagcctccagatgaagccaaggttggggacaccctaggagacagcagcagctctgttctggagttcatgtcgatgaagtcctatcccgacgtttctgtggatatctccatgctcagctctctggggaaggtgaagaaggagctggaccctgacgacagccatttgaacttggatgagacgacgaagctcctgcaggacctgcacgaagcacaggcggagcgcggcggctctcggccgtcgtccaacctcagctccctgtccaacgcctccgagagggaccagcaccacctgggaagcccttctcgcctgagtgtcggggagcagccagacgtcacccacgacccctatgagtttcttcagtctccagagcctgcggcctctgccaagacctaactctagaccaccttcagctcttttattttatttttttagttttattttgcacgtgtagagtttttgtcatcagacaaggactttgatcctgtcccctttggcatgcgggaagcagccgcggggaggtaatgaattgtctgtggtatcatgtcagcagagtctccaagccccacgaaccctgaggagtggagtcat

SEQ ID NO: 112318 - DNA, 2120 bp, Homo sapiens
  Payload ID: 1986
  Gene Symbol: BRD9
  Gene Name: bromodomain containing 9
  Uniprot ID: Q9H8M2
  ENST ID: ENST00000483173
  CDS Start-End: 141-1775
tccgggcacgcggacgggggtcctgggcaccgggcgagattatgccgacaagcccctggagaagcctctaaagctagtcctgaaggtcggaggaagtgaagtgactgaactctcaggatccggccacgactccagttactatgatgacaggtcagaccatgagcgagagaggcacaaagaaaagaaaaagaagaagaagaagaagtccgagaaggagaagcatctggacgatgaggaaagaaggaagcgaaaggaagagaagaagcggaagcgagagagggagcactgtgacacggagggagaggctgacgactttgatcctgggaagaaggtggaggtggagccgcccccagatcggccagtccgagcgtgccggacacagccagccgaaaatgagagcacacctattcagcaactcctggaacacttcctccgccagcttcagagatccccatggattttttgcttttcctgtcacggatgcaattgctcctggatattcaatgataataaaacatcccatggattttggcaccatgaaagacaaaattgtagctaatgaatacaagtcagttacggaatttaaggcagatttcaagctgatgtgtgataatgcaatgacatacaataggccagataccgtgtactacaagttggcgaagaagatccttcacgcaggctttaagatgatgagcaaacaggcagctcttttgggcaatgaagatacagctgttgaggaacctgtccctgaagttgtaccagtacaagtagaaactgccaagaaatccaaaaagccgagtagagaagttatcagctgcatgtttgagcctgaagggaatgcctgcagcttgacggacagtaccgcagaggagcacgtgctggcgctggtggagcacgcagctgacgaagctcgggacaggatcaaccggttcctcccaggcggcaagatgggctatctgaagaggaacggggacgggagcctgctctacagcgtggtcaacacggccgagccggacgctgatgaggaggagacccacccggtggacttgagctcgctctccagtaagctactcccaggcttcaccacgctgggcttcaaagacgagagaagaaacaaagtcacctttctctccagtgccactactgcgctttcgatgcagaataattcagtatttggcgacttgaagtcggacgagatggagctgctctactcagcctacggagatgagacaggcgtgcagtgtgcgctgagcctgcaggagtttgtgaaggatgctgggagctacagcaagaaagtggtggacgacctcctggaccagatcacaggcggagaccactctaggacgctcttccagctgaagcagagaagaaatgttcccatgaagcctccagatgaagccaaggttggggacaccctaggagacagcagcagctctgttctggagttcatgtcgatgaagtcctatcccgacgtttctgtggatatctccatgctcagctctctggggaaggtgaagaaggagctggaccctgacgacagccatttgaacttggatgagacgacgaagctcctgcaggacctgcacgaagcacaggcggagcgcggcggctctcggccgtcgtccaacctcagctccctgtccaacgcctccgagagggaccagcaccacctgggaagcccttctcgcctgagtgtcggggagcagccagacgtcacccacgacccctatgagtttcttcagtctccagagcctgcggcctctgccaagacctaactctagaccaccttcagctcttttattttatttttttagttttattttgcacgtgtagagtttttgtcatcagacaaggactttgatcctgtcccctttggcatgcgggaagcagccgcggggaggtaatgaattgtctgtggtatcatgtcagcagagtctccaagccccacgaaccctgaggagtggagtcatacgcgaaggccatatggccatcgtgtcagcagagagagtctctgtacacagccccgtgaaccctgaggagtggagtcatacacgaagggcgtgtggccatcgtgtcagcagagagagtctctgtacacagccccgtgaaccctgaggagt

SEQ ID NO: 112319 - DNA, 2843 bp, Homo sapiens
  Payload ID: 1986
  Gene Symbol: BRD9
  Gene Name: bromodomain containing 9
  ENST ID: ENST00000495265
  CDS Start-End: 298-570
tttccggcgcggcccagcgagctcggcaacctcggcgcagcgagcgcgggcggccagccagggccagggggcggtggcggccaaggtccgaccgggtgccagctgttcccagcccccgcctcgggcccgccgccggcgccgccatgggcaagaagcacaagaagcacaaggccgagtggcgctcgtcctacgaggattatgccgacaagcccctggagaagcctctaaagctagtcctgaaggtcggaggaagtgaagtgactgaactctcaggatccggccacgactccagttactatgatgacaggtcagaccatgagcgagagaggcacaaagaaaagaaaaagaagaagaagaagaagtccgagaaggagaagcatctggacgatgaggaaagaaggaagcgaaaggaagagaagaagcggaagcgagagagggagcactgtgacacggagggagaggctgacgactttgatcctgggaagaaggtggaggtggagccgcccccagatcggccagtccgagcgtgccggacacagccagttctcggtggaacttaaaatgctgtgagacaccagacagacagatactgtgaacttggagctctctaatgaagggataccaaagtcttgtattcaatttttttttccttaaattgtcagccgaaaatgagagcacacctattcagcaactcctggaacacttcctccgccagcttcagagaaaagatccccatggattttttgcttttcctgtcacggatgcaattgctcctggatattcaatgataataaaacatcccatggattttggcaccatgaaagacaaaattgtagctaatgaatacaagtcagttacggaatttaaggcagatttcaagctgatgtgtgataatgcaatgacatacaataggccagataccgtgtactacaagttggcgaagaagatccttcacgcaggctttaagatgatgagcaaagagcggctgttagctttgaagcgcagcatgtcgtttatgcaggacatggatttttctcagcaggcagctcttttgggcaatgaagatacagctgttgaggaacctgtccctgaagttgtaccagtacaagtagaaactgccaagaaatccaaaaagccgagtagagaagttatcagctgcatgtttgagcctgaagggaatgcctgcagcttgacggacagtaccgcagaggagcacgtgctggcgctggtggagcacgcagctgacgaagctcgggacaggatcaaccggttcctcccaggcggcaagatgggctatctgaagaggaacggggacgggagcctgctctacagcgtggtcaacacggccgagccggacgctgatgaggaggagacccacccggtggacttgagctcgctctccagtaagctactcccaggcttcaccacgctgggcttcaaagacgagagaagaaacaaagtcacctttctctccagtgccactactgcgctttcgatgcagaataattcagtatttggcgacttgaagtcggacgagatggagctgctctactcagcctacggagatgagacaggcgtgcagtgtgcgctgagcctgcaggagtttgtgaaggatgctgggagctacagcaagaaagtggtggacgacctcctggaccagatcacaggcggagaccactctaggacgctcttccagctgaagcagagaagaaatgttcccatgaagcctccagatgaagccaaggttggggacaccctaggagacagcagcagctctgttctggagttcatgtcgatgaagtcctatcccgacgtttctgtggatatctccatgctcagctctctggggaaggtgaagaaggagctggaccctgacgacagccatttgaacttggatgagacgacgaagctcctgcaggacctgcacgaagcacaggcggagcgcggcggctctcggccgtcgtccaacctcagctccctgtccaacgcctccgagagggaccagcaccacctgggaagcccttctcgcctgagtgtcggggagcagccagacgtcacccacgacccctatgagtttcttcagtctccagagcctgcggcctctgccaagacctaactctagaccaccttcagctcttttattttatttttttagttttattttgcacgtgtagagtttttgtcatcagacaaggactttgatcctgtcccctttggcatgcgggaagcagccgcggggaggtaatgaattgtctgtggtatcatgtcagcagagtctccaagccccacgaaccctgaggagtggagtcatacgcgaaggccatatggccatcgtgtcagcagagagagtctctgtacacagccccgtgaaccctgaggagtggagtcatacacgaagggcgtgtggccatcgtgtcagcagagagagtctctgtacacagccccgtgaaccctgaggagtggagtcatacgcgaagggtgtgtggccaggctgcagagctgcgtgccgtttgtgtccgagcatcacgtgtggctccagcccttgtttctgccagtgtagacacctctgtctgccccactgtcctggggtcgctcttgggaggcacaggcatgggtgtgtctggcctcattctgtatcagtccagtgtgttcctgtcatagtttgtgtctcccaggcaggccatggtaggggcctcgcaggggccattggggagcacagggccaggctggggtgaggagagctcccctgttttctgtttaattgatgagcctgggaaaggagtgtgttctgcctgcccgttacagtggagcgttccgtgtccataaaacgttttctaactggg

SEQ ID NO: 112320 - DNA, 1417 bp, Homo sapiens
  Payload ID: 1986
  Gene Symbol: BRD9
  Gene Name: bromodomain containing 9
  ENST ID: ENST00000466684
  CDS Start-End: 154-426
acgggggaggagttccgggcacgcggacgggggtcctgggcaccgggcgagattatgccgacaagcccctggagaagcctctaaagctagtcctgaaggtcggaggaagtgaagtgactgaactctcaggatccggccacgactccagttactatgatgacaggtcagaccatgagcgagagaggcacaaagaaaagaaaaagaagaagaagaagaagtccgagaaggagaagcatctggacgatgaggaaagaaggaagcgaaaggaagagaagaagcggaagcgagagagggagcactgtgacacggagggagaggctgacgactttgatcctgggaagaaggtggaggtggagccgcccccagatcggccagtccgagcgtgccggacacagccagttctcggtggaacttaaaatgctgtgagacaccagacagacagatactgtgaacttggagctctctaatgaagggataccaaagtcttgtattcaatttttttttccttaaattgtcagccgaaaatgagagcacacctattcagcaactcctggaacacttcctccgccagcttcagagaaaagatccccatggattttttgcttttcctgtcacggatgcaattgctcctggatattcaatgataataaaacatcccatggattttggcaccatgaaagacaaaattgtagctaatgaatacaagtcagttacggaatttaaggcagatttcaagctgatgtgtgataatgcaatgacatacaataggccagataccgtgtactacaagttggcgaagaagatccttcacgcaggctttaagatgatgagcaaacaggcagctcttttgggcaatgaagatacagctgttgaggaacctgtccctgaagttgtaccagtacaagtagaaactgccaagaaatccaaaaagccgagtagagaagttatcagctgcatgtttgagcctgaagggaatgcctgcagcttgacggacagtaccgcagaggagcacgtgctggcgctggtggagcacgcagctgacgaagctcgggacaggatcaaccggttcctcccaggcggcaagaggaggagacccacccggtggacttgagctcgctctccagtaagctactcccaggcttcaccacgctgggcttcaaagacgagagaagaaacaaagtcacctttctctccagtgccactactgcgctttcgatgcagaataattcagtatttggcgacttgaagtcggacgagatggagctgctctactcagcctacggagatgagacaggcgtgcagtgtgcgctgagcctgcaggagtttgtgaaggatgctgggagctacagcaagaaagtggtggacgacctcctggaccagatcacaggcggagaccactctaggacgctcttccagc

SEQ ID NO: 112321 - DNA, 753 bp, Homo sapiens
  Payload ID: 1986
  Gene Symbol: BRD9
  Gene Name: bromodomain containing 9
  ENST ID: ENST00000487688
  CDS Start-End: 205-477
gggcaccgggcgaggtcctggccacgagggaggggttctgggcacgcgggagggggtcctgggatttcgggcagggaaccgggcacacgtgaggggtcctggattatgccgacaagcccctggagaagcctctaaagctagtcctgaaggtcggaggaagtgaagtgactgaactctcaggatccggccacgactccagttactatgatgacaggtcagaccatgagcgagagaggcacaaagaaaagaaaaagaagaagaagaagaagtccgagaaggagaagcatctggacgatgaggaaagaaggaagcgaaaggaagagaagaagcggaagcgagagagggagcactgtgacacggagggagaggctgacgactttgatcctgggaagaaggtggaggtggagccgcccccagatcggccagtccgagcgtgccggacacagccagttctcggtggaacttaaaatgctgtgagacaccagacagacagatactgtgaacttggagctctctaatgaagggataccaaagtcttgtattcaatttttttttccttaaattgtcagccgaaaatgagagcacacctattcagcaactcctggaacacttcctccgccagcttcagagaaaagatccccatggattttttgcttttcctgtcacggatgcaattgctcctggatattcaatgataataaaacatcccatggattttggcaccatgaaagacaaaattgtagctaatgaata

SEQ ID NO: 112322 - DNA, 1139 bp, Homo sapiens
  Payload ID: 1986
  Gene Symbol: BRD9
  Gene Name: bromodomain containing 9
  ENST ID: ENST00000489093
  CDS Start-End: 464-1139
ggctggaggaggggagggggtgttccgttggtagcaaaacgcgaaccgctgaggcccgcagactcagttccaggatcctgggtgtgctgttcctcagcagaccctgccagggtctctgtgaggagggagcctggcatgaggaggatctcggagggggtttcccttagttctgtccctcccctgagaactgcgaggggattgggcagacctgtccggatcccgcctactcctgcctttctcactcccttgactctgccgcccaggaagagaagaagcggaagcgagagagggagcactgtgacacggagggagaggctgacgactttgatcctgggaagaaggtggaggtggagccgcccccagatcggccagtccgagcgtgccggacacagccagttctcggtggaacttaaaatgctgtgagacaccagacagacagatactgtgaacttggagctctctaatgaagggataccaaagtcttgtattcaatttttttttccttaaattgtcagccgaaaatgagagcacacctattcagcaactcctggaacacttcctccgccagcttcagagaaaagatccccatggattttttgcttttcctgtcacggatgcaattgctcctggatattcaatgataataaaacatcccatggattttggcaccatgaaagacaaaattgtagctaatgaatacaagtcagttacggaatttaaggcagatttcaagctgatgtgtgataatgcaatgacatacaataggccagataccgtgtactacaagttggcgaagaagatccttcacgcaggctttaagatgatgagcaaagagcggctgttagctttgaagcgcagcatgtcgtttatgcaggacatggatttttctcagcaggcagctcttttgggcaatgaagatacagctgttgaggaacctgtccctgaagttgtaccagtacaagtagaaactgccaagaaatccaaaaagccgagtagagaagttatcagctgcatgtttgagcctgaagggaatgcctgcagcttgacggacagtaccgcagaggagcacgtgctggcgctggtggagcacgcagctgacgaagctcgggacaggatcaaccggttcctcccaggcggca

SEQ ID NO: 112323 - DNA, 546 bp, Homo sapiens
  Payload ID: 1986
  Gene Symbol: BRD9
  Gene Name: bromodomain containing 9
  ENST ID: ENST00000518251
  CDS Start-End: 1-372
tcagtatttggcgacttgaagtcggacgagatggagctgctctactcagcctacggagatgagacaggcgtgcagtgtgcgctgagcctgcaggagtttgtgaaggatgctgggagctacagcaagaaagtggtggacgacctcctggaccagatcacaggcggagaccactctaggacgctcttccagctgaagcagagaagaaatgttcccatgaagcctccagatgaagccaaggttggggacaccctaggagacagcagcagctctgttctggagttcatgtcgatgaagtcctatcccgacgtttctgtggatatctccatgctcagctctctggggcctgccatctatcacgtgatgctgtactaaagtcggatcggaatttggtgtcttattaccacggagtctgctttgtcaaccttcagatttctgttttaaagttaatgctggtcagctgtgcctgaattccaaaagaggggataatgaggggaagggtgccaacagcagcagagggacaagagtgacatccaaggaaacccagcg

SEQ ID NO: 112324 - DNA, 861 bp, Homo sapiens
  Payload ID: 1986
  Gene Symbol: BRD9
  Gene Name: bromodomain containing 9
  ENST ID: ENST00000519112
  CDS Start-End: 1-524
tcacctttctctccagtgccactactgcgctttcgatgcagaataattcagtatttggcgacttgaagtcggacgagatggagctgctctactcagcctacggagatgagacaggcgtgcagtgtgcgctgagcctgcaggagtttgtgaaggatgctgggagctacagcaagaaagtggtggacgacctcctggaccagatcacaggcggagaccactctaggacgctcttccagctgaagcagagaagaaatgttcccatgaagcctccagatgaagccaaggttggggacaccctaggagacagcagcagctctgttctggagttcatgtcgatgaagtcctatcccgacgtttctgtggatatctccatgctcagctctctggtttctttcagggcctgccatctatcacgtgatgctgtactaaagtcggatcggaatttggtgtcttattaccacggagtctgctttgtcaaccttcagatttctgttttaaagttaatgctggtcagctgtgcctgaattccaaaagaggggataatgagggaaggtgaagaaggagctggaccctgacgacagccatttgaacttggatgagacgacgaagctcctgcaggacctgcacgaagcacaggcggagcgcggcggctctcggccgtcgtccaacctcagctccctgtccaacgcctccgagagggaccagcaccacctgggaagcccttctcgcctgagtgtcggggagcagccagacgtcacccacgacccctatgagtttcttcagtctccagagcctgcggcctctgccaagacctaactctagaccaccttcagctcttttattttatttttttagttttat

SEQ ID NO: 112325 - DNA, 580 bp, Homo sapiens
  Payload ID: 1986
  Gene Symbol: BRD9
  Gene Name: bromodomain containing 9
  ENST ID: ENST00000523139
  CDS Start-End: 1-277
gtttgtgaaggatgctgggagctacagcaagaaagtggtggacgacctcctggaccagatcacaggcggagaccactctaggacgctcttccagctgaagcagagaagaaatgttcccatgaagcctccagatgaagccaaggttggggacaccctaggagacagcagcagctctgttctggagttcatgtcgatgaagtcctatcccgacgtttctgtggatatctccatgctcagctctctggggcctgccatctatcacgtgatgctgtactaaagtcggatcggaatttggtgtcttattaccacggagtctgctttgtcaaccttcagatttctgttttaaagttaatgctggtcagctgtgcctgaattccaaaagaggggataatgagatgtttccctgacttctgtgagtcactctaggaaattcatagagctcaagtctggtcttctgggaaccccatttgatagctggggaagggtgccaacagcagcagagggacaagagtgacatccaaggaaacccagcgtgaggcccagatccactcccagcagaggcacatgggacacgcttaat

SEQ ID NO: 112326 - DNA, 689 bp, Homo sapiens
  Payload ID: 1986
  Gene Symbol: BRD9
  Gene Name: bromodomain containing 9
  ENST ID: ENST00000518250
  CDS Start-End: 1-218
gcagcagctctgttctggagttcatgtcgatgaagtcctatcccgacgtttctgtggatatctccatgctcagctctctggtttctttcagggcctgccatctatcacgtgatgctgtactaaagtcggatcggaatttggtgtcttattaccacggagtctgctttgtcaaccttcagatttctgttttaaagttaatgctggtcagctgtgcctgaattccaaaagaggggataatgagatgtttccctgacttctgtgagtcactctaggaaattcatagagctcaagtctggtcttctgggaaccccatttgatagctggggaagggtgccaacagcagcagagggacaagagtgacatccaaggaaacccagcgtgaggcccagatccactcccagcagaggcacatgggacacgcttaattcccaggagtgagctgtgacaacacacgtgaaatgcccaccagggaagcccgtcagaggcttggtgctcggggtcacagggcacccccttgccagggaaggtgaagaaggagctggaccctgacgacagccatttgaacttggatgagacgacgaagctcctgcaggacctgcacgaagcacaggcggagcgcggcggctctcggccgtcgtccaacctcagctccctgtccaacgcctccgagagggaccagcaccacctgg

SEQ ID NO: 112327 - DNA, 9688 bp, Homo sapiens
  Payload ID: 1987
  Gene Symbol: BPTF
  Gene Name: bromodomain PHD finger transcription factor
  Uniprot ID: Q12830
  ENST ID: ENST00000306378
  CDS Start-End: 61-8823
gccccccctgcgcccgcccctcccccttcgctttccttctccccccgcctcggctccgacatgaggggccggcggggcaggccgcccaagcagcccgcggctcccgctgcggagcgctgcgccccggccccgccgccaccgccgccgccgcccacgtccggacccatcggggggctccgctcgcggcaccgcggcagcagccggggcaggtgggccgccgcccaggctgaggtggcgcccaagacgcggctgagctcgcccagggggggcagcagtagccggaggaagccgccgccgccgccgccggccccccccagcaccagcgccccgggccggggggggcgaggaggcgggggcggcaggacggggggcgggggcggcggcggccacctggcccggaccaccgcggcccggagggccgtcaacaaagtggtgtacgatgaccacgagagcgaggaggaggaggaagaggaggacatggtctccgaggaggaggaggaggaggacggcgacgccgaggagacccaggattctgaggacgacgaggaggatgagatggaagaggacgacgatgactccgattatccggaggagatggaagacgacgacgacgacgccagttactgcacggaaagcagcttcaggagccatagtacctacagcagcactccaggtaggcgaaaaccaagagtacatcggcctcgttctcctatattggaagaaaaagacatcccgccccttgaatttcccaagtcctctgaggatttaatggtgcctaatgagcatataatgaatgtcattgccatttacgaggtactgcggaactttggcactgttttgagattatctccttttcgctttgaggacttttgtgcagctctggtgagccaagagcagtgcacactcatggcagagatgcatgttgtgcttttgaaagcagttctgcgtgaagaagacacttccaatactacctttggacctgctgatctgaaagatagcgttaattccacactgtatttcatagatgggatgacgtggccagaggtgctgcgggtgtactgtgagagtgataaggagtaccatcacgttcttccttaccaagaggcagaggactacccatatggaccagtagagaacaagatcaaagttctacagtttctagtcgatcagtttcttacaacaaatattgctcgagaggaattgatgtctgaaggggtgatacagtatgatgaccattgtagggtttgtcacaaacttggggatttgctttgctgtgagacatgttcagcagtataccatttggaatgtgtgaagccacctcttgaggaggtgccagaggacgagtggcagtgtgaagtctgtgtagcacacaaggtgcctggtgtgactgactgtgttgctgaaatccaaaaaaataaaccatatattcgacatgaacctattggatatgatagaagtcggaggaaatactggttcttgaaccgaagactcataatagaagaagatacagaaaatgaaaatgaaaagaaaatttggtattacagcacaaaggtccaacttgcagaattaattgactgtctagacaaagattattgggaagcagaactctgcaaaattctagaagaaatgcgtgaagaaatccaccgacacatggacataactgaagacctgaccaataaggctcggggcagtaacaaatcctttctggcggcagctaatgaagaaattttggaatccataagagccaaaaagggagacattgataatgttaaaagcccagaagaaacagaaaaagacaagaatgagactgagaatgactctaaagatgctgagaaaaacagagaagaatttgaagaccagtcccttgaaaaagacagtgacgacaaaacaccagatgatgaccctgagcaaggaaaatctgaggtaggtgatttcaaatcggagaagtccaacggggagctaagtgaatctcctggagctggaaaaggagcatctggctcaactcgaatcatcaccagattgcggaatccagatagcaaacttagtcagctgaagagccagcaggtggcagccgctgcacatgaagcaaataaattatttaaggagggcaaagaggtactggtagttaactctcaaggagaaatttcacggttgagcaccaaaaaggaagtgatcatgaaaggaaatatcaacaattattttaaattgggtcaagaagggaagtatcgcgtctaccacaatcaatactccaccaattcatttgctttgaataagcaccagcacagagaagaccatgataagagaaggcatcttgcacataagttctgtctgactccagcaggagagttcaaatggaacggttctgtccatgggtccaaagttcttaccatatctactctgagactgactatcacccaattagaaaacaacatcccttcatcctttcttcatcccaactgggcatcacatagggcaaattggatcaaggcagttcagatgtgtagcaaacccagagaatttgcattggctttagccattttggagtgtgcagttaaaccagttgtgatgctaccaatatggcgagaatctttaggacataccaggttacaccggatgacatcaattgaaagagaagaaaaggagaaagtcaaaaaaaaagagaagaaacaggaagaagaagaaacgatgcagcaagcgacatgggtaaaatacacatttccagttaagcatcaggtttggaaacaaaaaggtgaagagtacagagtgacaggatatggtggttggagctggattagtaaaactcatgtttataggtttgttcctaaattgccaggcaatactaatgtgaattacagaaagtcgttagaaggaaccaaaaataatatggatgaaaatatggatgagtcagataaaagaaaatgttcacgaagtccaaaaaaaataaaaatagagcctgattctgaaaaagatgaggtaaaaggttcagatgctgcaaaaggagcagaccaaaatgaaatggatatctcaaagattactgagaagaaggaccaagatgtgaaggagctcttagattctgacagtgataaaccctgcaaggaagaaccaatggaagtagacgatgacatgaaaacagagtcacatgtaaattgtcaggagagttctcaagtagatgtggtcaatgttagtgagggttttcatctaaggactagttacaaaaagaaaacaaaatcatccaaactagatggacttcttgaaaggagaattaaacagtttacactggaagaaaaacagcgactcgaaaaaatcaagttggagggtggaattaagggtataggaaagacttctacaaattcttcaaaaaatctctctgaatcaccagtaataacgaaagcaaaagaagggtgtcagagtgactcgatgagacaagaacagagcccaaatgcaaataatgatcaacctgaggacttgattcagggatgttcagaaagtgattcctcagttcttagaatgagtgatcctagtcataccacaaacaaactttatccaaaagatcgagtgttagatgatgtctccattcggagcccagaaacaaaatgtccgaaacaaaattccattgaaaatgacatagaagaaaaagtctctgaccttgccagtagaggccaggaacccagtaagagtaaaacaaaaggaaatgattttttcatcgatgactctaaactagccagtgcagatgatattggtactttgatctgtaagaacaaaaaaccgctcatacaggaggaaagtgacaccattgtttcttcttccaagagtgctttacattcatcagtgcctaaaagtaccaatgacagagatgccacacctctgtcaagagcaatggactttgaaggaaaactgggatgtgactctgaatctaatagcactttggaaaatagttctgataccgtgtctattcaggatagcagtgaagaagatatgattgttcagaatagcaatgaaagcatttctgaacagttcagaactcgagaacaagatgttgaagtcttggagccgttaaagtgtgagttggtttctggtgagtccactggaaactgtgaggacaggctgccggtcaaggggactgaagcaaatggtaaaaaaccaagtcagcagaagaaattagaggagagaccagttaataaatgtagtgatcaaataaagctaaaaaataccactgacaaaaagaataatgaaaatcgagagtctgaaaagaaaggacagagaacaagtacatttcaaataaatggaaaagataataaacccaaaatatatttgaaaggtgaatgcttgaaagaaatttctgagagtagagtagtaagtggtaatgttgaaccaaaggttaataatataaataaaataatccctgagaatgatattaaatcattgactgttaaagaatctgctataaggccattcattaatggtgatgtcatcatggaagattttaatgaaagaaacagctccgaaacaaaatcgcatttgctgagttcttcagatgctgaaggtaactaccgagatagccttgagaccctgccatcaaccaaagagtctgacagtacacagacgaccacaccctcagcatcttgtccagaaagcaattcagttaatcaggtagaagatatggaaatagaaacctcagaagttaagaaagttacttcatcacctattacttctgaagaggaatctaatctcagtaatgactttattgatgaaaatggtctgcccatcaacaaaaatgaaaatgtcaatggagaatctaaaagaaaaaccgtcatcacagaagtcaccacgatgacctccacagtggccacagaatcaaaaactgtgatcaaggtagaaaaaggcgataagcaaactgtggtttcttccacagaaaattgtgcaaaatccactgtcacaaccaccactacaacagtgaccaagctttccacaccctccacaggcggcagtgtggacatcatctctgtaaaggagcagagcaaaaccgtggtcaccacgacagtgacagactccctgaccaccacgggaggcacactggttacatctatgactgtgagcaaagagtattccacacgagacaaagtgaaactgatgaaattttcaagaccaaagaagactcgttcaggtacagctctgccatcctatagaaaatttgttaccaagagcagcaagaagagcatttttgttttgcctaatgatgacttaaaaaagttggcccgaaaaggaggaatccgagaggtcccttattttaattacaatgcaaaacctgctttggatatatggccatatccttctcctagaccgacctttggcatcacttggaggtatagacttcagacagtaaagtccttagctggagtgagcctgatgttacggttactgtgggcaagtttgagatgggatgatatggcggccaaggctcctccaggaggagggactacacggacagaaacatccgaaactgaaatcacaacaacagaaataattaagaggagagatgttggtccttatggcattcgatctgaatattgtatcaggaaaatcatttgtcccattggagttccagaaacaccaaaagaaacgcctacacctcagaggaaaggccttcgatcaagtgcactgcggccaaagagaccagaaacgcccaagcaaactggccctgttattattgaaacctgggtagcagaagaagaactggaattgtgggagatcagggcatttgctgagagagtggagaaagaaaaggcacaagcagttgagcaacaggctaagaaacgactggagcagcagaagccgacagtgattgcaacttccactacttccccaacaagcagtacaaccagcaccatctctccagcacagaaggttatggtggcccccataagtggctcagttacaactggaaccaaaatggtactaactactaaagttggatctccagctacagtaacattccaacaaaacaagaactttcatcaaacctttgctacatgggttaagcaaggccagtcaaattcaggcgttgttcaagtacagcagaaagtcctgggtatcattccatcaagtacaggtaccagtcagcaaacctttacttcattccagcccaggacagcaacagtcacaattaggcccaatacctcaggctctggaggaaccacaagcaattcacaagtaatcacagggcctcagattcgccctggtatgaccgtgattagaacaccactccaacagtcaacactaggaaaggcaattattcgaacacctgtgatggtacagccaggtgctcctcagcaagtgatgactcaaatcatcagggggcagcctgtctccactgcagtctccgcccctaacacggtttcctcaacacctgggcagaaaagcttaacttcagcaacgtccacttcaaatatacagtcttcagcctcacaaccccctcgcccccaacaaggacaagtgaagctcaccatggctcaacttactcagttaacacagggccacggtggcaatcaaggtttgacagtagtaattcaaggacaaggtcaaactactggacagttgcagttgatacctcaaggggtgactgtactcccaggcccaggccagcagctaatgcaagctgcaatgccaaatggtactgttcagcgattcctctttaccccattggcaacaacagccaccacagccagcaccaccaccaccactgtttccacgacagcagcaggtacaggtgaacaaaggcagagtaaactgtcaccccagatgcaggtacatcaagacaaaaccctgccaccagctcagtcatcaagtgtgggtccagcagaagcccagccacagactgctcagccttcagctcagccccagccccaaacccagccccagtccccagctcagcctgaagttcagactcagcctgaagttcagacccaaacaactgtttcatcccatgtcccttctgaagcacaacccacccacgcacagtcatccaagccccaagttgcagcacagtctcagcctcaaagtaatgtccaaggacagtctcctgttcgtgtccaaagtccatcacagactcgaatacgtccatcaactccatcccaactgtctcctggacaacaatcccaggttcagactacaacctcacaaccgattccaattcaaccacatacatctcttcagataccttcccaaggccagccacagtcacaaccccaggtacagtcttcaactcaaactctttcatcaggacaaactttaaatcaagttactgtttcatccccatcccgtcctcagctacaaatacagcagccacagccccaagtcattgctgtgcctcagctgcaacaacaagtccaggttctctctcagatccagtcacaggttgtggctcagatacaggctcagcaaagtggtgtgccccagcaaatcaaactccagttacctatccaaattcagcaaagcagtgctgtgcagactcaccagattcagaatgtggttacagtgcaggcagccagtgtgcaagagcagttgcaaagggttcagcaactcagggatcagcagcaaaagaagaaacagcaacagatagaaattaagcgtgaacacaccctccaagcttctaatcaaagtgaaatcattcagaaacaggtggtgatgaagcataatgctgtaatagaacatttaaaacagaaaaagagcatgactccagctgaaagagaagagaatcaaagaatgattgtctgtaaccaggtgatgaagtatattttggataagatagataaagaagaaaaacaggcagcaaaaaaacggaagcgtgaagagagtgtggagcagaaacgtagcaagcagaatgccactaagctgtcagctctgctcttcaagcacaaagagcagctcagagccgagatcctgaagaagagagcactcctggacaaggatctgcaaattgaagtgcaggaagagctgaagagagacctgaaaattaagaaagaaaaagacctgatgcagttggctcaggccacagcagtagctgcaccctgccccccagtgacaccagctcctccagcccctccagcccctccaccttcacctccccctccacctgctgtgcaacacacaggccttctgtccacgcccaccttacctgctgcttcccagaagaggaagcgggaagaggaaaaagactccagctcaaagtccaagaaaaagaaaatgatctctactacctcaaaggaaactaagaaggacacaaagctttactgtatctgtaaaacgccttatgatgaatctaaattttatattggctgtgatcggtgtcagaattggtaccatgggcgctgcgttggcatcttgcaaagtgaggcagagctcattgatgagtatgtctgtccacagtgccagtcaacagaggatgccatgacagtgctcacgccactaacagagaaggattatgaggggttgaagagggtgctccgttccttacaggcccataagatggcctggcctttccttgaaccagtagaccctaatgatgcaccagattattatggtgttattaaggaacctatggaccttgccaccatggaagaaagagtacaaagacgatattatgaaaagctgacggaatttgtggcagatatgaccaaaatttttgataactgtcgttactacaatccaagtgactccccattttaccagtgtgcagaagttctcgaatcattctttgtacagaaattgaaaggcttcaaagctagcaggtctcataacaacaaactgcagtctacagcttcttaaagttcagcgtgttaacctaacataaaacacagcaagaatctggttgtctgaactattttaaattaaggagccagatgtttttagtcaggctatcctgacaagacttgacctaaacttcgtttttattggtcataacagtccaattatattcttggccaattttgtccaacggacaagaaaaaagcaaagtcaacgacaccattatcttgtcaagatcagatggttttactattgtggcagaagcgagaaaactttgtttattgaaaaaaaaagaaaaagaaagcaagaaaaaaagatactatggggtcaagtgtaactccatggaaatgccacgtctgctcttcagtgaagaagctggtttagagtctcacagaaaacttttgactgtatttatttattgttgcaaaaaagacgcttttttattgctgccctcatttgtcagctaattattttttcttataaaatccagccccggttacatataatcatctgtatcttatcatgattcctgtaggtaaaagtacaagacgacctctagatgtcttttctttctatgaaaggagctgctatgtacacatgtgcacacacacacaactgggaatcaacaatgagtttattgttcatggtagattaaaattaagcttgcataaaggttgggctaagtggtcctggactacagactctgttgccttgaatataacagtacaatttgtcaattactctgcaccaggctaaaatgagtaaaatctatttgaaggtatcttgtttgtaaacatttgtcagattctaatttttttcttttgtattaaaattcaactatggatgtatatgaaacaaaataaatggagataatttttctcccaca

SEQ ID NO: 112328 - DNA, 11292 bp, Homo sapiens
  Payload ID: 1987
  Gene Symbol: BPTF
  Gene Name: bromodomain PHD finger transcription factor
  Uniprot ID: Q12830
  ENST ID: ENST00000321892
  CDS Start-End: 62-9202
cgccccccctgcgcccgcccctcccccttcgctttccttctccccccgcctcggctccgacatgaggggccggcggggcaggccgcccaagcagcccgcggctcccgctgcggagcgctgcgccccggccccgccgccaccgccgccgccgcccacgtccggacccatcggggggctccgctcgcggcaccgcggcagcagccggggcaggtgggccgccgcccaggctgaggtggcgcccaagacgcggctgagctcgcccagggggggcagcagtagccggaggaagccgccgccgccgccgccggccccccccagcaccagcgccccgggccggggggggcgaggaggcgggggcggcaggacggggggcgggggcggcggcggccacctggcccggaccaccgcggcccggagggccgtcaacaaagtggtgtacgatgaccacgagagcgaggaggaggaggaagaggaggacatggtctccgaggaggaggaggaggaggacggcgacgccgaggagacccaggattctgaggacgacgaggaggatgagatggaagaggacgacgatgactccgattatccggaggagatggaagacgacgacgacgacgccagttactgcacggaaagcagcttcaggagccatagtacctacagcagcactccaggtaggcgaaaaccaagagtacatcggcctcgttctcctatattggaagaaaaagacatcccgccccttgaatttcccaagtcctctgaggatttaatggtgcctaatgagcatataatgaatgtcattgccatttacgaggtactgcggaactttggcactgttttgagattatctccttttcgctttgaggacttttgtgcagctctggtgagccaagagcagtgcacactcatggcagagatgcatgttgtgcttttgaaagcagttctgcgtgaagaagacacttccaatactacctttggacctgctgatctgaaagatagcgttaattccacactgtatttcatagatgggatgacgtggccagaggtgctgcgggtgtactgtgagagtgataaggagtaccatcacgttcttccttaccaagaggcagaggactacccatatggaccagtagagaacaagatcaaagttctacagtttctagtcgatcagtttcttacaacaaatattgctcgagaggaattgatgtctgaaggggtgatacagtatgatgaccattgtagggtttgtcacaaacttggggatttgctttgctgtgagacatgttcagcagtataccatttggaatgtgtgaagccacctcttgaggaggtgccagaggacgagtggcagtgtgaagtctgtgtagcacacaaggtgcctggtgtgactgactgtgttgctgaaatccaaaaaaataaaccatatattcgacatgaacctattggatatgatagaagtcggaggaaatactggttcttgaaccgaagactcataatagaagaagatacagaaaatgaaaatgaaaagaaaatttggtattacagcacaaaggtccaacttgcagaattaattgactgtctagacaaagattattgggaagcagaactctgcaaaattctagaagaaatgcgtgaagaaatccaccgacacatggacataactgaagacctgaccaataaggctcggggcagtaacaaatcctttctggcggcagctaatgaagaaattttggaatccataagagccaaaaagggagacattgataatgttaaaagcccagaagaaacagaaaaagacaagaatgagactgagaatgactctaaagatgctgagaaaaacagagaagaatttgaagaccagtcccttgaaaaagacagtgacgacaaaacaccagatgatgaccctgagcaaggaaaatctgaggagccaacagaagttggggataaaggtaactctgtgtcagcaaatcttggcgacaacacaacaaatgcaacttcagaagagactagtccctctgaagggaggagccctgtggggtgtctctcagaaacccccgatagcagcaacatggcagagaagaaggtggcatctgagctcccccaggatgtgccagaagaacctaacaagacatgtgagagcagtaacactagtgctaccactacctccatccagcctaatctggaaaacagtaacagcagcagtgaactaaattcttcccagagtgaatctgctaaggcagctgatgatcctgaaaatggagaaagagaatctcatacacctgtctctattcaggaagagatagtaggtgatttcaaatcggagaagtccaacggggagctaagtgaatctcctggagctggaaaaggagcatctggctcaactcgaatcatcaccagattgcggaatccagatagcaaacttagtcagctgaagagccagcaggtggcagccgctgcacatgaagcaaataaattatttaaggagggcaaagaggtactggtagttaactctcaaggagaaatttcacggttgagcaccaaaaaggaagtgatcatgaaaggaaatatcaacaattattttaaattgggtcaagaagggaagtatcgcgtctaccacaatcaatactccaccaattcatttgctttgaataagcaccagcacagagaagaccatgataagagaaggcatcttgcacataagttctgtctgactccagcaggagagttcaaatggaacggttctgtccatgggtccaaagttcttaccatatctactctgagactgactatcacccaattagaaaacaacatcccttcatcctttcttcatcccaactgggcatcacatagggcaaattggatcaaggcagttcagatgtgtagcaaacccagagaatttgcattggctttagccattttggagtgtgcagttaaaccagttgtgatgctaccaatatggcgagaatctttaggacataccaggttacaccggatgacatcaattgaaagagaagaaaaggagaaagtcaaaaaaaaagagaagaaacaggaagaagaagaaacgatgcagcaagcgacatgggtaaaatacacatttccagttaagcatcaggtttggaaacaaaaaggtgaagagtacagagtgacaggatatggtggttggagctggattagtaaaactcatgtttataggtttgttcctaaattgccaggcaatactaatgtgaattacagaaagtcgttagaaggaaccaaaaataatatggatgaaaatatggatgagtcagataaaagaaaatgttcacgaagtccaaaaaaaataaaaatagagcctgattctgaaaaagatgaggtaaaaggttcagatgctgcaaaaggagcagaccaaaatgaaatggatatctcaaagattactgagaagaaggaccaagatgtgaaggagctcttagattctgacagtgataaaccctgcaaggaagaaccaatggaagtagacgatgacatgaaaacagagtcacatgtaaattgtcaggagagttctcaagtagatgtggtcaatgttagtgagggttttcatctaaggactagttacaaaaagaaaacaaaatcatccaaactagatggacttcttgaaaggagaattaaacagtttacactggaagaaaaacagcgactcgaaaaaatcaagttggagggtggaattaagggtataggaaagacttctacaaattcttcaaaaaatctctctgaatcaccagtaataacgaaagcaaaagaagggtgtcagagtgactcgatgagacaagaacagagcccaaatgcaaataatgatcaacctgaggacttgattcagggatgttcagaaagtgattcctcagttcttagaatgagtgatcctagtcataccacaaacaaactttatccaaaagatcgagtgttagatgatgtctccattcggagcccagaaacaaaatgtccgaaacaaaattccattgaaaatgacatagaagaaaaagtctctgaccttgccagtagaggccaggaacccagtaagagtaaaacaaaaggaaatgattttttcatcgatgactctaaactagccagtgcagatgatattggtactttgatctgtaagaacaaaaaaccgctcatacaggaggaaagtgacaccattgtttcttcttccaagagtgctttacattcatcagtgcctaaaagtaccaatgacagagatgccacacctctgtcaagagcaatggactttgaaggaaaactgggatgtgactctgaatctaatagcactttggaaaatagttctgataccgtgtctattcaggatagcagtgaagaagatatgattgttcagaatagcaatgaaagcatttctgaacagttcagaactcgagaacaagatgttgaagtcttggagccgttaaagtgtgagttggtttctggtgagtccactggaaactgtgaggacaggctgccggtcaaggggactgaagcaaatggtaaaaaaccaagtcagcagaagaaattagaggagagaccagttaataaatgtagtgatcaaataaagctaaaaaataccactgacaaaaagaataatgaaaatcgagagtctgaaaagaaaggacagagaacaagtacatttcaaataaatggaaaagataataaacccaaaatatatttgaaaggtgaatgcttgaaagaaatttctgagagtagagtagtaagtggtaatgttgaaccaaaggttaataatataaataaaataatccctgagaatgatattaaatcattgactgttaaagaatctgctataaggccattcattaatggtgatgtcatcatggaagattttaatgaaagaaacagctccgaaacaaaatcgcatttgctgagttcttcagatgctgaaggtaactaccgagatagccttgagaccctgccatcaaccaaagagtctgacagtacacagacgaccacaccctcagcatcttgtccagaaagcaattcagttaatcaggtagaagatatggaaatagaaacctcagaagttaagaaagttacttcatcacctattacttctgaagaggaatctaatctcagtaatgactttattgatgaaaatggtctgcccatcaacaaaaatgaaaatgtcaatggagaatctaaaagaaaaaccgtcatcacagaagtcaccacgatgacctccacagtggccacagaatcaaaaactgtgatcaaggtagaaaaaggcgataagcaaactgtggtttcttccacagaaaattgtgcaaaatccactgtcacaaccaccactacaacagtgaccaagctttccacaccctccacaggcggcagtgtggacatcatctctgtaaaggagcagagcaaaaccgtggtcaccacgacagtgacagactccctgaccaccacgggaggcacactggttacatctatgactgtgagcaaagagtattccacacgagacaaagtgaaactgatgaaattttcaagaccaaagaagactcgttcaggtacagctctgccatcctatagaaaatttgttaccaagagcagcaagaagagcatttttgttttgcctaatgatgacttaaaaaagttggcccgaaaaggaggaatccgagaggtcccttattttaattacaatgcaaaacctgctttggatatatggccatatccttctcctagaccgacctttggcatcacttggaggtatagacttcagacagtaaagtccttagctggagtgagcctgatgttacggttactgtgggcaagtttgagatgggatgatatggcggccaaggctcctccaggaggagggactacacggacagaaacatccgaaactgaaatcacaacaacagaaataattaagaggagagatgttggtccttatggcattcgatctgaatattgtatcaggaaaatcatttgtcccattggagttccagaaacaccaaaagaaacgcctacacctcagaggaaaggccttcgatcaagtgcactgcggccaaagagaccagaaacgcccaagcaaactggccctgttattattgaaacctgggtagcagaagaagaactggaattgtgggagatcagggcatttgctgagagagtggagaaagaaaaggcacaagcagttgagcaacaggctaagaaacgactggagcagcagaagccgacagtgattgcaacttccactacttccccaacaagcagtacaaccagcaccatctctccagcacagaaggttatggtggcccccataagtggctcagttacaactggaaccaaaatggtactaactactaaagttggatctccagctacagtaacattccaacaaaacaagaactttcatcaaacctttgctacatgggttaagcaaggccagtcaaattcaggcgttgttcaagtacagcagaaagtcctgggtatcattccatcaagtacaggtaccagtcagcaaacctttacttcattccagcccaggacagcaacagtcacaattaggcccaatacctcaggctctggaggaaccacaagcaattcacaagtaatcacagggcctcagattcgccctggtatgaccgtgattagaacaccactccaacagtcaacactaggaaaggcaattattcgaacacctgtgatggtacagccaggtgctcctcagcaagtgatgactcaaatcatcagggggcagcctgtctccactgcagtctccgcccctaacacggtttcctcaacacctgggcagaaaagcttaacttcagcaacgtccacttcaaatatacagtcttcagcctcacaaccccctcgcccccaacaaggacaagtgaagctcaccatggctcaacttactcagttaacacagggccacggtggcaatcaaggtttgacagtagtaattcaaggacaaggtcaaactactggacagttgcagttgatacctcaaggggtgactgtactcccaggcccaggccagcagctaatgcaagctgcaatgccaaatggtactgttcagcgattcctctttaccccattggcaacaacagccaccacagccagcaccaccaccaccactgtttccacgacagcagcaggtacaggtgaacaaaggcagagtaaactgtcaccccagatgcaggtacatcaagacaaaaccctgccaccagctcagtcatcaagtgtgggtccagcagaagcccagccacagactgctcagccttcagctcagccccagccccaaacccagccccagtccccagctcagcctgaagttcagactcagcctgaagttcagacccaaacaactgtttcatcccatgtcccttctgaagcacaacccacccacgcacagtcatccaagccccaagttgcagcacagtctcagcctcaaagtaatgtccaaggacagtctcctgttcgtgtccaaagtccatcacagactcgaatacgtccatcaactccatcccaactgtctcctggacaacaatcccaggttcagactacaacctcacaaccgattccaattcaaccacatacatctcttcagataccttcccaaggccagccacagtcacaaccccaggtacagtcttcaactcaaactctttcatcaggacaaactttaaatcaagttactgtttcatccccatcccgtcctcagctacaaatacagcagccacagccccaagtcattgctgtgcctcagctgcaacaacaagtccaggttctctctcagatccagtcacaggttgtggctcagatacaggctcagcaaagtggtgtgccccagcaaatcaaactccagttacctatccaaattcagcaaagcagtgctgtgcagactcaccagattcagaatgtggttacagtgcaggcagccagtgtgcaagagcagttgcaaagggttcagcaactcagggatcagcagcaaaagaagaaacagcaacagatagaaattaagcgtgaacacaccctccaagcttctaatcaaagtgaaatcattcagaaacaggtggtgatgaagcataatgctgtaatagaacatttaaaacagaaaaagagcatgactccagctgaaagagaagagaatcaaagaatgattgtctgtaaccaggtgatgaagtatattttggataagatagataaagaagaaaaacaggcagcaaaaaaacggaagcgtgaagagagtgtggagcagaaacgtagcaagcagaatgccactaagctgtcagctctgctcttcaagcacaaagagcagctcagagccgagatcctgaagaagagagcactcctggacaaggatctgcaaattgaagtgcaggaagagctgaagagagacctgaaaattaagaaagaaaaagacctgatgcagttggctcaggccacagcagtagctgcaccctgccccccagtgacaccagctcctccagcccctccagcccctccaccttcacctccccctccacctgctgtgcaacacacaggccttctgtccacgcccaccttacctgctgcttcccagaagaggaagcgggaagaggaaaaagactccagctcaaagtccaagaaaaagaaaatgatctctactacctcaaaggaaactaagaaggacacaaagctttactgtatctgtaaaacgccttatgatgaatctaaattttatattggctgtgatcggtgtcagaattggtaccatgggcgctgcgttggcatcttgcaaagtgaggcagagctcattgatgagtatgtctgtccacagtgccagtcaacagaggatgccatgacagtgctcacgccactaacagagaaggattatgaggggttgaagagggtgctccgttccttacaggcccataagatggcctggcctttccttgaaccagtagaccctaatgatgcaccagattattatggtgttattaaggaacctatggaccttgccaccatggaagaaagagtacaaagacgatattatgaaaagctgacggaatttgtggcagatatgaccaaaatttttgataactgtcgttactacaatccaagtgactccccattttaccagtgtgcagaagttctcgaatcattctttgtacagaaattgaaaggcttcaaagctagcaggtctcataacaacaaactgcagtctacagcttcttaaagttcagcgtgttaacctaacataaaacacagcaagaatctggttgtctgaactattttaaattaaggagccagatgtttttagtcaggctatcctgacaagacttgacctaaacttcgtttttattggtcataacagtccaattatattcttggccaattttgtccaacggacaagaaaaaagcaaagtcaacgacaccattatcttgtcaagatcagatggttttactattgtggcagaagcgagaaaactttgtttattgaaaaaaaaagaaaaagaaagcaagaaaaaaagatactatggggtcaagtgtaactccatggaaatgccacgtctgctcttcagtgaagaagctggtttagagtctcacagaaaacttttgactgtatttatttattgttgcaaaaaagacgcttttttattgctgccctcatttgtcagctaattattttttcttataaaatccagccccggttacatataatcatctgtatcttatcatgattcctgtaggtaaaagtacaagacgacctctagatgtcttttctttctatgaaaggagctgctatgtacacatgtgcacacacacacaactgggaatcaacaatgagtttattgttcatggtagattaaaattaagcttgcataaaggttgggctaagtggtcctggactacagactctgttgccttgaatataacagtacaatttgtcaattactctgcaccaggctaaaatgagtaaaatctatttgaaggtatcttgtttgtaaacatttgtcagattctaatttttttcttttgtattaaaattcaactatggatgtatatgaaacaaaataaatggagataatttttctcccacagacagaggtgtctttgaatgtgcgctaatgattatctgtaagcctttgtggggagggaggcctgcaaggtcatgaaaggcagaagagtctaattgtgcctggatttctccaggacagcagtggcccctcgttttatcattcccagtccattgtcatcacgtcagagaaaaatcttcaggggtgctaatcctgttgcatcagttgatcatactaacgagaacggtaatgcgacaagatacacattgccttcatctgtacattctgtgataccaggcaaattaccaattacacacagctacttatattttatgaagggcattttttagatgacctcatcctctgtgttatttgttgattgggtttgttttctgtttgttggtttgtttgtttcttccacgtaaggaaaagtagtgtaaacagtagcgagaaaatggaaaccacagaggaagatgtattttgcatgtttttcctttcagtgttcttacacgttgtatcactgcattgtggtaatagcttctataaaatctgccatagttggattatgcagctttgcaaaaatttttactagattttgcactaactcatattagctttgtcctaccaacttctggaatttatctaattattgtttttcaaagtttctttccttttaatgtttccctgctatgcaaaacctttcccagacctcagtttcttaaaagaaagatgttgctacagttcccgattctttcttattacaggctcaggtgtacaggttattctgggttaattttatctaatgaagcccattcctttttgtacataaagatgtcacttaaacttatgcttacaaactaaagactaatcgctcaatatgaaaacatgaaaaaatttttgcttaaagtattaagatggaagtagttaaatatgggttattttgtccttttacttttttaaaaaatgttacatattgtatgcactgtgctgatgcaagaattctacattttaatgagttataaaattattctgcatctcatcacgtcacagtatttctgtactatttattcatatatataaatatatatgggcttaatcatttaaaatttgttgcagcaagaactttcctacctgtaggcaatagattgctatgtttttaacaaattgtggcaaattctaaacagcaattcttttgtacgtaataggacatttcatcctagaaaaataaagtaatgtttttgacattgga

SEQ ID NO: 112329 - DNA, 2627 bp, Homo sapiens
  Payload ID: 1987
  Gene Symbol: BPTF
  Gene Name: bromodomain PHD finger transcription factor
  ENST ID: ENST00000335221
  CDS Start-End: 31-2463
gagagcgaggaggaggaggaagaggaggacatggtctccgaggaggaggaggaggaggacggcgacgccgaggagacccaggattctgaggacgacgaggaggatgagatggaagaggacgacgatgactccgattatccggaggagatggaagacgacgacgacgacgccagttactgcacggaaagcagcttcaggagccatagtacctacagcagcactccaggtaggcgaaaaccaagagtacatcggcctcgttctcctatattggaagaaaaagacatcccgccccttgaatttcccaagtcctctgaggatttaatggtgcctaatgagcatataatgaatgtcattgccatttacgaggtactgcggaactttggcactgttttgagattatctccttttcgctttgaggacttttgtgcagctctggtgagccaagagcagtgcacactcatggcagagatgcatgttgtgcttttgaaagcagttctgcgtgaagaagacacttccaatactacctttggacctgctgatctgaaagatagcgttaattccacactgtatttcatagatgggatgacgtggccagaggtgctgcgggtgtactgtgagagtgataaggagtaccatcacgttcttccttaccaagaggcagaggactacccatatggaccagtagagaacaagatcaaagttctacagtttctagtcgatcagtttcttacaacaaatattgctcgagaggaattgatgtctgaaggggtgatacagtatgatgaccattgtagggtttgtcacaaacttggggatttgctttgctgtgagacatgttcagcagtataccatttggaatgtgtgaagccacctcttgaggaggtgccagaggacgagtggcagtgtgaagtctgtgtagcacacaaggtgcctggtgtgactgactgtgttgctgaaatccaaaaaaataaaccatatattcgacatgaacctattggatatgatagaagtcggaggaaatactggttcttgaaccgaagactcataatagaagaagatacagaaaatgaaaatgaaaagaaaatttggtattacagcacaaaggtccaacttgcagaattaattgactgtctagacaaagattattgggaagcagaactctgcaaaattctagaagaaatgcgtgaagaaatccaccgacacatggacataactgaagacctgaccaataaggctcggggcagtaacaaatcctttctggcggcagctaatgaagaaattttggaatccataagagccaaaaagggagacattgataatgttaaaagcccagaagaaacagaaaaagacaagaatgagactgagaatgactctaaagatgctgagaaaaacagagaagaatttgaagaccagtcccttgaaaaagacagtgacgacaaaacaccagatgatgaccctgagcaaggaaaatctgaggagccaacagaagttggggataaaggtaactctgtgtcagcaaatcttggcgacaacacaacaaatgcaacttcagaagagactagtccctctgaagggaggagccctgtggggtgtctctcagaaacccccgatagcagcaacatggcagagaagaaggtggcatctgagctcccccaggatgtgccagaagaacctaacaagacatgtgagagcagtaacactagtgctaccactacctccatccagcctaatctggaaaacagtaacagcagcagtgaactaaattcttcccagagtgaatctgctaaggcagctgatgatcctgaaaatggagaaagagaatctcatacacctgtctctattcaggaagagatagtaggtgatttcaaatcggagaagtccaacggggagctaagtgaatctcctggagctggaaaaggagcatctggctcaactcgaatcatcaccagattgcggaatccagatagcaaacttagtcagctgaagagccagcaggtggcagccgctgcacatgaagcaaataaattatttaaggagggcaaagaggtactggtagttaactctcaaggagaaatttcacggttgagcaccaaaaaggaagtgatcatgaaaggaaatatcaacaattattttaaattgggtcaagaagggaagtatcgcgtctaccacaatcaatactccaccaattcatttgctttgaataagcaccagcacagagaagaccatgataagagaaggcatcttgcacataagttctgtctgactccagcaggagagttcaaatggaacggttctgtccatgggtccaaagttcttaccatatctactctgagactgactatcacccaattagaaacaacatcccttcatcctttcttcatcccaactgggcatcacatagggcaaattggatcaaggcagttcagatgtgtagcaaacccagagaatttgcattggctttagccattttggagtgtgcagttaaaccagttgtgatgctaccaatatggcgagaatctttaggacataccaggttacaccggatgacatcaattgaaagagaagaaaaggagaaagtcaaaaaaaaagagaagaaacaggaagaagaagaaacgatgcagcaagcg

SEQ ID NO: 112330 - DNA, 4041 bp, Homo sapiens
  Payload ID: 1987
  Gene Symbol: BPTF
  Gene Name: bromodomain PHD finger transcription factor
  ENST ID: ENST00000342579
  CDS Start-End: 1-1951
gactgtactcccaggcccaggccagcagctaatgcaagctgcaatgccaaatggtactgttcagcgattcctctttaccccattggcaacaacagccaccacagccagcaccaccaccaccactgtttccacgacagcagcaggtacaggtgaacaaaggcagagtaaactgtcaccccagatgcaggtacatcaagacaaaaccctgccaccagctcagtcatcaagtgtgggtccagcagaagcccagccacagactgctcagccttcagctcagccccagccccaaacccagccccagtccccagctcagcctgaagttcagactcagcctgaagttcagacccaaacaactgtttcatcccatgtcccttctgaagcacaacccacccacgcacagtcatccaagccccaagttgcagcacagtctcagcctcaaagtaatgtccaaggacagtctcctgttcgtgtccaaagtccatcacagactcgaatacgtccatcaactccatcccaactgtctcctggacaacaatcccaggttcagactacaacctcacaaccgattccaattcaaccacatacatctcttcagataccttcccaaggccagccacagtcacaaccccaggtggtgatgaagcataatgctgtaatagaacatttaaaacagaaaaagagcatgactccagctgaaagagaagagaatcaaagaatgattgtctgtaaccaggtgatgaagtatattttggataagatagataaagaagaaaaacaggcagcaaaaaaacggaagcgtgaagagagtgtggagcagaaacgtagcaagcagaatgccactaagctgtcagctctgctcttcaagcacaaagagcagctcagagccgagatcctgaagaagagagcactcctggacaaggatctgcaaattgaagtgcaggaagagctgaagagagacctgaaaattaagaaagaaaaagacctgatgcagttggctcaggccacagcagtagctgcaccctgccccccagtgacaccagctcctccagcccctccagcccctccaccttcacctccccctccacctgctgtgcaacacacaggccttctgtccacgcccaccttacctgctgcttcccagaagaggaagcgggaagaggaaaaagactccagctcaaagtccaagaaaaagaaaatgatctctactacctcaaaggaaactaagaaggacacaaagctttactgtatctgtaaaacgccttatgatgaatctaagttctatattggctgtgatctttgtactaactggtatcatggagaatgtgttggcatcacagaaaaggaggctaagaaaatggatgtgtacatctgtaatgattgtaaacgggcacaagagggcagcagtgaggaattgtactgtatctgcagaacaccttatgatgagtcacaattttatattggctgtgatcggtgtcagaattggtaccatgggcgctgcgttggcatcttgcaaagtgaggcagagctcattgatgagtatgtctgtccacagtgccagtcaacagaggatgccatgacagtgctcacgccactaacagagaaggattatgaggggttgaagagggtgctccgttccttacaggcccataagatggcctggcctttccttgaaccagtagaccctaatgatgcaccagattattatggtgttattaaggaacctatggaccttgccaccatggaagaaagagtacaaagacgatattatgaaaagctgacggaatttgtggcagatatgaccaaaatttttgataactgtcgttactacaatccaagtgactccccattttaccagtgtgcagaagttctcgaatcattctttgtacagaaattgaaaggcttcaaagctagcaggtctcataacaacaaactgcagtctacagcttcttaaagttcagcgtgttaacctaacataaaacacagcaagaatctggttgtctgaactattttaaattaaggagccagatgtttttagtcaggctatcctgacaagacttgacctaaacttcgtttttattggtcataacagtccaattatattcttggccaattttgtccaacggacaagaaaaaagcaaagtcaacgacaccattatcttgtcaagatcagatggttttactattgtggcagaagcgagaaaactttgtttattgaaaaaaaaagaaaaagaaagcaagaaaaaaagatactatggggtcaagtgtaactccatggaaatgccacgtctgctcttcagtgaagaagctggtttagagtctcacagaaaacttttgactgtatttatttattgttgcaaaaaagacgcttttttattgctgccctcatttgtcagctaattattttttcttataaaatccagccccggttacatataatcatctgtatcttatcatgattcctgtaggtaaaagtacaagacgacctctagatgtcttttctttctatgaaaggagctgctatgtacacatgtgcacacacacacaactgggaatcaacaatgagtttattgttcatggtagattaaaattaagcttgcataaaggttgggctaagtggtcctggactacagactctgttgccttgaatataacagtacaatttgtcaattactctgcaccaggctaaaatgagtaaaatctatttgaaggtatcttgtttgtaaacatttgtcagattctaatttttttcttttgtattaaaattcaactatggatgtatatgaaacaaaataaatggagataatttttctcccacagacagaggtgtctttgaatgtgcgctaatgattatctgtaagcctttgtggggagggaggcctgcaaggtcatgaaaggcagaagagtctaattgtgcctggatttctccaggacagcagtggcccctcgttttatcattcccagtccattgtcatcacgtcagagaaaaatcttcaggggtgctaatcctgttgcatcagttgatcatactaacgagaacggtaatgcgacaagatacacattgccttcatctgtacattctgtgataccaggcaaattaccaattacacacagctacttatattttatgaagggcattttttagatgacctcatcctctgtgttatttgttgattgggtttgttttctgtttgttggtttgtttgtttcttccacgtaaggaaaagtagtgtaaacagtagcgagaaaatggaaaccacagaggaagatgtattttgcatgtttttcctttcagtgttcttacacgttgtatcactgcattgtggtaatagcttctataaaatctgccatagttggattatgcagctttgcaaaaatttttactagattttgcactaactcatattagctttgtcctaccaacttctggaatttatctaattattgtttttcaaagtttctttccttttaatgtttccctgctatgcaaaacctttcccagacctcagtttcttaaaagaaagatgttgctacagttcccgattctttcttattacaggctcaggtgtacaggttattctgggttaattttatctaatgaagcccattcctttttgtacataaagatgtcacttaaacttatgcttacaaactaaagactaatcgctcaatatgaaaacatgaaaaaatttttgcttaaagtattaagatggaagtagttaaatatgggttattttgtccttttacttttttaaaaaatgttacatattgtatgcactgtgctgatgcaagaattctacattttaatgagttataaaattattctgcatctcatcacgtcacagtatttctgtactatttattcatatatataaatatatatgggcttaatcatttaaaatttgttgcagcaagaactttcctacctgtaggcaatagattgctatgtttttaacaaattgtggcaaattctaaacagcaattcttttgtacgtaataggacatttcatcctagaaaaataaagtaatgtttttgacattgga

SEQ ID NO: 112331 - DNA, 8295 bp, Homo sapiens
  Payload ID: 1987
  Gene Symbol: BPTF
  Gene Name: bromodomain PHD finger transcription factor
  ENST ID: ENST00000424123
  CDS Start-End: 1-8295
atggtctccgaggaggaggaggaggaggacggcgacgccgaggagacccaggattctgaggacgacgaggaggatgagatggaagaggacgacgatgactccgattatccggaggagatggaagacgacgacgacgacgccagttactgcacggaaagcagcttcaggagccatagtacctacagcagcactccaggtaggcgaaaaccaagagtacatcggcctcgttctcctatattggaagaaaaagacatcccgccccttgaatttcccaagtcctctgaggatttaatggtgcctaatgagcatataatgaatgtcattgccatttacgaggtactgcggaactttggcactgttttgagattatctccttttcgctttgaggacttttgtgcagctctggtgagccaagagcagtgcacactcatggcagagatgcatgttgtgcttttgaaagcagttctgcgtgaagaagacacttccaatactacctttggacctgctgatctgaaagatagcgttaattccacactgtatttcatagatgggatgacgtggccagaggtgctgcgggtgtactgtgagagtgataaggagtaccatcacgttcttccttaccaagaggcagaggactacccatatggaccagtagagaacaagatcaaagttctacagtttctagtcgatcagtttcttacaacaaatattgctcgagaggaattgatgtctgaaggggtgatacagtatgatgaccattgtagggtttgtcacaaacttggggatttgctttgctgtgagacatgttcagcagtataccatttggaatgtgtgaagccacctcttgaggaggtgccagaggacgagtggcagtgtgaagtctgtgtagcacacaaggtgcctggtgtgactgactgtgttgctgaaatccaaaaaaataaaccatatattcgacatgaacctattggatatgatagaagtcggaggaaatactggttcttgaaccgaagactcataatagaagaagatacagaaaatgaaaatgaaaagaaaatttggtattacagcacaaaggtccaacttgcagaattaattgactgtctagacaaagattattgggaagcagaactctgcaaaattctagaagaaatgcgtgaagaaatccaccgacacatggacataactgaagacctgaccaataaggctcggggcagtaacaaatcctttctggcggcagctaatgaagaaattttggaatccataagagccaaaaagggagacattgataatgttaaaagcccagaagaaacagaaaaagacaagaatgagactgagaatgactctaaagatgctgagaaaaacagagaagaatttgaagaccagtcccttgaaaaagacagtgacgacaaaacaccagatgatgaccctgagcaaggaaaatctgaggagccaacagaagttggggataaaggtaactctgtgtcagcaaatcttggcgacaacacaacaaatgcaacttcagaagagactagtccctctgaagggaggagccctgtggggtgtctctcagaaacccccgatagcagcaacatggcagagaagaaggtggcatctgagctcccccaggatgtgccagaagaacctaacaagacatgtgagagcagtaacactagtgctaccactacctccatccagcctaatctggaaaacagtaacagcagcagtgaactaaattcttcccagagtgaatctgctaaggcagctgatgatcctgaaaatggagaaagagaatctcatacacctgtctctattcaggaagagatagtaggtgatttcaaatcggagaagtccaacggggagctaagtgaatctcctggagctggaaaaggagcatctggctcaactcgaatcatcaccagattgcggaatccagatagcaaacttagtcagctgaagagccagcaggtggcagccgctgcacatgaagcaaataaattatttaaggagggcaaagaggtactggtagttaactctcaaggagaaatttcacggttgagcaccaaaaaggaagtgatcatgaaaggaaatatcaacaattattttaaattgggtcaagaagggaagtatcgcgtctaccacaatcaatactccaccaattcatttgctttgaataagcaccagcacagagaagaccatgataagagaaggcatcttgcacataagttctgtctgactccagcaggagagttcaaatggaacggttctgtccatgggtccaaagttcttaccatatctactctgagactgactatcacccaattagaaaacaacatcccttcatcctttcttcatcccaactgggcatcacatagggcaaattggatcaaggcagttcagatgtgtagcaaacccagagaatttgcattggctttagccattttggagtgtgcagttaaaccagttgtgatgctaccaatatggcgagaatctttaggacataccaggttacaccggatgacatcaattgaaagagaagaaaaggagaaagtcaaaaaaaaagagaagaaacaggaagaagaagaaacgatgcagcaagcgacatgggtaaaatacacatttccagttaagcatcaggtttggaaacaaaaaggtgaagagtacagagtgacaggatatggtggttggagctggattagtaaaactcatgtttataggtttgttcctaaattgccaggcaatactaatgtgaattacagaaagtcgttagaaggaaccaaaaataatatggatgaaaatatggatgagtcagataaaagaaaatgttcacgaagtccaaaaaaaataaaaatagagcctgattctgaaaaagatgaggtaaaaggttcagatgctgcaaaaggagcagaccaaaatgaaatggatatctcaaagattactgagaagaaggaccaagatgtgaaggagctcttagattctgacagtgataaaccctgcaaggaagaaccaatggaagtagacgatgacatgaaaacagagtcacatgtaaattgtcaggagagttctcaagtagatgtggtcaatgttagtgagggttttcatctaaggactagttacaaaaagaaaacaaaatcatccaaactagatggacttcttgaaaggagaattaaacagtttacactggaagaaaaacagcgactcgaaaaaatcaagttggagggtggaattaagggtataggaaagacttctacaaattcttcaaaaaatctctctgaatcaccagtaataacgaaagcaaaagaagggtgtcagagtgactcgatgagacaagaacagagcccaaatgcaaataatgatcaacctgaggacttgattcagggatgttcagaaagtgattcctcagttcttagaatgagtgatcctagtcataccacaaacaaactttatccaaaagatcgagtgttagatgatgtctccattcggagcccagaaacaaaatgtccgaaacaaaattccattgaaaatgacatagaagaaaaagtctctgaccttgccagtagaggccaggaacccagtaagagtaaaacaaaaggaaatgattttttcatcgatgactctaaactagccagtgcagatgatattggtactttgatctgtaagaacaaaaaaccgctcatacaggaggaaagtgacaccattgtttcttcttccaagagtgctttacattcatcagtgcctaaaagtaccaatgacagagatgccacacctctgtcaagagcaatggactttgaaggaaaactgggatgtgactctgaatctaatagcactttggaaaatagttctgataccgtgtctattcaggatagcagtgaagaagatatgattgttcagaatagcaatgaaagcatttctgaacagttcagaactcgagaacaagatgttgaagtcttggagccgttaaagtgtgagttggtttctggtgagtccactggaaactgtgaggacaggctgccggtcaaggggactgaagcaaatggtaaaaaaccaagtcagcagaagaaattagaggagagaccagttaataaatgtagtgatcaaataaagctaaaaaataccactgacaaaaagaataatgaaaatcgagagtctgaaaagaaaggacagagaacaagtacatttcaaataaatggaaaagataataaacccaaaatatatttgaaaggtgaatgcttgaaagaaatttctgagagtagagtagtaagtggtaatgttgaaccaaaggttaataatataaataaaataatccctgagaatgatattaaatcattgactgttaaagaatctgctataaggccattcattaatggtgatgtcatcatggaagattttaatgaaagaaacagctccgaaacaaaatcgcatttgctgagttcttcagatgctgaaggtaactaccgagatagccttgagaccctgccatcaaccaaagagtctgacagtacacagacgaccacaccctcagcatcttgtccagaaagcaattcagttaatcaggtagaagatatggaaatagaaacctcagaagttaagaaagttacttcatcacctattacttctgaagaggaatctaatctcagtaatgactttattgatgaaaatggtctgcccatcaacaaaaatgaaaatgtcaatggagaatctaaaagaaaaaccgtcatcacagaagtcaccacgatgacctccacagtggccacagaatcaaaaactgtgatcaaggtagaaaaaggcgataagcaaactgtggtttcttccacagaaaattgtgcaaaatccactgtcacaaccaccactacaacagtgaccaagctttccacaccctccacaggcggcagtgtggacatcatctctgtaaaggagcagagcaaaaccgtggtcaccacgacagtgacagactccctgaccaccacgggaggcacactggttacatctatgactgtgagcaaagagtattccacacgagacaaagtgaaactgatgaaattttcaagaccaaagaagactcgttcaggtacagctctgccatcctatagaaaatttgttaccaagagcagcaagaagagcatttttgttttgcctaatgatgacttaaaaaagttggcccgaaaaggaggaatccgagaggtcccttattttaattacaatgcaaaacctgctttggatatatggccatatccttctcctagaccgacctttggcatcacttggaggtatagacttcagacagtaaagtccttagctggagtgagcctgatgttacggttactgtgggcaagtttgagatgggatgatatggcggccaaggctcctccaggaggagggactacacggacagaaacatccgaaactgaaatcacaacaacagaaataattaagaggagagatgttggtccttatggcattcgatctgaatattgtatcaggaaaatcatttgtcccattggagttccagaaacaccaaaagaaacgcctacacctcagaggaaaggccttcgatcaagtgcactgcggccaaagagaccagaaacgcccaagcaaactggccctgttattattgaaacctgggtagcagaagaagaactggaattgtgggagatcagggcatttgctgagagagtggagaaagaaaaggcacaagcagttgagcaacaggctaagaaacgactggagcagcagaagccgacagtgattgcaacttccactacttccccaacaagcagtacaaccagcaccatctctccagcacagaaggttatggtggcccccataagtggctcagttacaactggaaccaaaatggtactaactactaaagttggatctccagctacagtaacattccaacaaaacaagaactttcatcaaacctttgctacatgggttaagcaaggccagtcaaattcaggcgttgttcaagtacagcagaaagtcctgggtatcattccatcaagtacaggtaccagtcagcaaacctttacttcattccagcccaggacagcaacagtcacaattaggcccaatacctcaggctctggaggaaccacaagcaattcacaagtaatcacagggcctcagattcgccctggtatgaccgtgattagaacaccactccaacagtcaacactaggaaaggcaattattcgaacacctgtgatggtacagccaggtgctcctcagcaagtgatgactcaaatcatcagggggcagcctgtctccactgcagtctccgcccctaacacggtttcctcaacacctgggcagaaaagcttaacttcagcaacgtccacttcaaatatacagtcttcagcctcacaaccccctcgcccccaacaaggacaagtgaagctcaccatggctcaacttactcagttaacacagggccacggtggcaatcaaggtttgacagtagtaattcaaggacaaggtcaaactactggacagttgcagttgatacctcaaggggtgactgtactcccaggcccaggccagcagctaatgcaagctgcaatgccaaatggtactgttcagcgattcctctttaccccattggcaacaacagccaccacagccagcaccaccaccaccactgtttccacgacagcagcaggtacaggtgaacaaaggcagagtaaactgtcaccccagatgcaggtacatcaagacaaaaccctgccaccagctcagtcatcaagtgtgggtccagcagaagcccagccacagactgctcagccttcagctcagccccagccccaaacccagccccagtccccagctcagcctgaagttcagactcagcctgaagttcagacccaaacaactgtttcatcccatgtcccttctgaagcacaacccacccacgcacagtcatccaagccccaagttgcagcacagtctcagcctcaaagtaatgtccaaggacagtctcctgttcgtgtccaaagtccatcacagactcgaatacgtccatcaactccatcccaactgtctcctggacaacaatcccaggttcagactacaacctcacaaccgattccaattcaaccacatacatctcttcagataccttcccaaggccagccacagtcacaaccccaggtggtgatgaagcataatgctgtaatagaacatttaaaacagaaaaagagcatgactccagctgaaagagaagagaatcaaagaatgattgtctgtaaccaggtgatgaagtatattttggataagatagataaagaagaaaaacaggcagcaaaaaaacggaagcgtgaagagagtgtggagcagaaacgtagcaagcagaatgccactaagctgtcagctctgctcttcaagcacaaagagcagctcagagccgagatcctgaagaagagagcactcctggacaaggatctgcaaattgaagtgcaggaagagctgaagagagacctgaaaattaagaaagaaaaagacctgatgcagttggctcaggccacagcagtagctgcaccctgccccccagtgacaccagctcctccagcccctccagcccctccaccttcacctccccctccacctgctgtgcaacacacaggccttctgtccacgcccaccttacctgctgcttcccagaagaggaagcgggaagaggaaaaagactccagctcaaagtccaagaaaaagaaaatgatctctactacctcaaaggaaactaagaaggacacaaagctttactgtatctgtaaaacgccttatgatgaatctaaattttatattggctgtgatcggtgtcagaattggtaccatgggcgctgcgttggcatcttgcaaagtgaggcagagctcattgatgagtatgtctgtccacagtgccagtcaacagaggatgccatgacagtgctcacgccactaacagagaaggattatgaggggttgaagagggtgctccgttccttacaggcccataagatggcctggcctttccttgaaccagtagaccctaatgatgcaccagattattatggtgttattaaggaacctatggaccttgccaccatggaagaaagagtacaaagacgatattatgaaaagctgacggaatttgtggcagatatgaccaaaatttttgataactgtcgttactacaatccaagtgactccccattttaccagtgtgcagaagttctcgaatcattctttgtacagaaattgaaaggcttcaaagctagcaggtctcataacaacaaactgcagtctacagcttcttaa

SEQ ID NO: 112332 - DNA, 7573 bp, Homo sapiens
  Payload ID: 1987
  Gene Symbol: BPTF
  Gene Name: bromodomain PHD finger transcription factor
  ENST ID: ENST00000544778
  CDS Start-End: 202-7573
aaacaagatggcggctgaaggcgatccggagtggggccccagcaattcggattgagccttctccctccacccgcttccgtcggccgggcccctcccgcccggccccgcgggcctccccacccggccccggcgctccccaccgccccccctgcgcccgcccctcccccttcgctttccttctccccccgcctcggctccgacatgaggggccggcggggcaggccgcccaagcagcccgcggctcccgctgcggagcgctgcgccccggccccgccgccaccgccgccgccgcccacgtccggacccatcggggggctccgctcgcggcaccgcggcagcagccggggcaggtgggccgccgcccaggctgaggtggcgcccaagacgcggctgagctcgcccagggggggcagcagtagccggaggaagccgccgccgccgccgccggccccccccagcaccagcgccccgggccggggggggcgaggaggcgggggcggcaggacggggggcgggggcggcggcggccacctggcccggaccaccgcggcccggagggccgtcaacaaagtggtgtacgatgaccacgagagcgaggaggaggaggaagaggaggacatggtctccgaggaggaggaggaggaggacggcgacgccgaggagacccaggattctgaggacgacgaggaggatgagatggaagaggacgacgatgactccgattatccggaggagatggaagacgacgacgacgacgccagttactgcacggaaagcagcttcaggagccatagtacctacagcagcactccaggtaggcgaaaaccaagagtacatcggcctcgttctcctatattggaagaaaaagacatcccgccccttgaatttcccaagtcctctgaggatttaatggtgcctaatgagcatataatgaatgtcattgccatttacgaggtactgcggaactttggcactgttttgagattatctccttttcgctttgaggacttttgtgcagctctggtgagccaagagcagtgcacactcatggcagagatgcatgttgtgcttttgaaagcagttctgcgtgaagaagacacttccaatactacctttggacctgctgatctgaaagatagcgttaattccacactgtatttcatagatgggatgacgtggccagaggtgctgcgggtgtactgtgagagtgataaggagtaccatcacgttcttccttaccaagaggcagaggactacccatatggaccagtagagaacaagatcaaagttctacagtttctagtcgatcagtttcttacaacaaatattgctcgagaggaattgatgtctgaaggggtgatacagtatgatgaccattgtagggtttgtcacaaacttggggatttgctttgctgtgagacatgttcagcagtataccatttggaatgtgtgaagccacctcttgaggaggtgccagaggacgagtggcagtgtgaagtctgtgtagcacacaaggtgcctggtgtgactgactgtgttgctgaaatccaaaaaaataaaccatatattcgacatgaacctattggatatgatagaagtcggaggaaatactggttcttgaaccgaagactcataatagaagaagatacagaaaatgaaaatgaaaagaaaatttggtattacagcacaaaggtccaacttgcagaattaattgactgtctagacaaagattattgggaagcagaactctgcaaaattctagaagaaatgcgtgaagaaatccaccgacacatggacataactgaagacctgaccaataaggctcggggcagtaacaaatcctttctggcggcagctaatgaagaaattttggaatccataagagccaaaaagggagacattgataatgttaaaagcccagaagaaacagaaaaagacaagaatgagactgagaatgactctaaagatgctgagaaaaacagagaagaatttgaagaccagtcccttgaaaaagacagtgacgacaaaacaccagatgatgaccctgagcaaggaaaatctgaggagccaacagaagttggggataaaggtaactctgtgtcagcaaatcttggcgacaacacaacaaatgcaacttcagaagagactagtccctctgaagggaggagccctgtggggtgtctctcagaaacccccgatagcagcaacatggcagagaagaaggtggcatctgagctcccccaggatgtgccagtaggtgatttcaaatcggagaagtccaacggggagctaagtgaatctcctggagctggaaaaggagcatctggctcaactcgaatcatcaccagattgcggaatccagatagcaaacttagtcagctgaagagccagcaggtggcagccgctgcacatgaagcaaataaattatttaaggagggcaaagaggtactggtagttaactctcaaggagaaatttcacggttgagcaccaaaaaggaagtgatcatgaaaggaaatatcaacaattattttaaattgggtcaagaagggaagtatcgcgtctaccacaatcaatactccaccaattcatttgctttgaataagcaccagcacagagaagaccatgataagagaaggcatcttgcacataagttctgtctgactccagcaggagagttcaaatggaacggttctgtccatgggtccaaagttcttaccatatctactctgagactgactatcacccaattagaaaacaacatcccttcatcctttcttcatcccaactgggcatcacatagggcaaattggatcaaggcagttcagatgtgtagcaaacccagagaatttgcattggctttagccattttggagtgtgcagttaaaccagttgtgatgctaccaatatggcgagaatctttaggacataccaggttacaccggatgacatcaattgaaagagaagaaaaggagaaagtcaaaaaaaaagagaagaaacaggaagaagaagaaacgatgcagcaagcgacatgggtaaaatacacatttccagttaagcatcaggtttggaaacaaaaaggtgaagagtacagagtgacaggatatggtggttggagctggattagtaaaactcatgtttataggtttgttcctaaattgccaggcaatactaatgtgaattacagaaagtcgttagaaggaaccaaaaataatatggatgaaaatatggatgagtcagataaaagaaaatgttcacgaagtccaaaaaaaataaaaatagagcctgattctgaaaaagatgaggtaaaaggttcagatgctgcaaaaggagcagaccaaaatgaaatggatatctcaaagattactgagaagaaggaccaagatgtgaaggagctcttagattctgacagtgataaaccctgcaaggaagaaccaatggaagtagacgatgacatgaaaacagagtcacatgtaaattgtcaggagagttctcaagtagatgtggtcaatgttagtgagggttttcatctaaggactagttacaaaaagaaaacaaaatcatccaaactagatggacttcttgaaaggagaattaaacagtttacactggaagaaaaacagcgactcgaaaaaatcaagttggagggtggaattaagggtataggaaagacttctacaaattcttcaaaaaatctctctgaatcaccagtaataacgaaagcaaaagaagggtgtcagagtgactcgatgagacaagaacagagcccaaatgcaaataatgatcaacctgaggacttgattcagggatgttcagaaagtgattcctcagttcttagaatgagtgatcctagtcataccacaaacaaactttatccaaaagatcgagtgttagatgatgtctccattcggagcccagaaacaaaatgtccgaaacaaaattccattgaaaatgacatagaagaaaaagtctctgaccttgccagtagaggccaggaacccagtaagagtaaaacaaaaggaaatgattttttcatcgatgactctaaactagccagtgcagatgatattggtactttgatctgtaagaacaaaaaaccgctcatacaggaggaaagtgacaccattgtttcttcttccaagagtgctttacattcatcagtgcctaaaagtaccaatgacagagatgccacacctctgtcaagagcaatggactttgaaggaaaactgggatgtgactctgaatctaatagcactttggaaaatagttctgataccgtgtctattcaggatagcagtgaagaagatatgattgttcagaatagcaatgaaagcatttctgaacagttcagaactcgagaacaagatgttgaagtcttggagccgttaaagtgtgagttggtttctggtgagtccactggaaactgtgaggacaggctgccggtcaaggggactgaagcaaatggtaaaaaaccaagtcagcagaagaaattagaggagagaccagttaataaatgtagtgatcaaataaagctaaaaaataccactgacaaaaagaataatgaaaatcgagagtctgaaaagaaaggacagagaacaagtacatttcaaataaatggaaaagataataaacccaaaatatatttgaaaggtgaatgcttgaaagaaatttctgagagtagagtagtaagtggtaatgttgaaccaaaggttaataatataaataaaataatccctgagaatgatattaaatcattgactgttaaagaatctgctataaggccattcattaatggtgatgtcatcatggaagattttaatgaaagaaacagctccgaaacaaaatcgcatttgctgagttcttcagatgctgaaggtaactaccgagatagccttgagaccctgccatcaaccaaagagtctgacagtacacagacgaccacaccctcagcatcttgtccagaaagcaattcagttaatcaggtagaagatatggaaatagaaacctcagaagttaagaaagttacttcatcacctattacttctgaagaggaatctaatctcagtaatgactttattgatgaaaatggtctgcccatcaacaaaaatgaaaatgtcaatggagaatctaaaagaaaaaccgtcatcacagaagtcaccacgatgacctccacagtggccacagaatcaaaaactgtgatcaaggtagaaaaaggcgataagcaaactgtggtttcttccacagaaaattgtgcaaaatccactgtcacaaccaccactacaacagtgaccaagctttccacaccctccacaggcggcagtgtggacatcatctctgtaaaggagcagagcaaaaccgtggtcaccacgacagtgacagactccctgaccaccacgggaggcacactggttacatctatgactgtgagcaaagagtattccacacgagacaaagtgaaactgatgaaattttcaagaccaaagaagactcgttcaggtacagctctgccatcctatagaaaatttgttaccaagagcagcaagaagagcatttttgttttgcctaatgatgacttaaaaaagttggcccgaaaaggaggaatccgagaggtcccttattttaattacaatgcaaaacctgctttggatatatggccatatccttctcctagaccgacctttggcatcacttggaggtatagacttcagacagtaaagtccttagctggagtgagcctgatgttacggttactgtgggcaagtttgagatgggatgatatggcggccaaggctcctccaggaggagggactacacggacagaaacatccgaaactgaaatcacaacaacagaaataattaagaggagagatgttggtccttatggcattcgatctgaatattgtatcaggaaaatcatttgtcccattggagttccagaaacaccaaaagaaacgcctacacctcagaggaaaggccttcgatcaagtgcactgcggccaaagagaccagaaacgcccaagcaaactggccctgttattattgaaacctgggtagcagaagaagaactggaattgtgggagatcagggcatttgctgagagagtggagaaagaaaaggcacaagcagttgagcaacaggctaagaaacgactggagcagcagaagccgacagtgattgcaacttccactacttccccaacaagcagtacaaccagcaccatctctccagcacagaaggttatggtggcccccataagtggctcagttacaactggaaccaaaatggtactaactactaaagttggatctccagctacagtaacattccaacaaaacaagaactttcatcaaacctttgctacatgggttaagcaaggccagtcaaattcaggcgttgttcaagtacagcagaaagtcctgggtatcattccatcaagtacaggtaccagtcagcaaacctttacttcattccagcccaggacagcaacagtcacaattaggcccaatacctcaggctctggaggaaccacaagcaattcacaagtaatcacagggcctcagattcgccctggtatgaccgtgattagaacaccactccaacagtcaacactaggaaaggcaattattcgaacacctgtgatggtacagccaggtgctcctcagcaagtgatgactcaaatcatcagggggcagcctgtctccactgcagtctccgcccctaacacggtttcctcaacacctgggcagaaaagcttaacttcagcaacgtccacttcaaatatacagtcttcagcctcacaaccccctcgcccccaacaaggacaagtgaagctcaccatggctcaacttactcagttaacacagggccacggtggcaatcaaggtttgacagtagtaattcaaggacaaggtcaaactactggacagttgcagttgatacctcaaggggtgactgtactcccaggcccaggccagcagctaatgcaagctgcaatgccaaatggtactgttcagcgattcctctttaccccattggcaacaacagccaccacagccagcaccaccaccaccactgtttccacgacagcagcaggtacaggtgaacaaaggcagagtaaactgtcaccccagatgcaggtacatcaagacaaaaccctgccaccagctcagtcatcaagtgtgggtccagcagaagcccagccacagactgctcagccttcagctcagccccagccccaaacccagccccagtccccagctcagcctgaagttcagactcagcctgaagttcagacccaaacaactgtttcatcccatgtcccttctgaagcacaacccacccacgcacagtcatccaagccccaagttgcagcacagtctcagcctcaaagtaatgtccaaggacagtctcctgttcgtgtccaaagtccatcacagactcgaatacgtccatcaactccatcccaactgtctcctggacaacaatcccaggttcagactacaacctcacaaccgattccaattcaaccacatacatctcttcagataccttcccaaggccagccacagtcacaac

SEQ ID NO: 112333 - DNA, 409 bp, Homo sapiens
  Payload ID: 1987
  Gene Symbol: BPTF
  Gene Name: bromodomain PHD finger transcription factor
  ENST ID: ENST00000544491
  CDS Start-End: 1-409
agatgctgagaaaaacagagaagaatttgaagaccagtcccttgaaaaagacagtgacgacaaaacaccagatgatgaccctgagcaaggaaaatctgaggaagaacctaacaagacatgtgagagcagtaacactagtgctaccactacctccatccagcctaatctggaaaacagtaacagcagcagtgaactaaattcttcccagagtgaatctgctaaggcagctgatgatcctgaaaatggagaaagagaatctcatacacctgtctctattcaggaagagatagtaggtgatttcaaatcggagaagtccaacggggagctaagtgaatctcctggagctggaaaaggagcatctggctcaactcgaatcatcaccagattgcggaatccagatagcaaactt

SEQ ID NO: 112334 - DNA, 1951 bp, Homo sapiens
  Payload ID: 1987
  Gene Symbol: BPTF
  Gene Name: bromodomain PHD finger transcription factor
  ENST ID: ENST00000580465
  CDS Start-End: 1-1453
aaatatacagtcttcagcctcacaaccccctcgcccccaacaaggacaagtgaagctcaccatggctcaacttactcagttaacacagggccacggtggcaatcaaggtttgacagtagtaattcaaggacaaggtcaaactactggacagttgcagttgatacctcaaggggtgactgtactcccaggcccaggccagcagctaatgcaagctgcaatgccaaatggtactgttcagcgattcctctttaccccattggcaacaacagccaccacagccagcaccaccaccaccactgtttccacgacagcagcaggtacaggtgaacaaaggcagagtaaactgtcaccccagatgcaggtacatcaagacaaaaccctgccaccagctcagtcatcaagtgtgggtccagcagaagcccagccacagactgctcagccttcagctcagccccagccccaaacccagccccagtccccagctcagcctgaagttcagactcagcctgaagttcagacccaaacaactgtttcatcccatgtcccttctgaagcacaacccacccacgcacagtcatccaagccccaagttgcagcacagtctcagcctcaaagtaatgtccaaggacagtctcctgttcgtgtccaaagtccatcacagactcgaatacgtccatcaactccatcccaactgtctcctggacaacaatcccaggttcagactacaacctcacaaccgattccaattcaaccacatacatctcttcagataccttcccaaggccagccacagtcacaaccccaggtggtgatgaagcataatgctgtaatagaacatttaaaacagaaaaagagcatgactccagctgaaagagaagagaatcaaagaatgattgtctgtaaccaggtgatgaagtatattttggataagatagataaagaagaaaaacaggcagcaaaaaaacggaagcgtgaagagagtgtggagcagaaacgtagcaagcagaatgccactaagctgtcagctctgctcttcaagcacaaagagcagctcagagccgagatcctgaagaagagagcactcctggacaaggatctgcaaattgaagtgcaggaagagctgaagagagacctgaaaattaagaaagaaaaagacctgatgcagttggctcaggccacagcagtagctgcaccctgccccccagtgacaccagctcctccagcccctccagcccctccaccttcacctccccctccacctgctgtgcaacacacaggccttctgtccacgcccaccttacctgctgcttcccagaagaggaagcgggaagaggaaaaagactccagctcaaagtccaagaaaaagaaaatgatctctactacctcaaaggaaactaagaaggacacaaagctttactgtatctgtaaaacgccttatgatgaatctaagtgagtagatctttttgagctctagttttttgtcttgaaagtttagctattaaattggattttgaagaaaatgaatattttgggagtgatataaatgaaaatattaaatttaagagtaatgtttcatccatggtcttgcatgtgatattcttaccattgacgctagtaaagtaaaatttgctatttcacgtgtttgtgattgtcctttgttatattcttttctgtcaaaaacaagctttctgttgctcctttgctttctcttcttccctctgaattaactccaaatcagtgagtaattgatgtctggagaaggaggtgtattactgttgcccaaaatggagagcatcctttctgggatctgttcaaagccctgcgaatacatgaaatcctggaaaccagttgaacatgaatggtcagaggttttgaatttgagtggttcggtttcttaattgttttattttaagcagttgtttttttttgtattaaaatactgcaactcata

SEQ ID NO: 112335 - DNA, 594 bp, Homo sapiens
  Payload ID: 1987
  Gene Symbol: BPTF
  Gene Name: bromodomain PHD finger transcription factor
  ENST ID: ENST00000577837
  CDS Start-End: 1-194
gacgatattatgaaaagctgacggaatttgtggcagatatgaccaaaatttttgataactgtcgttactacaatccaagtgactccccattttaccagtgtgcagaagttctcgaatcattctttgtacagaaattgaaaggcttcaaagctagcagggtgaatgaaagaacatggctgcttctcccagactgactgaccttggcatccgcataaagcatcattgttttcaaaaatgaagggtgcttaattgttcccttttttctatattctgtaggtctcataacaacaaactgcagtctacagcttcttaaagttcagcgtgttaacctaacataaaacacagcaagaatctggttgtctgaactattttaaattaaggagccagatgtttttagtcaggctatcctgacaagacttgacctaaacttcgtttttattggtcataacagtccaattatattcttggccaattttgtccaacggacaagaaaaaagcaaagtcaacgacaccattatcttgtcaagatcagatggttttactattgtggcagaagcgagaaaactttgtttattgaaaaaaaaagaaaaagaa

SEQ ID NO: 112336 - DNA, 464 bp, Homo sapiens
  Payload ID: 1987
  Gene Symbol: BPTF
  Gene Name: bromodomain PHD finger transcription factor
  ENST ID: ENST00000583990
  CDS Start-End: 1-208
gctcacgccactaacagagaaggattatgaggggttgaagagggtgctccgttccttacaggcccataagatggcctggcctttccttgaaccagtagaccctaatgatgcaccagattattatggtgttattaaggaacctatgggtctcataacaacaaactgcagtctacagcttcttaaagttcagcgtgttaacctaacataaaacacagcaagaatctggttgtctgaactattttaaattaaggagccagatgtttttagtcaggctatcctgacaagacttgacctaaacttcgtttttattggtcataacagtccaattatattcttggccaattttgtccaacggacaagaaaaaagcaaagtcaacgacaccattatcttgtcaagatcagatggttttactattgtggcagaagcgagaaaactttgtttattgaaaaaaaaagaaaaagaa

SEQ ID NO: 112337 - DNA, 1015 bp, Homo sapiens
  Payload ID: 1987
  Gene Symbol: BPTF
  Gene Name: bromodomain PHD finger transcription factor
  ENST ID: ENST00000582467
  CDS Start-End: 1-1015
caggaaaatcatttgtcccattggagttccagaaacaccaaaagaaacgcctacacctcagaggaaaggccttcgatcaagtgcactgcggccaaagagaccagaaacgcccaagcaaactggccctgttattattgaaacctgggtagcagaagaagaactggaattgtgggagatcagggcatttgctgagagagtggagaaagaaaaggcacaagcagttgagcaacaggctaagaaacgactggagcagcagaagccgacagtgattgcaacttccactacttccccaacaagcagtacaaccagcaccatctctccagcacagaaggttatggtggcccccataagtggctcagttacaactggaaccaaaatggtactaactactaaagttggatctccagctacagtaacattccaacaaaacaagaactttcatcaaacctttgctacatgggttaagcaaggccagtcaaattcagccaccagcacagctgccacatctgctacaaccattgccagcacaggtcagacgttccaaattacaggcaatccagtcactatggcaggaaaagtaattaccaaactgccacttcctgcaaacagcaagattgtcgctgtaaatgtgccagcaacacaaggaggcgttgttcaagtacagcagaaagtcctgggtatcattccatcaagtacaggtaccagtcagcaaacctttacttcattccagcccaggacagcaacagtcacaattaggcccaatacctcaggctctggaggaaccacaagcaattcacaagtaatcacagggcctcagattcgccctggtatgaccgtgattagaacaccactccaacagtcaacactaggaaaggcaattattcgaacacctgtgatggtacagccaggtgctcctcagcaagtgatgactcaaatcatcagggggcagcctgtctccactgcagtctccgcccctaacacggtttcctcaacacctgggcagaaaagcttaact

SEQ ID NO: 112338 - DNA, 1582 bp, Homo sapiens
  Payload ID: 1987
  Gene Symbol: BPTF
  Gene Name: bromodomain PHD finger transcription factor
  ENST ID: ENST00000581258
  CDS Start-End: 1-1262
aacatttaaaacagaaaaagagcatgactccagctgaaagagaagagaatcaaagaatgattgtctgtaaccaggtgatgaagtatattttggataagatagataaagaagaaaaacaggcagcaaaaaaacggaagcgtgaagagagtgtggagcagaaacgtagcaagcagaatgccactaagctgtcagctctgctcttcaagcacaaagagcagctcagagccgagatcctgaagaagagagcactcctggacaaggatctgcaaattgaagtgcaggaagagctgaagagagacctgaaaattaagaaagaaaaagacctgatgcagttggctcaggccacagcagtagctgcaccctgccccccagtgacaccagctcctccagcccctccagcccctccaccttcacctccccctccacctgctgtgcaacacacaggccttctgtccacgcccaccttacctgctgcttcccagaagaggaagcgggaagaggaaaaagactccagctcaaagtccaagaaaaagaaaatgatctctactacctcaaaggaaactaagaaggacacaaagctttactgtatctgtaaaacgccttatgatgaatctaagttctatattggctgtgatctttgtactaactggtatcatggagaatgtgttggcatcacagaaaaggaggctaagaaaatggatgtgtacatctgtaatgattgtaaacgggcacaagagggcagcagtgaggaattgtactgtatctgcagaacaccttatgatgagtcacaattttatattggctgtgatcggtgtcagaattggtaccatgggcgctgcgttggcatcttgcaaagtgaggcagagctcattgatgagtatgtctgtccacagtgccagtcaacagaggatgccatgacagtgctcacgccactaacagagaaggattatgaggggttgaagagggtgctccgttccttacaggcccataagatggcctggcctttccttgaaccagtagaccctaatgatgcaccagattattatggtgttattaaggaacctatggaccttgccaccatggaagaaagagtacaaagacgatattatgaaaagctgacggaatttgtggcagatatgaccaaaatttttgataactgtcgttactacaatccaagtgactccccattttaccagtgtgcagaagttctcgaatcattctttgtacagaaattgaaaggcttcaaagctagcagattgtgatatctttagtctgaatttttaactggaatcagaactggatgttggggtcactctttgttttattgtacctcgtgattacctaattcaaaattgccccccaaaaagtcagattagttaatataattttttaatgttaaagatgtatcgtggtaaaaaatttactctagcagccatgttgaacaatgtatttaaaaattgtaaactcttggaatactgtatttatctgctatttcaatataaagtcctttgacttagtcctggtaactgtacagtaatttggtttactaatgaaagttgtgaataaaactgtgaaactagaa

SEQ ID NO: 112339 - DNA, 3409 bp, Homo sapiens
  Payload ID: 1988
  Gene Symbol: BRDT
  Gene Name: bromodomain, testis-specific
  Uniprot ID: Q58F21
  ENST ID: ENST00000362005
  CDS Start-End: 419-3262
tataaaagcgcctgtcgcgcgaccgccattacaacaaaaactggcggcgaggaactgcggagaactgttgccctgcaccgcttcattttgtgcagcctgaaaggggcaatcacataaggtcggttttgtaatatacaggtaacatacaggtaatgtaccctccacagggggtgctgccttaggccggccccgaggtgcggccttgggtgggaacaaccgttttttcccccctctcccctccccgaccccatcaacatcgtgcgacagtccgggcagttgagaaggccaccccgcttcgtgcctgcagcccagttcctcttaggtcttggactggtgtggatcgctgctgcctgtactgtaattttggaaatgcaggagaaagacatgtacttgtagacaggattcaaagcagttaagaatgtctctgccaagtcgacaaacagctattattgttaaccctcctccaccagaatatataaatactaagaaaaatgggcgattgacaaatcaacttcagtatctacaaaaagttgtcctaaaggatttatggaagcatagtttttcatggccctttcaacgtcctgtggatgctgtgaaactacagttgcctgattattataccattataaaaaacccaatggatttaaatacaattaagaagcgcttggagaataaatattatgcgaaggcttcagaatgtatagaagacttcaatacaatgttctcaaattgttatttatataacaagcctggagatgacattgttcttatggcacaagctctagagaagctgtttatgcagaaattatctcagatgccacaagaagagcaagttgtgggtgttaaggaaagaatcaagaaaggcactcaacagaatatagctgtttcttctgctaaagaaaaatcatcacccagcgcaacagaaaaagtatttaagcagcaagaaattccttctgtatttcctaagacatctatttctcccttgaacgtggtacagggagcttcagtcaactccagttcacaaactgcggcccaagttacaaaaggtgtgaagaggaaagcagatacaacaactcctgcaacttcagcagttaaagcaagtagtgaattttctccaacattcacagaaaaatcagtggcactgccacctataaaagaaaatatgccaaagaatgttttgccagattctcagcaacaatataatgttgtgaagactgttaaagtaactgaacaattaaggcactgtagtgagattcttaaagaaatgcttgcaaagaaacatttttcatatgcatggcccttttataatcctgttgacgttaatgctttgggactccataactactatgacgttgtcaaaaatccgatggatcttggaactattaaggagaaaatggataaccaagaatataaggatgcatacaaatttgcggcagatgttagattaatgttcatgaattgctacaagtacaatcctccagatcacgaagttgtgacaatggcaagaatgcttcaggatgttttcgaaacgcatttttcaaagatcccgattgaacctgttgagagtatgcctttatgttacatcaaaacagatatcacagaaaccactggtagagagaacactaatgaagcctcctctgaagggaactcttctgatgattctgaagatgagcgagttaagcgtcttgcaaagcttcaggagcagcttaaagctgtacatcaacagctccaggttttgtcccaagtacctttccgtaagctaaataaaaagaaagagaagtctaaaaaggaaaagaaaaaagaaaaggttaataacagcaatgaaaatccaagaaaaatgtgtgagcaaatgaggctaaaggaaaagtccaagagaaatcagccaaagaaaaggaaacaacagttcattggtctaaaatctgaagatgaagataatgctaaacctatgaactatgatgagaaaaggcagttaagtctgaatataaacaaactccctggagataaacttgggcgagtagttcacataatacaatcaagagagccttctctgagcaattccaatcctgatgagatagagatagactttgaaacactgaaagcatcaacactaagagaattagaaaaatatgtttcggcatgtctaagaaagagaccattaaaacctcctgctaagaaaataatgatgtccaaagaagaacttcactcacagaaaaaacaggaattggaaaagcggttactggatgttaataatcagttaaattctagaaaacgtcaaacaaaatctgataaaacgcaaccatccaaagctgttgaaaatgtttcccgactgagtgagagcagcagcagcagcagcagctcatcagagtctgaaagtagcagcagtgacttaagctcttcagacagcagtgattctgaatcagaaatgttccctaagtttacagaagtaaaaccaaatgattctccttctaaagagaatgtaaagaaaatgaagaatgaatgcataccgcctgaaggaagaacaggcgtcacacagataggatattgtgtgcaagacacaacctctgccaatactacccttgttcatcagaccacaccttcacatgtaatgccaccaaatcaccaccaattagcatttaattatcaagaattagaacatttacagactgtgaaaaacatttcacctttacaaattctgcctccctcaggtgattctgaacagctctcaaatggcataactgtgatgcatccatctggtgatagtgacacaacgatgttagaatctgaatgtcaagctcctgtacagaaggatataaagattaagaatgcagattcatggaaaagtttaggcaaaccagtgaaaccatcaggtgtaatgaaatcctcagatgagctcttcaaccaatttagaaaagcagccatagaaaaggaagtaaaagctcggacacaggaactcatacggaagcatttggaacaaaatacaaaggaactaaaagcatctcaagaaaatcagagggatcttgggaatggattgactgtagaatctttttcaaataaaatacaaaacaagtgctctggagaagagcagaaagaacatcagcagtcatcagaagctcaagataaatccaaactctggcttctcaaagaccgtgatttagcaaggcagaaagaacaagagaggaggaggagagaagcaatggtgggtaccattgatatgacccttcaaagtgacattatgacaatgtttgaaaacaactttgattaaaactcagtttttaaattaaccatcaacttaaaatgaatggtaaaagatcaaaatgcatatggtaaaatgattgctttcagataacaagataccaatcttatattgtattttgactgctctaaaatgattaaacagttttcacttaca

SEQ ID NO: 112340 - DNA, 3696 bp, Homo sapiens
  Payload ID: 1988
  Gene Symbol: BRDT
  Gene Name: bromodomain, testis-specific
  Uniprot ID: Q58F21
  ENST ID: ENST00000370389
  CDS Start-End: 925-3549
tataaaagcgcctgtcgcgcgaccgccattacaacaaaaactggcggcgaggaactgcggagaactgttgccctgcaccgcttcattttgtgcagcctgaaaggggcaatcacataaggtcggttttgtaatatacaggtaacatacaggtaatgtaccctccacagggggtgctgccttaggccggccccgaggtgcggccttgggtgggaacaaccgttttttcccccctctcccctccccgaccccatcaacatcgtgcgacagtccgggcagttgagaaggccaccccgcttcgtgcctgcagcccagttcctcttaggtcttggactggtgtggatcgctgctgcctgtactgtaattttggaaatgcaggagaaagtacggagcgtttagctttagctggcattttgtgtttattctgcaagtggtcatttgggacggggaagttcgggttcttgcttcatttatttattcaattaactttattaagcccctggaacgtctgaaccctcttttgggtactgcaggattgtggtgggctttacttcaaggcgcgctggcctgtattaagaattaagatagaggaggccgggtgcagtggctcgcccctgtaatctcagcactttcggaggccgaggcaagtggatcacctgaggtcaggagttcaagaccagcctggccaacataatgaaatgcccatctctaccaaaaatacaaaaattagctgggtgtgatggcaggcgcctgtagtcccagctactcgggaggctgaggcaggagaatcgcttgaacccaggaggcggaagttgcagtgcgccgagatcacgccagtgcactccagcctgggcgacagagtgagactccgtctccccgctccccccaaaaaagaaagaggattattataccattataaaaaacccaatggatttaaatacaattaagaagcgcttggagaataaatattatgcgaaggcttcagaatgtatagaagacttcaatacaatgttctcaaattgttatttatataacaagcctggagatgacattgttcttatggcacaagctctagagaagctgtttatgcagaaattatctcagatgccacaagaagagcaagttgtgggtgttaaggaaagaatcaagaaaggcactcaacagaatatagctgtttcttctgctaaagaaaaatcatcacccagcgcaacagaaaaagtatttaagcagcaagaaattccttctgtatttcctaagacatctatttctcccttgaacgtggtacagggagcttcagtcaactccagttcacaaactgcggcccaagttacaaaaggtgtgaagaggaaagcagatacaacaactcctgcaacttcagcagttaaagcaagtagtgaattttctccaacattcacagaaaaatcagtggcactgccacctataaaagaaaatatgccaaagaatgttttgccagattctcagcaacaatataatgttgtgaagactgttaaagtaactgaacaattaaggcactgtagtgagattcttaaagaaatgcttgcaaagaaacatttttcatatgcatggcccttttataatcctgttgacgttaatgctttgggactccataactactatgacgttgtcaaaaatccgatggatcttggaactattaaggagaaaatggataaccaagaatataaggatgcatacaaatttgcggcagatgttagattaatgttcatgaattgctacaagtacaatcctccagatcacgaagttgtgacaatggcaagaatgcttcaggatgttttcgaaacgcatttttcaaagatcccgattgaacctgttgagagtatgcctttatgttacatcaaaacagatatcacagaaaccactggtagagagaacactaatgaagcctcctctgaagggaactcttctgatgattctgaagatgagcgagttaagcgtcttgcaaagcttcaggagcagcttaaagctgtacatcaacagctccaggttttgtcccaagtacctttccgtaagctaaataaaaagaaagagaagtctaaaaaggaaaagaaaaaagaaaaggttaataacagcaatgaaaatccaagaaaaatgtgtgagcaaatgaggctaaaggaaaagtccaagagaaatcagccaaagaaaaggaaacaacagttcattggtctaaaatctgaagatgaagataatgctaaacctatgaactatgatgagaaaaggcagttaagtctgaatataaacaaactccctggagataaacttgggcgagtagttcacataatacaatcaagagagccttctctgagcaattccaatcctgatgagatagagatagactttgaaacactgaaagcatcaacactaagagaattagaaaaatatgtttcggcatgtctaagaaagagaccattaaaacctcctgctaagaaaataatgatgtccaaagaagaacttcactcacagaaaaaacaggaattggaaaagcggttactggatgttaataatcagttaaattctagaaaacgtcaaacaaaatctgataaaacgcaaccatccaaagctgttgaaaatgtttcccgactgagtgagagcagcagcagcagcagcagctcatcagagtctgaaagtagcagcagtgacttaagctcttcagacagcagtgattctgaatcagaaatgttccctaagtttacagaagtaaaaccaaatgattctccttctaaagagaatgtaaagaaaatgaagaatgaatgcataccgcctgaaggaagaacaggcgtcacacagataggatattgtgtgcaagacacaacctctgccaatactacccttgttcatcagaccacaccttcacatgtaatgccaccaaatcaccaccaattagcatttaattatcaagaattagaacatttacagactgtgaaaaacatttcacctttacaaattctgcctccctcaggtgattctgaacagctctcaaatggcataactgtgatgcatccatctggtgatagtgacacaacgatgttagaatctgaatgtcaagctcctgtacagaaggatataaagattaagaatgcagattcatggaaaagtttaggcaaaccagtgaaaccatcaggtgtaatgaaatcctcagatgagctcttcaaccaatttagaaaagcagccatagaaaaggaagtaaaagctcggacacaggaactcatacggaagcatttggaacaaaatacaaaggaactaaaagcatctcaagaaaatcagagggatcttgggaatggattgactgtagaatctttttcaaataaaatacaaaacaagtgctctggagaagagcagaaagaacatcagcagtcatcagaagctcaagataaatccaaactctggcttctcaaagaccgtgatttagcaaggcagaaagaacaagagaggaggaggagagaagcaatggtgggtaccattgatatgacccttcaaagtgacattatgacaatgtttgaaaacaactttgattaaaactcagtttttaaattaaccatcaacttaaaatgaatggtaaaagatcaaaatgcatatggtaaaatgattgctttcagataacaagataccaatcttatattgtattttgactgctctaaaatgattaaacagttttcacttaca

SEQ ID NO: 112341 - DNA, 3207 bp, Homo sapiens
  Payload ID: 1988
  Gene Symbol: BRDT
  Gene Name: bromodomain, testis-specific
  Uniprot ID: Q58F21
  ENST ID: ENST00000394530
  CDS Start-End: 350-3055
tataaaagcgcctgtcgcgcgaccgccattacaacaaaaactggcggcgaggaactgcggagaactgttgccctgcaccgcttcattttgtgcagcctgaaaggggcaatcacataaggtcggttttgtaatatacaggtaacatacaggtaatgtaccctccacagggggtgctgccttaggccggccccgaggtgcggccttgggtgggaacaaccgttttttcccccctctcccctccccgaccccatcaacatcgtgcgacagtccgggcagttgagaaggccaccccgcttcgtgcctgcagcccaggacatgtacttgtagacaggattcaaagcagttaagaatgtctctgccaagtcgacaaacagctattattgttaaccctcctccaccagaatatataaatactaagaaaaatgggcgattgacaaatcaacttcagtatctacaaaaagttgtcctaaaggatttatggaagcatagtttttcatggccctttcaacgtcctgtggatgctgtgaaactacagttgcctcctggagatgacattgttcttatggcacaagctctagagaagctgtttatgcagaaattatctcagatgccacaagaagagcaagttgtgggtgttaaggaaagaatcaagaaaggcactcaacagaatatagctgtttcttctgctaaagaaaaatcatcacccagcgcaacagaaaaagtatttaagcagcaagaaattccttctgtatttcctaagacatctatttctcccttgaacgtggtacagggagcttcagtcaactccagttcacaaactgcggcccaagttacaaaaggtgtgaagaggaaagcagatacaacaactcctgcaacttcagcagttaaagcaagtagtgaattttctccaacattcacagaaaaatcagtggcactgccacctataaaagaaaatatgccaaagaatgttttgccagattctcagcaacaatataatgttgtgaagactgttaaagtaactgaacaattaaggcactgtagtgagattcttaaagaaatgcttgcaaagaaacatttttcatatgcatggcccttttataatcctgttgacgttaatgctttgggactccataactactatgacgttgtcaaaaatccgatggatcttggaactattaaggagaaaatggataaccaagaatataaggatgcatacaaatttgcggcagatgttagattaatgttcatgaattgctacaagtacaatcctccagatcacgaagttgtgacaatggcaagaatgcttcaggatgttttcgaaacgcatttttcaaagatcccgattgaacctgttgagagtatgcctttatgttacatcaaaacagatatcacagaaaccactggtagagagaacactaatgaagcctcctctgaagggaactcttctgatgattctgaagatgagcgagttaagcgtcttgcaaagcttcaggagcagcttaaagctgtacatcaacagctccaggttttgtcccaagtacctttccgtaagctaaataaaaagaaagagaagtctaaaaaggaaaagaaaaaagaaaaggttaataacagcaatgaaaatccaagaaaaatgtgtgagcaaatgaggctaaaggaaaagtccaagagaaatcagccaaagaaaaggaaacaacagttcattggtctaaaatctgaagatgaagataatgctaaacctatgaactatgatgagaaaaggcagttaagtctgaatataaacaaactccctggagataaacttgggcgagtagttcacataatacaatcaagagagccttctctgagcaattccaatcctgatgagatagagatagactttgaaacactgaaagcatcaacactaagagaattagaaaaatatgtttcggcatgtctaagaaagagaccattaaaacctcctgctaagaaaataatgatgtccaaagaagaacttcactcacagaaaaaacaggaattggaaaagcggttactggatgttaataatcagttaaattctagaaaacgtcaaacaaaatctgataaaacgcaaccatccaaagctgttgaaaatgtttcccgactgagtgagagcagcagcagcagcagcagctcatcagagtctgaaagtagcagcagtgacttaagctcttcagacagcagtgattctgaatcagaaatgttccctaagtttacagaagtaaaaccaaatgattctccttctaaagagaatgtaaagaaaatgaagaatgaatgcataccgcctgaaggaagaacaggcgtcacacagataggatattgtgtgcaagacacaacctctgccaatactacccttgttcatcagaccacaccttcacatgtaatgccaccaaatcaccaccaattagcatttaattatcaagaattagaacatttacagactgtgaaaaacatttcacctttacaaattctgcctccctcaggtgattctgaacagctctcaaatggcataactgtgatgcatccatctggtgatagtgacacaacgatgttagaatctgaatgtcaagctcctgtacagaaggatataaagattaagaatgcagattcatggaaaagtttaggcaaaccagtgaaaccatcaggtgtaatgaaatcctcagatgagctcttcaaccaatttagaaaagcagccatagaaaaggaagtaaaagctcggacacaggaactcatacggaagcatttggaacaaaatacaaaggaactaaaagcatctcaagaaaatcagagggatcttgggaatggattgactgtagaatctttttcaaataaaatacaaaacaagtgctctggagaagagcagaaagaacatcagcagtcatcagaagctcaagataaatccaaactctggcttctcaaagaccgtgatttagcaaggcagaaagaacaagagaggaggaggagagaagcaatggtgggtaccattgatatgacccttcaaagtgacattatgacaatgtttgaaaacaactttgattaaaactcagtttttaaattaaccatcaacttaaaatgaatggtaaaagatcaaaatgcatatggtaaaatgattgctttcagataacaagataccaatcttatattgtattttgactgctctaaaatgattaaacagttttcacttacattttt

SEQ ID NO: 112342 - DNA, 3125 bp, Homo sapiens
  Payload ID: 1988
  Gene Symbol: BRDT
  Gene Name: bromodomain, testis-specific
  Uniprot ID: Q58F21
  ENST ID: ENST00000402388
  CDS Start-End: 135-2978
aagagcattttaagaatcataatagttcagtgcagatgttcctgggaggtcaagttaagagtcaaaaataattcattagatttaacaatttagcatggacatgtacttgtagacaggattcaaagcagttaagaatgtctctgccaagtcgacaaacagctattattgttaaccctcctccaccagaatatataaatactaagaaaaatgggcgattgacaaatcaacttcagtatctacaaaaagttgtcctaaaggatttatggaagcatagtttttcatggccctttcaacgtcctgtggatgctgtgaaactacagttgcctgattattataccattataaaaaacccaatggatttaaatacaattaagaagcgcttggagaataaatattatgcgaaggcttcagaatgtatagaagacttcaatacaatgttctcaaattgttatttatataacaagcctggagatgacattgttcttatggcacaagctctagagaagctgtttatgcagaaattatctcagatgccacaagaagagcaagttgtgggtgttaaggaaagaatcaagaaaggcactcaacagaatatagctgtttcttctgctaaagaaaaatcatcacccagcgcaacagaaaaagtatttaagcagcaagaaattccttctgtatttcctaagacatctatttctcccttgaacgtggtacagggagcttcagtcaactccagttcacaaactgcggcccaagttacaaaaggtgtgaagaggaaagcagatacaacaactcctgcaacttcagcagttaaagcaagtagtgaattttctccaacattcacagaaaaatcagtggcactgccacctataaaagaaaatatgccaaagaatgttttgccagattctcagcaacaatataatgttgtgaagactgttaaagtaactgaacaattaaggcactgtagtgagattcttaaagaaatgcttgcaaagaaacatttttcatatgcatggcccttttataatcctgttgacgttaatgctttgggactccataactactatgacgttgtcaaaaatccgatggatcttggaactattaaggagaaaatggataaccaagaatataaggatgcatacaaatttgcggcagatgttagattaatgttcatgaattgctacaagtacaatcctccagatcacgaagttgtgacaatggcaagaatgcttcaggatgttttcgaaacgcatttttcaaagatcccgattgaacctgttgagagtatgcctttatgttacatcaaaacagatatcacagaaaccactggtagagagaacactaatgaagcctcctctgaagggaactcttctgatgattctgaagatgagcgagttaagcgtcttgcaaagcttcaggagcagcttaaagctgtacatcaacagctccaggttttgtcccaagtacctttccgtaagctaaataaaaagaaagagaagtctaaaaaggaaaagaaaaaagaaaaggttaataacagcaatgaaaatccaagaaaaatgtgtgagcaaatgaggctaaaggaaaagtccaagagaaatcagccaaagaaaaggaaacaacagttcattggtctaaaatctgaagatgaagataatgctaaacctatgaactatgatgagaaaaggcagttaagtctgaatataaacaaactccctggagataaacttgggcgagtagttcacataatacaatcaagagagccttctctgagcaattccaatcctgatgagatagagatagactttgaaacactgaaagcatcaacactaagagaattagaaaaatatgtttcggcatgtctaagaaagagaccattaaaacctcctgctaagaaaataatgatgtccaaagaagaacttcactcacagaaaaaacaggaattggaaaagcggttactggatgttaataatcagttaaattctagaaaacgtcaaacaaaatctgataaaacgcaaccatccaaagctgttgaaaatgtttcccgactgagtgagagcagcagcagcagcagcagctcatcagagtctgaaagtagcagcagtgacttaagctcttcagacagcagtgattctgaatcagaaatgttccctaagtttacagaagtaaaaccaaatgattctccttctaaagagaatgtaaagaaaatgaagaatgaatgcataccgcctgaaggaagaacaggcgtcacacagataggatattgtgtgcaagacacaacctctgccaatactacccttgttcatcagaccacaccttcacatgtaatgccaccaaatcaccaccaattagcatttaattatcaagaattagaacatttacagactgtgaaaaacatttcacctttacaaattctgcctccctcaggtgattctgaacagctctcaaatggcataactgtgatgcatccatctggtgatagtgacacaacgatgttagaatctgaatgtcaagctcctgtacagaaggatataaagattaagaatgcagattcatggaaaagtttaggcaaaccagtgaaaccatcaggtgtaatgaaatcctcagatgagctcttcaaccaatttagaaaagcagccatagaaaaggaagtaaaagctcggacacaggaactcatacggaagcatttggaacaaaatacaaaggaactaaaagcatctcaagaaaatcagagggatcttgggaatggattgactgtagaatctttttcaaataaaatacaaaacaagtgctctggagaagagcagaaagaacatcagcagtcatcagaagctcaagataaatccaaactctggcttctcaaagaccgtgatttagcaaggcagaaagaacaagagaggaggaggagagaagcaatggtgggtaccattgatatgacccttcaaagtgacattatgacaatgtttgaaaacaactttgattaaaactcagtttttaaattaaccatcaacttaaaatgaatggtaaaagatcaaaatgcatatggtaaaatgattgctttcagataacaagataccaatcttatattgtattttgactgctctaaaatgattaaacagttttcacttaca

SEQ ID NO: 112343 - DNA, 3357 bp, Homo sapiens
  Payload ID: 1988
  Gene Symbol: BRDT
  Gene Name: bromodomain, testis-specific
  Uniprot ID: Q58F21
  ENST ID: ENST00000399546
  CDS Start-End: 350-3205
tataaaagcgcctgtcgcgcgaccgccattacaacaaaaactggcggcgaggaactgcggagaactgttgccctgcaccgcttcattttgtgcagcctgaaaggggcaatcacataaggtcggttttgtaatatacaggtaacatacaggtaatgtaccctccacagggggtgctgccttaggccggccccgaggtgcggccttgggtgggaacaaccgttttttcccccctctcccctccccgaccccatcaacatcgtgcgacagtccgggcagttgagaaggccaccccgcttcgtgcctgcagcccaggacatgtacttgtagacaggattcaaagcagttaagaatgtctctgccaagtcgacaaacagctattattgttaaccctcctccaccagaatatataaatactaagaaaaatgggcgattgacaaatcaacttcagtatctacaaaaagttgtcctaaaggatttatggaagcatagtttttcatggccctttcaacgtcctgtggatgctgtgaaactacagttgcctgattattataccattataaaaaacccaatggatttaaatacaattaagaagcgcttggagaataaatattatgcgaaggcttcagaatgtatagaagacttcaatacaatgttctcaaattgttatttatataacaagcctggagatgacattgttcttatggcacaagctctagagaagctgtttatgcagaaattatctcagatgccacaagaagagcaagttgtgggtgttaaggaaagaatcaagaaaggtaaggcaggaggcactcaacagaatatagctgtttcttctgctaaagaaaaatcatcacccagcgcaacagaaaaagtatttaagcagcaagaaattccttctgtatttcctaagacatctatttctcccttgaacgtggtacagggagcttcagtcaactccagttcacaaactgcggcccaagttacaaaaggtgtgaagaggaaagcagatacaacaactcctgcaacttcagcagttaaagcaagtagtgaattttctccaacattcacagaaaaatcagtggcactgccacctataaaagaaaatatgccaaagaatgttttgccagattctcagcaacaatataatgttgtgaagactgttaaagtaactgaacaattaaggcactgtagtgagattcttaaagaaatgcttgcaaagaaacatttttcatatgcatggcccttttataatcctgttgacgttaatgctttgggactccataactactatgacgttgtcaaaaatccgatggatcttggaactattaaggagaaaatggataaccaagaatataaggatgcatacaaatttgcggcagatgttagattaatgttcatgaattgctacaagtacaatcctccagatcacgaagttgtgacaatggcaagaatgcttcaggatgttttcgaaacgcatttttcaaagatcccgattgaacctgttgagagtatgcctttatgttacatcaaaacagatatcacagaaaccactggtagagagaacactaatgaagcctcctctgaagggaactcttctgatgattctgaagatgagcgagttaagcgtcttgcaaagcttcaggagcagcttaaagctgtacatcaacagctccaggttttgtcccaagtacctttccgtaagctaaataaaaagaaagagaagtctaaaaaggaaaagaaaaaagaaaaggttaataacagcaatgaaaatccaagaaaaatgtgtgagcaaatgaggctaaaggaaaagtccaagagaaatcagccaaagaaaaggaaacaacagttcattggtctaaaatctgaagatgaagataatgctaaacctatgaactatgatgagaaaaggcagttaagtctgaatataaacaaactccctggagataaacttgggcgagtagttcacataatacaatcaagagagccttctctgagcaattccaatcctgatgagatagagatagactttgaaacactgaaagcatcaacactaagagaattagaaaaatatgtttcggcatgtctaagaaagagaccattaaaacctcctgctaagaaaataatgatgtccaaagaagaacttcactcacagaaaaaacaggaattggaaaagcggttactggatgttaataatcagttaaattctagaaaacgtcaaacaaaatctgataaaacgcaaccatccaaagctgttgaaaatgtttcccgactgagtgagagcagcagcagcagcagcagctcatcagagtctgaaagtagcagcagtgacttaagctcttcagacagcagtgattctgaatcagaaatgttccctaagtttacagaagtaaaaccaaatgattctccttctaaagagaatgtaaagaaaatgaagaatgaatgcataccgcctgaaggaagaacaggcgtcacacagataggatattgtgtgcaagacacaacctctgccaatactacccttgttcatcagaccacaccttcacatgtaatgccaccaaatcaccaccaattagcatttaattatcaagaattagaacatttacagactgtgaaaaacatttcacctttacaaattctgcctccctcaggtgattctgaacagctctcaaatggcataactgtgatgcatccatctggtgatagtgacacaacgatgttagaatctgaatgtcaagctcctgtacagaaggatataaagattaagaatgcagattcatggaaaagtttaggcaaaccagtgaaaccatcaggtgtaatgaaatcctcagatgagctcttcaaccaatttagaaaagcagccatagaaaaggaagtaaaagctcggacacaggaactcatacggaagcatttggaacaaaatacaaaggaactaaaagcatctcaagaaaatcagagggatcttgggaatggattgactgtagaatctttttcaaataaaatacaaaacaagtgctctggagaagagcagaaagaacatcagcagtcatcagaagctcaagataaatccaaactctggcttctcaaagaccgtgatttagcaaggcagaaagaacaagagaggaggaggagagaagcaatggtgggtaccattgatatgacccttcaaagtgacattatgacaatgtttgaaaacaactttgattaaaactcagtttttaaattaaccatcaacttaaaatgaatggtaaaagatcaaaatgcatatggtaaaatgattgctttcagataacaagataccaatcttatattgtattttgactgctctaaaatgattaaacagttttcacttacattttt

SEQ ID NO: 112344 - DNA, 760 bp, Homo sapiens
  Payload ID: 1988
  Gene Symbol: BRDT
  Gene Name: bromodomain, testis-specific
  ENST ID: ENST00000423434
  CDS Start-End: 231-760
ataaaagcgcctgtcgcgcgaccgccattacaacaaaaactggcggcgaggaactgcggagaactgttgccctgcaccgcttcattttgtgcagcctgaaaggggcaatcacataaggtcggttttgtaatatacaggtaacatacagtccgggcagttgagaaggccaccccgcttcgtgcctgcagcccaggacatgtacttgtagacaggattcaaagcagttaagaatgtctctgccaagtcgacaaacagctattattgttaaccctcctccaccagaatatataaatactaagaaaaatgggcgattgacaaatcaacttcagtatctacaaaaagttgtcctaaaggatttatggaagcatagtttttcatggccctttcaacgtcctgtggatgctgtgaaactacagttgcctgattattataccattataaaaaacccaatggatttaaatacaattaagaagcgcttggagaataaatattatgcgaaggcttcagaatgtatagaagacttcaatacaatgttctcaaattgttatttatataacaagcctggagatgacattgttcttatggcacaagctctagagaagctgtttatgcagaaattatctcagatgccacaagaagagcaagttgtgggtgttaaggaaagaatcaagaaaggcactcaacagaatatagctgtttcttctgctaaagaaaaatcatcacccagcgcaacagaaaaagtatttaagcagcaagaaat

SEQ ID NO: 112345 - DNA, 1363 bp, Homo sapiens
  Payload ID: 1988
  Gene Symbol: BRDT
  Gene Name: bromodomain, testis-specific
  ENST ID: ENST00000427104
  CDS Start-End: 898-1363
attacaacaaaaactggcggcgaggaactgcggagaactgttgccctgcaccgcttcattttgtgcagcctgaaaggggcaatcacataaggtcggttttgtaatatacaggtaacatacaggtaatgtaccctccacagggggtgctgccttaggccggccccgaggtgcggccttgggtgggaacaaccgttttttcccccctctcccctccccgaccccatcaacatcgtgcgacagtccgggcagttgagaaggccaccccgcttcgtgcctgcagcccaggtcttggactggtgtggatcgctgctgcctgtactgtaattttggaaatgcaggagaaagtacggagcgtttagctttagctggcattttgtgtttattctgcaagtggtcatttgggacggggaagttcgggttcttgcttcatttatttattcaattaactttattaagcccctggaacgtctgaaccctcttttgggtactgcaggattgtggtgggctttacttcaaggcgcgctggcctgtattaagaattaagatagaggaggccgggtgcagtggctcgcccctgtaatctcagcactttcggaggccgaggcaagtggatcacctgaggtcaggagttcaagaccagcctggccaacataatgaaatgcccatctctaccaaaaatacaaaaattagctgggtgtgatggcaggcgcctgtagtcccagctactcgggaggctgaggcaggagaatcgcttgaacccaggaggcggaagttgcagtgcgccgagatcacgccagtgcactccagcctgggcgacagagtgagactccgtctccccgctccccccaaaaaagaaagaggacatgtacttgtagacaggattcaaagcagttaagaatgtctctgccaagtcgacaaacagctattattgttaaccctcctccaccagaatatataaatactaagaaaaatgggcgattgacaaatcaacttcagtatctacaaaaagttgtcctaaaggatttatggaagcatagtttttcatggccctttcaacgtcctgtggatgctgtgaaactacagttgcctgattattataccattataaaaaacccaatggatttaaatacaattaagaagcgcttggagaataaatattatgcgaaggcttcagaatgtatagaagacttcaatacaatgttctcaaattgttatttatataacaagcctggagatgacattgttcttatggcacaagctctagagaagctgtttatgcagaaattatctcagatgccacaagaagagcaagttgtgggtgttaaggaaagaatcaagaaaggcactcaacagaatatagctg

SEQ ID NO: 112346 - DNA, 534 bp, Homo sapiens
  Payload ID: 1988
  Gene Symbol: BRDT
  Gene Name: bromodomain, testis-specific
  ENST ID: ENST00000355011
  CDS Start-End: 493-534
acaacaaaaactggcggcgaggaactgcggagaactgttgccctgcaccgcttcattttgtgcagcctgaaaggggcaatcacataaggattgtggtgggctttacttcaaggcgcgctggcctgtattaagaattaagatagaggaggccgggtgcagtggctcgcccctgtaatctcagcactttcggaggccgaggcaagtggatcacctgaggtcaggagttcaagaccagcctggccaacataatgaaatgcccatctctaccaaaaatacaaaaattagctgggtgtgatggcaggcgcctgtagtcccagctactcgggaggctgaggcaggagaatcgcttgaacccaggaggcggaagttgcagtgcgccgagatcacgccagtgcactccagcctgggcgacagagtgagactccgtctccccgctccccccaaaaaagaaagaggacatgtacttgtagacaggattcaaagcagttaagaatgtctctgccaagtcgacaaacagctattattgttaaccct

SEQ ID NO: 112347 - DNA, 1707 bp, Homo sapiens
  Payload ID: 1988
  Gene Symbol: BRDT
  Gene Name: bromodomain, testis-specific
  ENST ID: ENST00000426141
  CDS Start-End: 320-1707
acaacaaaaactggcggcgaggaactgcggagaactgttgccctgcaccgcttcattttgtgcagcctgaaaggggcaatcacataaggtcggttttgtaatatacaggtaacatacaggtaatgtaccctccacagggggtgctgccttaggccggccccgaggtgcggccttgggtgggaacaaccgttttttcccccctctcccctccccgaccccatcaacatcgtgcgacagtccgggcagttgagaaggccaccccgcttcgtgcctgcagcccaggacatgtacttgtagacaggattcaaagcagttaagaatgtctctgccaagtcgacaaacagctattattgttaaccctcctccaccagaatatataaatactaagaaaaatgggcgattgacaaatcaacttcagtatctacaaaaagttgtcctaaaggatttatggaagcatagtttttcatggccctttcaacgtcctgtggatgctgtgaaactacagttgcctgattattataccattataaaaaacccaatggatttaaatacaattaagaagcgcttggagaataaatattatgcgaaggcttcagaatgtatagaagacttcaatacaatgttctcaaattgttatttatataacaagcctggagatgacattgttcttatggcacaagctctagagaagctgtttatgcagaaattatctcagatgccacaagaagagcaagttgtgggtgttaaggaaagaatcaagaaaggcactcaacagaatatagctgtttcttctgctaaagaaaaatcatcacccagcgcaacagaaaaagtatttaagcagcaagaaattccttctgtatttcctaagacatctatttctcccttgaacgtggtacagggagcttcagtcaactccagttcacaaactgcggcccaagttacaaaaggtgtgaagaggaaagcagatacaacaactcctgcaacttcagcagttaaagcaagtagtgaattttctccaacattcacagaaaaatcagtggcactgccacctataaaagaaaatatgccaaagaatgttttgccagattctcagcaacaatataatgttgtgaagactgttaaagtaactgaacaattaaggcactgtagtgagattcttaaagaaatgcttgcaaagaaacatttttcatatgcatggcccttttataatcctgttgacgttaatgctttgggactccataactactatgacgttgtcaaaaatccgatggatcttggaactattaaggagaaaatggataaccaagaatataaggatgcatacaaatttgcggcagatgttagattaatgttcatgaattgctacaagtacaatcctccagatcacgaagttgtgacaatggcaagaatgcttcaggatgttttcgaaacgcatttttcaaagatcccgattgaacctgttgagagtatgcctttatgttacatcaaaacagatatcacagaaaccactggtagagagaacactaatgaagcctcctctgaagggaactcttctgatgattctgaagatgagcgagttaagcgtcttgcaaagcttcaggagcagcttaaagctgtacatcaacagctccaggttttgtcccaagtacctttccgtaagctaaataaaaagaaagagaagtctaaaaaggaaaagaaaaaagaaaa

SEQ ID NO: 112348 - DNA, 551 bp, Homo sapiens
  Payload ID: 1988
  Gene Symbol: BRDT
  Gene Name: bromodomain, testis-specific
  ENST ID: ENST00000457265
  CDS Start-End: 457-551
actgttgccctgcaccgcttcattttgtgcagcctgaaaggggcaatcacataaggtcggttttgtaatatacaggtaacatacaggtaatgtaccctccacagggggtgctgccttaggccggccccgaggtgcggccttgggtgggaacaaccgttttttcccccctctcccctccccgaccccatcaacatcgtgcgacagtccgggcagttgagaaggccaccccgcttcgtgcctgcagcccagctgggtgtgatggcaggcgcctgtagtcccagctactcgggaggctgaggcaggagaatcgcttgaacccaggaggcggaagttgcagtgcgccgagatcacgccagtgcactccagcctgggcgacagagtgagactccgtctccccgctccccccaaaaaagaaagaggacatgtacttgtagacaggattcaaagcagttaagaatgtctctgccaagtcgacaaacagctattattgttaaccctcctccaccagaatatataaatactaagaaaaatgggcgattgacaaatcaact

SEQ ID NO: 112349 - DNA, 550 bp, Homo sapiens
  Payload ID: 1988
  Gene Symbol: BRDT
  Gene Name: bromodomain, testis-specific
  ENST ID: ENST00000449584
  CDS Start-End: 395-550
attacaacaaaaactggcggcgaggaactgcggagaactgttgccctgcaccgcttcattttgtgcagcctgaaaggggcaatcacataagctgggtgtgatggcaggcgcctgtagtcccagctactcgggaggctgaggcaggagaatcgcttgaacccaggaggcggaagttgcagtgcgccgagatcacgccagtgcactccagcctgggcgacagagtgagactccgtctccccgctccccccaaaaaagaaagagatagctgctatggctgggcgatctcagaggatcgcctgagtcgctcacgcctgtaatcccagcacttaggaggccgaggcgggtggatcacctgaggacatgtacttgtagacaggattcaaagcagttaagaatgtctctgccaagtcgacaaacagctattattgttaaccctcctccaccagaatatataaatactaagaaaaatgggcgattgacaaatcaacttcagtatctacaaaaagttgtcctaaaggatttatggaagcatagtttttcatggcccttt

SEQ ID NO: 112350 - DNA, 591 bp, Homo sapiens
  Payload ID: 1988
  Gene Symbol: BRDT
  Gene Name: bromodomain, testis-specific
  ENST ID: ENST00000448194
  CDS Start-End: 126-591
acaacaaaaactggcggcgaggaactgcggagaactgttgccctgcaccgcttcattttgtgcagcctgaaaggggcaatcacataaggacatgtacttgtagacaggattcaaagcagttaagaatgtctctgccaagtcgacaaacagctattattgttaaccctcctccaccagaatatataaatactaagaaaaatgggcgattgacaaatcaacttcagtatctacaaaaagttgtcctaaaggatttatggaagcatagtttttcatggccctttcaacgtcctgtggatgctgtgaaactacagttgcctgattattataccattataaaaaacccaatggatttaaatacaattaagaagcgcttggagaataaatattatgcgaaggcttcagaatgtatagaagacttcaatacaatgttctcaaattgttatttatataacaagcctggagatgacattgttcttatggcacaagctctagagaagctgtttatgcagaaattatctcagatgccacaagaagagcaagttgtgggtgttaaggaaagaatcaagaaaggcactcaacagaatatagctg

SEQ ID NO: 112351 - DNA, 559 bp, Homo sapiens
  Payload ID: 1988
  Gene Symbol: BRDT
  Gene Name: bromodomain, testis-specific
  ENST ID: ENST00000450792
  CDS Start-End: 272-559
aacaaaaactggcggcgaggaactgcggagaactgttgccctgcaccgcttcattttgtgcagcctgaaaggggcaatcacataaggtcggttttgtaatatacaggtaacatacagtccgggcagttgagaaggccaccccgcttcgtgcctgcagcccaggttcacagcaaaactgagcagtaaatagtgttcccatctaccccgtttcaacactagtacagcaccagagtggacatgtacttgtagacaggattcaaagcagttaagaatgtctctgccaagtcgacaaacagctattattgttaaccctcctccaccagaatatataaatactaagaaaaatgggcgattgacaaatcaacttcagtatctacaaaaagttgtcctaaaggatttatggaagcatagtttttcatggccctttcaacgtcctgtggatgctgtgaaactacagttgcctgattattataccattataaaaaacccaatggatttaaatacaattaagaagcgcttggagaataaatattatgcgaaggcttcagaatgtatagaa

SEQ ID NO: 112352 - DNA, 788 bp, Homo sapiens
  Payload ID: 1988
  Gene Symbol: BRDT
  Gene Name: bromodomain, testis-specific
  ENST ID: ENST00000440509
  CDS Start-End: 188-788
gtcgcgcgaccgccattacaacaaaaactggcggcgaggaactgcggagaactgttgccctgcaccgcttcattttgtgcagcctgaaaggggcaatcacataagtccgggcagttgagaaggccaccccgcttcgtgcctgcagcccaggacatgtacttgtagacaggattcaaagcagttaagaatgtctctgccaagtcgacaaacagctattattgttaaccctcctccaccagaatatataaatactaagaaaaatgggcgattgacaaatcaacttcagtatctacaaaaagttgtcctaaaggatttatggaagcatagtttttcatggccctttcaacgtcctgtggatgctgtgaaactacagttgcctgattattataccattataaaaaacccaatggatttaaatacaattaagaagcgcttggagaataaatattatgcgaaggcttcagaatgtatagaagacttcaatacaatgttctcaaattgttatttatataacaagcctggagatgacattgttcttatggcacaagctctagagaagctgtttatgcagaaattatctcagatgccacaagaagagcaagttgtgggtgttaaggaaagaatcaagaaaggcactcaacagaatatagctgtttcttctgctaaagaaaaatcatcacccagcgcaacagaaaaagtatttaagcagcaagaaattccttctgtatttcctaagacatctatttctcccttgaacgtggtacagggagcttcagtcaactccagtt

SEQ ID NO: 112353 - DNA, 578 bp, Homo sapiens
  Payload ID: 1988
  Gene Symbol: BRDT
  Gene Name: bromodomain, testis-specific
  ENST ID: ENST00000552654
  CDS Start-End: 389-578
aacaaaaactggcggcgaggaactgcggagaactgttgccctgcaccgcttcattttgtgcagcctgaaaggggcaatcacataaggtcggttttgtaatatacaggtaacatacagtccgggcagttgagaaggccaccccgcttcgtgcctgcagcccaggtcttggactggtgtggatcgctgctgcctgtactgtaattttggaaatgcaggagaaaaatatataaatactaagaaaaatgggcgattgacaaatcaacttcagtatctacaaaaagttgtcctaaaggatttatggaagcatagtttttcatggccctttcaacgtcctgtggatgctgtgaaactacagttgcctgattattataccattataaaaaacccaatggatttaaatacaattaagaagcgcttggagaataaatattatgcgaaggcttcagaatgtatagaagacttcaatacaatgttctcaaattgttatttatataacaagcctggagatgacattgttcttatggcacaagctctagagaagctgtttatgcagaaattatctcagatgccacaagaag

SEQ ID NO: 112354 - DNA, 569 bp, Homo sapiens
  Payload ID: 1988
  Gene Symbol: BRDT
  Gene Name: bromodomain, testis-specific
  ENST ID: ENST00000548992
  CDS Start-End: 269-569
aacaaaaactggcggcgaggaactgcggagaactgttgccctgcaccgcttcattttgtgcagcctgaaaggggcaatcacataaggtcggttttgtaatatacaggtaacatacagtccgggcagttgagaaggccaccccgcttcgtgcctgcagcccagttcctcttaggtcttggactggtgtggatcgctgctgcctgtactgtaattttggaaatgcaggagaaagacatgtacttgtagacaggattcaaagcagttaagaatgtctctgccaagtcgacaaacagctattattgttaaccctcctccaccagaatatataaatactaagaaaaatgggcgattgacaaatcaacttcagtatctacaaaaagttgtcctaaaggatttatggaagcatagtttttcatggccctttcaacgtcctgtggatgctgtgaaactacagttgcctgattattataccattataaaaaacccaatggatttaaatacaattaagaagcgcttggagaataaatattatgcgaaggcttcagaatgtatagaagacttcaatacaa

SEQ ID NO: 112355 - DNA, 2579 bp, Homo sapiens
  Payload ID: 1989
  Gene Symbol: BTK
  Gene Name: Bruton agammaglobulinemia tyrosine kinase
  Uniprot ID: Q06187
  ENST ID: ENST00000308731
  CDS Start-End: 165-2144
gctcagactgtccttcctctctggactgtaagaatatgtctccagggccagtgtctgctgcgatcgagtcccaccttccaagtcctggcatctcaatgcatctgggaagctacctgcattaagtcaggactgagcacacaggtgaactccagaaagaagaagctatggccgcagtgattctggagagcatctttctgaagcgatcccaacagaaaaagaaaacatcacctctaaacttcaagaagcgcctgtttctcttgaccgtgcacaaactctcctactatgagtatgactttgaacgtgggagaagaggcagtaagaagggttcaatagatgttgagaagatcacttgtgttgaaacagtggttcctgaaaaaaatcctcctccagaaagacagattccgagaagaggtgaagagtccagtgaaatggagcaaatttcaatcattgaaaggttcccttatcccttccaggttgtatatgatgaagggcctctctacgtcttctccccaactgaagaactaaggaagcggtggattcaccagctcaaaaacgtaatccggtacaacagtgatctggttcagaaatatcacccttgcttctggatcgatgggcagtatctctgctgctctcagacagccaaaaatgctatgggctgccaaattttggagaacaggaatggaagcttaaaacctgggagttctcaccggaagacaaaaaagcctcttcccccaacgcctgaggaggaccagatcttgaaaaagccactaccgcctgagccagcagcagcaccagtctccacaagtgagctgaaaaaggttgtggccctttatgattacatgccaatgaatgcaaatgatctacagctgcggaagggtgatgaatattttatcttggaggaaagcaacttaccatggtggagagcacgagataaaaatgggcaggaaggctacattcctagtaactatgtcactgaagcagaagactccatagaaatgtatgagtggtattccaaacacatgactcggagtcaggctgagcaactgctaaagcaagaggggaaagaaggaggtttcattgtcagagactccagcaaagctggcaaatatacagtgtctgtgtttgctaaatccacaggggaccctcaaggggtgatacgtcattatgttgtgtgttccacacctcagagccagtattacctggctgagaagcaccttttcagcaccatccctgagctcattaactaccatcagcacaactctgcaggactcatatccaggctcaaatatccagtgtctcaacaaaacaagaatgcaccttccactgcaggcctgggatacggatcatgggaaattgatccaaaggacctgaccttcttgaaggagctggggactggacaatttggggtagtgaagtatgggaaatggagaggccagtacgacgtggccatcaagatgatcaaagaaggctccatgtctgaagatgaattcattgaagaagccaaagtcatgatgaatctttcccatgagaagctggtgcagttgtatggcgtctgcaccaagcagcgccccatcttcatcatcactgagtacatggccaatggctgcctcctgaactacctgagggagatgcgccaccgcttccagactcagcagctgctagagatgtgcaaggatgtctgtgaagccatggaatacctggagtcaaagcagttccttcaccgagacctggcagctcgaaactgtttggtaaacgatcaaggagttgttaaagtatctgatttcggcctgtccaggtatgtcctggatgatgaatacacaagctcagtaggctccaaatttccagtccggtggtccccaccggaagtcctgatgtatagcaagttcagcagcaaatctgacatttgggcttttggggttttgatgtgggaaatttactccctggggaagatgccatatgagagatttactaacagtgagactgctgaacacattgcccaaggcctacgtctctacaggcctcatctggcttcagagaaggtatataccatcatgtacagttgctggcatgagaaagcagatgagcgtcccactttcaaaattcttctgagcaatattctagatgtcatggatgaagaatcctgagctcgccaataagcttcttggttctacttctcttctccacaagccccaatttcactttctcagaggaaatcccaagcttaggagccctggagcctttgtgctcccactcaatacaaaaaggcccctctctacatctgggaatgcacctcttctttgattccctgggatagtggcttctgagcaaaggccaagaaattattgtgcctgaaatttcccgagagaattaagacagactgaatttgcgatgaaaatattttttaggagggaggatgtaaatagccgcacaaaggggtccaacagctctttgagtaggcatttggtagagcttgggggtgtgtgtgtgggggtggaccgaatttggcaagaatgaaatggtgtcataaagatgggaggggagggtgttttgataaaataaaattactagaaagcttgaaa

SEQ ID NO: 112356 - DNA, 2248 bp, Homo sapiens
  Payload ID: 1989
  Gene Symbol: BTK
  Gene Name: Bruton agammaglobulinemia tyrosine kinase
  ENST ID: ENST00000372880
  CDS Start-End: 359-1810
aactgagtggctgtgaaagggtggggtttgctcagactgtccttcctctctggactgtaagaatatgtctccagggccagtgtctgctgcgatcgagtcccaccttccaagtcctggcatctcaatgcatctgggaagctacctgcattaagtcaggactgagagctgtgtgttacacaccaaccttctggaggactcaaaaatggatccctttcctttcacattattgagtgatggaccagtggcacctaaggaagagctaccacattttcaggctgtgtgagtctggactggatcataagaaacaggagaaaagcagtcaaagaagcacacaggtgaactccagaaagaagaagctatggccgcagtgattctggagagcatctttctgaagcgatcccaacagaaaaagaaaacatcacctctaaacttcaagaagcgcctgtttctcttgaccgtgcacaaactctcctactatgagtatgactttgaacgtgggagaagaggcagtaagaagggttcaatagatgttgagaagatcacttgtgttgaaacagtggttcctgaaaaaaatcctcctccagaaagacagattccgagaagaggtgaagagtccagtgaaatggagcaaatttcaatcattgaaaggttcccttatcccttccaggttgtatatgatgaagggcctctctacgtcttctccccaactgaagaactaaggaagcggtggattcaccagctcaaaaacgtaatccggtacaacagtgatctggttcagaaatatcacccttgcttctggatcgatgggcagtatctctgctgctctcagacagccaaaaatgctatgggctgccaaattttggagaacaggaatggaagcttaaaacctgggagttctcaccggaagacaaaaaagcctcttcccccaacgcctgaggaggaccagatcttgaaaaagccactaccgcctgagccagcagcagcaccagtctccacaagtgagctgaaaaaggttgtggccctttatgattacatgccaatgaatgcaaatgatctacagctgcggaagggtgatgaatattttatcttggaggaaagcaacttaccatggtggagagcacgagataaaaatgggcaggaaggctacattcctagtaactatgtcactgaagcagaagactccatagaaatgtatgagtggtattccaaacacatgactcggagtcaggctgagcaactgctaaagcaagaggggaaagaaggaggtttcattgtcagagactccagcaaagctggcaaatatacagtgtctgtgtttgctaaatccacaggggaccctcaaggggtgatacgtcattatgttgtgtgttccacacctcagagccagtattacctggcagctcgaaactgtttggtaaacgatcaaggagttgttaaagtatctgatttcggcctgtccaggtatgtcctggatgatgaatacacaagctcagtaggctccaaatttccagtccggtggtccccaccggaagtcctgatgtatagcaagttcagcagcaaatctgacatttgggcttttggggttttgatgtgggaaatttactccctggggaagatgccatatgagagatttactaacagtgagactgctgaacacattgcccaaggcctacgtctctacaggcctcatctggcttcagagaaggtatataccatcatgtacagttgctggcatgagaaagcagatgagcgtcccactttcaaaattcttctgagcaatattctagatgtcatggatgaagaatcctgagctcgccaataagcttcttggttctacttctcttctccacaagccccaatttcactttctcagaggaaatcccaagcttaggagccctggagcctttgtgctcccactcaatacaaaaaggcccctctctacatctgggaatgcacctcttctttgattccctgggatagtggcttctgagcaaaggccaagaaattattgtgcctgaaatttcccgagagaattaagacagactgaatttgcgatgaaaatattttttaggagggaggatgtaaatagccgcacaaaggggtccaacagctctttgagtaggcatttggtagagcttgggggtgtgtgtgtgggggtggaccgaatttggcaagaatgaaatggtgtcataaagatgggaggggagggtgttttgataaaataaaattactagaaagcttgaaagtc

SEQ ID NO: 112357 - DNA, 2417 bp, Homo sapiens
  Payload ID: 1989
  Gene Symbol: BTK
  Gene Name: Bruton agammaglobulinemia tyrosine kinase
  ENST ID: ENST00000618050
  CDS Start-End: 1-1707
atggccgcagtgattctggagagcatctttctgaagcgatcccaacagaaaaagaaaacatcacctctaaacttcaagaagcgcctgtttctcttgaccgtgcacaaactctcctactatgagtatgactttgaacgtgggagaagaggcagtaagaagggttcaatagatgttgagaagatcacttgtgttgaaacagtggttcctgaaaaaaatcctcctccagaaagacagattccgagaagaggtgaagagtccagtgaaatggagcaaatttcaatcattgaaaggttcccttatcccttccaggttgtatatgatgaagggcctctctacgtcttctccccaactgaagaactaaggaagcggtggattcaccagctcaaaaacgtaatccggtacaacagtgatctggttcagaaatatcacccttgcttctggatcgatgggcagtatctctgctgctctcagacagccaaaaatgctatgggctgccaaattttggagaacaggaatggaagcttaaaacctgggagttctcaccggaagacaaaaaagcctcttcccccaacgcctgaggaggaccagatcttgaaaaagccactaccgcctgagccagcagcagcaccagtctccacaagtgagctgaaaaaggttgtggccctttatgattacatgccaatgaatgcaaatgatctacagctgcggaagggtgatgaatattttatcttggaggaaagcaacttaccatggtggagagcacgagataaaaatgggcaggaaggctacattcctagtaactatgtcactgaagcagaagactccatagaaatgtatgagtggtattccaaacacatgactcggagtcaggctgagcaactgctaaagcaagaggggaaagaaggaggtttcattgtcagagactccagcaaagctggcaaatatacagtgtctgtgtttgctaaatccacaggggaccctcaaggggtgatacgtcattatgttgtgtgttccacacctcagagccagtattacctggctgagaagcaccttttcagcaccatccctgagctcattaactaccatcagcacaactctgcaggactcatatccaggctcaaatatccagtgtctcaacaaaacaagaatgcaccttccactgcaggcctgggatacggatcatgggaaattgatccaaaggacctgaccttcttgaaggagctggggactggacaatttggggtagtgaagtatgggaaatggagaggccagtacgacgtggccatcaagatgatcaaagaaggctccatgtctgaagatgaattcattgaagaagccaaagtcatgatgaatctttcccatgagaagctggtgcagttgtatggcgtctgcaccaagcagcgccccatcttcatcatcactgagtacatggccaatggctgcctcctgaactacctgagggagatgcgccaccgcttccagactcagcagctgctagagatgtgcaaggatgtctgtgaagccatggaatacctggagtcaaagcagttccttcaccgagacctggcagctcgaaactgtttggtaaacgatcaaggagttgttaaagtatctgatttcggcctgtccaggtatgtcctggatgatgaatacacaagctcagtaggctccaaatttccagtccggtggtccccaccggaatcctgatgtatagcaagttcagcagcaaatctgacatttgggcttttggggttttgatgtgggaaatttactccctggggaagatgccatatgagagatttactaacagtgagactgctgaacacattgcccaaggcctacgtctctacaggcctcatctggcttcagagaaggtatataccatcatgtacagttgctggcatgagaaagcagatgagcgtcccactttcaaaattcttctgagcaatattctagatgtcatggatgaagaatcctgagctcgccaataagcttcttggttctacttctcttctccacaagccccaatttcactttctcagaggaaatcccaagcttaggagccctggagcctttgtgctcccactcaatacaaaaaggcccctctctacatctgggaatgcacctcttctttgattccctgggatagtggcttctgagcaaaggccaagaaattattgtgcctgaaatttcccgagagaattaagacagactgaatttgcgatgaaaatattttttaggagggaggatgtaaatagccgcacaaaggggtccaacagctctttgagtaggcatttggtagagcttgggggtgtgtgtgtgggggtggaccgaatttggcaagaatgaaatggtgtcataaagatgggaggggagggtgttttgataaaataaaattactagaaagcttgaaagtc

SEQ ID NO: 112358 - DNA, 2767 bp, Homo sapiens
  Payload ID: 1989
  Gene Symbol: BTK
  Gene Name: Bruton agammaglobulinemia tyrosine kinase
  Uniprot ID: Q06187
  ENST ID: ENST00000621635
  CDS Start-End: 248-2329
ttcgtcactttatctcttttggtggactctgctacgtagtggcgttcagtgaagggagcagtgtttttcccagatcctctggcctccccgtccccgagggaagccaggactagggtcgaatgaaggggtcctccacctccacgttccattcctgttccacctcaaggtcactgggaacacctttcgcagcaaactgctaattcaatgaagacctggagggagccaattgttccagttcatctatcacatggccagttggtccattcaacaaatggttattggatgcccattatgtggcaggcactgttccgggggagagcacacaggtgaactccagaaagaagaagctatggccgcagtgattctggagagcatctttctgaagcgatcccaacagaaaaagaaaacatcacctctaaacttcaagaagcgcctgtttctcttgaccgtgcacaaactctcctactatgagtatgactttgaacgtgggagaagaggcagtaagaagggttcaatagatgttgagaagatcacttgtgttgaaacagtggttcctgaaaaaaatcctcctccagaaagacagattccgagaagaggtgaagagtccagtgaaatggagcaaatttcaatcattgaaaggttcccttatcccttccaggttgtatatgatgaagggcctctctacgtcttctccccaactgaagaactaaggaagcggtggattcaccagctcaaaaacgtaatccggtacaacagtgatctggttcagaaatatcacccttgcttctggatcgatgggcagtatctctgctgctctcagacagccaaaaatgctatgggctgccaaattttggagaacaggaatggaagcttaaaacctgggagttctcaccggaagacaaaaaagcctcttcccccaacgcctgaggaggaccagatcttgaaaaagccactaccgcctgagccagcagcagcaccagtctccacaagtgagctgaaaaaggttgtggccctttatgattacatgccaatgaatgcaaatgatctacagctgcggaagggtgatgaatattttatcttggaggaaagcaacttaccatggtggagagcacgagataaaaatgggcaggaaggctacattcctagtaactatgtcactgaagcagaagactccatagaaatgtatgagtggtattccaaacacatgactcggagtcaggctgagcaactgctaaagcaagaggggaaagaaggaggtttcattgtcagagactccagcaaagctggcaaatatacagtgtctgtgtttgctaaatccacaggggaccctcaaggggtgatacgtcattatgttgtgtgttccacacctcagagccagtattacctggctgagaagcaccttttcagcaccatccctgagctcattaactaccatcagcacaactctgcaggactcatatccaggctcaaatatccagtgtctcaacaaaacaagaatgcaccttccactgcaggcctgggatacggatcatgggaaattgatccaaaggacctgaccttcttgaaggagctggggactggacaatttggggtagtgaagtatgggaaatggagaggccagtacgacgtggccatcaagatgatcaaagaaggctccatgtctgaagatgaattcattgaagaagccaaagtcatgatgaatctttcccatgagaagctggtgcagttgtatggcgtctgcaccaagcagcgccccatcttcatcatcactgagtacatggccaatggctgcctcctgaactacctgagggagatgcgccaccgcttccagactcagcagctgctagagatgtgcaaggatgtctgtgaagccatggaatacctggagtcaaagcagttccttcaccgagacctggcagctcgaaactgtttggtaaacgatcaaggagttgttaaagtatctgatttcggcctgtccaggtatgtcctggatgatgaatacacaagctcagtaggctccaaatttccagtccggtggtccccaccggaagtcctgatgtatagcaagttcagcagcaaatctgacatttgggcttttggggttttgatgtgggaaatttactccctggggaagatgccatatgagagatttactaacagtgagactgctgaacacattgcccaaggcctacgtctctacaggcctcatctggcttcagagaaggtatataccatcatgtacagttgctggcatgagaaagcagatgagcgtcccactttcaaaattcttctgagcaatattctagatgtcatggatgaagaatcctgagctcgccaataagcttcttggttctacttctcttctccacaagccccaatttcactttctcagaggaaatcccaagcttaggagccctggagcctttgtgctcccactcaatacaaaaaggcccctctctacatctgggaatgcacctcttctttgattccctgggatagtggcttctgagcaaaggccaagaaattattgtgcctgaaatttcccgagagaattaagacagactgaatttgcgatgaaaatattttttaggagggaggatgtaaatagccgcacaaaggggtccaacagctctttgagtaggcatttggtagagcttgggggtgtgtgtgtgggggtggaccgaatttggcaagaatgaaatggtgtcataaagatgggaggggagggtgttttgataaaataaaattactagaaagcttgaaagtc

SEQ ID NO: 112359 - DNA, 1926 bp, Homo sapiens
  Payload ID: 1990
  Gene Symbol: BRIX1
  Gene Name: BRX1, biogenesis of ribosomes
  Uniprot ID: Q8TDN6
  ENST ID: ENST00000336767
  CDS Start-End: 364-1425
cgcttactagtctcggggtccccgagtgcggaaaccctacctttgcggtggggtctggacgcccgagagcccttctcagcaaagtccctgaagaggagcgaggcggctccgaggaaccgcggaggaagtgaagccagtcccgccactcttcagaccggccctccacctcggccaccgtcaccacagagctgaaggaggcctagagagccgcgcgtgccgcgccaccgagaccggaaggaggcggcacagacctggaggacgaccgcggagctgagcgcttagagccgccgaaccatagagatcggaaataggagcgagcggcagcgccggaaaggaggccaagagcgcgggcggcgaggcaagatggcggcaaccaagaggaaacggcgtggaggctttgcagttcaggcgaagaagccaaaaagaaacgaaatagatgcggagccgccagctaagcggcacgccacagcagaggaggtggaggaagaagagagggaccggatcccaggccccgtttgcaagggaaagtggaaaaataaggaacggattctcatcttttcttccagaggaataaattttagaacaagacatttaatgcaggacttgagaatgttgatgcctcattctaaagcagatactaaaatggatcgtaaggataagctatttgtgattaacgaggtttgtgaaatgaagaactgtaataaatgcatctattttgaagctaagaaaaaacaggatctctatatgtggctttcaaattcacctcacggaccatctgctaaattccttgttcaaaatattcataccctcgctgaactgaagatgactggaaactgtttgaaaggttctcggccccttttgtcttttgaccctgcttttgatgaattaccacattatgctttgttaaaagaactcttaattcagatctttagtacaccacggtatcatcccaaaagccaaccatttgtggaccacgtgtttactttcaccattttggataataggatatggtttcggaactttcagatcatagaagaagatgctgctcttgtagaaataggacctcgttttgtcttaaatctcataaagattttccagggaagttttggaggaccaactttatatgaaaatcctcactaccagtcaccaaacatgcatcggcgtgtcataagatccatcacagctgcaaaatacagagagaaacagcaagtgaaagatgtgcaaaaactgagaaagaaagagccgaagactcttcttccacatgatcccactgcagatgtttttgtaacaccagctgaggagaaaccaatagaaatacagtgggtaaaaccagagccaaaagttgatttgaaagcaagaaagaaacggatttacaaaaggcaaagaaaaatgaaacagaggatggacagtgggaaaacaaaataagtcaatggaaacctgatttgtttttcagttactttatatttattttgtattcaatgtgtaaatacttttattatctaatactatcttacgtctaattagtgtagcatttacaagaaagaaaaattaagatcttaaaatcagtgattatctttttctaaataaaatatcaccagaattcatcagttaatttctgatttctttttgaagtttgtgttgctaaaaatgtagcacacttaatgtagcctgttctcttgggttggaatttttggtttagcaaagctgaaattcagacatttattaggtcatattatttgtaaaagcattcaacacttcaagagcatcggttgtggatggtaaagtaggagtagactggtagaaaggaaggcatctcactgaagtttactcagtcatcagttaatgaagccatggaagaaccaacccctgatctgtcacttcaaaaaagagtatattaaaatgttgaggttttgagaatcaaatgca

SEQ ID NO: 112360 - DNA, 4599 bp, Homo sapiens
  Payload ID: 1991
  Gene Symbol: BSDC1
  Gene Name: BSD domain containing 1
  Uniprot ID: Q9NW68
  ENST ID: ENST00000341071
  CDS Start-End: 13-1437
catgcaggcaagatggcggaaggggaggacgtgggatggtggcggagctggctgcagcagagctaccaagcagtcaaagagaagtcctctgaagccttggagtttatgaagcgggacctgacggagtttacccaggtggtgcagcatgacacggcctgtaccatcgcagccacggccagcgtggtcaaggagaagctggctattgcagcctgttcccggggcgcttgcttcctctgcccgttctctatacagacggaaggctcctcaggagcaacagagaagatgaagaaagggttatctgacttcctaggggtgatctcagacacctttgccccttcgccagacaaaaccatcgactgcgatgtcatcaccctgatgggcacaccgtctggcacagctgagccctatgatggcaccaaggctcgcctctatagcctgcagtcggacccagcaacctactgtaatgaaccagatgggcccccggaattgtttgacgcctggctttcccagttctgcttggaggagaagaagggggagatctcagagctccttgtaggcagcccctccatccgggccctctacaccaagatggttccagcagctgtttcccattcagaattctggcatcggtatttctataaagtccatcagttagagcaggagcaggcccggagggacgccctgaagcagcgggcggaacagagcatctctgaagagcccggctgggaggaggaggaagaggagctcatgggcatttcacccatatctccaaaagaggcaaaggttcctgtggccaaaatttctacattccctgaaggagaacctggcccccagagcccctgtgaagagaatctggtgacttcagttgagcccccagcagaggtgactccatcagagagcagtgagagcatctccctcgtgacacagatcgccaacccggccactgcacctgaggcacgagtgctacccaaggacctgtcccaaaagctgctagaggcatccttggaggaacagggcctggctgtggatgtgggtgagactggaccctcaccccctattcactccaagcccctaacgcctgctggccacaccggcggcccagagcccaggcctccagccagagtagagactctgagggaggaggcgcccacagacttacgggtgtttgagctgaactcggatagtgggaagtctacaccctccaacaatggaaagaaaggctcaagcacggacatcagtgaggactgggagaaagactttgacttggacatgactgaagaggaggtgcagatggcactttccaaagtggatgcctccggggaggtgagtgggcctggtgggtcagagggaagcgagcctaatggtcctgggtgtgagagctctccccagccagcccagctgtcccctcaggagggtccctgctcctgtctgaggtgacaggtggtgggaaaggagctggagcttcctgctcagacccacaacattggtcatcagcaggctgcacttttcctcagttccagggtggatagagggtcaagttcttgaccttagctctgtatcaaaattgcctgagaaactgcttaagaaaacagatgtcatgctgagcgcggtggctcacacctgtaatcccaacactttgggaggccaaggtgggaggattgcttgaggcgaggagttcaagaccagcctggccaatatagtgagaccccatttctgtttttgaaaaaaaaaaaaaaaggaaaaaagaaaacagacatcaaaccctgcctgaccttctgagttgtggtcctcaggtatgaggcctgagtatatacttggccttggagacaaaagaccagtgtgatcaagggcaagggcaagttacttaacctgagcccctggttcctcatctaaaacatggaattgatcattataagacctggctataagctgtaatgaggtgatccatgtagacaccttagggctattgcctgagacatggtgaccagcactcaggagacattagtgataaaccccacaaaacccattccagttattaagctcaaggaggccttagtactgttattcttcactacctctcagaatcaaaagtggctcatttagattgagaggctggaacagtccaaagctctcccagctaataagtgacaggactgaggctgcaacccagacatctgattcatgtcagcgttagttccactgtcacataagaaccacatgagtccttccatcatgtaacttatgagcctgttagaaagaggtggacagattagagagacatgtgaagggcctcctttttcatgatgggaaactgaagccttgggggagtattttacctactcaggagtattttgcacttgtgactacctcactatacccaggacagagaaagcccatagtgccctgtcaggccacaggggcttgctggctttttgtgtctttgcagccccctttaaaacctgacgtgcagtacacgtgagcattctagaacctgctataccagggcttagccgacagcaggccaagagtaggaacaaagcaagaaaacgttccgtggggagacttgagctgggaattagggtgttggtgcccctagtgaagacctagtgggcatctgtaggccactgccacctctgcttttggccacagtgccactcaggcagtggcctccattcacccaaagactaagtaacttgcccttgattacactggtcttttgtgtccagggccaagtatctgctcaggcctcctgagttctctgcttctcagagccatggcattatctgctcagcaggaggcaagttctccttaaaggactgaggctgacttggttcctgtaggcagccatcaccttgtggtgtctggtgttggttgggggaagtgtttcctttaggtctgaggtaatcagagcatcaggcccacccctcaggcagagggcagctctgcccctcagacacattccttaagactaggggttcactctcagtgggacctcagagtatggcctggggtaggggatgggaggtggctctgctcagcaagtggaggttaggtctgggcctgactcaggagtaactatgtgtttgtgatttccattaccccctcccatttgcagctggaagatgtagagtgggaggactgggagtgagggagccagagggagcagctcccccacccatggcatctctcgcctccctcgctcgtctcagcccagccctggaagactgagaatgttcccccaaatctcctctgccaaccagagctctgggcacagattctggtggctccctgctggccctcttgggcctctgctcacacctgggaaggggctctctaaatcccggccagaaactctgacttgtgccaacaataggatgacccaagggagaggaaacctatcctcctcaccagaagagcctgtgtttttctgctgaacacccactgttcctgaggactcctgctgggaagtcccaagggatagttctagcccttctgcctgtgtagacagaagctaaaccaccagtctctctcggaggaagctgagacaacatactctgtccatacataagcaggcagggagggccatgccacctacccttggctaaacagggacagtgaacacattttggttcctatcccagtgggtaagaggcacttatctctgggaaatttgcctctcttgggactctccccctcccaggcattttccattcctggaaaggctcctttggggttcagaatccagagaccaaaccctgacccacctccttcctttcctccagcccacgctggtctgtccccatgccttcccagggcttcttcatgtcggatgcacccaagtccttagcccagctgtgccacctgcaggagttcgctcttgcgtttcttcccctccccaagaagggagggggctacttcaggcccttctgtgtgttgcctggcaggataccttgtccaaccagctacccacctcaactcccctgtagtttaggacacaaaacagctaccagcggtacagagcggtgatcaaagccgagtacttacaactctggtaagcctagcttctccgcctcagcccttctgcttctggaagggctatcctgggggtgaacttgaaactctcatcaggcttctgcaaaagctcttcttcctgaagacagacccagcctttgtgctctcaccctccactctggtaaagctgcacctctgggggaatgaggggctgcaggaatctctggagagcctggtgcttcacgatgctgctctggtgattcttgtacctaatctggtgtgctcaccaatgagtgaaagggatcgtgggtcagggacaccgagagagtgaggtcacttccacttcaaaccttcagtgagggggtgggatggagagaatgctgaatcttttttttgacgggatggggtttttctctttgtaattatttctttagtttaattaaccttttggttgtttgtgcaatattatatattttaaattataatgcatctccccagagtattttgtagctgggaaaagaaaaaaggaaaaaaagaaaaaaagattctaacagctgttagttttataattaaaaaagaaagaaaaaa

SEQ ID NO: 112361 - DNA, 1630 bp, Homo sapiens
  Payload ID: 1991
  Gene Symbol: BSDC1
  Gene Name: BSD domain containing 1
  ENST ID: ENST00000373520
  CDS Start-End: 15-209
gtcatgcaggcaagatggcggaaggggaggacgtgggatggtggcggagctggctgcagcagagctaccaagcagtcaaagagaagtcctctgaagccttggagtttatgaagcgggacctgacggagtttacccaggtggtgcagcatgacacggcctgtaccatcgcagccacggccagcgtggtcaaggagaagctggctgggtgatctcagacacctttgccccttcgccagacaaaaccatcgactgcgatgtcatcaccctgatgggcacaccgtctggcacagctgagccctatgatggcaccaaggctcgcctctatagcctgcagtcggacccagcaacctactgtaatgaaccagatgggcccccggaattgtttgacgcctggctttcccagttctgcttggaggagaagaagggggagatctcagagctccttgtaggcagcccctccatccgggccctctacaccaagatggttccagcagctgtttcccattcagaattctggcatcggtatttctataaagtccatcagttagagcaggagcaggcccggagggacgccctgaagcagcgggcggaacagagcatctctgaagagcccggctgggaggaggaggaagaggagctcatgggcatttcacccatatctccaaaagaggcaaaggttcctgtggccaaaatttctacattccctgaaggagaacctggcccccagagcccctgtgaagagaatctggtgacttcagttgagcccccagcagaggtgactccatcagagagcagtgagagcatctccctcgtgacacagatcgccaacccggccactgcacctgaggcacgagtgctacccaaggacctgtcccaaaagctgctagaggcatccttggaggaacagggcctggctgtggatgtgggtgagactggaccctcaccccctattcactccaagcccctaacgcctgctggccacaccggcggcccagagcccaggcctccagccagagtagagactctgagggaggaggcgcccacagacttacgggtgtttgagctgaactcggatagtgggaagtctacaccctccaacaatggaaagaaaggctcaagcacggacatcagtgaggactgggagaaagactttgacttggacatgactgaagaggaggtgcagatggcactttccaaagtggatgcctccggggaggtgagtgggcctggtgggtcagagggaagcgagcctaatggtcctgggtgtgagagctctccccagccagcccagctgtcccctcaggagggtccctgctcctgtctgaggtgacaggtggtgggaaaggagctggagcttcctgctcagacccacaacattggtcatcagcaggctgcacttttcctcagttccagggtggatagagggtcaagttcttgaccttagctctgtatcaaaattgcctgagaaactgcttaagaaaacagatgtcatgctgagcgcggtggctcacacctgtaatcccaacactttgggaggccaaggtgggaggattgcttgaggcgaggagttcaagaccagcctggccaatatagtgagaccccatttctgtttttgaaaaaaaaaaaaaaa

SEQ ID NO: 112362 - DNA, 1505 bp, Homo sapiens
  Payload ID: 1991
  Gene Symbol: BSDC1
  Gene Name: BSD domain containing 1
  Uniprot ID: Q9NW68
  ENST ID: ENST00000446293
  CDS Start-End: 17-1360
atgtcatgcaggcaagatggcggaaggggaggacgtgggatggtggcggagctggctgcagcagagctaccaagcagtcaaagagaagtcctctgaagccttggagtttatgaagcgggacctgacggagtttacccaggtggtgcagcatgacacggcctgtaccatcgcagccacggccagcgtggtcaaggagaagctggctattgcagcctgttcccggggcgcttgcttcctctgcccgttctctatacagacggaaggctcctcaggagcaacagagaagatgaagaaagggttatctgacttcctaggggtgatctcagacacctttgccccttcgccagacaaaaccatcgactgcgatgtcatcaccctgatgggcacaccgtctggcacagctgagccctatgatggcaccaaggctcgcctctatagcctgcagtcggacccagcaacctactgtaatgaaccagatgggcccccggaattgtttgacgcctggctttcccagttctgcttggaggagaagaagggggagatctcagagctccttgtaggcagcccctccatccgggccctctacaccaagatggttccagcagctgtttcccattcagaattctggcatcggtatttctataaagtccatcagttagagcaggagcaggcccggagggacgccctgaagcagcgggcggaacagagcatctctgaagagcccggctgggaggaggaggaagaggagctcatgggcatttcacccatatctccaaaagaggcaaaggttcctgtggccaaaatttctacattccctgaaggagaacctggcccccagagcccctgtgaagagaatctggtgacttcagttgagcccccagcagaggtgactccatcagagagcagtgagagcatctccctcgtgacacagatcgccaacccggccactgcacctgaggcacgagtgctacccaaggacctgtcccaaaagctgctagaggcatccttggaggaacagggcctggctgtggatgtgggtgagactggaccctcaccccctattcactccaagcccctaacgcctgctggccacaccggcggcccagagcccaggcctccagccagagtagagactctgagggaggaggcgcccacagacttacgggtgtttgagctgaactcggatagtgggaagtctacaccctccaacaatggaaagaaaggctcaagcacggacatcagtgaggactgggagaaagactttgacttggacatgactgaagaggaggtgcagatggcactttccaaagtggatgcctccggggagctggaagatgtagagtgggaggactgggagtgagggagccagagggagcagctcccccacccatggcatctctcgcctccctcgctcgtctcagcccagccctggaagactgagaatgttcccccaaatctcctctgccaaccagagctctgggcacagattctggtggctccctgct

SEQ ID NO: 112363 - DNA, 1473 bp, Homo sapiens
  Payload ID: 1991
  Gene Symbol: BSDC1
  Gene Name: BSD domain containing 1
  Uniprot ID: Q9NW68
  ENST ID: ENST00000419121
  CDS Start-End: 28-1152
aaatagtggtgatgtcatgcaggcaagatggcggaaggggaggacgtgggatggtggcggagctggctgcagcagagctaccaagcagtcaaagagaagtcctctgaagccttggagtttatgaagcgggacctgacggagtttacccaggtggtgcagcatgacacggcctgtaccatcgcagccacggccagcgtggtcaaggagaagctggctgctcgcctctatagcctgcagtcggacccagcaacctactgtaatgaaccagatgggcccccggaattgtttgacgcctggctttcccagttctgcttggaggagaagaagggggagatctcagagctccttgtaggcagcccctccatccgggccctctacaccaagatggttccagcagctgtttcccattcagaattctggcatcggtatttctataaagtccatcagttagagcaggagcaggcccggagggacgccctgaagcagcgggcggaacagagcatctctgaagagcccggctgggaggaggaggaagaggagctcatgggcatttcacccatatctccaaaagaggcaaaggttcctgtggccaaaatttctacattccctgaaggagaacctggcccccagagcccctgtgaagagaatctggtgacttcagttgagcccccagcagaggtgactccatcagagagcagtgagagcatctccctcgtgacacagatcgccaacccggccactgcacctgaggcacgagtgctacccaaggacctgtcccaaaagctgctagaggcatccttggaggaacagggcctggctgtggatgtgggtgagactggaccctcaccccctattcactccaagcccctaacgcctgctggccacaccggcggcccagagcccaggcctccagccagagtagagactctgagggaggaggcgcccacagacttacgggtgtttgagctgaactcggatagtgggaagtctacaccctccaacaatggaaagaaaggctcaagcacggacatcagtgaggactgggagaaagactttgacttggacatgactgaagaggaggtgcagatggcactttccaaagtggatgcctccggggagctggaagatgtagagtgggaggactgggagtgagggagccagagggagcagctcccccacccatggcatctctcgcctccctcgctcgtctcagcccagccctggaagactgagaatgttcccccaaatctcctctgccaaccagagctctgggcacagattctggtggctccctgctggccctcttgggcctctgctcacacctgggaaggggctctctaaatcccggccagaaactctgacttgtgccaacaataggatgacccaagggagaggaaacctatcctcctcaccagaagagcctgtgtttttctgctgaacacccactgttcctgaggactcctgctgggaagt

SEQ ID NO: 112364 - DNA, 2846 bp, Homo sapiens
  Payload ID: 1991
  Gene Symbol: BSDC1
  Gene Name: BSD domain containing 1
  Uniprot ID: Q9NW68
  ENST ID: ENST00000455895
  CDS Start-End: 35-1327
ggtcagtaaatagtggtgatgtcatgcaggcaagatggcggaaggggaggacgtgggatggtggcggagctggctgcagcagagctaccaagcagtcaaagagaagtcctctgaagccttggagtttatgaagcgggacctgacggagtttacccaggtggtgcagcatgacacggcctgtaccatcgcagccacggccagcgtggtcaaggagaagctggctacggaaggctcctcaggagcaacagagaagatgaagaaagggttatctgacttcctaggggtgatctcagacacctttgccccttcgccagacaaaaccatcgactgcgatgtcatcaccctgatgggcacaccgtctggcacagctgagccctatgatggcaccaaggctcgcctctatagcctgcagtcggacccagcaacctactgtaatgaaccagatgggcccccggaattgtttgacgcctggctttcccagttctgcttggaggagaagaagggggagatctcagagctccttgtaggcagcccctccatccgggccctctacaccaagatggttccagcagctgtttcccattcagaattctggcatcggtatttctataaagtccatcagttagagcaggagcaggcccggagggacgccctgaagcagcgggcggaacagagcatctctgaagagcccggctgggaggaggaggaagaggagctcatgggcatttcacccatatctccaaaagaggcaaaggttcctgtggccaaaatttctacattccctgaaggagaacctggcccccagagcccctgtgaagagaatctggtgacttcagttgagcccccagcagaggtgactccatcagagagcagtgagagcatctccctcgtgacacagatcgccaacccggccactgcacctgaggcacgagtgctacccaaggacctgtcccaaaagctgctagaggcatccttggaggaacagggcctggctgtggatgtgggtgagactggaccctcaccccctattcactccaagcccctaacgcctgctggccacaccggcggcccagagcccaggcctccagccagagtagagactctgagggaggaggcgcccacagacttacgggtgtttgagctgaactcggatagtgggaagtctacaccctccaacaatggaaagaaaggctcaagcacggacatcagtgaggactgggagaaagactttgacttggacatgactgaagaggaggtgcagatggcactttccaaagtggatgcctccggggagctggaagatgtagagtgggaggactgggagtgagggagccagagggagcagctcccccacccatggcatctctcgcctccctcgctcgtctcagcccagccctggaagactgagaatgttcccccaaatctcctctgccaaccagagctctgggcacagattctggtggctccctgctggccctcttgggcctctgctcacacctgggaaggggctctctaaatcccggccagaaactctgacttgtgccaacaataggatgacccaagggagaggaaacctatcctcctcaccagaagagcctgtgtttttctgctgaacacccactgttcctgaggactcctgctgggaagtcccaagggatagttctagcccttctgcctgtgtagacagaagctaaaccaccagtctctctcggaggaagctgagacaacatactctgtccatacataagcaggcagggagggccatgccacctacccttggctaaacagggacagtgaacacattttggttcctatcccagtgggtaagaggcacttatctctgggaaatttgcctctcttgggactctccccctcccaggcattttccattcctggaaaggctcctttggggttcagaatccagagaccaaaccctgacccacctccttcctttcctccagcccacgctggtctgtccccatgccttcccagggcttcttcatgtcggatgcacccaagtccttagcccagctgtgccacctgcaggagttcgctcttgcgtttcttcccctccccaagaagggagggggctacttcaggcccttctgtgtgttgcctggcaggataccttgtccaaccagctacccacctcaactcccctgtagtttaggacacaaaacagctaccagcggtacagagcggtgatcaaagccgagtacttacaactctggtaagcctagcttctccgcctcagcccttctgcttctggaagggctatcctgggggtgaacttgaaactctcatcaggcttctgcaaaagctcttcttcctgaagacagacccagcctttgtgctctcaccctccactctggtaaagctgcacctctgggggaatgaggggctgcaggaatctctggagagcctggtgcttcacgatgctgctctggtgattcttgtacctaatctggtgtgctcaccaatgagtgaaagggatcgtgggtcagggacaccgagagagtgaggtcacttccacttcaaaccttcagtgagggggtgggatggagagaatgctgaatcttttttttgacgggatggggtttttctctttgtaattatttctttagtttaattaaccttttggttgtttgtgcaatattatatattttaaattataatgcatctccccagagtattttgtagctgggaaaagaaaaaaggaaaaaaagaaaaaaagattctaacagctgttagttttataattaaaaaagaaagaaaaaagaactttgtcctgaaccttttacagacttgccgttaacagcattaaagtgattcacccgaagctgaaa

SEQ ID NO: 112365 - DNA, 2925 bp, Homo sapiens
  Payload ID: 1991
  Gene Symbol: BSDC1
  Gene Name: BSD domain containing 1
  Uniprot ID: Q9NW68
  ENST ID: ENST00000444377
  CDS Start-End: 15-1301
gtcatgcaggcaagatggcggaaggggaggacgtgggatggtggcggagctggctgcagcagagctaccaagcagtcaaagagaagtcctctgaagccttggagtttatgaagcgggacctgacggagtttacccaggtggtgcagcatgacacggcctgtaccatcgcagccacggccagcgtggtcaaggagaagctggctacggaaggctcctcaggagcaacagagaagatgaagaaagggttatctgacttcctaggggtgatctcagacacctttgccccttcgccagacaaaaccatcgactgcgatgtcatcaccctgatgggcacaccgtctggcacagctgagccctatgatggcaccaaggctcgcctctatagcctgcagtcggacccagcaacctactgtaatgaaccagatgggcccccggaattgtttgacgcctggctttcccagttctgcttggaggagaagaagggggagatctcagagctccttgtaggcagcccctccatccgggccctctacaccaagatggttccagcagctgtttcccattcagaattctggcatcggtatttctataaagtccatcagttagagcaggagcaggcccggagggacgccctgaagcagcgggcggaacagagcatctctgaagagcccggctgggaggaggaggaagaggagctcatgggcatttcacccatatctccaaaagaggcaaaggttcctgtggccaaaatttctacattccctgaaggagaacctggcccccagagcccctgtgaagagaatctggtgacttcagttgagcccccagcagaggtgactccatcagagagcagtgagagcatctccctcgtgacacagatcgccaacccggccactgcacctgaggcacgagtgctacccaaggacctgtcccaaaagctgctagaggcatccttggaggaacagggcctggctgtggatgtgggtgagactggaccctcaccccctattcactccaagcccctaacgcctgctggccacaccggcggcccagagcccaggcctccagccagagtagagactctgagggaggaggcgcccacagacttacgggtgtttgagctgaactcggatagtgggaagtctacaccctccaacaatggaaagaaagagacaaggtctcagttcactgttgatttcctctggaagatttctgtgactctcttggagcctctgggccaaagtgcttctccgctctttagtaacctgccttttccgaggctcaagcacggacatcagtgaggactgggagaaagactttgacttggacatgactgaagaggaggtgcagatggcactttccaaagtggatgcctccggggagctggaagatgtagagtgggaggactgggagtgagggagccagagggagcagctcccccacccatggcatctctcgcctccctcgctcgtctcagcccagccctggaagactgagaatgttcccccaaatctcctctgccaaccagagctctgggcacagattctggtggctccctgctggccctcttgggcctctgctcacacctgggaaggggctctctaaatcccggccagaaactctgacttgtgccaacaataggatgacccaagggagaggaaacctatcctcctcaccagaagagcctgtgtttttctgctgaacacccactgttcctgaggactcctgctgggaagtcccaagggatagttctagcccttctgcctgtgtagacagaagctaaaccaccagtctctctcggaggaagctgagacaacatactctgtccatacataagcaggcagggagggccatgccacctacccttggctaaacagggacagtgaacacattttggttcctatcccagtgggtaagaggcacttatctctgggaaatttgcctctcttgggactctccccctcccaggcattttccattcctggaaaggctcctttggggttcagaatccagagaccaaaccctgacccacctccttcctttcctccagcccacgctggtctgtccccatgccttcccagggcttcttcatgtcggatgcacccaagtccttagcccagctgtgccacctgcaggagttcgctcttgcgtttcttcccctccccaagaagggagggggctacttcaggcccttctgtgtgttgcctggcaggataccttgtccaaccagctacccacctcaactcccctgtagtttaggacacaaaacagctaccagcggtacagagcggtgatcaaagccgagtacttacaactctggtaagcctagcttctccgcctcagcccttctgcttctggaagggctatcctgggggtgaacttgaaactctcatcaggcttctgcaaaagctcttcttcctgaagacagacccagcctttgtgctctcaccctccactctggtaaagctgcacctctgggggaatgaggggctgcaggaatctctggagagcctggtgcttcacgatgctgctctggtgattcttgtacctaatctggtgtgctcaccaatgagtgaaagggatcgtgggtcagggacaccgagagagtgaggtcacttccacttcaaaccttcagtgagggggtgggatggagagaatgctgaatcttttttttgacgggatggggtttttctctttgtaattatttctttagtttaattaaccttttggttgtttgtgcaatattatatattttaaattataatgcatctccccagagtattttgtagctgggaaaagaaaaaaggaaaaaaagaaaaaaagattctaacagctgttagttttataattaaaaaagaaagaaaaaagaactttgtcctgaaccttttacagacttgccgttaacagcattaaagtgattcaccc

SEQ ID NO: 112366 - DNA, 1361 bp, Homo sapiens
  Payload ID: 1991
  Gene Symbol: BSDC1
  Gene Name: BSD domain containing 1
  Uniprot ID: Q9NW68
  ENST ID: ENST00000526031
  CDS Start-End: 28-1035
aaatagtggtgatgtcatgcaggcaagatggcggaaggggaggacgtgggatggtggcggagctggctgcagcagagctaccaagcagtcaaagagaaggctcgcctctatagcctgcagtcggacccagcaacctactgtaatgaaccagatgggcccccggaattgtttgacgcctggctttcccagttctgcttggaggagaagaagggggagatctcagagctccttgtaggcagcccctccatccgggccctctacaccaagatggttccagcagctgtttcccattcagaattctggcatcggtatttctataaagtccatcagttagagcaggagcaggcccggagggacgccctgaagcagcgggcggaacagagcatctctgaagagcccggctgggaggaggaggaagaggagctcatgggcatttcacccatatctccaaaagaggcaaaggttcctgtggccaaaatttctacattccctgaaggagaacctggcccccagagcccctgtgaagagaatctggtgacttcagttgagcccccagcagaggtgactccatcagagagcagtgagagcatctccctcgtgacacagatcgccaacccggccactgcacctgaggcacgagtgctacccaaggacctgtcccaaaagctgctagaggcatccttggaggaacagggcctggctgtggatgtgggtgagactggaccctcaccccctattcactccaagcccctaacgcctgctggccacaccggcggcccagagcccaggcctccagccagagtagagactctgagggaggaggcgcccacagacttacgggtgtttgagctgaactcggatagtgggaagtctacaccctccaacaatggaaagaaaggctcaagcacggacatcagtgaggactgggagaaagactttgacttggacatgactgaagaggaggtgcagatggcactttccaaagtggatgcctccggggagctggaagatgtagagtgggaggactgggagtgagggagccagagggagcagctcccccacccatggcatctctcgcctccctcgctcgtctcagcccagccctggaagactgagaatgttcccccaaatctcctctgccaaccagagctctgggcacagattctggtggctccctgctggccctcttgggcctctgctcacacctgggaaggggctctctaaatcccggccagaaactctgacttgtgccaacaataggatgacccaagggagaggaaacctatcctcctcaccagaagagcctgtgtttttctgctgaacacccactgttcctgaggactcctgctgggaagtcccaa

SEQ ID NO: 112367 - DNA, 567 bp, Homo sapiens
  Payload ID: 1991
  Gene Symbol: BSDC1
  Gene Name: BSD domain containing 1
  ENST ID: ENST00000527163
  CDS Start-End: 35-567
atgcaggcaagatggcggaaggggaggacgtgggatggtggcggagctggctgcagcagagctaccaagcagtcaaagagaaggggtgatctcagacacctttgccccttcgccagacaaaaccatcgactgcgatgtcatcaccctgatgggcacaccgtctggcacagctgagccctatgatggcaccaaggctcgcctctatagcctgcagtcggacccagcaacctactgtaatgaaccagatgggcccccggaattgtttgacgcctggctttcccagttctgcttggaggagaagaagggggagatctcagagctccttgtaggcagcccctccatccgggccctctacaccaagatggttccagcagctgtttcccattcagaattctggcatcggtatttctataaagtccatcagttagagcaggagcaggcccggagggacgccctgaagcagcgggcggaacagagcatctctgaagagcccggctgggaggaggaggaagaggagctcatgggcatttcacccatatctccaaaagaggcaaaggttcctgtggc

SEQ ID NO: 112368 - DNA, 576 bp, Homo sapiens
  Payload ID: 1991
  Gene Symbol: BSDC1
  Gene Name: BSD domain containing 1
  ENST ID: ENST00000527513
  CDS Start-End: 12-281
atgcaggcaagatggcggaaggggaggacgtgggatggtggcggagctggctgcagcagagctaccaagcagtcaaagagaagtcctctgaagccttggagtttatgaagcgggacctgacggagtttacccaggtggtgcagcatgacacggcctgtaccatcgcagccacggccagcgtggtcaaggagaagctggctggcccccggaattgtttgacgcctggctttcccagttctgcttggaggagaagaagggggagatctcagagctccttgtaggcagcccctccatccgggccctctacaccaagatggttccagcagctgtttcccattcagaattctggcatcggtatttctataaagtccatcagttagagcaggagcaggcccggagggacgccctgaagcagcgggcggaacagagcatctctgaagagcccggctgggaggaggaggaagaggagctcatgggcatttcacccatatctccaaaagaggcaaaggttcctgtggccaaaatttctacattccctgaaggagaacctggcccccagagcccctgtgaagagaa

SEQ ID NO: 112369 - DNA, 482 bp, Homo sapiens
  Payload ID: 1991
  Gene Symbol: BSDC1
  Gene Name: BSD domain containing 1
  ENST ID: ENST00000530485
  CDS Start-End: 15-482
gtcatgcaggcaagatggcggaaggggaggacgtgggatggtggcggagctggctgcagcagagctaccaagcagtcaaagagaagacggaaggctcctcaggagcaacagagaagatgaagaaagggttatctgacttcctaggggtgatctcagacacctttgccccttcgccagacaaaaccatcgactgcgatgtcatcaccctgatgggcacaccgtctggcacagctgagccctatgatggcaccaaggctcgcctctatagcctgcagtcggacccagcaacctactgtaatgaaccagatgggcccccggaattgtttgacgcctggctttcccagttctgcttggaggagaagaagggggagatctcagagctccttgtaggcagcccctccatccgggccctctacaccaagatggttccagcagctgtttcccattcagaattctggcatcggtatttctataaagtccat

SEQ ID NO: 112370 - DNA, 7250 bp, Homo sapiens
  Payload ID: 1992
  Gene Symbol: BTAF1
  Gene Name: BTAF1 RNA polymerase II, B-TFIID transcription factor-associated, 170kDa
  Uniprot ID: O14981
  ENST ID: ENST00000265990
  CDS Start-End: 309-5858
cagttgtgcgtgccgacgcccgcgtcagcaaagagcggagctgagggtacccggtttgaagtcgtgcgggtcggaggactgccgcctccgctaccgtcttggacccctgcttaccggccgccgcggggacgagctcgggtaggcggcagggcagatgcccgagggcctgcgctggaacgccccacgccgcaccggccgctcccctgtgctccgcggcctgggcctgcgccgctcagctctctggaaactagcgcctcagctgcgcggcgcgtaggtcgcggggagctccgaaccgccggcgcccggccatggcggtctccaggctagatcgcctttttattttactggatactggcactactcctgttacaagaaaagctgctgcacagcaacttggagaagtggtgaagcttcatccccatgaactaaataatctcctgtctaaagtgttgatatatttaaggagtgcaaattgggatacccggattgcagcaggacaagctgttgaagctatagtgaaaaatgtacctgagtggaatccagtgccgagaaccagacaagaacctacttccgaaagttctatggaagattcacctactacagagcgattgaattttgacagatttgatatatgtagattgttacaacatggtgcatcactcctgggatctgctggtgccgaatttgaagtccaagatgaaaaatcaggtgaagtggatcctaaagagaggatagcacgccaacgaaaattattacagaagaaacttggccttaatatgggagaagcaattggaatgagtactgaagaacttttcaatgatgaggatttggattataccccaacttcagcatcctttgttaacaaacaacctactcttcaggcagctgaattgattgactcagagtttcgagcaggaatgagcaatagacaaaagaacaaagctaaaagaatggccaagttatttgcaaaacagagatccagggatgcagtggaaactaatgagaagagcaatgatagcactgatggggagccagaagaaaagagacggaaaatagcaaatgttgttattaatcagtctgcaaatgattccaaagtcttgattgataatattccagacagctcttccttaattgaagagacaaatgaatggcctttggaaagcttttgtgaagaactttgcaatgacctttttaatccctcctgggaggttcgacatggtgcaggcactggacttagggaaattcttaaagctcatgggaaaagtggtggtaaaatgggtgacagcactttagaagagatgattcagcagcatcaagagtggttggaagacttggttattagactcctttgtgtttttgcattagacagatttggagactttgtttctgatgaagttgtggcaccagttcgtgaaacttgtgctcaaacattaggtgtggttttaaaacacatgaacgaaacaggagttcataagactgtggatgtgctgctaaaattacttacacaagaacaatgggaagttagacatggtggtctgctgggaataaaatatgctttggcagtccgtcaggatgtaattaatactttattgcctaaagttttaactagaataattgaaggactccaggatcttgatgatgatgtcagagctgttgctgcagcatcattagtgcctgtagtagaaagccttgtctatcttcagacacaaaaggtgcccttcattataaatacattgtgggatgctcttctggaattagatgatctaacagcttcaacaaatagtattatgactctcctttcatccttgttaacttaccctcaggtccaacaatgcagtattcagcagtcactgacagttttagttccacgtgtctggccttttttgcatcacactatatcatcagttcgaagagcagcattggaaactctgtttacgttattatcaacacaggaccagaactcttcatcttggcttatacctatactgcctgatatgctccgacacatttttcagttctgtgttttggaaagcagccaggaaattctggaccttattcacaaggtttggatggaactgttgagtaaggcttcagttcagtatgtggtagcagctgcttgcccatggatgggtgcttggctttgcttgatgatgcagccttctcatttacctatcgatttaaatatgttgctagaagtaaaagctagagccaaggaaaaaacaggtggtaaggtgcgccaaggccaaagccagaataaagaagtacttcaggagtatattgcaggtgccgacaccatcatggaagacccagccaccagggattttgtagttatgcgggccagaatgatggcagccaagttgttaggagcactttgttgctgtatttgtgatccaggtgtaaatgtggtaactcaagaaattaaaccagctgaatccctgggccagttactactcttccatttgaactccaagtctgctttacagaggattagtgtagctttggtaatctgtgaatgggctgctttacaaaaggagtgtaaagctgttaccttagctgtgcagccgcgtttacttgatatcctttcagaacatttatattatgacgaaattgccgttccattcacacgaatgcagaatgaatgtaaacaacttatatcatcattagctgatgtacatattgaagttggtaatcgagtaaacaacaatgttttaacaatagatcaagctagtgacttggtcactactgtttttaatgaagccacatcatctttcgatttaaatcctcaagtgttacaacagttagatagtaaacgacagcaggtccaaatgacagttacagagaccaaccaggagtggcaagtgttgcagttgagagtgcatacttttgctgcctgtgcagttgtgagcttgcagcagcttccggagaaattaaatcctatcataaaaccattaatggagacaattaaaaaagaagagaatacactagtgcaaaactatgcagctcagtgcatagctaaactccttcagcagtgcacaacaaggacgccctgtcccaattcaaaaattattaaaaacctctgtagctcactttgtgtggacccatatctaactccttgtgtcacatgtccagtaccaacacaaagtggccaggaaaattctaaaggatccacctcagaaaaagatggaatgcaccatactgtcaccaagcacagaggtataattacactctacaggcaccagaaagctgcctttgctatcacaagtaggcgaggtcctacccccaaagcagtaaaagctcaaatagcagatcttcctgcaggaagtagtggaaatattcttgttgaacttgatgaggcccagaagccttacctggtacaacggagaggagctgaatttgctttgacaactatagtaaagcattttggtggtgaaatggcagtgaagttgccacatctctgggatgctatggttggcccattgaggaatacaatcgacataaataattttgatggaaaatccctcctggataagggagatagccctgctcaagaattggtgaattctctgcaggtttttgaaacagcagcagcttcaatggattctgagcttcatcccttgttggtccagcatttgccacatctttatatgtgccttcaataccccagtactgcagtgaggcacatggctgctcgttgtgtaggtgtcatgagcaaaatagctaccatggaaacaatgaatatttttttggagaaggttcttccgtggctgggagcaattgatgacagtgtcaaacaagagggtgcaattgaagcacttgcctgtgtaatggaacaactagatgttggtattgttccatatattgtccttttagttgttcctgtattaggaagaatgagtgatcagacagacagtgtgagattcatggccacgcagtgctttgcaacgctaattagactcatgccacttgaggcaggcattccagaccctccaaacatgtcagcagaattaatccaattgaaagccaaggagcgacactttttggagcaattgttagatgggaaaaaattggaaaattataaaattccagtaccaatcaatgctgaactcagaaaatatcagcaggatggtgtgaactggttagcatttcttaataagtataaacttcatggaattctgtgtgatgacatgggtttaggaaaaactttacagtccatctgcattctagcaggagatcattgtcatagggcccaggaatatgcaagatcaaaattagcagaatgtatgccacttccttccttagtggtttgtccgccaacattaacaggccattgggtggatgaagtaggtaaattttgctctagagaatatctcaacccgttgcattacactggacctcccactgaaagaataaggttacagcaccaagtaaaaaggcacaatctaatagtggcttcatatgatgttgtgaggaatgacatagatttctttagaaatattaaatttaactactgcattcttgatgaaggccatgtcatcaaaaatggaaaaacaaagttgtcaaaagcagtaaaacaactgactgctaattataggattattctttctggaacaccaatccagaacaacgttttggagctgtggtcattatttgatttcctcatgccaggatttttgggtactgaacgccagtttgctgctcgatatggtaaacctatattagcaagtagggatgctcgaagctccagtcgagagcaagaagcaggtgttcttgctatggatgcgctgcaccgccaagtactaccgtttcttttgagaagaatgaaagaagatgttttgcaggatcttccacctaaaattattcaagactattattgtactcttagtcctctccaggttcagctctatgaagattttgctaagtctcgtgccaagtgtgatgttgatgaaacagtttcttcagctacactttctgaagaaactgaaaaaccaaagcttaaagctacaggccacgtattccaggcattacagtacttacgtaaactgtgcaaccatccagcattagtcttaacacctcaacatccagaattcaagaccactgccgaaaaactggcagttcagaattcttctctacatgatattcaacatgcccctaagctctcagctttgaaacaattgctgttggactgcggtttgggaaatggcagcacttccgagagtggcacagagtctgttgtggcccagcacaggatactgatattctgtcagctgaaaagcatgcttgatatagtagagcatgatctcctcaaacctcacttgccctctgtcacttatttgagattagatggcagcatacctcctggtcagaggcattccattgtttcccggtttaataatgatccatctatagacgttctgttacttaccactcacgttggtggcctgggacttaatttgacaggcgctgacacagtagtatttgtggagcatgactggaatcctatgcgagatctacaagccatggaccgggcccatcgcattgggcagaaacgtgtggttaacgtataccgattgataaccagaggaacattggaagaaaaaataatggggttgcagaaattcaagatgaacatagcgaatactgttattagccaagagaattctagtttgcagagcatggggactgatcagcttcttgatctgtttactcttgataaggatggcaaagcagaaaaagctgacacctctacttctgggaaagcaagtatgaaatcaattcttgaaaacctgagtgatctttgggatcaagagcagtatgattcagagtacagcctggaaaattttatgcattctctcaagtaactatcaaatattgtaaatgcaattgctgctagttcagttacatttctgctgatattcagcaaatttctaagtttatggtgaacttttaactcaatgtgtaaatagatctggagaatattcagcataatgctggctcttgtttcactgggggaaacaagttattctcaaatatttgcactgtattaaatttaaatgttaatgtgaaatggtttaaattttacatgctgaaaagctgcagagcagaggaaccaaaccaggtttatttgtgctaccaggaggtgttcttaatgggaacaggcctcctatctttagtcactttgtacaggatgatatccatgagtactttagtgtttgtatatgttttttcttttaaatagaacttgtttttataattgatttaaaatagggctttttttctataaaagccttaatgagccataattttaagaatataagaataatgactatgatattggtcagtcttagaacatgaaaatgtcagacaatgaatttaatcgggcccttggtggaaacatttatatatttaatgcagatgcatagtgtttttcaaatctttaacatcattttttcaacttttaagatataatatcaactattctaaatacaggtaatggtatatttaaggctaccataacatcctatttagagggtggttttttttaatttatctaatggctacgatatagccagattcaaataacatatgtactcaataggtttcaatcatatatataatatattttttgtaactatgaacatacacagttttccagaaatagattttacactgtttagaattccaacacctacagtggaaagactgtttattgtagtaatgcatggctgaagcataaaagggagagagaatttctttatatacacaaacatacatgaatatgcatatctatatgcatagatgtacctatcctgcacccaaaaaggtgcctggtattggcactaaaatcatgtagttatactgggcagcaataataattgggcatgaggctgattactcaatggtgagggtaggtatatgtagatagatgtgcatgtatgtgtttgtatatataattttataagtttcacgcataaattaatacatgcctgtgtgcatacatatgtatgggatatatttgtatatatatgtacaggtaataaacatccccaaggtttgtggctggccatacacataggcatcagtttaacaaccatcagacctcagctgtacaataacaggtgttttgtttaattaaaattatactgttctgcagcatttagacatttgtcacatttcattagctttgacaaccatactgtaacattaaacctagcattccacaagagaataaatataagattgaaactgtaaaa

SEQ ID NO: 112371 - DNA, 6938 bp, Homo sapiens
  Payload ID: 1992
  Gene Symbol: BTAF1
  Gene Name: BTAF1 RNA polymerase II, B-TFIID transcription factor-associated, 170kDa
  ENST ID: ENST00000544642
  CDS Start-End: 1-5550
atgggagtattcaggctagatcgcctttttattttactggatactggcactactcctgttacaagaaaagctgctgcacagcaacttggagaagtggtgaagcttcatccccatgaactaaataatctcctgtctaaagtgttgatatatttaaggagtgcaaattgggatacccggattgcagcaggacaagctgttgaagctatagtgaaaaatgtacctgagtggaatccagtgccgagaaccagacaagaacctacttccgaaagttctatggaagattcacctactacagagcgattgaattttgacagatttgatatatgtagattgttacaacatggtgcatcactcctgggatctgctggtgccgaatttgaagtccaagatgaaaaatcaggtgaagtggatcctaaagagaggatagcacgccaacgaaaattattacagaagaaacttggccttaatatgggagaagcaattggaatgagtactgaagaacttttcaatgatgaggatttggattataccccaacttcagcatcctttgttaacaaacaacctactcttcaggcagctgaattgattgactcagagtttcgagcaggaatgagcaatagacaaaagaacaaagctaaaagaatggccaagttatttgcaaaacagagatccagggatgcagtggaaactaatgagaagagcaatgatagcactgatggggagccagaagaaaagagacggaaaatagcaaatgttgttattaatcagtctgcaaatgattccaaagtcttgattgataatattccagacagctcttccttaattgaagagacaaatgaatggcctttggaaagcttttgtgaagaactttgcaatgacctttttaatccctcctgggaggttcgacatggtgcaggcactggacttagggaaattcttaaagctcatgggaaaagtggtggtaaaatgggtgacagcactttagaagagatgattcagcagcatcaagagtggttggaagacttggttattagactcctttgtgtttttgcattagacagatttggagactttgtttctgatgaagttgtggcaccagttcgtgaaacttgtgctcaaacattaggtgtggttttaaaacacatgaacgaaacaggagttcataagactgtggatgtgctgctaaaattacttacacaagaacaatgggaagttagacatggtggtctgctgggaataaaatatgctttggcagtccgtcaggatgtaattaatactttattgcctaaagttttaactagaataattgaaggactccaggatcttgatgatgatgtcagagctgttgctgcagcatcattagtgcctgtagtagaaagccttgtctatcttcagacacaaaaggtgcccttcattataaatacattgtgggatgctcttctggaattagatgatctaacagcttcaacaaatagtattatgactctcctttcatccttgttaacttaccctcaggtccaacaatgcagtattcagcagtcactgacagttttagttccacgtgtctggccttttttgcatcacactatatcatcagttcgaagagcagcattggaaactctgtttacgttattatcaacacaggaccagaactcttcatcttggcttatacctatactgcctgatatgctccgacacatttttcagttctgtgttttggaaagcagccaggaaattctggaccttattcacaaggtttggatggaactgttgagtaaggcttcagttcagtatgtggtagcagctgcttgcccatggatgggtgcttggctttgcttgatgatgcagccttctcatttacctatcgatttaaatatgttgctagaagtaaaagctagagccaaggaaaaaacaggtggtaaggtgcgccaaggccaaagccagaataaagaagtacttcaggagtatattgcaggtgccgacaccatcatggaagacccagccaccagggattttgtagttatgcgggccagaatgatggcagccaagttgttaggagcactttgttgctgtatttgtgatccaggtgtaaatgtggtaactcaagaaattaaaccagctgaatccctgggccagttactactcttccatttgaactccaagtctgctttacagaggattagtgtagctttggtaatctgtgaatgggctgctttacaaaaggagtgtaaagctgttaccttagctgtgcagccgcgtttacttgatatcctttcagaacatttatattatgacgaaattgccgttccattcacacgaatgcagaatgaatgtaaacaacttatatcatcattagctgatgtacatattgaagttggtaatcgagtaaacaacaatgttttaacaatagatcaagctagtgacttggtcactactgtttttaatgaagccacatcatctttcgatttaaatcctcaagtgttacaacagttagatagtaaacgacagcaggtccaaatgacagttacagagaccaaccaggagtggcaagtgttgcagttgagagtgcatacttttgctgcctgtgcagttgtgagcttgcagcagcttccggagaaattaaatcctatcataaaaccattaatggagacaattaaaaaagaagagaatacactagtgcaaaactatgcagctcagtgcatagctaaactccttcagcagtgcacaacaaggacgccctgtcccaattcaaaaattattaaaaacctctgtagctcactttgtgtggacccatatctaactccttgtgtcacatgtccagtaccaacacaaagtggccaggaaaattctaaaggatccacctcagaaaaagatggaatgcaccatactgtcaccaagcacagaggtataattacactctacaggcaccagaaagctgcctttgctatcacaagtaggcgaggtcctacccccaaagcagtaaaagctcaaatagcagatcttcctgcaggaagtagtggaaatattcttgttgaacttgatgaggcccagaagccttacctggtacaacggagaggagctgaatttgctttgacaactatagtaaagcattttggtggtgaaatggcagtgaagttgccacatctctgggatgctatggttggcccattgaggaatacaatcgacataaataattttgatggaaaatccctcctggataagggagatagccctgctcaagaattggtgaattctctgcaggtttttgaaacagcagcagcttcaatggattctgagcttcatcccttgttggtccagcatttgccacatctttatatgtgccttcaataccccagtactgcagtgaggcacatggctgctcgttgtgtaggtgtcatgagcaaaatagctaccatggaaacaatgaatatttttttggagaaggttcttccgtggctgggagcaattgatgacagtgtcaaacaagagggtgcaattgaagcacttgcctgtgtaatggaacaactagatgttggtattgttccatatattgtccttttagttgttcctgtattaggaagaatgagtgatcagacagacagtgtgagattcatggccacgcagtgctttgcaacgctaattagactcatgccacttgaggcaggcattccagaccctccaaacatgtcagcagaattaatccaattgaaagccaaggagcgacactttttggagcaattgttagatgggaaaaaattggaaaattataaaattccagtaccaatcaatgctgaactcagaaaatatcagcaggatggtgtgaactggttagcatttcttaataagtataaacttcatggaattctgtgtgatgacatgggtttaggaaaaactttacagtccatctgcattctagcaggagatcattgtcatagggcccaggaatatgcaagatcaaaattagcagaatgtatgccacttccttccttagtggtttgtccgccaacattaacaggccattgggtggatgaagtaggtaaattttgctctagagaatatctcaacccgttgcattacactggacctcccactgaaagaataaggttacagcaccaagtaaaaaggcacaatctaatagtggcttcatatgatgttgtgaggaatgacatagatttctttagaaatattaaatttaactactgcattcttgatgaaggccatgtcatcaaaaatggaaaaacaaagttgtcaaaagcagtaaaacaactgactgctaattataggattattctttctggaacaccaatccagaacaacgttttggagctgtggtcattatttgatttcctcatgccaggatttttgggtactgaacgccagtttgctgctcgatatggtaaacctatattagcaagtagggatgctcgaagctccagtcgagagcaagaagcaggtgttcttgctatggatgcgctgcaccgccaagtactaccgtttcttttgagaagaatgaaagaagatgttttgcaggatcttccacctaaaattattcaagactattattgtactcttagtcctctccaggttcagctctatgaagattttgctaagtctcgtgccaagtgtgatgttgatgaaacagtttcttcagctacactttctgaagaaactgaaaaaccaaagcttaaagctacaggccacgtattccaggcattacagtacttacgtaaactgtgcaaccatccagcattagtcttaacacctcaacatccagaattcaagaccactgccgaaaaactggcagttcagaattcttctctacatgatattcaacatgcccctaagctctcagctttgaaacaattgctgttggactgcggtttgggaaatggcagcacttccgagagtggcacagagtctgttgtggcccagcacaggatactgatattctgtcagctgaaaagcatgcttgatatagtagagcatgatctcctcaaacctcacttgccctctgtcacttatttgagattagatggcagcatacctcctggtcagaggcattccattgtttcccggtttaataatgatccatctatagacgttctgttacttaccactcacgttggtggcctgggacttaatttgacaggcgctgacacagtagtatttgtggagcatgactggaatcctatgcgagatctacaagccatggaccgggcccatcgcattgggcagaaacgtgtggttaacgtataccgattgataaccagaggaacattggaagaaaaaataatggggttgcagaaattcaagatgaacatagcgaatactgttattagccaagagaattctagtttgcagagcatggggactgatcagcttcttgatctgtttactcttgataaggatggcaaagcagaaaaagctgacacctctacttctgggaaagcaagtatgaaatcaattcttgaaaacctgagtgatctttgggatcaagagcagtatgattcagagtacagcctggaaaattttatgcattctctcaagtaactatcaaatattgtaaatgcaattgctgctagttcagttacatttctgctgatattcagcaaatttctaagtttatggtgaacttttaactcaatgtgtaaatagatctggagaatattcagcataatgctggctcttgtttcactgggggaaacaagttattctcaaatatttgcactgtattaaatttaaatgttaatgtgaaatggtttaaattttacatgctgaaaagctgcagagcagaggaaccaaaccaggtttatttgtgctaccaggaggtgttcttaatgggaacaggcctcctatctttagtcactttgtacaggatgatatccatgagtactttagtgtttgtatatgttttttcttttaaatagaacttgtttttataattgatttaaaatagggctttttttctataaaagccttaatgagccataattttaagaatataagaataatgactatgatattggtcagtcttagaacatgaaaatgtcagacaatgaatttaatcgggcccttggtggaaacatttatatatttaatgcagatgcatagtgtttttcaaatctttaacatcattttttcaacttttaagatataatatcaactattctaaatacaggtaatggtatatttaaggctaccataacatcctatttagagggtggttttttttaatttatctaatggctacgatatagccagattcaaataacatatgtactcaataggtttcaatcatatatataatatattttttgtaactatgaacatacacagttttccagaaatagattttacactgtttagaattccaacacctacagtggaaagactgtttattgtagtaatgcatggctgaagcataaaagggagagagaatttctttatatacacaaacatacatgaatatgcatatctatatgcatagatgtacctatcctgcacccaaaaaggtgcctggtattggcactaaaatcatgtagttatactgggcagcaataataattgggcatgaggctgattactcaatggtgagggtaggtatatgtagatagatgtgcatgtatgtgtttgtatatataattttataagtttcacgcataaattaatacatgcctgtgtgcatacatatgtatgggatatatttgtatatatatgtacaggtaataaacatccccaaggtttgtggctggccatacacataggcatcagtttaacaaccatcagacctcagctgtacaataacaggtgttttgtttaattaaaattatactgttctgcagcatttagacatttgtcacatttcattagctttgacaaccatactgtaacattaaacctagcattccacaagagaataaatataagattgaaactgt

SEQ ID NO: 112372 - DNA, 3297 bp, Homo sapiens
  Payload ID: 1993
  Gene Symbol: BTBD1
  Gene Name: BTB (POZ) domain containing 1
  Uniprot ID: Q9H0C5
  ENST ID: ENST00000261721
  CDS Start-End: 204-1652
agtcctgttacacctcccgcggccgcgcacagcggcaacccgggcgtgcgggggcgcgcgcggtcagggaggggcctgcggaggcgcgaggcccccggaagcgcctttcccggaaggcagggaggcagcgccggcctccggaggcggcctgggcgatggcggcggagttttgtccataacgtgggcaaccgcgcagctggaggatggcctcactcgggcctgccgcagctggggagcaggcgtcgggggctgaggcggagccgggccccgcggggccgccgccgccgccctcaccgtcctctctggggcccctgctccccctgcagcgggaacctctctacaactggcaggcgaccaaggcgtcgctgaaggagcgcttcgccttcctcttcaactcggagctgctgagcgatgtgcgcttcgtactgggcaagggtcgcggcgccgccgccgctgggggcccgcagcgcatccccgcccaccgcttcgtgctggcggccggcagcgccgtctttgacgccatgttcaacggcggcatggccaccacgtcggccgagatcgagctgccggacgtggagcccgcagccttcctggcgctgctgagatttctatattcagatgaagttcaaattggtccagaaacagttatgaccactctttatactgccaagaaatacgcagtcccagccttggaagcacactgtgtagaatttctcaccaaacatcttagggcagataatgcctttatgttacttactcaggctcgattatttgatgaacctcagcttgctagtctttgtctagatacaatagacaaaagcacaatggatgcaataagtgcagaagggtttactgatattgatatagatacactctgtgcagttttagagagagacacactcagtattcgagaaagtcgactttttggagctgttgtacgctgggcagaagcagaatgtcagagacaacaattacctgtgacttttgggaataaacaaaaagttctaggaaaagcactttccttaatccggttcccactgatgacaattgaggaatttgcagcaggtcctgctcaatctggaattttgtcagatcgtgaagtggtaaacctctttcttcattttactgtcaaccctaaaccccgagttgaatacattgaccgaccaagatgctgtctcaggggaaaggaatgctgcatcaatagattccagcaagtagaaagccgctggggttacagtgggacgagtgatcgaatcagattcacagttaatagaaggatctctatagttggatttggcttgtatggatctattcatggccctacagattatcaagtgaatatacagatcattgaatatgagaaaaagcaaaccctgggacagaatgataccggctttagttgtgatgggacagctaacacattcagggtcatgttcaaggaacccatagagatcctgcccaatgtgtgctacacagcatgtgcaacactcaaaggtccagattcccactatggcacaaaaggattgaagaaagtagtgcatgagacacctgctgcaagcaagactgtttttttcttttttagttcccctggcaataataatggcacttcaatagaagatggacaaattccagaaatcatattttatacataatttagcattataatacatcttggctaaataataccatacaatctagtgtcaaaaacataaatggccacaaaaaagtagtttgagtgttatgaatatttaaaattgtaagataagaaacagtttcttagagcagatagaaaaatgcttatttaaatctttgcatgatttaaaaacagattttccattttcttacaactttaagagaaaagaactgggtttaatggtttaaaaaaaagcacagctttttcaccttcatcttgtataatttcatagattggctgacttagggtctttcaatagtttgggaattgaaagattcttgttatatatagctagtttgggtttgtttttgttttaactattttgaaggttaggtgagatgggcaaataggcttaactattttgaaggttggatgaaaagagatgggtcagtattcctacagaattcttattaactcaaataactaaatttcagaaaattaagaagctgactttatatttggtggtttgaagtatcttgttgttagcatttgtaataatgctaaaaaaggcctaataaaatgcccaagaaaatattcagtgcatttatagagaaggatattttgtagtagtatagtaatgtgttatgtagtacagttttaaagctataaatggaattttgtgtaaattcacaaaaatgtgatataaacaggatctaagactggattccctgtcactaaactgcaccactatacctgtctctctgtgtgggggacactgctgatgattcccaagattgagatgatgacggtgatgacgactgggtgaacagccatcacttcaacattgtgataatccttcacagcaagaaaccgaataaaatactaacatttctaacaactgctctgacattgtaaagagatccaacagaatcactcctgctgaaaaatacgctttctgccacctacacatttctatttaggaagtaaaatttgcttcatggtcatgaccccattagtcagtgttacagctgtgttggggataggaagtatatctggcagattgatatttatacacttttttataaagcagattttaaaatatagtaacatccatttttttcccttgaaagtgattctcttataaaaaatgaaagtggagtttaaggtatatcaaatcgttgtggaaggtgattaaaaatcaaaattcttttaaatatcaacttaattttttctaagtaagatacaaaaaattttcatctaaagtaatatttcactttatattgtaaagaaggtaggtatattggtggctgaggtctcttgaaattgctaaagggaaatttttctatggtaatgctcttacggatataaacctcagttaaatggaattatctatgggatgtgtggttctggttaactaaaaattaaccagtaaacactctgtagtaaccattacagaaaatacttctgccttaaaaaatatgatatgccagagatgagttagtgtttcttgacgttggagaccttttaaatgcctcatctgttgtactgaacaattgaaactgcatgcagccataaaagggacaagaaacagaactgtttactaactttgggacatcccctggagtttttaaaaataaataaatatatatatatataaaaaaaac

SEQ ID NO: 112373 - DNA, 1467 bp, Homo sapiens
  Payload ID: 1993
  Gene Symbol: BTBD1
  Gene Name: BTB (POZ) domain containing 1
  Uniprot ID: Q9H0C5
  ENST ID: ENST00000379403
  CDS Start-End: 1-1158
atggcctcactcgggcctgccgcagctggggagcaggcgtcgggggctgaggcggagccgggccccgcggggccgccgccgccgccctcaccgtcctctctggggcccctgctccccctgcagcgggaacctctctacaactggcaggcgaccaaggcgtcgctgaaggagcgcttcgccttcctcttcaactcggagctgctgagcgatgtgcgcttcgtactgggcaagggtcgcggcgccgccgccgctgggggcccgcagcgcatccccgcccaccgcttcgtgctggcggccggcagcgccgtctttgacgccatgttcaacggcggcatggccaccacgtcggccgagatcgagctgccggacgtggagcccgcagccttcctggcgctgctgagatttctatattcagatgaagttcaaattggtccagaaacagttatgaccactctttatactgccaagaaatacgcagtcccagccttggaagcacactgtgtagaatttctcaccaaacatcttagggcagataatgcctttatgttacttactcaggctcgattatttgatgaacctcagcttgctagtctttgtctagatacaatagacaaaagcacaatggatgcaataagtgcagaagggtttactgatattgatatagatacactctgtgcagttttagagagagacacactcagtattcgagaaagtcgactttttggagctgttgtacgctgggcagaagcagaatgtcagagacaacaattacctgtgacttttgggaataaacaaaaagttctaggaaaagcactttccttaatccggttcccactgatgacaattgaggaatttgcagcaggtcctgctcaatctggaattttgtcagatcgtgaagtggtaaacctctttcttcattttactgtcaaccctaaaccccgagttgaatacattgaccgaccaagatgctgtctcaggggaaaggaatgctgcatcaatagattccagcaagtagaaagccgctggggttacagtgggacgagtgatcgaatcagatcattgaatatgagaaaaagcaaaccctgggacagaatgataccggctttagttgtgatgggacagctaacacattcagggtcatgttcaaggaacccatagagatcctgcccaatgtgtgctacacagcatgtgcaacactcaaaggtccagattcccactatggcacaaaaggattgaagaaagtagtgcatgagacacctgctgcaagcaagactgtttttttcttttttagttcccctggcaataataatggcacttcaatagaagatggacaaattccagaaatcatattttatacataatttagcattataatacatcttggctaaataataccatacaatctagtgtcaaaaacataaatggccacaaaaaagtagtttgagtgttatgaatatttaaaattgt

SEQ ID NO: 112374 - DNA, 797 bp, Homo sapiens
  Payload ID: 1993
  Gene Symbol: BTBD1
  Gene Name: BTB (POZ) domain containing 1
  ENST ID: ENST00000559652
  CDS Start-End: 1-112
gaaatacgcagtcccagccttggaagcacactgtgtagaatttctcaccaaacatcttagggcagataatgcctttatgttacttactcagatacactctgtgcagttttagagagagacacactcagtattcgagaaagtcgactttttggagctgttgtacgctgggcagaagcagaatgtcagagacaacaattacctgtgacttttgggaataaacaaaaagttctaggaaaagcactttccttaatccggttcccactgatgacaattgaggaatttgcagcaggtcctgctcaatctggaattttgtcagatcgtgaagtggtaaacctctttcttcattttactgtcaaccctaaaccccgagttgaatacattgaccgaccaagatgctgtctcaggggaaaggaatgctgcatcaatagattccagcaagtagaaagccgctggggttacagtgggacgagtgatcgaatcaggcaaatataaattatcaaaattgactgaagaagaaaagcctgaatagaccaattaccatggaaggaattaaaagttatcaaagaactgtcccttcacaaggtggtttttacagattcacagttaatagaaggatctctatagttggatttggcttgtatggatctattcatggccctacagattatcaagtgaatatacagatcattgaatatgagaaaaagcaaaccctgggacagaatgataccggctttagttgtgatgggacagctaacacattcagggtcatgttcaaggaacccatagagatcctgccc

SEQ ID NO: 112375 - DNA, 2504 bp, Homo sapiens
  Payload ID: 1994
  Gene Symbol: BTBD10
  Gene Name: BTB (POZ) domain containing 10
  Uniprot ID: Q9BSF8
  ENST ID: ENST00000278174
  CDS Start-End: 247-1674
tctcgcggtaagaggctgaggagccggcctgcaacctgccggggcggctccgctacgcgcagccgcctcagtggcttcctccacagccacctccggagggatctggctgaggaggaagtggaggtgtcactggccccggcctttgccccaatcttgtgtgggcactgaagggggactacaggttcgagagttatgggtgctacatgtgtgctttcagagcagtagtgtgaggaagcttggagtgggatggcaggacggcctcatccctatgatggtaactccagtgatccagagaattgggatcggaaattgcatagtagacctcgtaaactttataaacattcaagtacttcctcgcgtattgctaaaggaggagttgaccacaccaaaatgagtctacatggtgctagtgggggacatgagagatcaagagatagacgaaggtcaagtgacagatcacgagattcatctcatgaaagaacggagtctcagctcactccttgtattagaaatgtgacttctccaacacgacagcaccatgttgaacgagaaaaagatcacagttcctctcgtccaagcagtccgcgtcctcaaaaagcatccccaaatggttccattagcagtgctgggaacagcagcagaaacagtagtcagtcaagttcagatggtagctgtaagacagctggggagatggtgtttgtatatgaaaatgcaaaagaaggagctcggaatataagaacgtcagaacgagtgacactaatagtggataacactagatttgttgtagacccatccatttttactgcacagccaaatacaatgttgggcaggatgtttggatctggccgagaacataactttacacgacccaatgagaaaggagagtatgaggtggcagagggaattggttccactgtgtttcgagcgattctggattactataaaacaggaataatccgttgtcctgatggcatatctattcctgaactgagagaagcatgtgactatctttgtatctcttttgaatatagcactattaaatgtagagatctcagtgccctaatgcatgagttatcaaatgatggtgctcgtagacaatttgaattttatctggaagaaatgatcctccctctcatggtagctagtgcccagagtggggaacgggaatgtcatatagtggtgcttacagatgatgatgtggttgattgggatgaagaatatccaccacagatgggagaagaatattcacaaattatttatagcacaaaattatatagatttttcaagtatattgaaaacagagatgtggccaagtcagttttgaaggagaggggtcttaagaagattagattgggaatagaaggttatcctacctacaaagaaaaagtaaagaaaaggcctggaggccgcccagaagtgatctacaactatgtccaaagaccctttattcgaatgtcctgggagaaggaagaaggaaagagtcggcatgtagactttcagtgtgtaaagagtaaatctatcaccaatcttgcagcagctgcagcagacattccccaggaccagctggtagtcatgcatccaactccacaagtggatgagctggatattctccctatccatcccccttctggcaacagtgacctcgatcctgatgcacagaatccaatgctgtgatgctgatcttccttgaaaccatagcatgctactcttcacagtgacgttgtactctcctcattctgcactgcaaggccactcttcttcattgtgagatgcacataacaatgtttaggatattgcagtgtaggcttttttaaagaccaaaggtagctgaatggtttttttttaaatgagtacaactctagcattttgaagttccagttgtaaatgtatttgtttaccagtaggtttgtgaaattggttctttgtatgggggatggtcctttttcacacagctaggtcttttcagaagtggtggaaattggcagctggggtactttcagtttggactgatattcatcacacctcagataaaatgcagagtaatatatagttgcactttataaatggtggttaaatggaaatgttcaagccattttatagttgtgatgcacaatataatttaagtgcttctgtcaaagtattcctccagtacaatttgtatagtttgctgcccttgatgagcaaaaagtatttatcttgggcttatctgaatgatcaggatgagatttaatgcccatatcttaccagttcagttatctccagagccatttcaccctttagagtgagtcacatgcagggagtgtgaatgtcagaggtggtttattatccagtctgccttacccttaatctgttcacagatatttatttactaatgctttttttttcttaagagttatgggataggaaaatgaagtgtttgctcttcatttactaaatgattgtaaacttgagtttttcatcaaaataaaattccattgttttaatgtttctgaccaaatttataa

SEQ ID NO: 112376 - DNA, 1871 bp, Homo sapiens
  Payload ID: 1994
  Gene Symbol: BTBD10
  Gene Name: BTB (POZ) domain containing 10
  Uniprot ID: Q9BSF8
  ENST ID: ENST00000530907
  CDS Start-End: 272-1723
acacgatgctgttttgttagaaacgtcagtgctgcacaacccacggctgagtcagtgtctgtgagaaaataaactgaattaatatgtagagggggttgtatctctgaatatttaaagcctaaatattgcaacagcattattacacagtagagggaggaagctaaaggaagtctatggacaggtgaggtagggggagactggggaattttctgattgttcagaggaatcttgaagatgatggaaatatcagatgtgctaaagtttcctagtaatgcccaaggatgctgacctggctttcagtgcttcattgtttgaaagagcagagtccctttatactctgatttcaaaatttttttcttgtttttgtgtgtctaccttggcatatactaaaggaagtacttcctcgcgtattgctaaaggaggagttgaccacaccaaaatgagtctacatggtgctagtgggggacatgagagatcaagagatagacgaaggtcaagtgacagatcacgagattcatctcatgaaagaacggagtctcagctcactccttgtattagaaatgtgacttctccaacacgacagcaccatgttgaacgagaaaaagatcacagttcctctcgtccaagcagtccgcgtcctcaaaaagcatccccaaatggttccattagcagtgctgggaacagcagcagaaacagtagtcagtcaagttcagatggtagctgtaagacagctggggagatggtgtttgtatatgaaaatgcaaaagaaggagctcggaatataagaacgtcagaacgagtgacactaatagtggataacactagatttgttgtagacccatccatttttactgcacagccaaatacaatgttgggcaggatgtttggatctggccgagaacataactttacacgacccaatgagaaaggagagtatgaggtggcagagggaattggttccactgtgtttcgagcgattctggattactataaaacaggaataatccgttgtcctgatggcatatctattcctgaactgagagaagcatgtgactatctttgtatctcttttgaatatagcactattaaatgtagagatctcagtgccctaatgcatgagttatcaaatgatggtgctcgtagacaatttgaattttatctggaagaaatgatcctccctctcatggtagctagtgcccagagtggggaacgggaatgtcatatagtggtgcttacagatgatgatgtggttgattgggatgaagaatatccaccacagatgggagaagaatattcacaaattatttatagcacaaaattatatagatttttcaagtatattgaaaacagagatgtggccaagtcagttttgaaggagaggggtcttaagaagattagattgggaatagaaggttatcctacctacaaagaaaaagtaaagaaaaggcctggaggccgcccagaagtgatctacaactatgtccaaagaccctttattcgaatgtcctgggagaaggaagaaggaaagagtcggcatgtagactttcagtgtgtaaagagtaaatctatcaccaatcttgcagcagctgcagcagacattccccaggaccagctggtagtcatgcatccaactccacaagtggatgagctggatattctccctatccatcccccttctggcaacagtgacctcgatcctgatgcacagaatccaatgctgtgatgctgatcttccttgaaaccatagcatgctactcttcacagtgacgttgtactctcctcattctgcactgcaaggccactcttcttcattgtgagatgcacataacaatgtttaggatattgcagtgtaggcttttttaaagaccaaa

SEQ ID NO: 112377 - DNA, 508 bp, Homo sapiens
  Payload ID: 1994
  Gene Symbol: BTBD10
  Gene Name: BTB (POZ) domain containing 10
  ENST ID: ENST00000526841
  CDS Start-End: 316-508
gatctggctgaggaggaagtggaggtgtcactggccccggcctttgccccaatcttgtgtgggcactgaagggggactacagggcagaggaaccccgtgccccgcccctttcctgtcatctcagacgaacgcagcgacatcctgaggaaggcgcatcacaataggggataaggtggtgggcagcctccctctgggtgaagaggagtgagaccccactaacgtgctgcgtggttttatgttgtaaccattttacgtgtggttatgggtgctacatgtgtgctttcagagcagtagtgtgaggaagcttggagtgggatggcaggacggcctcatccctatgatggtaactccagtgatccagagaattgggatcggaaattgcatagtagacctcgtaaactttataaacattcaagtacttcctcgcgtattgctaaaggaggagttgaccacaccaaaatgagtctacatggtgctagtgggggacatgagagatcaagagatagac

SEQ ID NO: 112378 - DNA, 616 bp, Homo sapiens
  Payload ID: 1994
  Gene Symbol: BTBD10
  Gene Name: BTB (POZ) domain containing 10
  ENST ID: ENST00000529708
  CDS Start-End: 419-616
gcggtaagaggctgaggagccggcctgcaacctgccggggcggctccgctacgcgcagccgcctcagtggcttcctccacagccacctccggagggatctggctgaggaggaagtggaggtgtcactggccccggcctttgccccaatcttgtgtgggcactgaagggggactacaggttcgagaggcagaggaaccccgtgccccgcccctttcctgtcatctcagacgaacgcagcgacatcctgaggaaggcgcatcacaataggggataaggtggtgggcagcctccctctgggtgaagaggagtgagaccccactaacgtgctgcgtggttttatgttgtaaccattttacgtgtggttatgggtgctacatgtgtgctttcagagcagtagtgtgaggaagcttggagtgggatggcaggacggcctcatccctatgatggtaactccagtgatccagagaattgggatcggaaattgcatagtagacctcgtaaactttataaacattcaagtacttcctcgcgtattgctaaaggaggagttgaccacaccaaaatgagtctacatggtgctagtgggggacatgagagatcaagagatagacgaagg

SEQ ID NO: 112379 - DNA, 1139 bp, Homo sapiens
  Payload ID: 1994
  Gene Symbol: BTBD10
  Gene Name: BTB (POZ) domain containing 10
  ENST ID: ENST00000525108
  CDS Start-End: 264-374
ctcttcgcattgtgagctctcgcggtaagaggctgaggagccggcctgcaacctgccggggcggctccgctacgcgcagccgcctcagtggcttcctccacagccacctccggagggatctggctgaggaggaagtggaggtgtcactggccccggcctttgccccaatcttgtgtgggcactgaagggggactacaggttcgagagttatgggtgctacatgtgtgctttcagagcagtagtgtgaggaagcttggagtgggatggcaggacggcctcatccctatgatggtaactccagtgatccagagaattgggatcggaaattgcatagtagacctcgtaaactttataaacattcaaggaggagttgaccacaccaaaatgagtctacatggtgctagtgggggacatgagagatcaagagatagacgaaggtcaagtgacagatcacgagattcatctcatgaaagaacggagtctcagctcactccttgtattagaaatgtgacttctccaacacgacagcaccatgttgaacgagaaaaagatcacagttcctctcgtccaagcagtccgcgtcctcaaaaagcatccccaaatggttccattagcagtgctgggaacagcagcagaaacagtagtcagtcaagttcagatggtagctgtaagacagctggggagatggtgtttgtatatgaaaatgcaaaagaaggagctcggaatataagaacgtcagaacgagtgacactaatagtggataacactagatttgttgtagacccatccatttttactgcacagccaaatacaatgttgggcaggatgtttggatctggccgagaacataactttacacgacccaatgagaaaggagagtatgaggtggcagagggaattggttccactgtgtttcgagcgattctggattactataaaacaggaataatccgttgtcctgatggcatatctattcctgaactgagagaagcatgtgactatctttgtatctcttttgaatatagcactattaaatgtagagatctcagtgccctaatgcatgagttatcaaatgatggtgctcgtagacaatttgaattttatctggaagaaatgatcctccctctcatggtagctag

SEQ ID NO: 112380 - DNA, 1662 bp, Homo sapiens
  Payload ID: 1994
  Gene Symbol: BTBD10
  Gene Name: BTB (POZ) domain containing 10
  ENST ID: ENST00000528120
  CDS Start-End: 250-1533
ctcttcgcattgtgagctctcgcggtaagaggctgaggagccggcctgcaacctgccggggcggctccgctacgcgcagccgcctcagtggcttcctccacagccacctccggagggatctggctgaggaggaagtggaggtgtcactggccccggcctttgccccaatcttgtgtgggcactgaagggggactacaggttcgagatacttcctcgcgtattgctaaaggaggagttgaccacaccaaaatgagtctacatggtgctagtgggggacatgagagatcaagagatagacgaaggtcaagtgacagatcacgagattcatctcatgaaagaacggagtctcagctcactccttgtattagaaatgtgacttctccaacacgacagcaccatgttgaacgagaaaaagatcacagttcctctcgtccaagcagtccgcgtcctcaaaaagcatccccaaatggttccattagcagtgctgggaacagcagcagaaacagtagtcagtcaagttcagatggtagctgtaagacagctggggagatggtgtttgtatatgaaaatgcaaaagaaggagctcggaatataagaacgtcagaacgagtgacactaatagtggataacactagatttgttgtagacccatccatttttactgcacagccaaatacaatgttgggcaggatgtttggatctggccgagaacataactttacacgacccaatgagaaaggagagtatgaggtggcagagggaattggttccactgtgtttcgagcgattctggattactataaaacaggaataatccgttgtcctgatggcatatctattcctgaactgagagaagcatgtgactatctttgtatctcttttgaatatagcactattaaatgtagagatctcagtgccctaatgcatgagttatcaaatgatggtgctcgtagacaatttgaattttatctggaagaaatgatcctccctctcatggtagctagtgcccagagtggggaacgggaatgtcatatagtggtgcttacagatgatgatgtggttgattgggatgaagaatatccaccacagatgggagaagaatattcacaaattatttatagcacaaaattatatagatttttcaagtatattgaaaacagagatgtggccaagtcagttttgaaggagaggggtcttaagaagattagattgggaatagaaggttatcctacctacaaagaaaaagtaaagaaaaggcctggaggccgcccagaagtgatctacaactatgtccaaagaccctttattcgaatgtcctgggagaaggaagaaggaaagagtcggcatgtagactttcagtgtgtaaagagtaaatctatcaccaatcttgcagcagctgcagcagacattccccaggaccagctggtagtcatgcatccaactccacaagtggatgagctggatattctccctatccatcccccttctggcaacagtgacctcgatcctgatgcacagaatccaatgctgtgatgctgatcttccttgaaaccatagcatgctactcttcacagtgacgttgtactctcctcattctgcactgcaaggccactcttcttcattgtgagatgcacataacaatgtttaggatattgcagtgta

SEQ ID NO: 112381 - DNA, 2338 bp, Homo sapiens
  Payload ID: 1994
  Gene Symbol: BTBD10
  Gene Name: BTB (POZ) domain containing 10
  ENST ID: ENST00000527102
  CDS Start-End: 193-801
acgcgcagccgcctcagtggcttcctccacagccacctccggagggatctggctgaggaggaagtggaggtgtcactggccccggcctttgccccaatcttgtgtgggcactgaagggggactacaggttcgagagttatgggtgctacatgtgtgctttcagagcagtagtgtgaggaagcttggagtgggatggcaggacggcctcatccctatgatggtaactccagtgatccagagaattgggatcggaaattgcatagtagacctcgtaaactttataaacattcaagtacttcctcgcgtattgctaaaggaggagttgaccacaccaaaatgagtctacatggtgctagtgggggacatgagagatcaagagatagacgaaggtcaagtgacagatcacgagattcatctcatgaaagaacggagtctcagctcactccttgtattagaaatgtgacttctccaacacgacagcaccatgttgaacgagaaaaagatcacagttcctctcgtccaagcagtccgcgtcctcaaaaagcatccccaaatggttccattagcagtgctgggaacagcagcagaaacagtagtcagtcaagttcagatggtagctgtaagacagctggggagatggtgtttgtatatgaaaatgcaaaagaaggagctcggaatataagaacgtcagaacgagtgacactaatagtggataacactagatttgttgtagacccatccatttttactgcacagccaaatacaatgttgggcaggatgtttggatctggattactataaaacaggaataatccgttgtcctgatggcatatctattcctgaactgagagaagcatgtgactatctttgtatctcttttgaatatagcactattaaatgtagagatctcagtgccctaatgcatgagttatcaaatgatggtgctcgtagacaatttgaattttatctggaagaaatgatcctccctctcatggtagctagtgcccagagtggggaacgggaatgtcatatagtggtgcttacagatgatgatgtggttgattgggatgaagaatatccaccacagatgggagaagaatattcacaaattatttatagcacaaaattatatagatttttcaagtatattgaaaacagagatgtggccaagtcagttttgaaggagaggggtcttaagaagattagattgggaatagaaggttatcctacctacaaagaaaaagtaaagaaaaggcctggaggccgcccagaagtgatctacaactatgtccaaagaccctttattcgaatgtcctgggagaaggaagaaggaaagagtcggcatgtagactttcagtgtgtaaagagtaaatctatcaccaatcttgcagcagctgcagcagacattccccaggaccagctggtagtcatgcatccaactccacaagtggatgagctggatattctccctatccatcccccttctggcaacagtgacctcgatcctgatgcacagaatccaatgctgtgatgctgatcttccttgaaaccatagcatgctactcttcacagtgacgttgtactctcctcattctgcactgcaaggccactcttcttcattgtgagatgcacataacaatgtttaggatattgcagtgtaggcttttttaaagaccaaaggtagctgaatggtttttttttaaatgagtacaactctagcattttgaagttccagttgtaaatgtatttgtttaccagtaggtttgtgaaattggttctttgtatgggggatggtcctttttcacacagctaggtcttttcagaagtggtggaaattggcagctggggtactttcagtttggactgatattcatcacacctcagataaaatgcagagtaatatatagttgcactttataaatggtggttaaatggaaatgttcaagccattttatagttgtgatgcacaatataatttaagtgcttctgtcaaagtattcctccagtacaatttgtatagtttgctgcccttgatgagcaaaaagtatttatcttgggcttatctgaatgatcaggatgagatttaatgcccatatcttaccagttcagttatctccagagccatttcaccctttagagtgagtcacatgcagggagtgtgaatgtcagaggtggtttattatccagtctgccttacccttaatctgttcacagatatttatttactaatgctttttttttcttaagagttatgggataggaaaatgaagtgtttgctcttcatttactaaatgattgtaaacttgagtttttcatcaaaataaaattccattgtttt

SEQ ID NO: 112382 - DNA, 5767 bp, Homo sapiens
  Payload ID: 1995
  Gene Symbol: BTBD11
  Gene Name: BTB (POZ) domain containing 11
  Uniprot ID: A6QL63
  ENST ID: ENST00000280758
  CDS Start-End: 529-3843
ggttcggcaaggtttgcagccgccacggccgctgctgcgctccggtgcagggcaggctggcgccgagcgaaccagggccgggaactgggagccgggagccgggagccagctgcccgcggagctgcggcggcggcggcatctggggtggtctcagtcccacgaacaccgtggccggcgcccggtggctactgcgcccagcggggctcagggaagagcggtctagacactttttattttggaagaaaggggcaagccccggcgggagcttccttcccggcctggctcgctccccattgcgcccagctccggcccggactctggaagatgactccagggtctgctctgtatattccagcggcggcagttccgggaggcagccgaaagtactaacagttggtagcagcggctagtggaaaagtgagccaaggcggcgcggactcggctctccccgcgccccgcggcactcgctgctcctcgccgctccttccctttggctcccaggcggctgcagcatgaagtggcgcagcgatggccaggagaggtaagaagcccgtggtgagaacgctggaggatctgacgctggactcgggttatggtggcgcggcggactcggtgcgctcctccaacttgtctttgtgctgttccgactcgcacccggcgtccccgtatggcgggagctgctggccgcctctagctgactccatgcacagccggcacaacagctttgacactgtcaacactgccctggtggaagactccgaggggctggactgcgccggccagcactgctcgcggctgctgccggacctagacgaggtcccctggactctccaggagctggaggcgctgctgctgcgttcgcgggatccccgggcaggcccggcggtccccggcggcctgcccaaggacgcgctggccaagctgtcgacgctggtgagccgggcgctggtgcgcatagccaaagaggcgcagcgcctgagcctgcgcttcgccaagtgcaccaagtacgagatccagagcgccatggagatcgtgctgtcctggggcctggccgcgcactgtacggcggctgcgctggccgcactgtccctctacaacatgagcagcgccggcggcgaccgcctgggccgcggcaagtcggcccgctgcggcctcaccttctccgtgggccgcgtgtatcgctggatggtggacagccgcgtggcgctgcgcatccacgagcacgccgccatctacctgacagcctgcatggagagcctcttccgggacatctactcgcgggtcgtggcctccggggtgccccggagctgcagtggccctgggtcaggctcgggctccggcccaggcccgagctcgggccctggtgcggcccccgcggcggataaagagcgggaggcgcccgggggaggagcggcgagcggcggcgcctgcagcgcagccagcagcgccagcgggggcagcagctgttgcgccccgccggccgccgcggccgccgcagtcccgccggcagccgccgccaaccaccaccatcaccaccaccatgcgctccacgaggcgcccaagttcaccgtggagaccctggagcacacggtcaacaacgactcggagatctggggtctcctgcagccctaccagcacctgatctgcgggaagaacgccagcggggtgctgtgcctaccagacagcctgaatcttcacagagacccacagcggtcaaacaagccaggggaactgcccatgttcagccagtcggagctgaggaccatcgagcagtctttgctggccacgcgcgtaggcagcatcgccgaattgagtgacctggtgtcccgtgcaatgcatcacctgcagcccctcaatgccaagcaccacggcaatggcacccccctgcaccacaagcagggggcactgtactgggagcccgaggccctgtacaccctttgctatttcatgcactgcccacaaatggaatgggaaaaccccaacgtggagccttccaaagtcaacctccaggtggaaaggcccttcctcgtgctgccgccgctgatggagtggatccgggtggccgtggcgcacgccggccaccgccgcagcttctccatggacagcgacgacgtccgccaggcggcccggctgctgctgcccggcgtggactgcgagccgcgccagctcagggccgacgactgcttttgtgcatctcgaaagctggatgcggtggccatcgaagccaagtttaagcaggacctgggtttccggatgctgaactgtggacgaacagacctggtgaagcaggcagtgtctctgctggggcccgatgggatcaacaccatgagcgaacagggcatgactcccctgatgtatgcctgcgtccgtggggacgaggcgatggttcagatgctgctggatgccggagctgacctgaatgtggaggttgtcagtactcctcataaatatccatccgtccaccccgagacccgccattggacggctctgacttttgctgtgttgcatggacatattcctgtagttcagctcctcctggatgctggggccaaggtggaaggctcagtggagcatggcgaggagaactactcggaaacacccctccagctggcagctgctgtaggaaattttgagctggttagtttgctgttggagcgtggtgccgatcccctgataggaaccatgtacaggaatggaatttctacaaccccccagggtgatatgaactctttcagccaggctgcagcccacggacacaggaatgtgttccgcaaactgctcgcccagccagagaaggagaagagtgatatcctgtccctggaggagattctggccgaggggactgacctggcggagacagccccgccccccttgtgcgccagccgcaacagcaaggccaaactgagggccctgagggaggccatgtatcacagcgctgagcatggctacgtggatgtcacaattgatatcaggagcataggcgtcccgtggactctgcacacgtggctggagtctttgcggatcgccttccagcagcaccgcaggcctctcatccagtgcttgttaaaggagtttaagaccattcaggaggaggaatacacggaggagctcgttacccaaggcctgcccctgatgtttgagatcctgaaagcgagcaagaatgaagtgatcagccagcagctgtgcgtcatcttcacacactgctacgggccctaccccatccccaagctcacagaaatcaaacggaaacagacctcgcgcttggatcctcattttcttaacaataaagaaatgtctgatgttacatttctggtagaaggaagaccattttatgctcacaaagtgctgttatttacagcctctccaaggttcaaagcactcctctccagcaagccgacaaatgatggcacctgcatagagattggttatgtgaaatactccatctttcagctggttatgcagtatctctactatggtggcccagagtcactgctcattaaaaacaatgagatcatggagcttctgtctgctgctaagtttttccagctggaggctttgcagcgacactgtgagattatctgtgcgaaaagcatcaataccgacaactgtgtggatatttacaaccatgccaagtttcttggagtcacagagctctcagcatattgcgaaggctactttctcaaaaacatgatggtcctcattgaaaacgaagcattcaagcagctcctgtatgacaaaaatggtgaagggaccggccaggatgtgctccaggacttacagaggacgttggccatcagaattcagtccatccacttgtcgtcttccaaaggttccgtggtatgaaacgcctagtgcagggaatgcttcccgggaactttccagttctcctgccgcattggctttacacaaacacagacaaattccacctggcacctgtttttggctgggccaaggagctgcctctactgctcccacgtgttcctgttgaaaaacaaaggactttccactggtctgcagatcagatcagctgggtccagagtttaatgggcaactggacaaccaagttaaccccaattgaaagcacccctaggaccattgaacacccactgccggggaccactgtccagtgaatggattgaggccttttaaaggtcactcaggttccaggttgacagttggaggacttcaccgtaccaaccctgaagagattgtattacacattaaggaccttggtagctgtgcttcagcaaacgtcaaccatggtagcaaattggtgaggctgtgaccaataatgaggaaataatctggcaaatttttaggggtgggaacttttttaaatgttcatttaaaaaaaaacaaaaacagggcagtcttgtagtttaaaatatatttctaaaagcttaacagttcgttttcaactaaattgtgtttagggatctgtgtttgagatttttctttatttcttttttttttttaaatagtaagtcacaggtccacactgtgtaaacatgcatctgataagatactgctgatattctaaacaagttgaaataatcttgccttagtgatcatgattacacaaaagaggtgcactgccaataagtatctctaattcaatagttgaaagcaacctgcatgctaatcgtggtttcggggtgagaataaaacacccccacataacatgcatttgcatgggcccgaacctgtgaaatgttacgtttgtgcttcatttttgccaaggtaaaaatgttccatcatttctagctaaaactccatttggtgaaaccaacatatccatttcttttcctagttacggatgatttggggatgcttttgcagaaatgtgttcatagatgatgctgaatgggggaggggggcagcacgtcagagaatttactattaatcccagagttttctctgtattctcagaagatgttaatagtttgttactagccagagagtatgactatgttagattatttttaaagatgaaacatgtatgataggatggattctttctgtattctgagagtgtacagtacaggattattataatgaaagtttatatcaacagggtttcgttggctctgccatatattataagcaaaagagattggtaaagtgccacagtattccagataacttttcagttgcggcctttcttctcgttctttaatttgaaacctagatacatgcagtaaaaactaggagaatgacttttacccttggggacagccaagttttgttgataaacctatttcctagcatgccttcaggaagttgtgccagaccctagattgtgaaggacccactgttcttctgttgtacgagctccctgaaccattgttcagaggaccaatgtcacatcgcttcatgggcatggcccatggagcatctgggtgatatctgtctacagtattggctcttctgcgaggctgatacacaaggcctctcttccacatgatcatttgcaaacctcccccagcccctaccatccaatgtggaaggaaaacaagaactgcctgaagaagagtccaagctacagatacacagcgtgtgcattgcggctgtcaccttcctcctcccacttctgtatcctcagagatgctgcgtggatgtttccttaacctcagctgacttccctgtgaatgtctaatgctagttcagggcctccaggcattgatttgtacagtggtaactcccaatgaggcttctgttatcatttggtgtgctttctctgtcattaaaagaaatgattttcccaggc

SEQ ID NO: 112383 - DNA, 4107 bp, Homo sapiens
  Payload ID: 1995
  Gene Symbol: BTBD11
  Gene Name: BTB (POZ) domain containing 11
  Uniprot ID: A6QL63
  ENST ID: ENST00000357167
  CDS Start-End: 258-2183
aaagagctccagaaagacgacagggacgaggctgcagatgggaagggagtgctagcggacaccttaggcttgggtccacaatcagggagccccaaatagaaataacacggggcgctgattggttttccgccgctccagaccctgcgcttggtgcttcaagtgactcatccttatgttcacatgatcgccgagagggataatattcccagatcagttacctcctagcctttcctagtcacattatccccaggctacagatgaggaaactgaggcccaaggattccagagagcctgccccggggtcaccggtgcggtccggatgtctccaaaggctctcccactactctggaattcagaggcccttcctcgtgctgccgccgctgatggagtggatccgggtggccgtggcgcacgccggccaccgccgcagcttctccatggacagcgacgacgtccgccaggcggcccggctgctgctgcccggcgtggactgcgagccgcgccagctcagggccgacgactgcttttgtgcatctcgaaagctggatgcggtggccatcgaagccaagtttaagcaggacctgggtttccggatgctgaactgtggacgaacagacctggtgaagcaggcagtgtctctgctggggcccgatgggatcaacaccatgagcgaacagggcatgactcccctgatgtatgcctgcgtccgtggggacgaggcgatggttcagatgctgctggatgccggagctgacctgaatgtggaggttgtcagtactcctcataaatatccatccgtccaccccgagacccgccattggacggctctgacttttgctgtgttgcatggacatattcctgtagttcagctcctcctggatgctggggccaaggtggaaggctcagtggagcatggcgaggagaactactcggaaacacccctccagctggcagctgctgtaggaaattttgagctggttagtttgctgttggagcgtggtgccgatcccctgataggaaccatgtacaggaatggaatttctacaaccccccagggtgatatgaactctttcagccaggctgcagcccacggacacaggaatgtgttccgcaaactgctcgcccagccagagaaggagaagagtgatatcctgtccctggaggagattctggccgaggggactgacctggcggagacagccccgccccccttgtgcgccagccgcaacagcaaggccaaactgagggccctgagggaggccatgtatcacagcgctgagcatggctacgtggatgtcacaattgatatcaggagcataggcgtcccgtggactctgcacacgtggctggagtctttgcggatcgccttccagcagcaccgcaggcctctcatccagtgcttgttaaaggagtttaagaccattcaggaggaggaatacacggaggagctcgttacccaaggcctgcccctgatgtttgagatcctgaaagcgagcaagaatgaagtgatcagccagcagctgtgcgtcatcttcacacactgctacgggccctaccccatccccaagctcacagaaatcaaacggaaacagacctcgcgcttggatcctcattttcttaacaataaagaaatgtctgatgttacatttctggtagaaggaagaccattttatgctcacaaagtgctgttatttacagcctctccaaggttcaaagcactcctctccagcaagccgacaaatgatggcacctgcatagagattggttatgtgaaatactccatctttcagctggttatgcagtatctctactatggtggcccagagtcactgctcattaaaaacaatgagatcatggagcttctgtctgctgctaagtttttccagctggaggctttgcagcgacactgtgagattatctgtgcgaaaagcatcaataccgacaactgtgtggatatttacaaccatgccaagtttcttggagtcacagagctctcagcatattgcgaaggctactttctcaaaaacatgatggtcctcattgaaaacgaagcattcaagcagctcctgtatgacaaaaatggtgaagggaccggccaggatgtgctccaggacttacagaggacgttggccatcagaattcagtccatccacttgtcgtcttccaaaggttccgtggtatgaaacgcctagtgcagggaatgcttcccgggaactttccagttctcctgccgcattggctttacacaaacacagacaaattccacctggcacctgtttttggctgggccaaggagctgcctctactgctcccacgtgttcctgttgaaaaacaaaggactttccactggtctgcagatcagatcagctgggtccagagtttaatgggcaactggacaaccaagttaaccccaattgaaagcacccctaggaccattgaacacccactgccggggaccactgtccagtgaatggattgaggccttttaaaggtcactcaggttccaggttgacagttggaggacttcaccgtaccaaccctgaagagattgtattacacattaaggaccttggtagctgtgcttcagcaaacgtcaaccatggtagcaaattggtgaggctgtgaccaataatgaggaaataatctggcaaatttttaggggtgggaacttttttaaatgttcatttaaaaaaaaacaaaaacagggcagtcttgtagtttaaaatatatttctaaaagcttaacagttcgttttcaactaaattgtgtttagggatctgtgtttgagatttttctttatttcttttttttttttaaatagtaagtcacaggtccacactgtgtaaacatgcatctgataagatactgctgatattctaaacaagttgaaataatcttgccttagtgatcatgattacacaaaagaggtgcactgccaataagtatctctaattcaatagttgaaagcaacctgcatgctaatcgtggtttcggggtgagaataaaacacccccacataacatgcatttgcatgggcccgaacctgtgaaatgttacgtttgtgcttcatttttgccaaggtaaaaatgttccatcatttctagctaaaactccatttggtgaaaccaacatatccatttcttttcctagttacggatgatttggggatgcttttgcagaaatgtgttcatagatgatgctgaatgggggaggggggcagcacgtcagagaatttactattaatcccagagttttctctgtattctcagaagatgttaatagtttgttactagccagagagtatgactatgttagattatttttaaagatgaaacatgtatgataggatggattctttctgtattctgagagtgtacagtacaggattattataatgaaagtttatatcaacagggtttcgttggctctgccatatattataagcaaaagagattggtaaagtgccacagtattccagataacttttcagttgcggcctttcttctcgttctttaatttgaaacctagatacatgcagtaaaaactaggagaatgacttttacccttggggacagccaagttttgttgataaacctatttcctagcatgccttcaggaagttgtgccagaccctagattgtgaaggacccactgttcttctgttgtacgagctccctgaaccattgttcagaggaccaatgtcacatcgcttcatgggcatggcccatggagcatctgggtgatatctgtctacagtattggctcttctgcgaggctgatacacaaggcctctcttccacatgatcatttgcaaacctcccccagcccctaccatccaatgtggaaggaaaacaagaactgcctgaagaagagtccaagctacagatacacagcgtgtgcattgcggctgtcaccttcctcctcccacttctgtatcctcagagatgctgcgtggatgtttccttaacctcagctgacttccctgtgaatgtctaatgctagttcagggcctccaggcattgatttgtacagtggtaactcccaatgaggcttctgttatcatttggtgtgctttctctgtcattaaaagaaatgattttcccaggc

SEQ ID NO: 112384 - DNA, 723 bp, Homo sapiens
  Payload ID: 1995
  Gene Symbol: BTBD11
  Gene Name: BTB (POZ) domain containing 11
  ENST ID: ENST00000415943
  CDS Start-End: 12-723
gtaccggctgaatggttgaaagcttgcacggcctagacagtcgtaaaggggtgctgtgcctaccagacagcctgaatcttcacagagacccacagcggtcaaacaagccaggggaactgcccatgttcagccagtcggagctgaggaccatcgagcagtctttgctggccacgcgcgtaggcagcatcgccgaattgagtgacctggtgtcccgtgcaatgcatcacctgcagcccctcaatgccaagcaccacggcaatggcacccccctgcaccacaagcagggggcactgtactgggagcccgaggccctgtacaccctttgctatttcatgcactgcccacaaatggaatgggaaaaccccaacgtggagccttccaaagtcaacctccaggtggaaaggcccttcctcgtgctgccgccgctgatggagtggatccgggtggccgtggcgcacgccggccaccgccgcagcttctccatggacagcgacgacgtccgccaggcggcccggctgctgctgcccggcgtggactgcgagccgcgccagctcagggccgacgactgcttttgtgcatctcgaaagctggatgcggtggccatcgaagccaagtttaagcaggacctgggtttccggatgctgaactgtggacgaacagacctggtgaagcaggcagtgtctctgctggggcccgatgggatcaacaccatgagcgaacagg

SEQ ID NO: 112385 - DNA, 3478 bp, Homo sapiens
  Payload ID: 1995
  Gene Symbol: BTBD11
  Gene Name: BTB (POZ) domain containing 11
  Uniprot ID: A6QL63
  ENST ID: ENST00000420571
  CDS Start-End: 521-3478
aaggtttgcagccgccacggccgctgctgcgctccggtgcagggcaggctggcgccgagcgaaccagggccgggaactgggagccgggagccgggagccagctgcccgcggagctgcggcggcggcggcatctggggtggtctcagtcccacgaacaccgtggccggcgcccggtggctactgcgcccagcggggctcagggaagagcggtctagacactttttattttggaagaaaggggcaagccccggcgggagcttccttcccggcctggctcgctccccattgcgcccagctccggcccggactctggaagatgactccagggtctgctctgtatattccagcggcggcagttccgggaggcagccgaaagtactaacagttggtagcagcggctagtggaaaagtgagccaaggcggcgcggactcggctctccccgcgccccgcggcactcgctgctcctcgccgctccttccctttggctcccaggcggctgcagcatgaagtggcgcagcgatggccaggagaggtaagaagcccgtggtgagaacgctggaggatctgacgctggactcgggttatggtggcgcggcggactcggtgcgctcctccaacttgtctttgtgctgttccgactcgcacccggcgtccccgtatggcgggagctgctggccgcctctagctgactccatgcacagccggcacaacagctttgacactgtcaacactgccctggtggaagactccgaggggctggactgcgccggccagcactgctcgcggctgctgccggacctagacgaggtcccctggactctccaggagctggaggcgctgctgctgcgttcgcgggatccccgggcaggcccggcggtccccggcggcctgcccaaggacgcgctggccaagctgtcgacgctggtgagccgggcgctggtgcgcatagccaaagaggcgcagcgcctgagcctgcgcttcgccaagtgcaccaagtacgagatccagagcgccatggagatcgtgctgtcctggggcctggccgcgcactgtacggcggctgcgctggccgcactgtccctctacaacatgagcagcgccggcggcgaccgcctgggccgcggcaagtcggcccgctgcggcctcaccttctccgtgggccgcgtgtatcgctggatggtggacagccgcgtggcgctgcgcatccacgagcacgccgccatctacctgacagcctgcatggagagcctcttccgggacatctactcgcgggtcgtggcctccggggtgccccggagctgcagtggccctgggtcaggctcgggctccggcccaggcccgagctcgggccctggtgcggcccccgcggcggataaagagcgggaggcgcccgggggaggagcggcgagcggcggcgcctgcagcgcagccagcagcgccagcgggggcagcagctgttgcgccccgccggccgccgcggccgccgcagtcccgccggcagccgccgccaaccaccaccatcaccaccaccatgcgctccacgaggcgcccaagttcaccgtggagaccctggagcacacggtcaacaacgactcggagatctggggtctcctgcagccctaccagcacctgatctgcgggaagaacgccagcggggtgctgtgcctaccagacagcctgaatcttcacagagacccacagcggtcaaacaagccaggggaactgcccatgttcagccagtcggagctgaggaccatcgagcagtctttgctggccacgcgcgtaggcagcatcgccgaattgagtgacctggtgtcccgtgcaatgcatcacctgcagcccctcaatgccaagcaccacggcaatggcacccccctgcaccacaagcagggggcactgtactgggagcccgaggccctgtacaccctttgctatttcatgcactgcccacaaatggaatgggaaaaccccaacgtggagccttccaaagtcaacctccaggtggaaaggcccttcctcgtgctgccgccgctgatggagtggatccgggtggccgtggcgcacgccggccaccgccgcagcttctccatggacagcgacgacgtccgccaggcggcccggctgctgctgcccggcgtggactgcgagccgcgccagctcagggccgacgactgcttttgtgcatctcgaaagctggatgcggtggccatcgaagccaagtttaagcaggacctgggtttccggatgctgaactgtggacgaacagacctggtgaagcaggcagtgtctctgctggggcccgatgggatcaacaccatgagcgaacagggcatgactcccctgatgtatgcctgcgtccgtggggacgaggcgatggttcagatgctgctggatgccggagctgacctgaatgtggaggttgtcagtactcctcataaatatccatccgtccaccccgagacccgccattggacggctctgacttttgctgtgttgcatggacatattcctgtagttcagctcctcctggatgctggggccaaggtggaaggctcagtggagcatggcgaggagaactactcggaaacacccctccagctggcagctgctgtaggcgtcccgtggactctgcacacgtggctggagtctttgcggatcgccttccagcagcaccgcaggcctctcatccagtgcttgttaaaggagtttaagaccattcaggaggaggaatacacggaggagctcgttacccaaggcctgcccctgatgtttgagatcctgaaagcgagcaagaatgaagtgatcagccagcagctgtgcgtcatcttcacacactgctacgggccctaccccatccccaagctcacagaaatcaaacggaaacagacctcgcgcttggatcctcattttcttaacaataaagaaatgtctgatgttacatttctggtagaaggaagaccattttatgctcacaaagtgctgttatttacagcctctccaaggttcaaagcactcctctccagcaagccgacaaatgatggcacctgcatagagattggttatgtgaaatactccatctttcagctggttatgcagtatctctactatggtggcccagagtcactgctcattaaaaacaatgagatcatggagcttctgtctgctgctaagtttttccagctggaggctttgcagcgacactgtgagattatctgtgcgaaaagcatcaataccgacaactgtgtggatatttacaaccatgccaagtttcttggagtcacagagctctcagcatattgcgaaggctactttctcaaaaacatgatggtcctcattgaaaacgaagcattcaagcagctcctgtatgacaaaaatggtgaagggaccggccaggatgtgctccaggacttacagaggacgttggccatcagaattcagtccatccacttgtcgtcttccaaaggttccgtggtatga

SEQ ID NO: 112386 - DNA, 4614 bp, Homo sapiens
  Payload ID: 1995
  Gene Symbol: BTBD11
  Gene Name: BTB (POZ) domain containing 11
  Uniprot ID: A6QL63
  ENST ID: ENST00000490090
  CDS Start-End: 1-3024
atggccaggagaggtaagaagcccgtggtgagaacgctggaggatctgacgctggactcgggttatggtggcgcggcggactcggtgcgctcctccaacttgtctttgtgctgttccgactcgcacccggcgtccccgtatggcgggagctgctggccgcctctagctgactccatgcacagccggcacaacagctttgacactgtcaacactgccctggtggaagactccgaggggctggactgcgccggccagcactgctcgcggctgctgccggacctagacgaggtcccctggactctccaggagctggaggcgctgctgctgcgttcgcgggatccccgggcaggcccggcggtccccggcggcctgcccaaggacgcgctggccaagctgtcgacgctggtgagccgggcgctggtgcgcatagccaaagaggcgcagcgcctgagcctgcgcttcgccaagtgcaccaagtacgagatccagagcgccatggagatcgtgctgtcctggggcctggccgcgcactgtacggcggctgcgctggccgcactgtccctctacaacatgagcagcgccggcggcgaccgcctgggccgcggcaagtcggcccgctgcggcctcaccttctccgtgggccgcgtgtatcgctggatggtggacagccgcgtggcgctgcgcatccacgagcacgccgccatctacctgacagcctgcatggagagcctcttccgggacatctactcgcgggtcgtggcctccggggtgccccggagctgcagtggccctgggtcaggctcgggctccggcccaggcccgagctcgggccctggtgcggcccccgcggcggataaagagcgggaggcgcccgggggaggagcggcgagcggcggcgcctgcagcgcagccagcagcgccagcgggggcagcagctgttgcgccccgccggccgccgcggccgccgcagtcccgccggcagccgccgccaaccaccaccatcaccaccaccatgcgctccacgaggcgcccaagttcaccgtggagaccctggagcacacggtcaacaacgactcggagatctggggtctcctgcagccctaccagcacctgatctgcgggaagaacgccagcggggtgctgtgcctaccagacagcctgaatcttcacagagacccacagcggtcaaacaagccaggggaactgcccatgttcagccagtcggagctgaggaccatcgagcagtctttgctggccacgcgcgtaggcagcatcgccgaattgagtgacctggtgtcccgtgcaatgcatcacctgcagcccctcaatgccaagcaccacggcaatggcacccccctgcaccacaagcagggggcactgtactgggagcccgaggccctgtacaccctttgctatttcatgcactgcccacaaatggaatgggaaaaccccaacgtggagccttccaaagtcaacctccaggtggaaaggcccttcctcgtgctgccgccgctgatggagtggatccgggtggccgtggcgcacgccggccaccgccgcagcttctccatggacagcgacgacgtccgccaggcggcccggctgctgctgcccggcgtggactgcgagccgcgccagctcagggccgacgactgcttttgtgcatctcgaaagctggatgcggtggccatcgaagccaagtttaagcaggacctgggtttccggatgctgaactgtggacgaacagacctggtgaagcaggcagtgtctctgctggggcccgatgggatcaacaccatgagcgaacagggcatgactcccctgatgtatgcctgcgtccgtggggacgaggcgatggttcagatgctgctggatgccggagctgacctgaatgtggaggttgtcagtactcctcataaatatccatccgtccaccccgagacccgccattggacggctctgacttttgctgtgttgcatggacatattcctgtagttcagctcctcctggatgctggggccaaggtggaaggctcagtggagcatggcgaggagaactactcggaaacacccctccagctggcagctgctgtaggaaattttgagctggttagtttgctgttggagcgtggtgccgatcccctgataggaaccatgtacaggaatggaatttctacaaccccccagggtgatatgaactctttcagccaggctgcagcccacggacacaggaatgtgttccgcaaactgctcgcccagccagagaaggagaagagtgatatcctgtccctggaggagattctggccgaggggactgacctggcggagacagccccgccccccttgtgcgccagccgcaacagcaaggccaaactgagggccctgagggaggccatgtatcacagcgctgagcatggctacgtggatgtcacaattgatatcaggagcataggcgtcccgtggactctgcacacgtggctggagtctttgcggatcgccttccagcagcaccgcaggcctctcatccagtgcttgttaaaggagtttaagaccattcaggaggaggaatacacggaggagctcgttacccaaggcctgcccctgatgtttgagatcctgaaagcgagcaagaatgaagtgatcagccagcagctgtgcgtcatcttcacacactgctacgggccctaccccatccccaagctcacagaaatcaaacggaaacagacctcgcgcttggatcctcattttcttaacaataaagaaatgtctgatgttacatttctggtagaaggaagaccattttatgctcacaaagtgctgttatttacagcctctccaaggttcaaagcactcctctccagcaagccgacaaatgatggcacctgcatagagattggttatgtgaaatactccatctttcagctggttatgcagtatctctactatggtggcccagagtcactgctcattaaaaacaatgagatcatggaggtaagggatccattgtggtgttggctatcataggtcccttgggtgagtggcacttctgtaaactcgggtcaccagcctgcatggaagtgtctggaaggacccgtgttgggttttcatttggatgaagacttggggctcttgttccttcctgactcctcagtcctcccaaacaggaagggcttctcatcagagaccttccctggcaggctggggtgctagtgcacttgcttgcctgactgcttttagtagccactgagtgaaacccaattttaactggcattggtggtaagggggcagggaagggaaggaatttgactgaaaagtctgaggctacagctgaggcgttaatagtgatatcatcaggaaatatcctagatgacgtcttctcccttgtcactaataaaagaattatatcccctaaaaacatccctcaaatcacaacactgtctgttcttccaagatatagaagctgagggcagattacagtctcctcctggctttcctcaaactgagcatcccacagtcatgaagcccacgcctgcttccttcactctccccagccccctgtctgcctcttgtaattcaactggttctagccccgcctgtctaggagtcttgtttctgcctgcttttgtccaaagccaagattttcccctgttccttgccaaaagtggaaatcttgttcattttcctaattgaaactgggagctttgaaccagaagccaaaaatcacccccaattaatcctcagcaaaagagccaggatctcggtcagttatctgacgtctggggggtacctggctgatgagagatgtcaggacacaatcaactgttcaagagcagacctcacacagtggttacaacacggaagctgggccagactagtctaaatccaggctccactgcttctgagctgtgtgactgtggacaagttatttaacctcatatcctcagcttccttacccataaaatggggataactatctacctcactgggttttttagaggatcttaaaatatgctaaggtgcttagaacagtgcctggcacacagtgatcgccaataggactatgtattcactgcaggcccacttatcctttcttcctattctgtgaaaccttccgtggtcactctctccccacccaaacacacacatggacacacagtgactctcttgtctccctggactactcctctgatggttttagtctcgaggatgtgggcttatttgtaaacaaaagtgcgctggtgtttacaactaatttttgtgtgtgtgtgaaacagtctcactctgcccccaggctggagtgcagtggtgcaatttcggctcactgcaacctctgcctcctgggttcacaccattctcctgcctcggcctcccgagtagctaggattacaggcacctgccaccacacccagctaatttgttgtatttttagtagagacggggtttcaccatgttggccagatggtctcgaactcctgacctcagcctcccaaagtgttgggattacaggcatgagccactgcacacggctgtttacaactaactgatcacaaccagttatggatttctgtattccttctccactcccactgcttcatttgtctagccttaacaaaa

SEQ ID NO: 112387 - DNA, 667 bp, Homo sapiens
  Payload ID: 1995
  Gene Symbol: BTBD11
  Gene Name: BTB (POZ) domain containing 11
  ENST ID: ENST00000550706
  CDS Start-End: 1-667
gcggccgccgcagtcccgccggcagccgccgccaaccaccaccatcaccaccaccatgcgctccacgaggcgcccaagttcaccgtggagaccctggagcacacggtcaacaacgactcggagatctggggtctcctgcagccctaccagcacctgatctgcgggaagaacgccagcggtgacctggtgtcccgtgcaatgcatcacctgcagcccctcaatgccaagcaccacggcaatggcacccccctgcaccacaagcagggggcactgtactgggagcccgaggccctgtacaccctttgctatttcatgcactgcccacaaatggaatgggaaaaccccaacgtggagccttccaaagtcaacctccaggtggaaaggcccttcctcgtgctgccgccgctgatggagtggatccgggtggccgtggcgcacgccggccaccgccgcagcttctccatggacagcgacgacgtccgccaggcggcccggctgctgctgcccggcgtggactgcgagccgcgccagctcagggccgacgactgcttttgtgcatctcgaaagctggatgcggtggccatcgaagccaagtttaagcaggacctgggtttccggatgctgaactgtggacgaacagacctggtgaagcaggcagtgtctctgc

SEQ ID NO: 112388 - DNA, 811 bp, Homo sapiens
  Payload ID: 1995
  Gene Symbol: BTBD11
  Gene Name: BTB (POZ) domain containing 11
  Uniprot ID: A6QL63
  ENST ID: ENST00000494235
  CDS Start-End: 260-811
agcgtttgtctcgttaatggagaacacagtcacaggatcaaaagggctaatttcaggataattctcctgaaatcctgctaatttcaggataattcactgcttccagaattttagagtactggtaaagaatgaagtgatcagccagcagctgtgcgtcatcttcacacactgctacgggccctaccccatccccaagctcacagaaatcaaacggaaacagacctcgcgcttggatcctcattttcttaacaataaagaaatgtctgatgttacatttctggtagaaggaagaccattttatgctcacaaagtgctgttatttacagcctctccaaggttcaaagcactcctctccagcaagccgacaaatgatggcacctgcatagagattggttatgtgaaatactccatctttcagctggttatgcagtatctctactatggtggcccagagtcactgctcattaaaaacaatgagatcatggagcttctgtctgctgctaagtttttccagctggaggctttgcagcgacactgtgagattatctgtgcgaaaagcatcaataccgacaactgtgtggatatttacaaccatgccaagtttcttggagtcacagagctctcagcatattgcgaaggctactttctcaaaaacatgatggtcctcattgaaaacgaagcattcaagcagctcctgtatgacaaaaatggtgaagggaccggccaggatgtgctccaggacttacagaggacgttggccatcagaattcagtccatccacttgtcgtcttccaaaggttccgtggtatga

SEQ ID NO: 112389 - DNA, 1849 bp, Homo sapiens
  Payload ID: 1996
  Gene Symbol: BTBD16
  Gene Name: BTB (POZ) domain containing 16
  Uniprot ID: Q32M84
  ENST ID: ENST00000260723
  CDS Start-End: 252-1772
aggaaaccaaggcaagctccccctgtcaaagcaccttggcccataagaagaaaagggggagccccagatgtgatgagcgcttccaggcttcaggctcagaaggcgcccccagctctcctgtaactcagaggccagtgtgatgggagttcctccactcagcacacttcccctgtaaacacgcctgtggtgggcaaaagggctttggaacggttgcttgtcttttctctcctgcgtaatttccactttcattcatgataatgtcgaacacgcacaaagctcggctggaacgccgggtcactggctcaaccaaccggtggcgtttgcccaaacagcctttctctggggacctgctctcactttcccagatgtgcaaggctctgagcatagactttgaggaagctttgaggaacccagacaggttatgcatttcacaaatccagaagtttttctttgagaatttcaagaacaaggacatccaaagtggggaagcagatgtgattctcgagtgcctgggcttcaaatgggagctccatcagccccagctttttcagtctgagaccttggccaagctctacctgaaagccctggcgcagggcaccacacaccccctgagggagctggaggagcttctgcgagctcaatcacctaagaagaccaaagaaaaatcccctgcaaagaggatcatcatttccttgaagatcaatgacccactggtcactaaagtcgccttcgccacggccctgaagaacctctacatgagtgaggtggagattaacttggaagacctactgggagtgctggcttccgcccacatcctccagttcagtggcctgtttcaaaggtgcgtggatgtgatgatagccagactcaagccaagcaccatcaagaaattctacgaggccggctgcaagtacaaggaagagcagctcaccaccggctgcgagaagtggctggaaatgaacttggttcctctaggggggacgcagatccacctccacaaaatcccacaggacctgctccacaaagtgctgaagtcccccaggttatttacctttagtgaattccatcttctgaaaacaatgcttttgtgggtcttcttgcaactgaactacaagattcaggcaattccgacttatgaaaccgtgatgacattttttaagagctttcctgagaactgttgctttctggaccgggacataggacggagcttgaggccgctcttcctctgcttgcgtctgcacggcatcaccaaaggcaaggatctggaggtgctgcggcaccttaacttcttcccagagtcatggctcgaccaggttacagtcaaccattaccacgcactggagaatgggggcgacatggtccacctgaaagatcttaacacccaggctgtgagatttgggctgctctttaaccaggagaatacaacttattcgaaaacgattgctctatatggattcttctttaagataaagggactcaaacatgatactacctcttatagtttttacatgcagagaataaagcacacagacctggaatctccctctgcggtctacgagcacaaccacgtcagcctgcgagcggcacgcctggtgaagtatgagatcagagcagaggccctggttgacggcaagtggcaggagttcaggacaaaccagatcaagcagaagtttgggttgaccacgtcatcctgcaaaagccataccttgaaaatccaaactgtgggcatcccaatctatgtaagttttgcattcatcttcccagcatcttgacagtttccagaagaatctatgggattttccccccactggtctgcataaaagaaaataaaatgacataaaagggagca

SEQ ID NO: 112390 - DNA, 1805 bp, Homo sapiens
  Payload ID: 1997
  Gene Symbol: BTBD17
  Gene Name: BTB (POZ) domain containing 17
  Uniprot ID: A6NE02
  ENST ID: ENST00000375366
  CDS Start-End: 128-1564
ggagggaggccaagcaggaaggggggtgccgtccccttgtgccggatcctatataaggaagagggatgtgagcagagtggtctgggcttcaccgtccctccagtggacttgggggctgagcataaagatgcctaggagaggctactccaagcctgggtcctggggcagcttctgggccatgctgaccttggtgggcctggtcacccatgcagcacagagagccgatgttggcggggaggcagctggcacctccatcaaccactcccaggcggtgctccagcgcttgcaggagctgctgcggcagggcaacgccagcgatgtggttctgcgggtgcaggctgcgggcaccgatgaggtccgggtattccacgcccaccgcctgctgctgggactgcacagtgagctgttcctggagctgctaagtaaccagagcgaggcggtgctgcaggagccacaggactgcgccgctgtcttcgacaagttcatcaggtacctgtactgcggggagctgaccgtgctgctgacccaggccatccccctgcacagactggccaccaagtacggcgtgtcctccctgcagcgcggcgtggccgactacatgcgcgcgcacctggcgggaggcgcgggcccggcggtgggctggtaccactacgcggtgggcaccggggacgaggccctgcgcgagagctgcctgcagttcctggcctggaacctgtcggccgtggcggccagcaccgagtggggcgccgtgagccccgagctgctctggcagctcctgcaacgctcggacctggtgctgcaggatgaactggagctgttccacgcgctggaggcctggctgggtcgcgcgcggccgccccctgccgtggccgagcgggcgctgcgcgccatacgctaccccatgatcccaccggcacagctgttccagctgcaggcgcgctcggcagccctggcgcgccacggccccgcggtggccgacctcctgctgcaggcctaccagttccacgccgcgtcgccgctgcactacgccaagttcttcgacgtcaacggcagcgccttcctgccccgcaactacctcgcgcccgcctggggcgccccgtgggtcatcaacaacccggcccgcgacgaccgcagcaccagcttccagacgcagctgggcccgagtggccacgacgcgggccgccgggtcacctggaacgtgctcttctcgccgcgctggctgcccgtcagcctgcggcccgtttacgcggacgccgcgggcactgctctgcccgccgcgcgcccggaggacggccgaccgcggctggtggtgacgccggccagcagcggcggcgacgcggcgggcgtgagcttccagaagacggtgctggtgggggcgcgccagcagggccgcctgctggtccgccacgcctacagcttccaccagagcagcgaggaggccggcgacttcctggcgcacgccgacctgcagcggcgcaactccgagtacctggttgagaacgccctgcacctgcacctcatcgtcaagcccgtataccacacccttatccggacccccaagtagcctcggggtctgggaataaaggcctggcctaggtggtccctgtgggtctgggaagggcaaggcgagcctggaggtggcaacaagcctggtcccctggatggccaggcgccggccaccctagggctggggtggagtccaggtgaggcgtggtagacaagatgcctggtttcaagagctgatttcacagctgacttgaaggaacgttcttggtcctgaataaaccgatgctcagagtggtaaa

SEQ ID NO: 112391 - DNA, 3044 bp, Homo sapiens
  Payload ID: 1998
  Gene Symbol: BTBD18
  Gene Name: BTB (POZ) domain containing 18
  Uniprot ID: B2RXH4
  ENST ID: ENST00000422652
  CDS Start-End: 290-2428
aatgtttccttaaaagtgttaacttgaagattatacctgtggagctgggatgtggtgctcaggaagaatataagtagtcagcattgtagcagttgagtctcagtggtaatggaaatgaggaaggttgaaggataataatagttaccatttggggcttggtagttattttgtgccaggcactcactgtgctaagcaactttaccttcactgactcatttaatctttaaaacaaccctacaaggagtctgatctgtgaaaacctagaaggtttgttaagactcttgccaacatgtgctctcctgccagtcccaaaatcctatacaggaacccccggttcctcaggttagcttttctgcagcttcatcaccagcagcagagtgatgtgttctgtgatgtccttctgcaggcagaaggtgaggcagttccagctcactgctgcatcctgtcagcttgtagccccttcttcacagagcgcctggagcgggagaggccagctcagggtgggaaggtggtgctagagctgggtggcctgaagatcagcacacttaggaagctggtggacttcttgtatacctcagaaatggaagtatctcaagaagaagcccaggatgtgctatctgctgcccgtcagctccgtgtgtctgagctggaatcccttcagcttgagggtggaaagttggtgaaggccccacagggccgaaggctgaaccgagagtgcttacaaccaacaagtgctgcaccaatctctgccagagtggtgacacccagccaccaccctcacaccccactgcccactaatcaaactccttgtcctcttggggcaataagattgaagtccttggggaaggaagaggggccccaggaaaacaaccgacagaatgcagacaatttgtctggcactcttctgctcaagaggaaggccagagcctgcccaactccacaagaaaaaaactcttcaccatcaagccatagtcaagagcctagagagaacaagaatgacactgcccttgatcctacagtgctctccccacccagcttgtacccctctgtggacaaacacctgttgcccagaaagatcaggctcagtcgctcaaagccatctcctggtatctgtacatcaaagccttccagcattttaagtggatctagctcagtgcctgcaacccctggccggcgtctttggcggcagaggagtgtaaataaagaaacaccagaggacaagccaaaaccaggcagagctagtcctctgcagagcaccccaaacccatctggtctgggaaagacaggtgggagcaggaagcggagccctgaagtcagggcacctaactcagactctgcagaggaggggcaggttgggagagttaaacttaggaagattgtcaatgggacttgctgggaagtggtacaagagactcctctcaaaaacactcaagatagcccccagatcccagatcccggaggagacttccaagagccttcaggaactcagccattctccagtaatgagcaggaaatgtcacctactagaacagaactgtgtcaggactcccccatgtgcactaagctacaagacattctggtctctgctagccactccccagaccacccagtggtgaagtcagagtttgagtccagtccagaactggtagagaaggaacctatgttggctattgactgcagagaaccctatgcatttgacacagctctgctggagcagccctgtgaggctgaggagtaccgaatcacaagtgctgctgccaccagtgagctggaggagatcctggacttcatgctctgtggctcagacattgaaccacctatagggtctctggagagtccaggggctgagggctgcagaacgcctacctaccatctgacagaaacaggaaagaactggattgaaggggaagaatggtgtctaccagacatggaactctggcccagggagctcacagaattggaaaaggaacctgctggtgagaacagagggccaactgagctccttagcccccttgtcatgccctctgaggtgagtgaagtgctttcagtaggaggccgttggacaccagaccttgaaattaccagctcccagccactggatggtcaggaagacaaacttctccatgtcagctcccttgatactccccagaggtcttatggggacctctcacctccctgctcaaactgggtggagactgggctggaagtctccttgactacagatgagttattatacccttctcccaaggcaggcaaggaggtatctggtcactctgaactactaggctcacttcctgccagctctgaagaggaagagattgatgtggtggactggacagcagaggggaggctggtacccactactgttccctccgtgtggcctgacccttcctcagagtcagaaacagaggtagatatactaacatagtggagaggggagggcaggttaggggccttgggagggtgggaaatgttagctagcaaaaggcttactggcagagaagctggcacgtgccctcagcacaagaggcaggtgtaccctggctctttgtaggtcccttcctcccttccctaagcctcagaagccaggcagaagccaagggtaccatagatagaaaattatgaacttgtaccatcttatttgtaatctattttccggttagtgacaactgaaacaaactgtgtgctccccaattctggtgggtcataggtaacagccaaggccagatctctcaggtcataaggcatccagtcactggtaatttaggaaaagctgagaaagaacaccctcctctgtggtggggtattgtttaagaaaatgttccagaggaaggtgtgaagcagtgttgggtggaatactaagtgggtgggagtgatggatgctgtccagcacccaacgtggggcttattcactgccagtattaggaagtctagctaaaacctctgcaggggccaagaagatgtacttccatcattacttccaaaaagtaagttgaaaaagatacagttgcttttttaaaaaataaattatttactttgctccc

SEQ ID NO: 112392 - DNA, 2947 bp, Homo sapiens
  Payload ID: 1998
  Gene Symbol: BTBD18
  Gene Name: BTB (POZ) domain containing 18
  Uniprot ID: B2RXH4
  ENST ID: ENST00000436147
  CDS Start-End: 189-2327
atatccttggcacaatttctgggctgatgtttcctcaactcatactattatctctcactttcaaaattcccctgccatttcaaagacaaaaaacaaattagatgtaaccatgcctctgaaatgtattatctcacctacaggagtctgatctgtgaaaacctagaaggtttgttaagactcttgccaacatgtgctctcctgccagtcccaaaatcctatacaggaacccccggttcctcaggttagcttttctgcagcttcatcaccagcagcagagtgatgtgttctgtgatgtccttctgcaggcagaaggtgaggcagttccagctcactgctgcatcctgtcagcttgtagccccttcttcacagagcgcctggagcgggagaggccagctcagggtgggaaggtggtgctagagctgggtggcctgaagatcagcacacttaggaagctggtggacttcttgtatacctcagaaatggaagtatctcaagaagaagcccaggatgtgctatctgctgcccgtcagctccgtgtgtctgagctggaatcccttcagcttgagggtggaaagttggtgaaggccccacagggccgaaggctgaaccgagagtgcttacaaccaacaagtgctgcaccaatctctgccagagtggtgacacccagccaccaccctcacaccccactgcccactaatcaaactccttgtcctcttggggcaataagattgaagtccttggggaaggaagaggggccccaggaaaacaaccgacagaatgcagacaatttgtctggcactcttctgctcaagaggaaggccagagcctgcccaactccacaagaaaaaaactcttcaccatcaagccatagtcaagagcctagagagaacaagaatgacactgcccttgatcctacagtgctctccccacccagcttgtacccctctgtggacaaacacctgttgcccagaaagatcaggctcagtcgctcaaagccatctcctggtatctgtacatcaaagccttccagcattttaagtggatctagctcagtgcctgcaacccctggccggcgtctttggcggcagaggagtgtaaataaagaaacaccagaggacaagccaaaaccaggcagagctagtcctctgcagagcaccccaaacccatctggtctgggaaagacaggtgggagcaggaagcggagccctgaagtcagggcacctaactcagactctgcagaggaggggcaggttgggagagttaaacttaggaagattgtcaatgggacttgctgggaagtggtacaagagactcctctcaaaaacactcaagatagcccccagatcccagatcccggaggagacttccaagagccttcaggaactcagccattctccagtaatgagcaggaaatgtcacctactagaacagaactgtgtcaggactcccccatgtgcactaagctacaagacattctggtctctgctagccactccccagaccacccagtggtgaagtcagagtttgagtccagtccagaactggtagagaaggaacctatgttggctattgactgcagagaaccctatgcatttgacacagctctgctggagcagccctgtgaggctgaggagtaccgaatcacaagtgctgctgccaccagtgagctggaggagatcctggacttcatgctctgtggctcagacattgaaccacctatagggtctctggagagtccaggggctgagggctgcagaacgcctacctaccatctgacagaaacaggaaagaactggattgaaggggaagaatggtgtctaccagacatggaactctggcccagggagctcacagaattggaaaaggaacctgctggtgagaacagagggccaactgagctccttagcccccttgtcatgccctctgaggtgagtgaagtgctttcagtaggaggccgttggacaccagaccttgaaattaccagctcccagccactggatggtcaggaagacaaacttctccatgtcagctcccttgatactccccagaggtcttatggggacctctcacctccctgctcaaactgggtggagactgggctggaagtctccttgactacagatgagttattatacccttctcccaaggcaggcaaggaggtatctggtcactctgaactactaggctcacttcctgccagctctgaagaggaagagattgatgtggtggactggacagcagaggggaggctggtacccactactgttccctccgtgtggcctgacccttcctcagagtcagaaacagaggtagatatactaacatagtggagaggggagggcaggttaggggccttgggagggtgggaaatgttagctagcaaaaggcttactggcagagaagctggcacgtgccctcagcacaagaggcaggtgtaccctggctctttgtaggtcccttcctcccttccctaagcctcagaagccaggcagaagccaagggtaccatagatagaaaattatgaacttgtaccatcttatttgtaatctattttccggttagtgacaactgaaacaaactgtgtgctccccaattctggtgggtcataggtaacagccaaggccagatctctcaggtcataaggcatccagtcactggtaatttaggaaaagctgagaaagaacaccctcctctgtggtggggtattgtttaagaaaatgttccagaggaaggtgtgaagcagtgttgggtggaatactaagtgggtgggagtgatggatgctgtccagcacccaacgtggggcttattcactgccagtattaggaagtctagctaaaacctctgcaggggccaagaagatgtacttccatcattacttccaaaaagtaagttgaaaaagatacagttgcttttttaaaaaataaattatttactttgctcccataa

SEQ ID NO: 112393 - DNA, 557 bp, Homo sapiens
  Payload ID: 1998
  Gene Symbol: BTBD18
  Gene Name: BTB (POZ) domain containing 18
  ENST ID: ENST00000527995
  CDS Start-End: 290-557
aatgtttccttaaaagtgttaacttgaagattatacctgtggagctgggatgtggtgctcaggaagaatataagtagtcagcattgtagcagttgagtctcagtggtaatggaaatgaggaaggttgaaggataataatagttaccatttggggcttggtagttattttgtgccaggcactcactgtgctaagcaactttaccttcactgactcatttaatctttaaaacaaccctacaaggagtctgatctgtgaaaacctagaaggtttgttaagactcttgccaacatgtgctctcctgccagtcccaaaatcctatacaggaacccccggttcctcaggttagcttttctgcagcttcatcaccagcagcagagtgatgtgttctgtgatgtccttctgcaggcagaaggtgaggcagttccagctcactgctgcatcctgtcagcttgtagccccttcttcacagagcgcctggagcgggagaggccagctcagggtgggaaggtggtgctagagctgggtggcctgaagatcagcacacttaggaagctgg

SEQ ID NO: 112394 - DNA, 1214 bp, Homo sapiens
  Payload ID: 1999
  Gene Symbol: BTBD19
  Gene Name: BTB (POZ) domain containing 19
  ENST ID: ENST00000409335
  CDS Start-End: 299-1060
agggcctctttcgccgccgccgccgccgccagccagccagcttcttcccaggaccataggccactccagcctcagcttctcctggccccctccctgtgtctgttcctgtccccgagcctctggcctctgatgccttcaggagcttgggcctctcctgctccactcctaaacttcagcttctcagcaaacaggcctcccaagtccctgcttctccctctcaggccttgctaacctcaccagctctagggcctggccaggcctcccaggctccctcctccaccccaaccccttctcactcatggagcccttgggactggtcgtgcatgggaaagctgaacctttttccgcagcactccgaagccttgtcaacaacccgcgatacagtgatgtttgcttcgtggttggtcaagaacggcaggaggtatttgcccatcggtgcttgttggcctgtagatgcaacttcttccagcgacttctgggcacagagccaggccccggggtgcccagtcctgtggtgctaagcactgtgccaactgaggccttcctggcagtgctggagttcctatataccaacagtgtcaagctgtaccgccactctgtggccgtaacctttggcctggggcagctgcaggagcgctgcgtggctttcatagaggcccacagccaggaggccctccggacccgaggcttcctggagctgtcggcggccgcgctgctgcccctgctccgcagcgacaagctctgcgtggacgaggctgaactggtccgcgcggcccgaagctgggcgcgcgtgggcgcggcggtgctggagcggccggtggctgaggtggcggccccggtggtgaaagagctgagactagccttgctggccccggcggagctgagcgccctggaagagcagaaccggcaggaaccactcatcccggtggagcagattgtggaggcgtggaaatgccatgccctgcggagaggggatgaggcccggggcgccccgtgtcgccgccggagaggcaccctgccccgggagcatcaccgctttctggacctgtccttcaaatgatccaacgccgggactcgcagggagccctcgacccgcccagctgagcctgccccaaactacagctcccgaagtgctcggcgttcggagcgggcttccgttcccagcgtgcccagtgagccgggcgccggaagaaccgttgtctgccacgcgcagc

SEQ ID NO: 112395 - DNA, 1572 bp, Homo sapiens
  Payload ID: 1999
  Gene Symbol: BTBD19
  Gene Name: BTB (POZ) domain containing 19
  Uniprot ID: C9JJ37
  ENST ID: ENST00000450269
  CDS Start-End: 340-1215
aggcttcccaccccgtcggctgcctgggcagactcccagccagggcctctttcgccgccgccgccgccgccagccagccagcttcttcccaggaccataggccactccagcctcagcttctcctggccccctccctgtgtctgttcctgtccccgagcctctggcctctgatgccttcaggagcttgggcctctcctgctccactcctaaacttcagcttctcagcaaacaggcctcccaagtccctgcttctccctctcaggccttgctaacctcaccagctctagggcctggccaggcctcccaggctccctcctccaccccaaccccttctcactcatggagcccttgggactggtcgtgcatgggaaagctgaacctttttccgcagcactccgaagccttgtcaacaacccgcgatacagtgatgtttgcttcgtggttggtcaagaacggcaggaggtatttgcccatcggtgcttgttggcctgtagatgcaacttcttccagcgacttctgggcacagagccaggccccggggtgcccagtcctgtggtgctaagcactgtgccaactgaggccttcctggcagtgctggagttcctatataccaacagtgtcaagctgtaccgccactctgtgctggaagtgctgacagcggctgtggagtatgggctggaggaactgagagagctgtgcctgcagtttgtggtgaaggtgctggatgtggacttggtttgtgaggccctgcaggtggccgtaacctttggcctggggcagctgcaggagcgctgcgtggctttcatagaggcccacagccaggaggccctccggacccgaggcttcctggagctgtcggcggccgcgctgctgcccctgctccgcagcgacaagctctgcgtggacgaggctgaactggtccgcgcggcccgaagctgggcgcgcgtgggcgcggcggtgctggagcggccggtggctgaggtggcggccccggtggtgaaagagctgagactagccttgctggccccggcggagctgagcgccctggaagagcagaaccggcaggaaccactcatcccggtggagcagattgtggaggcgtggaaatgccatgccctgcggagaggggatgaggcccggggcgccccgtgtcgccgccggagaggcaccctgccccgggagcatcaccgctttctggacctgtccttcaaatgatccaacgccgggactcgcagggagccctcgacccgcccagctgagcctgccccaaactacagctcccgaagtgctcggcgttcggagcgggcttccgttcccagcgtgcccagtgagccgggcgccggaagaaccgttgtctgccacgcgcagccccttgtgcgggatcaagcccgtgtgggcgaggtggggtcgggccgggcagggcttgggctgggcctccctgagggggtgaaactcgaaaacgaggatttccttcgttccacaccctgactctacgccctgcccctgggcattgtcgtctactagtctattctgatgactcccacatatctatctgttcagctcagctccctc

SEQ ID NO: 112396 - DNA, 941 bp, Homo sapiens
  Payload ID: 1999
  Gene Symbol: BTBD19
  Gene Name: BTB (POZ) domain containing 19
  Uniprot ID: C9JJ37
  ENST ID: ENST00000439563
  CDS Start-End: 255-743
ttcccaggaccataggccactccagcctcagcttctcctggccccctccctgtgtctgttcctgtccccgagcctctggcctctgatgccttcaggagcttgggcctctcctgctccactcctaaacttcagcttctcagcaaacaggcctcccaagtccctgcttctccctctcaggccttgctaacctcaccagctctagggcctggccaggcctcccaggctccctcctccaccccaaccccttctcactcatggagcccttgggactggtcgtgcatgggaaagctgaacctttttccgcagcactccgaagccttgtcaacaacccgcgatacagtgatgtttgcttcgtggttggtcaagaacggcaggaggtatttgcccatcggtgcttgttggcctgtagatgcaacttcttccagcgacttctgggcacagagccaggccccggggtgcccagtcctgtggtgctaagcactgtgccaactgaggccttcctggcagtgctggagttcctatataccaacagtgtcaagctgtaccgccactctgtgctggaagtgctgacagcggctgtggagtatgggctggaggaactgagagagctgtgcctgcagtttgtggtgaaggtgctggatgtggacttggtttgtgaggccctgcagcacttttggaggccgaggcgggcggatcaagaggtcaggagatcgagaccatcctggctaacacggtggccgtaacctttggcctggggcagctgcaggagcgctgcgtggctttcatagaggcccacagccaggaggccctccggacccgaggcttcctggagctgtcggcggccgcgctgctgcccctgctccgcagcgacaagctctgcgtggacgaggctgaactggtccgcgcggcccgaagctgggcgcgcgtgggcgcggtgagtg

SEQ ID NO: 112397 - DNA, 2649 bp, Homo sapiens
  Payload ID: 2000
  Gene Symbol: BTBD2
  Gene Name: BTB (POZ) domain containing 2
  Uniprot ID: Q9BX70
  ENST ID: ENST00000255608
  CDS Start-End: 22-1599
cgcccacgccgcagccacaaaatggcggcgggtgggagcggcgggcgtgcgtcgtgcccgccgggggtcggggtcggcccgggcacggggggcagtcccgggcccagcgccaacgccgccgccaccccggcccccggcaacgcggccgccgccgccgccgccgccgccgccgccgccgccgcccctgggccgacgccgcccgccccgccgggccccgggacagacgcgcaggccgcgggcgcggagcgggcggaggaggcggcgggcccgggggcggcggcgctgcagcgcgaggccgcgtacaactggcaggccagcaagcccaccgtgcaggagcgcttcgccttcctcttcaacaacgaggtgctgtgcgacgtgcacttcctggtgggcaaggggctcagctcgcagcgcatccccgcgcacaggttcgtgctggccgtgggcagcgccgtctttgatgccatgttcaacgggggaatggccacaacatccacggagattgagctgcccgacgtggaacccgctgccttcctcgcactgctcaagtttctctactcggacgaggtgcagattggcccggagacggtgatgaccacgctatacaccgccaagaagtacgcggtgccagcgctcgaggcccattgcgtggagttcctgaagaagaacctgcgagccgacaacgccttcatgctgctcacgcaggcgcgactcttcgatgaaccgcagctggccagcctgtgcctggagaacatcgacaaaaacactgcagacgccatcaccgcggagggcttcaccgacattgacctggacacgctggtggctgtcctggagcgcgacacactgggcatccgtgaggtgcggctgttcaatgccgttgtccgctggtccgaggccgagtgtcagcggcagcagctgcaggtgacgccagagaacaggcggaaggttctgggcaaggccctgggcctcattcgcttcccgctcatgaccatcgaggagttcgctgcaggtcccgcacagtcgggcatcctggtggaccgcgaggtggtcagcctcttcctgcacttcaccgtcaaccccaagccacgagtggagttcattgaccggccccgctgctgcctgcgtgggaaggagtgcagcatcaaccgcttccagcaggtggagagtcgctggggctacagcgggaccagtgaccgcatcaggttctcagtcaacaagcgcatcttcgtggtgggatttgggctgtatggatccatccacgggcccaccgactaccaagtgaacatccagattattcacaccgatagcaacaccgtcttgggccagaacgacacgggcttcagctgcgacggctcagccagcaccttccgcgtcatgttcaaggagccggtggaggtgctgcccaacgtcaactacacggcctgtgccacgctcaagggcccagactcccactacggcaccaaaggcctgcgcaaggtgacacacgagtcgcccaccacgggcgccaagacctgcttcaccttttgctacgcggccgggaacaacaatggcacatccgtggaggacggccagatccccgaggtcatcttctacacctaggctgcccgacaccgacaccgccctccctccgtggggatagccgcagccccaggccatcatctgctgctggggcccccccaccacgcggtgccaggcccagtgtcccccaggccgtctgtccactccatgccacctttctcagcatcaggacggggttgccctgtgttcaccacgagtgtggctgctggatcagggcagccggggaggtggccaggccagtggccaggccctgtggagacaatccctcaggactagggacagggctgtgccggcctgggccagggcccacggacccgcagctcagggcgcctgcccacgtcgtctgccggcggtgcgccgcgggcgtccctcgcgtctcttcactgcacattgcaatgcatttgcgattcccatttctctgctaggagccagcctgggtggcgctgctcccagagccgtgggtcccagaccttgcgttccttttgttcctgtccgtttatcaggacacgggccccacctgtcacgtgcccgaggccacccaagcccagcctgcggggcgttcccactgcctggatgccggcttgagttctgcgcacgcaggattcagtgtggggacggcccctgccggataggcctagccctggcccaggtggtgagcggtttgcagtgtccgttctcatccacctgatgggcccagataaaggcccccgctgtccagcctccctggacggccctcgcggtccctgcagcccaagatgggactcagaccctgtgccccagagctcccctgccgcagaatggggccccagccggccccgaccgggtccaggagcactgctcgcctgtacatactgttgccctagcccacctggtgccgtgggagccacccccaggtgctgggggcacagcccctccccactccggccacgcccccacccaccccgcgtgtttctgccctgtgactcctggaacctgcgtcctccccaaagccatgggaggggtgtcctcctcagaccatgcccccagatgatttttttaaataaagaaacaaatgcacctgccttgagcgca

SEQ ID NO: 112398 - DNA, 858 bp, Homo sapiens
  Payload ID: 2000
  Gene Symbol: BTBD2
  Gene Name: BTB (POZ) domain containing 2
  ENST ID: ENST00000589200
  CDS Start-End: 1-335
ccctgggccgacgccgcccgccccgccgggccccgggacagacgcgcaggccgcgggcgcggagcgggcggaggaggcggcgggcccgggggcggcggcgctgcagcgcgaggccgcgtacaactggcaggccagcaagcccaccgtgcaggagcgcttcgccttcctcttcaacaacgaggtgctgtgcgacgtgcacttcctggtgggcaaggggctcagctcgcagcgcatccccgcgcacagggaccctgccactcccacccgcacccctgtgcgccaagacccctaggccttgctccctgcgtcctccctgctgcctccagacccagtgacccccaccggagacccccaggctcagcacatgatctggatcagagaccttcaaaccatgctgctcccctccagggataccccctgcccgccctgcagtccagatcatagactaccatccacagcccctccagccccggacccccacctcagccagagacccctgggccctgccacctcccacttcagtgaccacccacctccagctccgccactgccaggctctggaccctggactctgcagaaggttcgtgctggccgtgggcagcgccgtctttgatgccatgttcaacgggggaatggccacaacatccacggagattgagctgcccgacgtggaacccgctgccttcctcgcactgctcaagtttctctactcggacgaggtgcagattggcccggagacggtgatgaccacgctatacaccgccaagaagtacgcggtgccagcgctcgaggcccattgcgtggagttcctgaagaagaacctgcgagccgacaacgccttcatgctgctcacgcagg

SEQ ID NO: 112399 - DNA, 961 bp, Homo sapiens
  Payload ID: 2000
  Gene Symbol: BTBD2
  Gene Name: BTB (POZ) domain containing 2
  ENST ID: ENST00000587825
  CDS Start-End: 1-961
gttcaacgggggaatggccacaacatccacggagattgagctgcccgacgtggaacccgctgccttcctcgcactgctcaagtttctctactcggacgaggtgcagattggcccggagacggtgatgaccacgctatacaccgccaagaagtacgcggtgccagcgctcgaggcccattgcgtggagttcctgaagaagaacctgcgagccgacaacgccttcatgctgctcacgcaggctggagtgcaatggcacgatctcagctcactgcaacctccgcctccagcgttcaagcgattctcctgcctcagcctccacagtagctgggattacaggcccccaccaccgcgcctggctaaaaaaaaagaaaaaaaaaaaccagagagaactttctctctctctctaaggaaatgtcaggcgcgactcttcgatgaaccgcagctggccagcctgtgcctggagaacatcgacaaaaacactgcagacgccatcaccgcggagggcttcaccgacattgacctggacacgctggtggctgtcctggagcgcgacacactgggcatccgtgaggtgcggctgttcaatgccgttgtccgctggtccgaggccgagtgtcagcggcagcagctgcaggtgacgccagagaacaggcggaaggttctgggcaaggccctgggcctcattcgcttcccgctcatgaccatcgaggagttcgctgcaggtcccgcacagtcgggcatcctggtggaccgcgaggtggtcagcctcttcctgcacttcaccgtcaaccccaagccacgagtggagttcattgaccggccccgctgctgcctgcgtgggaaggagtgcagcatcaaccgcttccagcaggtggagagtcgctggggctacagcgggaccagtgaccgcatcaggttctcagtcaacaagcgcatcttcgtggtgggatttgggctgtat

SEQ ID NO: 112400 - DNA, 352 bp, Homo sapiens
  Payload ID: 2000
  Gene Symbol: BTBD2
  Gene Name: BTB (POZ) domain containing 2
  ENST ID: ENST00000588395
  CDS Start-End: 278-352
aagagagatggcgctcgggacggaagggttccctgccctgccccaggagcctgcatgggagaaggcgtgaggaggtgaaggaagcttatggtacctgcacaccgacaggctggagcgcgagagatcttgctctgttgcccaggctggagggcagtggtggagtcatagctcatcaaaagctcaaccttccaggctcaagtgatgcttccgtctcagccttctgagtagctgggacaacaggttcgtgctggccgtgggcagcgccgtctttgatgccatgttcaacgggggaatggccacaacatccacggagattgagctgcccgacgtggaacccgctgccttcctcgca

SEQ ID NO: 112401 - DNA, 349 bp, Homo sapiens
  Payload ID: 2000
  Gene Symbol: BTBD2
  Gene Name: BTB (POZ) domain containing 2
  ENST ID: ENST00000592082
  CDS Start-End: 1-349
gttcaatgccgttgtccgctggtccgaggccgagtgtcagcggcagcagctgcaggtcccgcacagtcgggcatcctggtggaccgcgaggtggtcagcctcttcctgcacttcaccgtcaaccccaagccacgagtggagttcattgaccggccccgctgctgcctgcgtgggaaggagtgcagcatcaaccgcttccagcaggtggagagtcgctggggctacagcgggaccagtgaccgcatcaggttctcagtcaacaagcgcatcttcgtggtgggatttgggctgtatggatccatccacgggcccaccgactaccaagtgaacatccagattattcacaccg

SEQ ID NO: 112402 - DNA, 572 bp, Homo sapiens
  Payload ID: 2000
  Gene Symbol: BTBD2
  Gene Name: BTB (POZ) domain containing 2
  ENST ID: ENST00000590646
  CDS Start-End: 414-572
gctggaggcaagagagatggcgctcgggacggaagggttccctgccctgccccaggagcctgcatgggagaaggcgtgaggaggtgaaggaagcttatggtacctgcacaccgacaggctggagcgcgagagcaaccctgtggcctgtcctggtctctgactcaccctgaagaatgagaaacctgtttaaagtgaagtgtgatggaatcaagtcagacgtgaggaaggacctacctccttggtcaaagctgggatggggatcttgctctgttgcccaggctggagggcagtggtggagtcatagctcatcaaaagctcaaccttccaggctcaagtgatgcttccgtctcagccttctgagtagctgggacaacaggttcgtgctggccgtgggcagcgccgtctttgatgccatgttcaacgggggaatggccacaacatccacggagattgagctgcccgacgtggaacccgctgccttcctcgcactgctcaagtttctctactcggacgaggtgcagattggcccggagacggtgatgaccacgctatacaccgccaagaagtacgcg

SEQ ID NO: 112403 - DNA, 559 bp, Homo sapiens
  Payload ID: 2000
  Gene Symbol: BTBD2
  Gene Name: BTB (POZ) domain containing 2
  ENST ID: ENST00000587742
  CDS Start-End: 455-559
aagagagatggcgctcgggacggaagggttccctgccctgccccaggagcctgcatgggagaaggcgtgaggaggtgaaggaagcttatggtacctgcacaccgacaggctggagcgcgagagcaaccctgtggcctgtcctggtctctgactcaccctgaagaatgagaaacctgtttaaagtgaagtgtgatggaatcaagtcagacgtgaggaaggacctacctccttggtcaaagctgggatggggatcttgctctgttgcccaggctggagggcagtggtggagtcatagctcatcaaaagctcaaccttccaggctcaagtgatgcttccgtctcagccttctgagtagctgggacaacaggctggagtgcaatggcgcggtctcggctcactgcaacctccgcctcccaggttcgtgctggccgtgggcagcgccgtctttgatgccatgttcaacgggggaatggccacaacatccacggagattgagctgcccgacgtggaacccgctgccttcctcgcactgctcaagtttctctactcggacgaggtg

SEQ ID NO: 112404 - DNA, 4686 bp, Homo sapiens
  Payload ID: 2001
  Gene Symbol: BTBD3
  Gene Name: BTB (POZ) domain containing 3
  Uniprot ID: Q9Y2F9
  ENST ID: ENST00000254977
  CDS Start-End: 358-1743
attgcgcatgccccgtatccaaggccgcctccgggagcacctcccatgccgctccgctccctcccggtgaccgggcacgcgcgctcgctcccgcagagcgtgccctgcgtgcgggtgcccgccgagcccgccgggcgctggatctccgagtgccccggccggggcctgaggagcgggcacagggcaaggcggcggacggctgcgtcgcccgaggcgaggaggagcgctggcgagacggtaaagaacaggtccaagaaaagctcaaagaaagcaaataccagcagcagcagtagcaacagcagcaagttgccaccagtttgttatgaaataattaccttgaagactaaaaagaagaagatggctgctgatatattcccccgtaaaaagccagccaactccagcagcaccagcgtccagcagtaccaccagcagaatctcagtaacaacaaccttatcccggccccaaactggcagggtctttatcccaccattagagagagaaatgcgatgatgttcaataatgatttgatggcagatgtacattttgtggttgggccaccaggtgggactcaacggttgccaggacacaaatatgttttagctgttgggagctctgtgttccatgcgatgttttacggagaacttgcagaggacaaagatgaaatccgtataccagatgtcgaacctgctgcttttctcgctatgctgaaatatatctattgtgatgaaattgacttggctgctgacacagtgctggccacactttatgctgccaaaaagtacattgtccctcaccttgccagagcctgtgttaatttcctggagaccagcctgagtgccaagaatgcctgtgtgctcctctcccagagctgcctgttcgaggagccagacctgacccagcgttgctgggaggtgattgatgcccaggctgagttagctctcaagtctgagggattctgcgatattgacttccagacactagaaagtattctccgtagggaaactctgaatgccaaagaaattgtggtttttgaggcagctctcaactgggctgaagtagaatgccaacgacaagatctggcgttgagcattgaaaataaacgcaaggttctaggaaaggcactttacttgatccgcatacccacaatggccctcgatgattttgcaaatggtgctgcacagtccggggtattaactctcaatgagaccaacgacatcttcctctggtatactgcagccaaaaagcctgagcttcagtttgtgagtaaagcccgtaagggccttgtcccccagcgctgtcaccgtttccagtcgtgtgcctatcgaagcaaccaatggcgctatcgtggtcgctgtgacagcatccagtttgcagttgataaaagagtgttcattgctggctttgggctgtatggctccagctgtggttctgcagaatacagtgccaagattgaacttaagcggcagggcgttgtcctggggcagaacttgagcaagtacttctcagatgggtccagcaatacctttcccgtatggtttgaatacccagtgcagatcgagccagacaccttctacacagccagtgtgatactggatggcaatgaactcagctactttggacaagaaggcatgacagaagttcagtgtggcaaagtgactgtccagtttcagtgctcctcagatagcaccaatggcactggggtacagggagggcagatccctgaacttatattctatgcttgaaaactcacttcctgaagcagcttgagctccaaagtgcacatctggttccaacttgcctgatgcttagctcatctgcaaatatgtgatcagtgccggtaatttgtaatgaatgaagcggtaggcaggttctaatttcttttaaccttttaattatgtacaggcaaaaatgcagcattccgcttttaactatctgcttaaaagagctaacgttcttattaaggctttgtggtttttagagttgcatctatgaacctggggagattatgtgctttcccaagcgttccaccaccctctcagttttgtccctctgaagataattttggatcaccttgaatttccttttggacgttatttgatgaacagaaataaagtgataacaagagttatttttaaacagaactcctcttaccccccaaaacagataaacctcagtgtacaattttgaaagaagttttgccttgtaatgagtaataatttagaaagtagacagtggttgtgtttggctctcgttttattccttttacatttgttgcttctgggatttaaaaaattactaaattcataagatagttaggtattaaacacttcagaatatcaatgtaaaattggaaaataaggaactgggggcatttgtttaggccatgacttctacaagcagatttcttttcttttagtttagaagacaaaaaatttcaatacagatacttcttttagaagtaaatttttagattttattgtcagtagaaaaaagttaaactcctactaatttaaactaagacagtttaaaaaggaagcctgaaaaagactcatactacaaataatttaattgatggcatataagaatatgcagtttgaaaaagccaaactcttctctccacttagcttttgatccccactgtttgcttatttgtataagtcatactgtgtagaatttctattttctttttccccattaaaagaggaccaaacaattctttatacaaatggagtagcaactagttttgtagcactacatttaatgtaatgagatacctttgttcatttttttaaatttgaaatatactttacctgatccactttgattgtatactatattctttgttaattttaattttgtcctgttcctagactgctagaatctggcccctggccatcttaaagtgccaacatatgcctgcagggtttataaaaaatggcctggagtgacacattttattatacctaatattcactgcatcagtatcacatctagctcccttacttgtccacagataatgtaaacaaaggagggaaaaacttattaaattctccttcgctgctggcttgtgctggtttagtgcctgtgtccctggcagtgtccagtgtgttcacttccagttgaagtatccatgtgtttctgggcagcttttctgctcagtgtgatcctgagatggcttccccgccgccacccagagtgtggtccttggccgcctcctgctcctgctctgcaagcctgaaactggcttgtctggagccaggagttagtcctggggtgtgtgtgtgcctgcgcacccatgcgcatgcaagtgtgtttgccagctcaggagctgtctcctctctacctggctagtaagaggtgggacagtaatggtcctcctgctggccccagcaaggcccatgagtgactgccctgacgtattcactgtgcctctgggccacttcttcccctgtagatgtgggcttgttgccttcagccggcttccctgagggaggagaacactggattattggaaatgttttaatcactcttgccattacctacatctattagcatagatgatgaaaagctgttactggtgattatagatgagtatttccaggacaacgttctaaaagtacaattatttcttattggggagattacaggtagtttggcaaagcattgaagtacaaaggtacattttcaattaaaaagcacacttctacaaaagatttggtttttaaattatggttacacatttcagtaactcatagctgctgtgcaaattggtagaccttataagaaggcacttgtttgtaagccagagaagaaactttaattgcatcctatcagattgttgaggtgggtgtgatagtcttcaggtgcagtgcgttcattcactaacgctcactgtcagtgcccatgtttgctagctgcctccatgtgactagtgagctgctggtgaaagtcgtgtgaaatcctgtacactgtgtatagaataatgtaattttatgttaattgttattactttaaaacatatctaccatctgattggctggtaccgagagctgtgggtaaaatttgaaaattgtatttagaataagaaattttacattttaaaccctattgtcctttatgcattttcaatgaaatggaatgaaggctaatatgcttgctttatttacttttgtaatcttggattttgtagcttttaaaactagaaaccattgttctaacaaagcaggcaactttattctataaacacaactttattaagcagaatacactgtagatgcttttccccaacgtatctggctggcagtctttgtcgttgttcattctggggataaaggggaactaggctagcagttctaatgtgacattctttaagcatatcttaaaatagtatttaagtaaatggtctaatttctacataattattgcactgaacttttttgtttattaaggtgtttaaataagctcagctaattcaagacactgtagccacttgtgcatcagtgtgcttgaatttagtagcttacagcattatttatgaaggaaaaaatacataaatatgaagtacctcatgttgaatgttattgtactgtatttttaatgtaacagtgcagatcttgttagacacatgaatgtgtataatcatgttaaatgcaaataaaactagttcatagatttgttttccttta

SEQ ID NO: 112405 - DNA, 4904 bp, Homo sapiens
  Payload ID: 2001
  Gene Symbol: BTBD3
  Gene Name: BTB (POZ) domain containing 3
  Uniprot ID: Q9Y2F9
  ENST ID: ENST00000378226
  CDS Start-End: 412-1980
gtaatacctactctcctccgatccattcaccacacaacttcagccggctgaacagactcacgcagctccagcccatcttgctgacctaattcagaaaagaagtgctacagctctgtgcctgtcatctttgcagtgtagcattttcaggtgatctaggaaacagttatttttatgagcaaataagagaaacaggaatcatgatggggatatatttaacagacccagtactggataaaacttaaagccagtttctattcaacatagtgaaaaggtcaccttgcctggctgagaaaagcagcaaaatatcagctttgttggtttcagttaacctcttagcccgggctaatctcttttccttgatgttcaaaccaatttgggatatctaactctaaagagagacacactgtactcatggtagatgacaaggaaaagaacatgaaatgtctcaccttcttcttgatgcttccagagacggtaaagaacaggtccaagaaaagctcaaagaaagcaaataccagcagcagcagtagcaacagcagcaagttgccaccagtttgttatgaaataattaccttgaagactaaaaagaagaagatggctgctgatatattcccccgtaaaaagccagccaactccagcagcaccagcgtccagcagtaccaccagcagaatctcagtaacaacaaccttatcccggccccaaactggcagggtctttatcccaccattagagagagaaatgcgatgatgttcaataatgatttgatggcagatgtacattttgtggttgggccaccaggtgggactcaacggttgccaggacacaaatatgttttagctgttgggagctctgtgttccatgcgatgttttacggagaacttgcagaggacaaagatgaaatccgtataccagatgtcgaacctgctgcttttctcgctatgctgaaatatatctattgtgatgaaattgacttggctgctgacacagtgctggccacactttatgctgccaaaaagtacattgtccctcaccttgccagagcctgtgttaatttcctggagaccagcctgagtgccaagaatgcctgtgtgctcctctcccagagctgcctgttcgaggagccagacctgacccagcgttgctgggaggtgattgatgcccaggctgagttagctctcaagtctgagggattctgcgatattgacttccagacactagaaagtattctccgtagggaaactctgaatgccaaagaaattgtggtttttgaggcagctctcaactgggctgaagtagaatgccaacgacaagatctggcgttgagcattgaaaataaacgcaaggttctaggaaaggcactttacttgatccgcatacccacaatggccctcgatgattttgcaaatggtgctgcacagtccggggtattaactctcaatgagaccaacgacatcttcctctggtatactgcagccaaaaagcctgagcttcagtttgtgagtaaagcccgtaagggccttgtcccccagcgctgtcaccgtttccagtcgtgtgcctatcgaagcaaccaatggcgctatcgtggtcgctgtgacagcatccagtttgcagttgataaaagagtgttcattgctggctttgggctgtatggctccagctgtggttctgcagaatacagtgccaagattgaacttaagcggcagggcgttgtcctggggcagaacttgagcaagtacttctcagatgggtccagcaatacctttcccgtatggtttgaatacccagtgcagatcgagccagacaccttctacacagccagtgtgatactggatggcaatgaactcagctactttggacaagaaggcatgacagaagttcagtgtggcaaagtgactgtccagtttcagtgctcctcagatagcaccaatggcactggggtacagggagggcagatccctgaacttatattctatgcttgaaaactcacttcctgaagcagcttgagctccaaagtgcacatctggttccaacttgcctgatgcttagctcatctgcaaatatgtgatcagtgccggtaatttgtaatgaatgaagcggtaggcaggttctaatttcttttaaccttttaattatgtacaggcaaaaatgcagcattccgcttttaactatctgcttaaaagagctaacgttcttattaaggctttgtggtttttagagttgcatctatgaacctggggagattatgtgctttcccaagcgttccaccaccctctcagttttgtccctctgaagataattttggatcaccttgaatttccttttggacgttatttgatgaacagaaataaagtgataacaagagttatttttaaacagaactcctcttaccccccaaaacagataaacctcagtgtacaattttgaaagaagttttgccttgtaatgagtaataatttagaaagtagacagtggttgtgtttggctctcgttttattccttttacatttgttgcttctgggatttaaaaaattactaaattcataagatagttaggtattaaacacttcagaatatcaatgtaaaattggaaaataaggaactgggggcatttgtttaggccatgacttctacaagcagatttcttttcttttagtttagaagacaaaaaatttcaatacagatacttcttttagaagtaaatttttagattttattgtcagtagaaaaaagttaaactcctactaatttaaactaagacagtttaaaaaggaagcctgaaaaagactcatactacaaataatttaattgatggcatataagaatatgcagtttgaaaaagccaaactcttctctccacttagcttttgatccccactgtttgcttatttgtataagtcatactgtgtagaatttctattttctttttccccattaaaagaggaccaaacaattctttatacaaatggagtagcaactagttttgtagcactacatttaatgtaatgagatacctttgttcatttttttaaatttgaaatatactttacctgatccactttgattgtatactatattctttgttaattttaattttgtcctgttcctagactgctagaatctggcccctggccatcttaaagtgccaacatatgcctgcagggtttataaaaaatggcctggagtgacacattttattatacctaatattcactgcatcagtatcacatctagctcccttacttgtccacagataatgtaaacaaaggagggaaaaacttattaaattctccttcgctgctggcttgtgctggtttagtgcctgtgtccctggcagtgtccagtgtgttcacttccagttgaagtatccatgtgtttctgggcagcttttctgctcagtgtgatcctgagatggcttccccgccgccacccagagtgtggtccttggccgcctcctgctcctgctctgcaagcctgaaactggcttgtctggagccaggagttagtcctggggtgtgtgtgtgcctgcgcacccatgcgcatgcaagtgtgtttgccagctcaggagctgtctcctctctacctggctagtaagaggtgggacagtaatggtcctcctgctggccccagcaaggcccatgagtgactgccctgacgtattcactgtgcctctgggccacttcttcccctgtagatgtgggcttgttgccttcagccggcttccctgagggaggagaacactggattattggaaatgttttaatcactcttgccattacctacatctattagcatagatgatgaaaagctgttactggtgattatagatgagtatttccaggacaacgttctaaaagtacaattatttcttattggggagattacaggtagtttggcaaagcattgaagtacaaaggtacattttcaattaaaaagcacacttctacaaaagatttggtttttaaattatggttacacatttcagtaactcatagctgctgtgcaaattggtagaccttataagaaggcacttgtttgtaagccagagaagaaactttaattgcatcctatcagattgttgaggtgggtgtgatagtcttcaggtgcagtgcgttcattcactaacgctcactgtcagtgcccatgtttgctagctgcctccatgtgactagtgagctgctggtgaaagtcgtgtgaaatcctgtacactgtgtatagaataatgtaattttatgttaattgttattactttaaaacatatctaccatctgattggctggtaccgagagctgtgggtaaaatttgaaaattgtatttagaataagaaattttacattttaaaccctattgtcctttatgcattttcaatgaaatggaatgaaggctaatatgcttgctttatttacttttgtaatcttggattttgtagcttttaaaactagaaaccattgttctaacaaagcaggcaactttattctataaacacaactttattaagcagaatacactgtagatgcttttccccaacgtatctggctggcagtctttgtcgttgttcattctggggataaaggggaactaggctagcagttctaatgtgacattctttaagcatatcttaaaatagtatttaagtaaatggtctaatttctacataattattgcactgaacttttttgtttattaaggtgtttaaataagctcagctaattcaagacactgtagccacttgtgcatcagtgtgcttgaatttagtagcttacagcattatttatgaaggaaaaaatacataaatatgaagtacctcatgttgaatgttattgtactgtatttttaatgtaacagtgcagatcttgttagacacatgaatgtgtataatcatgttaaatgcaaataaaactagttc

SEQ ID NO: 112406 - DNA, 4826 bp, Homo sapiens
  Payload ID: 2001
  Gene Symbol: BTBD3
  Gene Name: BTB (POZ) domain containing 3
  Uniprot ID: Q9Y2F9
  ENST ID: ENST00000399006
  CDS Start-End: 498-1883
agagcgtgccctgcgtgcgggtgcccgccgagcccgccgggcgctggatctccgagtgccccggccggggcctgaggagcgggcacagggcaaggcggcggacggctgcgtcgcccgaggcgaggaggagcgctggcggtgtcactgttttgcttggtccaatcatgattggtgacttcagctattggctcggagcactggctgtctgactccatctgcagggctgtaatacctactctcctccgatccattcaccacacaacttcagccggctgaacagactcacgcagctccagcccatcttgctgacctaattcagaaaagaagtgctacagctctgtgcctgtcatctttgcagtgtagcattttcagagacggtaaagaacaggtccaagaaaagctcaaagaaagcaaataccagcagcagcagtagcaacagcagcaagttgccaccagtttgttatgaaataattaccttgaagactaaaaagaagaagatggctgctgatatattcccccgtaaaaagccagccaactccagcagcaccagcgtccagcagtaccaccagcagaatctcagtaacaacaaccttatcccggccccaaactggcagggtctttatcccaccattagagagagaaatgcgatgatgttcaataatgatttgatggcagatgtacattttgtggttgggccaccaggtgggactcaacggttgccaggacacaaatatgttttagctgttgggagctctgtgttccatgcgatgttttacggagaacttgcagaggacaaagatgaaatccgtataccagatgtcgaacctgctgcttttctcgctatgctgaaatatatctattgtgatgaaattgacttggctgctgacacagtgctggccacactttatgctgccaaaaagtacattgtccctcaccttgccagagcctgtgttaatttcctggagaccagcctgagtgccaagaatgcctgtgtgctcctctcccagagctgcctgttcgaggagccagacctgacccagcgttgctgggaggtgattgatgcccaggctgagttagctctcaagtctgagggattctgcgatattgacttccagacactagaaagtattctccgtagggaaactctgaatgccaaagaaattgtggtttttgaggcagctctcaactgggctgaagtagaatgccaacgacaagatctggcgttgagcattgaaaataaacgcaaggttctaggaaaggcactttacttgatccgcatacccacaatggccctcgatgattttgcaaatggtgctgcacagtccggggtattaactctcaatgagaccaacgacatcttcctctggtatactgcagccaaaaagcctgagcttcagtttgtgagtaaagcccgtaagggccttgtcccccagcgctgtcaccgtttccagtcgtgtgcctatcgaagcaaccaatggcgctatcgtggtcgctgtgacagcatccagtttgcagttgataaaagagtgttcattgctggctttgggctgtatggctccagctgtggttctgcagaatacagtgccaagattgaacttaagcggcagggcgttgtcctggggcagaacttgagcaagtacttctcagatgggtccagcaatacctttcccgtatggtttgaatacccagtgcagatcgagccagacaccttctacacagccagtgtgatactggatggcaatgaactcagctactttggacaagaaggcatgacagaagttcagtgtggcaaagtgactgtccagtttcagtgctcctcagatagcaccaatggcactggggtacagggagggcagatccctgaacttatattctatgcttgaaaactcacttcctgaagcagcttgagctccaaagtgcacatctggttccaacttgcctgatgcttagctcatctgcaaatatgtgatcagtgccggtaatttgtaatgaatgaagcggtaggcaggttctaatttcttttaaccttttaattatgtacaggcaaaaatgcagcattccgcttttaactatctgcttaaaagagctaacgttcttattaaggctttgtggtttttagagttgcatctatgaacctggggagattatgtgctttcccaagcgttccaccaccctctcagttttgtccctctgaagataattttggatcaccttgaatttccttttggacgttatttgatgaacagaaataaagtgataacaagagttatttttaaacagaactcctcttaccccccaaaacagataaacctcagtgtacaattttgaaagaagttttgccttgtaatgagtaataatttagaaagtagacagtggttgtgtttggctctcgttttattccttttacatttgttgcttctgggatttaaaaaattactaaattcataagatagttaggtattaaacacttcagaatatcaatgtaaaattggaaaataaggaactgggggcatttgtttaggccatgacttctacaagcagatttcttttcttttagtttagaagacaaaaaatttcaatacagatacttcttttagaagtaaatttttagattttattgtcagtagaaaaaagttaaactcctactaatttaaactaagacagtttaaaaaggaagcctgaaaaagactcatactacaaataatttaattgatggcatataagaatatgcagtttgaaaaagccaaactcttctctccacttagcttttgatccccactgtttgcttatttgtataagtcatactgtgtagaatttctattttctttttccccattaaaagaggaccaaacaattctttatacaaatggagtagcaactagttttgtagcactacatttaatgtaatgagatacctttgttcatttttttaaatttgaaatatactttacctgatccactttgattgtatactatattctttgttaattttaattttgtcctgttcctagactgctagaatctggcccctggccatcttaaagtgccaacatatgcctgcagggtttataaaaaatggcctggagtgacacattttattatacctaatattcactgcatcagtatcacatctagctcccttacttgtccacagataatgtaaacaaaggagggaaaaacttattaaattctccttcgctgctggcttgtgctggtttagtgcctgtgtccctggcagtgtccagtgtgttcacttccagttgaagtatccatgtgtttctgggcagcttttctgctcagtgtgatcctgagatggcttccccgccgccacccagagtgtggtccttggccgcctcctgctcctgctctgcaagcctgaaactggcttgtctggagccaggagttagtcctggggtgtgtgtgtgcctgcgcacccatgcgcatgcaagtgtgtttgccagctcaggagctgtctcctctctacctggctagtaagaggtgggacagtaatggtcctcctgctggccccagcaaggcccatgagtgactgccctgacgtattcactgtgcctctgggccacttcttcccctgtagatgtgggcttgttgccttcagccggcttccctgagggaggagaacactggattattggaaatgttttaatcactcttgccattacctacatctattagcatagatgatgaaaagctgttactggtgattatagatgagtatttccaggacaacgttctaaaagtacaattatttcttattggggagattacaggtagtttggcaaagcattgaagtacaaaggtacattttcaattaaaaagcacacttctacaaaagatttggtttttaaattatggttacacatttcagtaactcatagctgctgtgcaaattggtagaccttataagaaggcacttgtttgtaagccagagaagaaactttaattgcatcctatcagattgttgaggtgggtgtgatagtcttcaggtgcagtgcgttcattcactaacgctcactgtcagtgcccatgtttgctagctgcctccatgtgactagtgagctgctggtgaaagtcgtgtgaaatcctgtacactgtgtatagaataatgtaattttatgttaattgttattactttaaaacatatctaccatctgattggctggtaccgagagctgtgggtaaaatttgaaaattgtatttagaataagaaattttacattttaaaccctattgtcctttatgcattttcaatgaaatggaatgaaggctaatatgcttgctttatttacttttgtaatcttggattttgtagcttttaaaactagaaaccattgttctaacaaagcaggcaactttattctataaacacaactttattaagcagaatacactgtagatgcttttccccaacgtatctggctggcagtctttgtcgttgttcattctggggataaaggggaactaggctagcagttctaatgtgacattctttaagcatatcttaaaatagtatttaagtaaatggtctaatttctacataattattgcactgaacttttttgtttattaaggtgtttaaataagctcagctaattcaagacactgtagccacttgtgcatcagtgtgcttgaatttagtagcttacagcattatttatgaaggaaaaaatacataaatatgaagtacctcatgttgaatgttattgtactgtatttttaatgtaacagtgcagatcttgttagacacatgaatgtgtataatcatgttaaatgcaaataaaactagttcatagatttgttttccttta

SEQ ID NO: 112407 - DNA, 5137 bp, Homo sapiens
  Payload ID: 2001
  Gene Symbol: BTBD3
  Gene Name: BTB (POZ) domain containing 3
  Uniprot ID: Q9Y2F9
  ENST ID: ENST00000405977
  CDS Start-End: 626-2194
tgcgtgcgggtgcccgccgagcccgccgggcgctggatctccgagtgccccggccggggcctgaggagcgggcacagggcaaggcggcggacggctgcgtcgcccgaggcgaggaggagcgctggcggtgtcactgttttgcttggtccaatcatgattggtgacttcagctattggctcggagcactggctgtctgactccatctgcagggctgtaatacctactctcctccgatccattcaccacacaacttcagccggctgaacagactcacgcagctccagcccatcttgctgacctaattcagaaaagaagtgctacagctctgtgcctgtcatctttgcagtgtagcattttcaggtgatctaggaaacagttatttttatgagcaaataagagaaacaggaatcatgatggggatatatttaacagacccagtactggataaaacttaaagccagtttctattcaacatagtgaaaaggtcaccttgcctggctgagaaaagcagcaaaatatcagctttgttggtttcagttaacctcttagcccgggctaatctcttttccttgatgttcaaaccaatttgggatatctaactctaaagagagacacactgtactcatggtagatgacaaggaaaagaacatgaaatgtctcaccttcttcttgatgcttccagagacggtaaagaacaggtccaagaaaagctcaaagaaagcaaataccagcagcagcagtagcaacagcagcaagttgccaccagtttgttatgaaataattaccttgaagactaaaaagaagaagatggctgctgatatattcccccgtaaaaagccagccaactccagcagcaccagcgtccagcagtaccaccagcagaatctcagtaacaacaaccttatcccggccccaaactggcagggtctttatcccaccattagagagagaaatgcgatgatgttcaataatgatttgatggcagatgtacattttgtggttgggccaccaggtgggactcaacggttgccaggacacaaatatgttttagctgttgggagctctgtgttccatgcgatgttttacggagaacttgcagaggacaaagatgaaatccgtataccagatgtcgaacctgctgcttttctcgctatgctgaaatatatctattgtgatgaaattgacttggctgctgacacagtgctggccacactttatgctgccaaaaagtacattgtccctcaccttgccagagcctgtgttaatttcctggagaccagcctgagtgccaagaatgcctgtgtgctcctctcccagagctgcctgttcgaggagccagacctgacccagcgttgctgggaggtgattgatgcccaggctgagttagctctcaagtctgagggattctgcgatattgacttccagacactagaaagtattctccgtagggaaactctgaatgccaaagaaattgtggtttttgaggcagctctcaactgggctgaagtagaatgccaacgacaagatctggcgttgagcattgaaaataaacgcaaggttctaggaaaggcactttacttgatccgcatacccacaatggccctcgatgattttgcaaatggtgctgcacagtccggggtattaactctcaatgagaccaacgacatcttcctctggtatactgcagccaaaaagcctgagcttcagtttgtgagtaaagcccgtaagggccttgtcccccagcgctgtcaccgtttccagtcgtgtgcctatcgaagcaaccaatggcgctatcgtggtcgctgtgacagcatccagtttgcagttgataaaagagtgttcattgctggctttgggctgtatggctccagctgtggttctgcagaatacagtgccaagattgaacttaagcggcagggcgttgtcctggggcagaacttgagcaagtacttctcagatgggtccagcaatacctttcccgtatggtttgaatacccagtgcagatcgagccagacaccttctacacagccagtgtgatactggatggcaatgaactcagctactttggacaagaaggcatgacagaagttcagtgtggcaaagtgactgtccagtttcagtgctcctcagatagcaccaatggcactggggtacagggagggcagatccctgaacttatattctatgcttgaaaactcacttcctgaagcagcttgagctccaaagtgcacatctggttccaacttgcctgatgcttagctcatctgcaaatatgtgatcagtgccggtaatttgtaatgaatgaagcggtaggcaggttctaatttcttttaaccttttaattatgtacaggcaaaaatgcagcattccgcttttaactatctgcttaaaagagctaacgttcttattaaggctttgtggtttttagagttgcatctatgaacctggggagattatgtgctttcccaagcgttccaccaccctctcagttttgtccctctgaagataattttggatcaccttgaatttccttttggacgttatttgatgaacagaaataaagtgataacaagagttatttttaaacagaactcctcttaccccccaaaacagataaacctcagtgtacaattttgaaagaagttttgccttgtaatgagtaataatttagaaagtagacagtggttgtgtttggctctcgttttattccttttacatttgttgcttctgggatttaaaaaattactaaattcataagatagttaggtattaaacacttcagaatatcaatgtaaaattggaaaataaggaactgggggcatttgtttaggccatgacttctacaagcagatttcttttcttttagtttagaagacaaaaaatttcaatacagatacttcttttagaagtaaatttttagattttattgtcagtagaaaaaagttaaactcctactaatttaaactaagacagtttaaaaaggaagcctgaaaaagactcatactacaaataatttaattgatggcatataagaatatgcagtttgaaaaagccaaactcttctctccacttagcttttgatccccactgtttgcttatttgtataagtcatactgtgtagaatttctattttctttttccccattaaaagaggaccaaacaattctttatacaaatggagtagcaactagttttgtagcactacatttaatgtaatgagatacctttgttcatttttttaaatttgaaatatactttacctgatccactttgattgtatactatattctttgttaattttaattttgtcctgttcctagactgctagaatctggcccctggccatcttaaagtgccaacatatgcctgcagggtttataaaaaatggcctggagtgacacattttattatacctaatattcactgcatcagtatcacatctagctcccttacttgtccacagataatgtaaacaaaggagggaaaaacttattaaattctccttcgctgctggcttgtgctggtttagtgcctgtgtccctggcagtgtccagtgtgttcacttccagttgaagtatccatgtgtttctgggcagcttttctgctcagtgtgatcctgagatggcttccccgccgccacccagagtgtggtccttggccgcctcctgctcctgctctgcaagcctgaaactggcttgtctggagccaggagttagtcctggggtgtgtgtgtgcctgcgcacccatgcgcatgcaagtgtgtttgccagctcaggagctgtctcctctctacctggctagtaagaggtgggacagtaatggtcctcctgctggccccagcaaggcccatgagtgactgccctgacgtattcactgtgcctctgggccacttcttcccctgtagatgtgggcttgttgccttcagccggcttccctgagggaggagaacactggattattggaaatgttttaatcactcttgccattacctacatctattagcatagatgatgaaaagctgttactggtgattatagatgagtatttccaggacaacgttctaaaagtacaattatttcttattggggagattacaggtagtttggcaaagcattgaagtacaaaggtacattttcaattaaaaagcacacttctacaaaagatttggtttttaaattatggttacacatttcagtaactcatagctgctgtgcaaattggtagaccttataagaaggcacttgtttgtaagccagagaagaaactttaattgcatcctatcagattgttgaggtgggtgtgatagtcttcaggtgcagtgcgttcattcactaacgctcactgtcagtgcccatgtttgctagctgcctccatgtgactagtgagctgctggtgaaagtcgtgtgaaatcctgtacactgtgtatagaataatgtaattttatgttaattgttattactttaaaacatatctaccatctgattggctggtaccgagagctgtgggtaaaatttgaaaattgtatttagaataagaaattttacattttaaaccctattgtcctttatgcattttcaatgaaatggaatgaaggctaatatgcttgctttatttacttttgtaatcttggattttgtagcttttaaaactagaaaccattgttctaacaaagcaggcaactttattctataaacacaactttattaagcagaatacactgtagatgcttttccccaacgtatctggctggcagtctttgtcgttgttcattctggggataaaggggaactaggctagcagttctaatgtgacattctttaagcatatcttaaaatagtatttaagtaaatggtctaatttctacataattattgcactgaacttttttgtttattaaggtgtttaaataagctcagctaattcaagacactgtagccacttgtgcatcagtgtgcttgaatttagtagcttacagcattatttatgaaggaaaaaatacataaatatgaagtacctcatgttgaatgttattgtactgtatttttaatgtaacagtgcagatcttgttagacacatgaatgtgtataatcatgttaaatgcaaataaaactagttcatagatttgttttccttta

SEQ ID NO: 112408 - DNA, 583 bp, Homo sapiens
  Payload ID: 2001
  Gene Symbol: BTBD3
  Gene Name: BTB (POZ) domain containing 3
  ENST ID: ENST00000422390
  CDS Start-End: 177-583
cttttcggaagaatttttgaatcaccctttttcatttcttggcctcagcagagacggtaaagaacaggtccaagaaaagctcaaagaaagcaaataccagcagcagcagtagcaacagcagcaagttgccaccagtttgttatgaaataattaccttgaagactaaaaagaagaagatggctgctgatatattcccccgtaaaaagccagccaactccagcagcaccagcgtccagcagtaccaccagcagaatctcagtaacaacaaccttatcccggccccaaactggcagggtctttatcccaccattagagagagaaatgcgatgatgttcaataatgatttgatggcagatgtacattttgtggttgggccaccaggtgggactcaacggttgccaggacacaaatatgttttagctgttgggagctctgtgttccatgcgatgttttacggagaacttgcagaggacaaagatgaaatccgtataccagatgtcgaacctgctgcttttctcgctatgctgaaatatatctattgtgatgaaattgacttggctgctgacacagtgctggccacact

SEQ ID NO: 112409 - DNA, 485 bp, Homo sapiens
  Payload ID: 2001
  Gene Symbol: BTBD3
  Gene Name: BTB (POZ) domain containing 3
  ENST ID: ENST00000450368
  CDS Start-End: 481-485
ggaggtggcggaggtccaggcagggggcgcggtcgggaagcctcggcgcctagcaggtggcgggggccgcgcccctctcccggggaggcgcgcggtgggaagcggagcaaacttcccctaagtgtcactgttttgcttggtccaatcatgattggtgacttcagctattggctcggagcactggctgtctgactccatctgcagggctgtaatacctactctcctccgatccattcaccacacaacttcagccggctgaacagactcacgcagctccagcccatcttgctgacctaattcagaaaagaagtgctacagctctgtgcctgtcatctttgcagtgtagcattttcagagacggtaaagaacaggtccaagaaaagctcaaagaaagcaaataccagcagcagcagtagcaacagcagcaagttgccaccagtttgttatgaaataattaccttgaagactaaaaagaagaagatggc

SEQ ID NO: 112410 - DNA, 541 bp, Homo sapiens
  Payload ID: 2001
  Gene Symbol: BTBD3
  Gene Name: BTB (POZ) domain containing 3
  ENST ID: ENST00000430557
  CDS Start-End: 243-541
tttatttgtccttagctttattaaaagtttgtataacttttattttaaactttagttacttcccttatgtttgcaatgattatgaacagtttagttagaacctttatttgttgttttgccttgaagttactggactgttgcttagcttgcaagtcttttgtgggttttgtatgttggggaaggggatgttaaaaatgcaggctgctgtgaattaatgagttgcctctgtttatagaaatgcgatgatgttcaataatgatttgatggcagatgtacattttgtggttgggccaccaggtgggactcaacggttgccaggacacaaatatgttttagctgttgggagctctgtgttccatgcgatgttttacggagaacttgcagaggacaaagatgaaatccgtataccagatgtcgaacctgctgcttttctcgctatgctgaaatatatctattgtgatgaaattgacttggctgctgacacagtgctggccacactttatgctgccaaaaagtacattgtccctcaccttgccagagc

SEQ ID NO: 112411 - DNA, 493 bp, Homo sapiens
  Payload ID: 2001
  Gene Symbol: BTBD3
  Gene Name: BTB (POZ) domain containing 3
  ENST ID: ENST00000455911
  CDS Start-End: 75-493
aagtgacagggttgtctatgggccatagaaaatgggaaccttttatttgtccttagctttattaaaaaaatgcgatgatgttcaataatgatttgatggcagatgtacattttgtggttgggccaccaggtgggactcaacggttgccaggacacaaatatgttttagctgttgggagctctgtgttccatgcgatgttttacggagaacttgcagaggacaaagatgaaatccgtataccagatgtcgaacctgctgcttttctcgctatgctgaaatatatctattgtgatgaaattgacttggctgctgacacagtgctggccacactttatgctgccaaaaagtacattgtccctcaccttgccagagcctgtgttaatttcctggagaccagcctgagtgccaagaatgcctgtgtgctcctctcccagagctgcctgttcgaggagccagacctgacccagcgttgctgggaggtgattgatgccca

SEQ ID NO: 112412 - DNA, 849 bp, Homo sapiens
  Payload ID: 2001
  Gene Symbol: BTBD3
  Gene Name: BTB (POZ) domain containing 3
  ENST ID: ENST00000449299
  CDS Start-End: 211-363
gagtgccccggccggggcctgaggagcgggcacagggcaaggcggcggacggctgcgtcgcccgaggcgaggaggagcgctggcgagacggtaaagaacaggtccaagaaaagctcaaagaaagcaaataccagcagcagcagtagcaacagcagcaagttgccaccagtttgttatgaaataattaccttgaagactaaaaagaagaagatggctgctgatatattcccccgtaaaaagccagccaactccagcagcaccagcgtccagcagtaccaccagcagaatctcagtaacaacaaccttatcccggccccaaactggcagggtctttatcccaccattagagagagtatgttttagctgttgggagctctgtgttccatgcgatgttttacggagaacttgcagaggacaaagatgaaatccgtataccagatgtcgaacctgctgcttttctcgctatgctgaaatatatctattgtgatgaaattgacttggctgctgacacagtgctggccacactttatgctgccaaaaagtacattgtccctcaccttgccagagcctgtgttaatttcctggagaccagcctgagtgccaagaatgcctgtgtgctcctctcccagagctgcctgttcgaggagccagacctgacccagcgttgctgggaggtgattgatgcccaggctgagttagctctcaagtctgagggattctgcgatattgacttccagacactagaaagtattctccgtagggaaactctgaatgccaaagaaattgtggtttttgaggcagctctcaactgggctgaagtagaatgccaacgacaagatctggcgttga

SEQ ID NO: 112413 - DNA, 4582 bp, Homo sapiens
  Payload ID: 2001
  Gene Symbol: BTBD3
  Gene Name: BTB (POZ) domain containing 3
  Uniprot ID: Q9Y2F9
  ENST ID: ENST00000618296
  CDS Start-End: 273-1658
gtaatacctactctcctccgatccattcaccacacaacttcagccggctgaacagactcacgcagctccagcccatcttgctgacctaattcagaaaagaagtgctacagctctgtgcctgtcatctttgcagtgtagcattttcagagacggtaaagaacaggtccaagaaaagctcaaagaaagcaaataccagcagcagcagtagcaacagcagcaagttgccaccagtttgttatgaaataattaccttgaagactaaaaagaagaagatggctgctgatatattcccccgtaaaaagccagccaactccagcagcaccagcgtccagcagtaccaccagcagaatctcagtaacaacaaccttatcccggccccaaactggcagggtctttatcccaccattagagagagaaatgcgatgatgttcaataatgatttgatggcagatgtacattttgtggttgggccaccaggtgggactcaacggttgccaggacacaaatatgttttagctgttgggagctctgtgttccatgcgatgttttacggagaacttgcagaggacaaagatgaaatccgtataccagatgtcgaacctgctgcttttctcgctatgctgaaatatatctattgtgatgaaattgacttggctgctgacacagtgctggccacactttatgctgccaaaaagtacattgtccctcaccttgccagagcctgtgttaatttcctggagaccagcctgagtgccaagaatgcctgtgtgctcctctcccagagctgcctgttcgaggagccagacctgacccagcgttgctgggaggtgattgatgcccaggctgagttagctctcaagtctgagggattctgcgatattgacttccagacactagaaagtattctccgtagggaaactctgaatgccaaagaaattgtggtttttgaggcagctctcaactgggctgaagtagaatgccaacgacaagatctggcgttgagcattgaaaataaacgcaaggttctaggaaaggcactttacttgatccgcatacccacaatggccctcgatgattttgcaaatggtgctgcacagtccggggtattaactctcaatgagaccaacgacatcttcctctggtatactgcagccaaaaagcctgagcttcagtttgtgagtaaagcccgtaagggccttgtcccccagcgctgtcaccgtttccagtcgtgtgcctatcgaagcaaccaatggcgctatcgtggtcgctgtgacagcatccagtttgcagttgataaaagagtgttcattgctggctttgggctgtatggctccagctgtggttctgcagaatacagtgccaagattgaacttaagcggcagggcgttgtcctggggcagaacttgagcaagtacttctcagatgggtccagcaatacctttcccgtatggtttgaatacccagtgcagatcgagccagacaccttctacacagccagtgtgatactggatggcaatgaactcagctactttggacaagaaggcatgacagaagttcagtgtggcaaagtgactgtccagtttcagtgctcctcagatagcaccaatggcactggggtacagggagggcagatccctgaacttatattctatgcttgaaaactcacttcctgaagcagcttgagctccaaagtgcacatctggttccaacttgcctgatgcttagctcatctgcaaatatgtgatcagtgccggtaatttgtaatgaatgaagcggtaggcaggttctaatttcttttaaccttttaattatgtacaggcaaaaatgcagcattccgcttttaactatctgcttaaaagagctaacgttcttattaaggctttgtggtttttagagttgcatctatgaacctggggagattatgtgctttcccaagcgttccaccaccctctcagttttgtccctctgaagataattttggatcaccttgaatttccttttggacgttatttgatgaacagaaataaagtgataacaagagttatttttaaacagaactcctcttaccccccaaaacagataaacctcagtgtacaattttgaaagaagttttgccttgtaatgagtaataatttagaaagtagacagtggttgtgtttggctctcgttttattccttttacatttgttgcttctgggatttaaaaaattactaaattcataagatagttaggtattaaacacttcagaatatcaatgtaaaattggaaaataaggaactgggggcatttgtttaggccatgacttctacaagcagatttcttttcttttagtttagaagacaaaaaatttcaatacagatacttcttttagaagtaaatttttagattttattgtcagtagaaaaaagttaaactcctactaatttaaactaagacagtttaaaaaggaagcctgaaaaagactcatactacaaataatttaattgatggcatataagaatatgcagtttgaaaaagccaaactcttctctccacttagcttttgatccccactgtttgcttatttgtataagtcatactgtgtagaatttctattttctttttccccattaaaagaggaccaaacaattctttatacaaatggagtagcaactagttttgtagcactacatttaatgtaatgagatacctttgttcatttttttaaatttgaaatatactttacctgatccactttgattgtatactatattctttgttaattttaattttgtcctgttcctagactgctagaatctggcccctggccatcttaaagtgccaacatatgcctgcagggtttataaaaaatggcctggagtgacacattttattatacctaatattcactgcatcagtatcacatctagctcccttacttgtccacagataatgtaaacaaaggagggaaaaacttattaaattctccttcgctgctggcttgtgctggtttagtgcctgtgtccctggcagtgtccagtgtgttcacttccagttgaagtatccatgtgtttctgggcagcttttctgctcagtgtgatcctgagatggcttccccgccgccacccagagtgtggtccttggccgcctcctgctcctgctctgcaagcctgaaactggcttgtctggagccaggagttagtcctggggtgtgtgtgtgcctgcgcacccatgcgcatgcaagtgtgtttgccagctcaggagctgtctcctctctacctggctagtaagaggtgggacagtaatggtcctcctgctggccccagcaaggcccatgagtgactgccctgacgtattcactgtgcctctgggccacttcttcccctgtagatgtgggcttgttgccttcagccggcttccctgagggaggagaacactggattattggaaatgttttaatcactcttgccattacctacatctattagcatagatgatgaaaagctgttactggtgattatagatgagtatttccaggacaacgttctaaaagtacaattatttcttattggggagattacaggtagtttggcaaagcattgaagtacaaaggtacattttcaattaaaaagcacacttctacaaaagatttggtttttaaattatggttacacatttcagtaactcatagctgctgtgcaaattggtagaccttataagaaggcacttgtttgtaagccagagaagaaactttaattgcatcctatcagattgttgaggtgggtgtgatagtcttcaggtgcagtgcgttcattcactaacgctcactgtcagtgcccatgtttgctagctgcctccatgtgactagtgagctgctggtgaaagtcgtgtgaaatcctgtacactgtgtatagaataatgtaattttatgttaattgttattactttaaaacatatctaccatctgattggctggtaccgagagctgtgggtaaaatttgaaaattgtatttagaataagaaattttacattttaaaccctattgtcctttatgcattttcaatgaaatggaatgaaggctaatatgcttgctttatttacttttgtaatcttggattttgtagcttttaaaactagaaaccattgttctaacaaagcaggcaactttattctataaacacaactttattaagcagaatacactgtagatgcttttccccaacgtatctggctggcagtctttgtcgttgttcattctggggataaaggggaactaggctagcagttctaatgtgacattctttaagcatatcttaaaatagtatttaagtaaatggtctaatttctacataattattgcactgaacttttttgtttattaaggtgtttaaataagctcagctaattcaagacactgtagccacttgtgcatcagtgtgcttgaatttagtagcttacagcattatttatgaaggaaaaaatacataaatatgaagtacctcatgttgaatgttattgtactgtatttttaatgtaacagtgcagatcttgttagacacatgaatgtgtataatcatgttaaatgcaaataaaactagttc

SEQ ID NO: 112414 - DNA, 4486 bp, Homo sapiens
  Payload ID: 2001
  Gene Symbol: BTBD3
  Gene Name: BTB (POZ) domain containing 3
  Uniprot ID: Q9Y2F9
  ENST ID: ENST00000618918
  CDS Start-End: 177-1562
cttttcggaagaatttttgaatcaccctttttcatttcttggcctcagcagagacggtaaagaacaggtccaagaaaagctcaaagaaagcaaataccagcagcagcagtagcaacagcagcaagttgccaccagtttgttatgaaataattaccttgaagactaaaaagaagaagatggctgctgatatattcccccgtaaaaagccagccaactccagcagcaccagcgtccagcagtaccaccagcagaatctcagtaacaacaaccttatcccggccccaaactggcagggtctttatcccaccattagagagagaaatgcgatgatgttcaataatgatttgatggcagatgtacattttgtggttgggccaccaggtgggactcaacggttgccaggacacaaatatgttttagctgttgggagctctgtgttccatgcgatgttttacggagaacttgcagaggacaaagatgaaatccgtataccagatgtcgaacctgctgcttttctcgctatgctgaaatatatctattgtgatgaaattgacttggctgctgacacagtgctggccacactttatgctgccaaaaagtacattgtccctcaccttgccagagcctgtgttaatttcctggagaccagcctgagtgccaagaatgcctgtgtgctcctctcccagagctgcctgttcgaggagccagacctgacccagcgttgctgggaggtgattgatgcccaggctgagttagctctcaagtctgagggattctgcgatattgacttccagacactagaaagtattctccgtagggaaactctgaatgccaaagaaattgtggtttttgaggcagctctcaactgggctgaagtagaatgccaacgacaagatctggcgttgagcattgaaaataaacgcaaggttctaggaaaggcactttacttgatccgcatacccacaatggccctcgatgattttgcaaatggtgctgcacagtccggggtattaactctcaatgagaccaacgacatcttcctctggtatactgcagccaaaaagcctgagcttcagtttgtgagtaaagcccgtaagggccttgtcccccagcgctgtcaccgtttccagtcgtgtgcctatcgaagcaaccaatggcgctatcgtggtcgctgtgacagcatccagtttgcagttgataaaagagtgttcattgctggctttgggctgtatggctccagctgtggttctgcagaatacagtgccaagattgaacttaagcggcagggcgttgtcctggggcagaacttgagcaagtacttctcagatgggtccagcaatacctttcccgtatggtttgaatacccagtgcagatcgagccagacaccttctacacagccagtgtgatactggatggcaatgaactcagctactttggacaagaaggcatgacagaagttcagtgtggcaaagtgactgtccagtttcagtgctcctcagatagcaccaatggcactggggtacagggagggcagatccctgaacttatattctatgcttgaaaactcacttcctgaagcagcttgagctccaaagtgcacatctggttccaacttgcctgatgcttagctcatctgcaaatatgtgatcagtgccggtaatttgtaatgaatgaagcggtaggcaggttctaatttcttttaaccttttaattatgtacaggcaaaaatgcagcattccgcttttaactatctgcttaaaagagctaacgttcttattaaggctttgtggtttttagagttgcatctatgaacctggggagattatgtgctttcccaagcgttccaccaccctctcagttttgtccctctgaagataattttggatcaccttgaatttccttttggacgttatttgatgaacagaaataaagtgataacaagagttatttttaaacagaactcctcttaccccccaaaacagataaacctcagtgtacaattttgaaagaagttttgccttgtaatgagtaataatttagaaagtagacagtggttgtgtttggctctcgttttattccttttacatttgttgcttctgggatttaaaaaattactaaattcataagatagttaggtattaaacacttcagaatatcaatgtaaaattggaaaataaggaactgggggcatttgtttaggccatgacttctacaagcagatttcttttcttttagtttagaagacaaaaaatttcaatacagatacttcttttagaagtaaatttttagattttattgtcagtagaaaaaagttaaactcctactaatttaaactaagacagtttaaaaaggaagcctgaaaaagactcatactacaaataatttaattgatggcatataagaatatgcagtttgaaaaagccaaactcttctctccacttagcttttgatccccactgtttgcttatttgtataagtcatactgtgtagaatttctattttctttttccccattaaaagaggaccaaacaattctttatacaaatggagtagcaactagttttgtagcactacatttaatgtaatgagatacctttgttcatttttttaaatttgaaatatactttacctgatccactttgattgtatactatattctttgttaattttaattttgtcctgttcctagactgctagaatctggcccctggccatcttaaagtgccaacatatgcctgcagggtttataaaaaatggcctggagtgacacattttattatacctaatattcactgcatcagtatcacatctagctcccttacttgtccacagataatgtaaacaaaggagggaaaaacttattaaattctccttcgctgctggcttgtgctggtttagtgcctgtgtccctggcagtgtccagtgtgttcacttccagttgaagtatccatgtgtttctgggcagcttttctgctcagtgtgatcctgagatggcttccccgccgccacccagagtgtggtccttggccgcctcctgctcctgctctgcaagcctgaaactggcttgtctggagccaggagttagtcctggggtgtgtgtgtgcctgcgcacccatgcgcatgcaagtgtgtttgccagctcaggagctgtctcctctctacctggctagtaagaggtgggacagtaatggtcctcctgctggccccagcaaggcccatgagtgactgccctgacgtattcactgtgcctctgggccacttcttcccctgtagatgtgggcttgttgccttcagccggcttccctgagggaggagaacactggattattggaaatgttttaatcactcttgccattacctacatctattagcatagatgatgaaaagctgttactggtgattatagatgagtatttccaggacaacgttctaaaagtacaattatttcttattggggagattacaggtagtttggcaaagcattgaagtacaaaggtacattttcaattaaaaagcacacttctacaaaagatttggtttttaaattatggttacacatttcagtaactcatagctgctgtgcaaattggtagaccttataagaaggcacttgtttgtaagccagagaagaaactttaattgcatcctatcagattgttgaggtgggtgtgatagtcttcaggtgcagtgcgttcattcactaacgctcactgtcagtgcccatgtttgctagctgcctccatgtgactagtgagctgctggtgaaagtcgtgtgaaatcctgtacactgtgtatagaataatgtaattttatgttaattgttattactttaaaacatatctaccatctgattggctggtaccgagagctgtgggtaaaatttgaaaattgtatttagaataagaaattttacattttaaaccctattgtcctttatgcattttcaatgaaatggaatgaaggctaatatgcttgctttatttacttttgtaatcttggattttgtagcttttaaaactagaaaccattgttctaacaaagcaggcaactttattctataaacacaactttattaagcagaatacactgtagatgcttttccccaacgtatctggctggcagtctttgtcgttgttcattctggggataaaggggaactaggctagcagttctaatgtgacattctttaagcatatcttaaaatagtatttaagtaaatggtctaatttctacataattattgcactgaacttttttgtttattaaggtgtttaaataagctcagctaattcaagacactgtagccacttgtgcatcagtgtgcttgaatttagtagcttacagcattatttatgaaggaaaaaatacataaatatgaagtacctcatgttgaatgttattgtactgtatttttaatgtaacagtgcagatcttgttagacacatgaatgtgtataatcatgttaaatgcaaataaaactagttc

SEQ ID NO: 112415 - DNA, 1948 bp, Homo sapiens
  Payload ID: 2002
  Gene Symbol: BTBD6
  Gene Name: BTB (POZ) domain containing 6
  Uniprot ID: Q96KE9
  ENST ID: ENST00000327471
  CDS Start-End: 304-1536
agcgggtggcagccccgcgggtcacagcgccgccgccgcccatgctgctgcccctagcctgcctgcacggccgcgtcgctcagtgcctgacctccttgcttttgcttgcagagccgctcccgaggccccggcgcggcgcgagggcgcggggcgcggcgtccacaggcgccgaggctgcccccgccgccccgcccgcgaagatggcggcggaactctacgctcccgcccacactcggcaacaaccaccaggagagccccggctggcggtgctgccgccccacgctgcgcgagaggaacgcgctcatgttcaacaacgagctcatggccgacgtgcacttcgtcgtggggcccccgggggcgaccaggacggtgcccgcccacaagtacgtcttggctgtcggcagctccgtcttctatgccatgttctacggagacctggcggaagtcaaatctgaaattcacattccagacgtggagcccgcagcctttctgatcctcttaaagtacatgtacagtgatgagatcgatctggaagccgacacggtgctggccactctgtacgctgctaagaagtacatcgtcccagcattggcaaaagcctgtgtcaactttctggagacaagtttggaagccaagaacgcctgcgtcctgctgtcccagagccggctgtttgaggagcccgagctgacgcagcgctgctgggaggtcattgacgcacaggccgagatggccctacggtccgaaggcttctgtgagatagaccggcagacgctggagatcattgtcactcgggaggccctcaacaccaaagaggcggtggtcttcgaggccgtcctgaactgggccgaggcggagtgcaagaggcaggggctgccaatcaccccacgaaacaagaggcatgttctggggcgagccctctatctggtccgaattccaaccatgaccctagaggagtttgccaacggcgctgcccagtcagacatcctgactctggaggagacccacagcatcttcctgtggtacacggccaccaacaagccccgcctggactttcccctgaccaagaggaagggcctcgccccgcagaggtgccaccgattccagtcttctgcctaccgcagcaaccagtggcggtaccgcgggcgctgcgacagcatccagtttgcagtggacagaagggtatttattgcagggctgggcctgtatggctccagctctgggaaggctgagtacagcgtgaagattgagctcaagcggctcggggtggttctggctcagaacttgaccaagttcatgtcagacggatccagtaacaccttcccggtctggtttgaacacccggtccaggttgaacaagacaccttctacacggccagtgccgtcctggacggcagcgaactcagctactttgggcaggaggggatgacggaagtgcagtgtggaaaggtggccttccagttccagtgctcctcggacagcaccaacgggactggggtccagggtgggcagatccctgagctcattttctatgcctgaggtgcccggggaggctgcagcaggtcagcgagtgagtggaggggaagtcaagatgctaactgcttcttgacaccatgaaaggctgctcttaactttgtctctctttgacatgtagtcagctgaagcttgactgtgtagagacattttccacacagccagaacccagggattggagtcttaggcatctctggtacagtggggtgcacgtctcaggtggaggaagatttacggctcaagacaggccccagatcccctcccagtggcacccatgccacctgctttgaggggttggatcttcctgctaccctcttggattctaagtggttccaagcttaacttgagaccttcccttcaaatctaaaattggcaaaaagtcacttaaaatagtggacttctgtaataaaggttgcct

SEQ ID NO: 112416 - DNA, 2176 bp, Homo sapiens
  Payload ID: 2002
  Gene Symbol: BTBD6
  Gene Name: BTB (POZ) domain containing 6
  Uniprot ID: Q96KE9
  ENST ID: ENST00000392554
  CDS Start-End: 298-1755
cgggcgggcgggcgggacggcgccccccgcggccgggcctggccgggctgcgctaggctgggctcgggcagggtcgcaggggcgggggtggcaggggagcgggtggcagccccgcgggtcacagcgccgccgccgcccatgctgctgcccctagcctgcctgcacggccgcgtcgctcagtgcctgacctccttgcttttgcttgcagagccgctcccgaggccccggcgcggcgcgagggcgcggggcgcggcgtccacaggcgccgaggctgcccccgccgccccgcccgcgaagatggcggcggaactctacgctcccgccagcgccgcggccgcggacctagccaacagcaacgccggcgccgccgtgggcaggaaggccgggccgcgcagcccgcccagcgcccccgcgccagcgccgccgccgcccgcgcccgcgccgcccacactcggcaacaaccaccaggagagccccggctggcggtgctgccgccccacgctgcgcgagaggaacgcgctcatgttcaacaacgagctcatggccgacgtgcacttcgtcgtggggcccccgggggcgaccaggacggtgcccgcccacaagtacgtcttggctgtcggcagctccgtcttctatgccatgttctacggagacctggcggaagtcaaatctgaaattcacattccagacgtggagcccgcagcctttctgatcctcttaaagtacatgtacagtgatgagatcgatctggaagccgacacggtgctggccactctgtacgctgctaagaagtacatcgtcccagcattggcaaaagcctgtgtcaactttctggagacaagtttggaagccaagaacgcctgcgtcctgctgtcccagagccggctgtttgaggagcccgagctgacgcagcgctgctgggaggtcattgacgcacaggccgagatggccctacggtccgaaggcttctgtgagatagaccggcagacgctggagatcattgtcactcgggaggccctcaacaccaaagaggcggtggtcttcgaggccgtcctgaactgggccgaggcggagtgcaagaggcaggggctgccaatcaccccacgaaacaagaggcatgttctggggcgagccctctatctggtccgaattccaaccatgaccctagaggagtttgccaacggcgctgcccagtcagacatcctgactctggaggagacccacagcatcttcctgtggtacacggccaccaacaagccccgcctggactttcccctgaccaagaggaagggcctcgccccgcagaggtgccaccgattccagtcttctgcctaccgcagcaaccagtggcggtaccgcgggcgctgcgacagcatccagtttgcagtggacagaagggtatttattgcagggctgggcctgtatggctccagctctgggaaggctgagtacagcgtgaagattgagctcaagcggctcggggtggttctggctcagaacttgaccaagttcatgtcagacggatccagtaacaccttcccggtctggtttgaacacccggtccaggttgaacaagacaccttctacacggccagtgccgtcctggacggcagcgaactcagctactttgggcaggaggggatgacggaagtgcagtgtggaaaggtggccttccagttccagtgctcctcggacagcaccaacgggactggggtccagggtgggcagatccctgagctcattttctatgcctgaggtgcccggggaggctgcagcaggtcagcgagtgagtggaggggaagtcaagatgctaactgcttcttgacaccatgaaaggctgctcttaactttgtctctctttgacatgtagtcagctgaagcttgactgtgtagagacattttccacacagccagaacccagggattggagtcttaggcatctctggtacagtggggtgcacgtctcaggtggaggaagatttacggctcaagacaggccccagatcccctcccagtggcacccatgccacctgctttgaggggttggatcttcctgctaccctcttggattctaagtggttccaagcttaacttgagaccttcccttcaaatctaaaattggcaaaaagtcacttaaaatagtggacttctgtaataaaggttgcctaaaataaca

SEQ ID NO: 112417 - DNA, 2195 bp, Homo sapiens
  Payload ID: 2002
  Gene Symbol: BTBD6
  Gene Name: BTB (POZ) domain containing 6
  Uniprot ID: Q96KE9
  ENST ID: ENST00000463376
  CDS Start-End: 542-1774
ctaggctgggctcgggcagggtcgcaggggcgggggtggcaggggagcgggtggcagccccgcgggtcacagcgccgccgccgcccatgctgctgcccctagcctgcctgcacggccgcgtcgctcagtgcctgacctccttgcttttgcttgcagagccgctcccgaggccccggcgcggcgcgagggcgcggggcgcggcgtccacaggcgccgaggctgcccccgccgccccgcccgcgaagatggcggcggaactctacgctcccgccagcgccgcggccgcggacctagccaacagcaacgccggcgccgccgtgggcaggaaggccgggccgcgcagcccgcccagcgcccccgcgccagcgccgccgccgcccgcgcccgcgccgcccacactcggcaacaaccaccaggagagccccggctggcggtgctgccgccccacgctgcgcgagaggtgagcccgtgccccgcggcccccgcgcccgcgcgcgcccacgcccccagcccgtgcctctacctttgcaggaacgcgctcatgttcaacaacgagctcatggccgacgtgcacttcgtcgtggggcccccgggggcgaccaggacggtgcccgcccacaagtacgtcttggctgtcggcagctccgtcttctatgccatgttctacggagacctggcggaagtcaaatctgaaattcacattccagacgtggagcccgcagcctttctgatcctcttaaagtacatgtacagtgatgagatcgatctggaagccgacacggtgctggccactctgtacgctgctaagaagtacatcgtcccagcattggcaaaagcctgtgtcaactttctggagacaagtttggaagccaagaacgcctgcgtcctgctgtcccagagccggctgtttgaggagcccgagctgacgcagcgctgctgggaggtcattgacgcacaggccgagatggccctacggtccgaaggcttctgtgagatagaccggcagacgctggagatcattgtcactcgggaggccctcaacaccaaagaggcggtggtcttcgaggccgtcctgaactgggccgaggcggagtgcaagaggcaggggctgccaatcaccccacgaaacaagaggcatgttctggggcgagccctctatctggtccgaattccaaccatgaccctagaggagtttgccaacggcgctgcccagtcagacatcctgactctggaggagacccacagcatcttcctgtggtacacggccaccaacaagccccgcctggactttcccctgaccaagaggaagggcctcgccccgcagaggtgccaccgattccagtcttctgcctaccgcagcaaccagtggcggtaccgcgggcgctgcgacagcatccagtttgcagtggacagaagggtatttattgcagggctgggcctgtatggctccagctctgggaaggctgagtacagcgtgaagattgagctcaagcggctcggggtggttctggctcagaacttgaccaagttcatgtcagacggatccagtaacaccttcccggtctggtttgaacacccggtccaggttgaacaagacaccttctacacggccagtgccgtcctggacggcagcgaactcagctactttgggcaggaggggatgacggaagtgcagtgtggaaaggtggccttccagttccagtgctcctcggacagcaccaacgggactggggtccagggtgggcagatccctgagctcattttctatgcctgaggtgcccggggaggctgcagcaggtcagcgagtgagtggaggggaagtcaagatgctaactgcttcttgacaccatgaaaggctgctcttaactttgtctctctttgacatgtagtcagctgaagcttgactgtgtagagacattttccacacagccagaacccagggattggagtcttaggcatctctggtacagtggggtgcacgtctcaggtggaggaagatttacggctcaagacaggccccagatcccctcccagtggcacccatgccacctgctttgaggggttggatcttcctgctaccctcttggattctaagtggttccaagcttaacttgagaccttcccttcaaatctaaaattggcaaaaagtcacttaaaatagtggacttctgtaataaaggttgcctaaaataaca

SEQ ID NO: 112418 - DNA, 1973 bp, Homo sapiens
  Payload ID: 2002
  Gene Symbol: BTBD6
  Gene Name: BTB (POZ) domain containing 6
  Uniprot ID: Q96KE9
  ENST ID: ENST00000536364
  CDS Start-End: 104-1561
cggggccgcggcagagccgctcccgaggccccggcgcggcgcgagggcgcggggcgcggcgtccacaggcgccgaggctgcccccgccgccccgcccgcgaagatggcggcggaactctacgctcccgccagcgccgcggccgcggacctagccaacagcaacgccggcgccgccgtgggcaggaaggccgggccgcgcagcccgcccagcgcccccgcgccagcgccgccgccgcccgcgcccgcgccgcccacactcggcaacaaccaccaggagagccccggctggcggtgctgccgccccacgctgcgcgagaggaacgcgctcatgttcaacaacgagctcatggccgacgtgcacttcgtcgtggggcccccgggggcgaccaggacggtgcccgcccacaagtacgtcttggctgtcggcagctccgtcttctatgccatgttctacggagacctggcggaagtcaaatctgaaattcacattccagacgtggagcccgcagcctttctgatcctcttaaagtacatgtacagtgatgagatcgatctggaagccgacacggtgctggccactctgtacgctgctaagaagtacatcgtcccagcattggcaaaagcctgtgtcaactttctggagacaagtttggaagccaagaacgcctgcgtcctgctgtcccagagccggctgtttgaggagcccgagctgacgcagcgctgctgggaggtcattgacgcacaggccgagatggccctacggtccgaaggcttctgtgagatagaccggcagacgctggagatcattgtcactcgggaggccctcaacaccaaagaggcggtggtcttcgaggccgtcctgaactgggccgaggcggagtgcaagaggcaggggctgccaatcaccccacgaaacaagaggcatgttctggggcgagccctctatctggtccgaattccaaccatgaccctagaggagtttgccaacggcgctgcccagtcagacatcctgactctggaggagacccacagcatcttcctgtggtacacggccaccaacaagccccgcctggactttcccctgaccaagaggaagggcctcgccccgcagaggtgccaccgattccagtcttctgcctaccgcagcaaccagtggcggtaccgcgggcgctgcgacagcatccagtttgcagtggacagaagggtatttattgcagggctgggcctgtatggctccagctctgggaaggctgagtacagcgtgaagattgagctcaagcggctcggggtggttctggctcagaacttgaccaagttcatgtcagacggatccagtaacaccttcccggtctggtttgaacacccggtccaggttgaacaagacaccttctacacggccagtgccgtcctggacggcagcgaactcagctactttgggcaggaggggatgacggaagtgcagtgtggaaaggtggccttccagttccagtgctcctcggacagcaccaacgggactggggtccagggtgggcagatccctgagctcattttctatgcctgaggtgcccggggaggctgcagcaggtcagcgagtgagtggaggggaagtcaagatgctaactgcttcttgacaccatgaaaggctgctcttaactttgtctctctttgacatgtagtcagctgaagcttgactgtgtagagacattttccacacagccagaacccagggattggagtcttaggcatctctggtacagtggggtgcacgtctcaggtggaggaagatttacggctcaagacaggccccagatcccctcccagtggcacccatgccacctgctttgaggggttggatcttcctgctaccctcttggattctaagtggttccaagcttaacttgagaccttcccttcaaatctaaaattggcaaaaagtcacttaaaatagtggacttctgtaataaaggttgcct

SEQ ID NO: 112419 - DNA, 1335 bp, Homo sapiens
  Payload ID: 2002
  Gene Symbol: BTBD6
  Gene Name: BTB (POZ) domain containing 6
  ENST ID: ENST00000537513
  CDS Start-End: 113-1335
gtgacgcaccggcgccgcggcggagccgctcccgaggccccggcgcggcgcgagggcgcggggcgcggcgtccacaggcgccgaggctgcccccgccgccccgcccgcgaagatggcggcggaactctacgctcccgccagcgccgcggccgcggacctagccaacagcaacgccggcgccgccgtgggcaggaaggccgggccgcgcagcccgcccagcgcccccgcgccagcgccgccgccgcccgcgcccgcgccgcccacactcggcaacaaccaccaggagagccccggctggcggtgctgccgccccacgctgcgcgagaggaacgcgctcatgttcaacaacgagctcatggccgacgtgcacttcgtcgtggggcccccgggggcgaccaggacggtgcccgcccacaagtacgtcttggctgtcggcagctccgtcttctatgccatgttctacggagacctggcggaagtcaaatctgaaattcacattccagacgtggagcccgcagcctttctgatcctcttaaagtacatgtacagtgatgagatcgatctggaagccgacacggtgctggccactctgtacgctgctaagaagtacatcgtcccagcattggcaaaagcctgtgtcaactttctggagacaagtttggaagccaagaacgcctgcgtcctgctgtcccagagccggctgtttgaggagcccgagctgacgcagcgctgctgggaggtcattgacgcacaggccgagatggccctacggtccgaaggcttctgtgagatagaccggcagacgctggagatcattgtcactcgggaggccctcaacaccaaagaggcggtggtcttcgaggccgtcctgaactgggccgaggcggagtgcaagaggcaggggctgccaatcaccccacgaaacaagaggcatgttctggggcgagccctctatctggtccgaattccaaccatgaccctagaggagtttgccaacggcgctgcccagtcagacatcctgactctggaggagacccacagcatcttcctgtggtacacggccaccaacaagccccgcctggactttcccctgaccaagaggaagggcctcgccccgcagaggtgccaccgattccagtcttctgcctaccgcagcaaccagtggcggtaccgcgggcgctgcgacagcatccagtttgcagtggacagaagggtatttattgcagggctgggcctgtatggctccagctctgggaaggctgagtacagcgtgaagattgagctcaagcggctcggggtggttctggctcagaacttgaccaagttcatgtcaga

SEQ ID NO: 112420 - DNA, 2621 bp, Homo sapiens
  Payload ID: 2003
  Gene Symbol: BTBD7
  Gene Name: BTB (POZ) domain containing 7
  Uniprot ID: Q9P203
  ENST ID: ENST00000298896
  CDS Start-End: 380-1612
ggccggctccgcagcgccgcgcaggcgccccagggccacgccgaaccgagcccctcctgctccgtctaggagtcaaaatggcggcgaggggaacctggagcagtcccggagcctgagccactgacaggagaggagagggcggcggcggcggcggtgggaggaggatggccgggggtgctggcgccggtgcggacggcggtgctggtggcggcggcggcggaggcgacggcagcggtcccagcggcagcagcagcggcgggaggagcctccgggaaatggatgaaaagaggctgctggatccagggttgaaggttcataaaggcctctgggattatactctgaagaacccgcagacggaatgcctgagtgactgaagaaaatgggtgctaatgcatctaattatcctcattcatgttccccgagggtagggggaaattcacaggcccaacagacttttatagggacctcatcctattctcagcaaggctatggttgcgaatcaaagttgtatagccttgaccatggccatgagaaaccacaagacaaaaaaaagagaacctctggtcttgccaccctcaaaaagaagtttattaagcgtcggaaatctaataggtctgccgatcatgccaagcagatgcgagaactcctctctgggtgggatgttagagatgtcaatgcattagtggaggaatatgagggaacatcagcattaaaggagctttctctacaagccagtttggctagaccagaagcccggacattgcagaaagatatggctgatctttatgagtacaagtattgtactgatgtagacttaatatttcaagaaacttgttttcctgttcatcgtgccattttggcagcaaggtgtccattttttaaaacactgctttcttcctcaccagagtatggggcagagataataatggacatcaatacagctggtattgatatgcccatgttttctgctttgttacactacctttatacaggagagtttggaatggaggactcaaggtttcaaaatgtcgatatccttgttcagcttagtgaagaatttggaacaccaaattcccttgatgtagatatgcgtggactctttgattacatgtgttattatgatgtcgtccttagtttttcttcagactctgaactggttgaagcttttggtggaaatcagaactgtttagatgaagagctcaaagcccacaaggctgttatttctgcacggtccccattttttcgaaatttattacaaaggaggatacgaactggtgaagaaatcacagaccgaactttgaggactcccacaagaattatattagatgagtccattataccaaaaaaatatgcaacagtgatattacactgtatgtataccgacgtggtggacctctctgttttgcactgtagcccctctgtggggagtctcagtgaagttcaggctctcgtcgcagggaagccaaacatgaccagggcagaagaagccatggaactttaccacatagcactgttcttggaatttaacatgcttgcacaagaggagactacagtcatcaggcctgcctgtgcagcagagctttcaaacagctgcttactgcctcaatcttaaatatgaaaacccatccaaggataactggacatttgaggaaagcttccaaattgagacagagatcagagcaaaaagaacaaagtcctggaggaagcagacaatgaagggagcagaagaaaacttcagtagaatcaaaatatccttatataaaagaactttttatggaatcagtgagacataagcaggatgctattaaagtaaaaacaggagcttttagaaataagatagcagaaatgaaagatataatggaagcattgaaaggtacagttgaggaaatctagaaagtaaataatataataaagagatgagtggagacaaataaaactagagtattcatccagggtctaacatctaacaaatagtggctttagaaatatataccagagaaaagtgaagagaagacagtatctaaggagtaatataagaaatatttccaaaactaaaggaatttctatataaaaagtttctttttcagaacactggggaaaaagagacaattttaaaatgttgcagggaggagaaaaattaggttccatgcaaagaaataggaatcagatggtattgagattttcagtagcaacaactgaataccacaatacagtgaagtagtgtcttccaaaagctgatggaaaattattttaaacacaaaatcctatatttagccaaacagtcaatcaagtgtaaggctaaataaaggcatttttcagtcatacctcgaaaaactgcctgtgtagggatatttcccctgcttccccactcaggcagctgctgggaatgtattccaccaaatgacgaagcaaaccaagaacaaagaagtgaaggatctagaaaatgggctccaacacgggaaggaagcaaagggagatcccacgcatcagccacacagtaggtcttgtgggcattcagtctagcccagaccgggagggtgaaagtctccaaggaaagaggtgtctcggaagaaatcaattactttcaatgtttgaacattaaatagcaaatgacaaagcaa

SEQ ID NO: 112421 - DNA, 8430 bp, Homo sapiens
  Payload ID: 2003
  Gene Symbol: BTBD7
  Gene Name: BTB (POZ) domain containing 7
  Uniprot ID: Q9P203
  ENST ID: ENST00000334746
  CDS Start-End: 309-3707
gtcaaaatggcggcgaggggaacctggagcagtcccggagcctgagccactgacaggagaggagagggcggcggcggcggcggtgggaggaggatggccgggggtgctggcgccggtgcggacggcggtgctggtggcggcggcggcggaggcgacggcagcggtcccagcggcagcagcagcggcgggaggagcctccgggaaatggatgaaaagaggctgctggatccagggttgaaggttcataaaggcctctgggattatactctgaagaacccgcagacggaatgcctgagtgactgaagaaaatgggtgctaatgcatctaattatcctcattcatgttccccgagggtagggggaaattcacaggcccaacagacttttatagggacctcatcctattctcagcaaggctatggttgcgaatcaaagttgtatagccttgaccatggccatgagaaaccacaagacaaaaaaaagagaacctctggtcttgccaccctcaaaaagaagtttattaagcgtcggaaatctaataggtctgccgatcatgccaagcagatgcgagaactcctctctgggtgggatgttagagatgtcaatgcattagtggaggaatatgagggaacatcagcattaaaggagctttctctacaagccagtttggctagaccagaagcccggacattgcagaaagatatggctgatctttatgagtacaagtattgtactgatgtagacttaatatttcaagaaacttgttttcctgttcatcgtgccattttggcagcaaggtgtccattttttaaaacactgctttcttcctcaccagagtatggggcagagataataatggacatcaatacagctggtattgatatgcccatgttttctgctttgttacactacctttatacaggagagtttggaatggaggactcaaggtttcaaaatgtcgatatccttgttcagcttagtgaagaatttggaacaccaaattcccttgatgtagatatgcgtggactctttgattacatgtgttattatgatgtcgtccttagtttttcttcagactctgaactggttgaagcttttggtggaaatcagaactgtttagatgaagagctcaaagcccacaaggctgttatttctgcacggtccccattttttcgaaatttattacaaaggaggatacgaactggtgaagaaatcacagaccgaactttgaggactcccacaagaattatattagatgagtccattataccaaaaaaatatgcaacagtgatattacactgtatgtataccgacgtggtggacctctctgttttgcactgtagcccctctgtggggagtctcagtgaagttcaggctctcgtcgcagggaagccaaacatgaccagggcagaagaagccatggaactttaccacatagcactgttcttggaatttaacatgcttgcacaaggctgtgaggatatcattgctgagagcatctcattagataccttaattgccatcctcaagtggagttctcatccatatggctctaaatgggtgcaccgacaagctttacatttcctctgtgaggaattttcccaggtcatgacttcggatgttttttatgaactcagcaaagaccatctgcttactgctatccagtctgactacctacaggcaagtgaacaagatatccttaaatatctgattaaatggggagagcatcagttgatgaaaagaatagcagatagagagccaaacttactgagtggcactgcccatagtgtgaacaaaagaggtgtaaaaagacgggacctggacatggaagagctcagagagatcctttcttctctcttaccttttgtgcgaattgaacacatcttacctataaacagtgaagtcttaagtgatgcaatgaaaagaggcttgattagtactcctccatcagatatgcttcctacaacagaaggtgggaagtcaaatgcctggttacggcaaaaaaatgctggcatctatgttcgtcctcgactcttctctccctatgtggaagaagcaaagtcagtgctagatgagatgatggtggaacaaacggatcttgtgcgcttgcgaatggttagaatgtccaatgtgccagacacgctctacatggtcaataatgccgtgccacagtgttgtcacatgatcagccaccagcagatcagcagcaaccagtcaagccctccttcagttgtagccaacgaaattccagttcctcgtctcctcattatgaaagacatggtcagacgactgcaggaactgcggcacacggagcaggtgcagagggcctatgccctgaactgcggggaaggcgccactgtcagctatgaaattcagattcgagtgctaagagagtttggtcttgcagatgctgctgcagagctgttgcagaatcctcacaaattctttcctgatgaacgttttggggatgaaagtccactcttgacaatgagacagcctgggagatgtcgcgtaaacagtacacctcctgcagaaaccatgtttacagatctggactcttttgtggccttccatccacccttgccccctccaccacctccctaccaccccccagctaccccaatccataaccaactcaaagcaggctggaagcaaagacctcccagtcagcacccttcacgttcattttcttatccctgtaatcattcgctgttccactccagaacagctcctaaagctggccctcccccagtctacttgccgagtgtgaaagctgcaccgcctgattgtaccagcactgcaggactgggcagacagacggtggctgctgctgccgccaccaccacctcaacagcaacagcagcagcagcagcagcatctgagaagcaagtgcgaacacaacctgtgctgaatgatctgatgccagacatcgcggtgggtgtgtccacactgtcactcaaggacaggaggcttccagagcttgctgtagacacagaattaagccagtcagtttctgaagcaggaccagggcctccccagcatctgtcgtgtattccacagagacatacacacacttctcggaaaaaacacacactagagcaaaaaacagacaccagagaaaatccacaggaatatccggatttctatgacttctcaaatgctgcttgcagaccttctactcctgctctcagcagacgcaccccttccccttcgcaaggtggatattttggtcccgatctgtacagccacaataaggcatcaccaagtggcttaaagtcagcctacctacctggtcagacgtctcctaaaaaacaggaagaagctaggagagaatatccactttcccctgacgggcatctacacagacaaaagaatgagccgatacacctggatgtcgttgagcaacctccccagcggtcagactttcctttggcagccccagaaaatgctagtaccggtccagcccatgtcaggggacgaactgcagtagaaactgacttgacttttgggctgactcctaacagaccttcactttctgcatgtagctctgaagctcccgaagagagatccggtagaagactggcagacagtgagtccctgggccatggagctcagagaaatacagatttggaaagggaagattcaataagcagaggaaggaggtcaccaagcaagccggacttcctctacaaaaagtctgccctctgagagcaacctccaagtcgtctgtgcctgagatgtgaaacatcccattttatgatgtaacccaacaacttacagaccagttcatcaatgccagctgataactcggtttcacatgattttgttctagtttttgtgtatatatgtgtttattagacatggcatgctaagaaggttttgttttttttttttaatgttgcatctgtctaatttgtctttgaacaattatgtcgggaggcatttttaagaacaagcaggctggcactttttatttctctttacaaatgatggaatttttttgcacttgtacatttattttctctgtattgattttatatcagtatgttaaactttattgccacatttaaaggactgtattttcatacttttttgcattttacctttcatctaccaatccatgtgcattggattgcacactaagatgtattttcttacgaaatagttctgtgtttattttttaattatagaaattccaaagaacagcacatcagaatgctcctctcttttcagtaattgttttagttcagagatcttcccgctcagcctccataaatctaatgtcattttttttttaataagtcctaggagctgggcttcattcctccagcgggagtccagtcagggtcctgaagtttgctggttcaggaaagaacaggaaagagaaaagccttctgtgcccaggctaaagctgttacatttccacagtgtggatgcagtcagaatccctgcacattctggtcataaggattagagtcaccagatgaggctctaaacagatcgcatcccttggaattagaaagcagtggagaccgggcgcagtgactcacacctgtgatcggcacttcggaaggccgaggcgggcagatcactgaagctcaggagttcaagaccagcctgggcaacatggcgaaactccatttctataaaaaatacaaaaaaaaaaaaatctagccaggcgtggtggtgcgtgcctgtagtcccagctacttggggggctgaggtggcaggatcgcttgagcctgggaggttgagactgcagtgagccaagattgcaccactgtgctcccacctgggcaacagtgagaccctgtctcaaaaaaaaaaaaaaaggcagtggaaatagagaagtaacttaaaggtcacactgacagaatttctggttctgagcgtcaactctccagctgtgatggcggaactgactgcttgctgcctttaattgtcttgctctctatgggaaaaaaacaaaagggcttcagtctcatggatgttatttggtgtttgtaaagatacgttttcttttaaacgattttcaaaatatgtctaaattttggtgttgtgtaatgcataatgctttctcaccaacagaaaaaaggaaaaaaattgttttcagttaaacactacatgtcctacttgaactccactgggacgctggtttggcatttactaaaccactgagcacatggggtctttcaggatcctctcccttggaagggcaatgtgtgagctaaggactgttttttttcttactctccaatgtaaatatatgagtatttgagtttttaaatcacttcaacattatttgagcatttactttgtatttttacaaacacataaacacacagccgtagcacttagaagaaaagaggctttctaagcattccttcctctgcaggatatttgggatcctcttttctatgtatgtatatatataaaaaactatgaatcactcacactcactcgaaaactatgcagggctagggagcgtttatgagctaccgggtaaatgaattacatgcactttgaagtaaataggttttctattgggtgtcaacaacgctgatttctcccaaaactatagtttctcttacggtcttttcctcctttaccctgtggatatacactcaggaataatctgacattttagaaaagccgaacagtagatagtctccaagatgggaaacatgtcgtgtgtctgcacgccccggcaaactgccgccactcgttctgctgcctgactggttagctgctgtgcgggtgcgctcggtgacactggtggtggtgcacgctcccgagctcccagagttaacactaatctgcaggtcggctgtgcatcgcattcgaggctccttttttaaagagaaaagcataggcctctgttctcatttgtaagaagtttgactcataatagaagacggtgtcttttgaagcccagtctctgtctgtcttcagaaacaaaagtgaatgccgtcatgttccttgatgtgtgtttctgccacatatgtatgttgacatgttcatgtactgcgccggtactgcaagtaagactcaacagacctaatttggatggggagaaaaactctcatccctgacccttccccccccgcaaatgttagaccagagctgttgatcccacacattcatttttctgaaaattcatgaactattctctcatatccctgaaatataaaagtaagtggccactattcctaagattatttagtttataaagtttgcttttaatcatacaatagcttacctggctaaaactttgcgtataaagggaaaacttgctttaatctgtgggattgcggaccgatgcgacttgcagaaggtaaacaggcgtgggttttgtgtgcgttaggttaggtgttagtggacttttaatgtatcttgtgaagtatggttactagggtaggttcaagagctacatgcctctggcttttgaacccatctattaaatcttttttaatgctgtactaagataaatgtgaagtctgagtaaggttgctctcagaaaaaaaaaaaaagcatatatatatataaaataaaatttaggccatgggaactggcattttacttggtataggaatttaatgagaaccaaatcacaaaaataccagatctccttttgagatcgtggacaatcaggcctttggacaatcaccgcttccagtgcccgctgtgcgttgaggttagagacctaccgtttacacgctagagccgagaggacgttcaagtttcttaaagatgctgttggtcttttttcttatgttattgttttagttttgtgattttgatgaataattgaagttcagagtcacccgtggctcctaaggaaaaaacagcatcatgaaaggcaaaaagtatttgaaacgtaattgtttcaattttccacgcccgttctcacatgccccctttagctttatttctgggaacatgtcactagacctcagctagcctgacaccgcaataacccgttaggctttgaggcttttcagtgaattcttgacatttaaatcttcttatagaattctttatgaagccttaactaattcttgtttttgcttcctcagaaactttttattgcatctgccatccttcattggatttttgttttggtttgttgttgccattctagcaatgagcttagtccttgtacatctgcattaaggtgccgatgcagaaggcaaattggaaacacgcgccagcggcagtggggctcaaagccgacctccatgcatcattctctagagttgaaaggattgacatttctcagtaactacccggcaaaatatatattttcataatgttgaatttgccttttaggaaaacaatgtttcatgaaacacttgtaagatacttattttgaaattaattataaggcattcatatttttaggactgaattcaaagggaaatgcttctttgactttttttcattgttcggttgactttcagctttctggagtgacaaagcagcagtgatgggtgctattcctggttctgtggtggtttactttgtctactaagtgatttactttcaaacctcattacagataatcttactaaaagacttaacatgcacactgctaaaaggtgttttactgttttccattaacgctgttgtatgaacaatatttggtgacatgttgtctttttgtcctgtagattgtcatatctgttatgtagttatccttttggcaagtcctttgatttttttttcctctagaaaatcctcagactgtcaatcttccatattttgaatattataatgctgtggccatttctatagaaagattacttgcaagtgtgtgtcttgaaaataacctcttgtatttgtgtgtttatgtgagttctgtctaagagatcagataagctctggaagcttcatcatctgtacctacatgtaactgtatctgggttacatgggcaggcggtaccaagtcctgctcttcgatggggtggctgagagataaaggttcctgaactctccttgctgtgtatgcaccacatctgtacttcagagaggtggaaaatcatctacaacactgcgtttcttgtggttgtgctgttactggtataaagtcaagtgccttcaatgctaaaggctcagaaatttttcttaaactgatttcatgtcctatgcaagtgttttctacaacctgcataaccagtactttgtaaaacttgtttacgcttcaattgtacatagtgatttttaaagaaatatatagtatttttatttaggtacctccaaacttgaattcgtctgtgtgaagcattgtaaaacgatacatttctcttttgagtaccattacagttgtacagaggttttcactgcttctatttttctactgttactgataagcatgtaacactgactttatcctacatatagttggcatttcaaataaatggcttgtatagaa

SEQ ID NO: 112422 - DNA, 6822 bp, Homo sapiens
  Payload ID: 2003
  Gene Symbol: BTBD7
  Gene Name: BTB (POZ) domain containing 7
  ENST ID: ENST00000355125
  CDS Start-End: 1-79
gaccagggcagaagaagccatggaactttaccacatagcactgttcttggaatttaacatgcttgcacaaggcaagtgaacaagatatccttaaatatctgattaaatggggagagcatcagttgatgaaaagaatagcagatagagagccaaacttactgagtggcactgcccatagtgtgaacaaaagaggtgtaaaaagacgggacctggacatggaagagctcagagagatcctttcttctctcttaccttttgtgcgaattgaacacatcttacctataaacagtgaagtcttaagtgatgcaatgaaaagaggcttgattagtactcctccatcagatatgcttcctacaacagaaggtgggaagtcaaatgcctggttacggcaaaaaaatgctggcatctatgttcgtcctcgactcttctctccctatgtggaagaagcaaagtcagtgctagatgagatgatggtggaacaaacggatcttgtgcgcttgcgaatggttagaatgtccaatgtgccagacacgctctacatggtcaataatgccgtgccacagtgttgtcacatgatcagccaccagcagatcagcagcaaccagtcaagccctccttcagttgtagccaacgaaattccagttcctcgtctcctcattatgaaagacatggtcagacgactgcaggaactgcggcacacggagcaggtgcagagggcctatgccctgaactgcggggaaggcgccactgtcagctatgaaattcagattcgagtgctaagagagtttggtcttgcagatgctgctgcagagctgttgcagaatcctcacaaattctttcctgatgaacgttttggggatgaaagtccactcttgacaatgagacagcctgggagatgtcgcgtaaacagtacacctcctgcagaaaccatgtttacagatctggactcttttgtggccttccatccacccttgccccctccaccacctccctaccaccccccagctaccccaatccataaccaactcaaagcaggctggaagcaaagacctcccagtcagcacccttcacgttcattttcttatccctgtaatcattcgctgttccactccagaacagctcctaaagctggccctcccccagtctacttgccgagtgtgaaagctgcaccgcctgattgtaccagcactgcaggactgggcagacagacggtggctgctgctgccgccaccaccacctcaacagcaacagcagcagcagcagcagcatctgagaagcaagtgcgaacacaacctgtgctgaatgatctgatgccagacatcgcggtgggtgtgtccacactgtcactcaaggacaggaggcttccagagcttgctgtagacacagaattaagccagtcagtttctgaagcaggaccagggcctccccagcatctgtcgtgtattccacagagacatacacacacttctcggaaaaaacacacactagagcaaaaaacagacaccagagaaaatccacaggaatatccggatttctatgacttctcaaatgctgcttgcagaccttctactcctgctctcagcagacgcaccccttccccttcgcaaggtggatattttggtcccgatctgtacagccacaataaggcatcaccaagtggcttaaagtcagcctacctacctggtcagacgtctcctaaaaaacaggaagaagctaggagagaatatccactttcccctgacgggcatctacacagacaaaagaatgagccgatacacctggatgtcgttgagcaacctccccagcggtcagactttcctttggcagccccagaaaatgctagtaccggtccagcccatgtcaggggacgaactgcagtagaaactgacttgacttttgggctgactcctaacagaccttcactttctgcatgtagctctgaagctcccgaagagagatccggtagaagactggcagacagtgagtccctgggccatggagctcagagaaatacagatttggaaagggaagattcaataagcagaggaaggaggtcaccaagcaagccggacttcctctacaaaaagtctgccctctgagagcaacctccaagtcgtctgtgcctgagatgtgaaacatcccattttatgatgtaacccaacaacttacagaccagttcatcaatgccagctgataactcggtttcacatgattttgttctagtttttgtgtatatatgtgtttattagacatggcatgctaagaaggttttgttttttttttttaatgttgcatctgtctaatttgtctttgaacaattatgtcgggaggcatttttaagaacaagcaggctggcactttttatttctctttacaaatgatggaatttttttgcacttgtacatttattttctctgtattgattttatatcagtatgttaaactttattgccacatttaaaggactgtattttcatacttttttgcattttacctttcatctaccaatccatgtgcattggattgcacactaagatgtattttcttacgaaatagttctgtgtttattttttaattatagaaattccaaagaacagcacatcagaatgctcctctcttttcagtaattgttttagttcagagatcttcccgctcagcctccataaatctaatgtcattttttttttaataagtcctaggagctgggcttcattcctccagcgggagtccagtcagggtcctgaagtttgctggttcaggaaagaacaggaaagagaaaagccttctgtgcccaggctaaagctgttacatttccacagtgtggatgcagtcagaatccctgcacattctggtcataaggattagagtcaccagatgaggctctaaacagatcgcatcccttggaattagaaagcagtggagaccgggcgcagtgactcacacctgtgatcggcacttcggaaggccgaggcgggcagatcactgaagctcaggagttcaagaccagcctgggcaacatggcgaaactccatttctataaaaaatacaaaaaaaaaaaaatctagccaggcgtggtggtgcgtgcctgtagtcccagctacttggggggctgaggtggcaggatcgcttgagcctgggaggttgagactgcagtgagccaagattgcaccactgtgctcccacctgggcaacagtgagaccctgtctcaaaaaaaaaaaaaaaggcagtggaaatagagaagtaacttaaaggtcacactgacagaatttctggttctgagcgtcaactctccagctgtgatggcggaactgactgcttgctgcctttaattgtcttgctctctatgggaaaaaaacaaaagggcttcagtctcatggatgttatttggtgtttgtaaagatacgttttcttttaaacgattttcaaaatatgtctaaattttggtgttgtgtaatgcataatgctttctcaccaacagaaaaaaggaaaaaaattgttttcagttaaacactacatgtcctacttgaactccactgggacgctggtttggcatttactaaaccactgagcacatggggtctttcaggatcctctcccttggaagggcaatgtgtgagctaaggactgttttttttcttactctccaatgtaaatatatgagtatttgagtttttaaatcacttcaacattatttgagcatttactttgtatttttacaaacacataaacacacagccgtagcacttagaagaaaagaggctttctaagcattccttcctctgcaggatatttgggatcctcttttctatgtatgtatatatataaaaaactatgaatcactcacactcactcgaaaactatgcagggctagggagcgtttatgagctaccgggtaaatgaattacatgcactttgaagtaaataggttttctattgggtgtcaacaacgctgatttctcccaaaactatagtttctcttacggtcttttcctcctttaccctgtggatatacactcaggaataatctgacattttagaaaagccgaacagtagatagtctccaagatgggaaacatgtcgtgtgtctgcacgccccggcaaactgccgccactcgttctgctgcctgactggttagctgctgtgcgggtgcgctcggtgacactggtggtggtgcacgctcccgagctcccagagttaacactaatctgcaggtcggctgtgcatcgcattcgaggctccttttttaaagagaaaagcataggcctctgttctcatttgtaagaagtttgactcataatagaagacggtgtcttttgaagcccagtctctgtctgtcttcagaaacaaaagtgaatgccgtcatgttccttgatgtgtgtttctgccacatatgtatgttgacatgttcatgtactgcgccggtactgcaagtaagactcaacagacctaatttggatggggagaaaaactctcatccctgacccttccccccccgcaaatgttagaccagagctgttgatcccacacattcatttttctgaaaattcatgaactattctctcatatccctgaaatataaaagtaagtggccactattcctaagattatttagtttataaagtttgcttttaatcatacaatagcttacctggctaaaactttgcgtataaagggaaaacttgctttaatctgtgggattgcggaccgatgcgacttgcagaaggtaaacaggcgtgggttttgtgtgcgttaggttaggtgttagtggacttttaatgtatcttgtgaagtatggttactagggtaggttcaagagctacatgcctctggcttttgaacccatctattaaatcttttttaatgctgtactaagataaatgtgaagtctgagtaaggttgctctcagaaaaaaaaaaaaagcatatatatatataaaataaaatttaggccatgggaactggcattttacttggtataggaatttaatgagaaccaaatcacaaaaataccagatctccttttgagatcgtggacaatcaggcctttggacaatcaccgcttccagtgcccgctgtgcgttgaggttagagacctaccgtttacacgctagagccgagaggacgttcaagtttcttaaagatgctgttggtcttttttcttatgttattgttttagttttgtgattttgatgaataattgaagttcagagtcacccgtggctcctaaggaaaaaacagcatcatgaaaggcaaaaagtatttgaaacgtaattgtttcaattttccacgcccgttctcacatgccccctttagctttatttctgggaacatgtcactagacctcagctagcctgacaccgcaataacccgttaggctttgaggcttttcagtgaattcttgacatttaaatcttcttatagaattctttatgaagccttaactaattcttgtttttgcttcctcagaaactttttattgcatctgccatccttcattggatttttgttttggtttgttgttgccattctagcaatgagcttagtccttgtacatctgcattaaggtgccgatgcagaaggcaaattggaaacacgcgccagcggcagtggggctcaaagccgacctccatgcatcattctctagagttgaaaggattgacatttctcagtaactacccggcaaaatatatattttcataatgttgaatttgccttttaggaaaacaatgtttcatgaaacacttgtaagatacttattttgaaattaattataaggcattcatatttttaggactgaattcaaagggaaatgcttctttgactttttttcattgttcggttgactttcagctttctggagtgacaaagcagcagtgatgggtgctattcctggttctgtggtggtttactttgtctactaagtgatttactttcaaacctcattacagataatcttactaaaagacttaacatgcacactgctaaaaggtgttttactgttttccattaacgctgttgtatgaacaatatttggtgacatgttgtctttttgtcctgtagattgtcatatctgttatgtagttatccttttggcaagtcctttgatttttttttcctctagaaaatcctcagactgtcaatcttccatattttgaatattataatgctgtggccatttctatagaaagattacttgcaagtgtgtgtcttgaaaataacctcttgtatttgtgtgtttatgtgagttctgtctaagagatcagataagctctggaagcttcatcatctgtacctacatgtaactgtatctgggttacatgggcaggcggtaccaagtcctgctcttcgatggggtggctgagagataaaggttcctgaactctccttgctgtgtatgcaccacatctgtacttcagagaggtggaaaatcatctacaacactgcgtttcttgtggttgtgctgttactggtataaagtcaagtgccttcaatgctaaaggctcagaaatttttcttaaactgatttcatgtcctatgcaagtgttttctacaacctgcataaccagtactttgtaaaacttgtttacgcttcaattgtacatagtgatttttaaagaaatatatagtatttttatttaggtacctccaaacttgaattcgtctgtgtgaagcattgtaaaacgatacatttctcttttgagtaccattacagttgtacagaggttttcactgcttctatttttctactgttactgataagcatgtaacactgactttatcctacatatagttggcatttcaaataaatggcttgtatagaa

SEQ ID NO: 112423 - DNA, 316 bp, Homo sapiens
  Payload ID: 2003
  Gene Symbol: BTBD7
  Gene Name: BTB (POZ) domain containing 7
  ENST ID: ENST00000554968
  CDS Start-End: 150-316
aggcctgaggactgctactcccaggggaagttagattgtccggaaatggatgaaaagaggctgctggatccagggttgaaggttcataaaggcctctgggattatactctgaagaacccgcagacggaatgcctgagtgactgaagaaaatgggtgctaatgcatctaattatcctcattcatgttccccgagggtagggggaaattcacaggcccaacagacttttatagggacctcatcctattctcagcaaggctatggttgcgaatcaaagttgtatagccttgaccatggccatgagaaaccacaagacaa

SEQ ID NO: 112424 - DNA, 2479 bp, Homo sapiens
  Payload ID: 2003
  Gene Symbol: BTBD7
  Gene Name: BTB (POZ) domain containing 7
  ENST ID: ENST00000553975
  CDS Start-End: 1-2244
ttattacaaaggaggatacgaactggtgaagaaatcacagaccgaactttgaggactcccacaagaattatattagatgagtccattataccaaaaaaatatgcaacagtgatattacactgtatgtataccgacgtggtggacctctctgttttgcactgtagcccctctgtggggagtctcagtgaagttcaggctctcgtcgcagggaagccaaacatgaccagggcagaagaagccatggaactttaccacatagcactgttcttggaatttaacatgcttgcacaagagccaaacttactgagtggcactgcccatagtgtgaacaaaagaggtgtaaaaagacgggacctggacatggaagagctcagagagatcctttcttctctcttaccttttgtgcgaattgaacacatcttacctataaacagtgaagtcttaagtgatgcaatgaaaagaggcttgattagtactcctccatcagatatgcttcctacaacagaaggtgggaagtcaaatgcctggttacggcaaaaaaatgctggcatctatgttcgtcctcgactcttctctccctatgtggaagaagcaaagtcagtgctagatgagatgatggtggaacaaacggatcttgtgcgcttgcgaatggttagaatgtccaatgtgccagacacgctctacatggtcaataatgccgtgccacagtgttgtcacatgatcagccaccagcagatcagcagcaaccagtcaagccctccttcagttgtagccaacgaaattccagttcctcgtctcctcattatgaaagacatggtcagacgactgcaggaactgcggcacacggagcaggtgcagagggcctatgccctgaactgcggggaaggcgccactgtcagctatgaaattcagattcgagtgctaagagagtttggtcttgcagatgctgctgcagagctgttgcagaatcctcacaaattctttcctgatgaacgttttggggatgaaagtccactcttgacaatgagacagcctgggagatgtcgcgtaaacagtacacctcctgcagaaaccatgtttacagatctggactcttttgtggccttccatccacccttgccccctccaccacctccctaccaccccccagctaccccaatccataaccaactcaaagcaggctggaagcaaagacctcccagtcagcacccttcacgttcattttcttatccctgtaatcattcgctgttccactccagaacagctcctaaagctggccctcccccagtctacttgccgagtgtgaaagctgcaccgcctgattgtaccagcactgcaggactgggcagacagacggtggctgctgctgccgccaccaccacctcaacagcaacagcagcagcagcagcagcatctgagaagcaagtgcgaacacaacctgtgctgaatgatctgatgccagacatcgcggtgggtgtgtccacactgtcactcaaggacaggaggcttccagagcttgctgtagacacagaattaagccagtcagtttctgaagcaggaccagggcctccccagcatctgtcgtgtattccacagagacatacacacacttctcggaaaaaacacacactagagcaaaaaacagacaccagagaaaatccacaggaatatccggatttctatgacttctcaaatgctgcttgcagaccttctactcctgctctcagcagacgcaccccttccccttcgcaaggtggatattttggtcccgatctgtacagccacaataaggcatcaccaagtggcttaaagtcagcctacctacctggtcagacgtctcctaaaaaacaggaagaagctaggagagaatatccactttcccctgacgggcatctacacagacaaaagaatgagccgatacacctggatgtcgttgagcaacctccccagcggtcagactttcctttggcagccccagaaaatgctagtaccggtccagcccatgtcaggggacgaactgcagtagaaactgacttgacttttgggctgactcctaacagaccttcactttctgcatgtagctctgaagctcccgaagagagatccggtagaagactggcagacagtgagtccctgggccatggagctcagagaaatacagatttggaaagggaagattcaataagcagaggaaggaggtcaccaagcaagccggacttcctctacaaaaagtctgccctctgagagcaacctccaagtcgtctgtgcctgagatgtgaaacatcccattttatgatgtaacccaacaacttacagaccagttcatcaatgccagctgataactcggtttcacatgattttgttctagtttttgtgtatatatgtgtttattagacatggcatgctaagaaggttttgttttttttttttaatgttgcatctgtctaatttgtctttgaacaattatgtcgggaggcat

SEQ ID NO: 112425 - DNA, 2697 bp, Homo sapiens
  Payload ID: 2003
  Gene Symbol: BTBD7
  Gene Name: BTB (POZ) domain containing 7
  Uniprot ID: Q9P203
  ENST ID: ENST00000554565
  CDS Start-End: 112-2457
ctcctgctccgtctaggagtcaaaatggcggcgaggggaacctggagcagtcccggagcctgagccactgacaggagaggagagggcggcggcggcggcggtgggaggaggatggccgggggtgctggcgccggtgcggacggcggtgctggtggcggcggcggcggaggcgacggcagcggtcccagcggcagcagcagcggcgggaggagcctccggggctgtgaggatatcattgctgagagcatctcattagataccttaattgccatcctcaagtggagttctcatccatatggctctaaatgggtgcaccgacaagctttacatttcctctgtgaggaattttcccaggtcatgacttcggatgttttttatgaactcagcaaagaccatctgcttactgctatccagtctgactacctacaggcaagtgaacaagatatccttaaatatctgattaaatggggagagcatcagttgatgaaaagaatagcagatagagagccaaacttactgagtggcactgcccatagtgtgaacaaaagaggtgtaaaaagacgggacctggacatggaagagctcagagagatcctttcttctctcttaccttttgtgcgaattgaacacatcttacctataaacagtgaagtcttaagtgatgcaatgaaaagaggcttgattagtactcctccatcagatatgcttcctacaacagaaggtgggaagtcaaatgcctggttacggcaaaaaaatgctggcatctatgttcgtcctcgactcttctctccctatgtggaagaagcaaagtcagtgctagatgagatgatggtggaacaaacggatcttgtgcgcttgcgaatggttagaatgtccaatgtgccagacacgctctacatggtcaataatgccgtgccacagtgttgtcacatgatcagccaccagcagatcagcagcaaccagtcaagccctccttcagttgtagccaacgaaattccagttcctcgtctcctcattatgaaagacatggtcagacgactgcaggaactgcggcacacggagcaggtgcagagggcctatgccctgaactgcggggaaggcgccactgtcagctatgaaattcagattcgagtgctaagagagtttggtcttgcagatgctgctgcagagctgttgcagaatcctcacaaattctttcctgatgaacgttttggggatgaaagtccactcttgacaatgagacagcctgggagatgtcgcgtaaacagtacacctcctgcagaaaccatgtttacagatctggactcttttgtggccttccatccacccttgccccctccaccacctccctaccaccccccagctaccccaatccataaccaactcaaagcaggctggaagcaaagacctcccagtcagcacccttcacgttcattttcttatccctgtaatcattcgctgttccactccagaacagctcctaaagctggccctcccccagtctacttgccgagtgtgaaagctgcaccgcctgattgtaccagcactgcaggactgggcagacagacggtggctgctgctgccgccaccaccacctcaacagcaacagcagcagcagcagcagcatctgagaagcaagtgcgaacacaacctgtgctgaatgatctgatgccagacatcgcggtgggtgtgtccacactgtcactcaaggacaggaggcttccagagcttgctgtagacacagaattaagccagtcagtttctgaagcaggaccagggcctccccagcatctgtcgtgtattccacagagacatacacacacttctcggaaaaaacacacactagagcaaaaaacagacaccagagaaaatccacaggaatatccggatttctatgacttctcaaatgctgcttgcagaccttctactcctgctctcagcagacgcaccccttccccttcgcaaggtggatattttggtcccgatctgtacagccacaataaggcatcaccaagtggcttaaagtcagcctacctacctggtcagacgtctcctaaaaaacaggaagaagctaggagagaatatccactttcccctgacgggcatctacacagacaaaagaatgagccgatacacctggatgtcgttgagcaacctccccagcggtcagactttcctttggcagccccagaaaatgctagtaccggtccagcccatgtcaggggacgaactgcagtagaaactgacttgacttttgggctgactcctaacagaccttcactttctgcatgtagctctgaagctcccgaagagagatccggtagaagactggcagacagtgagtccctgggccatggagctcagagaaatacagatttggaaagggaagattcaataagcagaggaaggaggtcaccaagcaagccggacttcctctacaaaaagtctgccctctgagagcaacctccaagtcgtctgtgcctgagatgtgaaacatcccattttatgatgtaacccaacaacttacagaccagttcatcaatgccagctgataactcggtttcacatgattttgttctagtttttgtgtatatatgtgtttattagacatggcatgctaagaaggttttgttttttttttttaatgttgcatctgtctaatttgtctttgaacaattatgtcgggaggcattttta

SEQ ID NO: 112426 - DNA, 2328 bp, Homo sapiens
  Payload ID: 2003
  Gene Symbol: BTBD7
  Gene Name: BTB (POZ) domain containing 7
  ENST ID: ENST00000555525
  CDS Start-End: 108-1544
gaaatggatgaaaagaggctgctggatccagggttgaaggttcataaaggcctctgggattatactctgaagaacccgcagacggaatgcctgagtgactgaagaaaatgggtgctaatgcatctaattatcctcattcatgttccccgagggtagggggaaattcacaggcccaacagacttttatagggacctcatcctattctcagcaaggctatggttgcgaatcaaagttgtatagccttgaccatggccatgagaaaccacaagacaaaaaaaagagaacctctggtcttgccaccctcaaaaagaagtttattaagcgtcggaaatctaataggtctgccgatcatgccaagcagatgcgagaactcctctctgggtgggatgttagagatgtcaatgcattagtggaggaatatgagggaacatcagcattaaaggagctttctctacaagccagtttggctagaccagaagcccggacattgcagaaagatatggctgatctttatgagtacaagtattgtactgatgtagacttaatatttcaagaaacttgttttcctgttcatcgtgccattttggcagcaaggtgtccattttttaaaacactgctttcttcctcaccagagtatggggcagagataataatggacatcaatacagctggtattgatatgcccatgttttctgctttgttacactacctttatacaggagagtttggaatggaggactcaaggtttcaaaatgtcgatatccttgttcagcttagtgaagaatttggaacaccaaattcccttgatgtagatatgcgtggactctttgattacatgtgttattatgatgtcgtccttagtttttcttcagactctgaactggttgaagcttttggtggaaatcagaactgtttagatgaagagctcaaagcccacaaggctgttatttctgcacggtccccattttttcgaaatttattacaaaggaggatacgaactggtgaagaaatcacagaccgaactttgaggactcccacaagaattatattagatgagtccattataccaaaaaaatatgcaacagtgatattacactgtatgtataccgacgtggtggacctctctgttttgcactgtagcccctctgtggggagtctcagtgaagttcaggctctcgtcgcagggaagccaaacatgaccagggcagaagaagccatggaactttaccacatagcactgttcttggaatttaacatgcttgcacaagcttgccttccatttgttttacagaggagactacagtcatcaggcctgcctgtgcagcagagctttcaaacagctgcttactgcctcaatcttaaatatgaaaacccatccaaggataactggacatttgaggaaagcttccaaattgagacagagatcagagcaaaaagaacaaagtcctggaggaagcagacaatgaagggagcagaagaaaacttcagtagaatcaaaatatccttatataaaagaactttttatggaatcagtgagacataagcaggatgctattaaagtaaaaacaggagcttttagaaataagatagcagaaatgaaagatataatggaagcattgaaaggtacagttgaggaaatctagaaagtaaataatataataaagagatgagtggagacaaataaaactagagtattcatccagggtctaacatctaacaaatagtggctttagaaatatataccagagaaaagtgaagagaagacagtatctaaggagtaatataagaaatatttccaaaactaaaggaatttctatataaaaagtttctttttcagaacactggggaaaaagagacaattttaaaatgttgcagggaggagaaaaattaggttccatgcaaagaaataggaatcagatggtattgagattttcagtagcaacaactgaataccacaatacagtgaagtagtgtcttccaaaagctgatggaaaattattttaaacacaaaatcctatatttagccaaacagtcaatcaagtgtaaggctaaataaaggcatttttcagtcatacctcgaaaaactgcctgtgtagggatatttcccctgcttccccactcaggcagctgctgggaatgtattccaccaaatgacgaagcaaaccaagaacaaagaagtgaaggatctagaaaatgggctccaacacgggaaggaagcaaagggagatcccacgcatcagccacacagtaggtcttgtgggcattcagtctagcccagaccgggagggtgaaagtctccaaggaaagaggtgtctcggaagaaatca

SEQ ID NO: 112427 - DNA, 6822 bp, Homo sapiens; identical to SEQ ID NO: 112422
  Payload ID: 2003
  Gene Symbol: BTBD7
  Gene Name: BTB (POZ) domain containing 7
  ENST ID: ENST00000620259
  CDS Start-End: 1-79

SEQ ID NO: 112428 - DNA, 8430 bp, Homo sapiens; identical to SEQ ID NO: 112421
  Payload ID: 2003
  Gene Symbol: BTBD7
  Gene Name: BTB (POZ) domain containing 7
  Uniprot ID: Q9P203
  ENST ID: ENST00000613725
  CDS Start-End: 309-3707

SEQ ID NO: 112429 - DNA, 2621 bp, Homo sapiens; identical to SEQ ID NO: 112420
  Payload ID: 2003
  Gene Symbol: BTBD7
  Gene Name: BTB (POZ) domain containing 7
  Uniprot ID: Q9P203
  ENST ID: ENST00000613511
  CDS Start-End: 380-1612

SEQ ID NO: 112430 - DNA, 2479 bp, Homo sapiens; identical to SEQ ID NO: 112424
  Payload ID: 2003
  Gene Symbol: BTBD7
  Gene Name: BTB (POZ) domain containing 7
  ENST ID: ENST00000628944
  CDS Start-End: 1-2244

SEQ ID NO: 112431 - DNA, 2697 bp, Homo sapiens; identical to SEQ ID NO: 112425
  Payload ID: 2003
  Gene Symbol: BTBD7
  Gene Name: BTB (POZ) domain containing 7
  Uniprot ID: Q9P203
  ENST ID: ENST00000627779
  CDS Start-End: 112-2457

SEQ ID NO: 112432 - DNA, 316 bp, Homo sapiens; identical to SEQ ID NO: 112423
  Payload ID: 2003
  Gene Symbol: BTBD7
  Gene Name: BTB (POZ) domain containing 7
  ENST ID: ENST00000626573
  CDS Start-End: 150-316

SEQ ID NO: 112433 - DNA, 2328 bp, Homo sapiens; identical to SEQ ID NO: 112426
  Payload ID: 2003
  Gene Symbol: BTBD7
  Gene Name: BTB (POZ) domain containing 7
  ENST ID: ENST00000625801
  CDS Start-End: 108-1544

SEQ ID NO: 112434 - DNA, 1408 bp, Homo sapiens
  Payload ID: 2004
  Gene Symbol: BTBD8
  Gene Name: BTB (POZ) domain containing 8
  Uniprot ID: Q5XKL5
  ENST ID: ENST00000342818
  CDS Start-End: 237-1373
gcgcacgctcttcctgggtcaagagccggctcggttctgggattctgaggctccccaccgcggtccggcttctctgggagactgtctacaaaccgacgagaggcgtcaaccttttaccctagggggcggatttgggtaggagccgagcgttcggtcggaaacgcccccttcttcctcctgggcggggcaagtgaggccaagtactgggcctccagggcgtcgtacctctgtgagacatggctcgctgtggggaaggcagtgcggcccccatggtacttctggggtccgctggagtttgcagtaaggggttgcaaaggaaggggccgtgtgagcggcgccggctgaaggcgacggtgtcggagcagctcagccaggatttgctcaggcttctaagggaagaattccatacagatgttaccttctctgtgggttgtactttgttcaaagcacacaaagcagtccttttagcaagagttcctgacttctattttcatactattggacagacatcaaatagtttaacaaatcaggagcctattgctgtggagaatgttgaagctttagaatttagaacgtttttacagattatatattcatcaaacagaaacataaaaaactatgaagaggaaattcttaggaaaaagataatggagattgggatatcacaaaagcaacttgacatcagttttccaaagtgtgaaaactcatctgattgttctcttcagaagcatgaaattccagaggatatcagtgacagagatgatgatttcatttccaatgataattatgacttggagcctgcatctgaattaggagaagatttattgaagctttatgtgaaaccttgttgcccagatattgatatttttgttgatggaaaacgttttaaagctcacagggccattttgagtgccagatctagttattttgctgcaatgctgagtggctgttgggctgaaagctcccaagagtacgttactcttcaaggtataagccatgtagaactgaatgttatgatgcattttatatatggaggaactctggacattccagacaaaactaatgttggtcagatactcaatatggctgatatgtatggactagaaggattaaaagaagtagcaatctatattttaagaagagattactgtaatttctttcagaagcctgttcccagaacattgacgtctatactagaatgcctgattattgctcattcagttggagtggaaagtctttttgctgactgcatgaagtggattgtaaagcattttgcaaggttttggtctgagagaagctttgcaaatatacctcctgagattcagaaaagttgtcttaatatgttgattcagtccttagtaagtataacctgaatactcttttgtgtgtttgccattaaaaagtttat

SEQ ID NO: 112435 - DNA, 1616 bp, Homo sapiens
  Payload ID: 2004
  Gene Symbol: BTBD8
  Gene Name: BTB (POZ) domain containing 8
  Uniprot ID: Q5XKL5
  ENST ID: ENST00000370382
  CDS Start-End: 268-1185
gccggcagaagtaaacagagcgagtacgcctgcgcacgctcttcctgggtcaagagccggctcggttctgggattctgaggctccccaccgcggtccggcttctctgggagactgtctacaaaccgacgagaggcgtcaaccttttaccctagggggcggatttgggtaggagccgagcgttcggtcggaaacgcccccttcttcctcctgggcggggcaagtgaggccaagtactgggcctccagggcgtcgtacctctgtgagacatggctcgctgtggggaaggcagtgcggcccccatggtacttctggggtccgctggagtttgcagtaaggggttgcaaaggaaggggccgtgtgagcggcgccggctgaaggcgacggtgtcggagcagctcagccaggatttgctcaggcttctaagggaagaattccatacagatgttaccttctctgtgggttgtactttgttcaaagcacacaaagcagtccttttagcaagagttcctgacttctattttcatactattggacagacatcaaatagtttaacaaatcaggagcctattgctgtggagaatgttgaagctttagaatttagaacgtttttacagattatatattcatcaaacagaaacataaaaaactatgaagaggaaattcttaggaaaaagataatggagattgggatatcacaaaagcaacttgacatcagttttccaaagtgtgaaaactcatctgattgttctcttcagaagcatgaaattccagaggatatcagtgacagagatgatgatttcatttccaatgataattatgacttggagcctgcatctgaattaggagaagatttattgaagctttatgtgaaaccttgttgcccagatattgatatttttgttgatggaaaacgttttaaagctcacagggccattttgagtgccagatctagttattttgctgcaatgctgagtggctgttgggctgaaagctcccaagagtacgttactcttcaaggtataagccatgtagaactgaatgttatgatgcattttatatatggaggaactctggacattccagacaaaactaatgttgggtatgtattcctttttaataatttaaaatataaaagagttaggttctgctttgttgagctgtgttgcaaagtgttaatgaagtagaaactttgctttttatagtctattatactatatcttcagtaggttttgagaacatctaaaaacaataagcaaatcatcttatttagaagaaaaggtgacttatcaactcacagtaataagattgagaacagtctttattagacttaaatttagaagaagctataaattatggtttatagatcaataaattgattaaacttttatcaaactttaaaaattactactttttaaattttaggatatcttttctaaacagcaaaagaaaagaaaaaacatagttaagaatataggggctgggtgcggtggctctcgcctgtaatcccagcactttgtgaggctgaggcggacggatcacaagatcaagagatcgagaccatcctggctaacatggtgaaacctcgtctctactaaaaatacaaaaaaaaaaaaaa

SEQ ID NO: 112436 - DNA, 8486 bp, Homo sapiens
  Payload ID: 2005
  Gene Symbol: BTBD9
  Gene Name: BTB (POZ) domain containing 9
  Uniprot ID: Q96Q07
  ENST ID: ENST00000314100
  CDS Start-End: 318-1952
agataaggaattgtataggaggaaacttcatagtaaacattgaacctctgtgcttgtctccttgttgaagttgggggttcatgtttattgttccaagggagcctcatcaaaaccacttttaaagcattgagaatccaaataaataccatggatcatacaggattggggataagtcttgaggtctccccgagaaggagaagttctttaatttggtaattttagggtaatggttggatgctctctggattaatggaaaccttcaggggtacttttaggcagagtataacccagtgaagagagcattattatatggtggaatgcgagagtctcagcctgaagcagaaattcctctccaagacaccactgcagaagcattcacaatgctactcaaatatatctacactgggcgggcaacgctgacagatgagaaggaggaggtgctgctggactttttgagcctggctcataaatatggatttccagagctagaggattctacctctgagtatctctgcaccatacttaacattcagaatgtctgcatgacttttgatgttgccagtctctactcacttcccaagttaacttgtatgtgctgcatgtttatggataggaatgctcaggaagtcctctcaagtgaaggtttcctctccctttctaagacagcacttttaaacatcgtgttaagagactcatttgcagctcccgaaaaagatattttcctagccttattaaactggtgtaagcacaattcaaaggagaatcatgctgaaatcatgcaggctgtgcgtttacctctcatgagcctcacagagcttctgaatgttgtgaggccttcaggactgctgtctcctgatgccatcctggatgccattaaagtgcgatctgagagccgggatatggacctcaattatagaggcatgctcataccagaagaaaacattgcaactatgaagtatggagcccaagttgtaaagggggagctgaaatcagccttattagatggtgatactcaaaattatgatttggatcatggattttcaaggcacccaattgatgatgactgccgttccggcatcgagattaagctaggtcagccatccattatcaatcacatacggatactcttgtgggaccgagatagccggtcttactcatacttcattgaagtgtcaatggatgaacttgattgggtcagagtgatagatcattcacaatatctgtgtcgttcttggcagaaattatattttccagcccgtgtctgcaggtatattcgaattgttgggactcacaacacagtgaacaagatttttcacattgtggcttttgaatgtatgtttacaaacaaaaccttcactcttgagaaggggctgatagttcccatggagaatgttgcaacaattgctgattgtgccagtgtgattgaaggagtcagtcggagccgaaatgccttgctgaatggggacactaagaattatgactgggattctggctacacatgtcaccagctaggaagtggtgcgattgtggttcagttggcacaaccgtacatgattgggtcaatacggttactactttgggattgtgatgatcgaagctatagctactacgttgaggtttctaccaaccagcaacagtggaccatggttgctgacagaactaaagtctcctgcaagtcctggcagtcagtaacttttgaaaggcagcctgcctccttcatccgtatcgttgggacacacaacacagcaaatgaggtgttccactgtgtccactttgagtgtccagagcagcagagcagccagaaggaggaaaatagtgaggaatcggggacaggggacaccagcctggccggtcagcagctcgactcccatgcgctgcgggcgcctagtggcagctcactaccctccagcccaggctccaactcacgctcccccaaccggcagcaccaataaaggaggcagcgggcctggtgtgacttggtgggctcgggcaacggcaggaaacggtctcctccctgagcaggggtctctgttgactgcccccacctctgcccctttccagggaggagccgacctagctgcaaaagcagacaccgaacaggttttctcccaaggacagaaaggggctgctttgttcttctcaatttatccaaatcaggcaggtctcaagggggagaaaatgggtcttcaatcttcatcaagtccaccattaacaccctacctctctaatctagcccaggcgcagggaacaggaggaagtcatagacaggcctgtgttggaatacaaaaatggcacgcaaacactcaggcggaggagaaagccattgggcctttgctacctggaggcaccctttaggaatgggcctccatagagtgttcattctgctggaatacattgccctggcaactaaatgattttttatttgttttagttattctccactcagtgaatcataggtgttccggatctatttgaaatgctcaaacagcaaatcactagttttaatcccttttgatgctataattttccttccttggttttgaacggttcagcttgcggggacagagacccatcgtgcatgtctcctaaatgagacacggatgcagctcatcctggcacttgggccacagaggaagtgccacaaatgcacacaagcaaatcaacctgtggacactggagttaatagtcactcgtgtggctgagttactcacctgtcattcctgacatggatccagcctttaagcttgggaggctgacaaggaaatagttactatgcccgctgctaattcactgttccgaagtccatgtagataaacatataccgagttctggcgtggccaaacctgccggggactgccgtggcttagctgcccctccagttgtgtttatcgaagcattggagaggcagccacctgcccatcagcgtcaggaacgcagaactgggactccgtgcttcccccacaccacagtactcaactggggactgaaaaatagcagttccaagaagcttttctcctaatcctcatcaaaaggacctcatttgacgatggtggcttgatgtggctccgtctcctacttagtgatttccattccagtgctgcctgccctgggtaactgcgcacaacattgcctgcccctccgctgtccccagagctccggcctctgtcgccatcagcatcagcctgggagtctccccaggacggcatggcacgtgagcagcactgcagtccttgggtcttcggcgccaacctgcaaccctgatcaaaggagggtgagggcgtgggagtttcctttcaggtgtgtcaaagacatatcagctgcgctctagaaagagccaacgggtcagccgcttcctcctagtttaacttgattttgagtgatttgtccatatggaaatagtagggtagcatcaaactgcgtgattaaattggaagactgtctttccgtgtgaacacaggatggcagacatcagagggctaccggggcagggtggacacgttcctgaggagaagccagggtctgcagctctccatcctccccggtagctccagctgcagggctgagctgcttcctatcccctcagctctgatctctgccacttccctgttgtgtgggagagtggaacactcctgggatgccaggcatttcataatgggaggaggctcctgtaaggaacggtgggcgcccgctcacagtggggggccctccagcatggttgctgactctgtcagcccccagccccgggttgccaattagccagagagctcctgcacacacagcacttccttccccagtgtgttttctacccagatggggacaaaggagccagacagtcatatcaagggcagagttcaaacattttgaaatgagccattcacatgcttctttttaaacatgggcatcacctgcccagaggcccttggcctgaagcagcatgctgctgaccttgggaagagagggtgggctggtgggggtgctggaggagctgcccggccctgcatctgcaaccctccagtcccctgcccacagagcacgcagagccctcctgtgctccgggaacgagatagcagcttggcagctcggcctcgcatctgaaaaggaatacgctgcaaagcctcggccctagacccacatctgcagctccctggcctgtggcggttctttccttcggggcatgcccttccagatctctgtccctcctgtcttctagcactttaaagatgccccttatcatcagataaagagaagtatggggacgatggggtggcactaacagtagatgtcattggtgaggactgatggcaaagtctcattccctcacagccgcgctgccagctcgcctccccctcgctttgctgggagcctgccctggactccaaaaggacacgggttcacctcctttcccaggctggaggggtactgcccttccctgaggggccttctgactggggcaggaactcttttcgtgtgtccagctgggcctggaggccaagtcaaggtgtgtcacaccacacaccagggcaaggacctcatctccagggaacagggacaagtgagtggctaccagaaagtccccgggcagcctggagttccccagagcctggctggtcctacagagcacttctcccctgggccaccaggaccaaagcgacctaaacacttgaagctaaaagcaagtgctgatgatgggatgggctggcacgtggctgggagggctcctgggcaccacagagccctcagcccagcagagagtggaggctcagtccgtggggagcgggggttgtgaaggagacatggccaagcccctggtcggggagataagctcccccatgcccaggccagccccaggggcaacaagccaacatggagagaggtggcaggtgaggctgacaggtgggtgcctgtggcctgggcccatgagggcaatggtcctcagtaaccaatggaaaggacacaagggcgccatggtcaccaccacccaggcaaagaaatgggaggtggccagcacccccacccttcacttttcattattattattattattattattattattttttttttttttttttttttttttttttttttttgagagtagaaaggcaacttcattggagcttttggggaaaaaagccttcaaagtcaccttctggcagctctggggagggtcatttggggtggactgagagtgtagggcaggtagggtgtgtgctgggcagcagctgtgtccatgcagccagcacccagcagggcagtctcacaggagccgttgtgagcactttggacttgaagcagctatgaaccaccccccgcccccaccgtctctccctctcacacacacacacacacacacacacacacacacacacacacacacacacccgttttaccattttctcagtgctttttctgctttcattcctttgattttagttagaagcacaagccatgatggatgtgggactcttctcaattgctctttaaattgtcactttttaaatcctattaaatgaagtgtcgattcctgacaaatacattaaaagtgttttattcctagaagagttgggaaaagaaattattttcagcaagagtaggatgtttgttaaactgattccttggcaaaaaagagaaaaaaagcttttgaattgtgcaaaaaattgcccagtattatgctgtcgccccagttgtcaaactgctgtgcagatggctccagcccagtcaacttcaccttctttttaatttagaagataacaaaattgtaatcacttatcctttccagagccaagggggaaaaggaaggtataatctacaataaaaagcgagcgttctgtgtactgaggccacttggtgataaagagatggagcgctcccctcacagacttcaattaagaacctccctttggacagggaagaaaggtgtcaaagaggaaaagaaaattaaatttgcttccttccaggagtttttcctcattagtgcttgcttgtcggtgttattattttaatcttaccttctatgtggtgaccagctcctccgagcgatgcccaggtcgggcacggcccgggcagggcaggtctgcagcgatgccgtggcagaggtgggcatactccatttgttttggcagctgcagccattgattctgcatatttttcctgacaacagccccggcaggagttcagttaggaatttaaagtgcagttcatggttctgtgccaccgtggcttttattattataatattaaattagaagttgtcctagtgcctggtgtttgctcagagtttccagaagagagggaagggcaaggtttaaatggcatgcaggacaactggaatgcccccatctctctcgctgacacggatccagtcatacctggggctggacgggatttggaggccctggtcatttgcagagtgaatggtgaagggcgcggaaaaggtttgcttggaggaaagaccggttgcagaggcgaggcggagggaggaggggcggaggcagcaggtctttgtttgtggtaggtctctggcttccatcagggaggaggaaagaggctgtgcccttcctggctcttggctgcaccactgaggacgctccgagggacagcgtgctcacccatcctttgcacagtgctggccccaagccccacggccttccagctaggattttctgctgggctcatgcagaggcaggggacaggtgcatggaagagccgccccacccgacacaccattgtttgaaaatcactgttctctttactcacttaaaaaagtgtacagggaacacctgttcctggcataatgctccaacctcgcggaaggggccaggtgcccttcatctggctctggctgcttccgacctgggcccacgtcatcgttcacgtcctctgtgaccaccactggtcacggtgctccctggcccagcctccaacccacccagcaccctggcatctcccaggccagtctgctgcacccagcgagcttccagtcagaagccaggctgaacggccctcctgccccatcagcttcgtgtcttcttttttttaaagaactgaaatagtccccaagaggcctcatggcctgaagactcacaatcatccacctgtaatttatgataaatgtctgggagcatttaccatttgcgtccgtgagtatttatagccctgaatgggcgggggggagggggggtggaggaggccctgcagccaggagctacacacctgtccccactagtgtcccctggttgacagagccccctcagcctccccaaggctgtcactgcggctgtgacagctgaggagtgccgcctttgaaagccagtggacagtcgctccactagggggagaggccctggccctggcgcagaggaggcgttgcgaggcgggacgggggctggaggggctgagcagccttcagggcagggactgggccctgggtcactggagacgttgatattagtccgtctgctgccaaattgctccccaccacatgagccccaggggtttatgtcccaggaaggcgagggtgcccatctgagcggaattgggaggggacggcaccagctcatctccctcagggcctttgcctcctggtgctgccctggtggctgctcctgcaccacagcccctgatggctgctgctagtcctgagttgctgggtttacccccagcccacacttcccacctgggcctgagggtgcggccagtgccctagtcctagccactacaggagtcattctgagacctgctggaggccatggggtcttcccaggcccctcaatcagctgcttccagggtcagcagggcagggtgctgccagtaaggtcctcagggagcacagcccggccgcccaggctgggggatactggggcagagcttccaggtctgtggggcctgatctctccccaaggctctccaggccttggtgcgccctccacagtgaccttcagagaggctgcaccccctcagaagaacagtgagaaatctctccatcacacgctccctggtccttatgtccctgaggccacccttccccaccccccagtgcctggagaagcgtgagactctggaggggcgccaggaggccaggggtcctcagggctaggcctggagctcggcccaagagctgcttttgcgaagcctgtcttgaatccggattcaccagagaacaagagcctcccagcctttggcgtttctgggcctgtaaagatgtgtgtacctcccaggccactctgatgcaagggcagggaccatgccaggcctgggttgggaatggctctgtgactccagaagctccgtctaaaactccaaagatgcccaaaaggctgtgctgctatgtggaatgtgtattatttgtgagcacgatgcggcttcttcctcattttgcagagcaacctaagcgggcagatgtacaaaccgtgtgttcgaaacccctgagtccatgtgtgtgaaaatgcaggttttctcttagaaataaagtggtgacttgtgctgta

SEQ ID NO: 112437 - DNA, 1968 bp, Homo sapiens
  Payload ID: 2005
  Gene Symbol: BTBD9
  Gene Name: BTB (POZ) domain containing 9
  ENST ID: ENST00000328403
  CDS Start-End: 239-1195
catgtttattgttccaagggagcctcatcaaaaccacttttaaagcattgagaatccaaataaataccatggatcatacaggattggggataagtcttgaggtctccccgagaaggagaagttctttaatttggtaattttagggtaatggttggatgctctctggattaatggaaaccttcaggggtacttttaggcagagtataacccagtgaagagagcattattatatggtggaatgcgagagtctcagcctgaagcagaaattcctctccaagacaccactgcagaagcattcacaatgctactcaaatatatctacactgggcgggcaacgctgacagatgagaaggaggaggtgctgctggactttttgagcctggctcataaatatggatttccagagctagaggattctacctctgagtatctctgcaccatacttaacattcagaatgtctgcatgacttttgatgttgccagtctctactcacttcccaagttaacttgtatgtgctgcatgtttatggataggaatgctcaggaagtcctctcaagtgaaggtttcctctccctttctaagacagcacttttaaacatcgtgttaagagactcatttgcagctcccgaaaaagatattttcctagccttattaaactggtgtaagcacaattcaaaggagaatcatgctgaaatcatgcaggctgtgcgtttacctctcatgagcctcacagagcttctgaatgttgtgaggccttcaggactgctgtctcctgatgccatcctggatgccattaaagtgcgatctgagagccgggatatggacctcaattatagaggcatgctcataccagaagaaaacattgcaactatgaagtatggagcccaagttgtaaagggggagctgaaatcagccttattagatggtgatactcaaaattatgatttggatcatggattttcaaggcacccaattgatgatgactgccgttccggcatcgagattaagctaggtcagccatccattatcaatcacatacggatactcttgtgggaccgagatagccggtcttactcatacttcattgaagtgtcaatggatgaacttgattgggtcagagtgatagatcattcacaatatctgtgtcgttcttggcagaaattatattttccagcccgtgtctgcagtttatgagagatctatgatacaggagaagagggatctaactgacagtgacagtgcaaagtcctcaaaaggtatattcgaattgttgggactcacaacacagtgaacaagatttttcacattgtggcttttgaatgtatgtttacaaacaaaaccttcactcttgagaaggggctgatagttcccatggagaatgttgcaacaattgctgattgtgccagtgtgattgaaggagtcagtcggagccgaaatgccttgctgaatggggacactaagaattatgactgggattctggctacacatgtcaccagctaggaagtggtgcgattgtggttcagttggcacaaccgtacatgattgggtcaatacggttactactttgggattgtgatgatcgaagctatagctactacgttgaggtttctaccaaccagcaacagtggaccatggttgctgacagaactaaagtctcctgcaagtcctggcagtcagtaacttttgaaaggcagcctgcctccttcatccgtatcgttgggacacacaacacagcaaatgaggtgttccactgtgtccactttgagtgtccagagcagcagagcagccagaaggaggaaaatagtgaggaatcggggacaggggacaccagcctggccggtcagcagctcgactcccatgcgctgcgggcgcctagtggcagctcactaccctccagcccaggctccaactcacgctcccccaaccggcagcaccaataaaggaggcagcgggcctggtgtgactt

SEQ ID NO: 112438 - DNA, 1155 bp, Homo sapiens
  Payload ID: 2005
  Gene Symbol: BTBD9
  Gene Name: BTB (POZ) domain containing 9
  ENST ID: ENST00000403056
  CDS Start-End: 1-1155
atgagtaacagccaccctcttcgcccctttactgcagtgggggaaattgatcatgtgcacattttgtctgaacatattggtgccttgttgattggggaagaatatggcgacgtcacattcgtggtggaaaagaaacgttttcctgcccacagggtaattttagcagccaggtgccaatattttcgagcattattatatggtggaatgcgagagtctcagcctgaagcagaaattcctctccaagacaccactgcagaagcattcacaatgctactcaaatatatctacactgggcgggcaacgctgacagatgagaaggaggaggtgctgctggactttttgagcctggctcataaatatggatttccagagctagaggattctacctctgagtatctctgcaccatacttaacattcagaatgtctgcatgacttttgatgttgccagtctctactcacttcccaagttaacttgtatgtgctgcatgtttatggataggaatgctcaggaagtcctctcaagtgaaggtttcctctccctttctaagacagcacttttaaacatcgtgttaagagactcatttgcagctcccgaaaaagatattttcctagccttattaaactggtgtaagcacaattcaaaggagaatcatgctgaaatcatgcaggctgtgcgtttacctctcatgagcctcacagagcttctgaatgttgtgaggccttcaggactgctgtctcctgatgccatcctggatgccattaaagtgcgatctgagagccgggatatggacctcaattatagaggcatgctcataccagaagaaaacattgcaactatgaagtatggagcccaagttgtaaagggggagctgaaatcagccttattagatggtgatactcaaaattatgatttggatcatggattttcaaggcacccaattgatgatgactgccgttccggcatcgagattaagctaggtcagccatccattatcaatcacatacggatactcttgtgggaccgagatagccggtcttactcatacttcattgaagtgtcaatggatgaacttgattgggtcagagtgatagatcattcacaatatctgtgtcgttcttggcagaaattatattttccagcccgtgtctgcagg

SEQ ID NO: 112439 - DNA, 1062 bp, Homo sapiens
  Payload ID: 2005
  Gene Symbol: BTBD9
  Gene Name: BTB (POZ) domain containing 9
  ENST ID: ENST00000408958
  CDS Start-End: 1-1062
atgtgcagagcattattatatggtggaatgcgagagtctcagcctgaagcagaaattcctctccaagacaccactgcagaagcattcacaatgctactcaaatatatctacactgggcgggcaacgctgacagatgagaaggaggaggtgctgctggactttttgagcctggctcataaatatggatttccagagctagaggattctacctctgagtatctctgcaccatacttaacattcagaatgtctgcatgacttttgatgttgccagtctctactcacttcccaagttaacttgtatgtgctgcatgtttatggataggaatgctcaggaagtcctctcaagtgaaggtttcctctccctttctaagacagcacttttaaacatcgtgttaagagactcatttgcagctcccgaaaaagatattttcctagccttattaaactggtgtaagcacaattcaaaggagaatcatgctgaaatcatgcaggctgtgcgtttacctctcatgagcctcacagagcttctgaatgttgtgaggccttcaggactgctgtctcctgatgccatcctggatgccattaaagtgcgatctgagagccgggatatggacctcaattatagaggcatgctcataccagaagaaaacattgcaactatgaagtatggagcccaagttgtaaagggggagctgaaatcagccttattagatggtgatactcaaaattatgatttggatcatggattttcaaggcacccaattgatgatgactgccgttccggcatcgagattaagctaggtcagccatccattatcaatcacatacggatactcttgtgggaccgagatagccggtcttactcatacttcattgaagtgtcaatggatgaacttgattgggtcagagtgatagatcattcacaatatctgtgtcgttcttggcagaaattatattttccagcccgtgtctgcagtagagatggggccttgccatgttgcccaggctggtcttcaactcctggactcaagcgatctgactgcttcagcctcacaaagtgc

SEQ ID NO: 112440 - DNA, 2034 bp, Homo sapiens
  Payload ID: 2005
  Gene Symbol: BTBD9
  Gene Name: BTB (POZ) domain containing 9
  Uniprot ID: Q96Q07
  ENST ID: ENST00000419706
  CDS Start-End: 260-2008
catgtttattgttccaagggagcctcatcaaaaccacttttaaagcattgagaatccaaataaataccatggatcatacaggattggggataagtcttgaggtctccccgagaaggagaagttctttaatttggtaattttagggtaatggttggatgctctctggattaatggaaaccttcaggggtacttttaggcagagtataacccagtgaagagcaaatcctatttgagggtttcttcatgtgtttcttccctgatgtgcagagcattattatatggtggaatgcgagagtctcagcctgaagcagaaattcctctccaagacaccactgcagaagcattcacaatgctactcaaatatatctacactgggcgggcaacgctgacagatgagaaggaggaggtgctgctggactttttgagcctggctcataaatatggatttccagagctagaggattctacctctgagtatctctgcaccatacttaacattcagaatgtctgcatgacttttgatgttgccagtctctactcacttcccaagttaacttgtatgtgctgcatgtttatggataggaatgctcaggaagtcctctcaagtgaaggtttcctctccctttctaagacagcacttttaaacatcgtgttaagagactcatttgcagctcccgaaaaagatattttcctagccttattaaactggtgtaagcacaattcaaaggagaatcatgctgaaatcatgcaggctgtgcgtttacctctcatgagcctcacagagcttctgaatgttgtgaggccttcaggactgctgtctcctgatgccatcctggatgccattaaagtgcgatctgagagccgggatatggacctcaattatagaggcatgctcataccagaagaaaacattgcaactatgaagtatggagcccaagttgtaaagggggagctgaaatcagccttattagatggtgatactcaaaattatgatttggatcatggattttcaaggcacccaattgatgatgactgccgttccggcatcgagattaagctaggtcagccatccattatcaatcacatacggatactcttgtgggaccgagatagccggtcttactcatacttcattgaagtgtcaatggatgaacttgattgggtcagagtgatagatcattcacaatatctgtgtcgttcttggcagaaattatattttccagcccgtgtctgcagtggagatggagtctcactatggtgcccactctggtctcgaactcctgagctcaagcaatcctccctccttggccttccaaagtgcaggtatattcgaattgttgggactcacaacacagtgaacaagatttttcacattgtggcttttgaatgtatgtttacaaacaaaaccttcactcttgagaaggggctgatagttcccatggagaatgttgcaacaattgctgattgtgccagtgtgattgaaggagtcagtcggagccgaaatgccttgctgaatggggacactaagaattatgactgggattctggctacacatgtcaccagctaggaagtggtgcgattgtggttcagttggcacaaccgtacatgattgggtcaatacggttactactttgggattgtgatgatcgaagctatagctactacgttgaggtttctaccaaccagcaacagtggaccatggttgctgacagaactaaagtctcctgcaagtcctggcagtcagtaacttttgaaaggcagcctgcctccttcatccgtatcgttgggacacacaacacagcaaatgaggtgttccactgtgtccactttgagtgtccagagcagcagagcagccagaaggaggaaaatagtgaggaatcggggacaggggacaccagcctggccggtcagcagctcgactcccatgcgctgcgggcgcctagtggcagctcactaccctccagcccaggctccaactcacgctcccccaaccggcagcaccaataaaggaggcagcgggcctggtgtgactt

SEQ ID NO: 112441 - DNA, 861 bp, Homo sapiens
  Payload ID: 2005
  Gene Symbol: BTBD9
  Gene Name: BTB (POZ) domain containing 9
  ENST ID: ENST00000497373
  CDS Start-End: 517-861
ggagccaggtgccggcagggcagccacaccctggggccccctgttctggaggggcagagggtcgggccgatgcgaaaaagccgcggaagctgccttaggcgactttctgggcctgcatcgccggacccagcagcccgctgtcgatcggttgctaagtgacgccagcgcgcagtggcgcgtgcgcggccacggcggagtgcgtgaaagcggacgcgcgccgcagcagccggggcggcggcgaggacggcggccacggaagcggccaagggggcggtggcgcagagaggggtgcggagcgggcggaagaggcgtctgtgtcgcagcttggtctcagaggagcatcgctgggtgggggaaattgatcatgtgcacattttgtctgaacatattggtgccttgttgattggggaagaatatggcgacgtcacattcgtggtggaaaagaaacgttttcctgcccacagggtaattttagcagccaggtgccaatattttcgagcattattatatggtggaatgcgagagtctcagcctgaagcagaaattcctctccaagacaccactgcagaagcattcacaatgctactcaaatatatctacactgggcgggcaacgctgacagatgagaaggaggaggtgctgctggactttttgagcctggctcataaatatggatttccagagctagaggattctacctctgagtatctctgcaccatacttaacattcagaatgtctgcatgacttttgatgttgccagtctctactcacttcccaagttaacttgtatgtgctgcatgtttatggataggaatgctcaggaagtcctctcaagtgaaggtttcctctccctttctaag

SEQ ID NO: 112442 - DNA, 8525 bp, Homo sapiens
  Payload ID: 2005
  Gene Symbol: BTBD9
  Gene Name: BTB (POZ) domain containing 9
  Uniprot ID: Q96Q07
  ENST ID: ENST00000481247
  CDS Start-End: 153-1991
agccggggcggcggcgaggacggcggccacggaagcggccaagggggcggtggcgcagagaggggtgcggagcgggcggaagaggcgtctgtgtcgcagcttggtctcagaggagcatcgctgggaacaacgactatcgtctattccacaagatgagtaacagccaccctcttcgcccctttactgcagtgggggaaattgatcatgtgcacattttgtctgaacatattggtgccttgttgattggggaagaatatggcgacgtcacattcgtggtggaaaagaaacgttttcctgcccacagggtaattttagcagccaggtgccaatattttcgagcattattatatggtggaatgcgagagtctcagcctgaagcagaaattcctctccaagacaccactgcagaagcattcacaatgctactcaaatatatctacactgggcgggcaacgctgacagatgagaaggaggaggtgctgctggactttttgagcctggctcataaatatggatttccagagctagaggattctacctctgagtatctctgcaccatacttaacattcagaatgtctgcatgacttttgatgttgccagtctctactcacttcccaagttaacttgtatgtgctgcatgtttatggataggaatgctcaggaagtcctctcaagtgaaggtttcctctccctttctaagacagcacttttaaacatcgtgttaagagactcatttgcagctcccgaaaaagatattttcctagccttattaaactggtgtaagcacaattcaaaggagaatcatgctgaaatcatgcaggctgtgcgtttacctctcatgagcctcacagagcttctgaatgttgtgaggccttcaggactgctgtctcctgatgccatcctggatgccattaaagtgcgatctgagagccgggatatggacctcaattatagaggcatgctcataccagaagaaaacattgcaactatgaagtatggagcccaagttgtaaagggggagctgaaatcagccttattagatggtgatactcaaaattatgatttggatcatggattttcaaggcacccaattgatgatgactgccgttccggcatcgagattaagctaggtcagccatccattatcaatcacatacggatactcttgtgggaccgagatagccggtcttactcatacttcattgaagtgtcaatggatgaacttgattgggtcagagtgatagatcattcacaatatctgtgtcgttcttggcagaaattatattttccagcccgtgtctgcaggtatattcgaattgttgggactcacaacacagtgaacaagatttttcacattgtggcttttgaatgtatgtttacaaacaaaaccttcactcttgagaaggggctgatagttcccatggagaatgttgcaacaattgctgattgtgccagtgtgattgaaggagtcagtcggagccgaaatgccttgctgaatggggacactaagaattatgactgggattctggctacacatgtcaccagctaggaagtggtgcgattgtggttcagttggcacaaccgtacatgattgggtcaatacggttactactttgggattgtgatgatcgaagctatagctactacgttgaggtttctaccaaccagcaacagtggaccatggttgctgacagaactaaagtctcctgcaagtcctggcagtcagtaacttttgaaaggcagcctgcctccttcatccgtatcgttgggacacacaacacagcaaatgaggtgttccactgtgtccactttgagtgtccagagcagcagagcagccagaaggaggaaaatagtgaggaatcggggacaggggacaccagcctggccggtcagcagctcgactcccatgcgctgcgggcgcctagtggcagctcactaccctccagcccaggctccaactcacgctcccccaaccggcagcaccaataaaggaggcagcgggcctggtgtgacttggtgggctcgggcaacggcaggaaacggtctcctccctgagcaggggtctctgttgactgcccccacctctgcccctttccagggaggagccgacctagctgcaaaagcagacaccgaacaggttttctcccaaggacagaaaggggctgctttgttcttctcaatttatccaaatcaggcaggtctcaagggggagaaaatgggtcttcaatcttcatcaagtccaccattaacaccctacctctctaatctagcccaggcgcagggaacaggaggaagtcatagacaggcctgtgttggaatacaaaaatggcacgcaaacactcaggcggaggagaaagccattgggcctttgctacctggaggcaccctttaggaatgggcctccatagagtgttcattctgctggaatacattgccctggcaactaaatgattttttatttgttttagttattctccactcagtgaatcataggtgttccggatctatttgaaatgctcaaacagcaaatcactagttttaatcccttttgatgctataattttccttccttggttttgaacggttcagcttgcggggacagagacccatcgtgcatgtctcctaaatgagacacggatgcagctcatcctggcacttgggccacagaggaagtgccacaaatgcacacaagcaaatcaacctgtggacactggagttaatagtcactcgtgtggctgagttactcacctgtcattcctgacatggatccagcctttaagcttgggaggctgacaaggaaatagttactatgcccgctgctaattcactgttccgaagtccatgtagataaacatataccgagttctggcgtggccaaacctgccggggactgccgtggcttagctgcccctccagttgtgtttatcgaagcattggagaggcagccacctgcccatcagcgtcaggaacgcagaactgggactccgtgcttcccccacaccacagtactcaactggggactgaaaaatagcagttccaagaagcttttctcctaatcctcatcaaaaggacctcatttgacgatggtggcttgatgtggctccgtctcctacttagtgatttccattccagtgctgcctgccctgggtaactgcgcacaacattgcctgcccctccgctgtccccagagctccggcctctgtcgccatcagcatcagcctgggagtctccccaggacggcatggcacgtgagcagcactgcagtccttgggtcttcggcgccaacctgcaaccctgatcaaaggagggtgagggcgtgggagtttcctttcaggtgtgtcaaagacatatcagctgcgctctagaaagagccaacgggtcagccgcttcctcctagtttaacttgattttgagtgatttgtccatatggaaatagtagggtagcatcaaactgcgtgattaaattggaagactgtctttccgtgtgaacacaggatggcagacatcagagggctaccggggcagggtggacacgttcctgaggagaagccagggtctgcagctctccatcctccccggtagctccagctgcagggctgagctgcttcctatcccctcagctctgatctctgccacttccctgttgtgtgggagagtggaacactcctgggatgccaggcatttcataatgggaggaggctcctgtaaggaacggtgggcgcccgctcacagtggggggccctccagcatggttgctgactctgtcagcccccagccccgggttgccaattagccagagagctcctgcacacacagcacttccttccccagtgtgttttctacccagatggggacaaaggagccagacagtcatatcaagggcagagttcaaacattttgaaatgagccattcacatgcttctttttaaacatgggcatcacctgcccagaggcccttggcctgaagcagcatgctgctgaccttgggaagagagggtgggctggtgggggtgctggaggagctgcccggccctgcatctgcaaccctccagtcccctgcccacagagcacgcagagccctcctgtgctccgggaacgagatagcagcttggcagctcggcctcgcatctgaaaaggaatacgctgcaaagcctcggccctagacccacatctgcagctccctggcctgtggcggttctttccttcggggcatgcccttccagatctctgtccctcctgtcttctagcactttaaagatgccccttatcatcagataaagagaagtatggggacgatggggtggcactaacagtagatgtcattggtgaggactgatggcaaagtctcattccctcacagccgcgctgccagctcgcctccccctcgctttgctgggagcctgccctggactccaaaaggacacgggttcacctcctttcccaggctggaggggtactgcccttccctgaggggccttctgactggggcaggaactcttttcgtgtgtccagctgggcctggaggccaagtcaaggtgtgtcacaccacacaccagggcaaggacctcatctccagggaacagggacaagtgagtggctaccagaaagtccccgggcagcctggagttccccagagcctggctggtcctacagagcacttctcccctgggccaccaggaccaaagcgacctaaacacttgaagctaaaagcaagtgctgatgatgggatgggctggcacgtggctgggagggctcctgggcaccacagagccctcagcccagcagagagtggaggctcagtccgtggggagcgggggttgtgaaggagacatggccaagcccctggtcggggagataagctcccccatgcccaggccagccccaggggcaacaagccaacatggagagaggtggcaggtgaggctgacaggtgggtgcctgtggcctgggcccatgagggcaatggtcctcagtaaccaatggaaaggacacaagggcgccatggtcaccaccacccaggcaaagaaatgggaggtggccagcacccccacccttcacttttcattattattattattattattattattattttttttttttttttttttttttttttttttttttgagagtagaaaggcaacttcattggagcttttggggaaaaaagccttcaaagtcaccttctggcagctctggggagggtcatttggggtggactgagagtgtagggcaggtagggtgtgtgctgggcagcagctgtgtccatgcagccagcacccagcagggcagtctcacaggagccgttgtgagcactttggacttgaagcagctatgaaccaccccccgcccccaccgtctctccctctcacacacacacacacacacacacacacacacacacacacacacacacacccgttttaccattttctcagtgctttttctgctttcattcctttgattttagttagaagcacaagccatgatggatgtgggactcttctcaattgctctttaaattgtcactttttaaatcctattaaatgaagtgtcgattcctgacaaatacattaaaagtgttttattcctagaagagttgggaaaagaaattattttcagcaagagtaggatgtttgttaaactgattccttggcaaaaaagagaaaaaaagcttttgaattgtgcaaaaaattgcccagtattatgctgtcgccccagttgtcaaactgctgtgcagatggctccagcccagtcaacttcaccttctttttaatttagaagataacaaaattgtaatcacttatcctttccagagccaagggggaaaaggaaggtataatctacaataaaaagcgagcgttctgtgtactgaggccacttggtgataaagagatggagcgctcccctcacagacttcaattaagaacctccctttggacagggaagaaaggtgtcaaagaggaaaagaaaattaaatttgcttccttccaggagtttttcctcattagtgcttgcttgtcggtgttattattttaatcttaccttctatgtggtgaccagctcctccgagcgatgcccaggtcgggcacggcccgggcagggcaggtctgcagcgatgccgtggcagaggtgggcatactccatttgttttggcagctgcagccattgattctgcatatttttcctgacaacagccccggcaggagttcagttaggaatttaaagtgcagttcatggttctgtgccaccgtggcttttattattataatattaaattagaagttgtcctagtgcctggtgtttgctcagagtttccagaagagagggaagggcaaggtttaaatggcatgcaggacaactggaatgcccccatctctctcgctgacacggatccagtcatacctggggctggacgggatttggaggccctggtcatttgcagagtgaatggtgaagggcgcggaaaaggtttgcttggaggaaagaccggttgcagaggcgaggcggagggaggaggggcggaggcagcaggtctttgtttgtggtaggtctctggcttccatcagggaggaggaaagaggctgtgcccttcctggctcttggctgcaccactgaggacgctccgagggacagcgtgctcacccatcctttgcacagtgctggccccaagccccacggccttccagctaggattttctgctgggctcatgcagaggcaggggacaggtgcatggaagagccgccccacccgacacaccattgtttgaaaatcactgttctctttactcacttaaaaaagtgtacagggaacacctgttcctggcataatgctccaacctcgcggaaggggccaggtgcccttcatctggctctggctgcttccgacctgggcccacgtcatcgttcacgtcctctgtgaccaccactggtcacggtgctccctggcccagcctccaacccacccagcaccctggcatctcccaggccagtctgctgcacccagcgagcttccagtcagaagccaggctgaacggccctcctgccccatcagcttcgtgtcttcttttttttaaagaactgaaatagtccccaagaggcctcatggcctgaagactcacaatcatccacctgtaatttatgataaatgtctgggagcatttaccatttgcgtccgtgagtatttatagccctgaatgggcgggggggagggggggtggaggaggccctgcagccaggagctacacacctgtccccactagtgtcccctggttgacagagccccctcagcctccccaaggctgtcactgcggctgtgacagctgaggagtgccgcctttgaaagccagtggacagtcgctccactagggggagaggccctggccctggcgcagaggaggcgttgcgaggcgggacgggggctggaggggctgagcagccttcagggcagggactgggccctgggtcactggagacgttgatattagtccgtctgctgccaaattgctccccaccacatgagccccaggggtttatgtcccaggaaggcgagggtgcccatctgagcggaattgggaggggacggcaccagctcatctccctcagggcctttgcctcctggtgctgccctggtggctgctcctgcaccacagcccctgatggctgctgctagtcctgagttgctgggtttacccccagcccacacttcccacctgggcctgagggtgcggccagtgccctagtcctagccactacaggagtcattctgagacctgctggaggccatggggtcttcccaggcccctcaatcagctgcttccagggtcagcagggcagggtgctgccagtaaggtcctcagggagcacagcccggccgcccaggctgggggatactggggcagagcttccaggtctgtggggcctgatctctccccaaggctctccaggccttggtgcgccctccacagtgaccttcagagaggctgcaccccctcagaagaacagtgagaaatctctccatcacacgctccctggtccttatgtccctgaggccacccttccccaccccccagtgcctggagaagcgtgagactctggaggggcgccaggaggccaggggtcctcagggctaggcctggagctcggcccaagagctgcttttgcgaagcctgtcttgaatccggattcaccagagaacaagagcctcccagcctttggcgtttctgggcctgtaaagatgtgtgtacctcccaggccactctgatgcaagggcagggaccatgccaggcctgggttgggaatggctctgtgactccagaagctccgtctaaaactccaaagatgcccaaaaggctgtgctgctatgtggaatgtgtattatttgtgagcacgatgcggcttcttcctcattttgcagagcaacctaagcgggcagatgtacaaaccgtgtgttcgaaacccctgagtccatgtgtgtgaaaatgcaggttttctcttagaaataaagtggtgacttgtgctgta

SEQ ID NO: 112443 - DNA, 573 bp, Homo sapiens
  Payload ID: 2005
  Gene Symbol: BTBD9
  Gene Name: BTB (POZ) domain containing 9
  ENST ID: ENST00000498633
  CDS Start-End: 297-573
agagaggggtgcggagcgggcggaagaggcgtctgtgtcgcagcttggtctcagaggagcatcgctgggctcgtctcaatttggccctgctgtatttcaagtgctcggtagccacatgtggcaagtggccatcactgtggccattgcagctccaaagggacaggagagttgatggaaattagacactgcattctacagcctcatgagcccaagagagcaaaccttggtttgctgaaaatcagcagataaggcaattgaaagggaagaagaacaacgactatcgtctattccacaagatgagtaacagccaccctcttcgcccctttactgcagtgggggaaattgatcatgtgcacattttgtctgaacatattggtgccttgttgattggggaagaatatggcgacgtcacattcgtggtggaaaagaaacgttttcctgcccacagggtaattttagcagccaggtgccaatattttcgagcattattatatggtggaatgcgagagtctcagcctgaagcagaaattcctctccaagacaccactgcagaagcattcacaatgctactca

SEQ ID NO: 112444 - DNA, 5669 bp, Homo sapiens
  Payload ID: 2006
  Gene Symbol: BACH1
  Gene Name: BTB and CNC homology 1, basic leucine zipper transcription factor 1
  Uniprot ID: O14867
  ENST ID: ENST00000286800
  CDS Start-End: 144-2354
gagtgagtcacctgaccgctgccctcgccgcccgccgggcgctctcgcttcagtcagtcgggccgcgccgcgcctcagctctggttgatgataattagaagcatgctttccactgaacttcccgacaacatttgttatgcagaatgtctctgagtgagaactcggtttttgcctatgaatcttctgtgcatagcaccaatgttttactcagccttaatgaccagcggaagaaagatgtgctgtgcgatgtcaccatctttgtggagggacagcggttccgcgctcaccggtccgtgctggcggcatgcagcagttacttccactcaagaatcgtaggccaggctgatggagagctgaacattactcttccagaagaggtgacagttaaaggatttgaacctttaattcagtttgcctacactgctaaactgattttaagtaaagagaatgtggatgaagtgtgcaaatgtgtggagtttttaagtgtacataatattgaggaatcctgctttcagtttctgaaatttaagtttttggactccactgcagaccagcaagaatgcccaagaaaaaaatgcttttcatcacactgtcagaaaacagaccttaaactttcacttttggaccagagggatctagaaactgatgaagtggaggaatttctggaaaataaaaatgttcagactcctcagtgtaaactccgcaggtatcaaggaaatgcaaaagcctcacctcctctacaagacagtgccagtcagacatatgagtccatgtgcttagagaaggatgctgctctggccttgccttctttatgccccaaatacagaaaattccaaaaagcatttggaactgacagagtccgtactggggaatctagtgtcaaagacattcatgcttctgttcagccaaatgaaaggtctgaaaatgaatgcctgggaggagtcccggagtgtagagatttgcaggtgatgttaaaatgtgacgaaagtaaattagcaatggaacctgaagaaacgaagaaagatcctgcttctcagtgcccaactgaaaaatcagaagtgactcctttcccccacaattcttccatagaccctcatggactttattctttgtctcttttacacacatatgaccaatatggtgacttgaattttgctggtatgcaaaacacaacagtgttaacagaaaagcctttgtcaggtacagacgtccaagaaaaaacatttggtgaaagtcaggatttacctttgaaatccgacttgggcaccagggaagatagtagtgttgcatctagtgataggagtagtgtggagcgagaagtggcagaacacctagcaaaaggcttctggagtgacatttgcagcacggacactccttgccaaatgcagttatcacctgctgtggccaaagatggctcagaacagatctcacagaaacggtctgagtgtccgtggttaggtatcaggattagtgagagcccagaaccaggtcaaaggactttcacaacattaagttctgtcaactgcccttttataagtactctgagtactgaaggctgttcaagcaatttggaaattggaaacgatgattatgtttcagaaccccagcaagaaccttgcccatatgcttgtgtcattagcttgggagacgactctgagacggacaccgaaggagacagtgaatcctgttcagccagagaacaagaatgtgaggtaaaactgccattcaatgcacaacggataatttcactgtctcgaaatgattttcagtccttgttgaaaatgcacaagcttactccagaacagctggattgtatccatgatattcgaagaagaagtaaaaacagaattgctgcacagcgctgtcgcaagagaaaacttgactgtatacagaatcttgaatcagaaattgagaagctgcaaagtgaaaaggagagcttgttgaaggaaagagatcacattttgtcaactctgggtgagacaaagcagaacctaactggactttgccagaaagtttgtaaagaagcagctctgagtcaagaacaaatacagatactcgccaagtactcagctgcagattgcccactttcatttttaatttctgaaaaagataaaagtactcctgatggtgaactggcgttaccatcaattttcagtttatctgaccggcctccagcagtgctgcctccctgtgccagaggaaacagtgagcctggctacgcgcgagggcaggagtcccagcagatgtccacagccacctctgagcaagctgggcctgcggaacagtgtcgtcagagtggtgggatctcagatttctgtcagcagatgactgataaatgtactactgatgagtaaacttgcattcacttccttcaaaccatctaattttctcctgaagttttggcagcgtcttgaaagcctaatatgaccatctgttgctcaacaatactgtttttttcctttagtagtttaccataagggaatttcctttaagtcaaccatgatttctccttgatttctacaagagacaaagaaatgattttgcctcctggatatcagaaaaatccatgtgaaaatgtagtaaacctttaaaactcatgttttaaagaataataactctagtaataactcttcctgctattcagaataagtaggagaatgaaaactgcagcatatcagacagcaatttaacagcttgaaacatctacagatagttcctactaaaagaagtggcctgcagaagtttaataatttgacttttttctaatattttagtttgaaagaaaatttcttcccaagcaatgctaatagagttctattcttagaagcagggtgtcagctactgggaatatttttgtagagctgcattgtgaaaaaaagatggtcttacctgaatcttagggctttgttcttcggctcctaaaatcaggctttaagctacattgggaagatttagtaaataggcaagtggttggcctaagacgggggctgcttctcctcttcagtatggactctagaaagtctggctacatgaatagatttaagtgtcactttccctccctgccccccgcttcagtctctaccatatctggtcccatcatggacttcctatttcctggcatttttgtccctttggaagaagaaataggactcagaatacagtggcatgagtgattacactggcagcattatctcaggctccctagaatctggagagcttaccaacatgtaaagctgttcatttttccaccgtgggtcaccaatgccagaaaaccagacatcacggggaaagaatgttgcttactttttaccaggagtgcagttcatttttttcaccctgtttttgaagtcgtattattcacttgtaaaaatgattgtaacagataaaaaatgtatctgcagcaactctgcaggtttgtgaaataggatgaaactcaatctttttctattgtgggtttgcatttgaaaagcaggttgaatccttgctctcttctccaaatttggtgtggtataaagacacacaaatcattttaacttggacatttaaagatcagtcttagtgtttgttcagtcctgttacaaaatagataactgagcacctatcgcataacattttgcggtggcttttagccatgctggggttagatgtgtttgagagtcaaatgaaagctatggatcttctcagcaattaaaaaaaatgcatatattcacattcacagaaacattggcagaacccagttttaatggtacagaggagtagtttatagtgttgatttcaccaaaatcagagggctgaaagagacacttctatagactgcatcctgagcctagtgcagggcttgtctagctaatgtgggcagccaccacccactgtgtatgaacaagtctgaagcaagttggccttgcccttgagagtatatggggaccagtcttcatgtcttggagtaatttgtcaaatgttaccctttttgatcagggtgtagggggaggatattgctagtatattttcagtggtttgtatgttctctctgtcactgacttatttgtaagagaaaattagttggacttgtttattttctagtagcttttataagtacactcaagaatttgtcagggagaataattctgatagtgcatcccatactgcaaaagaatttgtgtgtgtgtgtgtgtgtgtgtgtgtgtgtgtgtatgtgtatgtatacatatatatctctccatataggtatttctttgatacttgtaattttaaatttcagcttcacgatataaaataatataagaacttctggtttacaaaatgtaaaatcttaagccaatggaacccttgatttcctacctcagtgtacacccaactattggttgtatcagtttgtgtatgtgcaaatgtcaaataatcttttgctttaattgctactgtacttgctttgaaagattacctactattttatgataaaatgtagttgtctccagagcttaaatataatttgtaaagcacttggtttaaatttctctctacctataaacagtttagcattaagggtttctattaatgacacagaattattggccaagtgtaatttcttaaaatttagcattactttaaatagccagcatgtaatacaagtaactacactacctcatatctacatgattttcaagttgtaatgcagatggacagataaaaaagattttacgtttgtcttttggccataagtgggaaagttttctgtatattgcatagcattacacatttatgcctattttaacattaacttctaaagaagttttttctaagaaaatgtttcaaggcaatattttttttgaggctgccgaagacaaatgacaggattatgagtatacagtgtatgccttttccttcatgcagaattttgaaatgttttcagtttgtatattgcatattcacatgatcattgttcactattttatgaactggccttctcaatgtttgatgattttttaaaagctgttatgttgaattcagtaaaataacattaccttattttttttcttattcaaattctggaactatagcaaataattcgttaaattgtcatattcaaaacaaatgtggatacagtcttggttctccatctgtaattttttttaacagtttgctatagcttactgcttaactaattttaaataaggaaataagtatgttagatgcagtagacgatacaggttgcatgtggacactcagtcacattaacaacttgggaaaaaaatggcaatgttacggtgaattctcaggtgaacttttttcagttataaaacatctattttgaatctgtaaatattttaaatgttttattaaggcatgtaataaactattctttgaaacttgttgggtagaatgaaaattaaagccataatggtagaagatggcatactgattataaaagaagcagaaaaacattgatttttttatatctttcataatataattttctaacaatgcaataaaaccactaaacttttgtgtccatattttactgagaccatgtttcattaaaagcatagtttcatagtatttaatttacatttctccctaatgttcttacccaaatgtacctgaactaaaaaatgttagatgttggtgataagttgacagttaaataaaattctctaaaattgcttctaattgaa

SEQ ID NO: 112445 - DNA, 5769 bp, Homo sapiens
  Payload ID: 2006
  Gene Symbol: BACH1
  Gene Name: BTB and CNC homology 1, basic leucine zipper transcription factor 1
  Uniprot ID: O14867
  ENST ID: ENST00000399921
  CDS Start-End: 244-2454
gtctactcagcccggtggctgtcgcgcgtggaatcgcgtaagaaaagccgagtttgtggctggggagagaaggccaccgtgctgagctggatttagcgaagactggttttggggaccggagagcccaggactccctttgttggagttttgcccacgcgttgtaattaagcctcgcacaatatggttgatgataattagaagcatgctttccactgaacttcccgacaacatttgttatgcagaatgtctctgagtgagaactcggtttttgcctatgaatcttctgtgcatagcaccaatgttttactcagccttaatgaccagcggaagaaagatgtgctgtgcgatgtcaccatctttgtggagggacagcggttccgcgctcaccggtccgtgctggcggcatgcagcagttacttccactcaagaatcgtaggccaggctgatggagagctgaacattactcttccagaagaggtgacagttaaaggatttgaacctttaattcagtttgcctacactgctaaactgattttaagtaaagagaatgtggatgaagtgtgcaaatgtgtggagtttttaagtgtacataatattgaggaatcctgctttcagtttctgaaatttaagtttttggactccactgcagaccagcaagaatgcccaagaaaaaaatgcttttcatcacactgtcagaaaacagaccttaaactttcacttttggaccagagggatctagaaactgatgaagtggaggaatttctggaaaataaaaatgttcagactcctcagtgtaaactccgcaggtatcaaggaaatgcaaaagcctcacctcctctacaagacagtgccagtcagacatatgagtccatgtgcttagagaaggatgctgctctggccttgccttctttatgccccaaatacagaaaattccaaaaagcatttggaactgacagagtccgtactggggaatctagtgtcaaagacattcatgcttctgttcagccaaatgaaaggtctgaaaatgaatgcctgggaggagtcccggagtgtagagatttgcaggtgatgttaaaatgtgacgaaagtaaattagcaatggaacctgaagaaacgaagaaagatcctgcttctcagtgcccaactgaaaaatcagaagtgactcctttcccccacaattcttccatagaccctcatggactttattctttgtctcttttacacacatatgaccaatatggtgacttgaattttgctggtatgcaaaacacaacagtgttaacagaaaagcctttgtcaggtacagacgtccaagaaaaaacatttggtgaaagtcaggatttacctttgaaatccgacttgggcaccagggaagatagtagtgttgcatctagtgataggagtagtgtggagcgagaagtggcagaacacctagcaaaaggcttctggagtgacatttgcagcacggacactccttgccaaatgcagttatcacctgctgtggccaaagatggctcagaacagatctcacagaaacggtctgagtgtccgtggttaggtatcaggattagtgagagcccagaaccaggtcaaaggactttcacaacattaagttctgtcaactgcccttttataagtactctgagtactgaaggctgttcaagcaatttggaaattggaaacgatgattatgtttcagaaccccagcaagaaccttgcccatatgcttgtgtcattagcttgggagacgactctgagacggacaccgaaggagacagtgaatcctgttcagccagagaacaagaatgtgaggtaaaactgccattcaatgcacaacggataatttcactgtctcgaaatgattttcagtccttgttgaaaatgcacaagcttactccagaacagctggattgtatccatgatattcgaagaagaagtaaaaacagaattgctgcacagcgctgtcgcaagagaaaacttgactgtatacagaatcttgaatcagaaattgagaagctgcaaagtgaaaaggagagcttgttgaaggaaagagatcacattttgtcaactctgggtgagacaaagcagaacctaactggactttgccagaaagtttgtaaagaagcagctctgagtcaagaacaaatacagatactcgccaagtactcagctgcagattgcccactttcatttttaatttctgaaaaagataaaagtactcctgatggtgaactggcgttaccatcaattttcagtttatctgaccggcctccagcagtgctgcctccctgtgccagaggaaacagtgagcctggctacgcgcgagggcaggagtcccagcagatgtccacagccacctctgagcaagctgggcctgcggaacagtgtcgtcagagtggtgggatctcagatttctgtcagcagatgactgataaatgtactactgatgagtaaacttgcattcacttccttcaaaccatctaattttctcctgaagttttggcagcgtcttgaaagcctaatatgaccatctgttgctcaacaatactgtttttttcctttagtagtttaccataagggaatttcctttaagtcaaccatgatttctccttgatttctacaagagacaaagaaatgattttgcctcctggatatcagaaaaatccatgtgaaaatgtagtaaacctttaaaactcatgttttaaagaataataactctagtaataactcttcctgctattcagaataagtaggagaatgaaaactgcagcatatcagacagcaatttaacagcttgaaacatctacagatagttcctactaaaagaagtggcctgcagaagtttaataatttgacttttttctaatattttagtttgaaagaaaatttcttcccaagcaatgctaatagagttctattcttagaagcagggtgtcagctactgggaatatttttgtagagctgcattgtgaaaaaaagatggtcttacctgaatcttagggctttgttcttcggctcctaaaatcaggctttaagctacattgggaagatttagtaaataggcaagtggttggcctaagacgggggctgcttctcctcttcagtatggactctagaaagtctggctacatgaatagatttaagtgtcactttccctccctgccccccgcttcagtctctaccatatctggtcccatcatggacttcctatttcctggcatttttgtccctttggaagaagaaataggactcagaatacagtggcatgagtgattacactggcagcattatctcaggctccctagaatctggagagcttaccaacatgtaaagctgttcatttttccaccgtgggtcaccaatgccagaaaaccagacatcacggggaaagaatgttgcttactttttaccaggagtgcagttcatttttttcaccctgtttttgaagtcgtattattcacttgtaaaaatgattgtaacagataaaaaatgtatctgcagcaactctgcaggtttgtgaaataggatgaaactcaatctttttctattgtgggtttgcatttgaaaagcaggttgaatccttgctctcttctccaaatttggtgtggtataaagacacacaaatcattttaacttggacatttaaagatcagtcttagtgtttgttcagtcctgttacaaaatagataactgagcacctatcgcataacattttgcggtggcttttagccatgctggggttagatgtgtttgagagtcaaatgaaagctatggatcttctcagcaattaaaaaaaatgcatatattcacattcacagaaacattggcagaacccagttttaatggtacagaggagtagtttatagtgttgatttcaccaaaatcagagggctgaaagagacacttctatagactgcatcctgagcctagtgcagggcttgtctagctaatgtgggcagccaccacccactgtgtatgaacaagtctgaagcaagttggccttgcccttgagagtatatggggaccagtcttcatgtcttggagtaatttgtcaaatgttaccctttttgatcagggtgtagggggaggatattgctagtatattttcagtggtttgtatgttctctctgtcactgacttatttgtaagagaaaattagttggacttgtttattttctagtagcttttataagtacactcaagaatttgtcagggagaataattctgatagtgcatcccatactgcaaaagaatttgtgtgtgtgtgtgtgtgtgtgtgtgtgtgtgtgtatgtgtatgtatacatatatatctctccatataggtatttctttgatacttgtaattttaaatttcagcttcacgatataaaataatataagaacttctggtttacaaaatgtaaaatcttaagccaatggaacccttgatttcctacctcagtgtacacccaactattggttgtatcagtttgtgtatgtgcaaatgtcaaataatcttttgctttaattgctactgtacttgctttgaaagattacctactattttatgataaaatgtagttgtctccagagcttaaatataatttgtaaagcacttggtttaaatttctctctacctataaacagtttagcattaagggtttctattaatgacacagaattattggccaagtgtaatttcttaaaatttagcattactttaaatagccagcatgtaatacaagtaactacactacctcatatctacatgattttcaagttgtaatgcagatggacagataaaaaagattttacgtttgtcttttggccataagtgggaaagttttctgtatattgcatagcattacacatttatgcctattttaacattaacttctaaagaagttttttctaagaaaatgtttcaaggcaatattttttttgaggctgccgaagacaaatgacaggattatgagtatacagtgtatgccttttccttcatgcagaattttgaaatgttttcagtttgtatattgcatattcacatgatcattgttcactattttatgaactggccttctcaatgtttgatgattttttaaaagctgttatgttgaattcagtaaaataacattaccttattttttttcttattcaaattctggaactatagcaaataattcgttaaattgtcatattcaaaacaaatgtggatacagtcttggttctccatctgtaattttttttaacagtttgctatagcttactgcttaactaattttaaataaggaaataagtatgttagatgcagtagacgatacaggttgcatgtggacactcagtcacattaacaacttgggaaaaaaatggcaatgttacggtgaattctcaggtgaacttttttcagttataaaacatctattttgaatctgtaaatattttaaatgttttattaaggcatgtaataaactattctttgaaacttgttgggtagaatgaaaattaaagccataatggtagaagatggcatactgattataaaagaagcagaaaaacattgatttttttatatctttcataatataattttctaacaatgcaataaaaccactaaacttttgtgtccatattttactgagaccatgtttcattaaaagcatagtttcatagtatttaatttacatttctccctaatgttcttacccaaatgtacctgaactaaaaaatgttagatgttggtgataagttgacagttaaataaaattctctaaaattgcttctaattgaa

SEQ ID NO: 112446 - DNA, 692 bp, Homo sapiens
  Payload ID: 2006
  Gene Symbol: BACH1
  Gene Name: BTB and CNC homology 1, basic leucine zipper transcription factor 1
  ENST ID: ENST00000435072
  CDS Start-End: 181-692
gcaaaagactgttgaagtagagagcattttgcccagctcactcggattctttgctggcatgccttcagtttcagttgtcatccagagaagtcaaaggaaatgctgcttggggatgagcatgttgatgataattagaagcatgctttccactgaacttcccgacaacatttgttatgcagaatgtctctgagtgagaactcggtttttgcctatgaatcttctgtgcatagcaccaatgttttactcagccttaatgaccagcggaagaaagatgtgctgtgcgatgtcaccatctttgtggagggacagcggttccgcgctcaccggtccgtgctggcggcatgcagcagttacttccactcaagaatcgtaggccaggctgatggagagctgaacattactcttccagaagaggtgacagttaaaggatttgaacctttaattcagtttgcctacactgctaaactgattttaagtaaagagaatgtggatgaagtgtgcaaatgtgtggagtttttaagtgtacataatattgaggaatcctgctttcagtttctgaaatttaagtttttggactccactgcagaccagcaagaatgcccaagaaaaaaatgcttttcatcacactgtcagaaaacagaccttaaactttcacttttggaccagagggatctagaaactgatgaagtgga

SEQ ID NO: 112447 - DNA, 777 bp, Homo sapiens
  Payload ID: 2006
  Gene Symbol: BACH1
  Gene Name: BTB and CNC homology 1, basic leucine zipper transcription factor 1
  ENST ID: ENST00000451655
  CDS Start-End: 104-777
gcctttggacatcttgaagaagcttagggaagaaaggctcccggttgatgataattagaagcatgctttccactgaacttcccgacaacatttgttatgcagaatgtctctgagtgagaactcggtttttgcctatgaatcttctgtgcatagcaccaatgttttactcagccttaatgaccagcggaagaaagatgtgctgtgcgatgtcaccatctttgtggagggacagcggttccgcgctcaccggtccgtgctggcggcatgcagcagttacttccactcaagaatcgtaggccaggctgatggagagctgaacattactcttccagaagaggtgacagttaaaggatttgaacctttaattcagtttgcctacactgctaaactgattttaagtaaagagaatgtggatgaagtgtgcaaatgtgtggagtttttaagtgtacataatattgaggaatcctgctttcagtttctgaaatttaagtttttggactccactgcagaccagcaagaatgcccaagaaaaaaatgcttttcatcacactgtcagaaaacagaccttaaactttcacttttggaccagagggatctagaaactgatgaagtggaggaatttctggaaaataaaaatgttcagactcctcagtgtaaactccgcaggtatcaaggaaatgcaaaagcctcacctcctctacaagacagtgccagtcagacatatgagtccatgtgcttagagaaggatgctgctctggccttgccttctttatgccc

SEQ ID NO: 112448 - DNA, 751 bp, Homo sapiens
  Payload ID: 2006
  Gene Symbol: BACH1
  Gene Name: BTB and CNC homology 1, basic leucine zipper transcription factor 1
  ENST ID: ENST00000447177
  CDS Start-End: 92-751
atacacaagaagtttcaggagtcagaggagggttgatgataattagaagcatgctttccactgaacttcccgacaacatttgttatgcagaatgtctctgagtgagaactcggtttttgcctatgaatcttctgtgcatagcaccaatgttttactcagccttaatgaccagcggaagaaagatgtgctgtgcgatgtcaccatctttgtggagggacagcggttccgcgctcaccggtccgtgctggcggcatgcagcagttacttccactcaagaatcgtaggccaggctgatggagagctgaacattactcttccagaagaggtgacagttaaaggatttgaacctttaattcagtttgcctacactgctaaactgattttaagtaaagagaatgtggatgaagtgtgcaaatgtgtggagtttttaagtgtacataatattgaggaatcctgctttcagtttctgaaatttaagtttttggactccactgcagaccagcaagaatgcccaagaaaaaaatgcttttcatcacactgtcagaaaacagaccttaaactttcacttttggaccagagggatctagaaactgatgaagtggaggaatttctggaaaataaaaatgttcagactcctcagtgtaaactccgcaggtatcaaggaaatgcaaaagcctcacctcctctacaagacagtgccagtcagacatatgagtccatgtgcttagagaaggatgctgctctggccttg

SEQ ID NO: 112449 - DNA, 850 bp, Homo sapiens
  Payload ID: 2006
  Gene Symbol: BACH1
  Gene Name: BTB and CNC homology 1, basic leucine zipper transcription factor 1
  ENST ID: ENST00000422809
  CDS Start-End: 1-655
tccgtggttaggtatcaggattagtgagagcccagaaccaggtcaaaggactttcacaacattaagttctgtcaactgcccttttataagtactctgagtactgaaggctgttcaagcaatttggaaattggaaacgatgattatgtttcagaaccccagcaagaaccttgcccatatgcttgtgtcattagcttgggagacgactctgagacggacaccgaaggagacagtgaatcctgttcagccagagaacaagaatgtgaggtaaaactgccattcaatgcacaacggataatttcactgtctcgaaatgattttcagtccttgttgaaaatgcacaagcttactccagaacagctggattgtatccatgatattcgaagaagaagtaaaaacagaattgctgcacagcgctgtcgcaagagaaaacttgactgtatacagaatcttgaatcagaaattgagaagctgaaccatggcctgtggtcacttaatcagcaaccctggttcgccaacatcccatgcaccatcgtggagactggctggatgccctgtgctctatcagggcatgtcagaccaacagaggggcaaatcagagtgaagaggaagccagaagatgggagagacatttttgaaggaacaagctgccaataatgtctgcaaaaagtgaattcttccaacaactacgtgagcttggaagaggaccttgaacctagaatgagactgcagcagccccagccaacacccttctcagcttcgtggaccctgagcagagaacacagcaaatttgtccagacttctcatctacagaaactgagataataaatgattgttgttttaacatcccta

SEQ ID NO: 112450 - DNA, 325 bp, Homo sapiens
  Payload ID: 2006
  Gene Symbol: BACH1
  Gene Name: BTB and CNC homology 1, basic leucine zipper transcription factor 1
  ENST ID: ENST00000548219
  CDS Start-End: 251-325
gaagaagctattcaaaaatgtccaggactctgttatttattcagcaagcttacaaagccatctttgattgactgattctttgacaatgactatctggatgacacaggaaggatgcaattctggccttggagagaaaacttgcaaggaaaggaacatgtttgaatttcagatgtgttcctcaatgaatcacgttgatgataattagaagcatgctttccactgaacttcccgacaacatttgttatgcagaatgtctctgagtgagaactcggtttttgcctatgaatcttctgtgcatagcaccaatgttttactcagccttaat

SEQ ID NO: 112451 - DNA, 315 bp, Homo sapiens
  Payload ID: 2006
  Gene Symbol: BACH1
  Gene Name: BTB and CNC homology 1, basic leucine zipper transcription factor 1
  ENST ID: ENST00000547141
  CDS Start-End: 241-315
tctttgacaatgactatctggatgacacaggaaggatgcaattctggccttggagagaaaacttgcaaggaaaggaacatgtttgaatttcagatgtgttcctcaatgaatcacacttgttacatttactgactctcatggtggtggagatggattttttcctagtgtgcctgtgtgtgggttgatgataattagaagcatgctttccactgaacttcccgacaacatttgttatgcagaatgtctctgagtgagaactcggtttttgcctatgaatcttctgtgcatagcaccaatgttttactcagccttaat

SEQ ID NO: 112452 - DNA, 217 bp, Homo sapiens
  Payload ID: 2006
  Gene Symbol: BACH1
  Gene Name: BTB and CNC homology 1, basic leucine zipper transcription factor 1
  ENST ID: ENST00000548467
  CDS Start-End: 143-217
ggcagtttcatgtcattgagtagaattgtgcggaatgcttttatggagtgaggcttctgcgttaaacttgtgctgattccaggttgatgataattagaagcatgctttccactgaacttcccgacaacatttgttatgcagaatgtctctgagtgagaactcggtttttgcctatgaatcttctgtgcatagcaccaatgttttactcagccttaat

SEQ ID NO: 112453 - DNA, 349 bp, Homo sapiens
  Payload ID: 2006
  Gene Symbol: BACH1
  Gene Name: BTB and CNC homology 1, basic leucine zipper transcription factor 1
  ENST ID: ENST00000550131
  CDS Start-End: 275-349
tctttgacaatgactatctggatgacacaggaaggatgcaattctggccttggagagaaaacttgcaaggaaaggaacatgtttgaatttcagatgtgttcctcaatgaatcaccacgtctccttcctgccatcttgtgaagaagtgccttgcttccctttcaccttctgccatgattgtaagtttcctgaggcctctccagccatcctgaactgttgatgataattagaagcatgctttccactgaacttcccgacaacatttgttatgcagaatgtctctgagtgagaactcggtttttgcctatgaatcttctgtgcatagcaccaatgttttactcagccttaat

SEQ ID NO: 112454 - DNA, 485 bp, Homo sapiens
  Payload ID: 2006
  Gene Symbol: BACH1
  Gene Name: BTB and CNC homology 1, basic leucine zipper transcription factor 1
  ENST ID: ENST00000546469
  CDS Start-End: 411-485
tctttgacaatgactatctggatgacacaggaaggatgcaattctggccttggagagaaaacttgcaaggaaaggaacatgtttgaatttcagatgtgttcctcaatgaatcacgatcttcagggaatgtttcaggtggaggaaggggctcttggtcaatgagcctgaagactgcatggcaacctttgccagcttttggcctgaaaactcaacttcttcatttgagattagcaaaagactgttgaagtagagagcattttgcccagctcactcggattctttgctggcatgccttcagtttcagttgtcatccagagaagtcaaaggaaatgctgcttggggatgagcatgttgatgataattagaagcatgctttccactgaacttcccgacaacatttgttatgcagaatgtctctgagtgagaactcggtttttgcctatgaatcttctgtgcatagcaccaatgttttactcagccttaat

SEQ ID NO: 112455 - DNA, 663 bp, Homo sapiens
  Payload ID: 2006
  Gene Symbol: BACH1
  Gene Name: BTB and CNC homology 1, basic leucine zipper transcription factor 1
  ENST ID: ENST00000468059
  CDS Start-End: 1-415
ttcagaaccccagcaagaaccttgcccatatgcttgtgtcattagcttgggagacgactctgagacggacaccgaaggagacagtgaatcctgttcagccagagaacaagaatgtgaggtaaaactgccattcaatgcacaacggataatttcactgtctcgaaatgattttcagtccttgttgaaaatgcacaagcttactccagaacagctggattgtatccatgatattcgaagaagaagtaaaaacagaattgctgcacagcgctgtcgcaagagaaaacttgactgtatacagaatcttgaatcagaaattgagaagctgccaacatcccatgcaccatcgtggagactggctggatgccctgtgctctatcagggcatgtcagaccaacagaggggcaaatcagagtgaagaggaagccagaagatgggagagacatttttgaaggaacaagctgccaataatgtctgcaaaaagtgaattcttccaacaactacgtgagcttggaagaggaccttgaacctagaatgagactgcagcagccccagccaacacccttctcagcttcgtggaccctgagcagagaacacagcaaatttgtccagacttctcatctacagaaactgagataataaatgattgttgttttaacatcccta

SEQ ID NO: 112456 - DNA, 9113 bp, Homo sapiens
  Payload ID: 2007
  Gene Symbol: BACH2
  Gene Name: BTB and CNC homology 1, basic leucine zipper transcription factor 2
  Uniprot ID: Q9BYV9
  ENST ID: ENST00000257749
  CDS Start-End: 709-3234
gcggccgccgccctcgccaccccgcctgcccactcccgccgccgccccgctctcgctttccccccggcctcccctcgccccttcccctcccccttcccggcgcactcggggggctgggaacgagctgccatgtgatgcgcgtcccctccgcgagctttcggtgacccacgaactgcccacctcgccggctgccgggagggggctgcgagccgggaagacgcggggaagaggaggcggaaaaggacgcaaagttctccggcgagcgcgttcgttcacatagctcccagttttaacatttcgccacctactgaagacatcatttgggaccaagctgatgagcccttgaagcacagcagataagagtgttgctgttgatcatctttgcctgggaagttgaatgataaagccagaagaaagcatgctttctgatcatttgcagctgtctgcttcagaaagtgagggctccaggaatgaggagaatcttcaagaacttcctcgcactgtgacatgtctgatcccttgctcccatccctgcagcatgaacaaggtggacactcactgacctgtcacaaggttgccccacaaaactttggggtccatgtctgaatggattgccagagccttctcatctctcccttcgcccagttccctgcatcctaagactcgaaggcagcacaggacctggaaaaattacatggtgtgaacggcatgtctgtggatgagaagcctgactcccccatgtatgtgtatgagtccacagtccactgcaccaacatcctcctgggcctcaatgaccagcggaaaaaggatattctctgtgacgtgactttgatcgtggagaggaaggagttccgggcccaccgggctgtgctggccgcatgcagtgaatatttttggcaggcgctggttggacagacaaaaaatgatttggtggtcagcttgcctgaggaggtcacagccaggggctttgggccgctgttacagtttgcctacactgccaagctgttactcagcagagaaaacatccgcgaggtcatccgctgtgctgagttcctgcgcatgcacaacctggaggactcctgcttcagcttcctgcagacccagctcctgaacagtgaggatggcctgtttgtgtgccggaaggatgctgcgtgccagcgcccacacgaggactgcgagaactctgcaggagaggaggaggatgaagaggaggagacgatggattcagagacggccaagatggcttgccccagggaccagatgcttccagagcccatcagctttgaggccgccgccatccccgtagcagagaaggaagaagccctgctgcccgagcctgacgtgcccacagacaccaaggagagctcagaaaaggacgcgttaacgcagtaccccagatacaagaaataccagcttgcatgtaccaagaatgtctataatgcatcatcacacagtacctcaggttttgcaagcacattccgggaagataactctagcaacagcctcaagccggggcttgccagggggcagattaaaagtgagccgcccagtgaagagaatgaggaagagagcatcacgctctgcctgtctggagatgagcctgacgccaaggacagagcgggggatgtcgagatggaccggaaacagcccagccctgcccctacccccacggccccagctggggccgcctgcctggagagatccaggagcgtggcctcgccctcctgcttaaggtctctgttcagcataacgaaaagtgtggagctgtctggcctgcccagtacatctcagcagcactttgccaggagtccagcctgcccttttgacaaggggatcactcagggtgaccttaaaactgactacacccctttcacagggaattatggacagccccacgtgggccagaaggaggtgtccaacttcaccatggggtcgcccctcagggggcctgggttggaggctctctgtaaacaggagggagagctggaccggaggagcgtgatcttctcctccagcgcttgtgaccaagtgagcacctcggtgcattcttattctggggtgagcagtttggacaaagacctctctgagccggtgccaaagggtctgtgggtgggagccggccagtccctccccagctcgcaggcctactcccacggtgggctgatggccgaccacttgccaggaaggatgcggcccaacaccagctgcccggtaccaatcaaagtctgccctcgctcaccccccttggagaccaggaccaggacttccagctcctgctcttcctattcctacgcggaggacgggagcgggggctcaccctgcagcctccctctctgtgagttctcctcctcgccctgttcccagggagccagattccttgccacagaacatcaggaaccaggcctgatgggagatggaatgtacaaccaagtgcggccccaaattaaatgtgagcagtcttatggaaccaactccagtgacgaatccggatcgttctcggaagcagacagtgagtcgtgtcctgtgcaggacaggggccaggaggtaaaacttccttttcctgtagatcaaatcacagatcttccaaggaacgatttccagatgatgattaaaatgcacaagctaacctcagaacagttagagtttattcatgatgtccgacggcgcagcaagaaccgcatcgcggcccagcgctgccgcaaaaggaaactggactgtattcagaatttagaatgtgaaatccgcaaattggtgtgtgagaaagagaaactgttgtcagagaggaatcaactgaaagcatgcatgggggaactgttggacaacttctcctgcctttcccaggaagtttgccgagacatccagagccccgagcagatccaggccctgcatcggtattgccctgtcctcagacccatggacttgcccacggcctccagtattaaccctgcgcccttgggtgctgagcagaacattgcggcctcccaatgcgcagtgggggaaaacgtgccctgctgcttggagccaggcgcggctccccccggacccccctgggcacccagcaacacctccgagaattgtacctctgggaggagactagaaggcactgacccgggaaccttctcagagagaggacctcctcttgaacccaggagccaaacagtgaccgtggacttctgccaggaaatgactgataagtgtacaactgacgaacagcccaggaaagattatacctagtgactcggctctgcctcccagtccgcacacctctcccatccaggcgttcttcagtcagcctgtggcactgttcatctgctgtcccgaagaaaccgagaacacatttggtgcacactacagcggtcttagcagcaatactgttccgaagtatcctctcctcttctcgagcaggagtgatagttaccttcacaatggtgctaccccttgcccaggcaaggaaagacagcagtgatgacactgtctgtctgtggctcaatttcagtcttcacagggatagactacaacacctctaggccccaaccacggattttttttctcagtggcccatgtcacaaaccctatctcaggaatttcttctgaatgttcaatttttttcattgaagacagcttctatacacatcaaagttttatagctagactgtacatattatatataatatatatataaaatatatatatatatatatatatatccatatgcaaaagtcctgcatgcctcaactttctcatcctaaaactggaaacttatttctcatttagaaacaggttccaacattcctcttcttttgtctctgatgctagaactagtttggtaactgttaacatggtcatttttcttgcttcacagttcaattttcaattcgtacttatttatggacaaaattcagtgttggaagctttttcccaaggttttatttcagatttctttttcgtttggtttggttttggcacctccaagtggtgtcatttgagcattgtaggtttgttttttgtttgtttggggggttttgtttgtttttgtttttgtttttgttttccttgcagatactgtacagtaatggtcaactttgccacttgcactgagttttgggtcaaacctattttcttaaatgaagttgtaacttcggtataactcaagtatactgtatattctttgcttttagttaaaaaagtaaaacattttagctaattaaaaagcactcaggtgataattatgtaggaaaaacaatcttgccaaataatgaattcatcctaggatgtgtagacaataatctgcttgaatatttttatatttcacctcctccccacctttccctaagcaaagtttaaacgcagatagagagttcagagttgatgctggatgttcagattcctaagtggggagagagtttggacatctcactcaaaagtacatcagaaaaacaggaatccgtgattttataccagaactcagcaggcattggctcctagaaatcaagttagaaagttttcacccagggagtaagtcccattcatttcaacacgtcctgaggcctcggcttgctcttggaagtgttgtgcagtaggacctgctcccctgaaggacggggccaaccagccactggctttcctgcccaggcttggcctcccaggacatctggcctgaggggatttgaatcacagccccgaaggtcctgccttcaccccattgggagagagcagggcatcctggcatctgcgatccatccctgacacaggctgacacattctttctcctttccttctccaaaggcttggagttttcttctgaggtttttctgccagtgtcttgtctgaaggcagacttcattctgaggctttggacaagctatcaccgggaaccctccctgtccccttcccgaatcacacacataccctaccctcacctgatgataattttctcttcttgctgcaaaactggttggcttgcaacccagagagagcagcttcccttggctctggggccgtgttggccccagccacgtttacaggaaggtgtgccccagaggaggaggaatcagctccctcgctccagtggccttgggtccgggtctcactgagcagcccgagggccactccagcccggctggggaagagagtcctgaacggtttgatgtggggatggggtggtgggcagtggggaatagatggttgactttgtttctttatttgtgccattgtttggacaatattaaagctgcatgtaaaaggggaaattagtatatgatgtaggctaaaagtgaaatcatagtaacatatgttttagtattattaacttttttctgtacaaatattagcactaaatgtttaaatatgtatgaatgccagaaatttgtcagttcatgcagtaggataaaaaaaaaaaaaaaaaaaaaaaaaaggcttttctttttaaacagttccacttttaaaacctgcctctgggtttttgttttttcttgtttgtgtgtgtgtgtgtgtgtgtgtgtgtgtgtgtgtgtgtgtgtgtgtgtgtctgaaacagatcttgataaagctctgtgttggagctgctggtttttgttatggttgttggaatttcttggcctactaggacagttctgtgcttcaccatgaggtttgcctttgtggaaaactggtgacagtgagaatataaactcaatgtgaatcacgtgatacttcgcaggcgtgtgttacagtggagtcagctgacagtattttgctttttaactctattgttgcctttccaagtgacctctcctcttcttttaaaaaaagaacactttctgctcatatcataaccaggtccaacccagcttcttggcatgaggtttaccctggtaacaactcatgtgcaactggtagtcttgaccacattccatccatttcctcaggtttctgtggttcagtagcccagacctgtttggcagccatttctagcaggggcggggcctctttatttctctccaccctaactcagacctcaccttcctcccacccacccctgccttgcttttcttcctcttcccccaacctaacttctgccatgggaactggttaaaaacactgctctaaaaaccatcttccaatttcatagagatttctcacaagttatttcattcataatccaccatgaacagtgactagcttcgtgcagttgttcatgtgatgtgtgtgtgtcttttcctattcagaactatgtgcttgtcaaaattatttctgggttgattcaaagggaggacttgctggggaccagaatccaaacggcctcaagtggaattttaaaacctagcctgtctcttttccctgggatccctctgtcaaccccacgccttttaggaaaaagaaaagtgagtgaacagcaaggaagagtgtttgcacagtacagtaacatttggttgttcttaaggctcttttcttacaaaaataagagaccctccaaccacgggctgtttaggaggatgcctgcttgggtctccaaatggctggggtaggaatggttgttggggcagagccagtggaggtgagtgaccctgagactaatgaacatcccacctaaatccagtcctccccttggatctgcctttgtcctgcttgtgtatccaggcaacctcttttcaagttggtcaggctttggacaggtgagtgatttgctgtatgtgtttgtttctctgcgttacctgggggtgccttgattaaaatcgaactttattacatactgattctggaacaaaacagttagaaaaactttaaaaaaaaaaaaaccgacaaagttacgaggccatcctgctatttatcttctgagttcccagcaatgactcaggcatcagagatgatgctgcagtggaaaacctgactctgtgtgtctgcaactgaatgttgtgcgagtaatttattaactgtctttctaaaggtttgctgcttttaagatgcactataattcgggatgtaatccttacattgcttttccaaggaagggaacaaaagtctagtgattagtatgccaactgccactactccttcaaaaggagccaggaccagcgacaagactcatgagaggactggctaaagtgaagtgtgcacagtgtgaagtttaatgctgttgtcaagaggcctaaacccacattttctcttttaatattttatgattgccatcaaagaagaagaaaaagaaggaacagacaaaggtttgaaaatgataagcctgttaagacaccaaaaactcctgtcccgtgaagctgcttgacatcctgtggagtagcataatcctctcaaaatgaggaagagctgcctgcaaagctttctcaagtccctatttggctacctacttctctacattatgccccatttaaactaggagctgtcttagaaatgacttcaaactgcttcactattgcttacagtttaggaggagtctcagatccagaaggagcaagaatcaagtttggtcctcaaatgactgtaaatagactaaagaacaaggtgttttttgtttttgtttttgttttctaagaataaagctgttcgttgtatcatgagttagtgtttcttccccaaactgaagactgtgttggaagtgcaatttctggtgagtcagtccacaatacaatgccctgtgtggagttggtattcatacaggaaatctgtgtgcacgaggcattgtgtgttgaaagtgtatgtttatagtactgcctgagccatctcatgaccccagcgtccaaaaccgatgctgtagaacagaacatatctgtacacaaatagtgtgtgcaaatagcatttgtacatagaaaagtctcattgtggcagattgagcataaattattcaactgacggtgcaaaaacattacttgcaaagaaaagtttatagtattttcctacactccaccctgggagatgatatttctatcaaatgaatatcagtgcattttaaatgtaatatgaaaacgatgctgccattttgtgaagaatacccacttggttgcagaggccaactttcatagctttgatttaatgttgtgacacggtgtatgcattttgctgtcaagcaatggataaacagctctgactttcattctcattccagtttattgacctcagataaaacactggcccttcttagaagcagaagtgtgcaccaagaccattcatttcaggtagactcacattcagtgccaagtgctcccatgggaataatcagacgcatatgttgcgaaagagtgaagggacttggacaaagaggggttttcctacagatggatgctcagtcttctaccaaaacatgtttggaggcagaactatgacctccccttaagtcctaacaatgtattttgtgtgtgcaaatcctgggatgcccgtttcacgctctgacataaagacatggcacctctagtgagtgatcaggaagattccatatgcatttgggagcttcaggtgcttgttagacacagtgagccattcaaggcaagcaccacctttgctagtgaggccaagagagcctgtgacaatttgacaatttgttccagaaccagtctgatgcaagtgcacctctaatatatgccttacaaactccagaggccatattcaaaacagggtcttctcagtgtatgcaaggggctgcagcccctcttctcttcctccccaggttgaacaatacggacagttttcacacatatctacctgtataaccctctgtacctctcataactggtcaacgactgtaacaggttacatcaggtgtttttctacatactttttacacagattctatgcgattaatgtaatttaattcaatgcatcattttattgtactagttcttaggcttgtccttatttttttctaagtgattgtggtttttctcgtggtttttattgtaaaaaatgaaaggctgttgatgcttattctctgtaactaagaatttttaccttttgggggaaaaaagcattgctatgaactaatgaattgaaacttcatttactcattgtaaatacactattgtgcaaaaaaagttttcactcaattgaattgctagtgttaactgaattttgtctagacaccatttctgttgatgaaataaagacatatcattatgcattgtaaactg

SEQ ID NO: 112457 - DNA, 3981 bp, Homo sapiens
  Payload ID: 2007
  Gene Symbol: BACH2
  Gene Name: BTB and CNC homology 1, basic leucine zipper transcription factor 2
  Uniprot ID: Q9BYV9
  ENST ID: ENST00000343122
  CDS Start-End: 533-3058
gcggccgccgccctcgccaccccgcctgcccactcccgccgccgccccgctctcgctttccccccggcctcccctcgccccttcccctcccccttcccggcgcactcggggggctgggaacgagctgccatgtgatgcgcgtcccctccgcgagctttcggtgacccacgaactgcccacctcgccggctgccgggagggggctgcgagccgggaagacgcggggaagaggaggcggaaaaggacgcaaagttctccggcgagctgtctgcttcagaaagtgagggctccaggaatgaggagaatcttcaagaacttcctcgcactgtgacatgtctgatcccttgctcccatccctgcagcatgaacaaggtggacactcactgacctgtcacaaggttgccccacaaaactttggggtccatgtctgaatggattgccagagccttctcatctctcccttcgcccagttccctgcatcctaagactcgaaggcagcacaggacctggaaaaattacatggtgtgaacggcatgtctgtggatgagaagcctgactcccccatgtatgtgtatgagtccacagtccactgcaccaacatcctcctgggcctcaatgaccagcggaaaaaggatattctctgtgacgtgactttgatcgtggagaggaaggagttccgggcccaccgggctgtgctggccgcatgcagtgaatatttttggcaggcgctggttggacagacaaaaaatgatttggtggtcagcttgcctgaggaggtcacagccaggggctttgggccgctgttacagtttgcctacactgccaagctgttactcagcagagaaaacatccgcgaggtcatccgctgtgctgagttcctgcgcatgcacaacctggaggactcctgcttcagcttcctgcagacccagctcctgaacagtgaggatggcctgtttgtgtgccggaaggatgctgcgtgccagcgcccacacgaggactgcgagaactctgcaggagaggaggaggatgaagaggaggagacgatggattcagagacggccaagatggcttgccccagggaccagatgcttccagagcccatcagctttgaggccgccgccatccccgtagcagagaaggaagaagccctgctgcccgagcctgacgtgcccacagacaccaaggagagctcagaaaaggacgcgttaacgcagtaccccagatacaagaaataccagcttgcatgtaccaagaatgtctataatgcatcatcacacagtacctcaggttttgcaagcacattccgggaagataactctagcaacagcctcaagccggggcttgccagggggcagattaaaagtgagccgcccagtgaagagaatgaggaagagagcatcacgctctgcctgtctggagatgagcctgacgccaaggacagagcgggggatgtcgagatggaccggaaacagcccagccctgcccctacccccacggccccagctggggccgcctgcctggagagatccaggagcgtggcctcgccctcctgcttaaggtctctgttcagcataacgaaaagtgtggagctgtctggcctgcccagtacatctcagcagcactttgccaggagtccagcctgcccttttgacaaggggatcactcagggtgaccttaaaactgactacacccctttcacagggaattatggacagccccacgtgggccagaaggaggtgtccaacttcaccatggggtcgcccctcagggggcctgggttggaggctctctgtaaacaggagggagagctggaccggaggagcgtgatcttctcctccagcgcttgtgaccaagtgagcacctcggtgcattcttattctggggtgagcagtttggacaaagacctctctgagccggtgccaaagggtctgtgggtgggagccggccagtccctccccagctcgcaggcctactcccacggtgggctgatggccgaccacttgccaggaaggatgcggcccaacaccagctgcccggtaccaatcaaagtctgccctcgctcaccccccttggagaccaggaccaggacttccagctcctgctcttcctattcctacgcggaggacgggagcgggggctcaccctgcagcctccctctctgtgagttctcctcctcgccctgttcccagggagccagattccttgccacagaacatcaggaaccaggcctgatgggagatggaatgtacaaccaagtgcggccccaaattaaatgtgagcagtcttatggaaccaactccagtgacgaatccggatcgttctcggaagcagacagtgagtcgtgtcctgtgcaggacaggggccaggaggtaaaacttccttttcctgtagatcaaatcacagatcttccaaggaacgatttccagatgatgattaaaatgcacaagctaacctcagaacagttagagtttattcatgatgtccgacggcgcagcaagaaccgcatcgcggcccagcgctgccgcaaaaggaaactggactgtattcagaatttagaatgtgaaatccgcaaattggtgtgtgagaaagagaaactgttgtcagagaggaatcaactgaaagcatgcatgggggaactgttggacaacttctcctgcctttcccaggaagtttgccgagacatccagagccccgagcagatccaggccctgcatcggtattgccctgtcctcagacccatggacttgcccacggcctccagtattaaccctgcgcccttgggtgctgagcagaacattgcggcctcccaatgcgcagtgggggaaaacgtgccctgctgcttggagccaggcgcggctccccccggacccccctgggcacccagcaacacctccgagaattgtacctctgggaggagactagaaggcactgacccgggaaccttctcagagagaggacctcctcttgaacccaggagccaaacagtgaccgtggacttctgccaggaaatgactgataagtgtacaactgacgaacagcccaggaaagattatacctagtgactcggctctgcctcccagtccgcacacctctcccatccaggcgttcttcagtcagcctgtggcactgttcatctgctgtcccgaagaaaccgagaacacatttggtgcacactacagcggtcttagcagcaatactgttccgaagtatcctctcctcttctcgagcaggagtgatagttaccttcacaatggtgctaccccttgcccaggcaaggaaagacagcagtgatgacactgtctgtctgtggctcaatttcagtcttcacagggatagactacaacacctctaggccccaaccacggattttttttctcagtggcccatgtcacaaaccctatctcaggaatttcttctgaatgttcaatttttttcattgaagacagcttctatacacatcaaagttttatagctagactgtacatattatatataatatatatataaaatatatatatatatatatatatatccatatgcaaaagtcctgcatgcctcaactttctcatcctaaaactggaaacttatttctcatttagaaacaggttccaacattcctcttcttttgtctctgatgctagaactagtttggtaactgttaacatggtcatttttcttgcttcacagttcaattttcaattcgtacttatttatggacaaaattcagtgttggaagctttttcccaaggttttatttcagatttctttttcgtttggtttggttttggcacctccaagtggtgtcatttgagcattgtaggtttgttttttgtttgtttggggggttttgtttgtttttgtttttgtttttgttttccttgcagatactgtacagtaatggtcaactttgccacttgcactgagttttgggtcaaacctattttcttaaatgaagttgtaacttcggtataactcaagtata

SEQ ID NO: 112458 - DNA, 780 bp, Homo sapiens
  Payload ID: 2007
  Gene Symbol: BACH2
  Gene Name: BTB and CNC homology 1, basic leucine zipper transcription factor 2
  ENST ID: ENST00000406998
  CDS Start-End: 538-780
gcggccgccgccctcgccaccccgcctgcccactcccgccgccgccccgctctcgctttccccccggcctcccctcgccccttcccctcccccttcccggcgcactcggggggctgggaacgagctgccatgtgatgcgcgtcccctccgcgagctttcggtgacccacgaactgcccacctcgccggctgccgggagggggctgcgagccgggaagacgcggggaagaggaggcggaaaaggacgcaaagttctccggcgagtgcagctgtctgcttcagaaagtgagggctccaggaatgaggagaatcttcaagaacttcctcgcactgtgacatgtctgatcccttgctcccatccctgcagcatgaacaaggtggacactcactgacctgtcacaaggttgccccacaaaactttggggtccatgtctgaatggattgccagagccttctcatctctcccttcgcccagttccctgcatcctaagactcgaaggcagcacaggacctggaaaaattacatggtgtgaacggcatgtctgtggatgagaagcctgactcccccatgtatgtgtatgagtccacagtccactgcaccaacatcctcctgggcctcaatgaccagcggaaaaaggatattctctgtgacgtgactttgatcgtggagaggaaggagttccgggcccaccgggctgtgctggccgcatgcagtgaatatttttggcaggcgctggttggacagacaaaaaatgatttggtggtcagcttgcctgaggag

SEQ ID NO: 112459 - DNA, 868 bp, Homo sapiens
  Payload ID: 2007
  Gene Symbol: BACH2
  Gene Name: BTB and CNC homology 1, basic leucine zipper transcription factor 2
  ENST ID: ENST00000453877
  CDS Start-End: 626-868
gcggccgccgccctcgccaccccgcctgcccactcccgccgccgccccgctctcgctttccccccggcctcccctcgccccttcccctcccccttcccggcgcactcggggggctgggaacgagctgccatgtgatgcgcgtcccctccgcgagctttcggtgacccacgaactgcccacctcgccggctgccgggagggggctgcgagccgggaagacgcggggaagaggaggcggaaaaggacgcaaagttctccggcgagcgcgttcgttcacatagctcccagttttaacatttcgccacctactgaagacatcatttgggaccaagctgatgagcccttgaagcacagcagctgtctgcttcagaaagtgagggctccaggaatgaggagaatcttcaagaacttcctcgcactgtgacatgtctgatcccttgctcccatccctgcagcatgaacaaggtggacactcactgacctgtcacaaggttgccccacaaaactttggggtccatgtctgaatggattgccagagccttctcatctctcccttcgcccagttccctgcatcctaagactcgaaggcagcacaggacctggaaaaattacatggtgtgaacggcatgtctgtggatgagaagcctgactcccccatgtatgtgtatgagtccacagtccactgcaccaacatcctcctgggcctcaatgaccagcggaaaaaggatattctctgtgacgtgactttgatcgtggagaggaaggagttccgggcccaccgggctgtgctggccgcatgcagtgaatatttttggcaggcgctggttggacagacaaaaaatgatttggtggtcagcttgcctgaggag

SEQ ID NO: 112460 - DNA, 9108 bp, Homo sapiens
  Payload ID: 2007
  Gene Symbol: BACH2
  Gene Name: BTB and CNC homology 1, basic leucine zipper transcription factor 2
  Uniprot ID: Q9BYV9
  ENST ID: ENST00000537989
  CDS Start-End: 704-3229
gtcaacaatgtagcgattgagagtgtgggcgttccggggagagcgcaagccgcgcggcgcggagcaaacagcgccgagccgccgccgcctcagcagcagcagcagcagcagcagcggcagcagcggccgtgcacgcccgggctgcggtcgcacagcgctaacgtgagcggccgccgccctcgccaccccgcctgcccactcccgccgccgccccgctctcgctttccccccggcctcccctcgccccttcccctcccccttcccggcgcactcggggggctgggaacgagctgccatgtgatgcgcgtcccctccgcgagctttcggtgacccacgaactgcccacctcgccggctgccgggagggggctgcgagccgggaagacgcggggaagaggaggcggaaaaggacgcaaagttctccggcgagtgcagctgtctgcttcagaaagtgagggctccaggaatgaggagaatcttcaagaacttcctcgcactgtgacatgtctgatcccttgctcccatccctgcagcatgaacaaggtggacactcactgacctgtcacaaggttgccccacaaaactttggggtccatgtctgaatggattgccagagccttctcatctctcccttcgcccagttccctgcatcctaagactcgaaggcagcacaggacctggaaaaattacatggtgtgaacggcatgtctgtggatgagaagcctgactcccccatgtatgtgtatgagtccacagtccactgcaccaacatcctcctgggcctcaatgaccagcggaaaaaggatattctctgtgacgtgactttgatcgtggagaggaaggagttccgggcccaccgggctgtgctggccgcatgcagtgaatatttttggcaggcgctggttggacagacaaaaaatgatttggtggtcagcttgcctgaggaggtcacagccaggggctttgggccgctgttacagtttgcctacactgccaagctgttactcagcagagaaaacatccgcgaggtcatccgctgtgctgagttcctgcgcatgcacaacctggaggactcctgcttcagcttcctgcagacccagctcctgaacagtgaggatggcctgtttgtgtgccggaaggatgctgcgtgccagcgcccacacgaggactgcgagaactctgcaggagaggaggaggatgaagaggaggagacgatggattcagagacggccaagatggcttgccccagggaccagatgcttccagagcccatcagctttgaggccgccgccatccccgtagcagagaaggaagaagccctgctgcccgagcctgacgtgcccacagacaccaaggagagctcagaaaaggacgcgttaacgcagtaccccagatacaagaaataccagcttgcatgtaccaagaatgtctataatgcatcatcacacagtacctcaggttttgcaagcacattccgggaagataactctagcaacagcctcaagccggggcttgccagggggcagattaaaagtgagccgcccagtgaagagaatgaggaagagagcatcacgctctgcctgtctggagatgagcctgacgccaaggacagagcgggggatgtcgagatggaccggaaacagcccagccctgcccctacccccacggccccagctggggccgcctgcctggagagatccaggagcgtggcctcgccctcctgcttaaggtctctgttcagcataacgaaaagtgtggagctgtctggcctgcccagtacatctcagcagcactttgccaggagtccagcctgcccttttgacaaggggatcactcagggtgaccttaaaactgactacacccctttcacagggaattatggacagccccacgtgggccagaaggaggtgtccaacttcaccatggggtcgcccctcagggggcctgggttggaggctctctgtaaacaggagggagagctggaccggaggagcgtgatcttctcctccagcgcttgtgaccaagtgagcacctcggtgcattcttattctggggtgagcagtttggacaaagacctctctgagccggtgccaaagggtctgtgggtgggagccggccagtccctccccagctcgcaggcctactcccacggtgggctgatggccgaccacttgccaggaaggatgcggcccaacaccagctgcccggtaccaatcaaagtctgccctcgctcaccccccttggagaccaggaccaggacttccagctcctgctcttcctattcctacgcggaggacgggagcgggggctcaccctgcagcctccctctctgtgagttctcctcctcgccctgttcccagggagccagattccttgccacagaacatcaggaaccaggcctgatgggagatggaatgtacaaccaagtgcggccccaaattaaatgtgagcagtcttatggaaccaactccagtgacgaatccggatcgttctcggaagcagacagtgagtcgtgtcctgtgcaggacaggggccaggaggtaaaacttccttttcctgtagatcaaatcacagatcttccaaggaacgatttccagatgatgattaaaatgcacaagctaacctcagaacagttagagtttattcatgatgtccgacggcgcagcaagaaccgcatcgcggcccagcgctgccgcaaaaggaaactggactgtattcagaatttagaatgtgaaatccgcaaattggtgtgtgagaaagagaaactgttgtcagagaggaatcaactgaaagcatgcatgggggaactgttggacaacttctcctgcctttcccaggaagtttgccgagacatccagagccccgagcagatccaggccctgcatcggtattgccctgtcctcagacccatggacttgcccacggcctccagtattaaccctgcgcccttgggtgctgagcagaacattgcggcctcccaatgcgcagtgggggaaaacgtgccctgctgcttggagccaggcgcggctccccccggacccccctgggcacccagcaacacctccgagaattgtacctctgggaggagactagaaggcactgacccgggaaccttctcagagagaggacctcctcttgaacccaggagccaaacagtgaccgtggacttctgccaggaaatgactgataagtgtacaactgacgaacagcccaggaaagattatacctagtgactcggctctgcctcccagtccgcacacctctcccatccaggcgttcttcagtcagcctgtggcactgttcatctgctgtcccgaagaaaccgagaacacatttggtgcacactacagcggtcttagcagcaatactgttccgaagtatcctctcctcttctcgagcaggagtgatagttaccttcacaatggtgctaccccttgcccaggcaaggaaagacagcagtgatgacactgtctgtctgtggctcaatttcagtcttcacagggatagactacaacacctctaggccccaaccacggattttttttctcagtggcccatgtcacaaaccctatctcaggaatttcttctgaatgttcaatttttttcattgaagacagcttctatacacatcaaagttttatagctagactgtacatattatatataatatatatataaaatatatatatatatatatatatatccatatgcaaaagtcctgcatgcctcaactttctcatcctaaaactggaaacttatttctcatttagaaacaggttccaacattcctcttcttttgtctctgatgctagaactagtttggtaactgttaacatggtcatttttcttgcttcacagttcaattttcaattcgtacttatttatggacaaaattcagtgttggaagctttttcccaaggttttatttcagatttctttttcgtttggtttggttttggcacctccaagtggtgtcatttgagcattgtaggtttgttttttgtttgtttggggggttttgtttgtttttgtttttgtttttgttttccttgcagatactgtacagtaatggtcaactttgccacttgcactgagttttgggtcaaacctattttcttaaatgaagttgtaacttcggtataactcaagtatactgtatattctttgcttttagttaaaaaagtaaaacattttagctaattaaaaagcactcaggtgataattatgtaggaaaaacaatcttgccaaataatgaattcatcctaggatgtgtagacaataatctgcttgaatatttttatatttcacctcctccccacctttccctaagcaaagtttaaacgcagatagagagttcagagttgatgctggatgttcagattcctaagtggggagagagtttggacatctcactcaaaagtacatcagaaaaacaggaatccgtgattttataccagaactcagcaggcattggctcctagaaatcaagttagaaagttttcacccagggagtaagtcccattcatttcaacacgtcctgaggcctcggcttgctcttggaagtgttgtgcagtaggacctgctcccctgaaggacggggccaaccagccactggctttcctgcccaggcttggcctcccaggacatctggcctgaggggatttgaatcacagccccgaaggtcctgccttcaccccattgggagagagcagggcatcctggcatctgcgatccatccctgacacaggctgacacattctttctcctttccttctccaaaggcttggagttttcttctgaggtttttctgccagtgtcttgtctgaaggcagacttcattctgaggctttggacaagctatcaccgggaaccctccctgtccccttcccgaatcacacacataccctaccctcacctgatgataattttctcttcttgctgcaaaactggttggcttgcaacccagagagagcagcttcccttggctctggggccgtgttggccccagccacgtttacaggaaggtgtgccccagaggaggaggaatcagctccctcgctccagtggccttgggtccgggtctcactgagcagcccgagggccactccagcccggctggggaagagagtcctgaacggtttgatgtggggatggggtggtgggcagtggggaatagatggttgactttgtttctttatttgtgccattgtttggacaatattaaagctgcatgtaaaaggggaaattagtatatgatgtaggctaaaagtgaaatcatagtaacatatgttttagtattattaacttttttctgtacaaatattagcactaaatgtttaaatatgtatgaatgccagaaatttgtcagttcatgcagtaggataaaaaaaaaaaaaaaaaaaaaaaaaaggcttttctttttaaacagttccacttttaaaacctgcctctgggtttttgttttttcttgtttgtgtgtgtgtgtgtgtgtgtgtgtgtgtgtgtgtgtgtgtgtgtgtgtgtctgaaacagatcttgataaagctctgtgttggagctgctggtttttgttatggttgttggaatttcttggcctactaggacagttctgtgcttcaccatgaggtttgcctttgtggaaaactggtgacagtgagaatataaactcaatgtgaatcacgtgatacttcgcaggcgtgtgttacagtggagtcagctgacagtattttgctttttaactctattgttgcctttccaagtgacctctcctcttcttttaaaaaaagaacactttctgctcatatcataaccaggtccaacccagcttcttggcatgaggtttaccctggtaacaactcatgtgcaactggtagtcttgaccacattccatccatttcctcaggtttctgtggttcagtagcccagacctgtttggcagccatttctagcaggggcggggcctctttatttctctccaccctaactcagacctcaccttcctcccacccacccctgccttgcttttcttcctcttcccccaacctaacttctgccatgggaactggttaaaaacactgctctaaaaaccatcttccaatttcatagagatttctcacaagttatttcattcataatccaccatgaacagtgactagcttcgtgcagttgttcatgtgatgtgtgtgtgtcttttcctattcagaactatgtgcttgtcaaaattatttctgggttgattcaaagggaggacttgctggggaccagaatccaaacggcctcaagtggaattttaaaacctagcctgtctcttttccctgggatccctctgtcaaccccacgccttttaggaaaaagaaaagtgagtgaacagcaaggaagagtgtttgcacagtacagtaacatttggttgttcttaaggctcttttcttacaaaaataagagaccctccaaccacgggctgtttaggaggatgcctgcttgggtctccaaatggctggggtaggaatggttgttggggcagagccagtggaggtgagtgaccctgagactaatgaacatcccacctaaatccagtcctccccttggatctgcctttgtcctgcttgtgtatccaggcaacctcttttcaagttggtcaggctttggacaggtgagtgatttgctgtatgtgtttgtttctctgcgttacctgggggtgccttgattaaaatcgaactttattacatactgattctggaacaaaacagttagaaaaactttaaaaaaaaaaaaaccgacaaagttacgaggccatcctgctatttatcttctgagttcccagcaatgactcaggcatcagagatgatgctgcagtggaaaacctgactctgtgtgtctgcaactgaatgttgtgcgagtaatttattaactgtctttctaaaggtttgctgcttttaagatgcactataattcgggatgtaatccttacattgcttttccaaggaagggaacaaaagtctagtgattagtatgccaactgccactactccttcaaaaggagccaggaccagcgacaagactcatgagaggactggctaaagtgaagtgtgcacagtgtgaagtttaatgctgttgtcaagaggcctaaacccacattttctcttttaatattttatgattgccatcaaagaagaagaaaaagaaggaacagacaaaggtttgaaaatgataagcctgttaagacaccaaaaactcctgtcccgtgaagctgcttgacatcctgtggagtagcataatcctctcaaaatgaggaagagctgcctgcaaagctttctcaagtccctatttggctacctacttctctacattatgccccatttaaactaggagctgtcttagaaatgacttcaaactgcttcactattgcttacagtttaggaggagtctcagatccagaaggagcaagaatcaagtttggtcctcaaatgactgtaaatagactaaagaacaaggtgttttttgtttttgtttttgttttctaagaataaagctgttcgttgtatcatgagttagtgtttcttccccaaactgaagactgtgttggaagtgcaatttctggtgagtcagtccacaatacaatgccctgtgtggagttggtattcatacaggaaatctgtgtgcacgaggcattgtgtgttgaaagtgtatgtttatagtactgcctgagccatctcatgaccccagcgtccaaaaccgatgctgtagaacagaacatatctgtacacaaatagtgtgtgcaaatagcatttgtacatagaaaagtctcattgtggcagattgagcataaattattcaactgacggtgcaaaaacattacttgcaaagaaaagtttatagtattttcctacactccaccctgggagatgatatttctatcaaatgaatatcagtgcattttaaatgtaatatgaaaacgatgctgccattttgtgaagaatacccacttggttgcagaggccaactttcatagctttgatttaatgttgtgacacggtgtatgcattttgctgtcaagcaatggataaacagctctgactttcattctcattccagtttattgacctcagataaaacactggcccttcttagaagcagaagtgtgcaccaagaccattcatttcaggtagactcacattcagtgccaagtgctcccatgggaataatcagacgcatatgttgcgaaagagtgaagggacttggacaaagaggggttttcctacagatggatgctcagtcttctaccaaaacatgtttggaggcagaactatgacctccccttaagtcctaacaatgtattttgtgtgtgcaaatcctgggatgcccgtttcacgctctgacataaagacatggcacctctagtgagtgatcaggaagattccatatgcatttgggagcttcaggtgcttgttagacacagtgagccattcaaggcaagcaccacctttgctagtgaggccaagagagcctgtgacaatttgacaatttgttccagaaccagtctgatgcaagtgcacctctaatatatgccttacaaactccagaggccatattcaaaacagggtcttctcagtgtatgcaaggggctgcagcccctcttctcttcctccccaggttgaacaatacggacagttttcacacatatctacctgtataaccctctgtacctctcataactggtcaacgactgtaacaggttacatcaggtgtttttctacatactttttacacagattctatgcgattaatgtaatttaattcaatgcatcattttattgtactagttcttaggcttgtccttatttttttctaagtgattgtggtttttctcgtggtttttattgtaaaaaatgaaaggctgttgatgcttattctctgtaactaagaatttttaccttttgggggaaaaaagcattgctatgaactaatgaattgaaacttcatttactcattgtaaatacactattgtgcaaaaaaagttttcactcaattgaattgctagtgttaactgaattttgtctagacaccatttctgttgatgaaataaagacatatcattatgcattgtaaactg

SEQ ID NO: 112461 - DNA, 2712 bp, Homo sapiens
  Payload ID: 2008
  Gene Symbol: BTG2
  Gene Name: BTG family, member 2
  Uniprot ID: P78543
  ENST ID: ENST00000290551
  CDS Start-End: 72-548
cagggtaacgctgtcttgtggacccgcacttcccacccgagacctctcactgagcccgagccgcgcgcgacatgagccacgggaagggaaccgacatgctcccggagatcgccgccgccgtgggcttcctctccagcctcctgaggacccggggctgcgtgagcgagcagaggcttaaggtcttcagcggggcgctccaggaggcactcacagagcactacaaacaccactggtttcccgaaaagccgtccaagggctccggctaccgctgcattcgcatcaaccacaagatggaccccatcatcagcagggtggccagccagatcggactcagccagccccagctgcaccagctgctgcccagcgagctgaccctgtgggtggacccctatgaggtgtcctaccgcattggggaggacggctccatctgcgtcttgtacgaggaggccccactggccgcctcctgtgggctcctcacctgcaagaaccaagtgctgctgggccggagcagcccctccaagaactacgtgatggcagtctccagctaggcccttccgcccccgccctgggcgccgccgtgctcatgctgccgtgacaacaggccaccacatacctcaacctggggaactgtatttttaaatgaagagctatttatatatattatttttttttaagaaaggaggaaaagaaaccaaaagttttttttaagaaaaaaaatccttcaagggagctgcttggaagtggcctccccaggtgcctttggagagaactgttgcgtgcttgagtctgtgagccagtgtctgcctataggagggggagctgttagggggtagacctagccaaggagaagtgggagacgtttggctagcaccccaggaagatgtgagagggagcaagcaaggttagcaactgtgaacagagaggtcgggatttgccctgggggaggaagagaggccaagttcagagctctctgtctcccccagccagacacctgcatccctggctcctctattactcaggggcattcatgcctggacttaaacaatactatgttatcttttcttttatttttctaatgaggtcctgggcagagagtgaaaaggcctctcctgattcctactgtcctaagctgcttttcttgaaatcatgacttgtttctaattctaccctcaggggcctgtagatgttgctttccagccaggaatctaaagctttgggttttctgaggggggggaggagggaactggaggttattggggttaggatggaagggaactctgcacaaaacctttgctttgctagtgctgctttgtgtgtatgtgtggcaaataatttgggggtgatttgcaatgaaattttgggacccaaagagtatccactggggatgttttttggccaaaactcttccttttggaaccacatgaaagtcttgatgctgctgccatgatccctttgagaggtggctcaaaagctacagggaactccaggtcctttattactgccttcttttcaaaagcacaactctcctctaaccctcccctcccccttcccttctggtcgggtcatagagctaccgtattttctaggacaagagttctcagtcactgtgcaatatgccccctgggtcccaggagggtctggaggaaaactggctatcagaacctcctgatgccctggtgggcttagggaaccatctctcctgctctccttgggatgatggctggctagtcagccttgcatgtattccttggctgaatgggagagtgccccatgttctgcaagactacttggtattcttgtagggccgacactaaataaaagccaaaccttgggcactgttttttctccctggtgctcagagcacctgtgggaaaggttgctgtctgtctcagtacaatccaaatttgtcgtagacttgtgcaatatatactgttgtgggttggagaaaagtggaaagctacactgggaagaaactcccttccttcaatttctcagtgacattgatgaggggtcctcaaaagacctcgagtttcccaaaccgaatcaccttaagaaggacagggctagggcatttggccaggatggccaccctcctgctgttgccccttagtgaggaatcttcaccccacttcctctacccccaggttctcctccccacagccagtcccctttcctggatttctaaactgctcaattttgactcaaaggtgctatttaccaaacactctccctacccattcctgccagctctgcctccttttcaactctccacattttgtattgccttcccagacctgcttccagtctttattgctttaaagttcactttgggcccacagacccaagagctaattttctggtttgtgggttgaaacaaagctgtgaatcactgcaggctgtgttcttgcatcttgtctgcaaacaggtccctgcctttttagaagcagcctcatggtctcatgcttaatcttgtctctcttctcttctttatgatgttcactttaaaaacaacaaaacccctgagctggactgttgagcaggcctgtctctcctattaagtaaaaataaatagtagtagtatgtttgtaagctattctgacagaaaagacaaaggttactaattgtatgatagtgtttttatatggaagaatgtacagcttatggacaaatgtacacctttttgttactttaataaaaatgtagtaggataaa

SEQ ID NO: 112462 - DNA, 1275 bp, Homo sapiens
  Payload ID: 2008
  Gene Symbol: BTG2
  Gene Name: BTG family, member 2
  Uniprot ID: P78543
  ENST ID: ENST00000475157
  CDS Start-End: 117-593
aaaaacgctgcccggggaaagtccgggcagagcccgagcagcggccagggtaacgctgtcttgtggacccgcacttcccacccgagacctctcactgagcccgagccgcgcgcgacatgagccacgggaagggaaccgacatgctcccggagatcgccgccgccgtgggcttcctctccagcctcctgaggacccggggctgcgtgagcgagcagaggcttaaggtcttcagcggggcgctccaggaggcactcacagagcactacaaacaccactggtttcccgaaaagccgtccaagggctccggctaccgctgcattcgcatcaaccacaagatggaccccatcatcagcagggtggccagccagatcggactcagccagccccagctgcaccagctgctgcccagcgagctgaccctgtgggtggacccctatgaggtgtcctaccgcattggggaggacggctccatctgcgtcttgtacgaggaggccccactggccgcctcctgtgggctcctcacctgcaagaaccaagtgctgctgggccggagcagcccctccaagaactacgtgatggcagtctccagctaggcccttccgcccccgccctgggcgccgccgtgctcatgctgccgtgacaacaggccaccacatacctcaacctggggaactgtatttttaaatgaagagctatttatatatattatttttttttaagaaaggaggaaaagaaaccaaaagttttttttaagaaaaaaaatccttcaagggagctgcttggaagtggcctccccaggtgcctttggagagaactgttgcgtgcttgagtctgtgagccagtctctgcctccttttcaactctccacattttgtattgccttcccagacctgcttccagtctttattgctttaaagttcactttgggcccacagacccaagagctaattttctggtttgtgggttgaaacaaagctgtgaatcactgcaggctgtgttcttgcatcttgtctgcaaacaggtccctgcctttttagaagcagcctcatggtctcatgcttaatcttgtctctcttctcttctttatgatgttcactttaaaaacaacaaaacccctgagctggactgttgagcaggcctgtctctcctattaagtaaaaataaatagtagtagtatgtttgtaagctattctgacagaaaagacaaaggttactaattgtatgatagtgtttttatatggaagaatgtacagcttatggacaaatgtacacctt

SEQ ID NO: 112463 - DNA, 1456 bp, Homo sapiens
  Payload ID: 2009
  Gene Symbol: BTG3
  Gene Name: BTG family, member 3
  Uniprot ID: Q14201
  ENST ID: ENST00000348354
  CDS Start-End: 258-1016
tcttccgggccgcgagccccctgcgcgccgctttggggctgcgctcactcgtgtgcgcgctcgtccgcccgccagtcctctcaacgcgcgcttggccgcccgacgacgcgggagccgcacgcgccggacgaggctcgctgcgctccctgttgcccagcgcgggcccgttgaggcggagccctcagttcccggccaggacacggtctgggccgccgaatctccggccgaagagcggcggcggcagcggcgggaaaaaaatgaagaatgaaattgctgccgttgtcttctttttcacaaggctagttcgaaaacatgataagttgaaaaaagaggcagttgagaggtttgctgagaaattgaccctaatacttcaagaaaaatataaaaatcactggtatccagaaaaaccatcgaaaggacaggcctacagatgtattcgtgtcaataaatttcagagagttgatcctgatgtcctgaaagcctgtgaaaacagctgcatcttgtatagtgacctgggcttgccaaaggagctcactctctgggtggacccatgtgaggtgtgctgtcggtatggagagaaaaacaatgcattcattgttgccagctttgaaaataaagatgagaacaaggatgagatctccaggaaagttaccagggcccttgataaggttacctctgattatcattcaggatcctcttcttcagatgaagaaacaagtaaggaaatggaagtgaaacccagttcggtgactgcagccgcaagtcctgtgtaccagatttcagaacttatatttccacctcttccaatgtggcaccctttgcccagaaaaaagccaggaatgtatcgagggaatggccatcagaatcactatcctcctcctgttccatttggttatccaaatcagggaagaaaaaataaaccatatcgcccaattccagtgacatgggtacctcctcctggaatgcattgtgaccggaatcactggattaatcctcacatgttagcacctcactaacttcgtttttgattgtgttggtgtcatgttgagaaaaaggtagaataaaccttactacacattaaaagttaaaagttcttactaatagtagtgaagttagatgggccaaaccatcaaacttatttttatagaagttattgagaataatctttcttaaaaaatatatgcactttagatattgatatagtttgagaaattttattaaagttagtcaagtgcctaagtttttaatattggacttgagtatttatatattgtgcatcaactctgttggatacgagaacactgtagaagtggacgatttgttctagcacctttgagaatttactttatggagcgtatgtaagttatttatatacaaggaaatctattttatgtcgttgtttaagagaattgtgtgaaatcatgtagttgcaaataaaaaatagtttgaggcatga

SEQ ID NO: 112464 - DNA, 1485 bp, Homo sapiens
  Payload ID: 2009
  Gene Symbol: BTG3
  Gene Name: BTG family, member 3
  Uniprot ID: Q14201
  ENST ID: ENST00000339775
  CDS Start-End: 155-1045
cgacgcgggagccgcacgcgccggacgaggctcgctgcgctccctgttgcccagcgcgggcccgttgaggcggagccctcagttcccggccaggacacggtctgggccgccgaatctccggccgaagagcggcggcggcagcggcgggaaaaaaatgaagaatgaaattgctgccgttgtcttctttttcacaaggctagttcgaaaacatgataagttgaaaaaagaggcagttgagaggtttgctgagaaattgaccctaatacttcaagaaaaatataaaaatcactggtatccagaaaaaccatcgaaaggacaggcctacagatgtattcgtgtcaataaatttcagagagttgatcctgatgtcctgaaagcctgtgaaaacagctgcatcttgtatagtgacctgggcttgccaaaggagctcactctctgggtggacccatgtgaggtgtgctgtcgtagagatggggtttcaccatgttggccagactgctctcaaactcctgacctcgtgatccgcccgccttggcctcccaaagcgctggattacaggcgtgagccactgcgcccggcctcctcctttttgattatgtatggagagaaaaacaatgcattcattgttgccagctttgaaaataaagatgagaacaaggatgagatctccaggaaagttaccagggcccttgataaggttacctctgattatcattcaggatcctcttcttcagatgaagaaacaagtaaggaaatggaagtgaaacccagttcggtgactgcagccgcaagtcctgtgtaccagatttcagaacttatatttccacctcttccaatgtggcaccctttgcccagaaaaaagccaggaatgtatcgagggaatggccatcagaatcactatcctcctcctgttccatttggttatccaaatcagggaagaaaaaataaaccatatcgcccaattccagtgacatgggtacctcctcctggaatgcattgtgaccggaatcactggattaatcctcacatgttagcacctcactaacttcgtttttgattgtgttggtgtcatgttgagaaaaaggtagaataaaccttactacacattaaaagttaaaagttcttactaatagtagtgaagttagatgggccaaaccatcaaacttatttttatagaagttattgagaataatctttcttaaaaaatatatgcactttagatattgatatagtttgagaaattttattaaagttagtcaagtgcctaagtttttaatattggacttgagtatttatatattgtgcatcaactctgttggatacgagaacactgtagaagtggacgatttgttctagcacctttgagaatttactttatggagcgtatgtaagttatttatatacaaggaaatctattttatgtcgttgtttaagagaattgtgtgaaatcatgtagttgcaaataaaaaatagtttgaggcatga

SEQ ID NO: 112465 - DNA, 511 bp, Homo sapiens
  Payload ID: 2009
  Gene Symbol: BTG3
  Gene Name: BTG family, member 3
  ENST ID: ENST00000457956
  CDS Start-End: 374-511
ttccgggccgcgagccccctgcgcgccgctttggggctgcgctcactcgtgtgcgcgctcgtccgcccgccagtcctctcaacgcgcgcttggccgcccgacgacgcgggagccgcacgcgccggacgaggctcgctgcgctccctgttgcccagcgcgggcccgttgaggcggagccctcagttcccggccaggacacggtctgggccgccgaatctccggccgaagagcggcggcggcagcggcgccgtgagcagaggagccttgtggaacaaagtagaacttgaggagcagccgccgcggtgacgaggtcccaggatgacgtcaccgtgcgatatttaaaatgggagccttttgctctgagtggaaaaaaatgaagaatgaaattgctgccgttgtcttctttttcacaaggctagttcgaaaacatgataagttgaaaaaagaggcagttgagaggtttgctgagaaattgaccctaatacttcaagaaaaatataaaaatcactgg

SEQ ID NO: 112466 - DNA, 511 bp, Homo sapiens; identical to SEQ ID NO: 112465
  Payload ID: 2009
  Gene Symbol: BTG3
  Gene Name: BTG family, member 3
  ENST ID: ENST00000628349
  CDS Start-End: 374-511

SEQ ID NO: 112467 - DNA, 597 bp, Homo sapiens
  Payload ID: 2009
  Gene Symbol: BTG3
  Gene Name: BTG family, member 3
  ENST ID: ENST00000627237
  CDS Start-End: 155-597
cgacgcgggagccgcacgcgccggacgaggctcgctgcgctccctgttgcccagcgcgggcccgttgaggcggagccctcagttcccggccaggacacggtctgggccgccgaatctccggccgaagagcggcggcggcagcggcgggaaaaaaatgaagaatgaaattgctgccgttgtcttctttttcacaaggctagttcgaaaacatgataagttgaaaaaagaggcagttgagaggtttgctgagaaattgaccctaatacttcaagaaaaatataaaaatcactggtatccagaaaaaccatcgaaaggacaggcctacagatgtattcgtgtcaataaatttcagagagttgatcctgatgtcctgaaagcctgtgaaaacagctgcatcttgtatagtgacctgggcttgccaaaggagctcactctctgggtggacccatgtgaggtgtgctgtcgtagagatggggtttcaccatgttggccagactgctctcaaactcctgacctcgtgatccgcccgccttggcctcccaaagcgctggattacaggcgtgagccactgcgcccggcctcctcctttttgattat

SEQ ID NO: 112468 - DNA, 568 bp, Homo sapiens
  Payload ID: 2009
  Gene Symbol: BTG3
  Gene Name: BTG family, member 3
  ENST ID: ENST00000629582
  CDS Start-End: 258-568
tcttccgggccgcgagccccctgcgcgccgctttggggctgcgctcactcgtgtgcgcgctcgtccgcccgccagtcctctcaacgcgcgcttggccgcccgacgacgcgggagccgcacgcgccggacgaggctcgctgcgctccctgttgcccagcgcgggcccgttgaggcggagccctcagttcccggccaggacacggtctgggccgccgaatctccggccgaagagcggcggcggcagcggcgggaaaaaaatgaagaatgaaattgctgccgttgtcttctttttcacaaggctagttcgaaaacatgataagttgaaaaaagaggcagttgagaggtttgctgagaaattgaccctaatacttcaagaaaaatataaaaatcactggtatccagaaaaaccatcgaaaggacaggcctacagatgtattcgtgtcaataaatttcagagagttgatcctgatgtcctgaaagcctgtgaaaacagctgcatcttgtatagtgacctgggcttgccaaaggagctcactctctgggtggacccatgtgaggtgtgctgtcg

SEQ ID NO: 112469 - DNA, 2368 bp, Homo sapiens
  Payload ID: 2010
  Gene Symbol: BANP
  Gene Name: BTG3 associated nuclear protein
  Uniprot ID: Q8N9N5
  ENST ID: ENST00000286122
  CDS Start-End: 153-1712
gcagagcggcggcttctctcgcgaggacggacgccattatcgcatctccccgacaaacaccacgagaattccgcagcccacacggtgaccaaaagccagccccactgtgagttgaactctttcgtgttgaccggccactctccgtgctctggatgatgtcggaacacgacctggccgatgtggttcagattgcagtggaagacctgagccctgaccacccagttgttttggagaatcatgtagtgacagatgaagacgaacctgctttgaaacgccagcgactagaaatcaattgccaggatccatctataaagacaatctgcttgcggttggatagcattgaagccaaattgcaagccctggaggctacttgtaaatccttagaagaaaagctggatctggtcacgaacaagcagcacagccccatccaggtccccatggtggccggctcccctctcggggcaacccagacgtgcaacaaagtgcgatgcgtcgtcccccagactacagtaatactcaacaatgatcggcagaacgccattgtagccaagatggaagaccccttgagcaacagggcaccggattccctggaaaatgtcattagcaacgctgtgcctgggcgtcggcagaacaccattgtggtgaaggtgccgggccaagaagacagccaccacgaggacggggagagcggctcggaggccagcgactctgtgtccagctgtgggcaggcgggcagtcagagcatcgggagcaacgtcacgctcatcaccctgaactcggaagaggactaccccaatggcacctggctgggcgacgagaacaaccccgagatgcgggtacgctgcgccatcatcccctccgacatgctgcacatcagcaccaactgccgcacggccgagaagatggcgctcacgctgctggactacctcttccaccgcgaggtgcaggctgtgtccaacctctcggggcagggcaagcacgggaagaagcagctggacccgctcaccatctacggcatccggtgtcaccttttctataaatttggcatcacagaatccgactggtaccgaatcaagcagagcatcgactccaagtgccgcacggcgtggcggcgcaagcagcggggccagagcctggcggtcaagagcttctcgcggagaacgcccaactcgtcctcctactgcccttcagagccgatgatgagcaccccacctcctgccagcgagctcccgcagccacagccgcagccgcaggccctgcactacgcgctggccaacgcacagcaggtgcagatccaccagatcggagaagacggacaggtgcaagtaggacacctccacatcgcccaggtgccgcagggggagcaagtccagatcacgcaggacagcgagggcaacctccagatccatcacgtggggcaggacggtcagcttctagaggccacccgcatcccctgcctcctggccccatccgtcttcaaagccagcagtggccaggtgctgcagggtgcacagctgatcgccgtggcctcctcggaccccgcggcggcgggcgtggatgggtcgccactccagggcagcgacatccaggttcagtacgtgcagctggcgccagtgagtgaccacacggccggggcacagacggccgaagccctgcagcccacgctacagccggagatgcagctcgagcacggggccatccagattcagtgagcggtgcccatggcaccaggagcccctcgccggctccgcctacggcccggcccccacgcgccctgctctcacggcctcggcacaggcagcggctgcacgtgttctgctgaagtgcgtctgaaggccgctgcctccgcggggaacagcatcctatcaactgaaagagcagccgccgccgcccccagccggagacccctttcgtttgagtcctgctgttggtgtcggagcacgaggggaggcacggtgcggagagcgtcgcatatgcgcgggaaatcaagaactatgatatttttctgtttaaacagctttttttaatttgctatggtgtttataacaaaaaagaaaatttgaaaaaaaaaatcccaggggagtagcaggagccctttgctgtgtgctctgtccagtgtcatgagacgggagccctttgctgtgtgctctgtccagtgtcatgagacgggagccctttgctgtgtgctctgtccagtgtcatgagacgggagccctttgctgtgtgctctgtccagtgtcatgaggcaggtgtttgcaaagccagctctcggttccgatggggtattgctgacctacttttctaggggaaatgctcttaaacactgtaattatgcatttctaatgaaataaaatgtatttatgaccac

SEQ ID NO: 112470 - DNA, 2164 bp, Homo sapiens
  Payload ID: 2010
  Gene Symbol: BANP
  Gene Name: BTG3 associated nuclear protein
  Uniprot ID: Q8N9N5
  ENST ID: ENST00000355022
  CDS Start-End: 98-1507
aacaccacgagaattccgcagcccacacggtgaccaaaagccagccccactgtgagttgaactctttcgtgttgaccggccactctccgtgctctggatgatgtcggaacacgacctggccgatgtggttcagattgcagtggaagacctgagccctgaccacccagttgttttggagaatcatgtagtgacagatgaagacgaacctgctttgaaacgccagcgactagaaatcaattgccaggatccatctataaagtcattcctgtattccatcaaccagacaatctgcttgcggttggatagcattgaagccaaattgcaagccctggaggctacttgtaaatccttagaagaaaagctggatctggtcacgaacaagcagcacagccccatccaggtccccatggtggccggctcccctctcggggcaacccagacgtgcaacaaagtgcgatgcgctgtgcctgggcgtcggcagaacaccattgtggtgaaggtgccgggccaagaagacagccaccacgaggacggggagagcggctcggaggccagcgactctgtgtccagctgtgggcaggcgggcagtcagagcatcgggagcaacgtcacgctcatcaccctgaactcggaagaggactaccccaatggcacctggctgggcgacgagaacaaccccgagatgcgggtacgctgcgccatcatcccctccgacatgctgcacatcagcaccaactgccgcacggccgagaagatggcgctcacgctgctggactacctcttccaccgcgaggtgcaggctgtgtccaacctctcggggcagggcaagcacgggaagaagcagctggacccgctcaccatctacggcatccggtgtcaccttttctataaatttggcatcacagaatccgactggtaccgaatcaagcagagcatcgactccaagtgccgcacggcgtggcggcgcaagcagcggggccagagcctggcggtcaagagcttctcgcggagaacgcccaactcgtcctcctactgcccttcagagccgatgatgagcaccccacctcctgccagcgagctcccgcagccacagccgcagccgcaggccctgcactacgcgctggccaacgcacagcaggtgcagatccaccagatcggagaagacggacaggtgcaagtaatcccacagggacacctccacatcgcccaggtgccgcagggggagcaagtccagatcacgcaggacagcgagggcaacctccagatccatcacgtggggcaggacggtcaggtgctgcagggtgcacagctgatcgccgtggcctcctcggaccccgcggcggcgggcgtggatgggtcgccactccagggcagcgacatccaggttcagtacgtgcagctggcgccagtgagtgaccacacggccggggcacagacggccgaagccctgcagcccacgctacagccggagatgcagctcgagcacggggccatccagattcagtgagcggtgcccatggcaccaggagcccctcgccggctccgcctacggcccggcccccacgcgccctgctctcacggcctcggcacaggcagcggctgcacgtgttctgctgaagtgcgtctgaaggccgctgcctccgcggggaacagcatcctatcaactgaaagagcagccgccgccgcccccagccggagacccctttcgtttgagtcctgctgttggtgtcggagcacgaggggaggcacggtgcggagagcgtcgcatatgcgcgggaaatcaagaactatgatatttttctgtttaaacagctttttttaatttgctatggtgtttataacaaaaaagaaaatttgaaaaaaaaaatcccaggggagtagcaggagccctttgctgtgtgctctgtccagtgtcatgagacgggagccctttgctgtgtgctctgtccagtgtcatgagacgggagccctttgctgtgtgctctgtccagtgtcatgagacgggagccctttgctgtgtgctctgtccagtgtcatgaggcaggtgtttgcaaagccagctctcggttccgatggggtattgctgacctacttttctaggggaaatgctcttaaacactgtaattatgcatttctaatgaaataaaatgtatttatgaccaca

SEQ ID NO: 112471 - DNA, 1648 bp, Homo sapiens
  Payload ID: 2010
  Gene Symbol: BANP
  Gene Name: BTG3 associated nuclear protein
  ENST ID: ENST00000355163
  CDS Start-End: 321-1073
gggcaggtcccacggaggggatgctgcggccaggctccgtggggtggggcaccctgcgacgggctgctcctcttcccagggccaccggtgagactctcagtgcacagagtgcggttctgtgtggaggtgtgggatgcatctcctggccctcccgtagtggggtgcaaccccaagtgaagaccccgtggctcatgtcaagtgccctcagggctggggctgcccacccgcctgcctgggccgtcttgacaccggagctgcctgcctggatgttggagcgcccagtggattgagtgggaagtgggcctgggtgcttacaggcgatggggtcaccagagcccacccaggggcctcgcctgtcccccattctcattccatactctgggaggcggtacaaggtcgggagggccagcggggctctctgccaccaggactcacttccgcccatcttggaactgggcctcactttcctgcgagcttctgctgggttctcagtgcccaccagcagctcctttgctctccctgagcccttgaggtcactctgccttgggaatggggagggtttgggtctcagcctcacgctcacggtcctggcttggattttaggcctcagtggcactctgggagcgcttgtgctcttcatggttgccactgggattttccaggaggctctgtggcatttgctgttgctctctttttctgtggaagctctgccttgcttttttttttttcccttttttctgctctgtaggtgcttgagggcggagttgcagatccagcagagactcgatggcactctctcactggatctgatgcgacttgagagcgatggggagacaggatgtgccgcagagtcctcggtgctgcagggtgcacagctgatcgccgtggcctcctcggaccccgcggcggcgggcgtggatgggtcgccactccagggcagcgacatccaggttcagtacgtgcagctggcgccagtgagtgaccacacggccggggcacagacggccgaagccctgcagcccacgctacagccggagatgcagctcgagcacggggccatccagattcagtgagcggtgcccatggcaccaggagcccctcgccggctccgcctacggcccggcccccacgcgccctgctctcacggcctcggcacaggcagcggctgcacgtgttctgctgaagtgcgtctgaaggccgctgcctccgcggggaacagcatcctatcaactgaaagagcagccgccgccgcccccagccggagacccctttcgtttgagtcctgctgttggtgtcggagcacgaggggaggcacggtgcggagagcgtcgcatatgcgcgggaaatcaagaactatgatatttttctgtttaaacagctttttttaatttgctatggtgtttataacaaaaaagaaaatttgaaaaaaaaaatcccaggggagtagcaggagccctttgctgtgtgctctgtccagtgtcatgagacgggagccctttgctgtgtgctctgtccagtgtcatgagacgggagccctttgctgtgtgctctgtccagtgtcatgagacgggagccctttgctgtgtgctctgtccagtgtcatgagacgggagccctttggatggggccggtgtcagcaaaggaggca
